United States Patent Application Publication US 2004/0214272 A1 - sequence listing, part 2

SEQ ID NO: 4382 - DNA, 427 bp, Zea mays
  Clone ID: MRT4577_103996C.1
aattattttttttttttttttttttttttttttttttttttaaccaaaccacgtaagcactcgcccctcgataaattgagacagtagaatcacaaaaataaaataaaatggggatcaaaataatattagcttggacacgcgagtacaaaacatacccttccacaatttacacgaccacaaaacgaacgaacaaaccaaccctttaccccttgtaaaccgcgtaaataaaaaaaacaattaattaatccggaggaaccaaacactgatcattcaaacgctgcagaaccaggcgtgcaggattaatggatgtagttggcaaagaaagaggcaaccagccccccgggggttggcacggtgggggaggagggcccacttgctttagggacaaacgcacccccggccgctggggggggcccctagaagggcg

SEQ ID NO: 4383 - DNA, 380 bp, Zea mays
  Clone ID: MRT4577_103997C.1
ccggccgtgacgccaaacatatcattaaccctctttcctgtgacagtagccacgagcctccacttgatcatctctcccggctgtgcagtggactcaaaacatgatggatgccatgcactgactgatcttagacatggttattacacagctctggacgcatcatctatgttgagatatcagctcggccccgccgccgttccaggtgcaactgacggagagctctgcaaggcgtacgatgtgaagtagccctacactctcgtttgaccttcataatcgagttctactttggcaggaggaaagtcccactgaattctgcctcatctacgacaacctcgaggctgactagatgttcgagccctaattccgccgcactaggaatg

SEQ ID NO: 4384 - DNA, 629 bp, Zea mays
  Clone ID: MRT4577_103998C.1
atatacccatccgctcgcctccctgctacagtttctgccacccccgcaacctccacctcctcgactcagattgcacattgtttaacataaatgtctgaatcaaaggacattcaacccctagtctgtgacaatgcaactgcaacgtccaaagctgggtttgctggatatgatgctccccgtgctgctttctcaactataactacatcgacctaactcgcactggtgccactgcgtgcaatggcacagaaagatgcattatgttcacgatcaaggcactctccagacaccttcacccctgacgttctgaagcatcccatcgattatgcaatcggaaccctctggaatgacctggaaaagatctggcatcataactatcgtataatgagctctaccgtaacacccaaagagcacccagatcttcttacacatgttcctcttaaccctaaggataacaggatatatatgacacaaatcaaggttgaaactttcagtgttcctgctatgtatgatgctattccagctgtgctttccctttatgctagggtacgtaccactgatattgtcctgcattccggagacaggtcatccacactgttcaatctatgaaagctatggcctcccacatgtca

SEQ ID NO: 4385 - DNA, 289 bp, Zea mays
  Clone ID: MRT4577_103999C.1
acggggtgcgacggacgcgtacggggacaccttggtaccaactactatatgtttttagaagatgctgcttaaccttggggcggggcattacataaacattgtccgaaagcactctaacacagtgtcgggtggtaagtctgaactaaacggatcaagatattgggagatgacattcttttcagtcgtgaatgagctgcactgtattgatgaaatttgtaattcgagcagtgatctgatatttgttatgtcttggaagggctttctaaaaacattgtggtctttctttttt

SEQ ID NO: 4386 - DNA, 762 bp, Zea mays
  Clone ID: MRT4577_10399C.1
aaaaaattgtgagcgagaggcagggagtgcgctcgacggccgccgccattagtgatttagtgttgagagagggagagaatctaaagtgaccggacgccgtccttccttgctgatcggcgacacggtccatcccgccctcgctcgctagggttccttttcgtccatggatcagagcttcgggaatctcggggctggagctgggagcagcagcgggggctccaactccaaggcggcggcagcggccgtttcctcctcgtctttcctgcagctgccgctgtcgacggcgtcccccgcgtactacggcgcgccgctcgcgctcctgcaccacgccgccacggccccgtcgtcgtcgcagcagcagcagcagcaccaccaccagtacgccaggcacggcgccgagatgtcggcggcggaggccgaggccatcaaggccaagatcgtggcgcacccgcagtactcggcgctcctcgccgcctacctcgactgccagaaaatacatcgcttgagctaccccgaccccggctggcgtcaccggccgtcggaaaaaccgcatctttatttttatatcttgattcgtgaagcgagatttgcttaatttgatgcgtaaatctatccacgcctgtcgcgtcctcacgctcaccctcacagtcacaggacagcacggtggctatgaaatgatgcgcgcgctgtgtctgtgtgattgcaaggtgggcgcgccgccggacgtgctggagaagctgacggccatggcggcaaagctgg

SEQ ID NO: 4387 - DNA, 373 bp, Zea mays
  Clone ID: MRT4577_1039C.1
tgttcgggcgcgcgacggcaccggcacatgggtgggagcgttacgacctgggatcgggggcctcctcgcgctactggtggctctgcttatgggggcccacgtggttggcgtgagctactggatctacaggcttgccacggacgggtgcaggcatcccgggcggtgcaggaagcactaacgggacggcgcccgcgggcggacgcttgaaaccagcttgctattcgagtcctggattcttggcttgttgatctccaaccttccaacgtgagaagatggtgtggacagatcctgagagaactaggacagggaacacgtgcttatacaatggtgtgatcagatgctggcgtgaaaagtgactattgctgcatagctg

SEQ ID NO: 4388 - DNA, 113 bp, Zea mays
  Clone ID: MRT4577_103C.1
gatctacataacaaagaaggctatttatgacataagcccggacgggacatcccaaggaatgatgggattcatggtaggcctacttgctaacaccaaaacctagcaatttacgc

SEQ ID NO: 4389 - DNA, 659 bp, Zea mays
  Clone ID: MRT4577_104000C.1
gcacgagctcgtgccgggttcggtcctccaccacagccgcccggacaagccaccgtcatgaggagcagcagttgtccaagatctgttgccatcctcacagttcacaaagcccgcacagcagcgaagcacctgtcaacagcaacgcctaaccgctgcatcaacctacaatcatatggcgtttgcatttgcagtattcataggtgagactaatatttaattttattatctatcctgcagtgtctcgtcatgtcgaagtaccctaagacttgcattgcaaaacaatgcgtccaataaaatctgatgattctaaatgtcgaagcattctaggacttacaatgtaaaacaatatgttcataaagatctggtgatttattccgaatgtcaaagcccctaggacttgcgttgtataccatgcgtccaggaagatccgatgattctttgttggatattgaagcccctaggacttgcgttttaaatagcgcgtccaggaagatctgcttatttatttcagatgtcaaagcaccttaggacttgcgttgtaaaacaatgcgccgaggaagatccgatatttattctggatgttgaagcctctatgacttgcgttgtacaccacatgtttaggaaaatctgatgatttatcctagatgctgaagcaccta

SEQ ID NO: 4390 - DNA, 143 bp, Zea mays
  unsure (1)..(143): unsure at all n locations
  Clone ID: MRT4577_104001C.1
ctcaacaccggcancttcttgctgcgcanntgccannggtcgcttganatgctggatacctgggcgccaatngggccaaagggcctgtcngcattgangccggcaaggtgctgaccaantccttgaaggatcggccagtattc

SEQ ID NO: 4391 - DNA, 954 bp, Zea mays
  Clone ID: MRT4577_104002C.1
cccaaggccaagggtggagagaccaacaccaacaaagacatagggaacgagctaccggaactggacatgaaaatggttaccgttcttaagataaacctgcactgcgacgcctgcagcgaggagatcaaaaggcggatacttaagattacaggcgtggaggaagccatgccgcacctcaagtcttcacaggtggcggtgaagggaaaggtggagccggcaacactggtgggcttcatccacaagtgcacggggaggagagccgccatcatcagggcggagccactggatgatgctctcctgccgcaaccaccaaacccgccggcggcgccaccgtctaaagccgagagcaagaaagatgagccacctgctgagaatccgccggccaaggtggaggacgaggagaacagaggagggggagggaaggacaatgcggatgacgacaaccccaagacggagaagccggctagcgacggccacggcgccgccgaggagcatggagcccatgcaacaaccgaagctccagaccgtgacaacgacgacgacgccggcgatgggctcgtgctggagaaccataccaaggcggcggtggaccgcctgttcgccgttccgacgccggccggcggagtcgtgacggtcgttgcgcctgagatggccctcggcagccgcagctactgctacccggcgtatccttgcgcgcagtattactacccctaccagccgcacctgtacccgccgcagccgtacccggcggcgtctgcttatagccctgttgccatgtatggctatccagccggctatccacccgaagctttcagtgaggagaacccaaatgcatgcaccatcgtgtgacatagtatatttgtagcagtataaaagaagccagtacttatgtatatatatataataatcgagcaatggatatatctatataaactgtataaaatttaatggttc

SEQ ID NO: 4392 - DNA, 605 bp, Zea mays
  unsure (1)..(605): unsure at all n locations
  Clone ID: MRT4577_104003C.1
ccggccgggaacacacactctagtagcgagaggcaaggggacgtaagaagtattccnttttcttccattgatccttcaagagctctcctgctccgcgaatggtgagaagggacattcgaagttctacccctctaaagcgaccgcggcccgacgtgtacttccacatccccaagtttgtcgcgactctggtaatggctaagacggataacacaaaggctgtgcaagaggcgtgtaccatcgattgcggcgccaccgggaagcagacgatcctcatccccaaggacgacttcttcgtcggagcactcgactttagatgcccctgcatcggcgacgtgaccatccaagggaatggccatctgctggctaccacgggcctaagccagtacaaggatcatggtaattggatcgacattctactcgtgcacaaccttctcatcaccggcaagggaaagctcgactggcaggggccagtccgtgtggagcaagaactcctgcgtcaagaaataccactgcaagatccttcccaactcgctggtgatgaacttcctgaacaacggggaggtgtcccggatcccgctgctcaactcccagttctttcccatgaa

SEQ ID NO: 4393 - DNA, 392 bp, Zea mays
  Clone ID: MRT4577_104005C.1
attcggctcgtgcccaggcctactgatccagaatttgtttccagggctgccgactgtggggccagagggggttcataagaccattggcaggggcggacgcacgggtgacttggatgcgaaaggcagacgactggtcattgctcgcagtcaaaatgaagctggtataggagactcgaaggcctcacaaaggagtattcctagacaaagtcggaggcccatggcccagcaactgcaccggatatagctggccatcacctggcagcatggagcttttcgaaatctgcacgactggcgcacacggtgctttgtaccacatgcttgaaccgagcactctgaccatcagggggcacaagccaaattggactacgactgttaaagaccgggcatgcaac

SEQ ID NO: 4394 - DNA, 341 bp, Zea mays
  unsure (1)..(341): unsure at all n locations
  Clone ID: MRT4577_104006C.1
gactatatttttttttttttacttaataatggcactttggacatttttacattttttgtcttcttnttatatcaatcaaatatttaaccattacacccgcaaaaaattgataaagtgagggttatttttgtccgtgcaaaacataattcggcactaaaaatgatggaatcttaagggcataaaataataattattttggtcaactcttgactggagatacccaaccaaaaacacaccctataccccttgaaagactatctgaaatttcactgcttgacattgctgctggaggcttgcattcaactacactaactatacagggagaggcgtataaatggagg

SEQ ID NO: 4395 - DNA, 418 bp, Zea mays
  Clone ID: MRT4577_104007C.1
ggggaagcgggcaaaaaaaataatccttggcaaaaatcctgtttgggaagggtggtacaatagggcaaatcaacaatgtttgactgggttctaaaaactgcaattgggatggccccccctcacttggaacttgggctaaaaaatgcttattttatggttcggcgacctttttgttaaaccaggccatccattcttttttgaggaaagagggccctcctctttggaaaagggaatgttaaagccctttggggttttctacgggaaaaaactttaacctttgccaaatagaccgctaccccaggggggtgatcaaaaagggtaacctcccccctcttgtacaaaagtgcccttattccctttccctttgagagaatggggaccccccttgcgggagtttttttcccaaattcacttttat

SEQ ID NO: 4396 - DNA, 652 bp, Zea mays
  Clone ID: MRT4577_104008C.1
tgcgtgctgagctaccctgagatgaagactaaagtcggaaggatttgcacacagtttataagaacataggacgcagaacatgataggattatgcgacaaatacatgtctgccgctcggaggggaacagcgccttagatctttaaccaccctttactgcaaaaactgggatgtgacatggggatcaccaatattggcatggagcaaaggaagatggaaccattcaggatgaagggatacaattagtagacaagaggcggcaaggggatcagagctctagatgacatcgctaactcattgactatatagaacagggaccttgaataattgcaggagcttgagtttagtacctgggggactgattaccatgcacaagaggagaggatcacagatgatataacagagaatcacgatgccatgctatggtcagaaggcttatgaaggacagcgtgtgaggactgattcatgggacgcggcacactggctagcatctctgcaccatccactcatagcagacttgtatggacgccgcaggacatatgaccagacgaatctgttgcacctggaacataattcatgcgtatatggctgactccgacatgcattcaccgacatcatgagctcctttatcggtgtaggcagctactaactgca

SEQ ID NO: 4397 - DNA, 334 bp, Zea mays
  Clone ID: MRT4577_104009C.1
ctagttatagatcgagagcggctgctttctaacctaaaggggatgtatgtagcaagtgccaggatgggatatactcaccaagtgatgcggatttaacaacactaacatagtgctgtcccaggttataagtctggtctgttgtgaatggcgctaagtgccagttggctctaccttattatattactatataccatctttagcttctttattgaggactgttacttaatctagcatggattataaaacttataaatgttttatacatataaaatagaatctaaatggatcatttttattcttgtaatttaacgtccgtaaattatttatttgtaaa

SEQ ID NO: 4398 - DNA, 449 bp, Zea mays
  unsure (1)..(449): unsure at all n locations
  Clone ID: MRT4577_104010C.1
agggcgaatgggtacttcgaggcaggcgggaacacacactctagtagcgaaagcaaagcacgtaagacgtcgtctacttccattggatcgaattacacgccttcttcctacctcttttcgttgcccgctgcncctcgtcctgnctggctgtttgctccggcncccttttcccggtgtcctgtgcgtctcttcttgtccccgtcgctcgcgcgtttcttgtctgccttgttcgctgtgttgtcgtcgcctgttgcgtctgttgcgtcgcggttgtctcctctggtcgttgtttcttccccgctttcttctccgctttggttcttcgtgctgtttttctgccngttctctcctggagctgctccgcgctctttgtttctgcnntggtgctcgtgcttcctcctcctttgtattcttacaggctacatcatgatggacttcatgaagaagta

SEQ ID NO: 4399 - DNA, 116 bp, Zea mays
  Clone ID: MRT4577_104011C.1
cagccttcaagtgaccgtgatgcaattggcctaggatgactagacatgtacgcatcctaggcaaattgcagccttcaagtgaccgtgatgcacagatagcttcatcaatatgaggc

SEQ ID NO: 4400 - DNA, 546 bp, Zea mays
  Clone ID: MRT4577_104012C.1
gggtttttttttttttttttttttttttttttttttttttttttttttttttttttttttttttttttttttttttttttttttttttttttggaaattggaacttttggtttaaaatttaattggggaaaggatttcactaaaagggggaggggtttaaaattggtccacgcaaattgattgttttaaaaaatggccttaaacttgggcacaggaaaaaaaatagaaaatccaaatccacggttttggtaccagcctgaaaagggaaaaaaaaaagctacgggtttaatggtttaaaagggtgccattataaggagggtaaaaaaattaaatggtttcttggcggaaaaatgttggaaaccttttttttaaaagggttttttttttttgaaaaaaaaaattaaatgggggaaggggaggaaatttaagggttaaagggtccggaaaaaagggagggggggggcctttgtttttggggttggttaacctggatggggaaaaaaaaaagggtgtccaagttaaaacctttaaaaaaaaggttacttt

SEQ ID NO: 4401 - DNA, 279 bp, Zea mays
  Clone ID: MRT4577_104013C.1
atggcgctcgggccccatgctgcccgcgtcgtctgccataaagagtacaagagtgtcaggcggcctagggcccacgaacacacatggccctaccccatggtagaacgcctggttttaccatcgcctgatggccccttcttgaggaagccaccactggctgaccccccctctttggcctataaaaggaggggggcgacccggtcttggattgtcctagatacacgagcggactattggatccctgaagacatgatggatgcaaggatataccctagatga

SEQ ID NO: 4402 - DNA, 493 bp, Zea mays
  Clone ID: MRT4577_104014C.1
gtgtttttttttttttttttttttttttttttttttttttttttttttttttttttttttttttttttttttttttttttttttttttttttttttttttttgggccaaaagggggtttttttgtcttggggcaatcaaaaaaaaaaaattttggggggagccacaggggggcaattcctagggaaacccaaaaaaaaggggggggggtaagagggagcccatcaggccacaaaatctaatttcccttaaacaaaaacaaaaaaccccggggggacaatcagtcaagtgggggccgggaaccacaaaaggcctaaaatttgcccactcaactcaggggctcctgggacccgggcaggaaaggcagggaaaccaaattaagccccggtggtccaagctttagggcgcatttcccgggggggtccaccaggccaaaaggggggatataaaaaacctgagggggccggggggggtgcttaatttccgatgggaaaa

SEQ ID NO: 4403 - DNA, 403 bp, Zea mays
  unsure (1)..(403): unsure at all n locations
  Clone ID: MRT4577_104015C.1
cggacgcgtgggcaataatgagtccctctccggaccttggtagctgcttgcttgtggtgagtgagagtgtgagactgagggagaagaggtggtgggcgtggggccggctacgtcgagagaggcgtgttcctgtactcgcttcgttttctctgcatgcgtgtataaattgtgttcaatcnaaaaaaaaaaaaaaaaaaaaaaaaaaaaaaaaaaaaataaaaaaaaaaaaaaaaaaaaaaaaacaaaaaataaaaaataataaaaaaaaaaaaaaaaaggggggggccgttttaaagaaacaaagcttacaaacccgtgcatgcaaaagaataacttttttataggggaacctaaattaaattaactggccggcgttttaaaaagtctggactggaaaaaccct

SEQ ID NO: 4404 - DNA, 451 bp, Zea mays
  Clone ID: MRT4577_104016C.1
cttctttttaatattatccctctcagccgaacagccactacggggcgctttagagatactttcagatttgctctgcgagaaagccaggttttacaaaaagctgctctctggatccagccctttggctggcttgtggcttatggggggtaaaagccaggaacctacagggattccaaacacacactgtagctggacgcggtggtttctaatcccgggaccagagaggcagtttaggtcaaacaggtcttctcaacgcaacaccatatcagttaggacaaacgacagtgccaacgacacctgagcgctgttggaccgaaagcgctaaaaacactagcggggtcatcacaaacatcacacacacacaggtcccatagtcgaccagtttcgatgctggcgtgcgcgccatatttgctcgctgttctctgcaggccccgaatcgaattattttttg

SEQ ID NO: 4405 - DNA, 403 bp, Zea mays
  unsure (1)..(403): unsure at all n locations
  Clone ID: MRT4577_104017C.1
aggacctccggcacggggagccatctgcttgctagttgtgtcgtcgtcgatcgtggtcctcagcacggccggtggtctcggatccgatgccactagtaggtccgccgctgcctatctctcacttgacgacgactacggggaggaggacgagagcggcgactcctccttctccttccccgaccccgagacgagttcagcttcaaccgggctagtgttcgggttctacgacgacaagtgcccggacgccgaggagatggtgtcgtccatggtgcggaagtctaccacgcggaccccaacgtcgcagccgcactcgtccgcctcttcttccaagactgcttcatccacggctgcgacgcctcggtgctgcttggaccgcgtcggcggccagagatcngagcgcgan

SEQ ID NO: 4406 - DNA, 1834 bp, Zea mays
  Clone ID: MRT4577_104018C.1
gggcatatcagatatgagataatcaaaggaatttgccatggtttgcattaccttcacacagattgccaaattgttcatttggacctaaagcctgagaatatattgctagatgacaacatggagccaaaaattacagattttggtatgtccaggctctttggtctacaacaatccaaaatcatcaccaaaacttgtggaggaacacttggatacatggcaccagaatacttactaaaagggttgatttcagtgaaggccgacatattcagtttgggcgttataatcatagaggtgatgaccggaggccggaattatcccacttgtgaaaaatcttgcgagcaattcgctgttgatgtggttggacgttggaggaagaggttattggaggaggcaggaaggtacacacccttggaaaaatacgttgagcaagtagagacatgcatcttgataggattgatgtgtgtcgatgatgatcctaacaaaaggcccacgacattggacattatcgaaaggcttaccaaagtagatgtcacgaacacggacagagggccacccaaaactctggaggccgcgacagggcttacaggccaccccaacctcgcaactagatcatttcttgacaggttccgccgaaccatcgtgatagggatgctgaagaaggccctgaaaatccaggacgtatcgcagttggagcagctcctggccaaggaggtgctgctggagctccacaaaatcggcacgaatgcaactggaaacagatcgttcctggagaggctccacgcaagcatcaccatggctacgctggttcaggcgctgcattccttggacttggatccatcggcggcgctgcgtatggaggtgctgttcttggcgctggagaatatgcgtggaaaaaacaactcaaggcgaagaagcgaggacgtccttgagctggaggagcggccagagcagatccggtcggtgctggaggctggcaccagggccaggctcagtgatgaggaacacatgccgtcggtgtctgtgcaggctgaagaccaggcctttcccaaaccgaagttggccaaagtacgcgccaccgccccggtgtgcgtgtcagcagtgtggttggcggccggcataggattcctgtgtggattcaccctaggagagatgaggggattaaggcggacgagggtccacgaacgcacgtgatgccaatgtgcccacatgacatggccagaaaatgtcactgcggtggaccatgcatgcacgaattaaggagcaccagttagaatacgtattctagattcattttacaaattctgtatttaaaaggaacttgtgcattgtgacagaggcggcggactggatcaggttgtattgtttctgctggtgtcctggcgtatgtataagccacggagtgtatcggatgaaattgaacagagaaatgtgcaatatagaaccgtgttgagggcagccaaaaaaaaaaaaaaagaggaccaacaaagaaatatacttagataatccagaaaagatgagcacgaatgcccctggaaacagatcgttcctgtaaaggctccacgcaagcatcaccatggttaccctggtccaggcgctgcattccttggacttggatccatcggcggcgctgcgtatggaggtgctgttcttggcgctggagaatatgcgtggaaaaaacaactcaaggcgaagaagcgaggacgtccttgagctggaggagcggccagagcagatccggtcgaggctggaggctggcaccagggccaggctcagtgatgaggaacacatgccgtcggtgtctgtgcaggctgaagaccaggcctttcccaaaccg

SEQ ID NO: 4407 - DNA, 267 bp, Zea mays
  Clone ID: MRT4577_104019C.1
ttccattcttagggaattcttattgacaaggacaaaagaggagacaattggacatcttattctttggaaggaggataataatgttttcttgcaaaagagtgacgttcaaaaacgtttttatagaacaatgctgcaacaacctgatatacaaattcttattaataaagatgtccactgtagcctgagaagtcctttacctaagttgaatgttgcaagacaaccgaaccagatcggggtataatgatttatcttgaccgagagaaccct

SEQ ID NO: 4408 - DNA, 1063 bp, Zea mays
  Clone ID: MRT4577_10401C.1
tctctcttcccttctcgtcttctgcaagaagccagtgaccgtctctgtttctctcattccctttcatcactctgctggtctccctcttccacctctggtcttggccatggcctccagcgcctcccggttcatcaagtgcgtcacagtgggggacggcgccgtgggaaagacctgcatgctcatctgctacaccagcaacaagttccccactgattacatacccactgtcttcgataacttcagtgcaaacgtggtagtcgacggtaccacggtgaatttgggcctttgggatactgcagggcaggaagattacaacagactgaggccactgagctaccgcggagcagatgtgttcgtgctcgccttctcgcttgtcagccgagctagctacgagaatgttatgaagaagtggctaccggagcttcagcattatgcaccgggtgtccccatagtgttggccggaactaaattggggaccactggatatgcttcatcgtttatcctaaggttggaaaggtgctggtgctcgactccttgcacaccgagccttcgacctattcaaaattcctcagcatcttagagctggcatttaggttttataagctacaaggtggaaagtacgacacgtccaaaaaaggcgtgccactagacatccattataactggccgtgccataaacaaccactcggatcagtcctatgtgggttctacgtgtgcgagttaatgagaatgaacgaacgatacatcacgaaccctggcaaggtattattagtaatagtcacgtatgtatttatgtcattaaagatgcaaatgtgttattattgagtataaatagatgatgttcataaacttcctttacaacgtcccctccgcagccactgggaacttctggttctctgctaccttccgatagagtgctctttgcgttcaccagctgtgcaaaatgaagtgaggttctagtttctaaattccctacgaggtgtaccttctttagtatgaatggtgggctatttagcagttcagcaaagtgtgaagtgacccctccctgcatgttttgtttccc

SEQ ID NO: 4409 - DNA, 379 bp, Zea mays
  Clone ID: MRT4577_104020C.1
ctgcctcgacggacgcgtccgcccacgcgtccggactagttctagatctgctgcattttttatgcaatatttggggaagctcgggtggagccaatggcgttatcagagcccacaaattgccagcctaatcgagaaaagtgcattaggcatttaccaaagcccatgatgcaaattttctcattaacattgggtaaaattcccatcgaaagagattcagtagaattatatggttacatggcggtgcgggatgatcaggatttattgcttaattatattgtcaatcggagcatggatgaagccattttactgcaaaaggattcccttatcgaaatgactggccctaagccaggcatctcaatgacatcctctgtacatgctg

SEQ ID NO: 4410 - DNA, 522 bp, Zea mays
  Clone ID: MRT4577_104021C.1
cagaaataaccatcgatttcattccattccatggtcattccaatccagcaattgtgcacagccactgattacacattttcaggagtagcaccccacgatcgcaagattcacatcaataaacaaaacagcacatacagcgacctacgctcagtgcttgttcctcggcgaggtcctccttgccccagccgccgacgagggcgcagcggccggtgcggcggccttcctctttggcgacaccatcgccggcgccccagcggcgggtgcagaagcctgctttctcttcggcgacgacccagcggcgggtgcagaagcctgcttcctcggcgacgtcctcgccggcttggccgcacccgccttccgcttcttctccacgaccagctggtactgctgctccgcggcgatgcggtcgaactcgtcgctgagcttcctcgcgcgcctcttcttggcggcggtgacgatagcagcgaggggctcgtcctcctcctccccctccgactcgtcggacccgtccgagtccacgtc

SEQ ID NO: 4411 - DNA, 430 bp, Zea mays
  Clone ID: MRT4577_104022C.1
gcggtggcagcagctctagaacgacggatccccgggcagcagggatactcgacaatctcacagacatccgttactgatcaacttgtctcattaattaccgccccagaaagaaatcggaaggaaatctagagatgcatccatgaatcgggagtcggcttagaccaaaagctgacaaacttgacgaaagctgaaaatatcgatgttgaaggactttttatagttttactaatgatggggatcccattgattgatgagatacgggaaaattcagcatcaatttataaataatgaaaatgtactggagaatggatttacatacagaagacatacattggtcaccactcatgattagtgataccgtgtacagcattctcccggggcgatcgaaaggcagcactgtagggtacgtacgacagctttttcagacata

SEQ ID NO: 4412 - DNA, 759 bp, Zea mays
  Clone ID: MRT4577_104023C.1
ctggttataatttacattaaagttacagttgttttctgttttagcaagttactatacatagaggtgcaacacagtataacgattagtcccgtcatagtagcagttgttttctgttttagcgagttacagttgttttctgatccaaaataaggtgatatgatccaagtctacattatgtgccgtacgtagggacacatcacagtgagatctatacacatggtactggtaaccatagcatggttgatgcaatccacacagttatgcacatagacttcagtagactacaagcgcagatccacttcaatccacaaaagataagtaaactgtccatccaccttaagcacatcatctgttgtgtgttcaaactccagatttgtgtaggctacgctcagtgcttgttcctcggcgaggtcctccttgccccagccaccgacgagggcgcaacggccggtgcggcggccttcctcttcggcgacgccctcgtcggcgccccagcggcgggtgcagaatcctgcttcctcaccggcatggccgcacccgccttccgcttcttctccacgaccagctggtgctgctgctccgcggcgatgcgatcgaactcatcgctgagcttcctcgtgcgcctcttccaggcgctcgtcgacgacgacgtggacttggacaggtccgacgagtcggagggggaggaggagtgggactcgcgactgcggcctcgaggcggggcgatggttaggcccaacaggacgacagagacatggt

SEQ ID NO: 4413 - DNA, 1247 bp, Zea mays
  Clone ID: MRT4577_104024C.1
ggcgggcgggatgagggccgacctttgtagaaattcgttcaatagcccggctgacgtcactaattcaccctctctttccggccgccgccacgggctctccatggaacggctcaaatcggcggtgccgcccgacctccggcgggccgtcggcgagggcacggccgccgatctagctaacaccacctctcgcctgttcgccttcttcgacagccttcctctcttccaccaggttatgcaagaactgaccgaccccgagcttgcgttgtgtcgcaaagacaaggtgaaggctgtagagttgaagggccacggcaacgcgtgcttctctaggagggagttcgggaaagctctcaggttctattcgcaggcattgcgccatgtcccaattaattcgggtggcatggatgtgaacttggtatcttcattatatgtcaatcgagcctccaccatgcataaattaggtctgttcgaagaatctctaagggactgtgacagggccataaccatttctcctaattattctaaggcttggtacaggaagggaatggtaaaaacagcgctcaagaattattcatctgcaatacatgatttagaggtggcattgagccaggaagtgacttcttcggggaagagtaacatagaacaagagctgaagttgattttagagaagcatgaaagtgtcaatgaagctgggacatcaaactgtgatagcaaggatagagatttgcctcttgcaggacaacctcataaaattgttatagagagtatttcaacaccaaacaaaggtagaggaatgatttctacagatgatatccccccagcttcgttgattcatgttgaggaccctcttgctgcgattatcatgaaatcttcccgtgtctcccactgccacttttgcttcagtgaaactccagccgatgttgtattctgtccttcatgtacaataccaatttattgttcaaaaaggtgccaggagcaatcagcaggtcatatttctcgtgatgaagatactaatcttggatattcaacgaatgttgcaaacctgagtataacttcgagttgcaagtctccaagatctaagctatttgctgaacataggcatgaatgtggaggtgcccactgggcagctgttttaccagctgatgtagttttagctggacgaataatagcacacagcatagtaaaaaggatgccgtctgggaagagctttgctttctctggcccaaatttggatctagttcaccattatg

SEQ ID NO: 4414 - DNA, 192 bp, Zea mays
  Clone ID: MRT4577_104025C.1
gtcctactggcaggcgctcttcgctaagctcatggagaagcgcactctcgaggatctagtcctctccgtgggatcatgatcgaggcgctgctccagttgctgcttccgcaccagctgggggtgctgcagctgctgctgcccatgctgcagaggagaagaagcaagagcccaaggacgagtctgctcgacgac

SEQ ID NO: 4415 - DNA, 279 bp, Zea mays
  Clone ID: MRT4577_104026C.1
gttacggcttaacatcaactaataatgtgtcatcgatggtgtcactagcaatgtttttgtggatcgttggaggaccacaatcattttcacaagctgaaaatcgttttacccgatcactatggacagtgcacaccaaatttcatgaagtactaaaatgtttgcgcaagttatcaaagataatattaaaccaagagatcctactttcaaaactgagcatgatagaatcacagaggaacgtttctggccatatttctaaggggctatcggagctattcgccg

SEQ ID NO: 4416 - DNA, 614 bp, Zea mays
  Clone ID: MRT4577_104027C.1
cacgcacgtacccgccggccgggagacagtggtagcgtgctcacacgagttcatgcatgtccgtggcagcaagcaggagtatatacatgtagcgttgcactgccctcccagctggtttggtttggtttcgtttttttcacaggcaccgcgcgccggcgatatcgagatggccgactggggccccgtggtggtggcggtggtgctgttcgtgctgctgtcgccgggcctgctgctgcagctgccggccaagggcgggcgcttcgtggagttcggcaacttccagaccagcggcgcctccatcttcgtccacgccatcatcttcttcgccctcgccgccgtcttcctcatcgccatcggggtgcacatcaccacggactagccgtatagccatagccgggaccgggatctttcttcgttacagtctgcctgtatatacatacatacatgctcagtacgtacgctttaccactgtgtcagtgagtatctctttgtatcagcacccctgctgtgtgcataccaagcaagtgtttatatgggctgttatcattcagtggcgcagcaagaaacctgatcgcttgcttccagttcctaaaaaaaaaaaaaaaaaagcggcc

SEQ ID NO: 4417 - DNA, 357 bp, Zea mays
  Clone ID: MRT4577_104028C.1
gaggggggtttttttaattactttgctcccattcacaggccatactcaatgctggacgagggagagccccattttttcctgcaccaaaaacagccttccttaaacgattaccggggccacaggaccacccctccggtattggatatctgctgaagtcgccacagcaaaaaaggtggccaaaagatgacggacgaccgattagtaccacctggcaaagttaacacgcacctgagaggcaaacacatgacccatggagattacactcctgcatttgatgtgcagcgccttccgcaatgaggcggccattttgtagaccaacacttggtggccaccccgccgttcaaccctgcctagtta

SEQ ID NO: 4418 - DNA, 366 bp, Zea mays
  Clone ID: MRT4577_104029C.1
acacccggggggcccccttttgtttccaaagggggatgggggccaaaattgggggttaaatgctgttattttccccccaaaaaaccaaaaggtggtttggaacactgaacctttaattgggacaagctaaactggggggacccccaaagggggggtttttttttttttttacatcaggtaggggaagccctttaagctttttttgaaatttaactccccgggaacttaaaaaatgggggtttttctgggcgggagggactttttaaaaaaaataaaacccccttgggagcccgggcagtttttattggttttatgggcgcaccttaacaaaaaaaaaaagcggttttcaaaggcccccttttgaaa

SEQ ID NO: 4419 - DNA, 830 bp, Zea mays
  Clone ID: MRT4577_10402C.1
ctcgaggccggccgggctccacttccaaccctaaaccaaccggcttcatcccgactctggcggccaggtgacatctccacctaaccggtggccttgcgacggctccaccccgactagagcccaagcggtggctccaccccgaccggagcccaggtggcggctccaccgccaggcggcggatccatcccgacggcggccaagcgacggatccatcacggaggtcgcggtcgcggctgcgcagcggatccatcccgacggcggccaggcggcgtctccatcacagaggtcgcggtcgcggctgcctcggatcgacgggcagggagcgctccgcccccgccccttccctgatccgcatcggctgatgaccaggaagtgtcttatataatttcatttgtctgattttataattatattaaagggtccattatacatgttatcattgttgttcatgccttgcaggggtcctccaaagaaaaggaaaaagaatgctgagccatcatgtgagagtgccatcgtgattgctgactcaacacccaaggcaatgtgttttcctcctaggtaagcatacttcgacaaatcatttaaaacatctctccatatgtccatatgtgcattctgattttttataaaatatttcctatctttgtaattttgtatctctattgcgaccaaggcgcctcaggaagctttggttcaaactctcataggtaaaataattcaatttgaacagtatcatgttattttgactattcagtactcttttttcttagataccttctgatatgcaggtctggacatggctcaaatcaacctggacaactgccattgaa

SEQ ID NO: 4420 - DNA, 261 bp, Zea mays
  Clone ID: MRT4577_104030C.1
cttctcaaaaaaaaaaagggttattggaaaaatgaaaaaagaccaaaaatagtgagacggacttattgctacggccgtatttacctgctaaacattactattattaggacgtgtgtaacgagataagcagaaggcactagattttcggaaaaacggcaagagctgaaaggccctgtggcctaatatggtgggacgcacagtggggcgagccggattataatcaccccctgccccaggacaaggggtctacataagatcttt

SEQ ID NO: 4421 - DNA, 405 bp, Zea mays
  Clone ID: MRT4577_104031C.1
ggcggcctcgccgcccgaattgtagtctgtagaggcgtccttctctttttgcctgcttttctgctgtggtggcttctcacgagcaccagactcatttgccgtacctaatccctgcttttttgggagaaaggcccaacgtttcgttgcatgataaaatgggcttgctatgctacagtgctgtttatatgtagcgtatgttagtgaagaaatcgcaaattagacaatctaatgaaaaaagttaaaccatattgacattaagtttcgtgtgttagaagattttccctagcctgacccacttgcaccaagcaaaatggttgatatcgctgacctccttaacaagaatcacgaaagcatcacagttcgaagcgctgcgaatggactgtccatgactgggatgtccttttt

SEQ ID NO: 4422 - DNA, 246 bp, Zea mays
  Clone ID: MRT4577_104032C.1
accttttctccttgccttctcttctttggactaagaatctgaccactttactaaaccagacttcaactctgttgcatctgacacatctcagcagattccataatcttctcagactctaaccgcggcagggcactacatcacagatattgtccaaaaccaggtgcgtttgacatcttctacaaaggcagacattgcagccgcctgtattacaggagacaaatagatgattaatccggcacatgaaac

SEQ ID NO: 4423 - DNA, 169 bp, Zea mays
  Clone ID: MRT4577_104033C.1
cggctcgagcgagtgcaaccggtgcctgcgggcgctgccgacgcagccgaccgtgaacgtgtactgccgcgcctacgccatctacgccatgaacgtccgcgacgtgaaggtggtgctggcgccggcgaacccctacgacgactaccagcactggatcaaggacatgcgg

SEQ ID NO: 4424 - DNA, 310 bp, Zea mays
  Clone ID: MRT4577_104034C.1
tcgcgattttcctaaacattcaccccccactaacgcggccattacgctgcacgcggggcgctccacacttctacccatctacctccttctctatcctcaccgcccttctctatcctcgccgctaaatacgtcacgccatgcataactaacaaaactcacgctctctcatctaataaagattccatttcaatcttcttccccccaccgactactacgatcctttccctgccactccctattatcctcgtaccaaacaacaacctcaatctcaggaactcccaaccccacattaccaatttctttatgcatt

SEQ ID NO: 4425 - DNA, 1547 bp, Zea mays
  Clone ID: MRT4577_104035C.1
cacgccagtacttttcgcagccgtcgtgcaaagctctctccaagccctcgccctttcacgctcccttgagggctttgatgcgggtggagtccagcggcggcctcccactcccagagctggaaagacagcaggcgggcgccaagagacgccgccggcgggcacgggcggcggcggcggcggcggcaccccgaacgatggccgcgcccgccaccgccgtgcagcggctcttcgaggcgtgccgcgaggtcttcaccggagctggtccaggcgcggttccaccgccggccggcgtcgagaggatcaagtccgttctagatagtatcacagcagcagatgttcgtctaacatccagcatgccatatttccgacgtgttgacccctacggcactccaaaaatcacttacttgcacctatacaagtgcgaggctttctcgatcggcatcttttgtttgccatcgaggggtgtcattcctctccacaatcaccctggcatgactgtgttcagcaagcttttgtttggtgccatgcatataaaatcttatgactgggctgcttctcaacaagacacacctgatgttcagttgcaagcaggaccacgtttggcaaaggtgaaggttgatggcatcttgactgcacctcatgaaacggcggtactatatccagaagatggtggtaatatgcattgctttaccgcacagaatgcttgtgcagtgcttgatgtccttggccctccatatgatgatggcagcggaaggcactgccagtactacaatgtccgttcctctgcaatttctgttggctcaactatattgcctggaggtgacagatatgaatggctggaggagagcgagccatctcgagatttttatcttgttggatcaacatatatgggcccgaaaatttgggaccactgaacttatatgcctgtgagataggatgtgcctatagctgttcggctgctagaaaagttgctgcacccacagcgtttcctgagaggaaaaaaaaagcctactgctcacttcaacagttcaacagcatcgttacctgcctcttcagcagttcaacagcttttaacagatcagtatatgttggttttggaggaagtgattaggaagaagaaacgatggaccacaatggtaagtgctcaccgttcgtaaatatatgacaccgttgattttttttaaaaattttaatcactcgtcttattaaaaaaataatgagttatcatttatttttatatgatttagtttgtgcttgacttaaaatgtttacattttagaataaatattttgaataagatgagtcgtcaaagttttcaaaaaaaatcaatagtgttatatatttatgaatggaggtagtactcacttcggactgaattattgtggaaagaccatgaggatgtccggaaagtcacagtcatgcttcagtatgaatacgacctggatcctcggacgattatcaagtgtattgtatcctgtaatagtgtcaattgtcaaacacgcattgccaccggagataaaaaaaaaagtctcctgataacttgccgt

SEQ ID NO: 4426 - DNA, 350 bp, Zea mays
  Clone ID: MRT4577_104036C.1
ggaacggaaggagctggcggccgcaacattaccgtattaggcccagtccccggcggcctggaggcgctgtgtgggtaccgtggtggccgtggaggctgtgctaccgtgttgcgcgccgtgatggcggttgccctaccgcggtggcggcggcttccgtggggcggcggtacagggtggtggcggcgctacggcggtggaaccgtggcggcgctacggaactccgacgggaactgatgaactgagcggggggcccgcgcggcaattattcctgttcgctccgtgatgttaccctttccagagggttatcttcttcgtgtctgtttgttgtgccatttttgtttttatttgaa

SEQ ID NO: 4427 - DNA, 2257 bp, Zea mays
  Clone ID: MRT4577_104037C.1
ccggccgcgttcggcgagatgtccttcgacgagcaccacctccgcgttgagaacgcgcggccccgggaggagatcgacaggatctccgccatcgccgccaagtacgtgggcaagcccatggtgtccttccccgtgctgtccagcccgctcgctggggcgcgtccgtcgccgctggacatcgacagcggtggcgtactggggggtgctgccacttatggcggcgccgctgacatcttcggcggcggcggtgtcgctgcttgtggtgcggccagggattgtgacaagcctatgattgtggagctggctgtgacggccatggaggagctggttcggatggcgcagctggacgagccgctgtggaacgcgccggcaggcgggcacgacgggtctgctgagacgctgaacgaggaggagtacgcgcgcatgttcgtccctgctggagggctcgggctaaaaaagcagtacgggttcaagtcggaggcgtcgcgcgacagctccgtcgtcatcatgacccatgccagcctcgtcgagatcctcatggacgtgaatcagtatgcgacggtgttctcgagcatcgtgtcgagagctgcgacgctggaggtgctgtcaaccggcgtggctgggaactacaatggcgcattgcaagtgatgtcggtggagtttcaggtgccttccccactggtgccgaccagggaaagctacttcgtgaggtactgcaagcagaacgcccgacggaacatgggcccgtcgtcgacgtctcgctggacggcctgcgccccggcgcagtcctcaagtgccggcgccggccgtcgggatgcctgatccaggaaatgcccaatggctactcgaaggtgacctgggtggagcacgtcgaggtggacgacaggtcggtgcacagcatctacaagctgctggtgagctcggggctggccttcggtgcacgccgatgggttgggacgctggaccgccagtgcgagcgccttgccagtgtcatggccagcaacattccgaccagtgacatcggcgtgatcactagcacggaggggaggaagagcatgctgaagctggctgagaggatggtgacgagcttctgcggtggcgtgacggcctcagccgcgcaccagtggacgacgctgtccggcagtggtgctgacgacgtccgtgtcatgaccaggaagagcgtcgacgaccctggcaggccgccgggcatagtcctcaatgctgccacctctttctggctccctatcacacccaagcgtgtcttcgacttcctccgtgacgaaagctctcgcagcgagtgggacatcctctccaatggcggcgtcgttcaagaaatggctcacattgccaatggccgcgaccatggcaactgcgtctcgcttcttcgtgtcaatcagagcaccaactcgacccaaagcaacatgctgatcctgcaagagagctgcacggacgcctcgggctcgtacgtcatctatgcgccggtggacgtggtggccatgaacgtggtcctcaacggcggcgaccccgactacgtggcgctcctgccctctgggcttcgccatcctgcccgacggcccgtcaggcagcagcagcatgcaaggcggtggcggtggcggcgtcggctcaggcgggtcgctcctgacggtggcgttccagatcttggtcgactccgtccccaccgccaagctctcgctggggtcggtggcgaccgtgaacagcctcatcgcccgcaccgtggagcgcatcaaggcggcggtctccggcgagagcattacccagcagtagctagcttcgtcgaatcagacactcttcttatccttgcatcattgaaggagcagcaagttttagagctttcatcagtgggaagtcaagaacgcacctcagactctccttgccatgtggtgctcatagttcgagttcttttttcgcctagtttccccaaaatttctgggtagaaatatttcagtcgcgcaacacaagaaaatgagtcaccactacgcaagggttgttggttcgggtattgacttcctctacatgttggcctctcggatgctgctacctctgaatttaggcttctttttcttctcttgtgggatacaaaaaccgtaatttagcatgtaatttgtgctgttgctgcagttgttcagatttatccagcatatatcctggattccccaaattgaaaaaaaaatgtgtcccccaaaaaaaaaaaaaaaaaaaaaaaaaaaaaaaggtcctctgcgttgttaccactgct

SEQ ID NO: 4428 - DNA, 348 bp, Zea mays
  Clone ID: MRT4577_104038C.1
tctcgatcccagcatccgagagagctcccaggccaggtccccatcgccgcggcgcttgccccacctctcccccgcccggtagtagcctcgccgccgttgccgagatggggttcgtgtccttcgtcgggagggtgctcttcgtcgccgcttttcttctcttcggctacccagagtttaatgaattcggtgctggtgggggaccaacagcttaaggccttcgggccaaattcaacggggttggcaaaaaaggatctggtcatttgggaagaactggggcacaccatgaggtgaaacctgggaatggcggctccaatgggcctaaagggcctggaaagcctccttttattt

SEQ ID NO: 4429 - DNA, 441 bp, Zea mays
  Clone ID: MRT4577_104039C.1
ggaatctttaaaagtgaaccaacgcgtccgctttgcttgcaatctccgaagcctccgtcggggggagcatcgatcatgtcggcctactgcgaaaagtacaaggatgagctcatcaagaatgctgcctacattggcacccctggcaagggtatccttgctgctgatgagtccactggcaccattggcaagcgcctttccagcatcaatgtcgagaacgttgaggagaaccgccgtgcctctcgtgagctcctattctgctgccctggtgctctccagaacatcatcgttgtgatcctcttctaggtgatccctgttctataagaccaagaattgctagtcttttcttatattatacataaggacgttgttatttattctattttatttatttctatctttttttatcctttctatctattttacttatatctttccaaattt

SEQ ID NO: 4430 - DNA, 343 bp, Zea mays
  Clone ID: MRT4577_10403C.1
ccggccgggctacttccgctgcgtgctgagaccagtgtactggttttgacagcgggccattggatgggcttgcggtcgaggcgattgagcaatgcgctgcagcagctgaaggtgactcattatgtcaaacgcgactagtcgtgagaggccggaccgtggctgttcatcgggcagttcgaggtggtcccgccgctacgcatgtgggggcatgtaatcatgctctcccgcgtactctggcacaccgacggttattttttctaggcccaggtgacacactcctctgccccataggatcttcatgcacgaaaagggagacttaatgtgatacgtgtgataacaggga

SEQ ID NO: 4431 - DNA, 519 bp, Zea mays
  Clone ID: MRT4577_104040C.1
acaagcttttttttttttttttttttttttttttattttttttttatttttttttttttttttttttttttttttttttttttttttttttttatttttttgggccgggtcctccctctggggggggttcatcccaaggggggggggggggggggggtggggcctcgcttccaaccctggcgtgggcatggggggggctggtttctgggtgaaagggattttcggtcccaatttcatacaacaaacaagccggacgcaaaaaaagaaaagcaaggggggggtgccgaatgagagaacccaaacaaatggggtgggggtgactgcccggttgcctgtcgggaaaccgaaccggccggggggatttatgaatggaccccccccccgggagagggaggaggggtttggggggggctttctttttctcgcccactgactaggtgggttggggggtttggttggggtcggcgggttccctttgctcaaaggggggaggacgggtttcccccggcccaggggggg

SEQ ID NO: 4432 - DNA, 203 bp, Zea mays
  Clone ID: MRT4577_104041C.1
tctcctcggcatgatccgacgacgacgacggagacggaaccagacgcggggggctcagcgcgatccctaagagggcacgctacgcgctgagctaaaagggcgcacaactcaagctgagattactcttcaagcatagaactgtgggtatagagccagaaagaagagcgagggcagcaccaacagtgaagaccgaaacggcagca

SEQ ID NO: 4433 - DNA, 484 bp, Zea mays
  Clone ID: MRT4577_104042C.1
cctcgagccggcgggcgggactctctcagttcctagacagaaactgtccttgcctctctgctgggtctgccgggagtgaagatcagagatcccgccgcccccaagtagggctagcgaggttgtccgaactcccgatgtaagagaggaaaccctcactatagccgagattctacagacctccgtcatcatgtgtctgtctgtgtcgcgagccgactgctacagacattacagtgcttgtttcttggctaggcgctaggtcgatgaagagcatgtagtacatggatacaaacaaagccagggatgggcatccatgcagattgtgtatctgtcagtagctacttgcatccgccttggaatgacgctagctgcgacaaagataacagctgcacttacataagcgtatgtccacgccatagaagtgtgtgttatgcacgtatatgctagatgagtgcatcaaaggccctcttctatgtacaagcacatg

SEQ ID NO: 4434 - DNA, 359 bp, Zea mays
  Clone ID: MRT4577_104043C.1
gtcaaaagaaattttttaatttttcggcggtgcaccagcaaaacactaaagggggaaggggagaaaacggacaaaaggagctcgcctccctccggaacatacaacactatgagctgcgtccagccatccgaggtatgaacaagaccacagggagcgacggggcacggagactctttgggagcccgcggacatctctcggaactcgaatacctcttctcggagcaccatatctgcggcctcttcttcatcgccatcgaaagaaaaacagtggctcttctcggccggcccgaacgcggacaacatgaacacgatgacacccaggggggccatctctccatgccaagatgcatcacccaccg

SEQ ID NO: 4435 - DNA, 457 bp, Zea mays
  Clone ID: MRT4577_104044C.1
gggcgcttacgaccagcatgtcgcgcggcgtgcgtgcgcgcatcctgccactgatattgtcatatccatgactgagaggttttgactagaaaagcgcagcctgagggacttttctcaaatgttgtcgtgagtgcacatgctcacagccttcatgatggaaaacctaccaaaccgtaccaggggaggaagagaagacatgaggccttgaggctgagctgagaaggacgtttgaaggaaggggacggtgttgtggaggagcatatgaaactgtacacagttgcgctgtacaggaggcattttctaaggactatactggctagggctcaaagaacaaggctactgatggtggctctgatgaggaccactcactctattcaactggtagacgtgatggtgaccatgcacatgttgactacgaagaggatgatgatgaagaccatgggcagactgacacttg

SEQ ID NO: 4436 - DNA, 620 bp, Zea mays
  unsure (1)..(620): unsure at all n locations
  Clone ID: MRT4577_104045C.1
ctactcggtagtgcctaaggggnagacaagnaccgtcaanagtacctctccgaggtgattggtactgngnattggagccacgnactcgnaagggcctggaaacaaatccgaagcgggcgacacgaagaagagcagcggcggcgcaagcgagagatgagatgctgctgagcggcggtggcgcaagcgagagacgaggagctgctgagcgtcagcggcgacgacaacatcttccccgccgctagcaaactctactgcaccggcaagcttctctccggcggcgacgtggggtagaagaccaaggcggctgcgaccaccggcatgaggaaggtgaaagagggaatgtcgcaggggttccaatggatcaaggacaagtgccagcacggcggcggcaagaagcagcagggctccgaggcccctaggttgtgggccggtgatccgatattggtggtgttgcagttgtagaggtccaaggataagagagagaaattcaagtcatgtcatgccagttgatacatcattaggcttggtagagtttgaaagcaattgtttgataaaaatctgatcattggatgttgatgtttgtttttatgtccgttttttaaatatatgtattgagaatc

SEQ ID NO: 4437 - DNA, 293 bp, Zea mays
  unsure (1)..(293): unsure at all n locations
  Clone ID: MRT4577_104046C.1
tttgttatttttcaacgactcaactnaaaaggctcaggagctcatgctgttagccagcacagggtctcttccaagctcaacccccgtggcccgtaagccaaaagctcctattcttgctccagcaaaagtcacaatgcctgagggtttgcatgcaacacaaatgcttgttcaaaaaccacaacacgttttttcacctgttactgtcattttcaaaccaattcctggcatcttgcaagctgcaagtcttcccaagagcgcctcgagctctaaccttggcttcccattttcaaaaa

SEQ ID NO: 4438 - DNA, 366 bp, Zea mays
  Clone ID: MRT4577_104047C.1
agctcgaccccccctcccgttgcttcggtaggtcagagctgaccacccgcatccccgtcagtcatggcagcgtgagcatgcggcggcgccgtgcgtgcgctgccccataaggtgcagacatacagatgatgctcgggcgcggcggtcacgttggcaccaagaagtgcgatttccagatggagcgctatggctttaagcggcgtaccgacggtgtctacataatcaaccttggcaagacatgggagaaactgccggttgcagcgagggttaactgttgccattgagaaccctgaggacatcatcgtgcaatacgtccgcccctatggacagcgtgctagcctcaagatcgctcagtacactggcgct

SEQ ID NO: 4439 - DNA, 201 bp, Zea mays
  Clone ID: MRT4577_104048C.1
ttggttgggtttgaaacaaaaacgcaggggggaccaaccggagaaacaaagggataggaacaaataggagaaacaagaggaaaggaaaggaacaaaggcacatgcacaatacaaagaaaacgatgggatgcaagacaaggccaaaatcataaagcaggcagggaaacagccgcaccaaccaagaaagggactagctcggga

SEQ ID NO: 4440 - DNA, 235 bp, Zea mays
  Clone ID: MRT4577_104049C.1
tataaaattattaccataggaggcacgagggattcgagtggcgtggtgaggcccaaaaaaaaaaaaaagaatagggcgggctccagctagtcaaaccgtcaacccagtaatacattcctgacaccttccagcaggcgcaccaactttccctatagtcaggcgtattacaacttggcggaataaaaagcatagctggtctctgactgaaactgttatcgcgatcacaattctaaca

SEQ ID NO: 4441 - DNA, 546 bp, Zea mays
  Clone ID: MRT4577_10404C.1
gccggccgggccgggagcatacgatatggacttaattatgtcttccccgccccctttcgcctttcccctcctatagacaccaccatgcccgctaccgccggcactccggcacaggtcgaatattccgtagttgagattgcaagaggaggtgaggtaagccgagagctgagctctaatgttctccatctattgctaacagcacctcagacctcagagggattgcagggacaatgcccatagcacctgatatgatgaggggagagtcaagaatgatggtgcccttgggcgccttgacatcgaaaccagaggatctgacatctgaagaatccctcatattgcgtacaagaagagttaaagcccgtgactacatgctgcacctgatgttattcaactgtctcggcagaacggaattgaccccagatcgacacctaccgacagttacagcacatgtttcaaaaccacccggatctgcgctaacagatcgagaggtgtcagaccgccgccactggtgcctaccacaacagacgaagtatactgcgacgtctg

SEQ ID NO: 4442 - DNA, 508 bp, Zea mays
  Clone ID: MRT4577_104050C.1
gcgttcgggggcccatgggttgtctcaagaacaaaccatgcgtgctcaagctctgaactcacacagctgccaactgcgctggctcagtaaatgcgttatagtcgcctggatggaccttgcttctggctaaccggcttcatctttcagctgattccaccaacaaacccacccttccgggaagcgggcgcactaattaaataaacagctgacgcgggctctgaccgctcgacccaaacattaatgtataactggactgatcgcacggaccttcgacgcctgtcggacgcatgcattcaacatggctgccctatagactttcatggggacgctactgtgcctccatggaagatcaccgatgcagaacaatagatgctggattctgctgaggcagcctccataaacgctctcacatctcaagaagctgcaaagccgcaaattacccaatcctgacactgcgtaggttgtcgacagtaaataaccctaccgaccgcgccagagtctggtcatt

SEQ ID NO: 4443 - DNA, 390 bp, Zea mays
  Clone ID: MRT4577_104051C.1
atcagagcgtcattcccgttgcgtggggggggtttacatctagaaaccacgatactgggctgcacgtgaaggacgaggacgaatagacaaggcttttctgcgcagactatgcggggaggtctgtacggttgcactggggcatctaggacgagatcaacaggaccgtcggggatcacgtcagctaaaggaccatgaacacatacaggtacgctccgtgtttactaccacgacccttacgaactgttctacatactgccctatcttgtcggtgtactaagccaagacattcggggccgaacacattttgtttttttgatgtctgcaacgctgagtggcacatatattcaagggaatagctgtcatgacagggggtaagcgatctgagccatt

SEQ ID NO: 4444 - DNA, 475 bp, Zea mays
  unsure (1)..(475): unsure at all n locations
  Clone ID: MRT4577_104052C.1
atctactcccgctcgtttttgtggagcccgaggaaaaagcggggacggaggggcggcatgcagaagcgcgcgaagacactgacggcgaagacgatgacgctcgaggaggagaacgcagaccccagggacaacgngcaggccaacatccaggacggggacggccacccaccgcaccagccggggacgancctcgctggcgaggagcagaagtatttttttccttgcctggctacaacatccagaacgatagctaccttgaaatggtgctgcgcctcagggttggtatgcaaatttaggtgaacacattgactggcatgaccctcgcctagtaggagaagcctgctgacacattcgctcatgggaaagccgtgcacccggacccggggggcgatccaccggaccagattcgcctgatctttgctgtgcagcggctggatgtatggcgcaccgttgtcgcctacaacatcgagaagga

SEQ ID NO: 4445 - DNA, 1331 bp, Zea mays
  Clone ID: MRT4577_104053C.1
ccggccgggggctccgctgcttccgcccggcctgcgggcctgcggccgttgccggaggcgcccgcagcatatcataagttcctttcttccgccgcaagaagcccagccaccgccacctgttcggcttccttgatataaccgtccatctcgattcgatccgcctcgtcactcacgaacgcacgaattcaccaaccaaactccactgtctccaactctccatcgcgtctgctacgcctctcctgcaggacgaccaatggcttccaggaagttcttcgtgggtggcaactggaaatgcaacggtactggcgaggacgtgaagaagatcgtcaccgtgctcaaccaagccgaggtgccctctgaagacgtcgtcgaggtggtggtgagtccgcctttcgtttttctgcagcaggtcaaggggctgctgcggctggacttcgccgtcgcagcgcagaactgctgggtgcgcaagggcggcgccttcaccggcgagatcagtgctgagatgctggtaaacctgcaggtgccctgggtcattttgggacattctgagcgcagagctctgttgggtgaatccagtgattttgttgctgataaagttgcatatgcactcactcaaggtctcaaggtaattgcttgcattggtgagacccttgagcagagagaggcaggaacaacaatggatgttgttgctgcacaaacaaaggctattgctgaaaaaatatcagattggacaaatattgtgttggcatatgaaccagtttgggctattggtaccggcaaagttgcaactcctgctcaggctcaggaggttcatgatggtctgagaaagtggctccactccaatgttagccctgcagttgctgaattgacaaggataatttatggagggtctgtaaatggagctaactgcaaagaacttgcagctcaaccagatgttgatggattccttgttggtggagcctcattgaagcctgaattcgtggacatcatcaagtctgccactgtcaagtcttcatctgcctagtgttttgactttcaatgcacctggatgcttgtcgtactgaatgctgttgatcttttaaagctattgccattttaccatctcgttttggtattctagctccagtgcatcgtttgtatatcatcatctcctgcgtatgtgcacagagtagtcatttacctgaatcatccttgtgtaccctttggaactgcataattgaactgcgctattctagatctgtcctctcatggttacttcaatttatgaggtgttgcatcatgagtcaactcttcaaatttgatggaataattccatttatcatactagtatt

SEQ ID NO: 4446 - DNA, 1425 bp, Zea mays
  Clone ID: MRT4577_104054C.1
ccaactctccatcgcgtctgctacgcctctcctgcaggacgaccaatggcttccaggaagttcttcgtgggtggcaactggaaatgcaacggtactggcgaggacgtgaagaagatcgtcaccgtgctcaaccaagccgaggtgccctctgaagacgtcgtcggtgagtcgtctcacttctcatggcatcatctctccccgcgtttgcagttgcgggcctgtgtcggttgtggtttggtttttgactagaccgatctatgtgctgatctcttggttggctggaactcggggaggtgagcagaggtggtggtgagtccgcctttcgtttttctgcagcaggtcaaggggctgctgcggctggacttcgccgtcgcagcgcagaactgctgggtgcgcaagggcggcgccttcaccggcgagatcagtgctgagatgctggtaaacctgcaggtgccctgggtcattttgggacattctgagcgcagagctctgttgggtgaatccagtgattttgttgctgataaagttgcatatgcactcactcaaggtctcaaggtaattgcttgcattggtgagacccttgagcagagagaggcaggaacaacaatggatgttgttgctgcacaaacaaaggctattgctggtaacttttacagttttacttgctgttatattctgatcatcttatgtttttaacttattcctgcttctgttcagtatagggttcaggatgcatatgctctcttagtcctttttttactttattaaataataaaaattttggtggtggggttgatgtatttgtgtgtttgtgtgtgaattggacacagaaataaatctgaagctattgtcattttaaaaaagaactacgctatacatgatacatatatttgtacctgacaccattttttaacacttcaaactttttagcttcatgtgctcattctagctgctgctttgaattttattccttcacgcagaaatgagggacttctgaatttctctaattcactgtttactgcctctccttttgttttgcagaaaaaatatcagattggacaaatattgtgttggcatatgaaccagtttgggctattggtaccggcaaagttgcaactcctgctcaggctcaggaggttcatgatggtctgagaaagtggctccactccaatgttagccctgcagttgctgaattgacaaggataatttatggagggtctgtaaatggagctaactgcaaagaacttgcagctcaaccagatgttgatggattccttgttggtggagcctcattgaagcctgaattcgtggacatcatcaagtctgccactgtcaagtcttcatctgcctagtgttttgactttcaatgcacctggatgcttgtcgtactgaatgctgttgatcttttaaagctattgccatttt

SEQ ID NO: 4447 - DNA, 387 bp, Zea mays
  Clone ID: MRT4577_104055C.1
cttccgctcgaccgagaaaatcaaggatcttcgcacctaggagatcaagaacggacgcctggacatgctgggcatcatgctcgcttggttgcaagccgaatacaccgtctccggccccatcgacaaccttttcagccacactatcgaccctggccaacccaccattttccaggccttcacccccaaatcatgagctctgatgaacttggcagttcgaagagtgctaccacacatgcatgcattgttaagtttgatagccgatatggaactttttctttatgttagcggcagactactgggtagactgtcaacgatgatgatgaatatgatgaaatgttcgttgtgcgatgcatggtgtacttgtactatgttgcaactaatgtaaaa

SEQ ID NO: 4448 - DNA, 287 bp, Zea mays
  Clone ID: MRT4577_104056C.1
cattccccttccacctctctctttctttccactactcgccctctctctcttgcgcgcgcgtgacaacatccctccacgggcgcgcggcgcgggagcacccaccgacttatcgccggtggggcggggcgggggcgatctgatgccggcgcggcggtgatggcagcggcgtccggcggttggggcagcggtgccggggaaggctcctcctcgggacgcggagatatgaagatcggggccgcaggggtggaacaagtcacagaagcgatgttgcagattaatttatgaga

SEQ ID NO: 4449 - DNA, 125 bp, Zea mays
  Clone ID: MRT4577_104057C.1
ctttctatggaacagctggggcatcctgcgtgtgctgggcccagaattcaatggtccacccgacgggcgcgcggactgttttgatagccgctgatgacataatgacctaggtcgatgttgaagaa

SEQ ID NO: 4450 - DNA, 438 bp, Zea mays
  Clone ID: MRT4577_104058C.1
atgccaccgaagaagatagcgacgctaggggctgttcttgctcccttggacaccaatcaagatgggatccttctaaggaaggcccgaagccagaagaggaaagctactagcccaacaccacaagacaaggagctataccaagaaatcaacaatctagaagctattcatcaacatgtggagaaaataagggaaaatatgcttcgactggccgagctccagaagaaggttgacgaagcagctgaggaaatgcgacatactgctcaagacaccgagcaagggcacaaaccacaacaaagagaccttcgtcaagaaggccccaaccatgacgacatgtggtatgatgattttcatcatgataacattgcttttgatgacgcttcccctctagctatagagttacaggctgtcccatggccaccatcatacaagccaccctag

SEQ ID NO: 4451 - DNA, 624 bp, Zea mays
  Clone ID: MRT4577_104059C.1
ccttcctcgagttttttttttttttttttttttttttttttttttttttttttttggaaggcccaatcgaatcaggaaatttctttgtattatatctaaacctaaactgttcctaaatttgcaaaaactgaggggacaaaccaaaaaaacatcacgcctttgggcacactgttttctgtacaacgcagttgcccaaaactgaactttacaccggggaaacacaaacagaaagttgatgcgtaaacaacggcaagggaggcctaaaaagtcaaaacgtcagggtccttcagggtccttttgcactgggatgagcaacgagtacttgaccttgagcgcgaccttgccgccttccatgcaaagtttggcgccggggacaacccagtaccccggcaggtcgtcggggcctttgctcacctcgggggggtcaatgggcctggccattttttgaaccgggaggggcaccggggggcccttggggaatatgggcggagttgacctccaccttttcctccaccgccgggggggccggcgccaggccaccggacagggcggggctgaggcgcgccgacagggacccggacctgcgcggggcgaccagggccccgccccactgggaggggggga

SEQ ID NO: 4452 - DNA, 399 bp, Zea mays
  Clone ID: MRT4577_10405C.1
tcgagggcgtggaccagggcccacgacaggggggcctttaagagccatttgggtgtcatggctcacagcggcgcggaggacatgtgtacatgaatgccccagaccgggcacttgataaacatcctgactcccgaggggaccctgtaccatgaagaagcctctaactacattggcataaaaggggctctattcatggtgcaccaaccaatgcatggacactgtgctggatcagacgcactacatggagctggtaccagtggcgacccagagcttctagagagactctgagccgggtgtcatgatatcatgcggggtggacctatcacgcacgccaaacaagctggcagcggcgtcctacggtacgcacgagatgtgtgcggactgccatcaaacagccta

SEQ ID NO: 4453 - DNA, 1119 bp, Zea mays
  unsure (1)..(1119): unsure at all n locations
  Clone ID: MRT4577_104060C.1
ggccctcgggcctgccgtcatggccgacttagccaagacgacgacgaccatcgccattaccacgacgatgatcgacggcgtgagcgagatcaccacgaagattgctatgctggaggactccgactccctagcgcacctgctacagcagcccgggacagaggacgtggaggcttcgcgctcgggcttggcctctccgactacccttccaccgggaaggtggtgctagacgatgaggactcctacaataaggaactgcatacctgaaggaatttaaagggaaatatgaccctcatctcataatcgcgccaaatattatcttggtcaattggaaggagcatcttctgtattcttcatgcattaaaaagattttaagctttccttttttggtaagatatttgttatcaaaactcatatttcttttatgttggtgcaaaggaccgaaagcagaagttgttctctcaaataatctgcttttttgtgtgtttttcatatattaggtatgcatatactcatgttatgatttcttatttcagcaataaaattttactgatacatttttagtgaatagacacaaatgttcctaattactcagaccgaccatcctaatctggaaatattctaaaagggcaaggcttatatttttttgaaaggcgcaagagagctgcatgtcatttcattattattaagaagaaaaagggggagacatgaatgtaaactccctaataggttacaaggaagacagacgcgccaccaaagatacaaccaaagccacctaggacctaagaacgaagaccctaggctatgctagcaaaatagcagctctagctgagtaccacaacacacactcggaggacataccctgcacaacctttggggtgcagggagcagcaccctaaaaaatgcacagattgtgatgcttcccaagcttccgagctaccacaacgatcacggcatcccccgcccaccacccctatccgaccccctgatgccccgccacccccacccccacctcccacagccccccccccccggcncccacggacgacccccaaccatctcccacgcaagcccttcctgtcccacaannnnnnnnnnnnnnnnnnnnnnnnnnnnnnnnnn

SEQ ID NO: 4454 - DNA, 329 bp, Zea mays
  Clone ID: MRT4577_104061C.1
aacccccaaatatcctataaaatttttttggggcctcctcaaaaacatttaagagggggttatgaagcatttaaacggggggggggctttccttgggaaaatggggcttacattggttttattacaggatactttttactatgcaacccggagaagcccgactttgttttattgccaaattaaattaagaaatgttttttgggaaataagacttccagaccccctcaggggggttttgctaactacaggggccagattttttatgcgggctccaaaacaaggggtggtgctccgccttcaccgggggagacaccagcaacttcgatttt

SEQ ID NO: 4455 - DNA, 250 bp, Zea mays
  Clone ID: MRT4577_104062C.1
tccctcttattctcttatgtggggggattttaaaggtattcccgtctttccctattagtcctccccaaaaaaacacacttcccggatgctaatactaacttgaggggcgggcacctctctaaaagaaggggacctatttcgcaaattttataacgggccatggtagtttatggttaccaaactagaactatctctaaaaaatggaagctcgcccttgccatcataaatactttttaaagcaaaccccccc

SEQ ID NO: 4456 - DNA, 1158 bp, Zea mays
  Clone ID: MRT4577_104063C.1
gagcaagaagaagatagagggatgatgtgatacgcaaaatactaaaacctagggtggtagtacaagcagtagttatgagcaggcctcttctctctctttcctgttccgttctttttctttttccctgcggaattccccttcttccctagtgcctcgcttcgatatttcgattggattggattaccaagggacagagggagggaatcccacacacacctctggccctcgcgaggccaagggaagggaagcactcagcactcagcagcagaaggaccgccgtaaatggcgctgccggtggcgaagctggggaccctggcgctgcggacgctgtccaagcccatcgccagccgcctcaagagccaggccgccgtccaccccaagttccgcaacttcatcatcgccatcgcccaggcaaaccaccagatcaccacaaagatacagaggcgcatttatgggcatgccacagatgtggcgatcaggcctttggatgagcagaaagctgttcaagctgctacagatctcatcggggaagcctttatcttctcggtcgctgttgctgctctaatttttgaggttcagagaaacgcaaggtctgaggctaggaaggaggaagctcgtagacaggaacttgaggaattgaaacgaagggaagagagtatagctaaagaattggaagatcttaaattgaagcttagtgaaattgagcagcttgctaaagggcgaggcctgacaggaatcttgaacttgaaacgggtccatggcacagaggtcggcaaggcagcagcacctctgcgtgagtaagcaatccggctttggcgcaggaaagtatgattccttgtcgcccccattatttggtaagacttgtgttgtcgtgctcaacctattctttggtgctcatattggatccacatttgtagtggttgatccatggacaccctgagacagtggtaataatacagcgtaacaaagaaatcaaattaaagcgcaatatgtatgtgctacttggtggcggtgaccacaaaatcagatgttaagatggattagggcttgtttggttgtatacttaaggtgtaaaaaatgccacgtttcagattaaagctggttgtttggactgttgcaactaaaaaaaaaaaaaaaaaaaagccaaaaaaaaaaaaa

SEQ ID NO: 4457 - DNA, 773 bp, Zea mays
  Clone ID: MRT4577_104064C.1
gacccatacccacgagaacctctagctaccgtagcttagctgagcttcctagctgtagccatggccaagtatttccagagtgctcctgttagcaatgaagcattgaagcacaaggagattctgttggacggcctgtacatgcaccaggaccttgacggatcaccaaatcagaaccagaaaactatagtgaatcctaacctccctctgcagtttggctgcaccgtggctaatgactggaccatatatgatggccttggccccgataagaagcttgttgcgcgtgcacaagggccacatatgggggcaggagtagccaaaggaagctggttcatatgtttcaacatggtgttcgtcgacgacaggtttgcgggttccagccttaaggtgctcggacattttgaagagccggtagaaggtgagtgggcaatccttggcgggacaggagagtttgcctatgcacaaggtgtggtcaccttcaagaaactccaggacggaagcactagggtcagacagcttcagatacgtgccatctgcctcagctttccatcgtcactttcaatgcctacgaagatggggccatggggtggaaatggaggctccattcaagacatcaccacaggaaccccgatgcgcctgcaaagtgtgacactcagcagcgagagcagctggattgtctctcttgcatttacttatattgacaaacttggaaagaggcgcaacgaaggcccctggggtcctgacaaagggaacagtcaaaccatcgagttcggacc

SEQ ID NO: 4458 - DNA, 107 bp, Zea mays
  Clone ID: MRT4577_104065C.1
acgctctgaaaagagtgaatttcacaagttacagcaactgcgagatgaacaaggcgaattgtccagcagtgatggccagctatactatgcactaaagcgtgccactg

SEQ ID NO: 4459 - DNA, 680 bp, Zea mays
  Clone ID: MRT4577_104066C.1
ttttttttttttttcttttttttttttttttttttttttttttttttttttttttttttttttttttttttttttttttcccacccaaggggccggagggggttttcataaaaaatttttttttataaaaaaggatattgtgtccggggaccccaatccatattttaggggcccctaaacgaaccttaaacataaattaacccgaaaacttttgcccattttctttaaaggggctaaaccgaaaacttttgcaaatttcccccaaaaggccttaaaattccccccaaaaacccagaaccttaactttccccaaaaaaaatttcaccctggcccctgcccaaccaggataaaaaaccagtttaaaaaagccctccaaattacccaacaaattttccccaatttcctccaatttgggtgcaaacaatggcccaatttccttttaaaccttggaaaaaaatgctctaaaccttcaaattcttttaaccaaactgatcatttccggggccctgggtcttaagccacgggttcttgcggggtaagaaaacgggccaaagggaaaaaaaaaaaggacctgatcctttcaggaaacctgaaagcaaggaaccacggcaataaaaactccccgggccccccatcaaaaatttccaacccggcaaggacaaataggtgccgagccagcg

SEQ ID NO: 4460 - DNA, 358 bp, Zea mays
  Clone ID: MRT4577_104067C.1
ggggttaggtgtgtgtttttgtgtttaatacacacccctctctattgggaaaaaaaaaaaaggggaataaaaacacacagcagagaaacacacaaaaaaaaaaggggacacggggcacgcgggaacaagaagactctataccctggagagcggggaggcgagcgctaaagagaacacgagcgcgcacaaacacaaagagaacagcgccctacaccccgggggcccccctggggcgggggatacacagacctcccccccagagcgcaaaatcacaggggaagccgaggggggtgtgtcctccccctccggcggggaaagcgcgggcgcctccacaggggagagagccagacccccccct

SEQ ID NO: 4461 - DNA, 941 bp, Zea mays
  Clone ID: MRT4577_104068C.1
cattgggtacctcgaggccggccggggttatccaaacggcacctcagggtactgcaatccagaagcaggggccctggcctcagcgcacctggatggcagggctggaggagttgaagaagaagctacaacccttgctgttcgatgacctggacagagttggcgccagtaccagggtgcccttaccagaagatacttgcgattcctacgcagagaagaggcaacaaattctgaatgagatgagaacattatgtgaagcatgttgttatcctggtttagttgaattccagggtgcattttacatgcctgattctggacaaataagtatcgctcttgaatacatggatggtggttccttggcagatgttataagggtcaagaagtctataccagaaccagttctttcacatatgctacagaaagtattgcttggtctgcgatacttgcatgaagtaaggcatctagtgcatagagatataaagccagcaaatttactggtaaatcttaagggcgaggcgaagattacagattttggtgtgagtgctggtttggacaatacaatggctatggtatgctacttcttggcgatagtcatcacaaatgttcttctagtgttgcttaattgtgctacctttgtaggcacagtcacatatatgtcacctgagagaattcgtaatgagaactattcttatgctgctgatatttggagtcttggactaacaatattggaatgtgctactggaaaattcccatatgacgtaaatgagggccctgcaaatctaatgttgcagatacttgatgatccatcaccaacaccaccagtagatacttgttcattagaattctgctcattcatcaatgattgcttgcagaaagagctgatgcaaggcccacatgtgagcagcttctgtcacacccattcatcaagaggtatgcaggaactg

SEQ ID NO: 4462 - DNA, 2391 bp, Zea mays
  Clone ID: MRT4577_104069C.1
cctcgaggccggccgggccgggttccactacctcacgtaaccaccactgacgcaggcaaccacctcagcccggtccacctctaccaccggccacccactgcctccacccccgccctagatcaccaccgcactctcaggcgcaagaacgagctcaccaggcaaagtcacggcggcgacctccgccttccaggtctcgcccttgctggcgcgcgcctctgctcaccacccagcgccgcgtcttccttctccagtccggtcgctggccgaccgccagcgcggctccgggccctgctttccgcacgcccaagcctgcgcgctccggacgcacctctcctgctcttctgggcttgggaaagagaagaaaccagcataaaaacactagatctgtgaaggatttgaggaagaaaccaaaccgaaaccctagtgacgatgctagagttcggacctcgctctgagtcgaaacgaccagagaccgctgccttccctccccattttcctttcccatgaaccaagcagcgtatgagctttccatccctcctcatttacctatcccacctctcatatcccgttatccaaacggcacctcagggtactgcaatccagaagcaggggccctggcctcagcgcacctggatggcagggctggaggagttgaagaagaagctacaacccttgctgttcgatgacctggacagagttggcgccagtaccagggtgcccttaccagaagatacttgcgattcctacgcagtttctgatggtgggactgttaatttacttagtagatccttgggtgagtataaaatcaatgagcatggctttcataaacgaagtgctgggccagacgagttagattctgatgagaaggcttaccgttgtgcctctcatgagatgcatatatttggtcccatcggtaatggtgcaagcagtgtagtggagagagctatatttattccagttcatcgaatcttggccttgaagaagataaacatattcgagaaggagaagaggcaacaaattctgaatgagatgagaacattatgtgaagcatgttgttatcctggtttagttgaattccagggtgcattttacatgcctgattctggacaaataagtatcgctcttgaatacatggatggtggttccttggcagatgttataagggtcaagaagtctataccagaaccagttctttcacatatgctacagaaagtattgcttggtctgcgatacttgcatgaagtaaggcatctagtgcatagagatataaagccagcaaatttactggtaaatcttaagggcgaggcgaagattacagattttggtgtgagtgctggtttggacaatacaatggctatgtgtgctacctttgtaggcacagtcacatatatgtcacctgagagaattcgtaatgagaactattcttatgctgctgatatttggagtcttggactaacaatattggaatgtgctactggaaaattcccatatgacgtaaatgagggccctgcaaatctaatgttgcagatacttgatgatccatcaccaacaccaccagtagatacttgttcattagaattctgctcattcatcaatgattgcttgcagaaagatgctgatgcaaggcccacatgtgagcagcttctgtcacacccattcatcaagaggtatgcaggaactgaagtggacttggcagcatatgtcaaaagtgtagttgacccaacagaaaggctaaagcaaatagctgagatgcttgctatacattactacctcttgtttaatggacctgatgggatttggcatcatatgaagacattctacatggaacaatctactttcagtttctcagagaacgtgtatgttggccagaatgaaatttttgatattttgtcaaatataaggaaaaagctaaaaggtgataggcctcgagagaaaattgttcatgttgtcgagaagctacattgtcgtgcaaatggtgaaactggggttgcaattcgtgtgtctggatctttcattgtgggaaaccaatttcttgtatgtggcgaggggataaaagctgaagggatgcctagcttggatgagctctctattgacattccaagcaaacgcgtaggccagttcagagagcagtttatcatgcaaccgggaaacttaatgtcatgctattacatatcaaagcaagatctgtacattatccaatcctgattgaacatattatttgtaagattattctctgaagcacatgtatagaggatttagaagaattcctttcggacctggttttgaatcttatttactttgtggaactgaaattttgggccaaacctctgacaagaattgaaaagtttaagtcttcaactatattcatgtttaaaaaagtttttataaaaa

SEQ ID NO: 4463 - DNA, 381 bp, Zea mays
  Clone ID: MRT4577_10406C.1
gcacgggacgctgggcctcgatccgagatacactcaaaattgcccatccgcggaggaggacgcgccctctatcccaatgcgccgggccactgcgacctgatgactcgtgcatattagtcggtcagtcgcgcggtcgtcaggtctttcaccaccacgcgcgatccgtctaacgctgcgtaggattgcgctatgccgaggatcggcgtagatggactggagcgcggtgacggcggtggacttggtggacgcgctgagggaggtggactggcacatgccgacgtggtctgtgccggtggtcttcagaggatttaccgttcaacgctgctacttcaggaggaccatcggcttaagtgctaccttactactacaggacatactatt

SEQ ID NO: 4464 - DNA, 181 bp, Zea mays
  Clone ID: MRT4577_104070C.1
acggaaagattcaagcaaatggtttacacctacttatattatgcctctaggcaatgagcagcgacaggtgaaggcagttctgttgtggacagtatgactaaagcaattgatgaggtaatcaaaataaacgatggagacttcacctgttgtaatccaacttaggagccgattccatttttga

SEQ ID NO: 4465 - DNA, 219 bp, Zea mays
  Clone ID: MRT4577_104071C.1
ggacgcttggcgcagttgcggatctcttccccacccctcggatttataaatcgcgcccttccttacccattaaacctggtgaggtcacgcaaatcgaggtgatgagaggccgccattgatgagttcgtggagatgtgaaggaaccactggcgccaatggatttggggcgtgtgcttcgtctcggtatcctggatgcagacggatggtgctggccattgt

SEQ ID NO: 4466 - DNA, 197 bp, Zea mays
  Clone ID: MRT4577_104072C.1
gactccaaggctaaaacggttaacctccgaagcatacaccatagaagatcgaaccgagcacctaaggatggggctgttccatctccactgtatcgtcaacacaatttgagtacaccaaatcagctgcccgacccatgatcatgacgcactattcatgccattttgtatatgaacaatgtcgcgcacctgcttaagtg

SEQ ID NO: 4467 - DNA, 585 bp, Zea mays
  unsure (1)..(585): unsure at all n locations
  Clone ID: MRT4577_104073C.1
cancacgtgtgtgttgctgatgctgcagggtgttcacaatggaggcctacgacctactcgatggcgacgcgtgcaacgcgcagatatactcggtggcatcggcagtgagcaggagggtggagaaggtggagagggactacttgtcgtacgacgagccaagaacgtgttctcgggcgaggcatgcaacgaccttggtggcgagttctgcgatgcgtcgtaccatgtcgacgtctttagggagctagcgcacacctgaagcctgatcctaattcccatccatgtttgtccagaaccaagttgatctcacaacgatcggtcggtgtagagctagctaattctaatggttagagttcgaatcggtaacacacacgtgtgtgttgctgatgctgcagggtgttcacaatggaggcctacgacctactcgatggcgacgcgtgcaacgcgcagatttactcggtggcatcggcagtgagcaggagggtggagaaagtggagagggactacttgtcgtacgatgagccaagaacgtnagccttaaccagnntaggataaaaccccatttcttaccttccctttccttctctg

SEQ ID NO: 4468 - DNA, 590 bp, Zea mays
  unsure (1)..(590): unsure at all n locations
  Clone ID: MRT4577_104074C.1
ccggccgggaagagccccaaccgtcgtctcccctatccccttgccctgagagagagagagagagagagagagtacggagtaccgagtactccgagtccgagatctgcctgtgtccacagccttcgcttccctgacctcgacatcttgccgatctgcactgactccacggcccgcgttcatggcggtgacctttccctctcccaccctgcggtccccgcgccggccggatgccattgtggctcctgacccctcgtctgctgacatgccgccctccctcgacttcggcgacccgacctccctcaccgcgctccgcgtcctcaccgacgggggtgccgccacccgcctcctccacgagtgcgtggcctaccagcgcgccctcgacgcccgtctcgacgctctcctcgcccgccgcgccgacctcgaccgcgccgctgcttcgctcctccgctctgccccaccactgctctcgctcgcggcctccgacgccgccgngcttaaggagtcctcctcctccaccgcggcgcttgccgacgcgctctcgtcccgcgtncgncaccttgacgcggcgcactccagggcggacgccgcgc

SEQ ID NO: 4469 - DNA, 540 bp, Zea mays
  Clone ID: MRT4577_104075C.1
ctcagcggcgggtcttcctcatgagagctataaaacgtatcgtctcgactggagttgcttctcctcttcccgagccggtttgcgaccatggtcaccagtgccgagtaatcgatggaatgccgtgtctgcttctcgcgatggaggagtagcaggccaaccccctataaccagcaatggggatgaagagggaggttcatgagtggagcagcatcaggcgatgagggccccgaatgtgaggtacctgtacttcgaacagacggaggctgcccaggtcgcgttgtgcctcgctgactctcatacggcctcgacgaggaccacgtcgggccgctccgccccagagttgacgccgtcgaggctgccgtcaagggcgtcaatagccccgactaccaccgcttcatagatctgtcgctcgacaacctcgtcttcaaccaccgcaatgtgtacgacacggtgcacgaagtggacaatgacctcccggacgcgctgaatgtggacgtctagcgcatgtctactcgaatggttcatcacaagccggaagag

SEQ ID NO: 4470 - DNA, 399 bp, Zea mays
  Clone ID: MRT4577_104076C.1
aaactgcgggttccagaggctcaggaagttcgttcgtgttcacacagaaacctagttggcccccatccccttttatcacctcacaaagaaactagaagcgtgtcgctaagggtaaggagtatttttatcttgggggcgggccaagaaaaacacaggaaatgggggtacttataaagccctctacaggagaggttgatacgaattccccgggttgatatcccagattagggtgagagaacctagaaagccccaaatgggaacatgttttttattaagcaggatcctatcactttttttcctttttttttaccatagtgggggggatcgcccccttacttgctcaaaggaagaatgacccaaaaaacaccccctattttttggatccattccctgggagaa

SEQ ID NO: 4471 - DNA, 275 bp, Zea mays
  Clone ID: MRT4577_104077C.1
aggctctgaatcaacccttgatagcctgatacatacgcacacagtagcgggaacgggtcgtctatgccatactgacgaccatgtgggcaaaagtatcttaaaacgaccacagactgaaacaagcaccagcgtctaaaacatgatcataggaccatacaagatgctttggtacagcgaacagactgaaatcctcatattatatggacctgtcaagattacaaactgcttacgatcttacccatgagatgactcatgcatatgtgcgtatcaaaaga

SEQ ID NO: 4472 - DNA, 246 bp, Zea mays
  Clone ID: MRT4577_104078C.1
tttgtttttaacataatttacatgatttattttattttgtatgatcactgtcaagaaatcccaacgggtgagaacagatccacgagagagaaaaacgcggttcatgcgttgtgacagctatcacacgggggaacttacaaacccctttggaaatggaacaacaccccccctaacaaagggcggggaccccgaaaccgcaaccccttgagagtgcaagccagcccctccaagaggttataaaggcca

SEQ ID NO: 4473 - DNA, 362 bp, Zea mays
  Clone ID: MRT4577_104079C.1
ctttttgtgagcgcaacaaatgcgttcattattccacaatgctcacttgctcctagtgccattattccacagttcctccgaccagttacttcaatgggcttcgaacaccttgctgtgcatgccttctggcttcatcatgcgcttgcggcgtgcgtctttcatcatccaattttccaattgcatcaacaatccttggctcatctttccattcaatccatcgcttcacatctgcttcatcagttccttccagctctgatccatcttgatgtggtgaaccctgtcgcctacttgcaacaacaggtgcttgcattcaacccacttgctctggcaaacgttgctgcattccaacaacaacaacaatt

SEQ ID NO: 4474 - DNA, 1392 bp, Zea mays
  Clone ID: MRT4577_10407C.1
agtctacatatgaatcctggtacagcttattaaggaaaaacccaggggcgtctgcccgctgtgttctaggttttttatgatgattgtaccagaatatatttatatagcctatatggatgcaaccactaagagtaattaattgctaattttctgcatccatgaagctgtcatctgaattgttctaagccatgtcatattcagagaaatatcaaacccatatgttgttgtttcaaacattaatagtgtaactttcttttttaaagaaaaaacagacactattacgtcatttgttgaacacattataatctagtagggtatttgacactggaccaagattgtttgaggacactattaatgagatatgcaaatgttacatatctcattaatatctgcaaaaaagagatagaagatgacaataagcccatgggagttttcactaggacagggtggaaaaatttggttacaaagtatgaagaaaaaacaggcctaaagctaacaaagaaacaattgaagaataagttggacaacatgaaaaaggagtatacatggttcatggagttcaagaatgcgaccactggtcttggatggaatgaggcaaaacaaactgttgactgctccaaagattggtgggatgaacacctagcaagatgtaacaatccggataaaggtatcaaatgcaaccatgttaggttcagaaaacaaggaccaaaacatcttgatgatctacatatgttgtttgataaaatacatgttagcgggacaagtgcatcatgtcctggagatatttcatctgatgactcaagtgatgatgtgctagagatagaaagaactccagaaaatgatgaagtcaaagtggttgtttcgaaaagatccaaaccagtgaaaaggaaacgcaaggcctcatgtactgctgctgaggagaaggaagagaagagtccattctttcgactatataagaacacatgtttgaagatagaaacaacagcagagaagatatccacaagtgttgaagcatcatcaacacatccaacaagccaagtgcctagcattgcagagactatgaagatggtgaaagattgtggggttaaagagaaaatagctctaatgcacacaactacatttttgattgtgaagcctgaatttagagaggtcttctgcatgctggaaacaaatgaaggaaggtttgacttacttgagagggagcatgcaaaggaaatgatgaggcacatgtagaagattttgaattatttatttatattaatgtgttgtgagaactatttgtttgcttgctatgtaagcaccatttggaatgatgatattgtgtccataatcattgttttctgtgcccaaaaaaaaaaaaaaaaaaaaaaaaaaaaaaaaaaaaaaaaaaaa

SEQ ID NO: 4475 - DNA, 417 bp, Zea mays
  unsure (1)..(417): unsure at all n locations
  Clone ID: MRT4577_104080C.1
cactttacacamaacaacgctgtaacamgnaatcacaaccacacataaaggctaccaaccacgcacatattcataccwcactctctcaatatacacaccatacaatcatccacaactcatacaaaacccccagcaacaatcgccactaccaccatctcatacacactcacacatacgacataamatgctagatatccaacmgtgaatcaccactagtctcycmctcgactacttgtccactcctmgagaaaatcgtgcagcacacaccatacaccgttcacaacactgctctcaagmacccaccgctaccacaacccccctagatactcwammmcamaaacacaaaaagsagaacactcgcaaagccmaatcgatgctctcaggcrttaaagcaccccatcttaacggacacmtcac

SEQ ID NO: 4476 - DNA, 422 bp, Zea mays
  unsure (1)..(422): unsure at all n locations
  Clone ID: MRT4577_104081C.1
gcgggacaagagccttctggctgaagaacaagaataagagcaagagcgtgcaaaangacntgcgggccctggaccagggggggcaggccaaacctggctctaccaanaccggcggcaagaagaataaggggggggagaatgcccgcgagaaggagcttaatggtctggtcaagggtggcggcaggcaggccaagggccctggtgggggtggtcccaangcaatattggggggggtcttcaagggtgggcaggggcagaaggggtttaaggggaaattctctcatgacctggatggccanagggagggtggaaaggttggtatctatacagacaaggggggtggagaaaccatggagggctgggatcaggaaactcttgagaagggtggtggatccaaaaagaggggggatcaggaaaacaaa

SEQ ID NO: 4477 - DNA, 395 bp, Zea mays
  Clone ID: MRT4577_104082C.1
ctgtgcggcgctcaggcggcggtcgggattgctacccgtggcgcgtgccagtgccgtccgtttctgtattgtgcacggactactccgtatggtggtgggcgcaggaacgacctgccgccgactgcgacgcgactagctatgcgcgcacgcaaggaggattatgatggagatgaaggctgccgtcgacggtggccacgtatgtggccatggctccatgccctaggaggattggagcgacgaggacgacgagccgcgaaccctcctcggagaggcagaggacacggccttccagccagctccacacgggcgccgccaaaactgctctttcttctttgagcggtgtatgcatgtaaattcttatggagtgtataaaaaaaaaaaaaaaaaggccccta

SEQ ID NO: 4478 - DNA, 266 bp, Zea mays
  Clone ID: MRT4577_104083C.1
tctgccggcaatgctgtttggcggcttctcaacggcatcccggccaactacatcgccggggttgactaccgctccttcgtccagtatactaattaacccgaccgggcggcgggcgggcgcccactgcatgagctagctagatcggcaccttgtgacgcatcgacgaaatatagtgaagtgagtgacggtcaggctgcgctgcaccgcggactgtggaacttaaacctaattcggctgttgtgtggtcgagtgagtcttgaagatgc

SEQ ID NO: 4479 - DNA, 359 bp, Zea mays
  Clone ID: MRT4577_104084C.1
cccacgcgttttgttatttaatgggttctggatgctcctaatccttttgtagagtaaactttagtctatagactaaaggaaacacacattccctatgtgaacagaaccggattagaaattttctgtcgttacgatactggtcaaatcccttctttgcgatgcctcgtgttcgttaagcgactactaatattttttgctttatggggtaagcaattattatttcgtactaaaacagacttttttagattaggacggtgcattaaatgacagtgtatgtatatgtgatgaaccaggggcatatggtctatctggaacctggggaaaacattttaatcacatgatgaggtgagggccttttt

SEQ ID NO: 4480 - DNA, 402 bp, Zea mays
  Clone ID: MRT4577_104085C.1
cccacgcgtccggatgctattcaaataggtacgatcttgatatatcttattggaaggtactacatactacatcatattatacatttaatcttattttctttagcctagtaggcctcatgttttagtttcgtacagggtctcgaattttctcgggacggccctggtaccaggcggtggtggcgcggggttggtgcagcgacgacctctttctcttctccaaggcacgcaacagtgatggtaagtcactcgggctcgggccacaaatgggaggaagcgaggagtcaaggagggaacatggtggagaatggaagtcgatgagaagggaagggacgccgcctcggcagtaggggcaggcgcctaccttggcatgacgacggaagccacaatggatggtgtcgcttg

SEQ ID NO: 4481 - DNA, 352 bp, Zea mays
  Clone ID: MRT4577_104086C.1
ccaaccaggcagaacctagtttcaaacataaatatacaatgactacccaatcgagctccataataatcgtcgaaacttaaccaaaaaaaaactatatataatgtgcacgtgaagaatcttgcccgtgctggtcaacgttgccgttctgcaaatgccctactcctacatcctagaaatcgaaatcgtcatcaaggccattgtagccttctgcgccatcgtcgtcgtatcccccatagttgtaattgtaaccgtcatcgaccgtctcaccggcagcattgtccggcccaaacagtgcgtcgaactccatctcttcttcactgtttgcgctgccaacttcatctttagtcttgtc

SEQ ID NO: 4482 - DNA, 499 bp, Zea mays
  Clone ID: MRT4577_104087C.1
atatcctcagtcgcgccgcctcggccaccagacgccttctggctctgcattcttcctcctcccgccacttcttccacgactagatgacgaatcgcaccggaaggcatcactcatgctcccccagggaaccaggaatggtgccagattacttaaacaaccaggaagatggatgtctcccagcactcaaatactcctgcagcagtcaagggccaagtttgcctggtctatgtgaggaggtggcatctgccgacgcaagctcatgcctatacggtagaggccgaaggaccctactctgtgatcgctggtagagcctctgctggactacctgctatccgccgcctgcgacattcctgcgacccatgtgtgcttgcatgttgagaagaagcacctggatctgttgtgatcacctctgcagacctgaaccaatttgcctttttatctaatggcacgacaatggcatatcgatctgaagcgaccactatgtactcatgaaacagtt

SEQ ID NO: 4483 - DNA, 494 bp, Zea mays
  Clone ID: MRT4577_104088C.1
gttctagatcgtgttcggccgcccttttttttttttttttttttttacacaaggatgatgatgatatctgattgaagtcttcgatcgaacacatgggtctcgcttctttactaattgacctccttagatttctcctcctcgatcgcacacaagaacccacaatattaacatcaactagttaacgtcaggtgagaaacaagcatcaacaatggtctgacagcaacgacacacaccaataatttaatccgactacgatttccaattccgctactacgtcgagcaccttgcgggcgtcacaccgagctatcacctaccttgacacctaattgctctgcaggggctgctgccaaatcgacggaaaggtcgcgaaggtgggaaatccggtcgagctcgtgcggatagggtgggtctctgggttgtgctcggagctcgacgaccagagaagagctggataaagcacgacgccactgctatgctgtcagcaggggcaagaa

SEQ ID NO: 4484 - DNA, 124 bp, Zea mays
  Clone ID: MRT4577_104089C.1
gctacagttgttgtctatattcgcggaattaactcgggcgatttgtatgtaacgggttcagccctcgtcatcgataaatatagaggaatacgactgattaaacattatcaatcgcattaataat

SEQ ID NO: 4485 - DNA, 449 bp, Zea mays
  Clone ID: MRT4577_10408C.1
ggtacacgcggccccttctcgagtttttttttttttttttttttttttttttttttttttttttttttttttttttttttttttttttttttttttttttttttttttttttttttttttttttttttttttttttttaccccccccagagggggtttttaaaacattggggggaaaaaacccaaaagcgggggccccaaattgttaaaaaccaaaaggggcaaaaaagggcccccggaacaggggccccgccccttttgggggacccaaaatggggtgcccaacccgggggaaaaggacaaaaaacacccggaggggcccgctacccccctaatggggggcgccccgggggggaaaaggttttaacctgggcccccaaagaaccccaagggaaaagtgtcgcagaaattcccccgggttttgtagagcttgtggccccctttgccaaa

SEQ ID NO: 4486 - DNA, 492 bp, Zea mays
  Clone ID: MRT4577_104090C.1
gccggccgggctgcgccccacccctttggccgcccctctctctcttcctctcttccactcttgcagccgccccaatccctctccttattccccaagtgattgcagcgccacccctcaaccctagccgcccccacctcatcctctccaaggtggagcctccccgcttggtgtccgtcgtgtgggtgcgagtcttccatgggagtttggagggaggaagaaggaagaaaacgaggaacccaaggtggtggatttctggatcgtacttagggatttgcccgaacttccggtaaaggtactttatacatgctgggaatgaggggagtagcagcatgtccactttcactctcacaataacgctgcccaggcgcaaccatgatttaattagaaacttattgtcaaaggaagattgtttttttaactagtcatgtgcactagttaattctgatcatgtcgtatgtttaacttcaaaaaaaaaaaaaaaaaaggccccta

SEQ ID NO: 4487 - DNA, 525 bp, Zea mays
  Clone ID: MRT4577_104091C.1
cggccttagcgtgaaacaaaaacaaagaacaaaactaaaaaaaataataaaaaaaaaaaaaaaaaaaaaaaaaaaaaaaaaaatatttttaaaaaaaaaataaaaaaaaaaaaaaaaaatattttttcccttggcccgccccccccttgggccaatttttgcaaatttccttccccctgggggccgttcgagcttccttttagggggcccaattccccctttggggggccgttttacatttcccgggccgaggttttacaccgttgggtctggtaaaaccctttggttccccacctaaaagcccttgccgcccatccctttttcgccggttggctttatggctgggaggccccccccgaccgcccttcccccttttccccaccctggtgggggtttgcccccccctgcccgcccctttacccccgggggggtggggtttccccccttggacctttcttttgccgggccctacgcccctcctcttgaggtttttcccttttttttcctcccgttttccgtttttcc

SEQ ID NO: 4488 - DNA, 294 bp, Zea mays
  Clone ID: MRT4577_104092C.1
gaggagggctacatggttaatttaagaggggaattttattatattttgggctacaatccctgtttcacagggcttgaataaggggggagccaaagagcagccgttttttttacagaagcctccccataacaaaaataatatttagaatgcagactaacatttccaggttgaacaaccaattttcccttccatataaaaacaaaaacttggttattaccctggttaaattcccctggggggtccattcaacttgaaacccgcttttatttccaacgagttttttaagggggccca

SEQ ID NO: 4489 - DNA, 553 bp, Zea mays
  Clone ID: MRT4577_104093C.1
acccctttggccgcccctcccctctctcttccactcttgcagccgccccaatccctctccttcttgcccaagtgattgcagcgccacccctcaaccctagccccccccccacctcttcctcatcaaggtggagcctccccgcttggggtccgtcgtgtgggtgcgagtcttccatgggagtttggagggaggaagaaggaagaaaagaagggggaaaggaggaacctaaggtggtggactccccgatcgtacttagggatttgcccgaacttccggtaaaggtacttgatacatgttgggaatgaggggagtagcagcacgtccactttcactctcacaataacgctgcccaggcgcagccatgatttaattagaaacttattgtcaaaggaagttttttaactagtcgtgcgcactagttaattcacttcatgtcgtatgtttaacttctctttgctagccaattaataatacttagtatgtttttgtcatgatatatgtttatacacggttgtcccctcatttatgcaattttgcaagggggatgctgccg

SEQ ID NO: 4490 - DNA, 551 bp, Zea mays
  Clone ID: MRT4577_104094C.1
ctcccctattcccctttggttgcagccgccaccccctcccctattcccctttgtggccgccaccccctctctctctctctccctctctttcctccccaagtgattgcagcaccacccctcaaccctagccgcccccccctcctcctctccatggtgcagcctccccgcttggtaccccgtcgtgtgggtgcgagtcttccattggagtttggagggaggaagaaggaagaaaggaaggaggaaaggaggaacccaaggtggtggacttccggatcgtacttagggatttgcccgaacttccggtaaaggtacttgatacatgttgggaatgaggggagtagcagcacgtccactttcactctcacaataacgctgcccaggcgcagccatgatttaattagaaacttattgtcaaaggaagtttgttttttactagtcgtacgcactagttaattcagttcatgtcgtatgtttaatttctctttgcaagccgcttaataatacttagtatgtatttgtcatgatatatgtttatacactgttgcccccat

SEQ ID NO: 4491 - DNA, 399 bp, Zea mays
  unsure (1)..(399): unsure at all n locations
  Clone ID: MRT4577_104095C.1
cccttatgccgccccccctctctcttcctctcttccctcttgcagccgccccaatctgtctccttcttccccaagtgattgcagcgccacccctcaaccctagccccccccccacctcttcctctcaaggtggagcctccccgcttggtgtccgtcgtgtgggtgcgagtcttccatgggagtttggagagaggaagaaggaagaaaagaaggagtaganaggaacccaaggtggtggacttccggatcgtacttagggatttgcccaaacttccggtcaaggtacttgatacatgttgggaatgaggggagtagcagcacgttcactttcactctcacaatagcgctgcccatgcgcagacatgatttagtggggatttatcggaaaggaagtttttt

SEQ ID NO: 4492 - DNA, 472 bp, Zea mays
  Clone ID: MRT4577_104096C.1
ggggggggaaaatatttaacccgggttttttttggggggggggggggggggcccccacggggaataaaaaacgggggagggacagggggggggaaaacccaagggaaatgggggctggcccccccaaatttcccccaaatgcatgcatgttgggggggaaacgggggcccctttttaaataaagaaaaaacatttaaccccttaataagggggaagcaatgaccgggggcaatcattattcctggacaaaggagcggtagtcaacctcggggatttaattggccgggaaaacttttttggccaccaattgcctgccggactttttggggatccccatggaaaaggggccaccgaccgggcggggggggcccaccctccaaagggggccccaggacttgggcatgggctcccaagggccggagttgctttgaatgaagtccccctgcaccacgtggccccccttgtttttggg

SEQ ID NO: 4493 - DNA, 798 bp, Zea mays
  Clone ID: MRT4577_104097C.1
tgggaccctcgaggccggccgggcaccgcctaccgcaatggaagccgcaggcggcggagccgaggatgagcaggtgatgagcgaggtgcacttgggctgcccgccgcacttctctggcctcctcgtctcccatttcagcttctcctcacggcccctagggccatatggacacaaaggaggcggcggcggcggcggcgggagcgagctagtcgcagcaactagcggttctgtcgccgtggatgaggatggggatctcgttctggaccggaggagaagaaacaaatatgctagaggtgaccgccatctgttcactattcagcatggtgttaccagctcgcttaagagcgttgggcttcagccgtgcaggtttggaaagcggccttactattatctgactttattctgcacgaaagcttttcatcgccaaactttgatggtgttactgccattgagataggtgctggaacaggtttggtaggtttagcactagctcgagttgctagaaggatttttgttacaggttcgatgaagctaaagtctgtgtacgagaactggactggaaaatggcatggcctccacctgtgggtacatatgacccttctgatccaagtcggtatttatggtctgcaagtgaagttgaggaggctgagaaagcaacagtcctgtttgctgcagatgttatttacagtgatgatctcacaaattgttcttcaacacggtgaagattgatgtcgcggtgcgtgctatacttggccctggcaccagtgtaagtttttttttttttttcccccccccccc

SEQ ID NO: 4494 - DNA, 1065 bp, Zea mays
  Clone ID: MRT4577_104098C.1
ggacacaaaggaggcggcggcggcggcggcgggagcgagctagtcgcagcaactagcggttctggtgattcccctgacgcagtcgccgtggatgaggatggggatctcgttctggaccggaggagaagaaacaaatatgctagaggtgaccgccatctgttcactattcagcatggtgttaccagctcgcttaagagcgttgggcttcagccgtgcaggtttggaaagcggccttactattatctgactttattctgcacgaaagcttttcatcgccaaactttgatggtgttactgccattgagataggtgctggaacaggtttggtaggtttagcactagctcgagttgctagaaggatttttgttacagatagaggcactgatatccttgataattgcttggctaatctccatatcaactctggtatgctaaggttcgatgaagctaaagtctgtgtacgagaactggactggaaaatggcatggcctccacctgtgggtacatatgacccttctgatccaagtcggtatttatggtctgcaagtgaagttgaggaggctgagaaagcaacagtcctgtttgctgcagatgttatttacagtgatgatctcacaaatttgttcttcaacacggtgaagaaattgatgtcggtcggtgctaagaaggtgctatacttggccctggagaagagatacaacttcagtgtagacgaactagatgtcgtggccaatggttacacgcacttccgaagtttcttcacagcccaagatgagcacggtgatccgagcaacagatctggaccaggttttgttggaaagcagatagaccctgcagagattcctcagtacatcagagagtatgagaggggcaaggatttagagatgtggatgatcatgtacagtccggaggagaaacagcacagtaactctacaaaaaccgtcttttccttctaggaggacgaagagagcaatgagtgcttggtgcaaaaagacgaattccgctaaaaagacggagatcccctcccacgggcatccatactatcttggacaaaaatgaaaactg

SEQ ID NO: 4495 - DNA, 349 bp, Zea mays
  Clone ID: MRT4577_104099C.1
acgccacgcgtgcgaagagaggagggatgcatcacccaatagaggctcaagtagtctgaccacttaatagaaacgggggaccactagagactgctcactcttttttcttgatgtctggaactaggtagggggataaaacttacaatgagtgttgccttcgtatggccgtgagatgattgtatatacctcctgctgcatatagctcgcgtcaatggcatcgcagtatttggaacgtcgcctgactagcttaaggtggcgtatgcacagacatctaataaaaagcagctactgtcttattactgaatgacacagaagcttttcctccagatcgcttgtcacaaggatattc

SEQ ID NO: 4496 - DNA, 140 bp, Zea mays
  Clone ID: MRT4577_10409C.1
tttggttttttttttacgaaagaccccgttttcctacacagcaaataaacgacatgaaaaatccacaggggaaagaaccacacttcttagagagtacatgctgagagtccctgggggacgatcaagttcatgatgaaaaa

SEQ ID NO: 4497 - DNA, 411 bp, Zea mays
  Clone ID: MRT4577_1040C.1
agagacctgctagcatgcctgcacgcctactctagcagatcccatatgggaactccctttccctttcttcaagatatcacgctgcacaaccgcgcgtatatgaatcggccctatacgtttccccattacgcctatgctgaagccaaaggcactgagatccgcatctacagcggaattccaattacacattatacagatgcatcgtggcttatcagttcatatctgaactggcattctctagcgtgctattatgcctatcctgaagccaaaggaaatgagatcggactgcctggcggactagcaattccacattttgcatacctatggaagcacaactgtacacatacgactcggaacgatacgtgaccttattacggctatgctgaatccaaaggaaatgatatcggaatt

SEQ ID NO: 4498 - DNA, 266 bp, Zea mays
  Clone ID: MRT4577_104100C.1
attggatgggggttttttttttttgttggaaaggctaccccccttttctaatatcacttaaataacaattttgagctttaacaagcaatctaattttgggactttttttttttaaacaaacctcaaaaaaaaatatttcatccggacatccatggggttttatataatatttaacaaaaacttgtccccataataggtaactaatcttgccggggaccaaacttttgtttttttttaaaccatgataaaattaccccactggggtt

SEQ ID NO: 4499 - DNA, 416 bp, Zea mays
  Clone ID: MRT4577_104101C.1
aacaaatatgtagtagctagtttgataagttattagttacaagttacaaagtacaaatacttacaaaatggtactgatagaactgggcgagggagtacacacaataaaatataattacaaattactacaggtcgtacaggggtttgtattcagcagaagagccgagctccataagctgtggacatgaagtggtggtggaagtgatcgacggccttgtgtaggaacctagtagcaggcccatagcaatggccctgtatgcagattctgatggatggaagccatcccatgatccatacttctctggattatcgcacagcttagggcttgttcggttattcctacgccacatggattggacgggattggaaaattttagtagacattttgacttgtatggatttgaacccacccaatcc

SEQ ID NO: 4500 - DNA, 646 bp, Zea mays
  Clone ID: MRT4577_104102C.1
gggaaaggttcacggatcgctcgcgcgtgccggtaaggtcaagtcgcaaacccccaaggttgaaccccaagagaagaagaagaaggtcactggtcgtgccaagaaacgtctcatcttcaactctcgtttcgttaacgttacctccgctcccggaggcaaggttcaacgcaacaagcaacctcaaggaaagtccggttaaacgaaccaacaaggagagaaaagaagaatcaatccagagaaaacacgaaaatcccagcagaaacagacttttattcagaattacattactcttatcactctcgccctttcctcccttcccctatcttcgcctttactcgttctactccctatcaatcctacttccagctcccaacgtatctttcctgcggtggatcagaggttattagtagtgagaggttggaagttttactcgggacgagcaggtcacaatttagtacgaaggaaggtcgtctaggtggatcaggcgctgtggaaggttatgtgaattctgtatttgtgtgtggaacgttggaaatgttcgtgttaactctctcgaaaggttttaattttctactttttacatatggacgttttaatctttctttttattgttggttgagaaatgcaaatggggtttttgtaaaag

SEQ ID NO: 4501 - DNA, 150 bp, Zea mays
  Clone ID: MRT4577_104103C.1
ctaaaaagcttctgtttttataacataacaagatgacatcccaagatgacagatgactctctatacttgatggggtgggcacgggatcttacatagctaccaaccttctaaacctcacgtgtgagagaactgtttacaggtcacactgca

SEQ ID NO: 4502 - DNA, 356 bp, Zea mays
  Clone ID: MRT4577_104104C.1
cagaggacatcttggattttaacactgaatttactctttaatcacttatataattgatggcgggtaacggagtagttgaataggttagaccatgtatgattgatctattcacttcgatgacgatccttcacccaacttgtatggctacctacgcctgcttactgcttacacagggctagcgctcatgctggagctcactgagaccagggctggatgctttttcacaaatggatgggctgcggatgcctttcagttgtagcacaagtcttccacctgaactgacgattttctgacatgatacgcgtttgatctcagctgctgcttcatgcgagattactactatttatgtgtatctc

SEQ ID NO: 4503 - DNA, 368 bp, Zea mays
  unsure (1)..(368): unsure at all n locations
  Clone ID: MRT4577_104105C.1
cagacacattacacccccacctatttttttaatctaacaccaaccaagcggcgcaaacacaattataatggggcaganaacaaanncacactcactaaacaaaacacactcaacatcaaacttcacctcaccacctccagctccacctcttcaaccaacgataaaccaaagcccatcaatcagaacactaacattatcactaagcacaataataatatccaccaaacacataaactcaaaacaaagctacccaaccacaatgactaacaccacactcacatcaccgtcctcttcacactcccccacagctacacaatcacaccaccacaaaaaatccaacaaacctcactttcttcacacacacaacc

SEQ ID NO: 4504 - DNA, 625 bp, Zea mays
  unsure (1)..(625): unsure at all n locations
  Clone ID: MRT4577_104106C.1
cattgggtacctcgaggccggccggggactcgctaggctgtatagctgcttctacgtgtaactgtacgagctgagcacagagaatatattaaatgatattgttcgattgctccatgtgatgggagacatggttncaacacagatgacaccgcgacagcgcccagcggaaaactattagcctacgtcgcccagcgtgcttctcccaccatcttccaggccttctcccgcacatgaccagtcgaactaataatgacgattttgaccgaggctaccacacatgcatcccgaggttgcatggctgatatatatgaacactctcacatttttatttcagcacaacgaatgctgaggaaactgtcaataaggcaatgctcgtgtacgtactgcaatagtgtggagtaattaggactagtgatcgtaacctacgcatgaaggggatactcctgatacgccatggcatgttatctcaaaaacaaaataaaaaaaagcagtcctaccagaccttccttctattaccatcaggtgaggcgaaattgttgtgttgacctgaatctgctacatacactgtctcccgtcgtgatacagaatccgatcaaaatgcactcgacataccagactaaaatat

SEQ ID NO: 4505 - DNA, 186 bp, Zea mays
  Clone ID: MRT4577_104107C.1
ttaagaggatgaaaacttattcctgttctcccacgactaattgtgctccttctatacgaggtactctatttacgggtggtgatgaataatgaagctggggcctgaggaaagttgtgttcccgaactggtggtggtttcctgacggtttttaacccttgaagctactgcaacccgggcttttgctac

SEQ ID NO: 4506 - DNA, 476 bp, Zea mays
  Clone ID: MRT4577_104108C.1
acgctctccttccgctcgaggagaatagaatatatgacggtccgtgctcgtctgtcgagaatctctctcacctgcccgaagcaagcgagcggggcatcgcgccatgaatgatcggaggagacgccatttatctgcacttgcacacacgcggtcggccgaaggtggaagaataagatggccctgtgctcgtgctgctgtcggagcctgtagctgctgagctcggacctcctcccgcccataggcgtgtgcctccgtcactgctgctgctgcatggagctctggatcagcgtgctgctcaccatcctcagctacctccccggcgtactctacaccgtgtacgacatctgctccgtcgaccctcaccgccatctagacaacgacgactacgtctacgtcccatgacaggatggaccggtgcccgtggcgctctgatccgcgtatatgctgctacctccgtcctctgcgctgagtgcatc

SEQ ID NO: 4507 - DNA, 1302 bp, Zea mays
  Clone ID: MRT4577_104109C.1
atgccgctgaaaaaagcttcagcaacaggggctgccactctgcagccgctggaccccaatcaggacgtcctttcccttagggaggcccgaagccagaagaggaaggctgctagtccaacgcctccggaggacgacttggatcaggagatccaaaacctggagatccttcagcagcaggtacaacgaaagaaggagaagatggctcgtctaactgatcttcagagacagatagatgaagcttcggaagaggttcgtcatcttgttcaagatgatcataaccgaaggcctccacgcagagagcttcatcaagaaggcttctacaatgaggatgattggtatgaggatttccatcatggaaattttgctttcgatgatgcttctcctctctcaacagaattgcaggctacaccatggccccagtcttacaagccaccccaactccccatgtacgatggtcatacagacccgaagcaattcttgatgagctatgaagcaaccatatcttcgtatggtggcaatactgcagtcatggcaaaatcttttgtcatggccgtcaagagcgttgctcagacctggtactcctctcttcggccagggacaatcacttcctggcagaagttgaaggatatgttgataactagcttccaagggtttcagacgaagccagtcactgctcaagctctattccagtgtacccaggaccacgaagaatacctccaggcgtatgtccgaaggtttctgcgtctgagggcacaggcgccaacagtgcccaatgaaattgtcattgaggccatgattaaggggcttcggccgggaccttcagcgcaatactttgccaggaagccaccacaaactttggagaagctgcttcagaagatggacgaatatattcgagctaacaatgacttccgccaaagaagggaggaagcattcaggttctctgaaatgaccaggggcttcggaggaagatttcacccgaggcacgttaggtcaattcataactctactcaaagtgatgatcgagggagccagcagcaaaggccacaatactcttcacaagcttcggggcagcagcaaagttcttttcggccgccagcgccaaggggcagaggcgccaggggcttcgggggaaggtttggagatcagccaagaaaaatttactgcctattctatggattcaacataacattttctctgggatgcacgaagctctttaacatttatttccaaatgatcggcccattgatcactaagctcttgttttgtctcttcaagtatacgttcttctttagctctagctag

SEQ ID NO: 4508 - DNA, 393 bp, Zea mays
  Clone ID: MRT4577_10410C.1
gtgctggcgcttgttgggggcgccgtgtgcttttctggctgtgggtgtgggtgccagacgcgttcgttttttctccctgctccgttgtttctggcgcctttgttcttttttttttcggaccagctgcctcagtggtggggggggggcgttctgtcgccggcgttctagctcgtgccagcgcttgcggtgctggggtgtcggcagcctctgcagcccgtgcctgggcctgcgtgtcgcgttcttgccgtcccagtgtagccccgcggcgacgccctccggttctacccgctctcagccgcttcggtgtggtgatccctgccgattacttgcgtcgggcctgttttgcgtgtccccgcgtcgttctgggtggtgctgctgtctttcctgcaccac

SEQ ID NO: 4509 - DNA, 400 bp, Zea mays
  unsure (1)..(400): unsure at all n locations
  Clone ID: MRT4577_104110C.1
acaccccagaaggccgnccacncccccgttttaggcgcgccgnncgccgggacaggagggagagnagagcaccaggangccggcgacgccgacgancancggngcccnccnggggcagggcacccaganggacgcaaacgcncnccgcaagcgccccnacangcgccanccaagggagcacnngnnggggangggncacggngcagggggggggaaccagcnggnaaagnnngangagaagcncaaggaggaccncgacaagangcnggagcgcgccaggccagccaacgagcagcgcnacanngacgangangaanagangcccagannnannngccagcgaccaggannnnnnnngcaacagggggncagnacacanggccaggacgganganccccc

SEQ ID NO: 4510 - DNA, 1518 bp, Zea mays
  Clone ID: MRT4577_104111C.1
atgccgccgaaaaaagcttcagcgacaggggctggtactttacagccgctggatcccaatcaggacgtcctttctcttagagaggcccgaagccagaagaggaaagttgttagtccaacacctccggaggatgacttggatcaagaaatccaaaatctggagatccttcaacaacaggtgcagcgcaagaaggagaagatggctcgtctagccgatcttcagagacagatagacgaagcttctgaagaggttcgccatcttgttcaagatgatcagagccgaaggactccacgcagagagctccatcaggaaggcttccacaatgaggacgactggtatgaagatttccatcatggaaactttgcttttgatgatgcttctcccctctcaacagaattgcaggctacaccatggccccagtcttacaagccaccccagttacccatgtatgaaggtcatacagacccgaagcaattcttgatgagctacgaggcaaccatatcttcgtatggtggcaatactgcagtcatggcaaaatcctttgtcatggccgtcaagagtgttgctcagacctggtactcctcccttcggccagggacaatcacttcttggcagaagttgaaggatatgttgataactagcttccaagggtttcagacgaagccagtcactgctcaagctttatttcagtgtacccaggaccacgaagaatacctccaggcgtacgtccgaaggtttctgcgtctgagggcacaagcgccaacagtgcccaatgaaattgtcattgaggccatgattaaagggcttcggccgggaccttcagcgcagtactttgccaggaagccaccacaaacattggagaaactgctccagaagatggatgaatacattcgagctgacaatgactttcgccaaagaagggaggaagcattcaggttctctgaaatgaacaggggcttcggaggaagatttcacctgaggcatgttaggtcaattcataactctgctcaaactgacgatcgagggagtcagcagcaaaggccacaatactcttcacaagcttcgggccagcagcaaagttcttttcggccaccagcgccaaggggcagaggcgccaggggcttcgggggaaggtttggagaccagccaagaaaaatttattgcctattctgtggtgaagacaagggccataccaccaggatgtgccatgttaccatccagaaacagaaggagatagcagaagcagcagcgcaacaaagtcagccgaagcaggtcatgcacactgcttcgtatcactcgccttatattccagaatacgtaggcaaccactctgcagcttctgttgcttcggcgagccaaccccaagcatcttggcagcagcctccaccgccaccgccgatccagcgaggacagcagctagaagggagtcagcacagtcatcttcagcgggatttcagagagcagtctgaagctcgcacagtcaacagcactgtgccagagtcgaagcatatttattga

SEQ ID NO: 4511 - DNA, 270 bp, Zea mays
  Clone ID: MRT4577_104112C.1
cggtccgtatcaccacgatcggagcagtgtagtactcctgggcgtcatctgcataatgccgttgtatcagtcctgtgatgccgagcaagtacgtactgtgctatagtaagctagcattatggggagcatcagctttcacagcatgacgaaagcacaggttagctgatgtgatcacatttggttcgtcatagtgacgtacggtatcgcaggcgtcagtgtcgcggccacctacgtgatctaagcatactactatctcacgtgcttttggtt

SEQ ID NO: 4512 - DNA, 110 bp, Zea mays
  unsure (1)..(110): unsure at all n locations
  Clone ID: MRT4577_104113C.1
agtaaaactacagagtgatctgtccgttccattcacgcgataacttaacaagatgggcatccgaacaacacttatacaagcacgattagtagacattnaaagcttttaac

SEQ ID NO: 4513 - DNA, 406 bp, Zea mays
  Clone ID: MRT4577_104114C.1
attcggctcgagagaccatcgaatctttttatgatgagtatgaggactctactgtgcgacttccattggaagcgtttacgcgcccaactacgttcgataacgtctgataggacgacgcgattgattcgactgaaccttgtaaggaggtcgagatggaaatggatcaagaggagatgcaactcgatgaagaaggaatgcgggcagacgagattgaggagaatgatgggcagcacaagatatcttgccgcgctatgactatgtacctatgatgattgtcaataactacaaaagagcctgaggacaggattcctgcatagagagacccaactaattttgttgtctgctcaataactgaggaacttaatcttatcaggtagatagcggaacacatgcgcatctgactcat

SEQ ID NO: 4514 - DNA, 470 bp, Zea mays
  Clone ID: MRT4577_104115C.1
aaaaaaaaaaaaaacgttttttttttgggccccccaagcaaggattttttgggggcaattcaaaaaaaaaagcgaaaaaaattacaaacccagcgcccctttttggacccacaaaaaccccaaaggggggggcttttaaagaaaaaaacaccccatcccgaaattcacccgaataatgcccggtttaaaccccccccttaactccccccccgggaaaaaaaaaaacccacgggcccctggcccactctaaaccccaaagccaaaaattaagcgttcttttaaagggttgccaacctccccccggggaaaccacccccggggaagggagggaaatggccccccggggggcttgaaaaccccccttgcgggggggggagaacccaaggggccagctttgtcaaaaccaaagccttgtttttagcggggaaaccaacggggggaacaagggggcccccccggggaaaaggggg

SEQ ID NO: 4515 - DNA, 436 bp, Zea mays
  Clone ID: MRT4577_104116C.1
gggagccctacaaagcaaaaatttctgagtacacaaaaaaccctcccacaaaaaaaaaaaaggttattacccccaaaagaaagaaacactgttatctgggagaaaaggaaggggtaaaaaaaaaacaaaccctccctaaacaagggagtccaaaactacccccactacaagtaccaaagggggcggtagggtaaacagggcaaaaactacaaaaatgacttgcaacaaaccccgcccccaaaaaagaccgcccaaggggggggtacaaaactgacccaaaagggggggacaaaaatgtcttcagagggggatggaaacaaaacccaataccgggaaatattttggggctacagggaaagccaacccaaaaccatcgaatgcaggctttgagaacacttggaaacccaaaggaaatgtttttttgagcccaaatgca

SEQ ID NO: 4516 - DNA, 433 bp, Zea mays
  Clone ID: MRT4577_104117C.1
agacccgattacccggaacggctaaaacatcaacatcaatttggtaaggccaacaggaaacaagacaaacagggggcagcagtttcacattgaacagggggttcaagggccaaatagatcaaaacccccagggggaaacaaacgggcccgggggggccccaggggcggcttattcaaagcaccccccgggggataccaaaggggggaaaactgcaacacaaaacaaaaggaattggttggggaaaaattcttcaaaaaggcaaaggtccctaaaacctttgaccccaagttgggcaccaggcccttttgggcgaacaaaaactgcccaaaaaaaagaaggggctgctttgcatggtcaactatggtggtcaactcccccgccgcggtgaacaaaagcctatcaaccaccctggggggggggaccttctggttt

SEQ ID NO: 4517 - DNA, 892 bp, Zea mays
  Clone ID: MRT4577_104118C.1
ttttccctttccgaagcttctcgaccccccatcccctccctgacatggccgacaacgcgaaggccgcggcggcgcatgcgaggccggagtcgtcgcaggaggaggaggaggactggaaggaggccgagggggacgtcgccgaagtcgaccgcgccgccaccaatggcgccggcgaggggggcgtgcccacagacaggccgatccgggtctacgctgacggcatctacgacctcttccacttcggccatgccatgccactcaatggggacggccatcaaggagaggatccaggagaggctcatcaaggcacaatccagcgactttggcagcctcctacagtacgacagctacgattctgatgaagccaaagaaaacgacgaggacgaagacgaactctttgaagacgtcaaggaatagcacatccgtacatatacaatggttttgtagctgcaaattgtgttgtgagtcagttgcctctctctggttggtgatctttatatatggtctcaaaggtaggtcaggttgcaatgtttgtagctgctcttggtgtttgttcaggcaacgcatggttgtaaaagctgtggaaagacttgtgcagtcaaggatacagattccgatggttacctttgggttagaacatatacggctgtaaaattggaagtcgaggtggttaaaactctgaaatcttgtctgttttccttcccctgacgtgcgtgttgcattcagcatctcagcggagctcctggtgtgtagtctgtggaggtcaccgcttctgccatcgaggttgccgagagcaggattctcagccgtttccagcacgaggaatgttttggaattattcttgtgttgatcgttgaatgaagtaatgaacaaataaaagcgtcttggattc

SEQ ID NO: 4518 - DNA, 319 bp, Zea mays
  unsure (1)..(319): unsure at all n locations
  Clone ID: MRT4577_104119C.1
gcccccgcaggcaacggcaaggctggcacttcgtccggcggcggggagggggcggagccgtggggcgggaagagggacgcgctagggtggctggagtggtgccgnggttggatggncattgtgggggagttncttttncagcgnattgtcgncagccatctggncaacccggtggggttgngcnngtttgatggcgtttttattgtngtnantggggggatnaggggttttggggttgagattgtaaggtantttgtttttgttggggnacatgttgttatgggtgtgtggagtattatggtggtgtattagttgtttt

SEQ ID NO: 4519 - DNA, 666 bp, Zea mays
  Clone ID: MRT4577_10411C.1
gttctgaaatccgatctccccgagaccatgcgcaactccgccgccgcccagccctcttctcccgccgccacgtacgtctcaggcgccgcctacgtcgcgcccgcctcctccgccgccatgtacggctcaagcgcctcctacgtcccgcccgccgcttccgcccccggcggcggcggataatctatcctgcacccgcctcctccggcggcagggccggctactccaagatcccaacctacccggcggccccggcggcgaatcccaaccccagccgtctcccggcgtgagtctccacccacgccccggtcgaggaccccacagcgctgccctcgccgctggccaaggggggagagctcgtgacacgtgtccgcgaggaggagcaggtgctcatcgcggcgcgacggccgtggggagaggtcttcagcgcgacggacttctccaattcgtcgtacggtcagggaggcgatccgacggatgcgactcaacaccggctactgccgcggcaactactgggtgtgcgtgctctgcgaagaaggctgctccttggtcagaaaatgaggtactgtctatcctgtatccgttcacgaacttgtcggctgcgtactcacaggcacgccgagggcaaaggtacgtaacacgcattgcccatagagcttatgatcttga

SEQ ID NO: 4520 - DNA, 438 bp, Zea mays
  Clone ID: MRT4577_104120C.1
gcttcatctttttttttggttttgtcttttttgttttttttacgagggccttgtttgcttctaaaacgggcggtttggcagacaaaaggagggggcgggggggccaacccgggggcggcgggcggggtccccccggggttcccgggccggctcctggggggggcccaagggccccgggtaagagtggggatagagggtggcgggggcaagggggtatccggttcctggttgggatcggtttccgccccccctctcccaccggaaacccggcggggccttaagggggagagaccggggggcccttggggggagctaactggccgttattggggtgggaaaactgggcgggctcctgggggaaaaaattgggcaacacctggggtaagggcgcttgcaaattgggggcaagggggggttttttttttggcccccgggcgg

SEQ ID NO: 4521 - DNA, 1933 bp, Zea mays
  Clone ID: MRT4577_104122C.1
gggtacctcgaggccggccgggaaatggacctgtgagaaagcaagaaataaagatatatacacacatggctactacgggcacaacatctatgccagcacctgtgtttcaccccacggtgtggggggactacttcatcaaatttgtcccagagccattgcaggtttcagatgaaacgatggcagagagaatcaggcatttgagagaggaggtaagtggtatgttccaggcttgcaagaacgttgtggacaaaacgaacctagtagacgtggtacaacgtcttggaatagatcaccatttcgaggaacagatagccactgccctagccagcatccacagcgctggattattcaatagctcaagcctacacgaggctgcccttcggtttcgcttgcttaggcagcaggggttttgggttcctgcagatgaacttgtcaagttcatcaagaacgaagacgggagctttatcgatggtataaccaatgacccaaagggcctgttgagcttatacaacgcagctcaccttgttactcacgacgaggggacgacgacacttgaagatgccatcgcatttgcaaggcagcatctggaagctgctagaagatgtagtctcaagtcccctctagctgaacaagtcggccgtgcccttggtatcccactgccaaggaccttgaagagggaggaagcaatagcttttatcccagagtatagctcatcaacaagatcaacaagtgtacagccccgtgatactagagcttgccaagctagacttcaacctccttcagcgtctccatcaagaagaactcaaggagatttctcaatggtggaaagacctctctggagaaatcggattaggctacgtcagggaccgcatcgtcgagtgttacttttggtcgtatactgtgcactacgagcgagggcaagcgcgtgcacggatgatacttgccaaggtattcatgttaacgtctttgttagatgacacttacgatgtgcatgcaactttggaggaggccagggagctcaacaaggctattcaaagatgggatgagagtgatgtttctcttctacccgagtacctaaagaaattctttgtcaaggtgataagtaacttcagggagtttgaggatgagttggagtcacatgaaaagtatcgtaatgtttacaatattaaagggttccaaacattatccaaacattatctccaagaagcagaatggtttcatcatggctgcactccaagcttcaaagatcaagtgaatgtttctgtcataacggggggcgctcaggtactaagcattggtttgcttgttggcatgggtcatgaggcaaccagagaggcattcgagtgggccatcggtgacactgatgctatatgggcttgtggagaggtgtcacgtttcatggatgacatgtattatccttagaatggtaggaacaaaatggatgtcgccagttctgtggagtgctacatcaaggagcacaatgtccctagcgaggtcgccctggcaaggataaattccttggttcaagatgcatggaagaccataaatcaagcaccatttaagtaccctgctctattcccggttgtgcaacgagttaccagcctagcaaagagcatgacactgctgttcctcgataagagggatgcgtacacatacagcaaggactttcaaacgacactggagacccatttcgtaagacatattccgctatagtactaggctgtttatagagtaaagttttaaataaaatgtgagctgccaggatagccttagaaagccaaattcatggtgtgtttcagtcagacatctaataatctttttgttttcgtctaccatatgtattattttttcataaggtatccggaatctgtgttatgtctgatgttagaaacatatttatataacgcttttcagagcctaatctcctgttgat

SEQ ID NO: 4522 - DNA, 377 bp, Zea mays
  Clone ID: MRT4577_104123C.1
gggctacgtagctacggcctggcaggccgagccacgtttggtgtatttgtcggaggcgggaggggacaatctaacaacggtatcaatccaatccagcaaccacatgctaaggatcccttacaactacccggagttagtcgccgacctgaccaatcaggagaagcaagggcagatcaagctggagcgcattaacgacgctcgtagccggatcctacgggtcaaactggccatgggcccattcgaggacctgttcctggacccgtgcctaaccaaggtactcggtgcgcaggagcaccaatcgctgtcgcggaaggccatacgcatgtagtttcgtgctgcttaagaacagcacgaatgggcaggcaaagcctatgctg

SEQ ID NO: 4523 - DNA, 409 bp, Zea mays
  Clone ID: MRT4577_104124C.1
cgacccaagactccacaaaaagtcagactaactttctatcattatttggagttaaaatgcgatgcattctaaaccaggaaacattcacgtagtccacatacaaaaagggctgttcatagagtaataattcctgcatcatgaacactaaatcataacgatgacatgaaacacagattcagtcactacgcagtaacttgagggcacctacggtcagcaagtaataggacacagggtcgacgtcccagtgactactgatgagacatcaacagtccatacatccatgtcattcatcatgcaacgtgtcactttcacatgtggctgcactcattcagcagcataaggcaatttacttcgacaaccagcatcaactttgcacacatgatcagggctatcacgagatggggacctc

SEQ ID NO: 4524 - DNA, 614 bp, Zea mays
  Clone ID: MRT4577_104125C.1
caacattccaacaacataaatagataacattccaggcttacaacaatatttcaccatagtgacatagtccatactccatagcaagtagtagaagtagcaaagacagtacaatacatcataaaacatgttccccctaaatttttccatctatatgctactatgcaaccacgtcaacaagattctctccccctatattcactcttccgccacggttctccctacatattccccctatctttcactctacacataaaatatacatatcattccaactaccattaactacattctttttttcattttgtatatgtacacttacggctggttcaaatatttagttttgtacctttttattacaaagataatttccaataattagtgtgttgtccattatgcatacaattaattcttcattactttccaaattccacgtatacataattgattatattgcattgtccaaaattgtattcaatattaattctcgagcatttagcaactaggatgaacttttttttgcaggaaaaaaaacacagcgaagaacccatgttcaagcatctaaccttggtcagcagtacttaactggtaaagttcactcctgccagcgctgctgc

SEQ ID NO: 4525 - DNA, 313 bp, Zea mays
  Clone ID: MRT4577_104126C.1
aatatcacaatggcaaactaaaactttggcgaaacactaataaaacaggggcagtgtttttcttcttctaaacatagttcttcaagaaattcaaaaacctttcctttcatcctatgtttcaaccttttttgtcttctcccactgcccatattacccttcttttaaaaagtttattttgttctctccatcatctattcataatatttttccagtctaataccactacacccttcaaacatggataccaaaataactcatgtacttttcctcccacttttcttcatcctttccttttttccaaatattcaacctt

SEQ ID NO: 4526 - DNA, 610 bp, Zea mays
  Clone ID: MRT4577_104127C.1
gtaggctgactatgtgtcgagcgatcaggacctgcttcgctgccgagtcagaacttctggaatctttgagaccaagttccaggtggacaaagtcaatcttccacatgtgtgacgtgggtggccagcgcgatgaacgccgcaagtggatccagtgcttcaacgatgtgactgccatcatcttcgtggtggccagcagcagctacaacatggtcatccgggaggacaaccagaccaaccgcctgcaggaggctctgaacctcttcaagagcatctggatcaacagatggctgcgcaccatctctgtgatcctgttcctcaacaagcaagatctgctcgctgagaaagtccttgctgggaaatcgaagattgtggactactttccagaatttgctcgctacactactcctgaggatgctactcccgagcccggagaggacccacgcgtggcccgggccaagtacttcattcgagatgagtttctgaggatcagcactgccagtggagatgggcgtcactactgctaccctcatttcacctgcgctgtggacactgagaacatccgccgtgtgttcaacgactgccgtgacatcattcagcgcatgcaccttcg

SEQ ID NO: 4527 - DNA, 344 bp, Zea mays
  unsure (1)..(344): unsure at all n locations
  Clone ID: MRT4577_104128C.1
agtggctaaagctggccaaccgggaaccaccctagacaattggagacgnggttccctgctcatacatggagagattgacggacgggcatcagccacgtcttaatagatgaatgctgcaaaaaagatcatactcacagcacgaacgtgtgcaactggatgacgttcaacacatgaactgggaaatatgacgacagcaagattgcgtacaaaatgctgatggcgcaaagctggagtgaccttgttgagaacactgaactcttaaactcaacccaaaacatcataaaaagacagaggctgctggatgcatgagacattgactgcgttacaacatcacccctcaacgg

SEQ ID NO: 4528 - DNA, 235 bp, Zea mays
  Clone ID: MRT4577_104129C.1
gtcggactcagggtcgaccacgcgtccgtagacataatgcatatctaaatgcataccaaaagttatctgtctagatatagtgttttttctatgtatccagacataatgcatatctaaatgcataccaaaagttatctgtctagatacatagaaaaaacaatatatctagaaaagccaaagcattttataatttgtaatagagggagtatatgattgcttcagaagaaaagggaaa

SEQ ID NO: 4529 - DNA, 510 bp, Zea mays
  Clone ID: MRT4577_10412C.1
gcagggggtacccgcccattaaaaatttccactgcataaaaagaaacttcaccactaaaaaaaaaagaggcggcgtgtggggtttaaatttaaaaaaaggccaaattcattccccaaaacttttttttccctaactttacacaaaagggcaagaaaaaatttttacagggttaggaaaaaaaacttgggaaagataaaacaaaacttaccacacccgcgagggaggcataaaaacacccccaccggcaggtagagggctttttcttcctccaggcaaaaaataccaccagcatgttgggaacccttggttaaaccaaggaagaacaatctggacgcccccataaaaaaaacctttgcccttttggcagcccaaaaggatcttcagcgtccttcaccaaaagccctaacaacttttctcgaaaaagggagcctttttgcagattccctaccccgttttgttccagtaatggatgttcacacctacttcaggggggccgggcctaaatagcc

SEQ ID NO: 4530 - DNA, 354 bp, Zea mays
  Clone ID: MRT4577_104130C.1
ctcgaggacttagaaagcgccagtgaatccgaggaagaagatgatgaaaacaatcctttcggagatagaaatgaagtgtcgactccgtttattgaaaagcagcaacttacctggaaagaggtctagtgacattagtcccgagaccgaacgatgctattccattttcctcataccgctaaactcagatgttttttgcactacagctatatgcgatggctgtaattatgttgctctttggttatctataccctggttttcgatgtcactggagaagcaatcacaaatggggttttggtttactctttacatgctatattcgcatcggccaatctgcaaaacttccattcgacttgt

SEQ ID NO: 4531 - DNA, 364 bp, Zea mays
  Clone ID: MRT4577_104131C.1
tcgggagatccttttaaagctatttctgactatctactcatgcgaggttctgcatctctttggcggctcactaacatcagatgcgcgtacatgtctaccgtgtactacccatttactacggtcgatatgagcgatatatctcttatacatcatacagcctacttagtcaagtaactaggcttgccatagaatatactcattcagtctcatacgacgtgactcatgctcattacacttttcgtatactgctcggacaccatcaacgtggacaacaaactctctaaaacatctgatctcatcttgccatacctactcccaatctacacactgcttctcaagggcaatcacgttgaattactaccac

SEQ ID NO: 4532 - DNA, 1171 bp, Zea mays
  Clone ID: MRT4577_104132C.1
ccggcgtcaccgtgaggaactggaacgacaaggactactcggtggtgaccatcaggtgcaaggacaggtccaagcttctgttcgacacggtctgcactctgacggacttgcagtatgttgttttccacgcgaacattgatgccaaggacaatcaggcttaccaggtgagtgtactgttccggatgtctctcgctagtcatcgacgtcgtttatctactcccattgagattatgggttcgaaagaaaactgtgtgacactcatggatgctgctgcctgctccgttgtaggaattctatgtaaggcatgtgaatggatcgccaatgaacactgaaaccgagaggttgcgagtcatccaatgcctggaagcagccatcgaacggagggtatctgaggtaataacaattccacgcgctcatctgaaaccacatcaccgaagaaaaaacagcaaaaactgcagctccttcaaattgaaaaccatgtcgttctggccgtcccagggtgtgaagcttgagctgtgcaccaacgacaaggtcgggctgctatccgaggtcacccgcatcttccgcgagaacagcctgacggttacgagggcggaggtgaccacgcggggcaggatggccgtgaacacgttctacgtgcgcggctccgcgggagaggccgtcgaccagaaggcgatcgactccatcagggaggccataggccacagcctccaggtgaaaggccaggccgagccaccggagccgcagaagaaagagtcccccacgtggttcctcttcgccaacctgtttcgcccgaggtcgctctacagctttgggttcatgcgctgatcgagccgtcgcttccaagaaccgctgcccgtgcagtaagttcaccaccgttcacgaagcaatccaggacatggggggatcttcttcagaaggtggaaaagccttcgttgtgtcctagcagtgcaggtttggcatgtaggtagagcatggcatgggtggtgttcatatatatgtcgtcgccgtcatcagcatcatcatctgtgtcatcagcatcagcgtctgtaaatatgacagcatttgaccatttgtacatataacgtgtaaactaaaggacgtaaatataagctgtacagaatatagttaaattccaaaaaaaaaaaaaaaaaatttgcggcccccacaa

SEQ ID NO: 4533 - DNA, 316 bp, Zea mays
  Clone ID: MRT4577_104133C.1
aggggataaagggcagtgcccaaggtcctcttcagggccattgttcataacacaaatggcggtgcctagtattacacagactcgaaggcactggctatatatctcaccttacaaggccgctcataattccaacactgccaagcttgacaatgactttctatttccccccctacagctgggacctttccttacccaaatggtctccatcccaattttgcctctcactcctttgtgcagtgacctaaccggggttaagagtcccttgtatccccggacaattcatgattcatcaaaatccctcccacgcccatttggt

SEQ ID NO: 4534 - DNA, 391 bp, Zea mays
  Clone ID: MRT4577_104134C.1
cggacgcgtgggcggacgcgtgtttttttttgaaacctaaaagcactgactaatgattttcatgtggattgtcttgcggaaaccaagctgttttccttatgagaatttgtagcgtgattgtgtggtggtggtttctactttctaatgattagtcagttaattcgtaatcttttggccatcaacacccgtatttctaatttcttcatatcttgtttgacacaggtggagcaggaccaataatgggtgatttatgggctttaaagggtattactgaagaagacaatgaggcgccaggttggacacagttgaaacttccagggcaatctccctcaccacgatgcggtcattcagtaacatctggtggaccttatatcctttttgacagctcttg

SEQ ID NO: 4535 - DNA, 417 bp, Zea mays
  Clone ID: MRT4577_104135C.1
atttttatttaatctgtgtagtgttcaaaaaacatcattttgaaatagttacaaatatctaaaaatggaaatctttaatacaaactctgagtttctggcttttttaggaaagttaaataatctgaaatattggttctgcattagagctgagattaagtcgttaactttctcctctgtgttggatatatagttttcagtgtgcctgagtcctacatttcagtttgtgatatatagtcagactgagtgagttgatctcttgatatttcttttggttctacaatttaaatattcttgaattagaatttaatttttctctctagaaaagcattttctatactttgctctgtagaacaatgcttctacaaaagggtaacagatgacaaggtcttgacggtcaaataaaattggaaatgctga

SEQ ID NO: 4536 - DNA, 600 bp, Zea mays
  unsure (1)..(600): unsure at all n locations
  Clone ID: MRT4577_104136C.1
agccgagtggtcttccactcctcccagccgagctctccctctcccgcagctccctcgcggtgctcccatggcgcgcttcctccaacgccggccggagtcctctgctggccatcccgcttccctctgtgtagcgcccagccatccctccgtctgttcgccggtgccatggacagctcgcagtcgctacgctgccgggatcctagtcacaatttctaagccgccatcgcgccgtgccggttgtccgtctttgatcctcgctctgacgtcatcttgcccatgcaacgcttgcttggtgctcgccaaaacgcctgaatcaggacccatcgtcgttctcgcgatcatcgagttggcttaggttatagtttttgtgctgctgttgatggtggtaagtgccggtgggctcggccttcttatataagtataccccgcctttatcttcttattgaggatggtcacttgagctagcatatatttcaaaactataaataatttataaccgttcaaagtttctttctttgaatcaatgtagtaatcactctgatcatgtacgaagtaaaaattntgtaacttgtaaaatttggtaataagattttcgctgca

SEQ ID NO: 4537 - DNA, 799 bp, Zea mays
  Clone ID: MRT4577_104137C.1
catgggtacctcgagccggccgggagccgagtggtcttccactcctcccagccgagctctccctctccacgcagctccctcgcggtgctcccatggcgcgcttcctccaacgccggccggagtcctctgctggccatcccgcttccctctgtgtagcgcccagccatccctccgtctgttcgccggtgccatggacagctcgcagtcgctacgctgccgggatcctagtcacaatttctaagccgccatcgcgccgtgccggttgtctgtctttgatcctcgctctgacgtcatcttgcccatgcaacgcttgcttggtgctcgccaaaacgcctgaatcaggaccatcgtcgttctcgcgatcatcgagttggcttaggtacgttaattaatcgcgcgatgcggaaaacgacccaagtcgactccaagcacgggctactccgcatggtgaagctgaaggacgaacacaaggatggatgacctgacaagtgccaagacaaagaatggtcatcaagtggacatcgtctaacaaacactaacctagtgtttcttccaggttatagtttttgtgctgctgttgatggtgttaagtgccggtgggctcggccttcttatataagtataccccgcctttatcttcttattgaggatggtcacttgagctagcatatatttcaaaactataaataatttataaccgttcaagtttctttctttgaatcaatgtagtaatcactctgatcatgtacgaagtaaaaattttgtaacttgtaaaaattggtaataaggattccgctgc

SEQ ID NO: 4538 - DNA, 1063 bp, Zea mays
  Clone ID: MRT4577_104138C.1
gccggccgggctgcgagtgtacagcttaatgcttccaagctccctcagcaagtgcaacctataaatgagcttgctaagggatcattgtcttgtaatcaacttgacgtcatcatcaatcaacaagaactgaagcaagaagttggcaatcagcagaggcaacagcagcccgttaaccaagcaattcctttaagtcaggctcaaaccaatcttgtccaggcccaggtaattatccagaatcagatgcaacagcagcagcaacaacagcagcagtctccaactaggtgccagaagggaaccagtgtgcaacagctgcttctttcacagcaacagcaggaccagaattttcaactgcagcaacaacagcagcttttacttcagcaactgcagcagcagaatcagcagcagcagcagcaacagcagaatcagcagcagctaaacaagttgccagctcaacttgtgaatttggctggtcaacaggctcaattgtctgaccaggaacttcagctgcagctattacagaaactacagcagcagtcacttgtatcacagccaacagttacactctcgccgttacaggtaatacaggaacagcagaagttacttttggacatgcagcagctatcaagctctcattcacttgcccagcagcggatcctgcctcaacaagatagcgatgtttcgctgcaagcatcacaggcgccaccaccaatgaagcaagaacagcagaagcctccacagaaacaatttgtgcttgcagatgtgtcagatgttgtctatccacatatttcatcaaccaacgttttgtccaaagctggaacccaactgatgactccaggtgctacacaatctgtactaacggaggaaattccttcttgctcaacatcaccttctacagccaccggaaatcatttggcatacccaatcattggcaggaacgagcattgcaaggtcaccattgagaaagttcctcaatcgtcttctctgatgtcaattccaacagctggtgaagctgtaacaactccaataatggcgaaggaattgtcaaagttgaaccataatctga

SEQ ID NO: 4539 - DNA, 303 bp, Zea mays
  Clone ID: MRT4577_104139C.1
cttcagtatgcttttattcatggactgtgttttgcattaaagctcttcccatttttagtccagattacatacatattaacaaccggctccaactgctaagtcacctacccaaacagatatcagtggtagtagactagcagttgttatattgcagagtcggtgcatttacaggaagataaataatcctgcaatgaaatctaaaatttaagatacacttaatactcctagtgaagtatacaatcagttgcgactgtgtgccaatctccacaggtgcattatttcttgctggccgttaccagttgc

SEQ ID NO: 4540 - DNA, 316 bp, Zea mays
  unsure (1)..(316): unsure at all n locations
  Clone ID: MRT4577_10413C.1
ccgcccttttttttttttggggggttttttaaaagcttccgtctgttctttccgcccacnnanaggaaattagacctaaagacacaaaacttatttgcccaaaaaacttattgtccgaggcaaacatattctggaatctactttggacaaatctcggctgccaattactgagggttcttgcaagagcttcctccttcctgcaaggcctcctgggccttgcgcatccaaccaggggggtctctgccaaacacatggttactttaccggacaattagctcctttaggcacctctgcacctcttttctaaccaaggaac

SEQ ID NO: 4541 - DNA, 314 bp, Zea mays
  Clone ID: MRT4577_104140C.1
ccgggccgacccacgcgtacgatctgttcacctcactaacacatctatcaactctgtctctcctgcaataatgggctctgtgtcctcctcctccaagacgaacatggtcgcagcagcaacagtcctggaagacatgctgctactactggcggcagggcccaatacagacatcccagcggcgagctacgcatacggaacgtccgtaagtggcactaatccaaggcaacgctacgggcagcgaggtatactattccaacaatgtctacaatggagtgaactacttcaacaaaacaaatctctttggatacatacca

SEQ ID NO: 4542 - DNA, 324 bp, Zea mays
  Clone ID: MRT4577_104141C.1
ccttctctgactctggggccctctccgtcgccgccgcagccgcttccggcgaccggccgcctcctcgtgctctacgcgtcgcagaccggcaacgccatggacgccgccgaacgtgttgggcgcgaggccgagcgcggtggctgcccggccgtcgacgtcctctccatggacagcttcgaccccagttgcctgccgggcgaaaggtccgtggtgttcgtcgtgtccaccacggggcagggcgatcccccggattccatgaaggggttttggaggtaccttcttaagaaggaccttggtgccaggtggctggaagggctccgtttt

SEQ ID NO: 4543 - DNA, 272 bp, Zea mays
  Clone ID: MRT4577_104142C.1
tttttttttttttttttagagaatgcaaaaatgatattaagttattaacacaagttacggtctctttcaggaccaaccggcaagaagtgtgggagtgctcgacaaagagtttgcctagagccacaccctcggcaaatagtttgccaagtattttccaagatttgctgagtgcctgagcagcctatcaaaatggagcgtcaagataagcaaatatccacacaataaagttgaaatccatgaattcttcattgaaattatcataaattcataat

SEQ ID NO: 4544 - DNA, 1573 bp, Zea mays
  Clone ID: MRT4577_104143C.1
cctcgagggtcggccgggtataatgattccttctttaaaccattgactattgattctaatgtaacttcgtcgccaacattgtttacaaccatcagacctctcgctctcacttaagttattgtactgtggtgaattaatgctaactgtaattttctaaccaacaatgttcactgagcacttccattcttgacataaagatatactcgaacaagttctaaacaagtggtttaaatcagtttgcccaaagttgaacaatgctgagtccactatgtcctccatttcatgttatttttcaccccaagtcaaaaatgatcatgcaaattaaggatatagatgacaaacagaatgtgtggcgccagttataactcttatccaactctcactatgctttggtaacaacaaaacaagcctttagagtaatttatgtatgcgacagcatatatggcgggccttcacatttctggaccttgtgtgtcacggtaatcagttctgcattattcatagttatgcttctagtttgttgttttgacaaatggcatgctttctccttcaggcttatgatttcactcgaatattgagctccttttatttcaaggggtatactttattgacaaaaatacagcgcatcgaatggaacaataggggtatgtccagcgcacatgcaatttttatcacggctgtatcattatatattgtcacgtcgactgatcttttctccgattgtgtcaaggggcctattacattccgtaattcgataatatccacttctgcattgggggtttctgttggctacttcatcactgatcttgaaatgatcttctggctgtatccttcccttggtggaatggaatatgtcctccaccatactctttctctggttgcaatagcttacacaatgttgtctggggaagggcagttttacacatacatggttctcatttcagagacaaccacccctgaaatcaacttgcgatggtttcttgacactgctggactgaagaaatcaagtgcttacttggttaatggaattctgatgtttgttgcatggctggtggcaaggatatttttgttcatgtatgtattttaccacatttatttgcattacagtcagataatgcagatgcatgcctttgggtactacctgacgtttgttgtgccatcggtgctctttgtaatgaacacaatgtggttcatgaagatcttaaaaggcgtgatgaaaacactggcaaaatggtcatgatggatgatgccaagaggatcccagaactatcaacaggatttggtctttctggcatcattgatctgtaaagttatggatatcagggtaactagagaaagttaatatgtaaagtattagcaaacaagctagattaggtgaaattgccctattttcagcagtgctggaagttcataaccagtttggtttgtaccggagatccagcacgctgttctgcttacccccaatgccatgtgtatatctggagcattttgcttaccccaatgccatgtgtatatttggagcattttaatggatggtttgttcaacacgaaaaaaaaaaaaaaaaaagcggcc

SEQ ID NO: 4545 - DNA, 185 bp, Zea mays
  Clone ID: MRT4577_104144C.1
cccgtcccggatttcccggttggaccaagccgtctttttttacttgttattaaccaccaacttttgggggcccggaccaattggatttttaaaaaaggaattcgggagggttcccaaggcttgggacccgagaaagggggtaataatccccaacaatttatttttaacaagggacagggggccca

SEQ ID NO: 4546 - DNA, 459 bp, Zea mays
  unsure (1)..(459): unsure at all n locations
  Clone ID: MRT4577_104145C.1
gggtaaaaggaaacgcgttcagactgctccagattaccttaagccttacagacgatagcacggaacttatacaccactccttgtacacagctagtggcacagctatcatgatgcggccacagatgctcttaagatcacacatgtaagaaacttcaaacgggtaatgattaatcaacctcagtacaagaaaccgatgaaaatcgtgatattaacgggtaaaatgaaccccagagaatcccatttgcctttgaaattcattaaaatacttaccgttacgccttgataggcgagatttacatacaagaaaaatccacaagcattatctcctttaacgaatatgaaatacaacagcaatccagttaagctgatcggaataccactacaaaaggtataatatacagcatnaatgattgtacccacgacaggggccatgtatatttacatagacctgaccaccct

SEQ ID NO: 4547 - DNA, 1479 bp, Zea mays
  Clone ID: MRT4577_104146C.1
ggtggttgcaaatgaggcaaccgcagaggaaaagggtcgggcggatggtggcagtggcacgccgcagctacctctcccctccccatcgccgccaacgccaaggccaacagcacaaccatcgcaccacccaagaaatgggagctgagtgtgccccttctcctcctcgcggctccccaagctcctgctccgcgcgcgtagccgcgcggcacctcccagtcccaacacgcccgcaagctccgctcaccgcgagataatatccccggttctgttctgctgctccccggcgcggatcgtttgttagtgtttgtttcttgagccttctggtgctgtttgaaccgtgaagatggcggcgatgactgcttacaagtatcaagctcaggccttgatgagggactatctgctagctgatccactaattccgtacacctctgtgctcattggcattgtcctctgcaagatggcttacgatttcactcgaatattgagctccttttatttcaagggctacactttactgacaaaaatacagcgcatcgaatggaacaataggggtatgtccagcgctcatgcaatttttatcacggctgtatcattatatcttgtcatgtcaactgatcttttctccgaccgcgtcaagggacctattacattccgttattcgataatatccacctctgcgttgggggtttctgtcggctacttcatcactgatcttgcaatgatcttctggctgtatccttcccttggtggaatggaatatgtcctccaccatactgtttccctggttgcaatagcttacacaatgttgtctggggaagggcagttttacacatacatggttctcatttcagagacaaccacccctgaaatcaacttgcgatggtttcttgacactgctggactgaagaaatcaagtgcttacttggttaatggaattctgatgtttgttgcatggctggtggcaaggatatttttgttcatggatgtattttaccacatttatttgcattacagtcagataatgcagatgcatgcctttgggtactacctgacgtttgttgtgccatcggtgctctttgtaatgaacacaatgtggttcatgaagatcttaaaaggcgtgatgaaaacactggcaaaatggtcatgatggatgatgccaagaggatcccagaactatcaacaggatttggtctttctggcatcattgatctgtaaagtatggatatcagggtaactagagaaacataatatgtaaagtattagcaaacaagctatattaggtgaaattgccctattttcagtcgagctggaagttcataaccggtttggtttgtaccggagatccagcacgctgttctgcttaccccacctgtgccatgtgtatatctgaagagaattttaatgggtggtttgttcaacagtacaatcccagtgctgtgtactccctccgtttctttttacaagtcgtttccaacagcc

SEQ ID NO: 4548 - DNA, 551 bp, Zea mays
  Clone ID: MRT4577_104147C.1
tttttttttttttttttgtggttgactgtcatatatttcatgaatatggaaatgcatgcttcaccattaaagatgccacatgcatattattatttttacatatatctattctccaccatgatcaatatgcatatgttattgttttggaagagttcaaacgatcgcctgtaagaggtctcgaatatatctattagtctaactataaactaattaattcacataaacattagaaaatatctctggtgctgtggctttgttgcttggtttgtaactttgtatggtgagggtgttggttgaacgggccggagtagtgagagactgagaggaggcacgcatcagatcgccgagtggagtcattattcgtcacaaggagctgcgccaaacggagtttaacttttgctttttgaatgtagaaacagagaataaattaaaccaaacgcatctctatctatatacgacatggaacccattgaaaagccgctagactggtgataacgtgttgaaaaaatcccttaaggtcctgttcggttacgacattcggattgaagagg

SEQ ID NO: 4549 - DNA, 2283 bp, Zea mays
  Clone ID: MRT4577_104148C.1
gggtacctcgaggccggccgggcggccggataaccgcagaggccaacagcacaacgagcgcaccactccccaagaaatggagctgacccaactcctcctcctcaccggcaccgcctcccgagctcctgctccgcgcgcgtagccgcgccgcagttcccagtaataacacgcccgcaagctccgcagtccgctccctgcgcgagggtgttgtttgagccatgaagatggcgacgatgactgcttacaagtatcaagctcaggcgttgatgagggactacttgctagctgatctactcgttccgtacacctctgtgctctttggcattgtcctctgcaagatggcttatgatttcactcgaatactgagctccttttatttcaaggggtatactttattgacaaaaatacagcgcatcgaatggaacaataggggtatgtccagcgcacatgcaatttttatcacggctgtatcattatatattgtcacgtcgactgatcttttctccgattgtgtcaaggggcctattacattccgtaattcgataatatccacttctgcattgggggtttctgttggctacttcatcactgatcttgcaatgatcttctggctgtatccttcccttggtggaatggaatatgtcctccaccatactctttctctggttgcaatagcttacacaatgttgtctggggaagggcagttttacacatacatggttctcatttcagagaccaccacccctgaaatcaacttgcgatggtttcttgacactgctggactgaaagaaatcaagtgcttacttggttaatggaattctgatgtttgttgcaagactgttgactattgattttgaggtcagccggattgggtacctcgaggcaggccgggaaccgcagaggaaaagggtcgggcggatggtggcagtggcacgccgcagctacctctcccctccccatcgccgccaacgccaaggccaacagcacaaccatcgcaccacccaagaaatggagctgagtgtgccccttctcctcctcgcggctccccaagctcctgctccgcgcgcgtagccgcgcggcacctcccagtcccaacacgcccgcaagctccgctcaccgcgaggtgctgtttgaaccgtgaagatggcggcgatgactgcttacaagtatcaagctcaggccttgatgagggactatctgctagctgatccactagttccgtacacctctgtgctcattggcattgtcctctgcaagatggcttacgatttcactcgaatattgagctccttttatttcaagggctacactttactgacaaaaatacagcgcatcgaatggaacaataggggtatgtccagcgctcatgcaatttttatcacggctgtatcattatatcttgtcatgtcaactgatcttttctccgaccgcgtcaagggacctattacattccgttattcgataatatccacctctgcgttgggggtttctgtcggctacttcatcactgatcttgcaatgatcttctggctgtatccttcccttggtggaatggaatatgtcctccaccatactgtttccctggttgcaatagcttacacaatgttgtctggggaagggcagttttacacatacatggttctcatttcagagacaaccacccctgaaatcaacttgcgatggtttcttgacactgctggactgaagaaatcaagtgcttacttggttaatggaattctgatgtttgttgcatggctggtggcaaggatatttttgttcatgtatgtattttaccacatctatttgcattacggtcagataatgcagatgcatgcctttgggtactacctgacatttgttgtgccatcagtgctctttgtaatgaacacaatgtggttcatgaagatcttaaaaggtgtgatgaaaacactggcaaaatggccatgacgtggatgacgccaagaggatctcagaactatcaacaggatttcgtctttctggcatcattacgtgaccttaatctgtgaagttatggatatcagggtaactagagaaacataatatgtaaagtattagcaaacaagctatattaggtgaaattgccctattttcagtcgagctggaagttcataaccggtttggtttgtaccggagatccagcacgctgttctgcttaccccacctgtgccatgtgtatatctgaagagaattttaatgggtggtttgttcaacagtacaaaaaaaaaaaaaaaaagcggcccctttctttttaaaacacacaac

SEQ ID NO: 4550 - DNA, 361 bp, Zea mays
  unsure (1)..(361): unsure at all n locations
  Clone ID: MRT4577_104149C.1
gacccaggcgtacgcggacataatgcgcaaggacacctnaacactaattgtatctttgccccatgcaacctcggggcggggagcccatcaggtccggggactccttcaagaccatcatcatgaacaaaaaatctaagcgtggaaagtcaaaccccgcagagctctatggtcaagtaacaaatgcaagcaaccatactcatcataacttaaaccgcccttctttcaatagtgaggacccccaataccatgcctcacttaacgaatgcgctgcttcccccattcccaacgcttttcggaaataccaagcaaggaatacccttcgctttctcaagggaatcaaaacaattcgccttgtgggtca

SEQ ID NO: 4551 - DNA, 356 bp, Zea mays
  unsure (1)..(356): unsure at all n locations
  Clone ID: MRT4577_10414C.1
ccggncgacccggcggccggggcacaaaacngnggcnnacancncnantttaccgaggangggacnncggggggagggggangcnggagggagaaacgggccnggananacangnggacangaagggggaagggaaaaggangcgnnncncngnnggacggncaccaangcnnagggngcnggaaanggcancggaggaaangcggggaagagngcagagnggccagaagagcannnacagcccanccgaganggagccagggggngngccagcgnnacccacggggaccaaagggggaagaagcancnngggagaagnggagaacncacaaaaaaaccaccagngagccaacaca

SEQ ID NO: 4552 - DNA, 255 bp, Zea mays
  unsure (1)..(255): unsure at all n locations
  Clone ID: MRT4577_104150C.1
cagncgcacttgaagaataggcttgtcatcagtggaggagagggctacatcgactgccgaatacgtgatgaaggtggagaatcagaactacttggagatgatcttccacttgaacctgctgatatcaatgcagacatgagtcactttatagtgaggcaagtgatgtatggccatgagtgagcccatgggtcacaggtggacatagggaagccgtctcttctacatggtttattttcccactaacctattatttaa

SEQ ID NO: 4553 - DNA, 120 bp, Zea mays
  Clone ID: MRT4577_104151C.1
ctctacaccacactcacacgctgacgctcacacacgccgccggctctctccgatgacgcgtcctcgagcatcaagcaggcgcaggctccgtgcgcggacgaccacaagggcgacgccgtg

SEQ ID NO: 4554 - DNA, 668 bp, Zea mays
  Clone ID: MRT4577_104152C.1
acaccagatccgcagttccccgacacaccgttcctccgagcccaggagcagccccgcgccaggaggaagtttgttcttttaacaatatgtcgagggaggagaatgtttacatggccaagttggctgagcaggctgaaaggtatgaggagatggttgagtatatggagaaggtggctaaaactgtacatgagcaggacctctctgctggggggcgtacccatctcgtgtgtggttcaccatagacaccaacggcttcctgaacgtgcatggcgaggacaatactgcgtagcagcagaacaacatcaccgtcagcaccgacacgggcggcctgtgcagagaggaaaacgagggggtgggacacgacgcagtacaggtcgggggacgggacgctcagcacgaagggaagagcccaagacactagctggagaacataactccaccacactgcgctacacgatcaaggcacggtatgatcacgtccaagctgactgccgtcgaccagacgaagaactaggacgcgcccgactcggccatcagctgggctggacgccaaccagctccgcgaggcggaacgagttccgagacaagaatgaaggacctggaaagccttttgcaaccccatcatccccaatatgtacacagggcgcgggtgcccgcatggggaaggg

SEQ ID NO: 4555 - DNA, 390 bp, Zea mays
  Clone ID: MRT4577_104153C.1
tccgggagctgcggatgagaacgtttctttgattactacattgaagtccacctcaagctctccgaactgaggtttgctgatgcttaattaaaacctatcttgtagtgatacattctgctgtctgtatgcaatcgtgcgctattttgcatctggaggaatgttgtctttctcgaaataaatttgtcgatgttagagccttaggttgttgttggtacgatgctacttcgacctactcttgaatttggcacccttttgtcatatttgtatactctgatgctgtatgcaactgaacccagaaaatctatgatcttactgctgcaccatgttcttgttactctgcctccatctagactcatccacagaaggcccctagatgcatcctcgcttgat

SEQ ID NO: 4556 - DNA, 157 bp, Zea mays
  unsure (1)..(157): unsure at all n locations
  Clone ID: MRT4577_104154C.1
gaacaggggacggtttaaacacggcgaccccggcaagccgcaccgaccacaccgangcagacacagcgccacaagcaaaaaccggaggggaacggaaggagcaggactggccaggggacgggcagagcacaggacttgcgaatcagcggaccgtgta

SEQ ID NO: 4557 - DNA, 377 bp, Zea mays
  Clone ID: MRT4577_104155C.1
tcattcttccggccacacgcaccccgacctgtcttgtttccaggccatcgcaccaccgcctcccccgtccccgactcgccgacgacggcgtcgtggcctgccggcctccgatggcgaagacccgcatgcctgcgtacccaccccccgcagaaacgccgactccgcagcggcggcgcaagaagaagggccgcccgcccctactcgacctgcagcgccgcaggctacgcctccaggcccaaaaccctagccccgctccctcgcccacccgcctggagcccaaccccttcgacgacgatgaggacgggaccgggagcgggcggctgcgccagaagcgcttaagagcgtcctaccggcgctgttaggaggagctggggagg

SEQ ID NO: 4558 - DNA, 603 bp, Zea mays
  Clone ID: MRT4577_104156C.1
gggcaaaggccaacttccatgttcccggtttctaatacgagaataaggcagtcaaatcaacctgcgctgcactctatcaccctctctgtactactctagccctaagaattgaaacattatactaaaaacaaccaatagtcaccttttgtacaagtcctggctatatttaggctaagaagaaacttgaaaatatttcttgctttgatttacaaatcagaacaaaatagcaagaaaacctcactagcaacccaaaaagaagtggaagggcatcagcctgtggcacttgcggtggtttggccctcctagcagcggtagttgcagtggtcaatagtgcaaaaggttgtcacagtcccaggttacggtgctgtcctatagggtgaagcgaatttcaggagttttcataacctgcaaatatgagcgatattcttccatgatgaaaatgggagatcaaactgatggcatatgcacattctgcgccacagacagctcccttagcttgtcacagcgaggtgtagggtagtccttggcccattgacgacgttggagttccacatggcaatatcttccaagcatactcttatagtccatcaaaacatgcccgtc

SEQ ID NO: 4559 - DNA, 879 bp, Zea mays
  Clone ID: MRT4577_104157C.1
atgcatcgcgtccttccaccttccgagcccccggatggggagcactcgtgtcgctttcgtcttgttctcgtcggaggaaagcaacttcgcggaagttggtacctttcagccatcgttcgacttcaaggattttcatcaggcagcccggctgcatcccctcgccggtggtcacccaagacggtgaccactagtttgctggtggggagaagcaagccgggctgcgacctctgcctcgccctcagcttcaaggatcttcatcatcctagctggggcggaggccggactgagccggagctctacctcccgcgcgggttcgtgggtcaccttctccctcagcattcaggggagagggcgctcaccggcctagcgggagggtcggacttcaacaacgcggggctggtcggcggcgagcgttgtcagcttcagcgcgttgagctcgctggctcagctggctctggctcggctctcggtgccccctcccgccgcgagagcggtcgtcacgccgcgcgcaccggaggaccgctcaagatgtcgcgcgctgctagggcggcgttcgtgttcttgggctgtcctgcctttgccctggtacggtgcctctacgtggaggatccgagtggggatctaccggtgggcagatggcttccgtcaccggcgctgaggtggtggcggctgaagaagtcctcgtcgccgacgggatcaccgccaccatccgcgctccgggcctccggctctttggctttgatagcttgtcctcgcccctcgagtggggacatgggcgagggccttatggcagcatcatccgccctgaggtcaccgctgctgctgttcggccgctcggagcggaggtcgttgtcgctgctgctcttcgggcggcggtga

SEQ ID NO: 4560 - DNA, 591 bp, Zea mays
  Clone ID: MRT4577_104158C.1
ctgtttattgtttcgcttgcatttattccagcgcgtcaagctgagtattcgctgcaacagacaaatacttcccctttcaaagtcactcaaaaacaaggagtggagtacttcgtcagcaaacaagattttgatcagcagtttccacagggtagtcagtctagagagaatcttgaacggcatgttctgatggactataagagtatgcttggaagatattgccatgtggaactccaacgtcgtcaatgggccaaggactaccctacacctcgctgtgacaagctaagggagctgtctgtggcgcagaatgtgcatatgccatcagtttgatctcccgttttcatcatggaagaatattgctcatatttgcaggacagcaccgtaacctgggactgtgacaaccttctgcactattgaccactgcaactaccgctgctaggagggccaaaccaccgcaagtgccacaggtgaaacgtaggaatcgtttggagcaaaacgaacagagtatggtatctagtcggtctggttgacaaatgtctaactggacagtagtgctcccttgtgttatagttgtagaattatatttgtttataa

SEQ ID NO: 4561 - DNA, 255 bp, Zea mays
  unsure (1)..(255): unsure at all n locations
  Clone ID: MRT4577_104159C.1
gtacggctaacagcattgtctctgcgctgaannntancgcaagctacttggctatgtgagcagaanagtgtgactcgttgcatccagancagtcgtnntaaactcctctggtgatcacgactcgatgatgatccgtgctgcagcatattatcatgagcnttacncatacagtntcagagagaatatggcgtatgcaagctaatggcngcctnctgagnttnaggtaacantangtcggcagntnacgngatntga

SEQ ID NO: 4562 - DNA, 350 bp, Zea mays
  Clone ID: MRT4577_10415C.1
tgtttttttttttttttgtatacttttttttttttttttttttggaaggtttaaaaggaaattaaaggggaaaatgttgaaatggatttccattatttgacccaacttgacccaaccgaaaacttaaccctttacctcgcccctttgtcaaaaaattaatgttgttgacattttgttgggtacccctttaaataaaaagggggaggcctacccctaaaggagaaaaattcacaatgcttttgaatttccacctcaaactttaaccgatttaaagggaagtcttgaatcatcaaaaagtccaccgtaatcattaagctagttttcccgaacgtgggtgccctaggacaaag

SEQ ID NO: 4563 - DNA, 315 bp, Zea mays
  Clone ID: MRT4577_104160C.1
tgcagtccaagttttgttggcaggttgtttcatcatgctcttgacgagtcaagaccaaaatctgttctggttcattcattgtcagtgtgtatatctttattggaccccaaaagactagcatcagtctcataccaagcatttagaagcaacttaactcacgggacgctggttacagccagtccagaaacagttgatggtatactggagagtctaggtgacttgctgaagttactggacattacttcttctcaaaatgtttttcctacaacttatggatgtttgtgtccgcctcttggaaaacaccgtttgaagatt

SEQ ID NO: 4564 - DNA, 487 bp, Zea mays
  Clone ID: MRT4577_104161C.1
ggttaagggtccaccaggggcgagtatgaattgttgacagggctcacgaaatgggagcacaaagccccgcattgggtgtctcggtttacattccatatgtttggttacccgcaccgtctcgtcttggaccatcgtatgcgttgactttgtctgagctcctgtttggttgtctacacaaggagacccaagctgtttgagcggatgcaaaaaagttattttatagccatttgattgcatccacttgtacgcagaaaattgtcgaattaaattagccagggccaccggagcctgcgtgtttggatacagacatccaattaggcacattcagaattagtgattgagccattgaatgaagcatggaacattgttcgcaccaatatcatattgtggacaggaatttggagtattccagtttgaaaaacaaactttagatttggtttaaaaaactttaatttttagctttacccaattcagatcccttaaaaat

SEQ ID NO: 4565 - DNA, 2580 bp, Zea mays
  Clone ID: MRT4577_104162C.1
atgtctgaagacaagaaggctgctgccgagatgaagctgagtctctctgaagagaaaaacctggggtttcttatagcaatgtcgaagaccaatacagaaaaaatcaccaaagagattttagaaggtttatctgaagatactgatgatagcgacagctatgatgcagatagtggtggcgaagactccgaagatcgaccttggcgaccaagccatgcggttttcggcaaatcaagtattaaagaaagtcatcttgtcaacatgaggggaagatatttccgggacttatccattcttatccccgaagcgatcataaggatgaatattttcgtgtgggctgtaaggagccaaggcttggagcctgatgcaaagagcttctgcaatatacacgaattgttatacgagacaaaaccctggggtaaggaacaatatcacaacaactttggctgctatagcttcggctctcgctctgggtcaagctgcccagtgccgacctttcggaagagatggcccggcgactggatgacagaatggttttatgtgaagaatgaccttaaaacacgggaagatattaaaggtataattatgcgccctatttggcaaagcttcggcctacggaggccgaaggttgaaatgaatgaagctgccgaagaatgccagagagccttcggagttatttgctcttttattggaacgagggatttggtccaagagcatatagccttcagagtgtggcctcttgtggataattgggaaatgccgcaagaaattattaaagaaactgacgaaagtgggctagtccggctgaagtacacattcaagtatggagacaaattcgttgaaccagatgatgattggttaaagagcattgagactgtaagtgatgaattgcttggggcatactcgaaggccgaagacactgcattgtcagcggccttcggaggccgaaaaaggaaaagactcaaccgggtatttgatgcaatcgggttcgtctaccctgactatcgttatcccattcgagagcagaaaagaaaagtcacgacttctgcgaaagaagaagctgcagctgttcctagtgagccagcaccgaaaagaaaaaggataaagcctcggtgcctgagttcaccgaagagacctcttcggccaccgaggctgaagagccaaccttgctaccagaagtcgcagaaatggccgaagcgccaacaacaacagaattggaggaaccaaagatttttattaccagaaaccaaagagatggccgaagcgccatcgacagaaaagatggaagaagcaaaaggatcaactaagggatcaaaaatatcagaaattttaagtccttcagtagaaattgaagtagcaggaattaagaaggggccaacagtgaccccaaaaagaaaaagaatggtcaatgtgctagatgttctggagacaattaagtcctcaagcacaactccgaagaagactgttgaaacttccgaagcggaaactgaattttttgatactaaagctccaaagaaacaaactgaggctgaagctgggccttcagagcccacgaaggtaaaatccttgaaaaccgaggaagaaaaaatgacggagccaattcttgttgaagaaatcagtgctattgcccccgaagcatcccccaaaacccttgattatattgttcgtcatgcttcgggaaaaaagttgtctgaaaaagaaaagcaagaggcccagttttacgcccaaaaactgaaatatccaaagggggcgttgatattcaacggcagcggagaagaagacttcttgtattgtctccctgacagtaaggagatttctgtctgtcgggagatgagcaagagcttcggattctcaacactagaagacgggctctcggtgttgtcgaaaaacgagctggccgacagcttggcgtacaatagcttaaagggccttatacttagcaatgccctcagggcccaaaaagatgtcgaagacgaagggtgtgttatggccctgagcaaccttcgttccgaagtcaagttgaggctcagaagcgtgaaattgaagatcttcgaaaaacaactagccagagctaaagaggaacgcatacttgaagaaacgaagcgagaacttagcgaccaatgggcaaatcatttagaaggaactgttgaagagcttcgttcgtccaagaaaatatgctatgtcaaatctatggagtgtgttaagaaaatgaaagctagcttcgccagcgttggcgcattctcgagcgtagaaaactttacaagaggcaaccctgaaggtctcatcgaatggattaatcacgaagctgaggcctttgaggaaattttaaatagccgcagagacatatgtgctttttcgggtgccagggggattgccaccattttggagaaaaagggctgcgagcatgtaaagattttagcgcaatccgaagctaccttgtccttcgaagatgcaaaagatccttcagccgaagctagcatggctggtggaaaatttttcaccgatgtctgggacaatggtggtcgagaaatggcccgagaaattatccaaaaaagcgaaaagggcatccatgatgctagataa

SEQ ID NO: 4566 - DNA, 786 bp, Zea mays
  Clone ID: MRT4577_104163C.1
cctcgaggccggccgggtttcaaaggtcactcaaaaacaaggagtggagtacttcgtcagcaaacaagattttgatcagcagtttccacagggtagtcagtctagagagaatcttgaacggcatgttttgatggactataagagtatgcttggaagatattgccatgtggaactccaacgtcgtcaatgggccaaggactaccctacacctcgctgtgacaagctaagggagctgtctgtggcgcagaatgtgcatatgccatcagtttgatctcccattttcatcatggaagaatatcgctcatatttgcaggtgaaacgtaggaatcgtttggagcaaaacgaacagagtatggtatctagtcggtctggttgacaaatgtctaactggacagtagtgctcccttgtgttatagttgtagaattatatttgtttataattcacaaatctatatgtgtctgcgcaattggtacagttgtgaaccagtaagccagagcataaaaggcttgtttacatgaagagatacatggctggtgaccaaccggttgaagttgcggttcacgttgatgcagatgcagcacgcccgacacctcacacctccgaactccgatgttgctgctgatgcccgcactgtactgtaaacaatctttcaaaggcaaatggaactgtgggatacatgtggcagtgtggcacttcgatgatgtgctctgttaaatatttttttaggaaacaatatgctcattcctactgtttttatatactaacatatagtatgtgttaacgct

SEQ ID NO: 4567 - DNA, 326 bp, Zea mays
  Clone ID: MRT4577_104164C.1
tcccactcaacccactcgtccgcagaaaaaaacaaaaaccaaaaaaaatttacataaaaaaaaaaaaaaaaaaaaaaaagaaaaagtaaaattttaaactaacaaaaaaccacaccaacaacaacattaacatcaaacacacaaaaatcctccaacaccctcaaatcatccaaccaccttaaaacaccataatttaactaccatcttccttatctacttctaaaactacatcatccttatcaccctatttcattaccaccactttaatatatctatccaaccattcttcaaacaatattactcaactaacatactaattctatttc

SEQ ID NO: 4568 - DNA, 2514 bp, Zea mays
  Clone ID: MRT4577_104165C.1
atgtctgaagataagaagactgttgctgagatgaagctgagcctcgacgaagagaaaaacttggggtttctcatagcgatgtcaaagaccaacacagaaaaaattaccaaggagattctggaaggtttgtctgaagatactggtgacagtgacagctatgatgtggacagtggtggaaggtatttccgggatttgtccattgtgagggccgacgaaggggaaaaaacttgcccacaccctgaagagaatgaagtcgtagtgtaccgaagctttttgaaagctgggctgcgatttcccctgagcagcttcgttgtagaggtgctgaaaatattcgaagtctatctccatcaacttacccccgaggcaattataaggctgaatatcttcgtgtgggccgtgagaagccaaggtctgaagcctgacgcaaaaagcttctgcaatatacatgaattatcatatgaaacaaaaccttggggtaaggaacagtatcacaataattttggctgctacagtttcgtttctcggtccgggtcaagctgccccgtgccaacctttcggaagagatggcccggcgactggatgacagaatggttttatgtgaagaatgatctgacagtacgagaagatatcaaaggtataattatgcgccctatttggcaaagcttcggccttcggaggccgaaggttgaaatgaatgaagttgccgaagaatgccagagggccttcggcgttatctgttcttttattggaacgagagacttagtacaagagcatattgccttcagggtatggccgctcgcggagaaatgggaaatgccacaagaaaccataaaagaggccgacgaaggtggacttatcagattgaagtacacttttaaatttggagataattcgttgagccagatgatgactgaaacgaaagagaaggccgaagcgccgtccacagaaaaaatggaagaagtaaaagaagcaattgagggaacaaaaacatcagaagttttgagtcctgcagcaaatattgaggcagtaaaaaaccaaaaggtgccagcagtgactccgaaaaggaagagaatggtcaacgtgctagatgttctggagacaattaaatcttcaggcacacctccgaaggagactgctgtcatccccgaagaaaaaactgaaatctctgatactaaagttccagaacaagaaactgaagccgaagctgggtcctcagaacccacgaaaataaaatccctggaattcgaggaagaaaaaattgcagagccaacttttgttgaagaaatcagtgctgctgcccccgaagcatctcccaaagtccttgattatattattcgccatgcttcggggaaacaactatcagaaaaagaaaaacaagaggcccaactttatgcccaaaaactgaagtatccaaagggggcattaatattcaatggcagtggagaagaagactttttgtattgtctccctgacagcaaagagatttctgtctgtcgggaaatgagcaagagcttcggattcccaacactggaagacgggctttcagtgctatcgaaaaatgatttggccgacagcctggcgtataatagcttgaagggcctgatacttagcaatgccctcagggcacagaaagatactgaagacgaagggtgtactatagccctgagcaaccttcgttccgaagtaattgaactgaggaacgaaggtctcgagaaagataaaatattacactcattgataaataaaataaaggaagacgaagctatttttaaaggtcaagctgaagctcataaacgcgaacttgaagatcttcggaaacaactggccagagccaaggaagaacgtatacttgaagaaacaaagcgagaactcagcgaccaatgggcagatcacttagaaggaactgttgaagagcttcggtcgtccaaaaagagatgctataacaaatctatagaatgtgttaagaagctaaaggctagcttcgccaaggtcggcgcattctcaagtgaggaaaactttacgagaggcaatcccgaaggtcccatcgaatggatcgaccacgaagctgaagccttcgaagaaattttaaatagccgtggagatatatgtgccttctcgggtgccagaggaattgccactattttagagaaaaaaggctgcgaacatgtaaagattctagcgcaatccgaaggtgctttttccttcgaagatgcaaaggatccatcggccgaagctagcatggttggtggaaaatttttcaccgatatctgggataatggtggccgagaaatggcccgagagattattcaaagaagcgaaaagggcattcacgatgctagagaagtagctgaggctgctgagaagagcgcagagcccgaagattctgctaaagccccttcggacactcagccgaaaggagacgacgaaataaaaaagatggctgaagctattatggacgaagtcgtcaatcgacttctaaacgaggctgcagaagtcgtcttgagagagaattaa

SEQ ID NO: 4569 - DNA, 864 bp, Zea mays
  Clone ID: MRT4577_104166C.1
gatattcaggtccttttatggcacccatgataatatgttccatccccagtatacctacagggctaggggaacaggcaggcaacagcaacagagaagggagcattcagtggagggtggttccagcataaatctaacagtgtttattcaccttgtagtagtactgtttattgtttcgcttgcatttattccagcgcgtcaagctgagtattcgctgcaacagacaaattacttccccatttcaaaggtcactcaaaaacaaggagtggagtacttcgtcagcaaacaagattttgatcagcagtttccacagggtagtcagtctagagagaatcttgaacggcatgttctgatggactataagagtatgcttggaagatattgccatgtggaactccaacgtcgtcaatgggccaaggactaccctacacctcgctgtgacaagctaagggagctgtctgtggcgcagaatgtgcatatgccatcagtttgatctcccgttttcatcatggaagaatattgctcatatttgcaggtattattcagtttttcctgaacacgattaagaaaaactcaaacctaaataatagccaagccttaaccaaacaggttatgaaaactcctgaaattcgcttcaccctataggacagcaccgtaacctgggactgtgacaaccttctgcactattgaccactgcaactaccgctgctaggagggccaaaccaccgcaagtgccacaggctgatgcccttccacttctttttgggttgctagtgaggttttcttgctattttgttctgatttgtaaatccaagcaagaaatattttcaagtttcttcttagcctaaatatagccaggacttgtac

SEQ ID NO: 4570 - DNA, 209 bp, Zea mays
  Clone ID: MRT4577_104167C.1
atgaaatccataagggtgtaaaataaatcatgaggctctcactaatacaacatgtgtggcctgattcactgcaaaaaaacatgtaaaacaacaatgttgtaaaattctgcaataaaggccatagactaccaactgccccaaatcaggcttcatatcactttcccagcaactggggtccaaactgatatacgcactttactctaaaattt

SEQ ID NO: 4571 - DNA, 2781 bp, Zea mays
  Clone ID: MRT4577_104168C.1
atgtctgaagataagaaggctgttgccgagatgaagctgagtctctctgaagagaaaaacctggggtttcttatagcgatgtcgaagaccaatacagaaaaaatcaccaaagagattttagaaggtttgtctgaagatactgatgacagcgacagttatgatgtggatagtggtggtgaagtctccgaagatcgcccttggcgaccaagccatgcggttttcggcaaatcaagtatcaaagaaaatcatcttgtcaacatgaggggaagatatttccgggacttgtccgttgtgagggccgacgaaggagagaagacttgtccgaaccctgaagaaaatgaagtcgtagttttcgtttctcggtctgggtcaagctgtcccgtgccaacctttcggaagagatggcccggcgactggatgacagaatggttttatgtgaagaatgacctgaaaacacgggaagatattaaaggtataattatgcgccctatttggcaaagcttcggcctgcggaggccgaaggttgaaatgaatgaagctgccgaagaatgccagagagccttcggagttatttgttcttttattggaacgagagatttggtccaagagcatattgccttcagagtatggccgctcgcggaaaaatgggaaatgccgcaagagaccataaaggaggctgacgaaggtggacttatcaggctgaagtatactttcaagtttggagataaattcgttgagccagatgatgactggctaaaaagcattgaaaatttaagtgatgaactacttggggcttattcgaaggccgaagatactgcattgtcagcagcctttggaggccggaaaaagaaaagactgaaccgagtgtttgacgcaatcgggttcgtctaccctgactatcgttatcccattcgagggcagaaaagaaaaggcacgactcctgcgaaagaagaaactgcagctgctcctagtgagccagcaccgaaaagaaaaaggataaaggtcctcacacatcggccacgctatattgaaccagcctcagtgcctgagttcaccggagagacctcttcggccaccgaggctgaagagccaaccttgctgccagaagtcgcagaaatggccgaagcgccaacaagaacagaattggaagaaccaaagatgttgttaccagaaaccaaagagatggctgaagcgccatcgacagaaaaaatggaagaagcgaaaggatcaactgagggatcaaaaatatcagaagttttaagcccttcagcaaatgttgagacaataaaaaaccaaaagggtccagcggtgactccgaaaagaaaaagaatggtcaatgtgctagatgttctggagacaattaagtcctcaagcacaactccgaagaagactgttgaaacttccgaagcgaaaactgaattttttgatactaaggctccaaagcaagaaactgaggctgaagctgggccctcagagcccacgaaggtaaaatccttggaaaccgaggaagaaaaaatgacggagccaattcttgttgaagaaatcagtgctgttgcccccgaagcatcccccaaagtccttgattatattgttcgacatgcttcggggaaaaaattatcagaaaaagaaaagcaagaggcccagctttacgcccaaaaactgaagtatccaaagggggcgttaatattcaacggcagcggagaagaagacttcttgtattgtctccctgacagcaaggagatttctgtctgtcgggagatgagcaagagcttcggattcccaacactagaagacaggctctcggtgctgtcgaaaaacgaactggccgacagcctggcgtacaatagcttaaagggccttatacttagcaatgccctcagggcccaaaaagatgccgaagacgaagggtgtgttatagccctgagcaaccttcgttccgaagtaattgaactaaggaacgaaggtctcgaaaaagataaaatattacattcattgataaatagaataaaagaagacgaagctacttttaaaggtcaagctgaggctcagaagcgtgaaattgaagatcttcgaaaacaactggccagagttaaagaggaacgcatacttgaagaaacgaatcgagaacttagcgaccaatgggcaaaccatttagaaggaactattgaagagcttcgttcgtccaagaaaagatgctatgataaatctatggagtgtgttaagaagatgaaagctagcttcgccagcgtcggcgcattctcgagcgaagaaaactttacaagaggcaaccccgaaggtcccatcgaatggattaatcacgaagctgaggcctttgaggaaattttaaatagccgcggagacatatgtgctttctcgggtgccagggggattgccaccattttggagaaaaagggctgcgagcatgtaaagattttagcgcaatccgaagctaccttgtccttcgaagatgcaaaggatccttcagccgaagctagcatggttggtggaaaattttcaccgatgtctgggataatggtggccgagaaatggcccgagaaattatccaaaaaaagcgaaaagggcatccatgatgcaagaaaagtagcagaggctgctgagaaaagcgcagagcccgaagggcaaataggtcctactaaagtgtctccgggccctcacccgaaaggagacgacgaaattaaaaagatggctgaagctatcatggatgaagttgttaattggctcctgaacgaagctgcggaagttgtacttagagaagattaa

SEQ ID NO: 4572 - DNA, 2214 bp, Zea mays
  Clone ID: MRT4577_104169C.1
atgtctgaagataagaaagctgctcctaagatgaagctgagtctctctaaagagaagaacctggggtttcttatagcaatgtcgaagaccaacacagaaaaaatcaccaaagagattttagaaggtatcaaagaaaatcatcttgccaacatgaggggaagatacttccgggatttatccattgtgagggtcgacgaaggagagaaaacttgcccgacccctgaggaaaatgaagtcgtagtgttccgaagctttttgaaagctggactgcgatttcccctgagcaactttgtcgtagaagtgctgaaaatgtttgaaatctatcttcatcaacttacccccgaagcaattataaggctgaatatcttcgtgtgggccgtgagaagccaaggtctggaacctgatgcgaaaagcttctgcaacatacatgaattatcatacgagacaaaaccctggggtaaggaacagtatcacaataattttggctgctacagtttcgtttctcggtctgggtcaagctgtcccgtgccaacctttcggaagagatggcccggcgactggatgacagaatggttttatgtgaaaaatgacctgaaagcacgggaagatattaaaggtataattatgcgccctatttggcaaagtttcggcctgcgaaagccgaagattgagatgaatgaagctgccgaagaatgccagagagccttcggagttatatgttcttttattggaacgggagatttggtccaagagcatattgccttcagagtatggccgcttgcggaaaaatgggaaatgccgcaagagaccataaaggaggctgacgaaggtggacttgtccgactgaagtatactttcaagttcggagataaatttgttgagccagatgatgactggctgaaaagcattgaaaatttaagtgatgaactgcttggggcttactcaaaggccgaagatactgcattgtccgcagccttcggaggccgaaaaaagaaaagactgaaccgagtgtttgacgcaatcgggttcgtctaccctgactatcgttatcccattcgagggcagaaaagaaaaagcgcaacctctgtgaaagaagaagctgcagctgctcctagtgagccagcgccgaaaagaaaaaggataaaggtcctcacacatcggccacgctatattgaaccagcttcggtgcctgaattcaccgaaaagacttcttcggccaccgaggctgaacagctaaccttgctgccagaagtcgcagaaatagccaaagcgccaacaagaacagaattggaagaaccaaagactttgttatcagaaaccaaagagacggccggagcgccattaacagaaaaaatggaagaaacaaaaagatcagctgagggatcaaaaatatcagaagttttaagtccttcagcaaatgttgacagaacaaaaattcaaaaggggccagcagtgactccgaaaagaaaaagaatggccaatgtgctagatgttctagaaacaattaagtcctcaagcacacctccgaagaaaactgttgaaacctccgaagcgaaaactgggatttttgatactaaagccccagagcaagaaactgaggctgaagccggtccttcggagctcacgaaggtaaaatccctggaaaccgaggaagaaaaagtgacagagccaattcttattgaagaaatcagtgctactgcccccgaagcatcccccaaaatccctgattatattgttcgacatgcttcggggaaaaagttgtctgaaaaagaaaagcaagaggcccagttttacgcccaaaaactaaaatatccaaagggagcgttgatattcaacggcagcggagaagaagacttcttgtactgtctccctgacagcaaggagatttctgtctgccgggagatgagcaagagcttcggattcccaacactcgaagacggactctcggtgctgtcgaaagacgagttagccgacagcttggcgtacaatagtttaaagggccttatacttagcaatgccctcagggcccaaaaagatgccgaagatgaaggatgtgtgatggccctgagcaaccttcgttccgaagtaattgaactacggaaagaatgtaacaccccaggtgttgccatggctggagcacaccttggcactcaagactatgatcacatgtggaagaacttaaggagcaaaagtataaggggctttggaaactaa

SEQ ID NO: 4573 - DNA, 117 bp, Zea mays
  Clone ID: MRT4577_10416C.1
tgaagcttgaggtgggcccacactttgccctgggagtaccgacggtacttaaggtcccaggtgcatggcgcggacctctgaaagttcactcacgtaagaagatcaccgagacgtaag

SEQ ID NO: 4574 - DNA, 317 bp, Zea mays
  unsure (1)..(317): unsure at all n locations
  Clone ID: MRT4577_104170C.1
atgagaggcaggcgtgtttgccgatatgaactgtgttgttgaggtatgacagatttatggggatagaagaagaggctcctgtttgccgtgtgagcagcagatttgatgtattatttgttggctaataaacagctattgtacactgtagaggcaaaagaaacaaattaacgtggtttccattttctttatatgttttggggatacctgaggagcggtttatatcatacatttttattgacataattcaatagggantgttatgtgcgatacttgtcaaaaaaaaataagaaatcatggagaaacaacggctgtgataa

SEQ ID NO: 4575 - DNA, 524 bp, Zea mays
  unsure (1)..(524): unsure at all n locations
  Clone ID: MRT4577_104171C.1
cagatgcgcatacaacgccactgtttctgtacaccagtagcgggtggcaacgctgctgagtgtatggcttcttggcactacagtgccctgtgatgagattagcttctggactatgacgctctccacccgtagctgtggagatttgaaccattggatctgtaccaccatgcactggcattaancctcgtctgcatagagcgtcccgctgcgatacagcgtccaacttcctgacgctctagggaaggctgtgcacgtgacaccctaatctcccttggccatgctctgcactatgttcattgtntaccgttcacggccgctctacatccagacggattccatcatactcatgcactcacagtacccgagacttactcaacaaatgccaggacgccaataaataatgcgcgcagctgaccctccgcatggctctttacctgatcgtcttgaccatgaccatgattaagatcaactcctaagaggtactagatcatatgatcaacgtgcataacaataactcttcctac

SEQ ID NO: 4576 - DNA, 2644 bp, Zea mays
  Clone ID: MRT4577_104172C.1
atgtctgaagataagaaggctgctgccgagatgaagctgagtctctctgaagagaaaaacctagggtttcttatagcaatgtcgaagaccaatacagaaaaaatcaccaaagagattttagaaggtttatctgaagatactgatgacagcgacagttatgatgtggatagtggtggtgaagactccgaagatcgcccctggcgaccaagccatgcggtttttggcaaatcaagtatcaaagaaaatcatcttgtcaacatgaggggaagatatttccgggacttatccattgtgagggccgacgaaggagagaagacttgcccgtcccctgaggaaaatgaagtcgtagtgttccgaagctttttgaaagctggactacgatttcccctgagcagctttgtcgtagagaatgacctaaaaacacgggaagatattaaaggtataattatgcgccctatttggcaaagcttcggcctacggaggccgaaggttgaaatgaatgaagctgccgaagaatgccagagagccttcggagttatttgctcttttattggaacgagggatctggtccaagagcatattgccttcagagtatggccgctcgcggaaaaatgggaaatgccgcaagagaccataaaggaggctgacgaaggtggacttatcaggctgaagtatactttcaagttcggagataaattcgttgagccagatgatgactggctaaaaagcattgaaaatgccgaagatactgcattgtcggcaaccttcggaggccggaaaaagaaaagactgaaccgagtgtttgacgcaattgggttcgtgtaccccgactaccactacccagcgcggggccaaaaaagaaaaagcgcaacttctgctcaggaaactgcctcagccgctcccagcgagccaacgccgaagagacaaagggtaaaggttcttacacaccggccacgctacattgaaccagctacagttcctgagttcgcccggtgaaacctcttcggccaccgaaattaaagaaccaacttcagtgctgaagatcgaagaaaaagttgaagcaccctcagcagagaaagcagaaaaatcgagaactgagggaacaaaaatattggaaactttgagtccttcagcaagtgttgagacaataaaaacccaaaagggcccagcggtgactccaaaaagaaaaagaatggtcaatgtgctagatgttctggagacaattaagtcctcaagcacaactccgaagaagactgttgaaacttccgaagcggaaactgaaatttttgatactcaagctccaaagcaacaaactgaggctgaagctgggccttcagagcccacgaaggtaaaatccttggaaaccgaggaagaaaaaatgatggagccaattcttgttgaagaaatcagtgttgttgcccccgaagcatcccccaaagtccttgattatattgttcgacatgcttcggggaaaaagttgtctgaaaaagaaaagcaagaggcccagttttacgcccaaaaactgaaatatccaaagggggcgttgatattcaacggcagcggagaagaagacttcttgtattgtctccctgacagcaaggagatttctgtctgtcgggagatgagcaagagcttcggattcccaacactagaagacgagctctcggtgttgtcgaaaaacgagctggccgacagcttggcgtacaatagcttaaagggccttatacttagcaatgccctcagggcccaaaaagataccgaagacgaagggtgtgttatggccctgagcaaccttcgttccgaagtaattgaactaaggaacgaaggcctcgaaaaagataaaatattacattcattgataaatagaataaaagaagacgaagctacttttaaaggtcaagctgaggctcagaagcgtgaaattgaagatcttcgaaaacaactagccagagctaaggaggaacgcatacttgaagaaacgaagcgagaacttagcgaccaatgggcaaatcatttagaaggaactgttgaagagcttcgttcgtccaagaaaagatgctatatcaaatctatggagtgtgttaagaaaatgaaagctagcttcgccagcgttggcgcattctcgagcgaagaaaactttacaagaggcaaccccgaaggtcccatcgaatggattaatcacgaagctgaggcctttgaggaaattttaaatagccgcggagacatatgtgctttttcgggtgccagggggattgccaccattttggagaaaaagggttgcgagcatgtaaagattttagcgcaatccgaagccaccttgtccttcgaagatgcaaaagatccttcagccgaagctagcatggttggtggaaaatttttcaccgatgtctgggacaatggtggtcgagaaatggcccgagaaattatccaaaaaagcgaaaagggcatccatgatgctagaaaagtggcagaggctgctgagaaaagcgcagagcccgaagggcaaatagatcctactaaagcgtcttcgggccctcccccgaaagatgacgatgaaattaaaaagatggctgaagctatcatggatcagattgtcaatcaactcctgaatgaagctgcggaagtagtacttagggaagactag

SEQ ID NO: 4577 - DNA, 488 bp, Zea mays
  Clone ID: MRT4577_104173C.1
gaactcaccatcccacactcaccaccctatagagcgcgtacctcagacaagacagacagaatcgcattctaccaatggaacgtctctctgctcacaggcatgctaaacagttacccacaccgcgagcggccagaataggaaacagctccaataactacacttgcatgtcagcgccgtcatcagcaaatagtgcggaccctcatgatccgacacggtgactccaggagacaagtgcacgaggacgtgccctttgcactatgactgaaagtgactgcgtcacaggccagcggagatctgcacgcgcacgtgcgtgctcgaggctgtcaacccgggagaagaagcgcactctccgatgccgctctctaccagtgtaggcgagaattcaccttctccaacacccaggactgctagagatgccttcgaaacgtgtggctagagcacaggttcccggccgactgagactgggccgcctgatgaccacgaggtgt

SEQ ID NO: 4578 - DNA, 2580 bp, Zea mays
  Clone ID: MRT4577_104174C.1
atgtctgaagataagaaggctgctgccgggatgaagctgagcctcgacgaagagaagaacctggggtttctcatagcgatgtcgaagaccaacacagaaaaaatcaccaaggagattctggaaggtttgtctgaagatactggtgacagcgacagctatgatgtggacagtggtggtgaagactccgaagatcgcccctggcgaccaagccatgcggttttcggcaaatcaactatcaaagagaatcatcttgtcaacatgagaggaagtttcgtttctcggtccgggtcaagctgccccgtgccaacctttcggaagagatggcccggcgactggatgacagaatggttctatgtgaagaatgacctggcagtacgggaagatatcaaaggtataattatgcgccctatttggcaaagcttcggcctgcggaggccgaaggttgaaatgagtgaagctgccgaagaatgccagagggccttcggcgctgtctgttctttcattggaacgagagacttggtacaagagcatattgccttcagggtatggccgctcgcggagaaatgggaaatgccgcaagaaaccgtaaaggaggccgacgaaggtggacttatcaggctgaagtacactttcaagttcggagataaattcgctgagccagatgatgactggctaaagagcattgaaaatttaagtgatgaactgcttggggcttattcgaaggccgaagacactgcactgtcagcagccttcggaggccgaaaaaagaagaggctgaaccgggtgtttgatgcaatcgggtttgtctaccctgactatcgctatcccattcgaaggcagaagagaaaaaacacaacctctgcaaaagaagaagctgcaattgctcctagcgagccagaaccgaaaagaaaaaagataaaggtcctcacacatcggccgcgctatattgaaccagcttcggtgcctgagtttaccggagaaacttcttcggccaccgaagctgaaaaaccaaccgagccaactttgctgccagaagtcgcagaaacggccgaagtgccaacaaagatagaattggaacaatcaaagattttgttatcagaaacgaaagagaaggccgaagcgccgtccacagaaaaaatggaagaggtaaaggaagcaactgagggctccaaaacatcagaagttttgagtcctgcagcaaacattgagacagtaaaaaatcaaaaagtgccagcagtgactccaaaaagaaagagaatggctaatgtgctagatgtactggaaacgatcaaatcttcaagcacacctccgaagaaggttgctgtcattcctgaaacaacaactgaaatttctggttctaaagctccagagcaagagactgaagccgaagctgggccctcagagcccgcaaagataaaacccttggaaaagaaagaagagcaagaggcccagcactacgcccaaaaactgaaatatccaaagggggcgttaatattcaatggcagtggagaagaagacttcttgtattgtcttcccgacagcaaggagatttctgtctgtcgggagatgagcaagagcttcggattcccaactttagaagacgggctctcagtgctgtcgaagaacgatctggccgacagcctggcttataatagcttaaagggactgatacttagcaatgccctcagagcacagaaagatgctgaagacgaagggtgttctatagccctgagcaaccttcgttccgaagttattgaactgaggaacgaaggtctcgaaaaagataaaatattacactcattgataaataaaataaaggaagacgaagctgcttttaaaggtcaagctgaagctcagaagcacgaaattgaagatcttcggaaacaactggccagagccaaggaagaacgcatacttgaagaaacaaaacgagaactcagtgaccaatgggcagatcacctagaaataactgttgaagagcttcgttcgtccagaaagagatgctataacaaatctatagagtgtgttaagaagttaaaaactagcttcgccagggtcggcgccttctcaagcgaagaaaactttacgagggggaatcccgaaggtcccatcgaatggatcgaccacgaagctgaggccttcgaagaaattttaaatagccgtggagatatatgcgccttctctggtgccagaggaattgccaccatcttagagaagaagggctgtgaacatgtaaaaattttagcacaatccgaatctgctttgtcttttgaagatgcaagagatccttcggccgaagctagtataattggtggaaaattttttaccgatatctgggataatggtggccgagaaatggccggagaaattattcgaagaagtgaaaagggcattcacgatgctagagaagtagctgaggctgctgaaaagagcgcagaggccgaagatcttgctaaagcgtcttcgggccctcagccgaaaggagacgacgaaattaaaaagatggctgaagatattatggatgaagtcgttaatcggctcctgaacgaggctgcagaagtcgttttgagagaagattaa

SEQ ID NO: 4579 - DNA, 2694 bp, Zea mays
  Clone ID: MRT4577_104175C.1
atgtccgaagataaaaaagctgctgccgagatgaagctaagtctctctgaagagaaaaacctgggctatgatgtggatagtggtggtgaggactccgaatatcgcccttggcgaccaagccatgcggttttcggcaaatcaagtatcaaagaaaatcatcttgtcaatatgaggggaagatatttccgggacttgtccgttgtgagagccgacgaaggagagaaaacttgtccgacccctgaggaaaatgaagtcgtagtgttccgaagctttttgaaagctggactacgatttcccctgaacagctttgtcgtagaggtgctgaaaatatttgaaatttatcttcaccaacttacccccgaagcaatcataaggatgaatatcttcgtgtgcggtgagaagccaaggtctagaaccggatgcgaagagtttctgcaacatacacgaattgttatacgaaacaaagccctgggcttcgtcgctcggtctgggtcaagctgtcccatgccaacctttcggaagaaatggcccggcgactggatgtcagaatggttttatgtgaagaatgacctgaaaacacgggaagatattaaaggtataattatgcgtcctatttggcaacgcttcggcctgcggaagccgaaggttgaaatgaatgaagctgccgaagaatgccagagagccttcggagttgtttgctcttttattggaacgagggatttggtccaagagcatattgccttcagagtatggtcgctcgcggaaaaatgggaaatgccgcaagagaccataaaggaggctgacgaaggtggacttatcaggctgaagtatactttcaaatttggagataaattcgttgagccagatgatgactggctaaaaagcattgaaaatttaagtgatgaactacttggggtttattcaaaggccgaagatactgcattgtcagcagccttcgaaggccagaaaaagaaaagactgaaccgagtatttgacgcaattgggttcgtgtaccctgactaccactatccagcgcggggccaaaaaagaaaaagcgcaacctctgcacaggaaactgcttcagccgctcccagcgagccagcgtcgaagagacaaagggtaaaagttctcacacaccggccacgctatattgaaccagctacagtgcctgagtttgccggtgaaacctcttcggccaccgaaaaagaaccaactttattgtcgaagatcgaagaaaaagctgaagcaccctcagcagagaaaacagaaaaaccgagaactgaaggaacgaaagtattggaaattttaagtccttcagcaagcgttgagacagtaaaaaaccagaagggcccagcagtaaccccgaaaagaaaaagaatggtcaatgtgctagatgtactagagacaattaagtcctcaagcactaccccgaagaagactgttgaaacttccgaagcggagactgaaatctttgatactaaagctccagagcaacaaattgagactgaagctgggccttcagagcccacaaaggtaaaatccttggaaaccgaggaggaaaaaatgacggagccaattcttgctgaagagatcagtgctgttgcccccgaagcatcccccaaagtccttgattacattgttcgacatgcttcagggaaaaagttatcagaagaagaagtttttgaagctaatcactatgccaaagaattaaaatatccgaagggggcactagtgttcaatggtacaaatgaagaagatttcttatactgcctcccggataacaaagaattactcgtctgtcgggaaatgacccgaagcatggggtttccgaagctggaggctggcctctgcgcgatgacaaaggacgatcttgcggacagccttgcgtataatagcctgaagggtttaatactaagcaacgcgctgagagcgcaaaagaatgccgaagacgagagctatgaaattgctttcaacaaccttcgaacagagcaattagcccgggctaaagaagaacgcatacttgaagaaacgaagcgagaacttagcgaccaatgggcaaatcatttagaaggaactgtcgaagagcttcgttcgtccaagaaaagatgctatgacaaatctatggagtgtgtcaagaaaatgaaagctagcttcgccagctttggcgcattttcgagtgaagaaaattttacaagaggcaaccccgaaggtcccattgaatggattaatcacgaagctgaagcctttgaagaaattttgaatagtcgtggagacatttgcgctttttcgggtgccagggggattgccaccattttagaaaggaaaggctgcgatcatgtaaaaattttagcacaatccgaaactgccttgtcctttgaagacgctaaagacccttcagctgaagctagcatagttggtggaaaatttttcaccgatatctgggataacggtggtcgagaaatggcccgagaaattatccaaaaaaacgaaaaaggcatccatgatgctagaaaagtggccgaggctgctgagagaagcgcagagcccgaagggcaaatagatcctgctaaaacgcctccggtccctcacccgaaggacgacgatgaaatcaaaaagatggccgaagctatcatggatcaagttgtcaatcaactcctgaacgaagctgcagaagtagtacttagggaatactag

SEQ ID NO: 4580 - DNA, 2589 bp, Zea mays
  Clone ID: MRT4577_104176C.1
atgaagctgactctttctgaagagaaaaacctgggatttcttgaagcaatgtcgaagaccaatacagaaaaaatcaccaaagagattttggaaggtttatctgaagatactgatgacagcgacagttatgatgtggatagtggtggtgaagactccgaagatcgcccttggcgaccaagccatggggttttcggcaaatcaagtatcaaagcaaatcatcttgtcaacatgaggggaagatatttccgagacttgtccattgtgagggccgacgaaggagagaagacttgtccgactcctgaggaaaatgaagtcgtagtgttccgaagctttttaaaagctggactacgatttcccctgagcaggtttgtcatagaggtgttgaaaatatttgaaatttatcttcaccagcttacccccgaagcaatcataaggatgaatatcttcgtgtgggcgaatgacctgaaaacacgggacgatattaaaggtataattatgcgccctatttggcaacgcttcggcctgcggaagccgaaggttgaaatgaatgaagctgccgaagaatgccagagagccttcggagttatttgctcttttattggaacgagggacttggtccaagagcatattgccttcagagtatggccgctcgcggaaaagtgggaaatgccgcaagagaccataaaggaggctgacgaaggtggacttattaggctgaagtatactttcaaatttggagataaattcattgagcctgatgacgactggctaaaaagtattgaaaatttaagtgatgaactacttggggtttactcaaaggccgaagatactgcattgtcagcagccttcggaggccgaaaaaagaaaagactgaaccgagtgtttgacgcaattgggttcatgtaccccgactaccactatccggcgcggagccaaaaaagaaagaatgcagcttctgcacaggaaacagcttcagccgctcccagcgagccagcgccgaagagacaaagggtaaaggttctcacacaccggccacgctacattgaaccagctacagtgcctgagttcgccggtgaaacttcttcggccaccgaaattaaggaaccaacttcaacgccgaagatcgaagaaaaaactgaagcatcctcagcaatggaagcagaaaaaccgagaactgaaggaacgaaaatattggaaattttaagtccttcagcaagtgttgggacaataaagaaccaaaagggcccagcggtgaccccgaaaagaaaaagaatggtcaatgtgctagatgttctggagacaattaagtcctcaagcacgactccgaaaaagactgttgaaacttccgaagcggagactgaaatttctgatattaaggctccaaaacaacaaactgagactgcaactgggccttcagagcccacaaaggtaaaacccttggaaaccgaggaagaaaaaatgacggaaccaatttttgttgaggaaatcagtgctgctgcccccaaagtccttgattatattgttcgacatgcttcggggaaaaaattatcagaagaagaagtttttgaagctaatcactatgccaaagaattgaaatatccgaagggggcactagtgttcaatggtacaaatgaagatgatttgctatactgccttccagataacaaagaattactcgtctgctgggaaatggcccgaagcatggggtttccgaagctggaggctggcctctgcgcaatgacaaaggacgatcttgcggacagccttgcgtataatagcctgaagggtttaattctaagcaacacgctgagagcacaaaagaatgccgaagacgagagctatgaaattgcttttaacaaccttcggacagaggtaattaaactaagaaatgaagccttagaaaaggacaaaattctagttacattggtagataaaataaaggagaacgaagctgcgtctaaagcacaagttgtagctcaaaagcacgagattgacgaccttcggaagcaattagcccgggctaaagaagaacgcatacttgaagaaacgaagcgagaacttagcgaccaatgggcaaatcatttagaaggaactgtcgaagagcttcgttcgtccaagaaaagatgctatgacaaatctatagagtgcgttaagaaaatgaaggctagcttcgccagcgtaggcgcattttcaagtgaagaaaactttacaagaggcaaccccgaaggtcccattgaatggattaatcacgaagctgaggcctttgaagaaattttaaatagtcgcggagacatatgcgctttttcgggtgccagggggattgccaccattttagaaaggaaaggatgcgaacatgtaaaaattttagcacaatccgaaactgcgttgtccttcgaagacgctaaagacccttcagctgaagctagcatagttggtggaaaatttttcaccgatatctgggataatggtggccgagaaatggcccgagaaattattcaaaaaagtgaaaaaggcatccatgatgctagaaaagtggccgaggctgctgagaaaagcgcagagcccgaagggcaaataggtattaactaa

SEQ ID NO: 4581 - DNA, 337 bp, Zea mays
  Clone ID: MRT4577_104177C.1
gcaaattgtaccttgcatgtacttgtattctcaacgggcacaataaaagatagaaatggctcatgcatcactacttaacatttattaacttaaagactatatatatctttaaatctttggactccttttcatttctattaacgcttccgcctcttccaatatgatatcttactcagtttgtaccaattgatttaagcttgtcttacataataaatagttttcttgactttgttgttgtcattggtgcatatttaatcaattattttaagttcactgtttatcaatcattttgacttttgattaatctcattttataaatttgatgaatatcaatttt

SEQ ID NO: 4582 - DNA, 1158 bp, Zea mays
  Clone ID: MRT4577_104178C.1
atggggtccaggcacagtgcttgctctgccgaggctgggtgccgaggttctttcgttttgctttttagtcaccctcctgcgaggagagttcgacatgcttcggggaaaaagttgtctgaaaaagaaaagcaagaggcccagttttacgcccaaaaactgaaatatccaaagggggcgttgatattcaacggcagcggagaagaagacttcttgtattgtctccctgacagcaaggagatttctgtctgtcgggagatgagcaagagcttcggattcccaacactagaagacgggctctcagtgttgtcgaaaaacgagctggccgacagcttggcgtacaatagcttaaagggccttatacttagcaatgccctcagggcccaaaaagatgccgaagatgaaggatgtgttatggccctgagcaaccttcgttccgaagtaattgaactaaggaacgaagccagagctaaagaggaacgcatacttgaagaaacaaagcgagaacttagcgaccaatgggcaaatcatttagaaggaactgttgaagagcttcgttcgtccaagaaaagatgctatgacaaatctatggagtgtgttaagaaaatgaaagctagcttcgccagcgttggcgcattttcgagcgaagaaaactttacaagaggcaaccccgaaggtcccatcgaatggattaatcacgaagctgaggcctttgaggaaattttaaatagccgcggagacatatgtgctttttcgggtgctaggggaattgccaccattttggagaaaaagggctgcgagcatgtaaagattttagcgcaatccgaagctaccttgtccttcgaagatgcaaaagatccttcagccgaagctagcatggttggtggaaaatttttcaccgatgtctgggacaacggtggccgggaaatggcccgagaaattatccaaaaaagcgaaaagggcatccatgatgctagaaaagtagcagaggctgctgagaaaagcgtagagcccgaagggcaaatagatcctactaaagcgtctccgggccctcacccgaaagatgacgatgaaattaaaaagatggctgaagctatcatggatcaagttgtcaatcaactcctgaacgaagctgcgaaagtagtacttagggaagactag

SEQ ID NO: 4583 - DNA, 184 bp, Zea mays
  Clone ID: MRT4577_104179C.1
ttttcaaaccagaaacggggggtgtgggtgatgactattacgaggagcacctatttatccgctacatgatattctttctttagttttatttttgtccgtccaatacctcggtgtactcttgtaattggaactcttaaatgtaaacaaaaattgggtatatttaataaccaatgatcatgtgttc

SEQ ID NO: 4584 - DNA, 225 bp, Zea mays
  Clone ID: MRT4577_10417C.1
aggagcaacccagggggcggctgatgcattatatttaaagcatatggacctaacgcactggaaacactaacaatgttcagcagtaaaaaaacaaaagttgcgaggaaacaatagcgaaaataaagagaattgtggactaacaacacatggcgcaaattaactagcagggatggatctagtctgtctcctgaacaggggagcgacaaaacccgacataattacaaa

SEQ ID NO: 4585 - DNA, 623 bp, Zea mays
  Clone ID: MRT4577_104180C.1
atccctttcaaacaggggacggcccgctccatgttgaccctggtcgattgttgatcctgctccgtcgcgtcgcgatcatgcgcggcatcttaagctgtgctcgactgttccgactgccttctcgctaagatggctcgcatcctcgcctgttccagaaagtgaagcacaggggccccgactgatgcgtcactgtacacagcacgaggtgcaacttcctgatgccccagcggctcgccgccgtctccccgctgtccgttgacagacgctgttcaacgtggaccgcaccgacgtggtgccggccattggagagatctacataccacaagaacggccggaagcatatcaccggcacacacaacttcagcacgagcagtgactgcgaggtcatcatgcccctgtacgataagtacggcgagaacttcgggtacatgctggacggggagctcgcgttcgtgctctactacacccgcgacaggacctacgtggcgtcgcgcgacgccatcggcgtcaacccgctctacatcggctgaagcagtgacggttccgactggatcgcgtccgagatgaaggcgctgaacgaggactgcgtgcgtttcgagatcttcccgtcgagccacctctac

SEQ ID NO: 4586 - DNA, 177 bp, Zea mays
  Clone ID: MRT4577_104181C.1
acaagtccctatagtgagtcatattagcgtcatggctacaatgtcatgatgtcgagattgccgaggttcttccatacgataacagaggatctttgtgttcagtactgtcaagccgtgtcttcatacgaggggggaaagtggatgctccactgaatggttgggcaagaagtggtgtta

SEQ ID NO: 4587 - DNA, 503 bp, Zea mays
  Clone ID: MRT4577_104182C.1
cgttgctgtcgccgttgctgtcgcccagaggtgccgcgcgacgtcgaggccggcgtagaacgggacgaagacggcggccgcgagggaagggtcgtcggtgaggcactcgtaccgcttgatccgctcgtggaagacgatgtccagcgcgtgctcgtcggtgtcgtaccagccggcgatggtgccctggaacgcgcccttgccgccggggagcagcgggccgaagccgccgttggtggtgtacctgcacatgtccgtccacggcgacagcttgtcgcagttctggaccatgtccttgttgaagcgggccggcaggtcgtgtacgtagatgtactggcccccgcagaggtcggccttgtcgtcggccgcggccagcgcgcgggcgaaggggtggccgccgcgctgctcggtgtgagcatgagcatgaggtcccgagggcgagccctgcttggacgatgttttggctccactggaagacttcgccgcgtcaccggcaccgctggcgt

SEQ ID NO: 4588 - DNA, 649 bp, Zea mays
  Clone ID: MRT4577_104183C.1
gaactgtctagcaaaggaggagcgtctgcaccccgccctgaaagagccgcatccttgccttcagattccgcaagccccaaggcgaaggcgaaggcgaagccccctgctcggtccatgtccatgcagccagagatgtcgagggggaacgtgcatccgagcatgccggatttcgacgaactcgccgcgcgcatcagtgctctgaggaacgcgtgagctgtgccccaagactgactgcccttcagcgacgcttctgttgtttcaggaacaaacctctaccatggaatctgaaacctggtggtgcctgcgagtcacggcctcactggggataagaggacactcgaggagatacaactgtggcctgttttcgcagcaattgtttttttgtcttggtggtatacttgttctcgtgttgctctgagtgtgtcttggtggtagagtattgtcatcaggaagagttgttaagatgtggcaattcatagggataccatactaccataccgatagccagctacagcgatctggatgtggttgtttgttgtactcatagaacagatactgttggtgtgtaagatgtccattgatgctgctacgatgataaagaaattccttcttttattatagagaaacgaagaacaaactccctcaaaat

SEQ ID NO: 4589 - DNA, 425 bp, Zea mays
  Clone ID: MRT4577_104184C.1
tcgggactttgaggttaaaaacagttagatttgtaaagaatttttttcatttaaaattgaaaatactgatgatatagtcccagaacacactggggggtaaatgggtgtgacaggtaatgttagttttcatctcatttagtttgaggtcccctaagagctgcttcctttttttcttcccgtcttgttctctttgtgagagactttgaaggccaagttctaaggaaataaagagtaatttagatttaaagatgtttaggaagcggttacacaaagaaaaagtatatgagctacaaacaaactctgtcccatatgtgcggtcttttattttctgagagactgctgtgaatcccatggtactccagctcacattctgttgacatgtatgtcagcaggactgggttttgtcgtcacgcgtgcctggcgtc

SEQ ID NO: 4590 - DNA, 2506 bp, Zea mays
  Clone ID: MRT4577_104185C.1
cgggagcagagagaagcgcaggagaggggaccgctgaccaccgagggagccgggcaagatgttcgacagtctgctcaactccaagttctacaacaaatgcaagcacgcgatcaagtgcacccggacccggctggatctgctgcggcggaagaagcaagcgatggtcaagttcctcaagaaggacgtcgctgacctcctcaccagcggccttgaatcgcacgccttcgcacggatggaagggctgatcattgagatgaaccaagcatcgtgctatgatacaatagaagagtactgcgaatatattgcgagagcagctcaaccacatgcagaaagctagtgaatgcccgcaagaagccttggaagctgtgtctactctaatatttgctgcagctagatttcctgatttgcctgaactgtgtgacctcagacatatattcacagagagatatgggagttctgtcgagccttttgttaattctgagtttgttcagaacctccagaataaatcatttactgatgaagagaagttgcgagtaatgaaacgtgttgctgaacaaatatcacatccattcgagaggagtggtctgcaatggaatatagcttgtggctctcaaaataaacatgctcttccaaagaagagttcacttaaacaggagatggaacgagatggacacaaggttgataggcatgctgttcatgaaagaaaatcaaaagctatgcctgaaggctatgaacagaagcaggaaatgaacgtaaaacccaaagatatccatgtcgttcctgatggcattggccagttaggcgaaaaaaacagaaagaactactctgataaacctagtgagagaaggcacgtggataatcctttgcctcctttggacatgaaagaaaagaatggtcagaaagacatgaagaaatctggcaaaaaggatagtgaccgtcggagggaactgatggatgcggaggtgttagacatcaatggcttgaaaaaacaggatgttggtacgatgaaaccttccggtggccccgatcgtagttggggacatgctgacctggggcttaaaactctgggcatagaaaaacaagaaattgatccaatttccaccttgaatggtaaagcagtgaacaagcctcctccttattctaagccctacagagcaccaatgggcgagaaggttgctgaagacaggcagcctgtgccagagaaggcaaccaatatgcgtcctccttatgttaagccaaatttcgaaaaacatgcaaatcaaggcgcaaatggccacaagcagagtggcaccgaagaaacaatccaccagaagcgtgaaccaatctatgatcctgtctccgtgagaagtagggttccaagaccacctgcacatgctgatgaatatgctggaatggaggaaaagatggcaaaccaagcacctgatggccgaagaagacactcaagcaagaggaatggtgcccatgacaatcatgaccagagagttgcccatgttgtaccacccttagaaggcatgggggtcgatgacgatatcaacaacgcgaggccttttcatcgagttcctagcgagcgaagaaagcacaaaagcaggcagaacggatcgacgagcggcagtgactacaattgggccagcgaaggccacgagtctgatggcgacgatgtgaacacatcgatcgatttcggcaacctcctgccccgagcccccagttcgcacaggaaacacaggagccggagcgctgatcctcgcaaggcaggaggccgcggcgacgacgaggagaggatgatggacaagcttctgatgcactacagcaagaaagggctggacagggaggagcgcaaggagagagccaacaagtcccggaccctgttcccacgagacgaccagcgcggcgacggagccggagaactgtctagcaaaggaggaggagcatctgcacaccgccctgaaagagccgcatccttgccttcagaatccgcaagccccaaggcaaaggcgaaggcgaagccccctgctcggtccatgtccatgcagccagagatgtcgagggggaacgtgcatccgagcatgccggatttcgatgaactcgctgcccgcatcagtgctctaaggaacgcgtgagctgtgccccaaaactgaactgattgcccttcagttcagcgacgcttctgttgtttcaggaacaaacctgtaccatggaatctgaaacctggtggtgcctgcgagtcacggggggataagagaacacttgaggagatgtaactggtctgttttcgcagcaattttttttgtgtgtcttggtggtataattgttctcgtgttgctctgagtgtgtcttggtggtagggttgttaagatgtggcaattcatagggataccatactaccataccgatagccagctacagcgatctggatgtggttgtttgttgtactcatagaacagatactgttggtgtgtaagatgtccattgatgctgctacgatgataaagaaattccttcttttatt

SEQ ID NO: 4591 - DNA, 282 bp, Zea mays
  Clone ID: MRT4577_104186C.1
ggcagctgcagtacccccaggatgcgtcgctattatccagcaggacattcagagccaacggaatgtgaaaccgcagccgcctctgggtgatgcctacctcactggtatgcctgccaatagacgctagacgatgcatggtgatggcccccatctgattctctcagaagctgtgagccgggcagctaacgcaggcggagctcggcccctgacgagccccgagagcctgagtcgggacctggatgcacaagaggttcgtcagagctacaggcagcagctccgggc

SEQ ID NO: 4592 - DNA, 315 bp, Zea mays
  Clone ID: MRT4577_104187C.1
ctcgaatctccaatcattcgtattcgtacatccaattcatcccatacggcggattgaaagaacgaattttgcatgcatgcatgcatgccagccgatcactacacatcactctctcgaacgaattttgcaagctgcatgcacgggacggggcgttctactactaatcgtgcatggattagcagcaagcaaacattttataacaatctggagcaagtaatcctactagcaagcaggtgggtgggtagcctatcatcctgcgcgccgaaaagacactggttttttttttggacacaaaaagctggcctcgtcttgctc

SEQ ID NO: 4593 - DNA, 484 bp, Zea mays
  Clone ID: MRT4577_104188C.1
cgtacttttttttttttttttttttttactttttttttttttttttttttttttttttttttttttttttaaaaacacaaaaccagggaagtaattagatcagttaaaaagaaggaagcaaattaccccatacatataattccaaaaagcctgggggggggaacaaatttttttttaaagttctaggaaagagtaccacatgccccaaccactctttttacaaacaaaaaggaacggtataactcccgcacttgaacccaggttaaaacggccttttacaaaagggggggaggaacacaaccttttccaggcaccaaacctttttaacttccttgaaaaaaaattggcaaagggagggaacatttgcccttttcacacaaaaaaaaatgctgccgacgggggcaactttgggttcggtggaaaaagcaaaaactgctggcactctcgttaaaggttttccgggttttgaacacaaccagaagcc

SEQ ID NO: 4594 - DNA, 355 bp, Zea mays
  Clone ID: MRT4577_104189C.1
atgccaagctagcaagagagggggtcgatcttttttgtttcgggaaaaaaaacgagcccgcccgtttcttcgtcgcacagatagatctgcacattgccccaaggagtagcgcccactagcccgcgaaactggttcatgatcatcctacgctacccggtgtgccttagctttcactacacaagtcctctgtggagaaacaacaccccgcgcagaatgatcaccttttggtcggaccttggacactcgagggcaaaccctgcggccctacgaccccaccgcgcgcacggtgagcaggacgttcgccaccaccaactttcctggctacttaccgcgagaagggccaggaacaggccct

SEQ ID NO: 4595 - DNA, 1047 bp, Zea mays
  Clone ID: MRT4577_10418C.1
cccacgcgtccgcccacgcgtccgccggaagccgctaccgctagcacctccgatcgagtcggcgccatggaagacgtcatcaccgacgtgccgccgccttcccgcttttcccctgacgacctcgacaacttcgccgctccgccagcgcagcccacccccatcttcgtcgtttccccgaaccctagcccaccggccccgcgcctcctcgtcgtattcatctcccccacctccctcgcgctcctcgcctccccgccgccgctccacgcatccctgctcctcccggacctgcccctactcccgcacgcgcccatgcgcgtgtacctccacccctccggcgcgctcctcgccgcggcgcacggcgccttccccgcccaccgcgcgcgccgccgcgaaggctcttgtctccaggctccagccggaggaggtgctggttttggacgcggtccggagcgggacgtaccggggccgcctcgccgcggacgagcccgtggaagggaagttggagacccgcgcggcgcgcgcgcggggaggcgtgggggctgccaaggcagtccaggctctggtcccacccggcagcgtggtggacgggctcggcgccgccgtgctcgcggagtgcgagatccggggcaaggcggccagcatggtggtgacgtggccggcggacgccaggcccgcggagttcggggtcatgcggcgcgtggcggcggagctcggcgtcgacaccggcaaggccgcggccagggtctccggccggcccgacctggattccttgtacacttgagatttctctgttactgctgctgaattgctgatttcgttggctgtggcgttgggttgtctgatgagtgagtgttttgttggtttgagacaatttggggtcaaatctggtctgacggacgagttggtttgcgtgatttcatatatgaacaaattctgatctcagttgtgtcgttactgctgtaatgatcactgattgaatggttggccttcctcagaagccatgtgaaggccaattacaatgaagcgcagaaaggttcatgacaagct

SEQ ID NO: 4596 - DNA, 334 bp, Zea mays
  Clone ID: MRT4577_104190C.1
aaacacatcagcatgctaaaaaaatcttaagaacacgggatgcttagtctttactggtatccaggacgaccaactccattgggcatgaatggtcgggagaccctaaccggcagtggggaaggcaaagcttcccggcctatcgggaaaacgactaagagtacctccggcttctcccatcctagcgactatctgcattgaactctgctccttatttactgcaccaacaatctaccatacagccagttacctgttggctacccccagctcttgcttccattctaccaactggcagcattgacctctcctgcttatttcagggacaacaactactacc

SEQ ID NO: 4597 - DNA, 272 bp, Zea mays
  unsure (1)..(272): unsure at all n locations
  Clone ID: MRT4577_104191C.1
gcgactgcgactgcctccaagggttccaagtatgccactccctgggtggcggcactggttctggcatgggcacgctgctcatctncaagatccggggaggagtaccccagaccgcttgatgcttgaccttctacgtgttccccgttgcccaaggtggtgggacaccggtcgtgggagcccctacaacgccgacgctgtaccgggcaccagcctggtggagaaacgccgactaagtgcatgggtcccttgacaacgaaggcgcctctatgata

SEQ ID NO: 4598 - DNA, 111 bp, Zea mays
  Clone ID: MRT4577_104192C.1
gtcagccatgttggcgcgtgattgccattacagcacagaacactgttagtgactggtttcctgttagatacgggttccagcagcctggggcagtatatctcagctggaatg

SEQ ID NO: 4599 - DNA, 1511 bp, Zea mays
  Clone ID: MRT4577_104193C.1
ccccgcgtccgcccacgcgtcggcccgtccctggctcgttcagtcgtcctcttcctccaacctttccgctgccggtgaacttcctccacctgaagcccctaccacgataagccctaatcccagcgccacctcgatggcgaccacctctttcttccatccgctcgccgccccgatggaccgcggtggcgtttgttttcgtcgctgcccgttcagcctaaccatccccgcccgtacagcgccccggcgaccggcgccgcttctcgtcgtccgcgctaagcgcgccggcagccaggcccctgctgccgccgcctcgcgtcagcccgcgaatcccagcgcggtcccgaagcgggacgtggaagaagaggaggaggaggtcgaggaggagatgccctggatccaggacaaggcgctggacctcgtggagttcactggcaccgtcacacaggccatcccagggccccgtgtcggctctagccctgttccatggcttctcgcggttcccctcgcctacgtcggggtctcctttgtgctcgcggtcgtccgcaccgtgcgcaggttcacctcgccgcacactaagaagaagcgaagggtgagtaagaatatattcttgttgaagtcactagatgatctgtttcagaagggcagggaggcaataaattatcctgctcttcaggacctaatgcaaaagacaggatttgacatggatgatgtagtaaggaagtacatccgttacacactgaatgaaaaacagttcagtcctgatgtggtttgtggatctcatacatcttaggaaggcatcaatgctggaagatgcagaagttgctgaaattttaaatgagatttcaagacgaattgtccgggaaaaagggccagtagttatggacttatctggttttacagagcaaggttttaagcggaagcttgctgtacaagcactgtttggaaaaatcctatacttatcagaacttccggagttctgttcacgggacagctcacttgtagtcaaagaaatctttggagttacagatgaggatgcagacagcctgcggattcacaccctatcagcaacaggtgatatcgaatctatacagaagatggtggacgatctagacctagaacaaggtcccccatcatcgtcttgagttatggtggtggaataatgctaaacatcgtcgttgatagtgttgcaattttagattgatgtgagtttctcgaatcttttcgtttagttttttcagctgttgaagtaggacttggcctgtgaacacaggatactttcggctggagcctggaggttttgtaaattgcctctcgattaggataacgtatgtcagacctgcccatgatttgagtaaacgagaatactattattatagaaaagcgcacggcagcagtgagtttatagaacgcgggaataatatctaaaaaaaaaaaaaaaaaaacaaaactaaacaaaaaattaaaaataatatacttaatccaaaaaattaaaagagcaaaaaaaaaataaa

SEQ ID NO: 4600 - DNA, 597 bp, Zea mays
  unsure (1)..(597): unsure at all n locations
  Clone ID: MRT4577_104194C.1
aattcggcacgaggttcgtaagaggatcaggggccggcgccggaggagatcccccgcgctatttggagctccccaagaaatgccgtgtgcactagaagtgattgatgcaaggttacagagcacatcacatattcagtgcagcagatcatttgaccaaaacattggaagacgcttttcaaagggccatctgatacaaaaacctgttgccatttgtcctgagaacagtgacacctcatcaacaatancttctgtttcggcacgatccagactggaaacaagcaccattcttgtctgacactcaagaggtcaacaaggtaatctctttgtcatcaggagctcttgatacagattgccttgagctattatctgaacagccaagaatactgttttgcttagatcagccaaatgaaaagaacatgcatgatcaggttgattcttctaaaccagtttccaatggaaacacacatggngggaagcacctttagacaatctcagcaagggaaaacgtttgtaattcattgatggcagttcctcctgccatgtagttgaaagaagactccaggtctgttgctactgtctgagctgggatctgatctg

SEQ ID NO: 4601 - DNA, 254 bp, Zea mays
  Clone ID: MRT4577_104195C.1
cccacgcgtgcgcccacgcgtgcgcccacgcgtgcggcggtcgccctttttttaggccgatggcgttcgcatacccgtcgtatcactttggaacaaattgaactaattccaatcatacattttacacgtgctctggaactacttcccacggaaactactactacctgttctagtaaaattcatgtacttgtttacaccacatgagatagctcatcccaacatgcatctttgaagtatcagcatacgtctagacc

SEQ ID NO: 4602 - DNA, 247 bp, Zea mays
  Clone ID: MRT4577_104196C.1
gtgacgcgagcacgagcatccatcgtttccccttcttccccatcgcgtgccctcggcgcaaccatcttccattgcggaccaagttcagggacgagcaaattcgcggagttcaagtaggcttcaagctcctcgataaagatggcgacggctgcatcactaacaagaagcttgaactgtgatgcgctccctggccagaatcccactgagcagagctgcagacatgatcacgagttgatgctgatggcat

SEQ ID NO: 4603 - DNA, 316 bp, Zea mays
  Clone ID: MRT4577_104197C.1
ctctttttttttttttttctttaaggtcaaaaagaaaataaactcatgaacctttaaatttacctcaatgtaacacaagcaaacaaataccacccaaaaacccaaccactaaaaatgatcactaacacattaaccttaaaaaaataaaccataaaaaaacaatgactcaacccaagctttaatgcacacaccaaactctaattaatattaaaaaacaccaaccccacaaatagcatcacactaaaatgacctacacgagaaataacatcaatttaggacataaaaccaaaaagccacgtccttgaccaaccaacac

SEQ ID NO: 4604 - DNA, 220 bp, Zea mays
  Clone ID: MRT4577_104198C.1
tatggtctgctggggaagcgaacccatcctactaggtacagtagctattaaagcatgtataatttagggcatgtatagtttatgtattgagctgtatatttcagtgtgtctaatagagtaaatataaaaactcaagacatgtatcttaaatttgcttcaaacaaggtttgtaatatttctcgattttatttaaagttgacgcatatatacttatcccgtt

SEQ ID NO: 4605 - DNA, 650 bp, Zea mays
  Clone ID: MRT4577_104199C.1
tgggtacctcgagggccggccgggatacttccagttaaaacatcgtattcccccagtttaatggacttgatccgccctaatcaagcaaccctcctcaacgaacgaacatctggagacgacaattacctcaaacgaatgacatctcctccgaactactgaaaaccactcaaaaaaaaaaaaacacacccctgaaaaaaaacaccaccaaaaaaaaaaaaaaaaaaaaagatgcttgccccctctccccccccactcccttcgatctacccgccctcgcgtcgggatggaaccacacgcaggtcggcatcccccccgctgggagcgccccccccactgattgctccagtttataccaccactgctttagcgggccccccccccttcgtattgtcaaaacaagatccacctgctgaggacttcgactatcctgcacatatggatatcacacagctggggtcgttggatgatgatatacaccccctttttttggggccgggtggccccctcctcaacagaatggagcaccggggagacaccttggatgattgctctgaggaagggggagagccctccttagatgatgatcaccttgtgtttgaaaagacatggccagactgaattttttttttttgttccacctccgcggaact

SEQ ID NO: 4606 - DNA, 509 bp, Zea mays
  Clone ID: MRT4577_10419C.1
gcaaaagtgcttatttctttcattattttggaagcttgacgagggttttgatgagagacacaaaccgtgagggttgtttggaagccatgagggggttgttacacaggatcagacccacacaagaggaggggggagctcaggagaggcaaccctatcaaggaatacaaactcagaggagtgggtgagaggcatgaaacggggaaatgaaactcgggatggcggagcaactagggtgcccgactcttgatataatagaagactgaatgcactggcaagggggggctggagagaaaacagaacgccatagatgccactaaggggggactgtggacgccgggagctgcgggggaatttatttcaggggaccgtgggcccaccatccttggctatacagaggctgatgcaaagctaggggcactttgggcctaagtgccccggtgagacaaaaaggcactgggtggcaatgccacacgccatacgagacggaagccttacggggctgggttggg

SEQ ID NO: 4607 - DNA, 334 bp, Zea mays
  Clone ID: MRT4577_1041C.1
tcgcccacgcgttcgtggacgcgtgggtcaattgtagaatctagttaaaaattgggactctacaaaatctcttgtgcatggcagttcataccaaaggaagcttggtgtcctaaagggtggagcacctccaacagtggataaaccaaaacgacgaacaccagcatttacaggaagaagttcatgacaagataaatctcatcgttcaagaaacatgttcactagcccacatcgtccacgtgttcgtggaaggcttccagccttcaatatgtaacttctggctttgagaacacgagctataccatgaaccttttcacccctccccccctgttgtgaa

SEQ ID NO: 4608 - DNA, 310 bp, Zea mays
  Clone ID: MRT4577_104200C.1
gtacaggacttacacacacctataatttttttttaatggaaggcggtaacaaatataaaaaacaaaaatcgccctttttgttttgcccaccaaccaggaagggacacgacttggacaaaagcaaagaagatagggggtccaataagttataaaaaaacatagcgactgagctcacaccttacgccgccagcgccaagagaagcggagtcgttactgcggcggccacccattgagcagacaggtacaacggtgcgtcggcagcctcgccccggggataatccgacaagttacttacggagacgggccatct

SEQ ID NO: 4609 - DNA, 248 bp, Zea mays
  Clone ID: MRT4577_104201C.1
gtcgatctcacccatcgggatgctggtcgagcactcgagagcgtccgcggaggttgtctcgtgccgacggactgctatggccggcaaaaccaaggacacctgcatggcgcttttgatctccgatgtgaatcacgctgatggcccaagatgcgttcacgccactcgcccgagaacttaagccccctaaccaacgacaggcatgccggctcgactcctccgggcgtaaggacgatctctgcccttgctat

SEQ ID NO: 4610 - DNA, 295 bp, Zea mays
  Clone ID: MRT4577_104202C.1
ttgattttaaaattaggcgtttttccctgcgtttttcttagcctttggcattccagggaaccattaaacacccggggtttttccacccccgccaggaccgggggcaccaccaccagggttcttggaaccattcaattttaatccatggcgaagttaatgaccaggtgggcggtttggttggggcacgacaggttaccggccgtcggtgtgttgcgcgccgggctggccaagttggtcctaaccttctttttggttttaacgggcgtttccgccgccatggccgccggttccgacg

SEQ ID NO: 4611 - DNA, 145 bp, Zea mays
  unsure (1)..(145): unsure at all n locations
  Clone ID: MRT4577_104203C.1
atctcactgttacactcagcttcctttacataccactgatcgcaaatcctcaagaggcccgctttcattactattatttttgtcaccacctancccatnccatcatccatcatcttcctatagcaaaaaaaactcctcatctcct

SEQ ID NO: 4612 - DNA, 357 bp, Zea mays
  Clone ID: MRT4577_104204C.1
cgcttcttgcagccgtcgccgcgaagctccagasaacttccgtcaacatggggaagacacgtggtawgggagccgggcgcaagcycaagayccaccgcagaaccagctgtgggctgayaaggcatacwagaagagccatttkggcaattagttgaagahacccttcgctgggtcatcccatgccaaggwgcattgtyctggagaagattggtattgaggccaagcagcccaactccgctatccgtaagtytkcccstyttcagcttgttaagmhttgcaagawgattgctgccttcgtgccaaatkacggttgtytkamctacattkaggaaaattatgaggtcttgatttcyggat

SEQ ID NO: 4613 - DNA, 218 bp, Zea mays
  unsure (1)..(218): unsure at all n locations
  Clone ID: MRT4577_104205C.1
cggacggtggnttccgcatggagccggatgccttccgtggcactgcaccaatcaacctcacggaacgcctctgccagatcctgcgctggtcgggcggctcccttgaaatgttcttctcacactgcccgctccttgctggccgtcgactgaacttgatgcaacggatcgcctacaccaacatgacagcctacccaatctcatcggtcttccttgtgttc

SEQ ID NO: 4614 - DNA, 927 bp, Zea mays
  Clone ID: MRT4577_104206C.1
tatcctttctgcctccctcactttcgcacgtgagcaacccaacccacatccaccggaagatgagagctccagctccagctgctcctattcccgcgctgctctcccgctgctcctcgcctccctcctcggccccgcgccgcctcctctcctcctcccgcacgccagccgcctgctgcccgcctccggcagtcgtccgctctgtctccgtcgatttgctggcggtcgccggggagccggctgtcgcgggcgccccctccgcaacgccgtgccgtcgcctcatcctcctccgtcacggggacagcgccaccgggggccgcttcaccagagatcatgacagacctctaagcaaggctgggagagctgacgcaatcagcgtctctaataaactccaacagatgggatgggtacccgagcttattctctgcagtgatgcaatgcgcacaaaggagactcttaagattctgcaagagcatgtccatggattgtctgaagcagtagtgcacccattgcagcatttgaacgccaaagcggcaatggatggccaaactgcagagcatttgcaaaaggcgatttgtgaatattcgagtgatgagatcttaactgtgatgtgcatgggtcataataaaggatgggaagaagccgcctctatgttttctggcgattcagttttgcttgagacatgtaacgctgcgttgctagaagctgcaggcaaatcatgggttgaggccttttttgtggctggtctgggaggatggaagctccatggaattgtaaagccatgaattattgtaactaaaagctagatgtaattttttagcttttttttaataattattattaacttttgtgtagtggtttttacatgccactgaagcttttggtctgaaggtatcaacatggttagatagatgagatgaattaattctt

SEQ ID NO: 4615 - DNA, 914 bp, Zea mays
  Clone ID: MRT4577_104207C.1
ccgggcgggccccgggctgcgcctgccacccctacgggcgctttttccttttggccatgtacgactgccagcgggagcagggtctgtactcgctcatctgcaacgccacccctactccggagtccccgtttccgctcctcgttaacgaagcgcgcatctacgcgctgtgcgcgcgcatcgtcaagtactactcgatgcggcggttcgtggcggccacggggcagccggccaacaactggacccggaggcacgacgagaggtacttccactactcgtcgggcctgcaggcggtggtcatggcgctaggggcgtgccattaggtgagcgtgttcggtttcgggaaggcgccgggggccaagcaccattaccacaccaaccagaagaaggagctcgacctgcacgactacgaggccgactaccagttctaccgcgacctccaggaacggccagaggcggtgccattcctcgacgaggcgccgggcttcaaggtgccaccggtgaagctctactggtgaccactgacgtcagtaacgtctggttggtagtaacttgtactgtaatatgtttgttgtacaatttttttttatttttacattttcacctaaagaggtgtttaggcagagagagataagcgtgtagagaatgtagcgattgacagggagggaatgtgtttaaggatagggaaaatggagatcaaatttgtgattgatcaaatggatcaaattggttgtagttgttcatgtattctgtctgtgtagggcaactgtacacttcatcgattcttgttcatatatagacactttcagacaccagtggaaaacataagttatgggcaacggaagcatacaatacaatacagagtctgctgttgcagtatgaatttggaaatgtataatgaggcttgtgatattgtc

SEQ ID NO: 4616 - DNA, 638 bp, Zea mays
  unsure (1)..(638): unsure at all n locations
  Clone ID: MRT4577_104208C.1
cccgggttcgnacccacgccgtccgtnctcaccgccgnntctctctcccatggtcccagacatcttggagcctcgatcgcaaaacccctcagacagctgtcttcccccagtccgtacgtacatgtatagcatcccgagtagtactgccggtctgccatgcctgtctctccctcgcgccctgtcccttcgnngcgccggtcgtgtgccccccgggccaccggcatgcagcatagcggcggcggggcgggcgcggcgggcngtngcggggaccggcgaatgttggtctgcaaggacgtggcatgccgcgcctncttcgtctcgtgtccaggggcgctgnnggcgggcacccggnacatagccatcctgaggggccgtngccggcacggcntncttgcgctcnngggatgcccgctgccggcgtccggcgataggaggcgtccgccgcccgcgacgactccacctgtngccacgntctgcgggnctcggctttccagaatgggccaggcgctatggcggccacatgcggcgnnccaccgcgaggaaggctgccgccaccatccgcgcatggcgccgcccgtccctcctccagcttcttcgtgtgagagtttttgccccgtccacgggagnntctagctagt

SEQ ID NO: 4617 - DNA, 212 bp, Zea mays
  Clone ID: MRT4577_104209C.1
attttattctattccactaccacccatctcgtcgtccggcgattcgatccggttgttgcaacccaggggcagtgatggcgacgaataggagcgtgggcaccctactgggggtgggaactaatggtggtgtcaggtgggaaaacgcgccgacctaatgatctggtttatgtattgacaaagaatcagcgagtgcccgcgggtgaggtcattgg

SEQ ID NO: 4618 - DNA, 447 bp, Zea mays
  Clone ID: MRT4577_10420C.1
ggaactagtaccattttgatccacgactgtggcatttgtgccgtatagtataaggccttgttcgtttctatcggattacacccggaatcgttccagctaatcaaaatttatataaattagataaacaattcggttaggaatcgttccgacccaccaacaaggcctaatagtactcatacagtatttgtcaaggaacttgtacctacggcttatttcgcgcgcgtattggtgagcgtaataacgacaggggaccaacccacctgcttaaacacaggagcagcatactcttcatcgcttcgcgtcgacgccggtttcacctaggacgggcgcacgggctgctgctgcgtgatgcagtgaatgttcccacctcccagcgcgatctcccgtccgccttcgaccatcaccacctcgtgatcaggaaacgccttctggagaaccgcatacgcc

SEQ ID NO: 4619 - DNA, 194 bp, Zea mays
  Clone ID: MRT4577_104210C.1
cggaagtccggatcgaccacacgtccgaaaaaattatcgaggcaaaagtgagatataagaaataaagtttacagcatgaaatggattgaaaaaaagtggaagtaaatgactgaaataaaaaggtggaagctctataggatgacgttactgtgttgtaagcgtagatcacaaaagtcttatctatggggacttgt

SEQ ID NO: 4620 - DNA, 220 bp, Zea mays
  Clone ID: MRT4577_104211C.1
attcttttgtccactgccccgtttccatcccccggaggcgttttcttgtgttaacgcggcgactgagaagaaaaaaaaacgatagagaagaaaaattgctccgagataccttctttgtcgacgccggtgctgctgctgaatgcacaagagttttgggatagggttattatgactttcacatagctcatatgggtaaatggcataataaggacccttagat

SEQ ID NO: 4621 - DNA, 892 bp, Zea mays
  Clone ID: MRT4577_104212C.1
atgattcacaaagttttcacaagtccaagtctgttccaaacattccgaaggaccatgtatgcactgttgatgagctgtcagttaatcggggtgactggtactaccttgatggcactgggcatgatcaaggcccattttcttattccgaattgcaagaattagttaaaaaggacactatcattgaacaaagtagcgtgttccgtaagatcgataacacatggtttccagttcttaaggatttaaaacctggaagctctgttcccagtgcagcacgaagctcaagttttactgctgctcttatgctcccagaccaatataattttggtgtgaaccaaggatcaggtagcttcaatcagttgcacccccagtttgtgggttatacacgtggtaaattacatgaactagtcatgaaatatttcaagagcagggaacttactttagctataaatgaggtcttggatccctggatctcagcaaagcagcaaaaaaaagagtttgaagcatacttctcccacaattcagcatctagaaatttgctgccagaagatggtgggtctgcaaaaaagcaaagttgctacctgatcagagtgatgaagatattcatttgtcacaagacattcttgccagtcggaaggaggacatctgttttgacgagctatgtgatgcagaaccttctgttgataatgattctctgaatcccggagcaggaaatgaaacctggggtctactaaacggccatgtgttagcaagaatcttccattttatgagggcagatgtgaaagcacttatttcttctgcagctacctgtaggagctggaatgctgctgtgaagtattacagaaacatgtgtagattcattgatctgtcttctgttggccctctttgcactgat

SEQ ID NO: 4622 - DNA, 571 bp, Zea mays
  Clone ID: MRT4577_104213C.1
aaaacaccctcagcttcgtcggtattcaagatgaagcttcagtgacactcccgtgtaaagcttcgtcagtgaactactggaggaagaggaactccgttgcagaagtggcactcatagctggctgcaaggcaacttgcttccgcactgccactgtcggcagtcgttgggaagacgagagctcgcctgctatataaacgccgatccttttagggcgcggaaattagcgaaattgcctttggttccgggagattcccgtcgaaaataagcggaaggccgcgtccagcttctcggttctgggaagcagatccaaaccgggccaaatcgtctgaaaacaaaagagagcaacagacgcgcgctgtctttgtatgggcgccgccctcccggctggatctgcggccactccccgtcgcggcgattccatgagaggttgacaactaggcactggagaagtggatactctgatctactctgctgaacgagtttaatatttgagtatggcggcggcattgacatggcggttcaatggaagcaatggcggcacccatggcagcgccgatctggaaaggcacgt

SEQ ID NO: 4623 - DNA, 168 bp, Zea mays
  unsure (1)..(168): unsure at all n locations
  Clone ID: MRT4577_104214C.1
tcctcctntcatctactcttatatccttaataagtcttatatttatatgtatatatatataaaagagcagctcataactaagagacatactcatccaccatccactattcttatctacccctccatttctttaatcaaccaacttaatttctacgttctcatcacaaa

SEQ ID NO: 4624 - DNA, 654 bp, Zea mays
  unsure (1)..(654): unsure at all n locations
  Clone ID: MRT4577_104215C.1
ggtaccctcgtttttcggccgggnctgtaactccaaaacctccctgccttctctccttccatcaccgcaactccaaaacctcttatcgtcttcttccatcgccgaacgacgactgggcccgctgtcgctgccgccgccgccctacttcgccaccttcgccggcgacgggcaccaccagtgtggactgtaatgtttgatgatgatgatgatggagtggacccacaaattgaggatttcaacggatactactttgaggatggtgaagagaaaccagtttgtttcagtatcttgcctttccagtttggtgaggacgatagcgaggcagattttctcagaaaggatgttttcttgtgtggatttgtggataaaaatcttcctgtgtacaaggaggtggtagcttggaagataaggcttgacagtgagcatcccaacatctatgtgctttctattgagcacaagtggataaagctgttgaaaccacgaaaatgctgtggagacattgttcgatcaacattgattacggtgcaaatgctccacttttttgggagaggggagcaaagaagttcgaatcacctttgggatcaccttgatgatgtttttggtaaatacaatcctaaacccgtggaggatgacttgatgaagcaccatacccta

SEQ ID NO: 4625 - DNA, 1986 bp, Zea mays
  Clone ID: MRT4577_104217C.1
atgacctacttccccgaggaggtggtagagcacatcttcagcttcttgccatcgcacagcgaccggaacacggtctcccttgtgtgcaaggtgtggtatgaggtcgagaggctgagccgacgagcggtgttcgtagggaactgctacgctgtgcgccctgagcgtgtggtgctgcggttccccaatataaaggccctcacggtgaaggggaagcctcactttgcagacttcaaccttgtgccgcctgattggggtggctacgcagggccatggattgatgcagcagcaaggagctgtgttggtctcgaggagttgcgcatgaagcggatggttgtgtttgatgagaaccttgagctgctagctcggtcattcctgagattcaaagtccttgtccttatcagctgcgaggggtttagcaccgatggtctagctgctattgcgagtcactgcaagctcctgagggagttagatttgcaggaaaatgatgtggaggaccgtgggcccagatggctttccttccctgattcctgcacttcgctggtctccttgaatttcgcttgcatcaaaggggaggtgaattctggtgcgttggagagacttgttgctaggtctccaaatctacgcagtttgaggttgaatcgttctgtttcagtagacacactctcaaagatactattgcgagccccaaatttggaagacttggggacaggcctaaacttgagttatactcccacactggattattctgatctagctaaaatggtcagccgctgtgtgaaactccagcgtctctgggtactggattgcatttcagataagggtttgcaagtggtggcctccagttgcaaggacctacaagaactcagggtgtttccatcagaattttatgttcctggtgcttctgcagtgacagaggagggacttgttgcaatatcgtcaggctgcccaaaactgacctctttgctgtatttctgtcaccagatgaccaatgaagcgctaattactgtagctaataactgcccaaatttcatcagatttagactctgtatccttgagccaaagaagccagatgccatgacaggccagccgttagatgaaggttttggtgcgattgtccgtgaatgcaaagggctaagacgtctgtcaatatcaggtcttctcacagacaaggttttcatgtatattggaaaacatgcaaaatacctcgaaatgctttctatagcatttgctggagatagtgataaggggatgatggacgtgatgaacgggtgcaagaatctgaggaagcttgagatcagagacagtccatttggcgatgttgcactcttgggaaatgttgccaagtatgagacaatgcgatccctttggatgtcttcatgcaatgtcacattaaaggggtgccaggtccttgcatcgaagatgccgatgctcaatgtggagatcatgaatgaactagatggaagtagtgaaatggagaaccatggagacctctctaaagtggacaaatggtcggtggaatccggcatgcctggggccagggcaacagtggatttatcgtacacacttttcgcccttgcatatttctcgtctcagcccacgggccccatagctttgagggcccagtgcggctgcccaccctgcccccttaggaccgatactacctccgcatcgctcatgatgccatcctccgatcttcgtgactctacaccccaagtgcgcgatgagctactctgcctctaccgcgaacacaaccttccctcctcctacctagccatcaacgagcatcccgacgctagcgatgtcgcgctggccgctgcacttgcggttgaggaagtaggcgctgcggtcatggtggcgcaacagaaggccgtcgcgtatgtgaaggttgccaccatggctgtagacaagacgaactatgtcatcattgctgtggagaatgtcttcgcgaaggaagctaatgccggtagcttcccaaactggtgttaa

SEQ ID NO: 4626 - DNA, 3343 bp, Zea mays
  unsure (1)..(3343): unsure at all n locations
  Clone ID: MRT4577_104218C.1
ggggcccctaaaaaaaaagtttataaatttggaaagccgcggggggttaaaatttggttccttttaaaaagggcnccccccttttttttttttttttttttttttttttttttttttttttttttttttttttttttttttttttttttttttttttttttttttttttttttttttttttttttttttttttttttttttttttttttttttgagacgagaaatatgcaagggcgaaaagtgtgtacgataaatcctgcaaggccatcaaatattacatgcagtccatgcattcacaggagcaagaaacagagcgtcgtccccggaatgtcccgataattctcaggtttgcgaaacaaaacactacaacagcgacgccagcaacacaatccaccgtgccaatgtcaaaagcaaatggagacaagtacactagagatgttacatggctagaaaaagttatccgttcggtcccctcctctcgagtgggagaattcacaggtaataaaggggggcctgggtggccatatgaccagacactgaaagggaggggggcggtggtacagaggatgatgatggattcccggtcgtgttgctccacgataagggcgcaggccagtgtggcttttcctgaccctgcaaaaggggagacgattcaagaacttaccactgttgccctggccccaggcatgccggattccaccgaccatctctcaaggtgggaagatataagggtagtcgcggctagctctgtaggatcttaacaaaatttggtgcatcatccctcgctccagcagttgtgcggtaaacatataacttgtccactttagagaggtctccatggttctccatttcactacttccatctagttcattcatgatctccacattgagcatcggcatcttcgatgcaaggacctggcacccctttaatgtgacattgcatgaagacatccaaagggatcgcattgtctcatacttggcaacatttcccaagagtgcaacatcgccaaatggactgtctctgatctcaagcttcctcagattcttgcacccgttcatcacgtccatcatccccttatcactatctccagcaaatgctatagaaagcatttcgaggtattttgcatgttttccaatatacatgaaaaccttgtctgtgagaagacctgatattgacagacgtcttagccctttgcattcacggacaatcgcaccaaaaccttcatctaacggctggcctgtcatggcatctggcttctttggctcaaggatacagagtctaaatctgatgaaatttgggcagttattagctacagtaattagcgcttcattggtcatctggtgacagaaatacagcaaagaggtcagttttgggcagcctgacgatattgcaacaagtccctcctctgtcactgcagaagcaccaggaacataaaattctgatggaaacaccctgagttcttgtaggtccttgcaactggaggccaccacttgcaaacccttatctgaaatgcaatccagtacccagagacgctggagtttcacacagcggctgaccattttagctagatcagaataatccagtgtgggagtataactcaagtttaggcctgttagttgatgacagaggggatagatatacggaacacaaataggagaagcatcccaaaatccagacagacttctcagctttttgcatttctccagagcactagtaagcctggaataggactcagcttggaactcatctgtcagattacctgtccccaagtcttccaaatttggggctcgcaatagtatctttgagagtgtgtctactgaaacagaacgattcaacctcaaactgcgtagatttggagacctagcaacaagtctctccaacgcaccagaattcacctcccctttgatgcaagcgaaattcaaggagaccagcgaagtgcaggaatcagggaaggaaagccatctgggcccacggtcctccacatcattttcctgcaaatctaactccctcaggagcttgcagtgactcgcaatagcagctagaccatcggtgctaaacccctcgcagctgataaggacaaggactttgaatctcaggaatgaccgagctagcagctcaaggttctcatcaaacacaaccatccgcttcatgcgcaactcctcgagaccaacacagctccttgctgctgcatcaatccatggccctgcgtagccaccccaatcaggcggcacaaggttgaagtctgcaaagtgaggcttccccttcaccgtgagggcctttatattggggaaccgcagcaccacacgctcagggcgcacagcgtagcagttccctacgaacaccgctcgtcggctcagcctctcgacctcataccacaccttgcacacaagggagaccgtgttccggtcgctgtgcgatggcaagaagctgaagatgtgctctaccacctcctcggggaagtaggtcatggcgccttcccccaagaggaccttgttactaggaccacaggaactggatctgaccccttccagcctctaggtatctaagatagacctagaagtcaacaagagcaagagcacgaatgtgatccgctcctttccagcttcaggtttactcaactcaggacaagatatcaacaacaactagaagcacgtcatctcgtgctaaaaatttttgatcagacaccgaaaaggatgtaatgacagtcaaaccgcggaaagcaatgccattcagtaaggtcaactgggcaaggagaccaagtgactttcagatctgcaggcaacgctgcttcagacagtagcagaatccgccatacatgcccgatttggccatgagacgctccatctactcgaaatgaggcgaagatagtgaccaccacccgatccctccaccgaaacctcgctcagatccgcgccgccggaccgccagatctaacccatgaacgtctcgcctactcgcggccgcctccttccttcccaccaaaaccccgttaaaaaaaactctccctctggcgaccgaagatcactcgccgctgtcgccgtcgccgcgcctcccggaccaagtacccgtcctgcctctgaaggcgttccccgaaaggggaacagagcgggggtaaatcccaggcaaccgccaagcgggaagcgccaggaggaggaggtaacgcggcggggtagtccggatgtggccggcggcggggaggaggggcggacggtggaggggcagcagtcggaggagagggagctggaggagggacggggaaggctcgtggggaattgagactagagtgaggatatgcttctctctctttcaggaacgggaaagcaggaagcctcgtgccgaatt

SEQ ID NO: 4627 - DNA, 640 bp, Zea mays
  unsure (1)..(640): unsure at all n locations
  Clone ID: MRT4577_104219C.1
tttcgtaaaaatcctccgttacttttcagtcgtatcagtgcgatttatctatcggctacctcactacgctatgcagtccgagaacaatactnagagaaggatatatgcatgagcgacccaaggcaggagaactaagcgccgcgaaataggtggaggaggaggaggcctcgcagaagctgctccggaggtcaacggccccgtggtgaagatcccccaggaggacaagcggctacctgtggccatctccggcggcgacgagggcgacgacaagaaaggtacgaagaaagtgaagaatagcgtgtagacctacaagatctacgtcttctaggtcctgaagcatgcgcacccacgacatcgacatctcctccaaggtcatgtacatcatgaactccttcatcaacgacgtctgcgagaggatcgccggggaggacgtgaagctcgcccgcgacaagatcaaaaccaccatcacgctcccgcgagatcatgacctccgtccgcctctacctccccggagagctcgacaagcacgccgtctcggagggtaccaaggacgtcaccaagctcacctcggcttaaccgccttgcaataggcatcgttgttgtctgcttctcaagcaagcactgcgatgagccgcttctc

SEQ ID NO: 4628 - DNA, 274 bp, Zea mays
  Clone ID: MRT4577_10421C.1
gtgcgccgctcgaggcggctgcatcgactcgcacgagcctgcccgttcgcattcgactgttcacggctcgcttcgattacgcgatacgcggtcatctacgagcggggagtagcgcagcggccggcgcgcgtcagaagtgccccgactggatccatgggctcaagaacaccatgctgcaagaggcgagcaaccacagagctctgttcgaggagatggcggccagggacgggaacctcaacctggccatggtcccgtgggcgcctctccaggtcga

SEQ ID NO: 4629 - DNA, 541 bp, Zea mays
  Clone ID: MRT4577_104220C.1
ggaaaaaaaggggtgggatcttcgttgaaaaaagtctaacacatgcttttcgtttgaacatgtttccacaaatttttaaaggccaaaaaaacttacttccaaaaaaaacccaaaaaagttaccccccgggggggcagaacgttcatttttattggaatgggaaaaaactaaaaaaccggcgggggataacttaaaacccaagaacgagcccccaagggctgaacaactggactgaggacccaatttttaggccaaccctgggccccaattttatcctttttttttaaaaacaaccctgctaaaaagggtaacacggggctttttttttttcgggtaaacaaaaaaggattgggggggggactttgggaccctgggacaaaaaacaaccaggggcgggggagcacttttaacaggctgggggcttcggccaaaaatttgctcgggttcttttttttcaagggcatttgcgccaggctcacaggggcgttttttctttggtgcgtcaggctcaacggacgggggcagggtaccccgttttttt

SEQ ID NO: 4630 - DNA, 306 bp, Zea mays
  unsure (1)..(306): unsure at all n locations
  Clone ID: MRT4577_104221C.1
cccacgcaatgcnacagacgacacgccgaccccgccgtcgcgatgaggccggcgctgataagtccacggccgagctcctccgccgcagccgcggctacgcctcctcggccaacccggagcggaaggtggccatcctgggcgctgcgggcggcatcgggcagccgctctccctcctcatgaagctcaacccgctcgtctcctccctctccctctatgagatcgggcgggaccccccggcgatcgcgggccgacgtntgccacatcaacttcccccgcccttggggaaggggtgctatggggggacga

SEQ ID NO: 4631 - DNA, 369 bp, Zea mays
  Clone ID: MRT4577_104222C.1
ttcttaggtaaaggagctaaaggaaaggctagaggacaacatgaacaaaataattgtttcaccaaatgaagcagcagcctctaacagtgaagcaaataagtatattatttcccaaataaaggaggcacaggaagtcaagcgtgcagccataaatggtttgaacaatatgattcgatatatctagaacttctcactttaaatttgttttagctttatgcatttttcagttctctatttgtttgatcgcttgcatcttttattttaggtgttttaatgccacatttcctttttcttttcctaacacgatggagagctgtgtatcattgatttaaaacaagagaggtaaaacacaaacaaacacccctaaaa

SEQ ID NO: 4632 - DNA, 182 bp, Zea mays
  unsure (1)..(182): unsure at all n locations
  Clone ID: MRT4577_104223C.1
aacatactcaaccaatccagaaaaaaaacactgaactaactactactaccggttnggggctaccaatacaccaataactcctactatactatcaaccctttctaccaaaaaaacctccgaacaaataacatactatacttacaggaaataacaatcctaaccacaccaattaccctacctac

SEQ ID NO: 4633 - DNA, 102 bp, Zea mays
  Clone ID: MRT4577_104224C.1
ggtcgacagctcgagagaggaagacttgtgagtatgaccaggtagtggtacataggtgtcgaatgtgtgctctgatgaacttatacacagaactgtgtggac

SEQ ID NO: 4634 - DNA, 476 bp, Zea mays
  Clone ID: MRT4577_104225C.1
actcagacgatgtataagcacgggttaaacaggcggacaactcgcgattcggtcaccgaacaaacaaacaaacaaacaacaaacccctccgcggaactcatgttcagtgcaaaacgacacttccacccaggaaacagaaaaggtcactttgcgggagcaagagggatctcttttgataaacatgcagggcaccgagcaaaatcaacataaacacgtggtgaggccattgaagccggacggtcggaggaccctcactaattgaggttatggatggcccacatgtccaaaggctagcctagggagtcatcttttgaaaggcgccaacaaccttttgggaagtggcaccccaccaacttaggactgaggcaaatgttgacaaggacatggcactcgcgcttttatatgttggggaattctaactttcaaggggtcagttaggatggaatgatttacgagcatgccatgaaagtgctggt

SEQ ID NO: 4635 - DNA, 566 bp, Zea mays
  Clone ID: MRT4577_104226C.1
gtagagataaataaaccgtggaatgggaaagaagtgtggccaagcttgcccctcaatacacagtgccacacagaatacgcgggatcgggcttctaaacatgcatgtagatggatgcggacgcctaacttgcttcatggtgcggacatcggtagacaaggggcggaagagtaacgcatgcatgcgaaggaaaccagggaatcacagaccccaacctctatgcgagcgcctgcatgggtgcggggtgcacagttacagaccgtcaagatgagggtgctcaacggtagcctgtggagggaaagggtctggttgcgcttccaggcggccctcctggacggaccgtacttggggagagcgggggcgtcgacacagagaccacagtactatttgtctggagaggcgaaatcgccgagctcacggtgcttgagcacaggatggcatatgcagttgagaattgggcccgcgcggatggaggcgtgagccacattaaccagcatgagcgggaagtacttgtacgagctatactgattcacccatgatgagctgagaaccctgagtccaccaagag

SEQ ID NO: 4636 - DNA, 324 bp, Zea mays
  Clone ID: MRT4577_104227C.1
aaaaggggataaaaaaaaatgcttccctgcataagtataaatttactttggaattaaaaacttgccccgggcgggttctaaaaatggccctggccctaaaaatcctgggaaaaaaaatccccctcaaaattttggcctaggcggggggcctaaaatagaagggcgggccaataccctggtgaaaaaaggggggggggggaattaggttaacattggggggcccaaacaatggtttgccatcgttttcgtatagagcatttaacctttttcctaacatggaacttcaacaacgttttgatttttggaactcgggtttattccatt

SEQ ID NO: 4637 - DNA, 423 bp, Zea mays
  Clone ID: MRT4577_104228C.1
aaactatcaacaagccatcactaaatgcgtcttgagcaaaacaaaatggaacagcatgaattcagggagccaaaacccccggaggaggtcacatggcatcctcatatggtacagcgggcgtgaaaacacaatggcatgcgcgacttaatttgattgtgacagaaaagaaagaaaggagatctcgatattgtacaggtgggcatcgaaactataaccgtgctgagcagactagttaagcttataaccaacaattaatctaggacgatatcgattcatgactgtctgctttgtttcgagtgccttttaacattgcagtgtcatagtactctccatggcacatctttgccagcaagacaggcttcccatgagatgttgctgacaagcttgctgtgcggagatgaaatgtactggatcacacattca

SEQ ID NO: 4638 - DNA, 352 bp, Zea mays
  Clone ID: MRT4577_104229C.1
cggacgcgtgggcggacgcgtgggttctgataccatttatggtctggaagatgatgtgcggaatttgtttaggggatgctgtgtacagtgtactgtcttttaccagtcacggagtgtttttgttgtgttgtcacagaactacatacgatctggccagttgatctcttagttccattgggcatggttggtgttcggtaaatagaaaaggacatcactgtccatatacagcaaatgtgcactaattacgctttaccgaagtattgatggaaatctaatcactttctaaaggtcctcgtatgtgcaagattgcttattattattacttaccacgactttattatatgatcacagt

SEQ ID NO: 4639 - DNA, 355 bp, Zea mays
  Clone ID: MRT4577_10422C.1
cccacgcgtccgcccacgcgtccgcggacgcgtgggaaaaaaaaaaaaaaataaaataaaaaaagaaaagaataaagaaattggaaaagaaaagtaaaaaaagaaaaagaaaaatgtaaaataaagtaaaaatgaaataaaaaatttttttcaaaaaaaaaaaggggtggccgcccaaaaggttcgaggttaacttaagcggataggcaatttcatactccttcaaaggggtccctaaatttaatttcaggggccttcttttaaaaacttctgaaggggaaaaaccgggtttttacccagttaaacccctttgaaaaaaatccccttttcccaacgggggttaaacccaaaaagg

SEQ ID NO: 4640 - DNA, 835 bp, Zea mays
  Clone ID: MRT4577_104230C.1
agaacacggccagtgaccaagcgaagacgaaggaagagagatgccggggctcacggcgccgtcggactacgcggaggagccgccgccccacccggccctcaggatcaactccaaggagccatttaatgctgagcctcatcgatctgcgttagtttcatcttatatcaccccagtggatttcttctacaagaggaatcatggaccaattcccaaagttgatgatatctcaagatacagtgtttccatcagtggcctcatgaataagcatatccagctgtccatggatgacattaggatgcttccgaagtacaatgtcactgcaacattacagtgtgcaggcaataagagaactgcaatgagtaaggtgcggaaagtgagaggtgttggatgggatgtatctgctcttggaaatgcaacttggggtggagcaaaactatctgatgtccttgaactagttggaatacataaactcagttcagtcacatctttaggaggcaaacatgttgagtttgtcagtgttgacaggtgtaaagaggagaaaggtggcccctataaggcatcaattccactaaagcaggcaacagatcctgatgctgatgtgttactcgcatatgaaatgaatggagagaccatcaatcgtgaccatggatatccactccgtgtggtcgtacctggtgttataggtgcacgctccgtaaaatggcttgacagcatcaacataatcaaggaagaatgccagggtttttttatgcaaaaagattacaagatgttcccacctaccgtagattgggacaatattaaattggtcactagaagaccacaaatggatttttct

SEQ ID NO: 4641 - DNA, 732 bp, Zea mays
  Clone ID: MRT4577_104231C.1
acacgcgtccgccgatgccacggaacataagccacaaaaaatagagagagaaggacaaacaagtataggttattttagctctaggcccaagtatatgatagtagtcctataatataaataataatagtcttttagtagctcctgccggtatcaagattcaagtgattaaaaccgtagatggcgtagtactagtaaaaactagacagctagtcttggcagccagttgtagtgaagtgacatggctgcatacagacatccaaaggaaacggacttggtaggtgccgtggacaaaatccttggccggacagacttggtgctgctgcagctgcagtgctgctgcacaaggaaaagtgatgagaccgagacgagaggggtgtactctgctgggaccagagcactcacgggtgcagagagactccacttcacctcatgagcaattctgcagggaccccccctctgaatcgtaggagcatgcaccaagcactccttgtcctggtctttcaccttttgctcatcttttcacccttgtagaaaacagcaggaggtagcagacagacagaggaatgggaaaaaaagtatttattagtcgtttatcttgttggtccatgctttttatattttgcttggttcccaaattaaatgaatatatatgtagagttgtcttagctcaaaaaaaataaaaaaaaaaaaaaaaaaaaaaaaaaaaagtactctgcgttgttaccactgctt

SEQ ID NO: 4642 - DNA, 434 bp, Zea mays
  Clone ID: MRT4577_104232C.1
ttcagcatgcatctacacacttccaatcagtcaccgctaaagctacagacactgcaccagtaccaccaccactagcttataaaaccaggcgccgagctcacagtcacagcacacggataacaacaattcgtaggctcacacatcatccatcatggacgagacgacaggagacctcggatggcggcaagggtggccggacggcggcggcggcatgccgctgcaggggccggtgctagcacttgcgagcatcgttgctttcttcctctacctgacatggcagatcgacgagtacgaggagcagctccgcaggcgcgcgcaggccgggctctgggtgctcctgctgctcgggctcctcgcgctggtcgtgctcgcgcaccacgtgctgtttgatgccgagccggccgtgtccttgtggcggcgcctgcagcttgaag

SEQ ID NO: 4643 - DNA, 687 bp, Zea mays
  unsure (1)..(687): unsure at all n locations
  Clone ID: MRT4577_104233C.1
gccggccgggttccggaaggtcgtgtacgtacgcacgcatcgtgacaccagcaacccccaactgcgccactgtccagtgagcgcgccaagcttgtttagctagtcgccatggtctccctcgccgccgtctccgtgaagcccgggggcatgaaggggctcgtcggtagctccatcgccggaaggaaactcggcggcgccagggcggctgcccctccatccggaggccccgcgaaagcgccgcgcagaccaagtaccgtgacaagagcggctactttgacctccacgacatcggaaacaccaccgaacagtgggacctctactggatctgacacgtcctcgccctacaaccctacagagctagtgcttcgagacgctagctggatccgttcaccaagagaggtctgtatgctcaagatcctgctgctggtcgccgactcacttctggcctacgtcagcgacgtttcgtctccgtgacctcctgccgatctggaagggacctcaggagccgccgcatccgagccagcgcgagaagatctgagctcatcttctccatttgaatgacccaacagcgtgctttggactgctagcgccggccgatacgtcgcaatcgacatggatcgtcactctatcttgttgngacgatgatcataatttggaatatttgacattcaggtattgtgtactctt

SEQ ID NO: 4644 - DNA, 1027 bp, Zea mays
  Clone ID: MRT4577_104234C.1
cgggtatccgtatctattccgcttttttttaaaatattttcagagtacaaagtcgattttattggttataccaaacaaatggttatcactatcactggcacaaatgatggctttattaaccatttggcaaacatatcgaagagcagcttctctaacagcaccgccgaacatctggcttctcagctctattcttctagatcacttccaaggaagcacccacaattatcctggaaaatggcttcttggtggggcagcacccacaattatgtcagggttcatggttaaaatttgcttgttggggggggggggcaagaacttgttttctttgaacttcatgtctcctggaaaggcattttgcatgcaagaccattaggcatgaacaagaagaagcgagtgaagaatactgatagctcttgacaagtttagatttccatttatgcgccccattaggatgaaacctcctgcactctgtatcctctctctctctctgcctcaagctctggtttatggtctctagaaaaattgtatgccaggtacagtaaggccgttgaggagactaagaaaagatcccagcagctagtgcagctaccaagccaatatcataccccgttagagcatattgcataccacacataatcccaccgttttggggagacatagctggtggaaaattcacatccttgaacttcctgttataaaaaaagagtaccagagctagaagcatccctggaatggcatgaaggaagaaaaggatctaggtgattaaattcaagtcattagtggtatgaatggattttacgcaaaagcaagagcaaagttgaaaaattacagactacacagaaaaagactcaaatcactctgatggagtcaaatcactctaattacatatgagcgttagaacttgttagatttgaataatctgtttaaaggatttgaggaaccgtacctggtcgttcttgtttgaggatgctaacctgtgtacagaacgaaagggtaagaactgcattgtccctttatactaaaccgg

SEQ ID NO: 4645 - DNA, 596 bp, Zea mays
  Clone ID: MRT4577_104235C.1
ataagattaactgagttccccattaactgagacaatatagagtaactgagttacctattaactgaagggttcacatctcttgaggaagtcctagacctcagcgccgcccagctcaggctcctagacctcagcgccggcaccgccaccgtggcaaaaatcaagaaagtgatcgaaagtagcaacataacgtctaaagtgactagcacaatgtcttaagttcacaacattgatacatgagtaattaaaacagcaacacaatgtctaaagtttagaacaccaaacattcggcatgataagcacaatgtcctaagttcacaagatctagaattagtagaaagtagataagcgactgcagctctaaactacagacagaaccggcagcaccatcaggtttagtcttcatggcctgcatggtcagcaggctcagcctgagcagcagcctcgcagcctgagcagctgcctcagcagcagcctcagcagcagcccgcatgttatgccatcttttcctgtcacctcgactcaggctcacaagatcagcatcctataagatgagaaacccagtgttactatcaaggaaaattatataatccataaat

SEQ ID NO: 4646 - DNA, 388 bp, Zea mays
  Clone ID: MRT4577_104236C.1
agaaaaacaaaaatcatttaattggggaacatttaaacagctttgccgaaaaaaacaaaaaaacacacacttcacatcatcctgttcatcacacttcacatcatcctggtcatcacacttcacatcatcctggtcatcacacttcacatcatcatcctggtcatccatgcatacgtcgacacgcacaacacgcacgtcacacaaactccattagcccaaagcagcagctaatgcgtcataattatttttgatttcctttcggatatttttccaaaaatatttgtcccaaatttccgtgacagccttgtacttctcaaccggcacattcaactgcgaaaacgacacctcagtccccaagggaacacgtcgtaaagtgatactcaatttt

SEQ ID NO: 4647 - DNA, 387 bp, Zea mays
  unsure (1)..(387): unsure at all n locations
  Clone ID: MRT4577_104237C.1
gcggaatgcccgggtagacccatcgcgtgcggctgttgcggagagcacaatccctttttaaaaagacaccgcccttcccttagctagcggaaccgccctctgctcgccgaggttggggtttcgagggtagacgcccgccatggacgcgttccagaaacagctggacttgaggatgggcgcctaccgcaacagcgacgccgaggaggagtgccggaactactacgaccgcgacgtctgccgcctattcctggctagnctctggccacacgacctttatcagctcacagaaaaaggatctcgaggcttgttctaagattcattctctccaactgcggtaagtgtatgaactagcgacagcaaagggaacagacattttggatagagaac

SEQ ID NO: 4648 - DNA, 383 bp, Zea mays
  Clone ID: MRT4577_104238C.1
ctcacctaccttatgcggaacaactcatgctggtccaaccatctcttctagtcatggacgcggggcatgacagtcttattgctaatccccctcctatcttcgccccctcttatttccactaattcagcctcacttgacaacgctaggagatcgtctctcaaccaacacaacgctacacaccttacgcctgtcctacatcctctagccactaatccatagttgacccctgacacatccacgacgttctcacaatcataaaccccacttcccgcactatgaaactgacttgcaaaaccacagacccacaggaaggttctgtcacgaaaaaatacacaccgactttattgactgactcctctgaattaaagagcttctagctccct

SEQ ID NO: 4649 - DNA, 228 bp, Zea mays
  Clone ID: MRT4577_104239C.1
cgcacacgagcgagcttaaccccctataacaggaggcgagagcccacaacacctggggtgacgcgctcgcccaaaggaccaccagatacaacggaagacctgcagaccgaacatatgcctaaaagtacaccgaggaaacgcacaaaccttgggccaagaaactgatgacggcatccgctcgcacttaagaactgaacggccccatacgaccaacactaccacaggaga

SEQ ID NO: 4650 - DNA, 307 bp, Zea mays
  unsure (1)..(307): unsure at all n locations
  Clone ID: MRT4577_10423C.1
ttcgtcgtctgccttctgcgcctccatttgggcgtgtgtcccttgcaaggggaatcgcacctccaaccatgggtaaagagaagtcccacatcaacattgtggttattggccacgttgactctggcaagtcgaccaccacaggacacctgatctacaagcttggaggcattgacaagcgtgtgatctagaggtttgngaaggaggctgcttgaatgaacaatctgtcctttaagtacgcgtgggtgctcgacaagctcaatgtttgnccttattagaaatattacnattggttattggctcttaggaa

SEQ ID NO: 4651 - DNA, 189 bp, Zea mays
  Clone ID: MRT4577_104240C.1
ctccgcaacggtttttatgataaattagagaaggctagaatacgaactattaaaacggtatattggttcattcctgacatatttagacttatgcacatatttatagttttgagtttattatctactatagctaacaccatcatagtaactatgaatgactataagaaacagaaacagctatgaactacc

SEQ ID NO: 4652 - DNA, 357 bp, Zea mays
  Clone ID: MRT4577_104241C.1
atggtgaggtcgtcaattcgcccgctcggtcaccacgggttccggcgtgaaattgccgatggtccaggcatcccagcccccacggagtgcgccatacgccaacgccgagcccaacagaattccgcgcccacaccatggaagccaatcgcgactccggctagaatagccgcggcggctagctttctctccctccggattcgacgaagcttcttggcacatcctctgtcgcgtcgatggttgagggcaatggggagcggggcctcggttcttataccccgagcggtgcgcaatagtcgggagggccgttacaacggcggcgcgacgaccgcggagtctgttgtccggttgcgagcgtag

SEQ ID NO: 4653 - DNA, 102 bp, Zea mays
  Clone ID: MRT4577_104242C.1
taggtgtccctccctttactccctccgtcctcccaggctcccacagtcccactgcccttctcctcggtgcatcgcaaggttctgcggccctgcctacggcgg

SEQ ID NO: 4654 - DNA, 232 bp, Zea mays
  Clone ID: MRT4577_104243C.1
gtcttaggtgctttatgctttaaaatgttgtttcctttggtgtacctaagaaaatacttcttaatcatggtgtgcttagacattttgctttatatgcatgatcttgtcgtttttcaattggtatatgtgttgcaatgatcatcatgtgtgaagtgtgcctacgttgcttttgaaatgttatatatcttgaggcatgcattgtttccactagtcataagttgtattatgtcat

SEQ ID NO: 4655 - DNA, 257 bp, Zea mays
  Clone ID: MRT4577_104244C.1
gagcaaccaattagcagagacaacaagtaagcaatacttggagagtgctaaaagaattgccagggcatgacgcggaatgccgcagtaacaacatctaacgcggaaaacaacactgcgcactaattctagatcgacatgcatcaagtgcggcatggaatcactggctgacagacagtccgaccatggggaacatatggtagatgttgataatgatctgcataattccggttcatgggcgatagatctgaatgatgagc

SEQ ID NO: 4656 - DNA, 188 bp, Zea mays
  Clone ID: MRT4577_104245C.1
gccaaatttgcactcctctaatggaggcacttgtttatagggcgggcgaacgtgaaggcaggcactcttatgaaggttggtacactgttttgcatcttctacaagaagttgatcccttgggtgacgctgtcggttcatatagcgtaagtaaccgatgttcatttagacacgttcaaagggtgctccca

SEQ ID NO: 4657 - DNA, 498 bp, Zea mays
  Clone ID: MRT4577_104246C.1
acggacaaacacactcgatgaaaaggagatatgatttcacgttacagacaggcatacaccaaagatgtgtcgttgttaccatcctgtgcgatctcatttccaccactcctttgactccttgctgatctacatatcccttctgcaaatgcaatctgcttgaatgctaactacttttttgccactttccggtagttctactagtgactcctcctattactaagattactacatttttattttttaaaaataatcccttttttttttttttactccttctacattattgatatatcttttcttcgctacttttatctatcaacactctaaatgtttttctcttttatcaattcccttaatttttactccctttattcttttagtaaatattttataaaactaatttttttgtttttatacaagttaatcaaattacttccttcaattcttttatttatattacctttcttttttttatttattttaaaaatatttctctat

SEQ ID NO: 4658 - DNA, 222 bp, Zea mays
  Clone ID: MRT4577_104247C.1
ttattcgcctgcccacccgggcggaggcgcgggatcttttgcccgtgggcgtgatgaggcaccagaggcaccttctccagaccaacatccagaggctgggagctcagctgcctgtcatagttaaacccactgcttgggacctaccgtagacttaccctcagctccatcgcattgtttggcaaaatcggaccggcgtatgcggatccctcgaacttgccctgg

SEQ ID NO: 4659 - DNA, 417 bp, Zea mays
  Clone ID: MRT4577_104248C.1
ctagaatctataccatctttcgtggacttgaattctcgggtaagccacatgttaaccgggacagtattcgacatccacacccgtctcctgtgctatcaatttcctgtaaccacttgttggtaaacttctttctgtgttttacccaagacggtgcatgtgattctgtttggggaaaatcacgtatttaccgctcacccaatagactcggatagtacaatgtcatcagaaaaagcaaactgcacacatgaaaccttatgtgttcttgtggcaggtagcgtctctactatgggacatctctaaattagcttaaggcgatatatgatatgcccactagagaaactacatcctgaggcactcacctttacttggactatcttagggttatcgctgatatggatatgggttacatacttctct

SEQ ID NO: 4660 - DNA, 1369 bp, Zea mays
  Clone ID: MRT4577_104249C.1
caacattctcggcgaatcctccgtcccagctcgctccagcctccatccaagctcccgcgcgcgcgcgtggtggtctcgatcgctaccatgctgtcttcgcaccacgaggccatgctgccgtacgcgccgccgccgccgccgccgtcgctgctggtggaccgtcggtacaggcagctgcaacaagccggagaggcggcgcccagctgcccgcgctgcgactcgcccaacaccaagttctgctactacaacaactacagcctcacccagccgcgctacttctgcaagggctgccgccggtactggaccaggggcggctccctccgcaacgtgcccgtcggcggcgggtgccggaggaaccgccgggccaagtcgtccttgcggtcggcggtcggcggcggcggcggcggccaccggttcccgggccccgtcgtccggcccgacctggtcctggaaggcatggtgtcgaacccagcccaggagatgcccggcgtgcccgccgctgccgacggctccaccattgatctcgcgatgctgtacgccaagtttctcgatcaccaccctccggcggaggaaggcctcggtagtgccgtgacgccggagctggcggtggcactggctgggccagggcgggtcgacgaggcattattcgacacgttcagcgacctgagcccaccagctggcgttctggcggcgccgccggtgcagttcgatccgccgtgcggccacgacgacgggttcgacgactggtcatccggcgcgccagtgcgcagcgccgggccctcgagtacggccagtactgccaccgcaaccaccaccatgccgccgtgcgccgacgtgagcgtgcacgctgcgttcggcgaggagttcaacttcgccaaggaccagagctgcctattattcgactcgctagggctgcccacggacgacgtcggcgacctctcttcgtcgtcgtggcgttcgatcgtgccgggcttgtcgacgctggaggacaccgagtatgacctgctggactcgtcgttccctgacgacgccctcagccttcacgagggcatggttagcgggactgatcatgactgctggagcgtggtggattgccaaggattggaggctctctaatccgccggtggtgttcttgtgatgattggtttcctacatttatttttctccttttcttttctttcattcaattcggtttggaagaaatatatatagagatacgtatgttttggaagagaggtactacgtgagggacaagtcgctcatgtaattaaattaaggaattcggtatacctgtgagatagatcgaggcaatacaataatgaaagcttgggaatactagtcgctataagtatctcatgcatgagacatg

SEQ ID NO: 4661 - DNA, 450 bp, Zea mays
  unsure (1)..(450): unsure at all n locations
  Clone ID: MRT4577_10424C.1
attnnaaaaaaacttcacgacttttaataatttgattgtacagcgattacatgaaaaacataatatttttttgccataattgcattgcaacacccaaaatgaaagaaagaaccaacgtaaaagaaagaaattacacgctatcatacacgagggaggctgattgtgagcgtgctgcctgtaaacactttcggacgcgttcggtcgtcatctcctggcctgctcgaccttctgcatcctaatctgctccctgaacttggctatgaactcgtcggcctttctgtccaccttgccctccaccttcgtctccgtttccccctccagtcccggtctcgtcgccagctcaaagagctcctcgttgcacgagttgacgccgtcgtcctcactcaccccatcatcttcgcagctgttttcctccttgatggtgtgcatcgcgagatcactgctaaacga

SEQ ID NO: 4662 - DNA, 201 bp, Zea mays
  Clone ID: MRT4577_104250C.1
cccacgcgtacggctaaccttccagctattccttgaccttacattatcttacatgggggggcatcttatgtggcatgctgctccttcgagctatagataactcatttcccatgtctcatgtcacactgactgccacagtgatcctgactcatcttgaccgactcattcactattcactctgatatcggatttttctgcact

SEQ ID NO: 4663 - DNA, 350 bp, Zea mays
  Clone ID: MRT4577_104251C.1
aagccacaagcgaaatgggtggggggggggattttcacaatgcgagggaggggaaaagggtaaaaaagtaaccaattttattaccgaccctttaattcaacacagcaatccacggggggaagggcatttatctatttatctaacccaaccgcggggaacactcccctgttttcggcccccacatggaaaagagttttaagggtttttccgcaattcacaccgggttataaatggggcccaaaacctgggaaacccgcaaatattcccgcttccctttttaaactactggcctgaaaacacccccccaccccttgacggcctccattggcgccttcgcggggccctggaag

SEQ ID NO: 4664 - DNA, 192 bp, Zea mays
  Clone ID: MRT4577_104252C.1
ccggcacggacttggacggaccgggtcgattccacgcatttggttgttaccaccccgacgccaagggcgcgcagggggtactttaggaacacgggcccgagaaggttcccccgccggaggagaaaaccggcaaaagagaccgcggacacagacgacacgcgagggcaacgaaggccaacgccagcggacagg

SEQ ID NO: 4665 - DNA, 591 bp, Zea mays
  Clone ID: MRT4577_104253C.1
cattgggtacctcgaggccggccgggattgcttcgcatccggagctactcgcgtatctatctcgaggacccaaccatgagctcgagtgtctgccaccgccgcggttcgcttcgctgtgctcttcctcgtcgacgtcctgtactgcgctgtcctcgaagtcgcagcagagtacaacgccgagtccgaatcaaccgccgtcgtgatagacggcgaccacaacgtgctgtcccatcccacagaccacgatgaggtactgaccgccagcgcaactgaagaggaggccatatcatgcggagcagcagcatcatgggttctcactcctacaacatgtcgactctacggctccaccaacaccaccatctctgattgcaacgtcgcacacggtatgtaccgtgacgcatcgagaaagctgccatagtatggccgcagtgagaggcatgagctggaaatgagactgctaggcatattgcccccatccacatgggaggtaagggtagagacaacagaagatgtcaatggcttatcagaacttgtgatcgaaacctccctgttagctaacgaaaatgccactctggtatcatgaaccaggac

SEQ ID NO: 4666 - DNA, 488 bp, Zea mays
  Clone ID: MRT4577_104254C.1
acacattctcttatcatttacccttctggaaaaaaaacccaacttcttggagacgatcaagccgtcgatcgtggttcggcagtttagcggaggaggagcccggacctacctggcacggtcccaatagatcaaaatcacccgggggttacatggttataaagacgatttggggggtcctgatctcccaaaaaaaaccttagattcttccccccacgagggggtcccttttacaggcgaaaaaccaggggccgggggcaaaatgaacccacctggcggcggctggggccaaacggccataaaacccggccctggaaattgggcctaaaaaacccaacttcgtgacccagtgcaaaaacagtccgcccctaggtcgaaaacctccccctccttgaaaaaaaacaccaatcccgggggccatccaagatatggggccccaactgcggccaaacaaaaaaaaaacaagtagttcatttgaagggctacgccct

SEQ ID NO: 4667 - DNA, 663 bp, Zea mays
  Clone ID: MRT4577_104255C.1
cggccctgggtgtttaacgtcgtcggccagcagctcaagatcccggagactatcccaggacgagcaacgcaagcaggaatctgatcaaaggtctgttgggcgtgattacgtgaagaggggcagcagccgttcttcgagggcatcaactgggcgcttatccggtgtagcactcctccctcggcaagcccaggcccatcgagcccgaggcggtggcactccctgcgccaacaaagcccaagagacgatggcgaggcgaacgacaactagcggaatcggaactggaacggtgggtggggtgctcgattggcgagcaagaatggataccagtaacacagaaacaaaggcgagcgtcgacagccggcttggagactcggcacggctgaggaggggcttgccgagctcgacgaacggacgaggagcgaggagacgctgatgaggtgactccacggtgggctactcagtgtcgagcgttgctgctccgatgagctgctcaatggctggacgacgttggagagatgagggaagatgtcgacatggaggagacgatgtacagggagggtcctcgccacctcggctgaggagcacggtgagagggaggaagaagaggtgctggtaacgaacgagcaaaggtcatggtaatccctgagcgtggacagaaagaat

SEQ ID NO: 4668 - DNA, 136 bp, Zea mays
  Clone ID: MRT4577_104256C.1
ctgtggtttttttttttaaacacaacagccagtacggtgttcattgctgagcgcttgtataaagacatacacacccacacaactggtcagactgaatcaagagcccggccggaccatcttcagagaaatggatgcg

SEQ ID NO: 4669 - DNA, 691 bp, Zea mays
  Clone ID: MRT4577_104257C.1
ccgtccggaccttgtgtcatcacgcccacacctccggacgagctcccctccctcgccccgctgagaccccttccgatctggagtcgggcccgccggcccggcccatgtccaccctcccggcccctccggacgccgctgggaatggcgagcggcagcatcccccaccgccgcctcctcaggcgaggacgaggaggagggactccgatagcggaaggccgaatgggcagacagacgcgccttcgcttccgcagctacaggaggaggaggaggcgccggagcggccggctcatgtgaagaacgagctccgtgacactccatgaatatgtcctctggtggtatgacggatgaccaccacttatatgctgcatggtgcggatcaatcatcctgattcctctcgtgatggaccctgctatgggtggctaggctgatgacatggcggcagtggaatccacagggttgctcgtgaccggggtgactacatcgctgcacatgtctggtggaacgagactgccacttgcgcagggtccatcctttgtatacctggctcctgcgcttgcgatcatcaactcaccagaattctttgggatcaatgataataattgtaaacacataatgaagcacctgcagggagctataataactggaggtgcatgccaagtgtggatgggatatacaggcctcatgtcacta

SEQ ID NO: 4670 - DNA, 837 bp, Zea mays
  unsure (1)..(837): unsure at all n locations
  Clone ID: MRT4577_104258C.1
gtctcgagtcccgtgccgctcgagtgcgccgtctgcgtctctagtggcgacgactgggcgaccgccgccgccgccctacgcaaggtgcccagctctccattttcggtcccttcgccggacacgagcacccgccaggggactagaggctagtagaagttctgaggaatctaattttggaaatgacttaaaggatggttcttcagtttcttctgagaacttcggctcctcttgtctgcccggcgagagctatcaatctgccacagtagatcatgaaaaacgacctctttttgatgtcaagacatgccaaattgcttgcaaacgtccaaagcaaacagatcactgtacctggttatattcctttgaggaacaccctttgaccagtgaagtgggaatatcttctccagctttatatgatggattggttgagatcaaacaaccaaatgacattcctgcaattaatggtgccacaacctgcagtggtagttcagtgatcccttgcggtaatcatgatcaatcaattttagtggcaagcttagacatacctgattgggcgacttccttccctggttattttgaagactgtgggccagttgttacatatagccatgttgatgacattggttcgcctagaaagggtgtgccaattggacctgagcaccaggctgacattccagaattgaggcccctaaactctatgattgtacctggtgcttcagagttttgtgctaatctggattgtagttctgcttccacttcagagtctgttcccagaggtgatgactatgtaagtgacaagtggatcaggtactgtgttgntccggtgacatgctgctcatc

SEQ ID NO: 4671 - DNA, 152 bp, Zea mays
  Clone ID: MRT4577_104259C.1
gcttatcatggcgatacagacgcgcactgtcttgattcatactagaacgcgacacgttgggagccagatgctgatatacggcccgccccagcctagcacaatcgcaggccctatgacgcaaacgtgcacgatattagcctagagcagaggta

SEQ ID NO: 4672 - DNA, 727 bp, Zea mays
  Clone ID: MRT4577_10425C.1
tctctgatcttgcgctattttgatatcgagacctgttggaaagaaggcctttgccgaaagtcctcgaactgataagttccactgttttgtgcctgttttagggacaacaagacaaccttcagtcggaagcttctataagccaaagggagaaagggacatcttcgtcatcaggaattaatcatggtgtcgacacacagccgaagtccaattctgaacgtagcttccaatatgtattgatgctgaaaaaacaaaagagctcaagagtatacgacatgtctcatgaggaaggacgaggtgacctctataaattttgtagaccatgtacatagggattgggggcaatagtttaatttcatgtgaagctatacggtgccccaaatactcatgcatggaggccggtcacattttcccttcacattggaagtgctcaacctttgaagctgattggttatttaccttcggacggcttgaaagcgtactgaagggaacattgtaacctactgtaatttaatgaatgaaaggcgatgattataaatatctcttcttatacggttaaccacacacattgtttatttccataacacacgttcttctcttcttaagagcccttgacaggtgaccaacaggatcccattttacttgtgtccatttgagtcctgaattcaaggtgcaaatagctgtggtatgttctagtaatttggggcattctgtcttctgttcggatcta

SEQ ID NO: 4673 - DNA, 566 bp, Zea mays
  unsure (1)..(566): unsure at all n locations
  Clone ID: MRT4577_104260C.1
ngatacttatgttctagataaaacgtgttagcacaaaagttattggaggtcgcgtcgctcctccaggggcgacacgggcggaagccccaaatcccgccggcctcccctcctccctgccctctcccctcgccaccgtcgaaggacatggccgggcgaagcccgtcgcctggacggcggtggcggggcttccccatctcgcggcgacgcgggtgtggccgatctggtgcggcggccacggtggtggtcctcggtgcatcttgcgcgagagctcggctgggcgcggatctggggccgctctgcccggatctgcgcgtggtgggcgcggcgggggctctttgtggcggctctgctcctgccctgcttggccggaggcagcctgcaaggccgggccagcgtccttttctgccgaggtttgagctgctagtctccccggggcagtggcctctacgtggagtaaggggtcctgccggtgatgtgtctcgcagggatactccctcccagatccggtattgcatgcgcagtgcgcaggctgtatcaactacgatcaggcttgtgatgagatgatt

SEQ ID NO: 4674 - DNA, 2297 bp, Zea mays
  unsure (1)..(2297): unsure at all n locations
  Clone ID: MRT4577_104261C.1
attgggaccctcgaggccggccggaccctcctggcctcctgtcctgccctgcctttccccccgcatgctctcgctcgctctctcgttctcgtggttctcccgagtcccgtgccgctcgagtgcgccgtctgcgtctctagtggcgacgactgggcgaccgccgccgccgccctacgcaaggtgcccagctctccattttcggtcccttcgccggacacgagcacccgccaggataatatgttgtccacgcatgaggcaaatgctgatcagtttgatcttctttcttatggtaatctaaggggactagaggctagtagaagttctgaggaatctaattttggaaatgacttaaaggatggttcttcagtttcttctgagaacttcggctcctcttgtctgcctggcgagagctatcaatctgccacagtagatcatgaaaaacgacctctttctgatgtcaagacatgccaaattgcttgcaaacgtccaaagcaaacagatcactgtacctggttatattcctttgaggaacaccctttgaccagtgaagtgggaatatcttctccagctttatatgatggattggttgagatcaaacaaccaaatgacattcctgcaattaatggtgccacaacctgcagtggtagttcagtgatcccttgccgtaatcatgatcaatcaattttagtggaaaacttagacatacctgattgggcgacttccttccctggttattttgaagactgtgggccagttgttacatatagccatgttgatgacattggttcgcctagaaagggtgtgccaattggacctgagcaccaggctgacattccagaatggaggcccctaaactctatgattgtacctggtgcttcagagttttgtgctaatctggattgtagttctgcttccacttcagagtctgttcccagaggtgatgactatgtaagtgacaagtggatcaggtactgtgttgttccggtgacatgctgctcatctcctgttgactgggctggagacagcaaaatagattgcaactgcagtgacgagggttctatgaggtgttccagacagcatattattgaagcaagggataaccttaaaatgatcttgggacaggacaggtttcgtgagttaggtctttgtgaaatgggagaggatgttgctctgagatggactgatgaggaggagaagctattccaaagagttgttttcttaaatcctgtctccttgggcaagaacttttgggaccaccttccggatgcatttcctaataaaactagccaggagcttgttagctactattttaacgttttcatgctcaggaaaagggctcagcagaacaggtctgacgtgttggctgtggacagtgatgatgatgaactgcatggtgaacctctagctgagcgggtggaaggggatcctgcagttgagtcctctacacatgaacattctgtcagcaattctctgcccatggatgatgaccataaagagtttgaaggagcacagtttgatggatctttgtgtgagaagtcagtatacaatgcagtcgagtgcagacatctaccaaatcagatgcctgcagattcaaatacggtgaacactgcactagatgtttgtgaccaagataatggagctcagtgttcagagtttcacatgtcactgccgagcgatacttcaaacagtcttggggatcaaagtgcatctgtataggagatgttgtgtggacaaggctctttggccgtcgagatgtccaaccaagaccatgaacaacaatgaaatggataacacattcagtttggatctgacatctacttcagatgggtgctgttttgccatggcttggagttgtaaattcagcttcatctggagttgatagttcatgaagttgtacattcttcaactactatgtacttttcgcggcattttgttagcacacttggaactcaactgagcttccacggggttttgctgcccccaccccctaccccccatccccattcgagaaatcaaccttgttgtatgtaccatctgttgtattttcatcgctgtatgtccattcgagaaactgaacatgtagattgtaagagttgccactgtctggattacccgcggtggttttcgtttgcagaccgagtgctttcggaatcgattcatgcaaataatgtgctaccgacagactcccagttgaatccatttgaatgtgatacgtttgtcanaaaaaaaaaaaaaaggggcggcccgcccttttttttttttttttttttttttttttttttttttttttaaagaag

SEQ ID NO: 4675 - DNA, 525 bp, Zea mays
  Clone ID: MRT4577_104262C.1
gggggtgtgtttttttattttttttttttttttttatttttttttttttttttttttttttttttttttttttttttttttttttttttttttttttttgggaacaaaactttttttttttcatttcaattgggcattcagggcattggggaggggggggctggcccccatgggggggcgggacacatttttacccaaacatcgccgctaaatgacccaactagctagctagcccgggggttttctacaacacatagttttttcagggggggacaccccccgcagcaacctaggggcatggagtcggtttttgaaagccccacattgccctaagttggtgggctttttgggccgccaacaacccccgaacctggccctttttcggttgctttttcaagatggactggaggaccaaacccaaaatcccctgggacccgggctgggggtccacctgcctgagctggggggaacacttgtgccccaacaactgggacttaggcgaacaatagggggtccccctcgggc

SEQ ID NO: 4676 - DNA, 557 bp, Zea mays
  unsure (1)..(557): unsure at all n locations
  Clone ID: MRT4577_104263C.1
ccgggctctccccggcggcggcgggtgcggttctccggccatcaccgtgcgcaccaggaagggatatgaggagggacagctcccgcttatcgcagcccccccaggaggggatatgagcggcagaggaagaagtccacctctaccaggaggtcataagggaggctgacggaagtgcttgtactggccatagccgcctgatcaattacgggtgcggagaggggagggggtaatatntttgctcagggcaacttgcctgatgcaaacaagggatcgataagcttagctgcaagcagagcaaagttgtgtcagttatgcgagcagtactcatacgaggcagctcctgtatctaacacaaaccgagaccgagactgagatggttagcattctagaggatgaatgtgtcagtcttgtccgactcaagcagcagggcattacgctgattgactactacgtacccattttcttctcggaggaatgcatgggtacacctgagaaggtctgtgaatcgatgcatatgtgaaagaaggagatgaaaattagtgtacccaactgggagg

SEQ ID NO: 4677 - DNA, 110 bp, Zea mays
  unsure (1)..(110): unsure at all n locations
  Clone ID: MRT4577_104264C.1
ggctgaaccaaattcttgagggtcttattttcaaaggggtgtgtggctaagtgggcctgaacagagggaacnctagggccttggacaatgtgattaaagctgccatcttg

SEQ ID NO: 4678 - DNA, 953 bp, Zea mays
  unsure (1)..(953): unsure at all n locations
  Clone ID: MRT4577_104265C.1
ccggccgggccgcctcgaaggggaaagggcactcccgcgcccccaagtcgaaacgcaaggacagtttgcttaccggttttgtgttcttacttggttgtgattataatctcccgagaccttgtcgtatgtggatatcatgcttgaagatttgatatactcgtgttagcagctaaattcgaagaaaatggtgatgggaagagaggacaaatatgtgagatttcaggactggagatcagagcagtctgttagttcagagaacatagttgctccacatagagatgatgtttcattattcagttcacttaaagaaaggactgccacggtttttacatttctaggaaatattttgcacacagaaacctcaaataaatcaatgctcgatgaaagaaagtccacaacaggaacacttcatcctcaagggccatttctgcaaaaatggaacaggatatttgtgatatcatgtatatttgcagtttcagtggatccattgttcttgtatatcccagttatcaatgatgaaaaaccttgctggtatttggatagaaagttggaaaaggcagcaagtgtcctgcgttttttcacagatattttctacatactccatatcatatttcagttccggacaggctttattgcatcatctcatacaacctttgggcgaagtgtcttaattgaagatagatatgcaataacaaagcgctacttatcaacatattttttcattgatgtctttgctattctacccatccctcaggttattattttggtcgtgctacctaatcttcatggctcgaaggttatgaaagccaaaaatgtgttaatgcttataattatatgccagtatgtgcctcggctaatccggataaggccactatacctccaaatcacaaggtctgctggtgtaattacagagacagcacgtgctggtgctgctntcaccttttgcttacatg

SEQ ID NO: 4679 - DNA, 475 bp, Zea mays
  Clone ID: MRT4577_104266C.1
gttccccctttggctggggggcccttcccccggggggcgcaggaaaaacgacgggaccaaaggaaacaaaggggaggaaaacgcggggggaggcgaaaggcccccttcaaaaggggaccaaaaggggacgaccaaaaaaaaacgggagggggaaaaaaacgggggccgaaaagggaaaggcgccaccggaaaaggggggcaacccggaaaggccccccccgacccagaaggggaaccaaatgggcggaaagggagggaaaataaaaaaaggggggaaaaagggaaaagggggtccctaggggaaagggtttcccggggaaaattgcacaaaaaacacgagcccgcaccaaaaaagggaaagccgggggaacaaaaaaagggggcaaaccaaaaaaaaaggcgtggccaaaactgaagcggttccagccgggaaaccccccaatccaaaaaattaaaggaaaaggccaaagaacgg

SEQ ID NO: 4680 - DNA, 923 bp, Zea mays
  Clone ID: MRT4577_104267C.1
atccgcagccccgcactgaattaacgaaacaatgcatacaatattacatcatcaatcatatttgatacattattatacattaaaaacacattcactcgactcagtcggatatacatgtatataatttgagcaagctagtaaagcagccgcgtgatcatctccctccacttggcgcgcatgcacgagaacatttcgaataaacaaaacagacgtatctcaaacaagcgcgtagaacaaggctccgatggcaaacgtggcggcgccggcaactcctgctgccaccttgggcggcgcggcggcgtttggcggcggatacggcgccgtcggcgagatgtcgatgccgaagggtggcggcggagagaaggacgagaacgggccgctgggggacggcgccagccccgcgcccggctcggtggcgttgccgacggccgcgcgctcggccatgacgacgacgatcagcttctcgccgcggtcgcagttgtccttgttgccgctgatgaagtagaaggggccggagcgggtgaaggtgaacacggtgctgccgtcggcgaaggtgtcggtcggcgagcccgtgtcgcaggcgtcgtaggacctcttgtcgaccaggagcaccgagtcgttgccgggctggtacgtgaaagcgatggcgtcgcccacgcggaagcggttgcgctgcgcccacgcgttgtacgagctgccgttgccgctaccggccgcggcgggcacgcgccactcgcccgtgccgccggccttgaacacgaacgcggacgcggtggacgccgacaccgacgccaccgccaccaggcacgccaggaacacgcagctcatccgcccctgcgccatgtgcgccatccagatccagccagcccctcaccaacaacaaaaaaaagtagcgtgtgcgaagcgatcgagcgtgcctgcgt

SEQ ID NO: 4681 - DNA, 414 bp, Zea mays
  Clone ID: MRT4577_104268C.1
aaaaagaaggccgggtttaggttttatatatatatataggatcaaatcatttcatcgggggccaattaatatttgggtacagcagacgcaatcggatcaagcaggggggatgtagacacacgtacatgagcccaaagactggcgccaaacatgcaggggggggggtagcaaactgaagaactctggttctttttttttttcacacaccacacaatacctatgtatgggagccagctcggcctcgcttattattggtcaaccaccaccacaggctagatagataataatcatatccatgggcggcgatcgatgggatcagcagttgcaggggtcgcacttggaactgctacccgagccgcaggcggggggggcctcgccggactccgccggggcctcgaagaactcgggggcggc

SEQ ID NO: 4682 - DNA, 699 bp, Zea mays
  unsure (1)..(699): unsure at all n locations
  Clone ID: MRT4577_104269C.1
cgggagtagtctggatttgagttaaaacaaagcgaccttcctcctctccctccagctccagttcgtctctctcctctcctcgcctaaggtttcgcctcctgtgatcccgtctcgacgtcgtcgccatgggggacaactacgacgacgaaggcgagccaatcgtggacctcgacgaacgggagccctctcctgagccacagccctacgaagatctcgatgacgacctcggcgacggcggcgattggacccgcagccgctccccgacccccgtccacggcgacgacagcgaggcggggtcctccgccaagccccggaagcgcctcctcaagaagggcggcggtggcggcatgcccggcgacgacgggctcgatgactttgggttggaggacgaggacgcggtccccgcgtctgaggcgaggaagagtaaggggtcctcggcgctgagggacctcgcgaggggcggggcgggcaaagagaagaaggagaagaaaaggcggagggaggacgacgggaggggaagtgatagtgggatggtgagggacaggcggggagcaggagggagggactcaggcggtagggaggaccaggatgatggggagagggagatccaggagctctgggataccattgctggtggtgactcagaggatgaccaagnaaggtgtagaaccatagatgatgataatttcattgatgaca

SEQ ID NO: 4683 - DNA, 526 bp, Zea mays
  Clone ID: MRT4577_10426C.1
tctgcaggcgggggagccgcggcggtggcggaaatcatgatgaagactcccccccccgacatgtgcacaggacggcggggaaacacgcccgacaacgactaggtggtgtacgacgtgacggtggtagacatgcaagtggacgctgtcgagaagtgtgtgaaagaagtgcgtaagctcgccaaggaggaggtcaagacggccgcgacatccgatgcgtggagggggctgaacctctgcaagacctactacctgtacgccggcgacaacctcgggcgactgcaagggggccatccatttgcgagacggcgtcaccatacgcgccacgatgagcatggtggcgcaggacacgcatagctgcgacgaggagttcaagaaggccgtctccaagaaccccatggaggaccactacaggtcgctcatccagatgtcctaaatcttgcgcacgctctcctacatgatgccgttacagcatgtccattggtttgattgattcttttttcccgaccccctactacgtttgggaacg

SEQ ID NO: 4684 - DNA, 376 bp, Zea mays
  Clone ID: MRT4577_104270C.1
gtgcgtattcacgcacaccaaccagttctgcttcatgtccatgggctactactgcagccagcgattgttcaaagacggcgggggcgtttactcctgctacaagattctattcaagaatgacccgtcctgcttcatgcatacagagaccgtgatcatcaccgacataaactactacccggtagtccaagtaccacttcgacctcagcatcacttgcattcgacttagctgtctcaaacgactgacctcaaccactagctccgccactccatcatcataaacatcaagttcaccacattgccaatcgagtttccgggcctgaagatcgttttccacgtgcaagagtactcgaacacgatatacctcgcgatactattc

SEQ ID NO: 4685 - DNA, 900 bp, Zea mays
  unsure (1)..(900): unsure at all n locations
  Clone ID: MRT4577_104271C.1
ggccgccccttttttttttttttttgcagcatgccagcatccgatattccgatcccagcaaaaacaattctcacagaaagagattattttgccccctcaccaatcctgctcccaaaactcctaatcttttaatccgcgtttgttttcctccggccgggcctggcttgcagcagtaatgaagcggaggaggaaaaaaggggagaaaacgaaaaaggcgcagggaaaacaacgcaccagcaacagcagagagcaggcgcacatcaactcatctaatctcctcatcaagctgggcgatgcgtgtgagcaggcaggcggttagggcgaaaatctgagaagtccgggagaatctccggactgacctccccgtacccgtcaaaaatccaatcttgacgcctccctggtcgagccgagactgttccaaagtttctgtctctgtgatgcgtgattgtttgccgctgctaatgaggcccgctcgcctgatccccgtggtcgtcgtcgcccgttaatccgcttcagctctggttccggttcttggacagattttttcgcccctcttggttgtggattgcgctgtttttgtttgtctggatctgcataagggcgtgggccgattcgccaccaccacaagcagagacggctcctcttttttattgcctccacagtgggatttgctttcgcgttgttgcagtatctatctatttctgcgaagcatcttctagggctccgtttgttctcgcgcactttacccttcgctgcccccatctcccagcaccgaatccgcccccttcccggccgtcgattgagggcgtgccgctgccgattgcgccgcaaatcgcgtcttgggtttggtccatgaagaagtggngttgatttctgatttcaagggaggtttttctcctg

SEQ ID NO: 4686 - DNA, 437 bp, Zea mays
  Clone ID: MRT4577_104272C.1
aaaaacccaacatagcagggtatcaaggccccgcaggggcggaagacccgggccaaaaaaagcggataaaacattccgcccccaaaaaaaatcgttttaactgcagctgcaggctttggggaccacaagctctgatacgggggcaacccaaaatctgggtcccacaaaaataatggggggataccaaaaccagctgggatccgaagctcattttacaactaaaaaatatttccacggcaatcacccaaatgacaggagcggcactggacccctcactgttgctggggggggtgctgggctactggttgttgggggaaattgggatagccagcaaaagccccagccccataattatacatattaggggcccgaaactggggggacccataggcctcatagccttgaccggagccataatatccaacattacccccggc

SEQ ID NO: 4687 - DNA, 776 bp, Zea mays
  Clone ID: MRT4577_104273C.1
gccgggccgggattagtttaatccccgccctcattccccggccgatctttttcctgccaatgggaagtgaagtcactcactcgagtgcctttgttagtttgcgtgaggtagaaagccactcggtactatccaccacgtcccctagctccttttcggcccccgcgcacctctctaaatcctctcgtccgtccgtccgtccacagaccacagctgggatcccgatcaatggcgcggaggggcggtggcggtggcgaccggcggcggcagcgctggggcgcggagtggggagggtgtggcgacggcggcgaggtgatcacctgaaggatttgctatcgtggtaggcaagtctgattcttggctgatgtcgtcctcctacacaatggcaaaacagtgtcttctttttttttctttttctttctctttctctgtcccttttccggttctcccttctgttggggcactggattttctttcgactctctcatccatcaggtcctgcggctcacgtcgatctgttcagaacagttgctcgagtgtctctgctcatctgtcgtgtgtatggagttgtgtgctgccatggtgcgttgtgtgtgtgtgtgtgtgcgtgtcctggtcttaaggatactatatatgtaaacacagtctgaaaggaatggcgggtgttgtgataaggaggcaaacgaaaatgcataggttgcgtgtttggtgaataattctgggcgttttgtagtcatgttattaaagtttaaacgtgtctcccattttttttttctgcc

SEQ ID NO: 4688 - DNA, 1037 bp, Zea mays
  Clone ID: MRT4577_104274C.1
cgagggcaacaggagagagggatggctaggctgatgtcgctggttgacgaggggttcgccgtcaggcgccagacccaggaagcgttgtactgcatgcagatgatgacgaggatccagactcagctgtacacgagacggctcaagaccgagaaggacaagaaggttctcaagagtcagaccaaggccgttaataaacatagcctggacaaagcaaagattggtgaaggctgggatcatagcctgcagtccaaggagcagatggaaacggtgcagaagatgaagcaggaagctgctacaaggcggcaaagggccttgtcatacgcattctctcaacagtggaggaacaggaacacctcttctgcgcgagctgcgcatgggcctgctcccatgtacatggaacctggcaacccgaactggggctggtgctgggcggagcgctggatggcggctacgaggccgtgggagaaccagaccatgccaccgccggacactggccgcgcagcatccaaaagcgctagcacccggctgcctcgagtcgccgtgtcggtccagatacccacggccaccactactccaaagggcaagccgttccgcccaccgaactggtcgtcgtcgtcgtcgctgtcgtccccgtcgacgcccccgccgcggaggacggccacgctggccagcccgaggagcggcccgctccacgcgacgagcggcctccagcacagcaagagcctgcagccagaccaccgccgcccgcggagcagccaggaactctcggcaaacagcccgcgccgcgccgccgtgccggcgagtcccaggtgcgccagcgggagcagcagcccgctccacccttccagtggcgccggcgcgcagcacgcgacgacgacggcgaccatacggctcgagcgccgcccgcggagcagccaggaccgcgggatgagcagcccacgcctgctgggcgccaaggacgccccgctgcggcgcaccgcgagcctacggtctgagctcccgataaggctgagcctaggaagcgccgtcgcggccgc

SEQ ID NO: 4689 - DNA, 603 bp, Zea mays
  unsure (1)..(603): unsure at all n locations
  Clone ID: MRT4577_104275C.1
agcttctcaacatttctgaatttttaacaacatgaagaggatggtttaactggatgcaataataaccactaagctcaataccattacagcattactatcattcatcatcaaacaagctatagcacactttcaaaataactggcgaaggtgaccaataagcagacttcgcaaaaatcagtagaggtcaccaccgaccagcccaaccacccaccgcagcctcaagccatgctccttctcttcagaaactgaacgcttgggttacattttgctagtggtgacggcacttcacactacacattagaagcaccagtcacgggcagttcgagttcttgccagggccgccgtagtagaagtaggtgccccagtccccattgttaccgttctgcacgtcgtagcaattggactgctcggtgaaggtgcctacgcccttgggggcgctgagctggttgctgctgtccaccacctgaacgttcttgaagtagctcgccttgctgaacccttcctccgggaagtgcccgctgcccatctgggtcgatgtgtgcgtgcccgtcggctcccgagtcaccacctncccgccccattcgatcatcgacgcgctgtccg

SEQ ID NO: 4690 - DNA, 2017 bp, Zea mays
  Clone ID: MRT4577_104276C.1
cctcgaggccggccggcgcgtaaacgcagaggcggcagggtgggcgaccagtctcctccgcacgcttcccaccgagctcacacactgcacactcccacactcccactcccacctgtaggttcacgggaggcgaggaccctgccccccctgcattcttcccgtatcgcggaccgatcctcgccgcgggaggcgagcggagcggggcgtttctgcgggggagaagcgcgtccctgcaatttctgagagaggggaggcggcgagtggaaaagagcaggcgttgctatcctatcttgctgacacagcggcggtgtggcgaggcgcatggcgagggcgcgcggtggcgccgcgtggtgggtgctggcagcggcgtgggtgctgtgggcggctgcggctgcggcggaggcggaggccaggtcgccgtcggcgaggagggtgcaccggcacctcaagcgcctcaacaagccggccgtcaagagcatcgagagtccagatggagacatcatcgactgcgtgcatatctcccaccagccagcgtttgatcatcctctcctcaagaaccacacaatacagtttaggccggcgtaccaccctgaaggtctatacgatgataccaagagcagcataggctcaaacaatgctggcgagaggccgatgctccagatgtggcatcgaaatggcaggtgccccgagggcacggttccaatcaggagaaccaagaaggacgacctgcttcgagctagctccgtgaggcggtatggcaggaagcggcacactgctccgaacccactgtctgttgatcccaacatgctcagcgagggtggccaccaacacgccattgcgtacgtccagggcgacaagtactatggtgcaaaggccaccattaatgtgtgggagcccaagattcagcaggctaacgaatttagcctgtcccagctctggatcttgggggggtcatttggggaggatctcaacagcatagaggctggctggcaggttagccctgacctctatggagacaacaacaccaggctgttcacatattggactagtgatgcataccaagccacaggttgctacaacatgttgtgctctggtttcattcagataaacagcgaggttgccatgggggctagtatcttccccatctcgaactacgcgggctcccaatatgatattagcatcctgatctggaaggaccccaaggaaggaaactggtggatgcagtttggcaaggaatacgtcctgggctactggccgtccttcctcttctcctacctcgcggacagcgcgtcgatgatcgaatggggcggggaggtggtgaactcggagcccgacggcacgcacacatcgacccagatgggcagcgggcacttcccggaggaagggttcagcaaggcgagctacttcaagaacgttcaggtggtggacagcagcaaccagctcagcgcccccaagggcgtaggcaccttcaccgagcagtccaactgctacgacgtgcagaacggtaacaatggggactggggcacctacttctactacggcggccctggcaagaactcgaactgcccgtgactggtgcttctaatgtgtagtgtgaagtgccgtcaccactagcaaaatgtaacccaagcgttcaggttcgcttatacagcgtcaatctgcatctccttgttcagtcctagctaggtagtgtgtaacatgtgcatgtgctctctagactctaatgttttcttcttcttttcattgtattttcttcttgtgccatgtaaagtttctgaagagaaggagcatggcttgaggctgcggtgggtggttgggctggtcggtggtgacctctactgatttttgcgaagtctgcttattggtcaccttcgccagttattttgaaagtgtgctatagcttgtttgatgatgaatgatagtaatgctgtaatggtattgagcttagtggttattattgcatccagttaaaccattcgcttcatgttgttaaaaattcagaaattgttgataagct

SEQ ID NO: 4691 - DNA, 396 bp, Zea mays
  Clone ID: MRT4577_104277C.1
aaaaaaaagcccccaatttattcgattgggttcaaaaaaaaaaggggggtttttttttctaaatttaacccaaaccttgttttaaaaaccccgccccgcataaaaacctaccttagctttcttgggggggggggaaatttacccccccgggactttttttccccgttcccttcattggggccccccgggcatttttaagggggggcttgtccccggggccccctgaaccacaaggtttggggggttgcatttttttccccaggggcatccagaactggccggttacaaaacctgtacaaaggggaggggggggttgccatggagtttttaagggccttcaccaggttttttggcccaggggggtgggtaacccttccgagaacataagcttttggg

SEQ ID NO: 4692 - DNA, 496 bp, Zea mays
  Clone ID: MRT4577_104278C.1
aaaaaaaaaaaaaaaaaaaaaaaaaaaaaaaaaaaataaaaaaaaaaaaacaacataaggccaaaattttgcatcttttccctccctctggtcggccttttcgtagctttcctttattagtgcccggtggtcccctctttgcgtgttagtgtgtcccgtttcccgctctacggtttacagctttcattacccgtggaagcggtggcccctcccccgtttactggggttggccctccctttcccctttcctccttttgctcgtactagctgtctaggtccagccccgatggggcccttaccaacagagtgcccggcctgaatgccctatttgacactccctgttttctgtttattaagcgcccccgccctggtgtttgccctcaacctcgccggttgcgttggctacgccctaccgcccgcttcctcttctttctgcccttccttcctggcctctttcgtcggttttttcctttttgctctcggtcgggggctcccc

SEQ ID NO: 4693 - DNA, 501 bp, Zea mays
  Clone ID: MRT4577_104279C.1
ggtttgtctcttgagttgcgattgtgtgtttggtcttcacttacaccagctctttcaaccatatcaagccaaccctcktttcatttattcaactctacagtttcaccacaaagaattcggtggcccatcatggatgtcgtactagaggttgtcgacacctttattgccgactatkcatatgcytactttcttacycaaagcgtctagctyyctacgacttcccgtcaccatccaacacaaccgacacaacagccaaggccttctcgacatggatttataaaccggccacacagttcattacactagagccaccagagcaagcatacatgagckcatgggatcgcgakaacktycttcgccaggsgcttacyytgtatytcatcacttggatytttggacttcttgtctatttcattgttgckacactctcatacatattcatcttcgacaagcgcacctttgagcacccgcgattcattaaaaatcaggkccgcatggaga

SEQ ID NO: 4694 - DNA, 450 bp, Zea mays
  Clone ID: MRT4577_10427C.1
agaaacatcaactatatccgttccacctgtgggaggaggcccctaacactttaccataaccgtggtgttgacagaccagacctctccaagagaggactggatccatctgaaactatcatgcttcatgtctatgaagactctgaaccctgtgtcaagagtgttctccttctgaaataccccttccctacctgcgaccatctgttacacagtcatgaggatagtccttcgaagggaattgaggcacaccgcccaatctactctttcactgatgagagcagttattaaaaataataactgcttttctgctgcaaatgctcctgaaaagagagtcaaacaacatactgtgcatattgccatatactgttgtttaccaccacaactgagaattgatatgtacttagattctcgtctaataacgcagctgtgttcctgcccttgatgagaccgagg

SEQ ID NO: 4695 - DNA, 126 bp, Zea mays
  Clone ID: MRT4577_104280C.1
ttacatctgctggaatccagccctacttggggtagggcttagactctccgacggcttgagcctatcaagggataactgccaggcgggatcccaactgacgcgcagtcacaaagcctatggagctcg

SEQ ID NO: 4696 - DNA, 391 bp, Zea mays
  Clone ID: MRT4577_104281C.1
tcttttttttttattaatttaacacaaaaacacaaacaactagcgccctgacacattttatttacaacctcacctctctattccataccaaaaaaaaactctcatctacccccaaatcaatcaaacaacaccaattatcctttatccctccaaacaacacccactaacctcactcaatgacaaatactcctcacccaccacaacctgaactccttcctggctaccaaactaacaaaccccacctctctcactcctaaaccacccccacattagccatatatcatcctcttatcacactatcaaccctgcccacacaccttcctaccaccaccactagtcactaacacaatctcccccctactttattccaaagaaacattcttttacatcc

SEQ ID NO: 4697 - DNA, 451 bp, Zea mays
  Clone ID: MRT4577_104282C.1
cgcctgcaggtaccgggcctaatggcggggggaggacgcgtgcgctccccccccttttttttttttttttttttttttttgggttaaacaaattcacgtgaggggtgtcatggggggggggggcggtatatccaaccaataggggccagtacacaaactatggacaggtggtggagagagagaacaggatcaactcttggtcttcaaagattgggggggcagggatacagaggggggggcaaaacttgtgttggcaataaaccaggagagaacccacttcagattggacaggatggactttaaaggcttgggccaggtttcattcttattggaactaagggcgatcgggggggtccctactttggcaccatcaatcttggagggaagcttcagggatttttcagggggaacattggtctggttatccaaacttatgggaaactcagcaaac

SEQ ID NO: 4698 - DNA, 577 bp, Zea mays
  Clone ID: MRT4577_104283C.1
taggggccttttttttttttttttttcttttttttttttttttttttttttttttttttttttttttttttttttttttttttttctttttttatatttttatttccgaaaataacagggcccaaagcccaacggaattggaagggcaaaaaaaaaaaagggcccaacgaaggggggccccaaaggggggaaacaaaagggggcgagaataagagggccccccggcaaaggaagcaacgggatcacgggaagggggggacccggaaaggagggggggagccccaaaccaaaccgggggaagaacaagaagaggggcaaattgggcaaaaggaacggggaacccccgcccagggaaaagggcgggccccaaaccaaagggaggaaccccccaggggaaaaggagggcccggaaaccgccggggaaaaaccaacggggcaaaaaacccccggggccccccccccaaaggaccagccccgggggaaaaacaacagggggaacccccaaaacccgcccgccggggaagagaaccccccggacaccaaacccctggaccgttgtcaaaaaaaaaaagtgggc

SEQ ID NO: 4699 - DNA, 315 bp, Zea mays
  Clone ID: MRT4577_104284C.1
cctttgtttttttttttttttgggttttagtttaaaccaattatttgtatttttgctaattacaacatttccacaccgtcggagttactttttggttctagggggaaccaaacaggtacaatgtgggggctcaaaagcccacgcacacaaaagattgtcttcctagccagtgcaaacccactggggggccatacaagtaaaaaaactgggctgttttgggcccaaaaaaaccacatcaacgggggggggggtgtctacaggggccctcaaataagcacaggggtggagggcaccttgaacagggaccgacctgaa

SEQ ID NO: 4700 - DNA, 392 bp, Zea mays
  Clone ID: MRT4577_104285C.1
atacgaagatatctatatatgccaaaaatgtcgaggtccttctcctcagattaaattcaaaagacgttcatcgatcagtagtgcctcatgaatcagatcagacacaaaactcagcaaattatttacgtgattccggtcgcaagaaattgaattaatacacgcatccacgtcgcctagttcgctacgccgtggcgagaatgggtgggttggcgtagggtcccctgagccagccatcggcgatgcggtggtacgccgcctcggtgaggtggacgccgtcccagttgacatacgccgacgggttcgggcaggctgccacgccgggcatcccgcacgcggcgctcaggttgaagttgtacttgccgtcgtcaccgccgcagcatacccttagcgcg

SEQ ID NO: 4701 - DNA, 406 bp, Zea mays
  unsure (1)..(406): unsure at all n locations
  Clone ID: MRT4577_104286C.1
cgtggncttgctgagcgtggccctagtgggcctgctcctctgaccagctcgcaattaccgcatccgcccagcagaacagacttccacgtcctcggtagcgtcgacggctctagtgactgcagcaggtgcgtgtcagaatgtcgcgtcctctaatcagatatgaatctggctgagacagactccgagtcgccggcacatgcgccggcgccagggccgtcgtccggttgaactgagaatcgtgcgtccagccatgcaaggtggtcagaatgtacaactaattagtggctcaatcatgtgtcaggctaatagtgctcttgccataattatatagatatacgcacagtgtgtgctaagctacccacatgcattctattgcagggcgccgcagatatattaaacaactgtg

SEQ ID NO: 4702 - DNA, 325 bp, Zea mays
  Clone ID: MRT4577_104287C.1
cgaaacaccgcaaccctccctcgatctagccgccatggccgcgcgcgtccccggttccctcttggctgtcctcctgctcatcctcgcgaccgcgtcccccaccggcgccctccgcttcgacctgcgttcgggccacaccaagtgcatctccgacgacatcaaggtgggcgccatggccgtcgggaagtaccaagtcatggcccccgacggcgtcgcctcttcgtcgtcgtcacagcagcttccggactctcaccgcatctcgctgcgggtcacctcggccctacgcaacagtctgcactacgcggagaacctgcactcgggcaac

SEQ ID NO: 4703 - DNA, 534 bp, Zea mays
  Clone ID: MRT4577_104288C.1
atggaggcaagaacaagaccatatgtaataatagaaggggagttatacaaacatggagtctgctctccacttctcaagtgtctatatccagaactgaaggctataactgtggacaacggaacacagtttgatgccgaagctttcaaggaattctgtgatcaaatcagcacgaagattcattttgcgtcagtcagacatccagagtcaaatggacttatcgaaagagcaaatggtattataatgacaagaataatgaagttaatttttaatcagcccagaggaaagtggccagaagagttcattaaagtggtgtggagcctcaatacgactgtatcaagatcagcaggtttcacgccattcaagttactatttggcgacgaagttataactccagaagtagctataacagggtcaataagatcgacaacttcggcagaagacgaagctgattatcatgtggcaaaagacactatagaaggggtcagacttcaggttgtggaaaatattaataccgtgacagaaaagttcgactga

SEQ ID NO: 4704 - DNA, 636 bp, Zea mays
  Clone ID: MRT4577_104289C.1
cctcgaggccggccgggaggactctctcgaagcgatatcctagccctatgacccccgactcgacggcgtgaagatggacatggacgcagcagcgcagaacagagtagctgatcgagcagttctcctctacaagtgatggatctttctcccatggagatctcgacgctctgaagctcgatgtcacctccgacccgtccctcttctccttctccgaaatactcggcctcccggtcctctccagtgctagctggcactcagaactcgacttcactggacttgatccgattcttctcctagtggagcttgtgaggactattatattatattcctgtatgccttccgacattgatgtcggatctggatctacagctagagtttgtcaaagcgctacactgctgggagagcgagtaccatactaccatatgataagatcatgtcccatgttattgtgtccgatgcaagagatgtcgaagattaatctaatcaatgacagaatggttcctgatcgcttgaggatatctgcataatatgagaaaatgcttatgattagatgtgcgggtggaacaatctgacgcctgatcagttaagaatcatgatagagatcttatctgagtgtccgataacatcagatattct

SEQ ID NO: 4705 - DNA, 133 bp, Zea mays
  Clone ID: MRT4577_10428C.1
aagggggaccccctgtatgcaacatggcatgatgagttcaggaaaccactcaactatctgaccggccagaaatataagactgatgaccaccggacaggctcgtggcagaactaaccatattgtgactaaccac

SEQ ID NO: 4706 - DNA, 530 bp, Zea mays
  Clone ID: MRT4577_104290C.1
ggtaggttaactgggaccaacaacaagtctctccttcaacggcaaatgcccataaactgaagatagatccatgcagcattattatttgtggcgaaacaaccccagggcagaacaaaaacgcgctacaaaggtcaactatgagggccaattacaacacatcgctacaaaaccagaaggactggacgccctttacttccaaccaaccctagataaccacacactatcttgattggacgcaacaaaagaaaatgatccacgactggcttcatctatggatcccactctaaaactcactctacaagccccactcacgttacacggtgcactggcatgttagaacctcgtctcctattggatgctccatacaactaggcgacgaccacctactggttgacccgctcatcattctcagccataatcttcaccctaagaatgttataacccaccttaagtaaaaccaccttatctacctttttagtggaaagaatgtgcttagactgactgttcttcaaaactggaaacttcctcac

SEQ ID NO: 4707 - DNA, 234 bp, Zea mays
  Clone ID: MRT4577_104291C.1
cctttctccattgttcacgtagtttttcgactgccatgattcactgcaatgcgaagaccttggcagccgggactacaggctattgactgcatctcaggcttggctgcggctacgctaggctcgtgcagaataaaaagcaacggccagtgcaggccgtcaggtcacacggcaatgtgcataaatatgctgtggtacaacacatcagcgctgacaagccagcactgctcgctgctg

SEQ ID NO: 4708 - DNA, 871 bp, Zea mays
  Clone ID: MRT4577_104292C.1
agcgggcagcggagagccgccaggcaatgcaatgaagaaatgctcggcgttggggtgggcgtccgactgatggtagggggggcccctgcgcctccagttccagccccaccaggcaaaccgccccttcctctctgctcctctctccttcaccgctcctccggctggtggttgtggggggggacgcccatggaagagacagcaccaccgccaccacgagcagcagggcgacgaggcggaagtggtggtccgaccccgacggcagccaagaagactacggttcctcttctctagaggaggacgagtacggttacggttacgactacgattacgaggatgaggctgcgttccccggatttggaggggctggggagatgttcgacgagccctggttctccaaggtctggtacatacgtattgtgtaaaatttctgctcctttccttcctttctggtaccctctgtcaatatgccatcaataatttctattttcctgcgtgcttgaaccttcatagtcatagactcataggtactaatgttacctgtctggacagtggatggggaccatagatcctttgccactcattcttagttataactaaaaatgcttcaaattaaatcaaatcgtcttccatttttttctctctctggtattaattcaagcaactgtataatgcttttgcctggtagatctaattaaaccaaatctctgcttataattctctgattgggatcttaacttacaatcaactaacctagacttgtcagctccagttcatgctgctttccattccatcagtaatgtagcatgcatcagtactgtaatcaatcgatggacgaataattgtgcttcattgttgtagtgactaatcaaat

SEQ ID NO: 4709 - DNA, 464 bp, Zea mays
  Clone ID: MRT4577_104293C.1
agattatatacactagatacctagattataggaatccataaataggtcattaagcgttaatataattgagaagctagattacacccatcaatcccctccttccaaaaactaagtgctgatttggtaaccaaagaattggatgagacccatgagagaaaaacccttgttctttaattttaaatagaaatggattacctctcatgtatcccatctaattctattggtaacaaatccgccctaaattgggataaggggaaccagtgatgccccacagaggaccagatgaccccaaaccagcactgagtatatacatataaaacttctgcttaaaaggaggcacatatgtacatgcccctgactgattaaacagcggctgcctatttctattggagaacgaaacccttatttttcaaacagctatattgcagactacctccagacattaaactactctgagaaacaac

SEQ ID NO: 4710 - DNA, 173 bp, Zea mays
  Clone ID: MRT4577_104294C.1
ccgccgacgacggggtgctgatcttcagggtgtacttccacgacgtccaggcggtgacgaaccagacggtggtgcgcatcgagcaggcggtatcctccagcatgaggcccatcagcttcggcgcatcggtgcgcatcgacgacccgatgagcatggttcctacgcgcgccgcg

SEQ ID NO: 4711 - DNA, 1932 bp, Zea mays
  Clone ID: MRT4577_104295C.1
cccacgcgtccgtttttctaaattaacaagggggaaagggaaagattagcatctcccccctcgaggccggccggggtcccctcccccctcccctcccgtacagctgtctgtctcggagcagcgggcagcggcggccggcaggcaatgcaatgaagaaatgctcggcgttggcctcggcgtccgactgatggtagctgttgcccctgcgcctccagttccagccccaccaggcaaaccgccccttcctctctgctcctctctccgccaccgctcctccggctggtggttctccaacggcgacgcccatggaagagacagcaccgccgccaccacgagcagcagggcgacgaggcggaagtggtggtccgaccccgacggcagccaagaagactacggttcctcttctctagaggaggacgagtacggttacggttacgactacgattacgaggatgaggctgcgttccccggatttggaggggctggggagatgttcgacgagccctggttctccaaggtattcaagacgtacggattcatgctaccggtgatgcttgcatccatgtttgctgtaacagggctaaaggcctttctaatggccatggcgatcccgctcggtcagtcggccatatcatttataattgacgctgtatggccaaggagaaaaggcaaccgtgacgacaggtggaggagaccagtccaagaggaggaggaggaggaggaagatttccctagggacgccactgactttgcaacaggtggtcgaggcagatacagcagcagctattatgaggggaggagagggaggcagagctaccagtcaagtgtctctaacgattttgctgatgctgcctcagctgctgttggagctgatgatagcaccaagagcagcagcagtgggatggcggaggcaacgaatcccgccgtcggtctggcgggtgcgtggggcttccggtcctccctcgcgcctctgctgctgcccgggtggctgtgggcaccggcaactctttctcagcgcggaacacttattacagcacgaaatcgcggccttcggcgactggggaggcagatgcggattttacccccgctggccgtggcggaagagcggagcagggagtaggagctcctccggaaagaatgagaatgagacgacggcgggtgccgagaacgatggggctgggcagtaccaggtacaagcaggcgccactcttgatgcgcctgttggtggcagtattcccattcctgggatcatggttcagtgtgctctgaactgtgctccttcgttccaaattataagacgttttggttgtcggctttctctagattcatagctttttgctatgtacttggatatacactatgtctacaaacgttataaaagcaatgtgtatagaaatgtcataatttggaacaagcaatgtatatagaaaagtcatgatttggaatggagggagtagtattacatattagcccatgttggctcactcatgaattcacatacaagtaaccagtggcagtaagcaaaagattatgattgtgaaactgccttcatccggtctccaggcagtcgcagaagtttgattcaatcataggctggagccgaatggaatcagaagtgaagctgtggattggaaggaagacaagtgtcgtgaagaagatcgattgattcaggcagtgtgcctgcagcatcagctaagcggaaaagtatgtacgtaccctgttgctctagcgcaatggttttcacttgcactatatggtagtgatacatagacagttgccttgtcattttttttcgtgtcacaatgaaatggaacagtaaagaaggccttcgttttatagaacctggtacatacgtattgtgtaaaatttctgctcctttccttcctttctggtaccctctgtcaatatgccatcaataatttctatttttct

SEQ ID NO: 4712 - DNA, 1511 bp, Zea mays
  Clone ID: MRT4577_104296C.1
cattgggtacctcgaggccggccggtgtcgctgtcccctcgctgtacacagggtgtctgtcaccgagcagcgggcagccggcaggcaatgcgatgatagtagctgctgctgcccctgcgccgccagttccagcaccgccgggcaaaccgcccttttctctctcctcctccagctcctccttctccctccgccgccgctccttcagcttgtggttctcaaacggcaacgcgcatggaagagacagcgccaccgccaccacgagcagcagggcgacgaggaggtggtggtggtccgatcccggcggcagccgagaagactacggctcctcttctctagaggaggaggacgtttacgattacgaggatgaggctgcgttccccagatttggaggggccgcggaactgttcgatgagccctggttctccaaggtatataagacttacggaatcctgctaccgttgatgcttgcgtccatgcttgctgcgacagggccaaaggcctttctaatggccatggtgatcccactcagtcagtcggccatatcgtttctgcttgacgctgtatggggaaggaggaaaggcaaccgcgacgacaggaggagaccattccaagaggaagattaccctgaggacgccgctggctttgcggcaggtggtcgaggcaatggataccgcagccgcagcagcagcagcagcaactattatgaggggagaaggaggacgagcaactaccagtcaagtgtttctaacaattttgctggtgctgcctcaactggtgttggagctgacgataacaccaagagcagcagcagtggatatggaggatgggatgagcttctggacaacgacactgctgctcaggagacaaagaggaggagctcattctcagctggcaccactgatcgaagcacaaaatcgcagccttcagcgactggggaggaagatgcagattatactgccactccttcaacaagaacgagaatgagacgacggcggacgccaggaacgatggggttgggcagtaccatgtacaagcaggcaccactcgtgatgcgcttgttggtggcagtcttcccgttcctgggatcatggttcaggctgctctgaattgattgttatatattcgtccacggtggttcgtttatgatttcagaaaaaaaaagatatatatatataagtggccagtggcattaagcaaaggattatgattgtgaaaaatatataagcgtagtgaagaagatcgattggttcaggcagtgtgcctgcagcatcagctctgtactgctgcatccgccattgcgaagggaaagaatcacagcatctgacttgctggtgcatgtgtgaacctttgcttcctcgcgcttgtgcagctgataatatgtttgtggtctcggtgaacattaactaattgtgtaagtggccagcgtagtgttgtgttgcttgtgtgtgtggtgtaagtgatgttgggttcttgcacccattcttcctttttaatataatgatgatacagat

SEQ ID NO: 4713 - DNA, 1274 bp, Zea mays
  Clone ID: MRT4577_104297C.1
gcacgcaacactgtctcgctcctcccctcttctacctcgatccatcacctttgcatagcatatatagcgcagcagctcactgcaggcagacgaaacaccatctcatcacatcacatcagagcagagcagagcagagcatcacccgatcccgatcccgctattcccagcctgcagtagcagcagcagtcgcgccgccctgcccatcgatccatctggctatcatacctgtcgacatggaaggcggactgagcccggagcggcacgcggcggctgagccggtgcggtcgcggtggacgcccaagccggagcagatactcatcctcgagtccatcttcaacagcggcatggtgaacccgcccaaggacgagacggtccgcatccgcaagctgctggagcgcttcggcgccgtgggcgacgccaacgtcttctactggttccagaaccgccgctcccgctcccgccgccgccgtcgtgcgaggggatgatgggcgacctggactactacggcggcgacgacctgttcgccatctcgcggcagatgggctacgccagcggcggtggctccggctccgcgtcctcggcggccgtcgcacaccacgagcagcagcaccagctttactactcgccgtgccagccagcgagcatgacggtgttcatcaatggcgtggcgacggaggtgccgcgggggccgatcgacctgcggtccatgttcgggcaggacgtgatgctggtgcactccaccgccggcctcctccccgtcaacgagtacggcgtgctcacgcagagcctgcagatgggcgagagctacttcctggtcacgaggggctactaggtagctagctatagcacattgcattgccgacatggagaccccagagctagctgatgcagtacacgtactcctccttaccatgcatggaattggatgttattcggatcgtcggagacgcatgcatgcattgcatgctgcagtacctagtatctctgtctctgtgtacgtgttcttcagtgaatgtctgtcagctcttgccgtccgtccgtccgggtgtagatcagaaaaaggaggcaaagaattcgataccagcagtgtgtgtgtgtgtttactatatatatatataaagagagagacacacacaaacaaatagagtgttgtacctacgacgcatccacatcgaacatctatactaagtatgtatgtaatgatgaatcatatgatgagtagtcgcaccattgcacgcatttgctttaatgaacctgaatgcaatgcatgttgc

SEQ ID NO: 4714 - DNA, 2270 bp, Zea mays
  unsure (1)..(2270): unsure at all n locations
  Clone ID: MRT4577_104298C.1
ccggccgggaaaggtatcttctccggtcctccctcccctccctgtccggctgtcccctcgctgtacacagggtgcctgtcaccgagcagcgggcagccggcaggcaatgcgatgatagtagctgctgctgcccctgcgccgccagttccagcaccgccgagcaaaccgcccttttctctctcctcctcctccttctccctccgccgccgctccttcagcttgtggttctcaaacggcaacgcgcatggaagagacagcgccaccgccaccacgagcagcagggcgacgaggaggtggtggtggtccgatcccggcggcagccaagaagtctacggctcctcttctctagaggaggaggaggacggttacgattacgaggatgaggctgcgttccccggatttggaggggccgcggaactgttcgatgagccctggttctccaaggtatataagacttacggaatcctgctaccgttgatgcttgcgtccatgcttgctgcgacagggccaaaggcctttataatggccatggtgatcccactcagtcagtcggccatatcgtttctgcttgacgctgtatggggaaggagganaggcaaccgcgacgacaggaggagaccattccaagaggaagattaccccgaagacgccgctggctttgccggaggtggtcgaggcaatggataccgcagcctctgattgggatcttaacttacaatcaactaacctagacttgtcagctccagttcatgctgctttccattccatcagtaatgtagcatgcatcagtactgtaatcaatcgatggacgaataattgtgcttcattgttgtagtgactaatcaaatggcctgctgctttctgtacttgtgagtaggtattcaagacgtacggattcatgctaccggtgatgcttgcatccatgtttgctgtaacagggctaaaggcctttctaatggccatggcgatcccgctcggtcagtcggccatatcatttataattgacgctgtatggccaaggagaaaaggcaaccgtgacgacaggtggaggagaccagtccaagaggaggaggaggaggaggaagatttccctagggacgccactgactttgcaacaggtggtcgaggcagatacagcagcagctattatgaggggaggagagggaggcagagctaccagtcaagtgtctctaacgattttgctgatgctgcctcagctgctgttggagctgatgatagcaccaagagcagcagcagtggagatggcggaggcaacaaaagcagcggtggatatggaggatgggatgagcttctggacaacaataacaacactgctgctgcccgggaggcaaagaggagcagcaactcattctcagctggcaacacttattacagcacgaaatcgcggccttcggcgactggggaggcagatgcggattataccgccgctggcggtggcggaagagcggagcagggagtaggagctcctccggaaagaatgagaatgagacgacggcgggtgccgagaacgatggggctgggcagtaccaggtacaagcaggcgccactcttgatgcgcctgttggtggcagtattcccattcctgggatcatggttcagtgtgctctgaactgtgctccttcgttccaaattataagacgttttggttgtcggctttctctagattcatagctttttgctatgtacttggatatacactatgtctacaaacgttataaaagcaatgtgtatagaaatgtcataatttggaacaagcaatgtatatagaaaagtcatgatttggaatggagggagtagtattatatattagcccatgttggctcactcatgaattcacatacaagtaaccagtggcagtaagcaaaagattatgattgtgaaactgccttcatccggtctccaggcagtcgcagaagtttgattcaatcataggctggagccgaatggaatcagaagtgaagctgtggattggaaggaagacaagtgtcgtgaagaagatcgattgattcaggcagtgtgcctgcagcatcagctaagcggaaaagtatgtacgtaccctgttgctctagcgcaatggttttcacttgcactatatggtagtgatacatagacagttgccttgtcattttttttcgtgtcacaatgaaatggaacagtaaagaaggccttcgttttatagaagaatgcaactctgtcttcggtggatcgtgtaaaatagggaatgtagaattatagatgacactatttac

SEQ ID NO: 4715 - DNA, 860 bp, Zea mays
  Clone ID: MRT4577_104299C.1
cccacgcgtccgccgtttttcgctgctgccggtccaaccctctcctctcacccaaacacctttttttcccacgagaaaccccggaacatccgagtttatgtccatcgaaaatctcaagtccttcgaccccttcgccgaagccgacgacgacaccggtgataccaaaaaggtcgagaatcacatccatattcgtattcaacagcgcaatggtcgcaagtctctgaccactgtcactggtcttcctgctaagttcgaccccggcaagattctgaccttcttcaggaaggaattcgcttgcaatggcaacaaggtcaatgacgaaaaggccggcgaggtgatccagctccagggtgaccaacgcaagaaggtcatggatttcctcgttgacaagaaggccggtctcggtctcaaccccgataacatcaccgtccacggtgcttaaatcgtcctcttcgcgccgccgtccccgccaccttccagcgacttggcttcacagcgtgctggtgatgagcgtcggaacgaggctgttcgagcagcctgggcatactactagtatatcttgcacaggcgcgcgtactgtcgccaccttcattatctagccgatatcgctatgcgcctgatttgtttattggtccctagcgatttcatacgatataacctcaacccccacgggtataataatccacctgtgtgcgggtagcagcgtctttgggaggtctggccggtcggatgcaatagaggatagggttagagtgagagctaccatcagcttattgggctttatttatgcacccggatctgctgtgcagcaatgcgaagcagttttacgaatgatcaatatcttttttttgtgtgtttcc

SEQ ID NO: 4716 - DNA, 694 bp, Zea mays
  Clone ID: MRT4577_10429C.1
ccggccgggatcctcctactcctcgagcggactgttggtttgtcaacctacaaatcaatcacgactccacgatgctcccgaacgcgaagcgagttttggcaaagcaggccactggcctcatggcgcgcgcgcacgcctacagcttgggcgcacaacggcagcgcctggtatcaaccttggcagttctcgagcaaaaggatggtgtgctcaaccacagctctctaagcgcctttacggctgcgaagaagcttggcggaacggtacacggcttcatcgcaggtactggtgtcaagtctgtcgctcaagaagttgccaaggctgagggcgttgaaaagattatcgctgtcgaaaatgctgcatacgaaaagggtttgcccgagacttttgcccctcttttggttgagaacatcaagaaaggcggttatacgcatgttattgccggtcacactgcgttcggcaagaatgtcatgcctcgagttgctgcactcctcgactcccagcagatctccgatatcacagctattgagagcgagaatgtcttcgtccgaccgatctatgctggaaacgcaatcgccacggttgagtcatcagactctgtcaagattgttacaattcgaggaactgcctttgcttctgttccacttgaaggaggctctgctgcccgttgaggattggtgttgattctaagccagag

SEQ ID NO: 4717 - DNA, 903 bp, Zea mays
  Clone ID: MRT4577_1042C.1
gttctagatcgcgagcgccgcccttttttttttttattgttatgaatttaatagcattgcaagagacttgtgatatagaattgaatacaagaaatgtccacatgcatgtttatgcagatacaggtacaaccatccattctatcagataaaacataaacagtaaacaaatacaccttaccccctctgttagaatcagatttgcatctgaacctatagatctatcattggctaatggggatgttaaaacagaagaaactcatttttctcagctttctttaggcatgatcattggccagctcaaacaaagaaagcagaaagcctgtcaggcctgctaccactaggttagtgaaatggcaggtggactggtatttaggaaaatgcatatcgtctagcacctgatctccagcacctttatttggagaggatcatgcctgactctcccgtcctgggaactgaaagaatgatccacgttgtataaacctcgtgccatctgatcatagcttctccgttaatcgaatcatgaaagaactgacagcaacaacatccagaacaatccacgatgactcaaacatgtcatggaaatagtccgcaccaatctcctctgccgcatacctgaaagcattaccaaacgcattcccctggacagccccaagccttggcttcccacataccccgacaactagcaccttctctggctcctttgctaagcaagcacagatcaacggcttcatccttgcacccctttccttgagagcatccagcagaaagaagcagaacttggtaagtgcttgcgggtggcaaagcttgttagtgtccacagggtcatcaagcttcacccaccggaacttcttggcactccgtataaaccctgtcttagtaatcgctgagcttccttgtctcaat

SEQ ID NO: 4718 - DNA, 767 bp, Zea mays
  Clone ID: MRT4577_104300C.1
gcacgcaacactgtctcgctcctcccctcttctacctcgatccatcacctttgcatagcatatatagcgcagcagctcactgcaggcacaccatctcttctcatcacatcacatcagagcagagcagagcagagcatcacccgatcccgatcccgctattcccagcctgcagtagcagcagcagtcgcgccgccctgcccatcgatccatctggctatcatacctgtcgacatggaaggcggactgagcccggagcggcacgcggcggctgagccggtgcggtcgcggtggacgcccaagccggagcagatactcatcctcgagtccatcttcaacagcggcatggtgaacccgcccaaggacgagacggtccgcatccgcaagctgctggagcgcttcggcgccgtgggcgacgccaacgtcttctactggttccagaaccgccgctcccgctcccgccggcgccagcgccagctgcaggcgcaggcggcggcggcggcggcggcctcctcgtcctcgtcgggatcgccccccacgagcggcctcgcgccgggacacgcgacggcttcgtcgacggcggggatgttcgcgcacggcgccacctacggctcgtctgcgtccgcgtcctggccgccgccgccgtcgtgcgaggggatgatgggcgacctggactacggcggcggcgacgacctgttcgccatctcgcggcagatgggctacgccagcggcggtggctccggctccgcgtcctcggcagccagtcgcac

SEQ ID NO: 4719 - DNA, 371 bp, Zea mays
  Clone ID: MRT4577_104301C.1
ccggccgggactcctactcgctcgcccgtccgcggccacactcacagctcttccatcccgccggagcggagggaccccgggacgatccttcccaacttcaacgtcggcccgagaggagggcgggcctaagcaccataacctgcagcactggctccgcctgaccaccagcaaccagatgtgcagcactgttccttctcgacgccactgctcgtcctaccctgcgggcgcctgttctactggctctcgctatctgcactgacgtccttggagccatgaaacaactggatgtaaggagcagcaagccccgccggatcaccagaacacggagagcatagctgcagccgtgcaaggcgaacgccgatgcctctgca

SEQ ID NO: 4720 - DNA, 145 bp, Zea mays
  Clone ID: MRT4577_104302C.1
cggtcacccacgggcttgagccggggtgaatctggaggggccgggccgagcacgggggcgctttcgcacgcgaagcatagcgctagagcaggacctggtctcccgagaacaggactacttgtagatatttgaggagggcagtgtc

SEQ ID NO: 4721 - DNA, 836 bp, Zea mays
  Clone ID: MRT4577_104303C.1
acttcaccgcgcctccgctctcccctgcctttctcgcgcgcccacccacccccggacacacccgcctcactcccaaccggacccaaccaccactcaaggtcggcactgccgttgcgatttcttggcgagcgttcagatcagatttcgctgtgaagaagccgccggatcttctccgagggctggccgagatccggagtgcaaatctgagtcccgtgcgtctccgagcctcaggggattccatgcgagattttgattttggggatctttcttgttggataacagttcagcggtgtgctctctacaccagtgatcgcacttttgctgttgtcgcctgctgcggttggttactcagggtttgcatcaagtccaaagatgactttgcgcagcatagttcgcgatttaagggagaactttggaaacctgtcaaggcggaatttcgaggcgaaaatctcaagcgtcccaagcctttcgggccatcacagggggaaatcgcttgaatctgcaagtgatctgcaggatagtcttgtcacaaacctgcaaggcaattgggctagccttcctcctgaattacttcgggatgtgatgtaaaggttggaggaagacgacagcaattggccatcccgcaaggatgttgttgcttgcgcttctgtctgtacaacttggagagagatgtgcaaggatatagtgaggaatccagaattctgtggaaagctcacctttcctgtgtcccttaagcagcctggatctcgagatggattgatccagtgtttcatcaaagggacaagccaagctaactatcgtctctactgtcccttacttctggtggcctgatgaaa

SEQ ID NO: 4722 - DNA, 396 bp, Zea mays
  Clone ID: MRT4577_104304C.1
caacccgggggggaaacaacacacgttacaaaaaaacaaggttccaacaaaacattggggaccttttttgggggggcccacttgaaacaacaagagaaccaccccgggccaggggcgggtggacccggaccgaaccaaaaaggaaccgggagttttcaaactaaacaaaaaagggggggcccccaacaaaaggataccctgtcaaaacggacccataaaacaatcaatcaggcgggacaaggggtgaccccaaaaacaaatttttgccctccccttccaggggaaaaaaccgggaggttacaaatgggggacccccctttttgggcccctgctaaaaaaattaagggaaaaaccggagcaggaaccccaggtggtggtgggaaaaggccccaacct

SEQ ID NO: 4723 - DNA, 368 bp, Zea mays
  Clone ID: MRT4577_104305C.1
catacccatcgtctgcatgcttgggatacagacggtgctaagccctttcgacacgacccagattaggcctttctgtggcaagttatacattacttagcacgtgaatcgaggctcatgtgcacgaatccgctccttactaccattaatccatatcttatggtctgaggttacctgtgatgtaataaccgaggagctgaacttgtacagatgctatgaataactggccgtaacctgtcggattctgttaacatcattacattagaacctgatcgttagctcataatgaactgacatcaaataatggaataacaaatctgtctaaagggaccgacgatgtatatggaccgagctaacgaacatcctgcttg

SEQ ID NO: 4724 - DNA, 551 bp, Zea mays
  Clone ID: MRT4577_104306C.1
gtaaacaggaacacactgcaacaaggcaaaaaactcataaccatgtatgccttacattcgatgttccataaaaaaaattaagtcttaatagcatcacggtttcaacgaaagtaataatacttcatgaccaggcaaacattgccatcatagattacttgttcacgcgacaactgcaaggatgtcaacaagacgagatattttaagcttccacgaggtaaccaacaagcaagcacagcaccagccagatagatcatttcttcttggcagcagccttcgtcaccagccagatagatcatttcttcttggcagcagccttcgtcaccttggctccagttgggatcataaggaggaagctccttgaacctcgcagtcttcacaatgtcaacccactcagggagctccatcttgccggagcgcttgaggtgggcggagtaggccttgacgaactcgtgcgggttgacatccttcaccgtcctcgccgtagattccgccatcctgccgcggacgccgccaggggacgagagaggcaggttgtggatgcggctgctctg

SEQ ID NO: 4725 - DNA, 411 bp, Zea mays
  unsure (1)..(411): unsure at all n locations
  Clone ID: MRT4577_104307C.1
acgcgagtctcacttcatgtgcgcaggtgcgcgccgtgctcgactttccggcttctcctctctcggcaggaaacaaaggccgtgctcgactttccgcattccggcgtcactgcgcgcaagcaatagcagtaggccccttctcctgttctaactgaggggtcgaggacaaagctcctcattgagttctccttcagtggggtttgatgcgaggtgctgccaaggtcatttcctcttgctgtgctccgcctctcgttcagataaagcggtcgggataagttcgtaaattgcttgtcaaatcaggacaagattctgaattaggggaacctaccgcataggttgctcatcagacaggccgaaggacaatgtcatcgcctaacaatnctgtcagcgcgggactggcagaaacgaccc

SEQ ID NO: 4726 - DNA, 706 bp, Zea mays
  unsure (1)..(706): unsure at all n locations
  Clone ID: MRT4577_104308C.1
cggggagcgttcgccggaacctccccgatctccaggtcacttcggcagagctagaccggcgccgataagccccgccgcccttttttctgccgatgctactattccggcgaggttaggagcgcggcttggatagctgacaggcttaggggggttacctcaatgtcattgactcagatgaatagtagccagaggacccgtctgtaagatcgcaggggaaaatacgctagggacccaagcacaaagcgtattttctattccattctgaaaatcaaatcctttttactaaacaacagacttagaaaaagcacaacttgactcttattcatccaaatgtggccaaaacacttttactagactctgcataatataatctatcaagcaaaaatagtagatcccatattccctatattactttcttgagttctgaattaaatgacaaaactacttaaaccttaaaaatagggaaagcggtaggaaaacttttagactaaggttgggaaaatttatggagatacttgaccagtagttacaatgcttaaaaatgttaagcaccccggtacccaagattaatagaattttatcccctaggatttatttttaaccagacttgcggaaaatggaaatgggcactagagatagaaaccagagaacacatntatcttttcttaaataaaagagttcacgagaaaaatatatgggaccgtat

SEQ ID NO: 4727 - DNA, 360 bp, Zea mays
  Clone ID: MRT4577_104309C.1
gacagtgttatatatatgtacaaaattcgctttttgtagcggccgcccaggtcggtcgatgtacaagctttttattttttttttgttttttttattttaacattaaacaaaaaacttatttattgaactgtaactttttaaaactgtccaggaggcccctccaaaggtggaattttagcacaatggtggtcgttactataggatccgagcttggatccaaactttgggtaatcatggaaaaaggtgcctcctttaggaaattgtgttgcgttaaaattacaactgtagttgtgtcaagaaggctaaagggttaacaccagctagcttaataaatggtattacttgtttttgttgtaaata

SEQ ID NO: 4728 - DNA, 1814 bp, Zea mays
  Clone ID: MRT4577_10430C.1
ataacttgggagtcagttgcgtaatgattactaccgattaaactcacagcccaactcctcttctcgccctcgtctgacttcgtttcggacctccccagtttttcccctccggccgccgcacggagaagcagaagccatgcaggccgccgccgcgcgcgcccgccgcctcctcgccttaccggcggcctcggggatccccggaatactctccggaccgatcccagggcgcgcatcatacgccgagggcgttctcctttaccgtctcaatggcgctcccgcttcgccgtcttctccgcagcataccaggggcttctcctcctcctgcttcgcctcccgatcacactgtaacctcccatcgcctaccatagcttctcaatggttgaatgagaaatcagtacactatcacatgacgacagcacacttctcaacggaagcaagtgacatggaccaccctacagaagctgtagaggagatgtaccagaaaatgttgaaatctgttgaagctgagaccatgcctccaaatgcctggttgtggtcaatgattgatagctgctccaataaggaggacatcaaacttctttttcaaattttgcagaaactcagagtatttagactatcaaatcttcgcatcagtgcaaacttcaatgagcatctctgcagaaaagtaactgaggcttgtgctcgtgtaggcgccgttgactatgggttgaaggctttatggaaacataatgtttatggaataacaccaacgattggttctgctcattatctactgcaacatgctaaagagcaaaatgacaacaaactaatggaaaacgtaattcatgtcctatcgagaaatttcttaccgctgcaaccaggcacagctgatatagtcttcagtatctgttataatgctgatagatgggatttactctcaaaatacgcggagagatttgttaaggcaggtgtcaaactgcatcgagctgcatttgacatttggatggactttgctgccaaagttggggattctcaatctatttggcacattaatagtctaagaggcaggtctgtcaaacattatacacttgcaacagggtttgcatgtgcaaaggggtctctgcttgatcggaagccagaaaatgccgctgacaagattaagcttctttatgagcatttgcctgatcagaagaaaccatttgtgaaagatgaactcgagaaacttattgctggatggcctacggaggtggtaaagaggcagaagaaagataagaggaaggcgttggaagaagctttgatgaaggacatcgctacgatggtggactgcctgacaaagtccggcctcgacatccctgtggaactggacaagctttccaccccacagctccaagtggcgtagcaaaagaaggcgcgcggctcgccatacaaccggaacagacttggagtctcgaggaacagcatgcattttggtttggcactgatgcaggcagcgcagcgcagcgcaggacgcagattgaaaatctgtgatagatgaaatcatgtttttgtttctgtttctaatgttgtagtgcaggcccgtgcgtggtgcgccctttctgttgtgcgttgaccgttgaaaatctgtgatagatgaaatcatgtttttatttctgtttctaagaagcaaattgccgtcgtatcttggcacgtgttgtaactgtacccatcctttctccaaggactttctaatctgttattacttttaataaaacataaatagacctagtcgcgcaactgtggagtatgaatatagggcggccgctcgcgatctacggacgcgtgggcgaacgcgtggg

SEQ ID NO: 4729 - DNA, 1331 bp, Zea mays
  Clone ID: MRT4577_104310C.1
gggcacatcgccacatcctccattccgccttctcggcttttccccacctggctacctcgacggggcacctcccgtctcctcgcctccttccaatccaccggttgccatccgtccgacgaggacggaaagggaccggcgtgagggaaacctagatgacccgttcctgggtcgggaccagagagccttccgggctgcgccttcgatcgccgccccgccgcctagggttcccgcgcctgtagatcgggtttgggggacgaggaaggggagtgccaagtaagggaacgatggggccgaggcgctccaagcgcgtttcgtgggccaccggggccaatctctgcaaggtattgtgataacgtcctcgccggaatgggttcgtccgccgcggcgccgcccaacggcgaggagaacgattcgcgcctcacgcggctccccaacccatccatcctttgtggcttgcctgcagttgacgtttttttcttctttttttggctgtgttcctcgtgctgttgctatgcccttcatttccccatctctgccgaacgttctgatccttatgttttgattgcgaaatgtgttcggctcgactggaacggacatgcgatcttacattcccaatgcaatgctgtggctgagatgggttcatctggcctccgcaaataagccaggattgccgttgttccttgcatgaatatcagtcgattcagcaacagctctgacaaataatttttaaagagaatgaatgatcatctcatatatgagttagacaacagggatatgcaaatgagaagaatgacaacttggggactagccaaagaaataaatggcgcctcaaataacttataagaaaaaaaaaagatgaagagctacatgaattccattatacaaagaatttatttactctatataacctccatctctttgttttaaatgacatatgtgcttacgtatagccatgcaaagctcaacccttatcttctcagtgaagtttgtttgaaagtgtacctgtatttatgccttctccaggcgaaaaatggagttcaggttataagcatgcatttaagttcaaattagtggacatttaattgaaatgtattgttctaattttatcctctattgtacttgtgttccaatttatcctgtagtttttttaatgccagccagacagtttaaacaaataattgtcggttttgccaagaataattgtagtttgataagattcataagattgacttgagtcatattgacactatttaatcagtaattaacgtttataaagatgaaattatttttcatggtgcagtgttaacatgtgtgataagacatgattttgc

SEQ ID NO: 4730 - DNA, 219 bp, Zea mays
  Clone ID: MRT4577_104311C.1
agaggggggggagtacgcatgaggttcttaaacacaacaacagtatatgaccttagaaaacgctgtccgtcaccatggtatgcacgttggccggttggcaagtctttctacacataagaatatagagcaacggcacacactcacgcacacatacggatcgatcaatacatccaaatgtttagaacgatgaacgaactatgggtcgcgatgtggacatac

SEQ ID NO: 4731 - DNA, 164 bp, Zea mays
  Clone ID: MRT4577_104312C.1
gtttctgcaggctggcgtatcccccgttgtgcttttcgaagagccgactcggaagatcaagggagctatttagaacgccatgtacacgcactcactctatgcatgtagccaattttaacgtcaatccccagaggggtagccgtacttcgctaaaaggtgctgtc

SEQ ID NO: 4732 - DNA, 463 bp, Zea mays
  Clone ID: MRT4577_104313C.1
cgggccggccggggtgtgttttttttttttttttttttttttttttttttttttttttttttttttttttttttttactttttccggggccgggcctgggtcaaagcccctggggaaaggggcttagggccctattccatataataaataccccacacaggggggggggtggggggcccacttgtggtaaacacccctttgaaatttggtgggcagacaacggtttccggccccgggtgttcttacccttctcacattaggctacctgcaggggcccggggcaaacccttttagaggttttggccctccacccgggcccatgggtggaattttgcaggctggggccggaatgccagcatcaaaccttagattcccacgcgcccctttcgggaaagtgggcccccctccggttgttcatgaagacacagcatttatggggtcggggggcctcgcatttctggtt

SEQ ID NO: 4733 - DNA, 284 bp, Zea mays
  Clone ID: MRT4577_104314C.1
ggggcggcactcgaagcatagccagtacggaccagaccagcgaacggatcgccttaatgcaaagagttgctgaaccgacaactaagacacataaggacgcacactaaccaaacctacaagctgactgggcacatgacgtcagtatagagtacgattgaatgggtcgtgagcaaagcaagacgaatgaaagtgacacgtaagcatggtcagaggatgaaaatggtagaattccaagaaaggaagcaagacacgggcgcgcactcaataaaagaaacacaggaggg

SEQ ID NO: 4734 - DNA, 404 bp, Zea mays
  unsure (1)..(404): unsure at all n locations
  Clone ID: MRT4577_104315C.1
gagtnctcnagtcggcggccgccattggattaggggaccaatttttgtggacttcggtgtaccagccgcacagtcaaggatatcgtagggccgtgcttgtagggatagcactcgctgactgtggactaaggcactcccgagggagttagacgaccatgggatgacgtacacagtccgccggactacaggagtgagctcccaggcagggcacgtggaggagctggcggtcgtgctctaaggggatgaggcagatatgacagggcccttgtggaggaacggagccaaggcgctacaactgacttggctacgagtgaaatatgcttcggctgtcgcaaacgaaccacggttcatcaaaaacaaagcccagttcatacatggttctcagcggcatgacgaacatggtt

SEQ ID NO: 4735 - DNA, 331 bp, Zea mays
  Clone ID: MRT4577_104316C.1
gacggccggccggccggcggcggagccgcctcgatgtctcgatccccgacagatgatatgatcggagctggcaaaccaccagggacaggaaaacaaaatacttattagtcgagtcatactatttgttatatgtctgcatttttagtgagctactactttggatccgccgtttcttcgtcaattcatggtgtcccttcttcctgatttctcattcatttcctaatattgttctttgatctacaagattctttattcggtgaaatgaattttctactatatgaaaaaaaaaaaaaaaaaaggggcggcccgtcacctttttacaaagaacccc

SEQ ID NO: 4736 - DNA, 794 bp, Zea mays
  Clone ID: MRT4577_104317C.1
gcgagcggccgctcgcgatcggccgcgtgggcggacgcgtgggcggacgcgtgggcggacgcgtgggctttcataggccggattgtcatggggctttttgggaagactgttcctaagacggcagagaacttccgagctctttgcacaggatcgagaggggttggcaagagtggcaaagccctccactacaagggaagtaagttccacagaatcatccccagcttcatgctccaaggaggtgacttcactctcggggacgggaggggtggtgaatctatctacggtttgaagtttgcggatgagaacttcaagatcaagcacactggtccaggccttctgtccatggccaatgccgggagagatacaaacggatcccagtttttcatcaccacagtgacaacaagttggttggacgggaagcatgtggtgtttggcaaggtgttgtctggaatggatgttgtgtacaaggtcgaagctgaaggccggcagagtggggagccgaagagcaaggttgtgatagcagatagcggcgagctgccgatgtgacggcgtgctgaattgatgttccatcccgaaacatgatgaatagaagtttctggtggccgtctgtcgttctagaactgttaggccctctttggaatcttactgtttttacagttttgaaggaatactatggtttaaaaagtcaaaatctgtttgcttgtataaggtaaaacgcagtttcgaataccatggtctatctaaagcgtagtatttttacagttttgaaaacttcccttggacttaagttttcc

SEQ ID NO: 4737 - DNA, 1242 bp, Zea mays
  Clone ID: MRT4577_104318C.1
gcacgagcgggggctttcctattctccccttatttggtggcctctctcgtgaacgaagcgaagacggcagaaccgcagaagtgcagcagaacgatcggatctagcagaattctctcaacctcatcggcggcggcgaagagcgtgcggatcggagatggagacaagcgggtggaggaggagagcggcggcgcgggcctcctggagccccgccacggtgtacctgtggctcgcgctcgccgcagcagcactgacgctcgcccaggctaagaaggacctaacggaggttacccacaaggtctacttcgatgtcgagattgacggcaagcccgcaggtcggattgtcatggggctttttgggaagactgttcctaagacagcagagaacttccgagctctttgcacaggagagaaaggaattggcaagagtggcaaagctctccactacaagggaagtacattccacagaatcattcccagcttcatgctccaaggaggtgacttcactcttggggatgggaggggtggtgaatctatctatggcatgaagtttgctgatgagaacttcaagatcaagcacactggaccaggccttctgtccatggccaatgctgggagagatacaaacggatctcagtttttcatcaccaccgtgacaacaagctggttggacgggaagcatgttgtgtttggcaaggtgttgtctggaatggatgttgtgtacaaggtggaagctgagggccggcagagcgggcaaccaaagagcaaggttgtcatagcagatagcggcgagctgccgatgtgatgagctgaactgatgttctatctggaaggatgttaagaagttgctggtgaccatttgtcgttctggaacttttattagtgcctgaaattggactgaaccagtttcttctgtttgctacagtgactttcttatttacttattagttgaaaaggttttaaaaggttgagctaatcaaaaaaaacgcgcttctgcatcgttttcagtttcatcttctagaatctagaataggtttttggttgccatgttggagtcttttagtcccaaataagaccttgtttgttattccaattccatgtaaattggatgagatcgctttggaatcttactgtttttacagttttgaaggaatactatggtttaaaaagtcaaaatctgtttgcttgtataaggtaaaacgcagtttcgaataccatggtctatctaaagcgtagtatttttac

SEQ ID NO: 4738 - DNA, 291 bp, Zea mays
  unsure (1)..(291): unsure at all n locations
  Clone ID: MRT4577_104319C.1
cacctatagagcnatagcggctccgcagaacaggcaaaaacataacactatcagagctaatcaatggacatcacagggtatattatgcccatatgcccgacaacacctcatcaggaacaggcctcatcctcggctgcgtggtcggattcatgatcctcttaaaacccgatatccgcagtacttgaagatttttttcagctaacggacatacgtcagaatgctctgagaactgtgccttcttattactccacgggtcatacctgttcacaagggaacgtcctggtcatatct

SEQ ID NO: 4739 - DNA, 278 bp, Zea mays
  Clone ID: MRT4577_10431C.1
cgccagtacctgcgtgccgcgcgctgctttctggtgctcggactgcttctcagctcgcctgaccggagcgccctgctcgccctcctgcgtcgagctccctcgctgtacgcgccgttgaagcttcacgggccgtgcgctcctctgtcccgaccaccagcatccaattcgagtattctcgccattgaagaacagtcgccgctctctgcgttctcgccgcgttcgtgaagctgtcgtgcaattgcggtcatttttctttgcgtcatgtgtgcagcacgtca

SEQ ID NO: 4740 - DNA, 1123 bp, Zea mays
  Clone ID: MRT4577_104320C.1
cctcgagccggcgggtgttattcaagagatgagggcattttgacagtactttttgcagacccagcatttgaaatgtttgcattcttgcgcacaggctgtgtttggagcagaaagtttgttatgagctttcccaaaaaaaaaaaaaaaaaaaaaaaaaaaaaaaaaaaaaaaaaaaaaaaaaaaaaaagaagacggaagactgcagcaaaaccatcagatctagcagaactctctcgacctcatcggcgttggcggagcgcgtgttgaccggagatggcgccgagcgggtggaggaggagcgcggcggcgcgggtcgcctggcgcccggccacggtttgcctgtggctcgcgctcgccgccgccgcactgacgctcgcccagagactgcgcagcgcgggattggtcgtcgatatgactgctaagaaggacctgacggaggttacccacaaggtctacttcgacatcgagatcgacggcaagcccgcaggccggattgtcatggggctttttgggaagactgttcctaagacggcagagaacttccgagctctttgcacaggagagaaaggggttggcaagagtggcaaagccctccactacaagggaagtaagttccacagaatcatccccagcttcatgctccaaggaggtgacttcactctcggggacgggaggggtggtgaatctatctacggcttgaagtttgcggatgagaacttcaagatcaagcacactggtccaggccttctgtccatggccaatgccggaaaaaatacaaacggatctcagtttttcatcacccccgtgacaccaagctggttgaacgggaagcatgttgtgtttggcaaggtgttgtctggaatggatgttgtgtacaaggtgaaagctaagggccggcaaagcgggcaaccaaagagcaaggttttttttttttatagcggccacccccccatgtgataagctgaccccccgtcccatctggaaggatgttaaaaagttgctggtgaccatttgtcgttctggaacttttattagggcctgaaattggactgaaccagttttttctgtttgctaaaaaaaaaaaaaaaaaaaaaaaaaaaaaaaaaaaaaaaaaaaaacacaa

SEQ ID NO: 4741 - DNA, 1981 bp, Zea mays
  Clone ID: MRT4577_104321C.1
gaaggacctgacggcggttacccacaaggtctacttcgacatcgagatcgacggcaagcccgcaggccggattgtcatggggctttttgggaagactgttcctaagacggcaggtattgcgaacttgctattaacaattcagaactatcttctcatgaggcaagagaaaactaatggaccctacttattgttttcctacagagaacttccgagctctttgcacaggagagaaaggggtcggcaagagtggcaaagccctccactacaagggaagtaagttccacagaatcatccccagcttcatgctccaaggaggtgacttcactctcggggacgggaggggtggtgaatctatctacggcttgaagtttgcggatgagaacttcaagatcaagcacactggtccaggccttctgtccatggccaatgccgggagagatacaaacggatcccagtttttcatcaccacagtgacaacaagttggttggacgggaagcatgtggtgtttggcaaggtgttgtctggaatggatgttgtgtacaaggtcgaagctgaaggccggcagagtggagagccgaagagcaaggttgtgatagcagatagcggcgagctgccgatgtgacggcgagctgaactgatgttccatcccgaagcatgatgataagaagttgctggtggccgtctgtcgttctagaactgttaggccctgtttggaatcttagtatttttacggttttgaaggaatgctatggtattggatgatactatggtatagaaagtcaaaatctgtttgtttgtatttgggcaggggagtccggggggctctggttttctcgcgttggcggggggcctctcgagcgcgtccgacgaagccggcagaaccgcagaagtgcagcaaaacgatcggatctagcagaactctctcgacctcatcggcgttggcggagcgcgtgttgaccggagatggcgccgagcgggtggaggaggagcgcggcggcgcgggccgcctggcgcccggccacggtttgcctgtggctcgcgctcgccgccgccgcactgacgctcgcccaggctaagaaggacctaacggaggttacccacaaggtctacttcgacatcgagatcgacggcaagcccgcaggccggattgtcatggggctttttgggaagactgttcctaagacggcagagaacttccgagctctttgcacaggagagaaaggggttggcaagagtggcaaagctctccactacaagggaagtaagttccacagaatcatccccagcttcatgctccaaggaggtgacttcactcttggggacgggaggggtggtgaatctatctacggcttgaagtttgcggatgagaacttcaagatcaagcacactggtccaggccttctgtccatggccaatgccgggagagatacaaacggatcccagtttttcatcaccacagtgacaacaagttggttggacgggaagcatgtggtgtttggcaaggtgttgtctggaatggatgttgtgtacaaggtcgaagctgaaggccggcagagtggggagccgaagagcaaggttgtgatagcagatagcggcgagctgccgatgtgacgagctgaacttatgttccatcccgaaggatgataagaatttgctggtggccgtctgtcgttctagaactgttaggccctgtttggaatcttagggggtgtttgggagtgaagtttttccaaagttttggaagaataatgcagtattctcaaaaactgtagtattatataccaaaagttgtttgacaaactagctaaaatctctgttttcaaaactaaaatattacaaatactgcagctcttttgaagtattctaaacttcggtttatacctcagttttctctgtaaaacacagcgcgcgcatttctaccgcgtgtaaaaaaatattttgcttctaaacacctctatgtatccaatattgtggtattct

SEQ ID NO: 4742 - DNA, 369 bp, Zea mays
  Clone ID: MRT4577_104322C.1
cctttttatctccaattttttaaagactcccctataaaaaaaaagtggttcctcaaaggggccctcccgatattatttatggggatgggtaatcaaaaacgaggggggccccccctgatttttttttttgtttttttttttttttttttttttttttttttttttttttttttttttttttttttttttttttttttttttttttttttttttttttttttttttttttttttttttttttttttttttcttcatatattgaccatcaggcaaccatgttattcactactatcagtctatcctggtctactaattttatccaggtaatgatttgcatacaacaatagcatcatgaaaatacacatcaat

SEQ ID NO: 4743 - DNA, 533 bp, Zea mays
  Clone ID: MRT4577_104323C.1
ggaaacgaacaccgcacattctagttagctatacccatatctggcagattttggcgggccacatgttcatgattaaacaggtttcaacacagacaacattgcgttggtgcagaatgagagtccagaccagggagtactttgtccattgaacaaaaaggaaacatgccgctttcagcctcccatgatttgagtgtctgcagggattggattgtagttggggcattgctatcaatatggtacgtagcaggatataatatccaaaactgctcctgggagttgaattagcaggttacctaactgaagacttcgttagccctcacaataccaaaaaaggatccaagtattcagaacctcaaaactatagccgtgttcagcacaaaattcattcatggcaagagcagaactccaagatggttatctgtggtggcatagctaactgtaatcataattcagaaacagacatttgatcgaacagcttcatcgcataatctacaaatatcaaacaatatggctgattcccctcgtgccgaatt

SEQ ID NO: 4744 - DNA, 659 bp, Zea mays
  Clone ID: MRT4577_104324C.1
ggagctgcttggctttgatggtaatgtcggcccaattatggatagcaccgaaccattagctggttttgtctccggttgtcatttgccgaggtacaaccttcaaggttcactttcagtgtgcaaggcacaagtaccaccattgatactcccttccggtagctgtacatccgaaaatgttgtgatgggatcatcaaaagaagcccccgtgtcactgcagaatttatctatggatgattgtggcagtttgaacaccgcaagttccaagatcagccaggtaaagaaacctgaaggagagaaggttgttaagaaaagagctaggccaggtgaaagtacacggccaagaccaaaggaccggcagcagatacaagagcgtgtaaaggagttacgtgagatagttccaaatagtgcaaagtgtagcattgatgctttgttggatcgaacaatcaaacatatgctctttctacaaagtgtgacaaagtatgcagaaaagattaagcaagccgatgaacctaatatgataagcaaggacaatggttctgtattgaatgataactcacatggagttgtcttgaaagaaatccaagtggtggaggcaatggaggtgcgacatgggcctatgaggttgcagggcagactatggtttgtccaataattgttga

SEQ ID NO: 4745 - DNA, 650 bp, Zea mays
  Clone ID: MRT4577_104325C.1
ggccgcttttttttttttttttttggggtttatgatgtttttgagatcgaattctttgggatgcccgctcagccagtctgtctttacgacggactgaaatgcaatggatacgcttatgcaaacaatgctaccagcaagagacagacagcagccatctccgttccaacttaaacattatcatgaccaagagtcatctttttccgtagctgcgtactgtggaggcccgcgaaggacgatcgagagaatgttcatcatatgcacaatgtcaggcgtagtcgcagcccggacagccatcaaatgaatgcgccgtcattaagagtcgtagattgtctttcgacaaagctgagaaaatgtacttgaagcagcttgatcaagccacttaaagcatggcgacaagagcggcaccagcaagaccgaagaggccggcaccaacgtgggaagcagcaccggtgtactcagctggggcggagtaggtggcagatggtgccttgctgacggtgccgttgccagttggtgcctggatctgaccgtcggcaatctgagagactggggtgccagtaggagcctggatctgtccgtcagagatctgagtaacaggagtgccagttggggcctgaatctgcccgtcggagatctgggtcacttgggga

SEQ ID NO: 4746 - DNA, 289 bp, Zea mays
  Clone ID: MRT4577_104326C.1
cgtcccgcgagcacatgcacattccctcgagcgcgcacccgggcgcgtccgtcgtcgtcgacctcccgccgatgccgagcatcgggtcgctccagtcgctggaaaaaaggccgtcggggtcgtacgcgtccttgacgcgcaggaagtgcggcaagcccgggtatttgcgcgcggcgccgacgaaggcgaggttgcgattcttgccccagggcggcaggccgccgtacttgaagatgcccatctgctcgatctcctccagcacgtcctcaaacaggcgcgcctgcccggg

SEQ ID NO: 4747 - DNA, 360 bp, Zea mays
  Clone ID: MRT4577_104327C.1
ccccgcgtccgccccgcgtccgaaagaaaaaaaaaaaaaaaaaaaaaaaaaaaaaaaaaaaaaaaaagaataaaaatataaaaaaaaaaattaaaaaataataaaaaaaaggggggacgttttgatgggtccaacctaagttcagcgtgctggcggaggtttaacttttttttgggggggggtaggttatttttttggccgtcgttttctaagtgatgacttgcgataacccaggtggctccaatcttattggggtggcaggaattcctcttttagacagttggtctgatttgatggagggtcggaccgagctcttttccggtcacttacccgccctggctggggagggtgccccccctt

SEQ ID NO: 4748 - DNA, 379 bp, Zea mays
  Clone ID: MRT4577_104328C.1
gtcttgagcgggccctgacatatttaacacagattggtgctatctttcctagcacgaggcgtttcatcaattggtggattatgccacccacgacaggcactgtgtggactgctaaaggttcaaagagcaaaaaaaaccccgtgttttcttctcccggcaaaagtatatctccggggatttactctgttgccacctaagtttttacctatggttgggcgaacgatgccgccactgccaagaccgaatgcaggctaatgggatctgtgagcggcaagacggacgaactgaacacgagcgttttggccagtcgcgacatcaaaaccgagcaccagatcgacctttggttcggccgcaccgccgctacgagacctgcgggaac

SEQ ID NO: 4749 - DNA, 964 bp, Zea mays
  Clone ID: MRT4577_104329C.1
attcggcctcagctcaatcccgagacaaaggaacccacctccactcccaccagcaagctcaagcaagcagccaccaccagcagcgatcagcggcagccatggacatgggccggcaccagctccagctccagcacgcggcctcctcgtcctccacctcggcgtcgtcctcgtccgagcaggacaagccgctctgctgctctggtcccaagaagcgccccgcggggcgcaccaagttccgggagacgcggcacccggtgttccgcggcgtgcggcggcggggcgccgcggggcggtgggtgtgcgaggtgcgcgtccccgggcggcgcggcgcgcggctgtggctcggcacctacctcggcgccgaggcggcggcgcgcgcgcacgacgccgcgatgctcgccctgggccgcggcgcggcctgcctcaacttccccgactccgcgtggctgctcgccgtgccgcccccgcccgcgctctcgggcggcctggacggcgcccgccgggccgcgctcgaggccgtcgcggagttccagagacgccgcttcggggcggcagccgccgacgaagcgacctcgggcacgtctcctccctcctcctcctcctcggcgacgaagccggcgccggcgattgagcgcgtgcctgtggaggccagtgagacggtggcgttggacggcgccgtgttcgagcccgactggttcggggacatggacttggacttgtactatgccagcctcgcggaagggctgctcgtggagccgccgccaccgccaccgcccgccgcctgggatcatggtgactgctgcgactccggagctgacgtcgcgctctggagctactagcaagctatagcagcaataagctccaccaactcatctgtactgtagtgtacttgtaccttgtaccttgtaccaaaatccaaattgatttgtagcgaattaacttaccaatcccccttggcaactcc

SEQ ID NO: 4750 - DNA, 550 bp, Zea mays
  Clone ID: MRT4577_10432C.1
tgtacatcgtggagcccgccaacgtggagtacatgctcaagaccaacttcggcaactacggcaagggggcgatgatccacgacgtgatggaggacctcctcggcgacggcatcttcaacgtggacggcgccaggtggcggcaccagcggaaggtggcgagccacgagttctccacgcgggtgctgcgcgactacagcagcggcgtgttccgcgacacggccgcggagctcgctgggatcgttgcggtggcggcgcggggcgccgggcccggggagaggccgctggacgtcgcggacctcctgatgcggtcgacgctggactccatgttcaaggtcgggttcggggtcgacctgggctcgctgtccggctgcggcgacgacgagggcgcggcggcgttcgccagggcgttcgacgacgccagcgagcaggtcctgtaccgcttcttcgacccgtcctggaaggtcaagaggctcctcggtgtctcgtcggagggggccatgaaggggtcgatccgcaccatcgatcaattcgtgttcggcgtcatcgacag

SEQ ID NO: 4751 - DNA, 1002 bp, Zea mays
  Clone ID: MRT4577_104330C.1
tcgcgatctagaactagtctcagctcaatcccgagacaaaggagccctcctccacctccactcccagcagcaagctcaagcaagcagccaccacaccaccagcagtgaacagcggcagccatggacatgggccggctccagctccagctccagcacgcggcctcctcgtcctccacctcggcgtcgtcctcgtcctcgtccgagcagaacaagctggcctggtccccgtcctccccgcagccgcccaagaagcgccccgcggggcgcaccaagttccgggagacgcggcacccggtgttccgcggcgtgcggcggcggggcgccgcgggccggtgggtgtgcgaggtgcgcgtccccgggcggcgcggcgcgcggctgtggctcggcacctacctcggcgccgaggcggcggcgcgcgcgcacgacgccgcgatgctcgccctgggccgcggcgccgcctgcctcaacttccccgactccgcgtggctgctcgccgtgccgcccccgcccgcgctctcgggcggcctggacggcgcccgccgggccgcgctcgaggccgtcgcggagttccagcgacgccgcttcggggcggtagccgccgacgaagcgacctcgggcacgtctcctccctcctcctcctcgtcgccgtcgggcacttatgtctcgcaggcgccggcgccggcgattgagcgcgtgcctgtggaggccagtgagacggcggcgttggacggcgccgtgttcgagcccgactggttcggggacatggacttggacttgtactatgccagcctcgcggaagggctgctcgtggagccgccgccaccgcccgccgcctgggatcatggtgactgctgcgactccggagctgacgtcgcgctctggagctactagcaagctatagcagcaataagcttggcaatgccaccaactcatctgtactgtactgtacttgtaccctgtaccaaaatcaaaattgatttccagcaaattaacttaccaatc

SEQ ID NO: 4752 - DNA, 515 bp, Zea mays
  Clone ID: MRT4577_104331C.1
ggatcaaacaaatcttaactgtcctgcattcgggactgtcctcacatgatcaaccaattaataaataaaatggtactgtcccaaatggaaaagacctgctggctgtaagttctacaacagtctctacttttgtcatagtagtaattacaagttactacaattgtaatggcaacaaaaatgggtggtgaatatgctgtacaggctctgttttcacactccacaaaatatggcgcttgcaccgttttcaccctatccctccgaacattttgtcaacttgatgtacctcgcaaaataaggcagtccaatcgcccacacctggcgggaagggaagaaccaaaattacagttctggactagcgcccgtcacgagtcagtttcggcttccgttgccgtagctgctttcagcttctggcttacaaactgccccttaactcttggcctctgcttcgcaagcttcttcctgctatgatacctgacctttttatcgaagcatctgtctttccttttcatgcggaa

SEQ ID NO: 4753 - DNA, 470 bp, Zea mays
  Clone ID: MRT4577_104332C.1
gcagaggccaagagttaaggggcagttggtaagccagaagctgaaagcagctacagcaacggcagccgaaactgactcgtgacgggcgctagtccagaacaactgtaattttggctcttcccttcccgcgccaggtgtgggcgattggactggtaatactgaaggctggcagaagttttttttcttccttccatggttagcctttctgtacaaaggtgaactctatgtcgggtgtttgttggcatccaagccttattttgcgaggtacatcaagttgacaaaatgttcggagggatagggtgaaaacgctgcaagcgccatattttgtggagtgtgaaaacagagcctgtacagcatattcaccacccatttttgttgccattacaattgtagtaacttgtaattactactatgacaaaagtagacactgttgtagaacttacagccagcaggtcttttccatttgggac

SEQ ID NO: 4754 - DNA, 2164 bp, Zea mays
  Clone ID: MRT4577_104333C.1
ctttcttgtggatcaaatcgcccctgggaaggggtgggacttcactattattggcgaagctcgaactacaagcaagcgactgtgatgtcatcccaagattctattggcacggtgctcaagtgtatgcagaagggtgcggtggacttccttgtgaaaccagtaagaaagaatgagctgggtaacctgtggcaacatgtgtggaggaggtatgcaatgaattgccagacaaatgtccatcagaaaataatgcagtcagcaatcatgtaagtaccaatgttgcagatgggtcaaagataggagaatacattgatgaggaaagcgatgcctaaccaggcgaacgcttcggcgggtgttgctgcccgccctcgccttagttcccgtggtacgtgctccaagtgaaagtgagaagaatgtgcgttccaaatgccttaatggtattacttctgcaaaggtggctgagcaaataatggataatgccttgaggatcacggatgcaagttcacgtcgtccaaccaatcttggcaaagatttggctatgactgaaccagcagctgatagaaaatgccaatctttagtgatggaaaataatgctgtcaaagaaaagaaccctggtgaaaagtcgaagagtgctgtaataggtcatgctgattcttacccctcccaatttctcgagaccaacttgggaaaacaacagtatcgtaatggttacaagaatcaagaattcagggaaaaagatatctttaatcactcgaattcctctgccttctcgagatatggcaataaaaggatagaaccatcaggtgagattcagtttttcccttctccctgcgtcattgggcaagggcatgttcatggcaagaacccagttttccaacccaatggggtgttgctgcctcccaatgaacataatacaggtgagagtacaaggcaagctcgaatttctctggacagtaggacagagggtgctgccatcctgtgttccactagtgccagggaagatgctggtgcaaatagttcttcccatagaaaggacagtatgagccatccctcatatgggtttatacctgttccaattcctgtcggtgccatgatgccctaccattgtggtgcaattctgcagccagtatactacccacagggtccacttatgcactgtaattcatctgcaatcaacaaggcaacaattcatcaaacctctggccaatctaactaccgtgaagattgtggtagtggtagaccatctcaggttgatgaacacaaacagtcagaggaaaagcaccagttgcatcattcaagacaaattcatcgggaatcaggacaaccagttgacatggttagagctcacatggatcatgctaaccagagtgcaagctgcagccgggatatctgtaaaggaagcggatgcacgggtagcggtgaagccgataccaatgcgaacacgacggttgccctagagagtggcaacgagagtggcatccaaaatagtgacaggtctcgccgagaagctgcgttgatgaagttccgcatgaaaaggaaagacagatgcttcgataaaaaggtcaggtatcatagcaggaagaagcttgcggagcagaggccaagagttaaggggcagtttgtaagccagaagctgaaagcagctatggcaacggaagccgaaactgactcgtgacgggcgctagtccagaactgtaattttggttcttcccttcgcgccaggtgtgggcgattggactggtaagtctgaaggctggcaaaagtttttttttcttccttccatggttagcctttctgtacaaaggtgaactccacgtcgggtgtttgttggcatccaagccttattttttgcgaggtacatcaagttgacaaaatgttcggagggatagggtgaaaacggtgcaagcgccatatttcgtccatacgcttaggtgtttgtggagtgtgaaagcagagcctgtacagcatattcaccacccattcttgttgccattacaattgtagtaacttgtaattactactatgacaaaagtagacactgttgtagaacttacagccagcaggtcttttccatatgggacagtagcattttatttattaattggttgatcatatgaggacagtcctgaatgcaggacagttatttgtttgccttaaaaaaaaaaaa

SEQ ID NO: 4755 - DNA, 1222 bp, Zea mays
  Clone ID: MRT4577_104334C.1
cattgggtacctcgaggccggccggggtggactctggcactgtcccccttccaccaaacgcgagaaacttgattccaggcagcaacccctcttccattccattcccgccgaccccgacgccgccctgtctcctcggctcctctctccgatccaatggcctacgccgcacgcctcgtagccaaggtccacctcgccgcgacgccgcaggccgagccgcgccacctctccagcttccgcgtaggagcactcagtcgatccacaaccgttcaacggcaaaagtttgttgctaaatctgctatctcggctgtggaaagtggtgatacatttgttggagtaaagcaaaatactagacctatcatagtcatagacaactatgatagcttcacatataatttatgccagtacatgggagaggttggagctaattttgaggtttatcgcaatgatgagatcactgtggaagaaattaagaagttgtttgttgcttgttctacaggatttctcctagaggaatacttatttccccaggccctggcactcctcaagattcaggaatatccttgcaaacagttacagagcttgggccctcaataccgttgtttggggtttgcatgggtttacagtgcattggagaggcatttggagggaaggttgttcgatccccttacggcgttgtgcacggaaagggctcccttgttcattatgatgagaaacttgatggaactctgttttatgatattcctaacccattccaggctggaaggtatcacagccttgtaatcgagaaggatagtttcccgcatgataccctggaaattgttgcgtggacagatgatgggttgatcatggctgctcgccacaggatatacaaacatattcagggcgtgcagttccatccggagagcatcataactactgaagggaggctcatggtcaacaattttatcaagattattgaaggctacgaagcctcgaattgctctccgtgatttatctagttggaagcagcagcagccctgcgtggggcgggtgacaataagatgatgtaaaagcttgtaactacatagctcgaacatgtaaactcagatgtatatgttcggatgtcacaaactcacgacactcagagtccaactactgtacatggtcgcatgtggcgtgtcgatgtcaaatcaaatcattgaactttttgtggcgtgaccgatatttctcgtgggggaaaaaa

SEQ ID NO: 4756 - DNA, 671 bp, Zea mays
  Clone ID: MRT4577_104335C.1
atcccaatgcgacagtctatgccattgcgaaccaagtttcagaagatgttaccttccttgggttcgacaagaaggactttgaagtcctcaagcccgccattgaagctgcacgagtggtcaaggatgagtttgaggtcgccatgattcgcaaggcgaaccacatctcgggcctcgcccaccaggcctgcgtccaacgcgtcaaaacggcgagcaacgagcaagagatcgaagccacgtttcttgagaagtgtgtgtctaatggcgccaaagagatggcttaccaccccatcatggcttctggccgtgctgccgcgacgctacactacgtcgcaaacaacgcgccgttggcagggaagcagaatatgctgttggatgccggcgcggagtggaacaactacgcatcagatatcacacggacattccctttgactggcaaattcacccctgagtcccgtgctatctacgacatcgtcctcaagatgcagaaggacaccactgctattttgaaggctggggttgtttgggatgatgttcatctcttggacacaagatcgccattgatggtctgctgtcacttggaatcctcaagggtgacaaggacgagattctcaaagcccgtaccagcgctgctttcttccctcacggccttggccactacctgggcatggata

SEQ ID NO: 4757 - DNA, 137 bp, Zea mays
  Clone ID: MRT4577_104336C.1
aattcggcacgagggttctctgcgacacctcttcctgctctgcggttgatcacacacacggtcgcaggcatctcctacgccaatatggctcataaagatgagctgtaggttgtcgcgacactagtcctcgctgcatg

SEQ ID NO: 4758 - DNA, 387 bp, Zea mays
  Clone ID: MRT4577_104337C.1
attccacaaaccaaacaaagcgctagggggggataatggtgggccacattattccaccaggcaaacacctaaaaaattacaggccggacatgtctcacagataagggaagaccacagggtggctggtcaaactgggacattacaaattttttaaaaaattaaagggggggaaaaacaactcttattgaacgggcattgggagggtctggcccccaagtcctgggtcctggtaaaacacctccctaatattggtctccacttcgccctgctggttctcaagggagtctttggatggctggattgaaactatcccactctcactggcattaaccttttgctcccgcccattgaacaaaactggctttgggtccaaaataaacacttttc

SEQ ID NO: 4759 - DNA, 513 bp, Zea mays
  unsure (1)..(513): unsure at all n locations
  Clone ID: MRT4577_104338C.1
ggattcgtccgcccacgcgtccgcccatgcgtccgcccacgcgtgcgaggacgcgtgggttcaaccgctggaccttcgatgatgtccaggtgaacgacatctcgctgaacgactacctcgctgtgaacgcgacnaatcacgcgatcttcttgccgcgtcgttgcgggacgttactccaagaagcggttcaaaaggcgcattgcccgatcgtcgagcgcctcacatactcgctcataatgcacgggcgcaacatcggcaagaaggtcatggctgtccccatgatcaagcataccctggagatcacccacctgctcaccgatgccaaccccatncaggtgggggggcgcgccttcatcaaccgggggcccccgtgaggaagccacccggattggggtgctgtcgggggctgggggtgggggggtggggagaggtgggggcgggagggggggggggtgggggggggggggggggggggggggggggggggggagggggggggtggggggggggggg

SEQ ID NO: 4760 - DNA, 375 bp, Zea mays
  Clone ID: MRT4577_104339C.1
gagaccaacaagcaacatagatagtgttatacagcatcaacaattgagcaacgatgggggccaagatatcttccatcctaatgctccttgctctgtctacatgtgttgctaactcgaccatctttcctgaatactcacaaactactatatctacaattctttcagcatatattgcatcaatgtccacttcaatatgataatacatagccatacaaccatacacgctgcatcaagctttctcaacttgtacattacctatatcatgcctaacgtcataacaatcatcaaccgtatggagcttgccgtcattaacataaacgataacgacgcacaatctggaggaactcgtgctagcagtgatcatccatacagctg

SEQ ID NO: 4761 - DNA, 383 bp, Zea mays
  Clone ID: MRT4577_10433C.1
gaaaatagcaggaaaagaagagcatttataaaaacttgatggctagtttggaaactcaaatccttttcggaattgaaggggatgggagaggaaattagtttatttccaactcaatcccctccaattccgaacgagatttgaggttcccaaagtagcctaaaggtaaagagatgaaggttacgtttgatcctctagccttgctggcaattgaatcatactagtatatccgatgaagaaacaaaagtgtgtggagaagtggaggcacgtctatgaactctacactctgcagttgggctgaagcccctgatccctcattgtttatcaactcattcattatcttatataaaatgcagttcaaattataaaaaaaaaaaaaagggccg

SEQ ID NO: 4762 - DNA, 1348 bp, Zea mays
  Clone ID: MRT4577_104340C.1
gcaatcttatccctggggaagaaatcacgtacatctccatctctcagccatctcatttcttctccgttcctgatgacactagagggattagtccgcacatcagtgcttggatcttgctagcagccgagctacttctccagcatcaatgtttgaaaccgtcatatctgcaatttccggtcgtcgacctcgccctgctgcttatcccgtcgccagctgtacttgtcttcctcaccggtgtgccctctcggctcgctcggcttcaatctccatcgcgcagcggcaacttcccttttctctggtgccgcgcacgctgctggtccttgcgagtccaccttgctccggccagtgacaccggtgccggctcgctaatgcttgcgcgcgtctgtccacgtcgccagcagctcggtctctacgtgtctccctcagcatctcggcatcggaactccatcatgtctgtatgtgtgtggaagaacgagatcgagggatcggagaagaaagcgaagcccatgtggtttgtgcgttcgtttggcttggaattggaactgtggatattggagaagaaattccgagaaattagtggacggtgatggtaatgttcgtgcgatactcatctgatgctcgacaaaaagcccgaatcgggagtggctgcttcgtcttcttcgtcgaatgagaatcgtcgtgctggccacgcgtcaccagctcgataaaataaatcctatgggtatctggttaaggatagaaattgtgtgcatcgctcgccagacgtgtgtggtcatgggcgtcaagcgaaaaccatcttcgtttttccgactatcgtgtcggattggtcagggtacgctagctgagaatcgtgcaaagcaaagttcatagctcaaaacaacccacaagacgatgtcgtcagtcggatcaacccgaagaagggcagactgaacaagtatcggaacaaaaggttgatcgccaagcggacgtcgtctaacaaacactaacatagtgtttattccaggtgaagtgtgttgctgtggaggaaggactctgctacttttgtgcaaaggtggttctcaagcaggaggaagaaccaaaaatagaagtgtgttgctgtggatggtgctaagtgccggtgggctcggccttcttataagtctaagtacctcttctatacttcttattgaggatggtcacttaagctagcagatatttcaaacttacaagtagtttataacatttcaaagtttatttctttgaatcactttgtaatcactccgataaacataatgtaaatttgatgtaacttgtaaccttttgtaataaagaaattccactgcaaaatgttggtgtgtgatttgtgttt

SEQ ID NO: 4763 - DNA, 392 bp, Zea mays
  Clone ID: MRT4577_104341C.1
cgcctgtcttgctgaagctgaactgctgatccgtcttccaagctgtggtgtcatcccctgagttctgatccaagatgtatctccagtattacatcaatgagaagggggacaaggtctacaccaccaagaaggagtcacctcttggggtgccgacgcagtctgctcacccagctcgcttctcaccagatgacaagtactctcgccagcggtacctgttgaagaagagatttggacttctgccaacgcagaagccagcactgaaaataggtatctgaggaaacatatcaaacactgctaggcactactatgacatctcagcgcattcaggcactatatgtaatgctatgtgtttgacaggtctcaagtgctaatcaaggagggtaacagctttg

SEQ ID NO: 4764 - DNA, 803 bp, Zea mays
  Clone ID: MRT4577_104342C.1
ctccagtattacatcaacgagaagggtgacaaggtctacaccaccaagaaggagtcgcctcttggggtggccgcgcagtctgctcacccacgcgtccgcggacgcgtgggatcgcgagttgcggcgacggtagaggaaaaatcagccgtggactctcttccgtaagccctagcccctagccgccagtgtcgtgcattcgtgctgaggctcaactgctgatccgtcttccaagctctggtatcatccctgagcactgatttaagatgtatctccagtactacatcaacgagaagggggacaaggtctacaccaccaagaaggagtcacctcttggggtgccaacgcagtctgctcacccagctcggttctcaccagatgacaagtactctcgccagcgatacctgttgaagaagagatttggacttctgccaacgaaaccgcgacaaataaaaaagaccacagaatccaggaccgaagtactgaagcttcaagtcaactgtccaacctgcgatgttctttttgtgtcaatgcttgttggttggaatgtactatcttcgttctcgaatatttgtggtccacttgttcaattttgaactaaaccgcgacaaataaaaaagagcggagggagtagaatataggtatttctgagaactgaaatcaaacactggtaggcactactatgtcatcctgcatcacattctgtcactacatgtaatgctatgtgtttttggactgttgacatgctttattagttactgcttattcaccaaaaaaaaaaaaaaaaaaaaaaaaaacaaaaacaa

SEQ ID NO: 4765 - DNA, 298 bp, Zea mays
  Clone ID: MRT4577_104343C.1
cgagccgtcatttgcggaagacctcgtcggtatcactggcattcaaggtgccattaaacccacccctgctaatagagatggcagtaccaatggcgacgggaaggccaaggctaatgtagatactgctggatccagttctgtggcggcgaaagtgggtctgccgcgggaggttgagaggttttcttggccgtgggcttgtgtccttgcggctggggcagggttcaatactgaggactttgctggtagagtagccatgtttagttcggttgaggttgtgcctttgttgtcgatgaggtcg

SEQ ID NO: 4766 - DNA, 1336 bp, Zea mays
  Clone ID: MRT4577_104344C.1
cgggccctgcagatgcgtacgtatctgatcatacgagtttgtattttggttggttggttgactgcgctgattcggcttaggagatgcagaaggaagccacgagccaggcccgtgggaaactagattcatttgcgtttctctgtagcctggctgaggtgatgctggctgccgtgagaagatgatgtgtttgttctgttctttgtaggtcgtgcatattaatactagtagcagactggattaaaaaaaaacttcactaccccctctgcaggctctcctgcttttctttggtgcgattctttgttattatttccccttgctgtccgcgaggccggcgcgcctcttccgtaaaccctagccgcctgtcttgctgaagctgaactgctgatccgtcttccaagctgtgagggcttgtgaggtgggattctattggggagtgttgtgccgttgtttggtcttggctggcctcttgccggcgttgcacggccgtctgcagctggcctctgggcagatctggcgttcgcaaccggctctgcttatatcaaaagcaagtgtcatccctgcgttctgatccaagatgtatctccagtattacatcaacgagaagggggacaaggtctacaccaccaagaaggagtcgcctcttggggtgccgacgcagtctgctcacccagctcgcttctcaccagatgacaagtactctcgccagcggtacctgttgaagaagagatttggacttctgccaacgcagaagccagcactgaagtactgaagcttcaactttccaaccatggatgtgcagtttgtgtcactgcttgatgcttgttggttggaatgtagaataggtatctgaggaaacatatcaaacactgctaggcactactatgacatctcagcgcattcaggcactatatgtaatgctatgtgtttgacaggtcttgttcttattatgtacttggtgtgtgggccaaagcatcgtttttggcgttctcttttcgtcttgattgatgacgtcccctttgctaaatcaatttgaagtcaggtctcaagtgctaatcaaggagggtaacagctttggacagctcgaatctccagaggagacttgggaagaggttgctgaaaaagttcacaaagaccaatggcttaaattcaatggcacaatgatttatattatatggaacatttgaaggatcaattactaaattcaacggcacagtgatttatattatatggaacatttgaagtatcaattactaaattcaatggcacaatgatttttattcttggtgcgtggaccaatacgctatcttgctgtcctcttttggtcttgactgttgat

SEQ ID NO: 4767 - DNA, 350 bp, Zea mays
  Clone ID: MRT4577_104345C.1
ttttcttttcaaacaaacagaaacgaatgcattagcatcgtcattgagtggaatatgaattgtcccgaatgtatatagagtacctcgtcggcatcaagaatttattacaacacatgaataattaatttttgtagtagtttagaattctgaatcttctcttaatggttatgtcttggatcaggatgctattgtatctaccctatgtggcctttaaccttgacagactccaaagggtgagagccgggctgctgcatgcttgaggggcatcagctcggcgacaagcgataaacattggcatagctgatagccgcctgaaaagacaatgagagcgcagatccccacaacattct

SEQ ID NO: 4768 - DNA, 393 bp, Zea mays
  Clone ID: MRT4577_104346C.1
cttgttggttgtttttttttttttttttttttctttttaggaaggagaggagaccgcaagaatgacttaaacacaacaacacggttagcccttaaaaaacgctggccggccccccggaagagcgcccccaccacgcccggggccgggcaggttccccaaaaaagaaagggggcgccggaacgagggagccgaaatacgggggggggaaatccgccaaaaaccaacgccgcataacgaagggggggcccatctggacaaccgccgggccagggtttaatttttttaacgaagattgcggccgcagagcccgctagtttaccggggatcattctattttaggtgcgagggcagcggctttcccaccccctcctggggggactccagggagggggg

SEQ ID NO: 4769 - DNA, 143 bp, Zea mays
  Clone ID: MRT4577_104347C.1
gcagagcatggggaacttaacgtccctggaggagctacggttagagagcatagttggtcggtgtatgtgccacccaatccctagtggcagagcttggcaagctaacaaggttgaaggtggtcagcagcaccttttcagaggag

SEQ ID NO: 4770 - DNA, 162 bp, Zea mays
  Clone ID: MRT4577_104348C.1
tcgccgccatttgtcggcaagtgcatctaactcttggggcacactctcatgctgagggacgatcactgacaaggtgatcgcgctctttaaccgaatgcaacatacctgtaccgatataggcaaccactgtagctaataccactggtgcatagaatggaaccc

SEQ ID NO: 4771 - DNA, 157 bp, Zea mays
  Clone ID: MRT4577_104349C.1
ccaacgcgtacgtatactcgaagcttcactttgtggtggacgcgccaaacattatggtcaggagcatcatccgggacagcgctgacatcaagcctatgacatacagccaggacactaaggatatgctcaagatctacaaggatcacgatcaccacgc

SEQ ID NO: 4772 - DNA, 336 bp, Zea mays
  Clone ID: MRT4577_10434C.1
tatctttgttttgcccgccaggataatcaacgtatggcgttaggtcagcttataagatctgcctgggctcaaccgcaaattgctactgttaatttcaatcaaagaaatgttcctgaccaggaccgttgaggataggggcacaagggagctttttcataaggcactaatattggtcgaagaccactgactgactattatagacccggtggtgagaccgcctttttgcgccagggtgtgcatataacgcttacatgtagccgcaatttatgaagattaattggcttatgcacgactcaaacagagctctggacggtctatccataaatgcagaatttg

SEQ ID NO: 4773 - DNA, 411 bp, Zea mays
  Clone ID: MRT4577_104350C.1
tacagaaccacaatctagccgcaagtatgggtatttccatctcgtaactctgcacgcacaaaggagcgagagggcaagtgtctccgaagcccttgccgttcgagaccttgcacggggaatcaataattagagagatgtcttcatctcatatggaatgacaagagaagttggacaaggatctggatcctcggagcgcatgggaggaggttttgctgctgtgttaaagcctgatccttttgatggtaaaaacttcttgatttggaaagctaagatggaattgtggcttactgcaatgtcttgttatcatgtcgctgagggcaagcctgccaacttaccttctgaggatgaggctaagtttgaggcggatgacaaccttttttgaggagctgtgattagtgcacttgatacaaa

SEQ ID NO: 4774 - DNA, 208 bp, Zea mays
  Clone ID: MRT4577_104351C.1
ttaacatggagggaacattgcatcatgattttttatttccagattctgtggatgttttcttccttctttttttttggtcttcttattcttccattaacatgtgcgttgattctttgtatgttgatctggatttggtgtattaattgtgcaagttgtggtgaaatcaccaggataatttatctgtcatgtaaattatttttgatgcatt

SEQ ID NO: 4775 - DNA, 1445 bp, Zea mays
  Clone ID: MRT4577_104352C.1
cattgggacctcgagccggcgggaaggaaagtgccaccgtcgccctcggactgggaactgcggtcggggttctcctcctcgtgttctgtgcttatgtgatcgtgtcaaggatcgtccattcaaggatgcaggagcgcaatccgaaggccgtagcgaacgccgaggactcggagtgttccaactcctgcctggtgctgctattccaaaacaacaaagagttgagcatcgaggacatcctcaagtccaccaacaacttcgaccaggcctacatagtcgggtgcggcggtttcggcctcgtctacaggtcgacgctgccggacgggaggagggtggcgatcaaaagactgtcgggagactactcgcagatcgagcgggagttccaggccgaggtggagacgctgtcgcgggcacagcacgagaacctcgtcttgctgcagggctactgcaaggtcggcaacgacaggctgctcatctactcgtacatggagaacggcagcctggactactggctccacgagagggccgacgacagcggggtgctgctggactggcggaagaggctacggatcgcgcagggctccgcgaggggggctggcgtacctgcacatgtcctgcgacccccacatactgcaccgcgacatcaagtccagcaacatcctcctggacgacaacttcgaggctcacctggccgacttcggcttggccaggctcatctgcgcgtacgagacgcacgtcaccaccgacgtcgtcgggaccctgggctacatccctcccgagtacggccagtcgccagtggcgacctacaagggcgacgtatacagcttcggcatcgtcctgctcgagctgctcaccggccggaggcccgtcgacatgtgccggcccaaggggaccagggacgtcgtgtcgtgggtgcttcggatgaaggaggagggcagggaggctgaggtcttccatccgagcatacaccacgaggacaaccaaggccagctggtgaggatcctcgacattgcgtgcctttgtgtcaccgctgctcctaaatcgagaccgacgtcgcagcagctagtcgcgtggctggacgacatcgcggagggatgaggcttcattctttgctgcagtcctagtttcttcccagtgccttcagtttgatagtttcttaagaatgattattagctgtgtacataatatttacagagtgatatgccgagagttctcttcttgtctttctctttatctgtctagtgatgctgatgacatcaacatcttcatttacttggtaaggtggttgcaagatcaccggagagtgtaaaagtgctttgtaggcttaccctcagtacaataatctagccttgacatgagcagctttcctacagatctgtggcatgccttgtaacttgagttactcgtaccagagacattttgcaaaaaaaatgaataaaaaataaaga

SEQ ID NO: 4776 - DNA, 687 bp, Zea mays
  Clone ID: MRT4577_104353C.1
aattcggcacgagggctccggcaccatgggcggcacgtccaagctgctctcctccctcctcctcacttcctccccgctacgcctccgacccactactgccgccgccgctgcgctcttcctcaccccgcccgcggcggcctcgcgccgcctgctcctgctctcctcgccttccccgccccgcaccctctccacctcgtcctcttcccttccgcacggctccagccaggcctccccggcgccatcgccccgagctccattccccgagtggtcccgcctcgtcgaccggcttgccgccgccggatacggctccggcgctccctttgccgctgacgatctcgcgatcgcccttgcctccggatgcggcctgtcggacggggcgctggccgctgtttccacctgcctcgcattcgcgcgggaccggcctgacctcctcagttctcttccaaggaaggatgtgaagatcctggtggccaatgcggcgccgtccctgttcaaagacggggaggcatcagcgctgcggcttcggcgctaccttgctggggaagaaaccgatgtcattgtttcggacagagctgaaactgtcgatattgttcgatatctgctaagttacacatacggttcttctgtcagcgactcagaacacaagaaacttattgattctgccgtgagaaaatcatggctgagtta

SEQ ID NO: 4777 - DNA, 410 bp, Zea mays
  Clone ID: MRT4577_104354C.1
aaaaacaaaatcaggcccaaactagggagctttgacttttttttgggaacaaaaaattaaccaaacaggggaaaatttgcgtaaaaaaagggaaaggggcttaaaagggggaacgggggggggaaggataaaaaaaacccctctcccggggggggggaaaagggggggggcccccaaaaccgggggacccccctctcctgggcgggaaggggccccccaggggcagaaggcgccccgaagtcccggggggggggggggcaccctgggggaaaggcgcccgccaagggaaaccggcacccccccacggccatgggcgaaaccctggtccggaaaacaattctagaagggacgccacagcccaacgcgtttagggagggccccgaccgggtttgccaaacgaggacccggcc

SEQ ID NO: 4778 - DNA, 432 bp, Zea mays
  Clone ID: MRT4577_104355C.1
cccaagcgggcgcccaaggggccggccaagggggcggccaagggtgagggggaagagggggggggaggggggggggccccggggaatacggcccggggccggaagacaaaacaactttaccaaaaaggagacctacggaaagagggggaacatcaggggaaaaaacgggagccgggggaaaagggggcccgacgcacaaagggcagaaatttacgagcccggcaggcaaaagggcaaagccagggggggctaaaacgggagcgaaccgaaactaacgggggcacgcgcaccggcggagttaaaagcgggaaaaccggagggagaggcggaataaaggagccgcccacgcgccggagggaggggcggccaggagagaagaccacgggggagtgtttttttcacagcgagacggggaaagaccggtctgggcta

SEQ ID NO: 4779 - DNA, 305 bp, Zea mays
  Clone ID: MRT4577_104356C.1
cggggaaaaaacttaaacttttcccctgggggttcacaaaccttggcccctaaggagggataaaaaaaagggagcggtttactttaaccagggtcggggactctgggctaaaatgggaaaatttattccacccacaaaaacctaaaacaagtgtgggaaaaaccatgggggaccaaaacctagaattttaaaaaaaaactcgaggggaatcctggggactccttcaatcacgcccaactccggggaccctggctcgtccttaagcaaaaggggaccgggtctgtcctccaacaaagggaacgggt

SEQ ID NO: 4780 - DNA, 428 bp, Zea mays
  Clone ID: MRT4577_104357C.1
ccggccgggtcggcggacggcgtcagcatggccaacgccgacaacatccccgccagagcggtggctacgatacagagcacataatctctcacttgacgcacagtacacaagcatgcaacggatcgatgtatccctagcgaaggtggccggttggtcgtatgcctccgaaccggaccattgacgagatgcaggcggccctggaacagagattgcttatgtacggcgggggggacgcgtcacactgtcacataagaaaaactgagatcaggcacccactatcgatgccgcagtgcctcgtccctccatggaaagcgcggggtcgccctccgtgccttactgcacagggtggcgctcgttcaatagccgagcgtcacctacgggggcccgggagggcaccggcagctgcctaaagagcatgacgggccgct

SEQ ID NO: 4781 - DNA, 416 bp, Zea mays
  Clone ID: MRT4577_104358C.1
ggagatcaaatcatatcttacagatccgcgggggggagagatagcctcaaccctccgaatctcagtcactttacccacaagatcgatgaaggaaaagcttacttcacgcctcatctagcaaatcgctgcgtcgctcctatccccagaagtccatgtgcggacgagtaagccttagccttgcacagctacaccattgtctacaacactatgacccgcaaaggtggcgcaacctcgctggccactgcagtgactgatctcggcttatttgtgggcaacgaccccatgtagaggctagccttccagagagttacaagctatcaccggaaccggtcgaactgtggctgatcttgtcggccaggccagacttgtcgactgctgctacagacacctcgccctcgatgatggtagtgacaccc

SEQ ID NO: 4782 - DNA, 346 bp, Zea mays
  Clone ID: MRT4577_104359C.1
gggggcccaaaactcggaaaaagatcaatacagtgggcagggaaaacaacgggatgcagtttattcccaacaaaatccttggggggggggccccttcttagtttggcgcgcgtcacacggatcgtttccttcatcggggttttcttgagcgcagggtcaatcttttccgccccctttggagaatcaccactgaccttattgattggcatgttgtctactttttgggtctcaaaaagggggggggcactaggctcggattttggggaatctgcccttggggctggagtttgaactgggtacaccgcaggtttgacctcacctttctttgggctacccccaggttttg

SEQ ID NO: 4783 - DNA, 1980 bp, Zea mays
  Clone ID: MRT4577_10435C.1
atggcctcgctggttcatcctgagcgtttccagtacgagggggcactcaacctggtgcgcaacctgctcggatggagcgcgccggcgttcttcgggacaatccgcgctggagccactcccctcggcgatctcgccgcgggggagttcgtgctcttcgtctcctacctctcctgcgggttggcgctgccgatctcgccattcttcctgctgctgctggaggagctcggccttcagcttcagtacctcacgccccactccatcctccaggcagccatcttcgcccacctgtgcgagatgttcgtgggggtggcgccctgtacctccctctttcgccacttcttcgtgttggtgaagtctgggaaggccaaggatcatctcggtgcctactacttccagatgaggctggattcagccggcgcctacatctcctcccttggtggcatgagatgggaaaactggcgcgccgactgggtgatcgtcagcaccgaggccaccgactgcctcacgctgccgagcgacaggcaaagacttgaccggaagcaatggagggccaagctgtcccttgcaccggagttcctacacgtgttggacaggatcaagaccttggcagccggtggcctgacctcgatgcacgtggtcggcgatttcctgaagcgccggatcacgccgctgcagaggagggcgcgcctgtgctgctggttcaccggctcgaacgacatcggccggatccagcacgggccgggcaccgacctgtcctgggaggagctgaaactcttggtgaagggaattactagtgagtccttcatccctgagtccctaatcctcccccaaggcatccctacgctttgcgatgacccagggttgcggacggcgatcctagcctcactcccgactcttgacgagagcggcgtggcggttcgccagaccgacgaccgagacccccatcatgggatccggatcttcgacgcgctggctggaggcccccagcccgctagtgcgggctccagagccccctccctgtggcccccaaccccttggacaagggcaaaggggctgcaagtagctcctccgccccgggtggcaccagggggtcgaaggaagagaggcgacaccggctgtgtcgcgctgacgggtcgcttgtcatggaccctccccttgttgcgaacccgccccaaaagcgtcataggacagctggcgaggccaaggggaccggctcctaggctcagggcgcgcagaggcatgggtgatctcccccaggggcaccagcagcaacaaccacagcagcagcagcaacaacaacagcagcggacgtcccgcttccagggtcgctggaaggtccagggccccaaagcagcggactcagcagaccgcgaccgtggagaggatccaaaatgcgagtgggaagtggaggacaaggccagcaacattgccctggctgaggagaacctcaaggcgaaggatgcctccctggataagcgggcaatggatctcgcctggcgggagaaggacctcgccttcagggaggaaatgtttgaaaggtgggataagttgctggccgagcatgagctcgaggcgaagcagagggagaaggatctggaagagcggatccagaagttccaggcggcacaggctgcaccgggctcccaggcggcggaggtgatgaagaaagcgcttgaggatctccaggcggagcatcgcgccggggtccagcgtatcgctacatgggccggcgagacgagcacgacgctggtgccgctagggatacttggcgcccgcctggaggccaaaggcggcaggctctgccgggcggtgatcgagtacatcctgacatgcttccggagccacgacccgaccatctccttggagccggtgatcgctggtccggtggtcgacaccaaagacgccgctcgggagggcgtacaaaatatcatggcagtggtggccgagcgcttccagcgggatcctactgatgatgagtag

SEQ ID NO: 4784 - DNA, 306 bp, Zea mays
  Clone ID: MRT4577_104360C.1
acgcccacgcgtgcgaccagagagtcggtgagagggccccgccaccggcaataacccacccaggcccagtcagactcagagcctgcaggctgcagcgtgtcggcgtcccgtgctgctctgccgccctccggcgcctgtggcggtgacgcgcacatacgctggagtagctagctaggcaagcgagcggtggtggtggtcgagcacgtagcacaaccagccatgacgcgccgcgggacgctcccgctggcgctgctgctgctgctggcggcgacaaccaccgtgtccgggcagggccgacccgtgacg

SEQ ID NO: 4785 - DNA, 168 bp, Zea mays
  Clone ID: MRT4577_104361C.1
ggaccaggcaaagccgagccgcaaccgcgaagatcttgcgtttcctcctttacccagctctgtcactgtgccgctcgtcccctccactcccggtccgaccaaccaataatccatcgacccatccagcactgggacgggggtggggcgatgtgtggggggggggggttt

SEQ ID NO: 4786 - DNA, 441 bp, Zea mays
  Clone ID: MRT4577_104362C.1
aggacaaacatcaaaaggggggggactttattggttaacaccggtatatgagtataacgggtagggaaacacaatttttcaattgcaaacaccactaagggcattggtggtgcatggattattttgggaggaagagggggacaagccccacattgaggggagggattgggctgctggcaaaaatgccaccgcactttgaggagcttggggaaaaccacaaaacccacaaggggggggggggggccccccccggaatatggattgaaccatgttgaaaaatgcttggggaaaggattggggctcaatctgccaaaaaaaagaaaacattggtggtgcaaaacccggcagctacttgggggtatcaaacgggattggaaaaaaggcattaccaaaggggtgcactggtgccttaggaaatcatgacaattttttaaatttgag

SEQ ID NO: 4787 - DNA, 932 bp, Zea mays
  Clone ID: MRT4577_104363C.1
ctcgagccggccgggagccacccctctctctccctctctctctccttccttccttcccggcccacccaccgtcgcgccgggccaccaccacccactctaccctcccctcccctccccaccaccactatcacccaccgtcccggcgcggagaccgcttccctccctccgcctccgcaaccctctcccgcctcgcccgcgcctccctccatttgtccgcggctcccctccctcccgatcttaaccacccgccacccggcttcctctcccccttcttcctccctcaaaccagacgctcgcccccctttcctccaccgcctatcttcttcagacgaccagcaggaggtacgagcaagaccacctaggaggcctctctctccccccagccacccccgtagcgagagggagggcggaagaggatgagcgcgtccaggttcataaagtgcgtcacggtcggggacggcgccgtcggcaagacctgcatgctcatctcctacacctccaacaccttccccaccgactatgttccgacagtgtttgataacttcagtgccaacgttgtggttgatggtaatactgtcaacctcggcctctgggacactgcaggtcaagaggattacaacagactgagaccactgagctatcgtggagctgatgtttttcttctggctttctcactgatcagtaaagccagctatgagaattggatacctgaactgaagcattatgcacctggtgtgccaataattctcgtagggacaaagcttgatcttcgagatgacaagcagttctttgtggaccatcctggtgctgttcctatcactactgctcagaacgtgaagggtgtcttcgatgcggcgataaaggttgtgctgcagccgcctaaggcgaagaagaagaaaaaggcgcagaggggggcgtgctccattttgtga

SEQ ID NO: 4788 - DNA, 658 bp, Zea mays
  unsure (1)..(658): unsure at all n locations
  Clone ID: MRT4577_104364C.1
cccagcgttctcggncgcgtgggcggccgcctgggcgggcgcggggggggncgcgtgggttatgcacctggtgtgccaataattctcgtagggacaaagcttgatcttcgagatgacaagcagttctttgtggaccatcctggtgctgttcctatcactactgctcagggagaggagctaagaaagcaaataggggcgccatactacatcgagtgcagctcaaagacccaactaaacgtgaagggtgtcttcgatgcggcgataaaggttgtgctgcagccgcctaaggcgaagaagaagaaaaaggcgcagaggggggcgtgctccattttgtgatctaataatgatcagtagacaaaagaaacaagggcgaaggtgccatggttctattatcgccgcgtcttgcttcagcgaaacagcaatggatgatcccaccccctcccccccctagattttactggcggctgcagcgagtcgaggcattcgagagggatatgtttgtttcatttccctccttcccgccttgtgattatctggtgtgtgtgactgacgaggtcgtggcaatttaggtaactcgcttagaaggtatttcccccgtgtttgagcccccaccccccccaaaaaaaaaaaaaaaaaaaaaaaaaaaaaaccccccccc

SEQ ID NO: 4789 - DNA, 1874 bp, Zea mays
  Clone ID: MRT4577_104365C.1
gtctgccttctgcgcctccatttcggcctctgtcccttgcaagttcaatctcacctccaaccatgggtaaagagaagtcccacatcaacattgtggttattggccttgtcgactctggcaagtcgaccaccacaggacaccttatctacaagcttggaggcattgacaagcgtgtgatcgagaggttcgagaaggaggctactgaaatgaacaagcggtccttcaagtacgcgtgggtgctcgacaagctcaaggctgagcgtgagagaggtatcaccattgatatcgctctgtggaagtttgagaccaccaagcactactgcacggtcattgatgttcctggacaccgtgactacgtcaagaacatgatcactgctacctcccaagctgattgcgctgtactgatcattgtccccccactccacgcgtccgctctctctctcctcccctccccaccccacccaccgccgcgccgggccaccacccactccacccctctctctctctctctctctctctctctctctctctctctctctctccacctccaccaccagcccccaccatcccggctcggagaccgcttccctccctccgcccccgcaaccctctcccgccgcgcacgcgccaccctccattcctccgctccccgcttcctcccgatcttaaccacccgccgcgccccctcccgccacccggcttcctctccccctcttcttcctccctcaaaccagacgctcgccccccatttccccatctctcttcttcttcttcttcttccccatccagaggaggaaggaagaagaataagcaggaggcctctcccccccagcccagccaccccgtagcgacgacggagggcggaagaggatgagcgcgtccaggttcataaagtgcgtcacggtcggggacggcgccgtcggcaagacctgcatgctcatttcctacacctccaacaccttccccaccgactatgttccgacggtgtttgacaacttcagtgctaacgttgtggttgatggtaacactgtcaacctcggcctctgggacactgcaggtcaagaggattacaacagactgagaccactgagctatcgtggagctgatgtttttcttctggctttctcactgatcagtaaagccagctatgagaatgtttcgaagaagtggatacctgaactgaagcattatgcacctggtgtgccaataattctcgtagggacaaagcttgatcttcgagatgacaagcagttctttgtggaccatcctggtgctgttcctatcactactgctcagggagaggagctaagaaagcaaataggcgcgccatactacatcgagtgcagctcaaagacccaactaaacgtgaagggtgtcttcgatgcggcgataaaggttgtgctgcagccgcctaaggcgaagaagaagaaaaaggcgcagaggggggcgtgctccattttgtgatctaataatgatcagtagatgaagaaacaagggcgaaggtgccatggctttatcatcgtcgcgtcttgcttcagtggaacagcatgaatggtccccaccccctctaggtttactggcggctcggctgcagcgagttctcatctctttgtcgaggcattgagcgatatgtttgtttcattttcctccttcctgccttgtgattatctggtgtgtgtgtgtgtgtgactgacgaagtcgcggcgattaggtaactcgcttagaaggtatttcccgtgtttgagcaaaagaaagtatccctgttatctctgttccataagttagacatgatgtaatcgtactaagtttatttttacttatttcacttgaatggaaaagtatgcttcccatttaaaaaaaaaaaaaaaaaaaaa

SEQ ID NO: 4790 - DNA, 749 bp, Zea mays
  unsure (1)..(749): unsure at all n locations
  Clone ID: MRT4577_104366C.1
ccggccggggttttcttgctctcgtggtttcggacttctggtctggaggtcccccagcagcccaggctccacctctccacggcagcaccaacgctccattctgtcagccacagcccacgccgctgaacggccggagatcgccccccactccctctcgccggacggttgcagatcagcggggcggggccggggccgggaggagggcggacgacccggggctcctcaagagggccttcgacagggtgttccgcttcgtccgcctcgccgagttcgagatcttcttcgtcctcttcttcctcatcgccttcttcctcttcaaggacctcatggcacggcctcaatacaatcagctgtttgtcaagaagcctgatctagatgattcctggccttagtacccaaataacctggtatttttctttgagctgtgttgccagtacattctttgaaggcctgcgtggccggctggtcacccccctttgttgtcaggagcatgttttatgattacctagagtattctcttcagtgacgatgaatatatttagccagtcattttcttcagttaaagaggaagattttcatgtcaatactggtatgcggcggcgatactgtggttggtgccagctgttattgtttgcactgtttatgtgttgtgaagccccatgagttcgaggtgagatgaccatatgattaagtgcagttctttttaatggcaaaannaaaaaaaagaaaaaaaaaaaaaaaaagcggcc

SEQ ID NO: 4791 - DNA, 1730 bp, Zea mays
  unsure (1)..(1730): unsure at all n locations
  Clone ID: MRT4577_104367C.1
gaaaattccactccacagtgggcagcgctctgctctcctccactcacgaactcactcactcactccccttgcccccatccatccgatagccactagctccagcaggctacgccggcgacactccactagatgctctgctctctccgatccactcacaaactcctgctcgagcccccccgcctctggctcccggtcgacccacgcgcctctctctctctctctccttccttccctccccacccaccaccgcgccgggccaccaccacccactctaccctcccctccccaccaccactagcacccaccgtcccggcgcggagaccgcttccctccctccgcctccgcaaccctctcccgcctcgcccgcgcctccctccatttgtccgcggctcccctccctcccgatcttaaccacccgccacccggcttcctctcccccttcttcctccctcaaaccagacgctcgcccccctttcctccacctatcttcttcagacgaccagcaggaggtacgagcaagaccacctaggaggcctctctctctctctccccagccacccccgtagcgagagggagggcggaagaggatgagcgcgtccaggttcataaagtgcgtcacggtcggggacggcgccgtcggcaagacctgcatgctcatctcctacacctccaacaccttccccaccgactatgttccgacagtgtttgataacttcagtgccaacgttgtggttgatggtaatactgtcaacctcggcctctgggacactgcaggtcaagaggattacaacagactgagaccactgagctatcgtggagctgatgtttttcttctggctttctcactgatcagtaaggccagctatgagaatgtttcgaagaagtggatacctgaactgaagcattatgcacctggtgtgccaattattctcgtagggacaaagcttgatcttcgagacgacaagcagttctttgtggaccatcctggtgctgtccctatcactactgctcagggagaggagctaagaaagcaaataggcgctccatactacatcgaatgcagctcgaagacccaactaaacgtgaagggcgtcttcgatgcggcgataaaggttgtgctgcagccgcctaaggcgaagaagaagaaaaaggtgcagaggggggcgtgctccattttgtgatctaatcatcggtagatgaagaaacaagggcgaaggtgccatggctttatcatcgtcgcgtcttgcttcagtggaacggcatggatggtccccacccccctaggtttactggcggctcggctgcagcgagttctcatctctttgtcgaggcattaagcgatatgtttgtttcattttcctccttcctgccttgtgattatctggtgtgtgtgtgtgtgtgactgacgaagtcgcggcgattaggtaactcgcttagaaggtatttcccgtgtttgagcaaaagaaagtatccctgttatctctgttccataagttagacatgatgtaatcgtactaagtttatttttacttatttcacttgaatggaaaagtatgcttcccatttaaaaaaaaaaaaaaaacggccaataccatgattggatcgagattctacgcgcctccgcaagggattgacagttntttgtggaccatnctggggctgttcctatnaatactggtgaaggagaggagntaagaaagganatggggggggaatactaaatggggggg

SEQ ID NO: 4792 - DNA, 634 bp, Zea mays
  Clone ID: MRT4577_104368C.1
ttgggtacctcgaggccggccgggggtctgtaggtcccccagcagcccaggctccacctctccacggcagcaccaacgctccattctgtcagccacagcccacgccgctgaacggccggagatcgccccccactccctctcgccggacggttgcagatcaggtctaccagatccgtctcagattaggtggcaggagaggaggaattcgggtctgaatctgatcgatatgcggcagcagcggggcggggccggggccgggaggagggcggacgacccggggctcctcaagagggccttcgacagggtgttccgcttcgtccgcctcgccgagttcgagatcttcttcgtcctcttcttcctcatcgccttcttcctcttcaaggacctcatggcacggcctcaatacaatcagctgtttgtcaagaagcctgatctagatgattcctggccttagtacccaaataacctggtatttttctttgagctgtgttgccagtacattctttgaaggcctgcgtggccggctggtcacccccctttgttgtcaggagcatgttttatgattacctagagtattctcttcagtgacgatgaatatatttagccagtcaaaaaaaaaaaaaaaaaagcggcc

SEQ ID NO: 4793 - DNA, 323 bp, Zea mays
  Clone ID: MRT4577_104369C.1
aaaaaggaccctttaaaactgggtttattgggattaactggtttttacaggggacaaacaggcccaaaattggaccccccaggcccagttacataaaaaatcccaaaccttattgggaaaaacacaacctttggagcaacattcaattttttaaggtcatcagggcaaaaacaaaccccccccttttttttaccccacaaacaagctttttttctttctaacacaaaacctgggtttccccagcctttaagggagttccttgaggaaatcggggttttaaaccaaaaccattttccaaccttttggatcaaaaaaagaggggt

SEQ ID NO: 4794 - DNA, 286 bp, Zea mays
  Clone ID: MRT4577_10436C.1
ccggggcttccgctgatttttattgttatttccagccaatttaacgtggggcattccatgatagtatcgcaaagccctgagcaagacttacatgtccagcaccaaggcggctatccaggttaactaaaacactcacttggttacactgcccatcacactgaacaattcatcatctctcatgtacgcatgcttctcaacaacaataactccaacaagcagtcccacgacaacataatctacctgaactaccatatcttcatcattaacgtgttctatcagttactcc

SEQ ID NO: 4795 - DNA, 590 bp, Zea mays
  Clone ID: MRT4577_104370C.1
ctggtgatttccaccagatcggcaaatgaggaggagagagcaggaccggctagctcggaatggaggctgactaccagaagagaaagaagatggctgagttcgaactgcggaggcaggagaggatgaaagcagctgaggagcggacagccaagaagcgcctgaaacggcaaaagaagaagcagcgtaagaaagagaagagagctaaaacgggtaataacggtggtgatgaacctaacagagtggagtcttctgatgacgatcacggttcggatgacgatgatgagtccaagcaatgacacgtcagttgcatctgaagatgatttcggacactggttgtctgggcattgaactaacgtctgtatggccgttgtaacaggttacaggccgaatctggtgctctatctgtaagaggacgtgatattttgagcagagaatgatagcactagataatttcatgttagtgttcatcattaaggtcttattcgtttacacaaattcagctctacattagcatggattgatgtgaggtatgaatttatctaatctaaacctagattaaatctatgatgtgattccataccttgtaccgg

SEQ ID NO: 4796 - DNA, 343 bp, Zea mays
  Clone ID: MRT4577_104371C.1
cggctcgggccgtgaagaacttgacggactgcatggatgggatccgcaagctgatcaggaggatcaatctcaagaacctgaatgtcaaggatctctctggcgtctaaggcacccacgcaatcggctgaccgcactgcccgtagatcgtcaagcggttgaccaactacacggaccaccgccacagcgtccacaccctgtacggcgcgtacgcggcgcagctgaggcggcagcgccggagccacacggacaacacgacggagctggagatgaggcccacgagctccaccacgttctactcgggctactacggcctgctcacggagctgatggcgctctaccactc

SEQ ID NO: 4797 - DNA, 278 bp, Zea mays
  unsure (1)..(278): unsure at all n locations
  Clone ID: MRT4577_104372C.1
cccgggtcgcccagcgtccgccccgcgtccgccccgcgtccgctgcggggnaacaagtctgggcgaggagcagcaggaagaggaaagggaggtgccaggatcttggtcgcacagccgccttcgtcttgctcatcatctcttgcacttacacggttacacctactctcttgccttgcctcgggtgtgcttttgtggattagttagtaacttgagacgctgatggcctttgaaaaattgaaaacagagtgataaaataatatactggacactaattttac

SEQ ID NO: 4798 - DNA, 687 bp, Zea mays
  Clone ID: MRT4577_104373C.1
ccggccaccggccggacgccgccgcgcgctgtcccacctgcggcgtgcccctgcaccgtcctgtgtcctcgccgcggtgctcagctcacgccatgtcgtgctttgctcatcaagccgtgcatcgccatgctgctcccagactcccagtcctcccaccgcgcgcccgtctgctcgccgcaccgtctggcctacctgcgccgcccagcctcccttcctagctactcgccgcgtcactccgcatctctacgctgccccacgacgctcgttgcaccttgctgctcctgcttcaagcgccttgtcgctctttgtgccacgcctgcaccgtcctccgtcgtcgccgtgctgctcctgtgtcgtgcccgcgctgtccagcatcgctcctgtgtcgtgcccgcgtcatacatcgtcatgtcgtgctgctccccgtgctgtcccgtggtgccgtccatcactgcaccgcctcgtgccacgctactccccgctcctcctcgcgcctcgtccattgcctcctcacaccacgttgtgcgccattggtggtgtagcacatatagtgagtcagagtcaatattatttctattttttgttacatcctatgttaatattggcttgttagcttcgatagttgcacatattctcaatttatgttctttattgaatgtgaagccatgaatacatttgtccctcccc

SEQ ID NO: 4799 - DNA, 358 bp, Zea mays
  unsure (1)..(358): unsure at all n locations
  Clone ID: MRT4577_104374C.1
aacactcccagacccatttccctttcctgacaggcgcactccgccttctgagagactcccacaacccccancncctcctctccggcgagctacacctctacaccggcatcggccagaagcgaggaggctaactaaccctgtacgctgcgccagacgtgatcccggatccgcagccgattctaatgcgatggcgcaccagtcactcatctacgcgttcctagcacgtagcaccctggtgctagccgattacacctagttaaccggcaactctaccaccatcgcctaccacaacctgcagaatctccccgccaccaacaacaaattcacctacaactgctacggacacaccttcaactac

SEQ ID NO: 4800 - DNA, 664 bp, Zea mays
  Clone ID: MRT4577_104375C.1
gcttaaaggctcctttcttgtcttttctatctttttttcctttccttccatttcccgggtatgctacagttttccaatgaaaaaaccatcacatgccccagaaaaaattcggatggaaaaatcagcttacattatcctcgaaatcacccaccttttctacggattcacacgatataacaaagaaaacgaaaaaaaaaactaggtcacattcaattaaccaaagcaaataggtaggattagtaacgggctatttaaccatggaaatgcctatctgattgactcaagttacttccaagttccaactatccatctgaattctagtgccaatgtagagactgttccttctccatgtaaaagaatgcaatgccccttctctttctcttcccccagttagctgcccatgattcgcctgatggctgcccgctgtgacggcgataacctcatcgggaaggtcacatcaaacttgattaccagctttcccttcttcccaggttccttcctgatcggccacccttcacgcgtgggcacaacttcgtatccagggcgcaccacttcctccaccctcacaggcagattccgaccatcaagggttgtgaggtttatctttgccccagcgagggcatctaccaaagggatcacctgctttacaagaagggtgttccct

SEQ ID NO: 4801 - DNA, 475 bp, Zea mays
  Clone ID: MRT4577_104376C.1
gggcgaacaacggcgggccccaagccattttatttcaaaggcgacaaacttctgggctttggggggaaaaaatctgagcggctccttcgtaaggcattctttctcgaaattttatggtctagggggttacaaaaggggatccatgcggggggacttttggggcgcagctaaggggggtttcagctgggggggaccaacccaatgctgaagcccaacgaaatgcaactaaactcctcgggggcggcccccaccatttttatgtaaatcgggtaccaccccgggggagggaaccctggcaacctttgtttgggggacaacacaaaatccccggtcgccggacaggaaatctttccccaaatgtcgcgcgtctcccagtgcacctaaaaaaaaaaaacttgacgtcgatcaccaacttccccttttggatgggtttatcagtagaagcggaaatcttaaaaagggaggcttgccgggc

SEQ ID NO: 4802 - DNA, 307 bp, Zea mays
  Clone ID: MRT4577_104377C.1
agctggagaaggtcttcgcggacgaggctttcgcctagttcttcgacaaccctaccttcgcgcgcgttgagaatgccgagctcatcgactagatccccaggtcgcccgagctacaccctcacatgcccaattcaataaacaacttcttatattccactcccacgaagatctctccgtttctcttgccaaatacacttccgagctgtctgaaaagttctcgggctaaaggggtgcctttaacgtcgtgctctttggccgatccctcatttatgcactcaataatcttactgatctctcctacctttat

SEQ ID NO: 4803 - DNA, 196 bp, Zea mays
  unsure (1)..(196): unsure at all n locations
  Clone ID: MRT4577_104378C.1
ggaggcgcccgcccacaaggaccaaagaccaaagggcggcccgccgtggccacccagacaccataagcacccccgcactagtctcaggcagtaacaggacccgcggnccagaggaaggccggaggaacgaggcggcggacaacaacccttttttttaggggggggggccgaacccgagcgaagactccgtgaaaaa

SEQ ID NO: 4804 - DNA, 549 bp, Zea mays
  unsure (1)..(549): unsure at all n locations
  Clone ID: MRT4577_104379C.1
ggaccagcaccgcncccaccagacggggcaaccccgnccatgccagccgcancgcccaagcccgcggcagcncgggggnacancnnggcgaaganggggnngcagangccctcgagctcctacatcttgtcttcgaacgcgtccacctcagcgagctggttgctgcccagccagctggtggcgctatcgacggcgtcctcgatctttttcttgacacctgccgagagcctggaggcgaacttgccatccttgatggtgttccccatgctataggcatagttctcgagcgtgttcttagcgcccaccttcttcttgacctcctcggcccgggccttggacttcacagccgcctgcaccaacttggcaatcgcctcctgggcaagccggccctagtcggaagggancgagatctagntcccctggccgggggtcttgtccccagcagagacgttgaggaggcacatggggccgatggcgaaggtgacgggganctggggcacgcccgggggagaaggagggaagcccgagagcccgaaaaagccgaggagg

SEQ ID NO: 4805 - DNA, 1178 bp, Zea mays
  Clone ID: MRT4577_10437C.1
ctcctttgtggcaaccattattgtacaaaatcttgccatgtgttagaagtcccattgaatcatcctgaaggagatcgtacaacatctatcagtaaagtgaacgcacttgctatgccttgtgaacaatgcaatcttccttgtcaaagggttagggagcctccttgttcacatccttgccctttgccatgtcatctgaacgattgtccttcttgtaaagtccttgttaaaagaccatgccattgtggtgctatggtgcatgcttttgaatgtgtgttttataacatcttaaatgcaaaggatcagattaaaataagatcttgtggtggcccatgtcatagaaagctaccaaattgcccccatctgtgttcagaagtatgtcaccctggtgtatgcccatcggttgatcagtgcatgaaaaaggtcaacacccgttgtgcatgcagcactctgaaacaagagtggcgatgtcaagatgtcctcaaggaataccgtaagtctggccgggatccaaaagaagtacctaaaagtcagtttggagttggcttacttgcctgcggtgaagattgcaagaagaagctgaaggctccagattcagagttgcatctccggaaaagtcaggagaacaagatccctgctgtggaagtcgtaaatgcacccaaacgcaggaagcggcgtgaccgtggacaagaagttaaaatttcgaaattccaggaagtgaagacttttgtgctgagagcgctactgattattttgctgtcaataatcgttgctgctggtctgtacctgttgtggaaaggtattttctggctttctgactggatgaatgaaatggaagagcagagggcgagtcaaaggtatccgaggggtgcaatgttgtaaaaaaaaagagataaaacaattactttgagcctaataatcggtattgacatgtggattaattaatggttgttagggattcagttttgcaggatcataaacatgtcaccgttttctcactttttgtcactataaactagaaattgtatgcgtaatgtattgttgtattttcattttgctactctgcattgttaagtgaacaaacgatacaattactacatgattcatcgcttatatctgttgcgggcaacggggtaaaaaaaaaaaaaaaaaaaaaaaagaaaaaaaaaaaagggcgaccg

SEQ ID NO: 4806 - DNA, 244 bp, Zea mays
  Clone ID: MRT4577_104380C.1
agtggctacataactacagttgatacattggatgatcggaatgttgctaatctgttagttactacttaacctttgaaatcatacaattatcttgcatttcagtctgtctaggtttcttttaacgtatccataattctctgcagtcaaatgcatcttctggcatgggagttgctcctaacattagggagacattcgtcgagcttcacatgaagaaggcattccgatatgttatcttcaaaatcga

SEQ ID NO: 4807 - DNA, 115 bp, Zea mays
  Clone ID: MRT4577_104381C.1
tccagtgatatcaaagatggatgtacgcgtatggaaatacgcgatgaaccgaggtctggggattatttgcatgcacgactaatcatcactggcaccaccgaaacatctatctggg

SEQ ID NO: 4808 - DNA, 370 bp, Zea mays
  Clone ID: MRT4577_104382C.1
gcacagtactaccagctgatcctccttgtctatgaaggttacaagaacatcgtggaaagctgacaatataacgcgaccgctctgaatcaaggtctggacaagacggacaagttcaacatcgagtccaaagacaacggcgtgccgctgctgggcttgtctctgaaggacagaagccggcacagcgagttcgagatcttagacttgctgcgccgattcggatggatcgtgccaggctacacgaagccccccgacgcgcatcacgtgaccgtgctccgactattcatccgcgaggacttcagccgcacactcacggagcgcctggtgctagacatcgagaaggtgctgcacgagctagacgcgctgcacgccc

SEQ ID NO: 4809 - DNA, 589 bp, Zea mays
  Clone ID: MRT4577_104383C.1
tgcagaagggataataatttagcgacatttgaattggtgatcgttgccaataacttgcatggggactaccagcttgccaatggttatggccctgacaaggcgaagatggtcttagaagagcacagaagaagtttcattacagcaaaggactttgatttcctgtctcgccacggaattaatactgtgagaattcctgtcggatggtggataacacaagatccttatccaccttctccatttgttggagggtctttggcagccctggacctagcattttcatgggcacaatcttatggtttgaaatgtataatcgatcttcatgctgctcctggttctcaaaatggaatggaacatagtgcgagcagggatggttctgtggcctggccctctcctgaatatatctcacaaacattggaagtcattgacttcctggcgacaaggtatggaggccatccttcccttttgggtattgagcttctgaacgaaccttctgcagctacagttactttagatgttcttgtgtcctactatatgaggggataccaaattgtgcgaaaccattcgtcaactgcatatgttattctctgtc

SEQ ID NO: 4810 - DNA, 561 bp, Zea mays
  Clone ID: MRT4577_104384C.1
gggggggttgacccccaaattattttggccctttcaagcaatacttaaagggctggggttcttataggagccccccctttttgaaacatagaggcgccgggacaaaatataggatcgcccaaaaacatttccttaagggggggttaattaaaaaaaacctcggggccaaaacctagcagacttcaaaaaaaagcatacttaaaacccccggggggggttccccagggggcttttggcggacaggcatttaaaatttggccagttttttttaaaaagggaaacaaggaaggggccccccatcgggaggttcggggggatcgggttctcccccatcgccaagttgccggcggggacccccaggcaaaggacctttttgggcgggaacttggggggggccttaatcccgttcaccttggacccgggggattccgggggggaaaccagggggggaaacctgcctgccttggggggacccggcccaaggggacggggaatctgcttggagagggcctctggggccaaaaaagcagggtactttttgggaggccctttaaaaagctt

SEQ ID NO: 4811 - DNA, 251 bp, Zea mays
  unsure (1)..(251): unsure at all n locations
  Clone ID: MRT4577_104385C.1
taaatcttatatattggaaaagacgtnataggaatattttgcgttttttttccccggaaaagaactgcgcgaaaacaacatcagcagtcaactgatccatcacaggttttgaggcacctagtcagtcccgcgattaataagccttgtaaaattaaaaatttagactagacaagtcgagcatgagacgcccgccttttctatttacaggtctctttgtaaccggtgcaccccgcccccctgctaacgaacac

SEQ ID NO: 4812 - DNA, 398 bp, Zea mays
  Clone ID: MRT4577_104386C.1
gggcaggaaccagtcggataaaatatattcgggggcctgccataacctgcctgggggtaggcttggccccactttgggtttttatatataattatggcaaaaacagtattagccggacacacaaacgagcccctaattagttctcgggtttgacccccctgcttgggtggaccccccctttttaatttaaccggaccacggccccggggccggggccggggccggggcattggattccctatcaaccaactttatttccccgtaaaccacccggcccttggacccggggcttcttccctccctggaaccccccacccttcccaggacctggatttttttcttgtgggccgaagccgtggtggccaagtggcaaaaaaacaagccccctatggcccccc

SEQ ID NO: 4813 - DNA, 297 bp, Zea mays
  unsure (1)..(297): unsure at all n locations
  Clone ID: MRT4577_104387C.1
tggaggatacttgctgatgttctctacgatcttggtactgcattggaaagtagttcgccgctgtgntcacaactttttcctgaagtagcangcttgggaaatgttgcgaaggcgaatggcgttgttgcagcaagagcaacgaggcttccaatttactcttctttcgccanagcaagcaatcatgagtgcattattgctaaagggggaagcatatcaacacttttcatgtcatgggattggagctggatggatggcactactgttgtcaacactcaggcagtaatgcagccgtacttc

SEQ ID NO: 4814 - DNA, 703 bp, Zea mays
  unsure (1)..(703): unsure at all n locations
  Clone ID: MRT4577_104388C.1
gccgcnccagtgtgatggaataactctgcagaaaattcgcccccttaagcgnntggtccgcccggcccgaggggtctttttattatttattttatttatttatctttttttttttttttttttttttttttttttttttttttttttaaaaaagaactttcttaattttgggaagccacaaacaaccaacaaaaaaaaatattaatgaaccaaaaccaaaaaaaaaaaaaaaaaaaggcaccccccaccacgggggggggggagaacccccccgggggggaaaaaaaaaggagggagaaaggaagaaaaaaaaaaaagaaaaaaagggggccccccagaggcgcggggggcgggcaaaacggccacaaccggggggggatgaaaaaaggaacagggcccaccccccccaaaaagcagaaggggaggaaggggcgcccccgaaaaaaaaaaaaaaaaacccccccggccggccccccgaaagggcgaacccccccccaccggcgggcggaacaaagggaacccaccccgccaccaaacaaggggaaaacacggccagacctggctcctgggggaaaaaaatacccccccacaaccccccacaaaaaacaaaccggaaacaaaaaaaaaaaagccaggggggcccaaagaaggagccaacccacaaaaattgcgtgccccccaccgcccccccccccggcgggaa

SEQ ID NO: 4815 - DNA, 747 bp, Zea mays
  Clone ID: MRT4577_104389C.1
gggaccctcgaggccggccgggataaggtagtcgagagacgagccgtttaaataggtgtcttgcggaagtgcagtgatgtatgcagctgaggcatcctaacgaacgaagatatgcccaagcgagagagagagagatagatagagagagattccttagttgattcttctgtggatgaagatgaaatctacttctgaaatcttgccaccgtccaactctgtttgatctaatctctatatcctccggccaccaagttcgtgtcaaataagcgagcacagctaggtaagcagctgattcgaattccaacaaaacatctcatcccttttagtctcttgtgctagatctcatgcgtctgcaaccttgggagctagctagccatggagttggcaagtgaagcgctaagcgcccttctttccaagctctccatgctgctttatggtaagtacaacctggagaagggcgtcaggggggacatccagcgcgtcatgaacaagctcgagcgggttcatgttgccctcggccatgatagcgaagcgcctgtgccactggagcagatctttcgtcctcgtctggtcaagatgtgggcacgcgacgtcatggagctatcctacgacatggaggacttggtcgacaccttcctggtgcgtgtccaaggccctgaacgcaccagcaaaagaagcgccaaaagattcatgaaatagatatatatggtcgtgaatcgccatgagatcgcccagaacatcaagtac

SEQ ID NO: 4816 - DNA, 132 bp, Zea mays
  Clone ID: MRT4577_10438C.1
tacgcggggggcggcgtttctgttccttcgggggaagctccaggtgctcacttccgaaagagggaaaagagggtcacacgaggctggatccctatcacttggactggtgctgctaatcccactgcgctacca

SEQ ID NO: 4817 - DNA, 334 bp, Zea mays
  Clone ID: MRT4577_104390C.1
gtgtttttttggatgatttgccataacaaaaagaaaaaggtggtaataaggatgaacttaggacaaattcggaaaggagggaacagcatacatagatacagaggagatgctgggggcagcctgggtctgtatgtgactaggatgaacggaggtctaaaatctgatagagggcgagaaagcaatgagaatcacaggtgggtaacagcaaaggggacgaaggaacatgaaccctctggagaagggaaaacattaaggacgcgaacaggaggaacaggtggagaggatcctatggtttagtctctggagctaaaattgaagttgatgaacatcccaa

SEQ ID NO: 4818 - DNA, 469 bp, Zea mays
  Clone ID: MRT4577_104391C.1
caagggccccccttaaaaatccgttaaaaaaaacccccgaaaatccaaattattaaggaaatctctgggcccaaaaaaaaagggataaaatttaaaaaaaaaaatttcccccccccccttattaaaggcccgatttgaccttaaaaaaaaaaccccgagaacccacaaaaaaaattccaaccccaaaaaaaaaatggggagccaaaaaaaaggccgggccggaaaaaaaaaaaaaaaaacaagggggaaaaaaacaaaggaacaccacccccccacggaaaaagggggggcggccttttgggcgcccctcttttcgggggccccggaaaaaaaaaaacccgggaaacccacgggggaaaagggggccaccccccccttaacccggggcccgggcttgtttttggggcccctttgggcctggggcttttcgggacagggccaccccccggcggaaaaggccccaaccccc

SEQ ID NO: 4819 - DNA, 329 bp, Zea mays
  Clone ID: MRT4577_104392C.1
ggggctgacaccccatgttgcggagctggaaataagactggtggggggggatgatatcacccgatagccactaccaaggagatgcaagtactacgctccattcttgataagtatggcgctggttcccaagtcgtgaactaagacgtggctaatgaaaacgaacggaggtagtgatacggctactggaaggatcagattctcgtgggggatgtgagttactatctgaaacacttgggcgagagttatagcaaggataccggcaggatgtaaaatgtgaatgtaaacacgatttgcggagtgctgaatttaagcttgctcagggttaggat

SEQ ID NO: 4820 - DNA, 347 bp, Zea mays
  Clone ID: MRT4577_104393C.1
ccctttcgtccggccggatctgagacgagacgacccccgctgccctcaagcggaacttggtttaccctatctaatgccactgacttcacccacccgcgcgctgcaggatatcgtaggactcggatccgcccgaccaccccttacggccgtcacgccgcagcacaagatcagagaagatggccggactcgacaccttcctcttcaccttggagtacgtggacgagggacaccctgacaagctctgcgaccaggtatcagatgctgctctggacgctagccttgctgaggaccctgacagcaaggttgcttgcgggacctgcaccaagaccaacatggtcatggtcttt

SEQ ID NO: 4821 - DNA, 279 bp, Zea mays
  Clone ID: MRT4577_104394C.1
acgagttctagtttggctccggcatcacgcctttctttattcgtcgctacccgtcttccaggctcctcccgcggcgcgcctgagtttcgccctagcagcgcaccccgcacgtacttcctcctcatcttcggacccggcggcatgcgctccttcagttgcgctgccataggtacgcggcggcgtggaaatgctgtgttgcaccacgcgccatgcgcagctcctccttcaaccagggcggcgcatggtaaaggatgtggccacagtcgaggccgcagtcgc

SEQ ID NO: 4822 - DNA, 214 bp, Zea mays
  Clone ID: MRT4577_104395C.1
tactcatcgatagactctcactgatatggaatcacatccaactgcattagggctaactactcaaccacagtataaaatggtctctctctacaattatcatacaatgctttcaccaccttttattgaatcatcttataatattgtaatcattacatacgattattcttatatcactacaacttaattcttatcccctatgacgacttattctacc

SEQ ID NO: 4823 - DNA, 1404 bp, Zea mays
  Clone ID: MRT4577_104396C.1
cacgactgcacgaggacgaaaaaaaaatctccggaaaacaggtcacggttgccattcttttcctgtaaccgaaccctgaagggtagcgtcatcatccagaccaccattaccagagtgctctgctctcgctggaggccgtggttcattcacgttcatggaggccgccgccattcccaccagtgccccggaaaccaggattgccgttgtcaccggcggcaacaaagggatcgggctagaggtgtgccggcagctggccggcgccggcgccaccgtcgtcgtcttaacagccagggacgagacgaggggtgcagccgctgcacaagagctcagagaatctgggctctccgatgtcatcttccatcagctggacatcaccgacgctgcgagcgtcagtcggctggctgagttcctcaaggctcgttttggaaagctagatatcctggtaaataatgccgcagttggtgctgttgagtacgtccaagatcctgctgacagttcaacgagcgaggaagagctgagtggcatggatatggtccaaaggcttcagtgcatgcttaagagagtccgggagacctacgacgctgcgacagaaggcatcaagacaaactactatggcataaagcatgtgatcgaagccttgctgcctctgcttcaagcttcctccgatgggaggatcgttaacgtctcctctgacttcggactgctaaggctgatcaacaacgaggagctaaggcaggagctaaacgacgtggagaagctcaccgaggagaggctggacgaggtgctggccgcgtacctgagagacttcgacgccggcgaggtgggggcgcgcgggtggccggtggacttctcggcctacaaggtggccaaggtggccatgaacgcgtacacgaggatcctagcgaggagccacccggggctgcgcgtcaactgcgcgcaccccggctacgtgagcaccgacatgaccgtccacaccgggcctctcacgcccgagcaaggcgcggccaacgtcgtgaaggtggcgctgctgccggagggcggcccgaccggcgcgtacttcgcgttgggagaggaggcgtcctttatgtgacgaaagcaccgtcgtcgttaagttcgtcgttgttcgccaactccctgttagtcgatttctaaatcgacgtacaatgaaatacatcatcgctgcaaactcacaaatgaaaacaagggaaccttgtagcaaaaaaaaaaagaagtggacagaataatgaataagcatgtcaaatatctcttgagtatctatttgttcaagtatgaatgactttggaaaaaaaaaaaaaaatgcggccggaaccaaattaagcacggctttgtgcaaaacgatttctaaatcgacgtacaatgaaaaacatcatcgctgcaaactga

SEQ ID NO: 4824 - DNA, 205 bp, Zea mays
  Clone ID: MRT4577_104397C.1
ctcttatgaactggtgagcggcatgggcgcttacgtggcgtagatggctagcatcgggctgtcggtgccaccctggttactggagttaacgggggcgttgcagctgtagcagccattcgacctaacgatgcaaagaatgttgatgctgtcggtggcccagtgcatgaaccagggagacgtctgtcgctgaaaaggccgactggtg

SEQ ID NO: 4825 - DNA, 1298 bp, Zea mays
  Clone ID: MRT4577_104398C.1
gcgtcatcatccagaccaccattaccagagtgctctgctctcgctggaggccgtggttcattcacgttcatggaggccgccgccattcccaccagtgccccggaaaccaggtccgtacgtgccataccctcatgctttgcttcgttcttgcagtcgtccgtgcagtctttacgagaacacaagtgtgcgtgcagtccttcaactgacctggctggaactggaacctaccaggttttccttacaggaagtcgtagtttctacctactgcttgacaggattgccgttgtcaccggcggcaacaaagggatcgggctagaggtgtgccggcagctggccggcgccggcgccaccgtcgtcgtcttaacagccagggacgagacgaggggtgcagccgctgcacaagagctcagagaatctgggctctccgatgtcatcttccatcagctggacatcaccgacgctgcgagcgtcagtcggctggctgagttcctcaaggctcgttttggaaagctagatatcctggtaaataatgccgcagttggtgctgttgagtacgtccaagatcctgctgacagttcaacgagcgaggaagagctgagtggcatggatatggtccaaaggcttcagtgcatgcttaagagagtccgggagacctacgacgctgcgacagaaggcatcaagacaaactactatggcataaagcatgtgatcgaagccttgctgcctctgcttcaagcttcctccgatgggaggatcgttaacgtctcctctgacttcggactgctaaggctgatcaacaacgaggaagctaaggcaggagctaaacgacgtggagaagctcaccgaggagaggctggacgaggtgctggccgcgtacctgagagacttcgacgccggcgaggtgggggcgcgcgggtggccggtggacttctcggcctacaaggtggccaaggtggccatgaacgcgtacacgaggatcctagcgaggagccacccggggctgcgcgtcaactgcgcgcaccccggctacgtgagcaccgacatgaccgtccacaccgggcctctcacgcccgagcaaggcgcggccaacgtcgtgaaggtggcgctgctgccggagggcggcccgaccggcgcgtacttcgcgttgggagaggaggcgtcctttatgtgacgaaagcaccgtcgtcgttaagttcgtcgttgttcgccaactccctgttagtcgatttctaaatcgacgtacaatgaaatacatcatcgctgcaaactcacaaatgaaaacaagggaaccttgtagc

SEQ ID NO: 4826 - DNA, 1456 bp, Zea mays
  unsure (1)..(1456): unsure at all n locations
  Clone ID: MRT4577_104399C.1
gggtagnncgtcatcatccanacccaccattaccagagtgctctgctctcgctggaggccgtggttcattcacgttcatggaggccgccgccattcccaccagtgccccggaaaccaggtccgtacgtgccataccctcatgctttgcttcgttcttgcagtcgtccgtgcagtctttacgagaacacaagtgtgcgtgcagtccttcaactgacctggctggaactggaacctaccaggttttccttacaggaagtcgtagtttctacctactggtactgtacgtaaaaaatgtaacacagatcgatacaactcctggtgattgaccctggccttagcttgacaggattgccgttgtcaccggcggcaacaaagggatcgggctagaggtgtgccggcagctggccggcgccggcgccaccgtcgtcgtcttaacagccagggacgagacgaggggtgcagccgctgcacaagagctcagagaatctgggctctccgatgtcatcttccatcagctggacatcaccgacgctgcgagcgtcagtcggctggctgagttcctcaaggctcgttttggaaagctagatatcctggtaaataatgccgcagttggtgctgttgagtacgtccaagatcctgctgacagttcaacgagcgaggaagagctgagtggcatggatatggtccaaaggcttcagtgcatgcttaagagagtccgggagacctacgacgctgcgacagaaggcatcaagacaaactactatggcataaagcatgtgatcgaagccttgctgcctctgcttcaagcttcctccgatgggaggatcgttaacgtctcctctgacttcggactgctaagggtaacaactaaccagtatatatatataaactctatctttcagcaacaacgacagacattttaattcagttcagaaaagctatgtaattaatttggtggtgtggtgtagctgatcaacaacgaggaagctaaggcaggagctaaacgacgtggagaagctcaccgaggagaggctggacgaggtgctggccgcgtacctgagagacttcgacgccggcgaggtgggggcgcgcgggtggccggtggacttctcggcctacaaggtggccaaggtggccatgaacgcgtacacgaggatcctagcgaggagccacccggggctgcgcgtcaactgcgcgcaccccggctacgtgagcaccgacatgaccgtccacaccgggcctctcacgcccgagcaaggcgcggccaacgtcgtgaaggtggcgctgctgccggagggcggcccgaccggcgcgtacttcgcgttgggagaggaggcgtcctttatgtgacgaaagcaccgtcgtcgttaagttcgtcgttgttcgccaactccctgttagtcgatttctaaatcgacgtacaatgaaatacatcatcgctgcaaactcacaaatg

SEQ ID NO: 4827 - DNA, 2783 bp, Zea mays
  Clone ID: MRT4577_10439C.1
cgccccgcgcgtcatgctcgcccagcaccccgcgccccccctcccggccgccgcggcccggtggccctccccgtccccgcgcggcccccgggggcggaccgccgccgcccgccgcccggcgccgggctcctcgcctccgcgtcctgggcgtccgggccctcctccaagctcccgcgcctcctcctcgcgatcgcatccgccgcccccgtcctcggcctgcgcggcccggccccccgagccgccgcgctgcgctgcctcggcgctccgcccgctcgcgctcgggcgcccccgccaagctcccgtacccggacgtcgcctggtccaaggtcccgcctctcgcgatcgctgcgggtagccccttcgcgtcattccgggcggagcggtggatcgtggtcgctgtctcgtccccacctaccgcggcgctggccgcgctcgcccgcgtcaggggctggcagctcctcgccgtcggcgattcccacacgcccgcagtgtgggagcttaagggcgccgtcttcctctgttcagagctgcaggcacagctcagacgacgctccgttctattcataccgcacgagtacccggtcttttcgccggcgggctacctcttcgccatccagcacggggcctgagtgatcttagatgccgacgacccccacttcgtgctggagttcgatctggggaagcatttcgacgtggatttgggatctggagtcaccaaccacccagtgctgctccagtacagccacgcggatcccaatcgcacagtggtgaacccctacgtgcacttcggccagcggtcggtctggccaagggggctgccgctcgataaggttggggaggtcgcccatgaggtgttctacaccgaggtcttcagtggccggcaattcattcagcaggggctgtcggacgggttgccagatgtagatgcggtgctctacttcactagaaaaccaccaacttcggcgttcgatctgaggtttgattcggaagccccgaaggtggcactacctcagggcatgatggcaccagtgaactcgttcaatacattgttccagacacctgctttctgggggctcatgatgccagtgtctgtgagctcaatggcagcagatgtgatccgtgggtactgggcgcaacggatcttgtgggagattggtggatatgtggctttctatccacctactatttacaggaaggactatattcaggcatacccatttgcagaagagaaggatcttcatgtgaatgttggtcggttgatcaagttcctgaatgagtggaggtcaaacaagaggacactctttgagaagattcttgatttgagttatgccatggctgaggaagggttctggacagagcaggatgtgagattaacagctgcttggctgcaggacctgctcgctgtgggctatcggcagcctcggctcatgtcattggagattgataggcagcgtgcaaccatcggagaaggtgacatgaaggagtttgtgcccaagaagctgccatctgtgcatccaggaattcggcagaagggcacagttaactatgagattggaaatcttattaagtggagaaagaactttggaaatgttgtgatgatcatgcacgttagtgggcctgtggatcgcacagcacttgagtggaggctgctttatggaaggattttcaagacggttatcattcttgctgagcagagcaatgcagagcttgctgttgaacgctgcatgctgtcacacgcttataagtatttgcccaaggtttttgaaagatacagtggtgctgatggatttgtgttcctccaagaccacatggttcttaactactggaacctgatgcaagctgacaaggaaaaactttggattacaaataagattgcacattcttgggttactgttccattggagacgaataaagaggaatggtttgtaaagcaaggtgatatggtcaagcaggtcattggcagttccccagttcatttccaaacaaactacaaggagagcatgggcgaagataaaattatattctgtggtagtgaactattctacgtgccccggcggtttgttgaggactttggtgaccttgtgggtcttgtcggcaatttggatttgcatcacaagattgcggtcccaatgttcttcttggcaatggactcgactcaaaattttgactctgatgctctggctggaacagtgttcaggccacagttgccagctaatgcgacgttctcgtctatttatacagctcaagcacctgctgttttccctgtgaaagttatgaatgagattgatttcataaaggtgattcggctaatgtccataggagacccacttctgatggagttggtttaaaggtgtaatgtgtagttgaagtgcaagcttatccttgtggccatgaggacagagtagaaaaggcatagttttgtgttttctggtgtttttgtaatttcatttattttgttcattctgtagctgtttattcctctgctgttgtatattggtgtaccattagtgacaaggttacttgggatctgctcggtccagctgtcctgctgaaagaaaggacggcctgtcagatacgagtcacggagaagagcttcgccctggccagctacatttttgcaagattttttggttgccaatagtaaagatccacacttgggcaatttgttgtaccattcaaactgatacaaactctcagaggaatattttgttttgtgctcgttgcagaaagcattgatataatgaaaatttgtaagtttgagccaaaaaaaaaaaaaaaaaaaa

SEQ ID NO: 4828 - DNA, 109 bp, Zea mays
  Clone ID: MRT4577_1043C.1
tcggtggctggcttgaacagctccagctcgatgagatggtagtctagaacaaacacagacatagatcaaacaagaaaggtgccatgttctcccctgtgatcaaagaaaa

SEQ ID NO: 4829 - DNA, 434 bp, Zea mays
  Clone ID: MRT4577_104400C.1
cttccggggtgtctaaggatctcctgacctccttccttcttgtccttttcctcccttccccggttacggaggtcctgttggttgctacggagaattactacaacaacaacggcaaggagaaaacaagtaaaccaaaatcttcttaacctaagaagcctaaccgccaattgaaaactttggccggttgttagaaaaaagtgcaaaattgccaaaactagtacgccgacaacaacaagcagaagtttgccggtttccaaggagggcggcaacggcaaaacaaccctttccgggttcggctttggcggcgtgaaaaccaaggtgctgaaccctttccaaaccaatttttggcaggtgcaaacctttttggaccaaaaccgcttcctgttcagggggatcaaccccaaccacgagtccaaggggcccgggaacttttc

SEQ ID NO: 4830 - DNA, 409 bp, Zea mays
  unsure (1)..(409): unsure at all n locations
  Clone ID: MRT4577_104401C.1
cgtccgcccagacccccggggggggggcgggnggctaaacctcccccgggggggcgggttcgggatctagaggggcnccggggatcggttttttttttgtttctgatcgaccaggccgccccagaagnngtgtaccttttttttttttgnggacaaattttttggggggggggggggtnttntttataactcccccatttccttcttttaggggggggagggcaaccacccccgggagggggagacacanaggcccccccgctttggcttcgttattttctccttgtggaggcgatgccgaacgccaccnagggcatgaacggnaaggagcgggactgccgtatcatcaccgtcaacgaggcccactcccgcggcggtcgaggaggcggcggcggcngctgttactttt

SEQ ID NO: 4831 - DNA, 365 bp, Zea mays
  Clone ID: MRT4577_104402C.1
gagggattaaactggcgcaagtccaaccacgtattctctttttacatggccatggacaggggatgagaacatacatcgttacgtccttaacatgttcatgtaccctactgtacgccatgacataaaacaaattgagaagaccatacattatctaactggtatccctatagatcctgataatgctaactccccatactcagagttcctgtacatatgatgttcaatcacattttactattaggacactatgcgcatacccatcggtcgtcacaaactgcaaggtgatcttcagccgcatcataaccgttatccaatagcagccccatagcagccgcataagacactatagaccattcagttgcata

SEQ ID NO: 4832 - DNA, 1107 bp, Zea mays
  Clone ID: MRT4577_104404C.1
agtctgccgctgcacacccctgctgcgtttttaccacaaaaatgtcgaaacatacaacccagtagcaaaaaagcacgaaaaaaaaacggttttacaagaccatttgcgggatatactttcttcaagaaatcttccccacttgttccctcgcgtccatggccttgctccagcctactcttctcactcctcccccgctctgctgctgctcgcatggcctcctctacccagggttcctgaaactgcctcccaaattctcaaatggggcctgctgttccacggcgagggcgtcggaccggagcgagctggcgggtaaaagcgggggcttggcttggagagcggcggggagaaaggggcggctgcttggcgtcaccggagctgggcgaggccccttctttggcggcggcgggaggcgtatggacaagggcactagccgggtagtggggaacctcgccttcgccgccgtcgtgacgtacctcgccgtgaccggccagctccggtgggttattgacgccatcgtctctctctggctcctcacaatactgctgcctgtactggctctgggtgcatttttcttctttgcaggacaagatatactgcagggcgattgtccgaactgtggaaaaagcttccagatactgaagtcagctttgaaggatggcccacaactctgtccctattgcactcaacctttctccgttcaaggcaacaaatttgttagagaatccgctagattttcatctgggagggctgctactgctacaaatggtccagtgttcaatgagatcttcaaccgcaacatgagaggaacggcggcgccttctgagacgatcgtggatgtggaggctgaagtcaaggacgtggagtgatgtttccacgggatcctacaccacgccagtcctcatcagtaccagcttctcgtcttctcagcagaagagcacgatttgcttctgaatctgtgagaaatggggagaaactgaaactgtgagagactaggcaaacgtgcatatagatagatgggtatcggggatgggtagttgtgtagtgcccgcgcgcatgagaaactggacaaggcccctgtttgtttccacaagtaaaaaatgaacaaaa

SEQ ID NO: 4833 - DNA, 272 bp, Zea mays
  Clone ID: MRT4577_104405C.1
aaataaatcatataaaaaaaaataaaaaaaaaaaaaaaaaaaaaaaataaaaaaaaaaaaaaaaaaaaaaaaaaaaaaaaaaaaaaaataaaggaaaagaaaaaaattgggtttaaatcacattaaagtgggagaaggggcaaaaatttaactcctaggggggggcgtcccaggggtttctgctcctgtttggcgttctggtaaattttcatctttctcttctgtttgatccgttttcctctccggcgttctattttactgcctatttgcgg

SEQ ID NO: 4834 - DNA, 415 bp, Zea mays
  Clone ID: MRT4577_104406C.1
gatgagccccactccgatgcaaaaacccggacattaaagcccgcgtcggcggatttttcacctcctcacacaacacgtttcaggtgtctctagctgccgagcgcatttttttccagggccgcggccacactcctgcatttaacaaatcagctgctctcaaacccgtggtctttggtagacaacagtacgccggctggggtcatggtgcccaggatgggcgtcagctttaacggcctccctgagcagaaccaaggcagcgtcaacttgctagtgggtgctcctgtcctgtggctgaccctgtcttcggagcacctaactgcgtccagaaatggcgctccatattagctgccttcaagtggcattaagcagacccgtttcttgcggaggccatctgatgcgcgactttctgtggggc

SEQ ID NO: 4835 - DNA, 271 bp, Zea mays
  unsure (1)..(271): unsure at all n locations
  Clone ID: MRT4577_104407C.1
gggaaagcaccaccgagaggagaaagggggccccaagggncgaaggaaggaggaagaccagggcgngagcggacaccaggacgcacaaaagacggancgcacgcaacagagaaagcgangagaaggaaagngcaaagaacgacaacgggaagaagaaaacagaaaacgagcnaccagagggagagagcggccgcacgcncgganagggagactccaacaggggcagggccactaaagcagaagccccacggaaggaaacggatgagagggg

SEQ ID NO: 4836 - DNA, 305 bp, Zea mays
  Clone ID: MRT4577_104408C.1
cttgcagggaaagaatgaggaggaacgggcggcatgacaggtttcgtgaactgggttctgcattacaacctggtaagccagtgaacgctcacaaagctgccatcctaaacgatgctactcgcatggctattcacctcctttcagaatcacacccactcaatgagactaatgacagcctccaagaaaagattaaagaactaatcgctgagaaggacgatcttggctactagcagcataaactggaactggtgaaggagagtctctatcacctgatgaagctgatggcacaggctccagcctacatg

SEQ ID NO: 4837 - DNA, 591 bp, Zea mays
  Clone ID: MRT4577_104409C.1
agataatacttaaaaagagaagtacctaatacaagatcgtagttgaacatgaaaccagttgcaaatgacaagaagcagttatctcaaagttcaaagatctgtttttctctctgccttttgtctttcaacagaaaccaataaaaccaacaacaaattcccactaattttaaatgaaataaaatcatgaagcgtattcaaaggcttgtggaggttgtggctcatcatctacggccatagctgaggccggggttccttgtgcagccgctgctgtaccagttgcaggagaagctgttgaagttggtgcgtcggtcagagagagaacctctggctcgtgttcacgccaggcttttgaaaaaaacgaaacctgacggtgctagcttcactggtacatatctgctgtcatcaagtaactttatgtatttctcttgagctgggactactcgagctgggttcactaaaatctcaaacgctggctcaggctcaggtgctttcttctcgaccgctgctgggctatcgacctgcatagagtctccttccttctcagttgatgcttttccttttccagatccactttcattgacaggcttttca

SEQ ID NO: 4838 - DNA, 810 bp, Zea mays
  unsure (1)..(810): unsure at all n locations
  Clone ID: MRT4577_10440C.1
cttgatcgacgacagtacgaagcaagacttttcttggatcgggtcgcaatcgtcgagtgatgtatgtttactcctctcccctgcgtgcctatccttttccantccatcacccctcctttcccctcctccccctccccccctccccttttcttccctccccccctcctccttccccctcccctttgtctgtccgcgcccccctccttctccctttctccccccctttnttttnnnnttttgntttcccctcccccaccttccccccctcgcctccccccccctcccccctcccctccctcccctctctccccccccccccccttcttttttattacttttgccggtgcccccttcccccacccccttcccccccccctccctcgcgctcccccctcccctttttcccccccccctctcccccctttgccccgtccccccccccccccttcccgccctcccccccccccctttcccccccttcccccccccccccccgtcccttccccttcttccccccctccccttccccccccccccctccccccctccccccccgtctcccccttttccccccttttntgcccccctttccctccttccccctccttcccccccctccctccccccccccccccccctttnctcccccccccctcccccccccccctccctccccctcgcccccccccccacctgccccccccccctttttccccccttcccctcccctccccccccccccccccccccccacctgttgatccccccttcgcccccccccccctcccccccccctccaccccccccccc

SEQ ID NO: 4839 - DNA, 354 bp, Zea mays
  unsure (1)..(354): unsure at all n locations
  Clone ID: MRT4577_104410C.1
gcccggggggaganganacttacgaggattcccctaggaacggcgagcgaaccgggagcagcccagcttgagaatcgggcggcctcgccgcccgaattgtagtctggagaggcgtcctcagcgactgatccgtgcccaagttctctggaaaggggggggggggagggtgttattttttttcggcccggaccctgtctgccataaggcgccctctcccagtcgggttgctccccttctgcaggccataccagtctatatgttccggtggtggcttgtgtcgggcctttcttagggctaattcccgttcgttggccggctgttctcngggttccgttgccggggccaggcttgggg

SEQ ID NO: 4840 - DNA, 797 bp, Zea mays
  Clone ID: MRT4577_104411C.1
ttttatttttttttttattttttttttttttttttttatttattttttttttttttaaatatatattcaaacttacgagcaggaaaaagcctgtatctgagaatgatttaattaagtagaagttagtaatcgtacacttcagctgcatttacatatttttttgctgggagtattcattttctagcaattagcacaagacaagggcactgaactacaatcagatcaggcggctcggcatcccccagcaattcctcgctctcgtgcttatctctactctacagctgtaagttctgtacatataacagtcatctagcctgatagtgtggtcgaaatgcttgattagatcccccagatagacggtctctcgatctagttttagcaacatcaacaactatcatccagccgtttatgatctgtccattcattgcttttagagcagcacctccagcttcctcggtagtgtattctacgaaggcatagccttttgacctttttgatatcctgtccataattatcttcacttcaacgagctcaccgaaaggctcaaacgctgcccgtagggtcttctcagatgtataaaatgaaaggcctgtaacaaagagccttttagttttgatatcgaccgctccagtcccttcagatgatttcacgccatcatcacctttgtaatttttgttgtctgatccaaagttcgtatcgggttgaacagataacactccaggaacatcagctaatcttttgcgcattcttcatcaatatgacaacagaaaccataatccctatcccatgaaacgtga

SEQ ID NO: 4841 - DNA, 817 bp, Zea mays
  Clone ID: MRT4577_104412C.1
agggattcgagttggatttctagggtttgctcatcctcatccccatcccctcctcgtcgccgtccgtcgccttccccacctccggtcgatcgaaatttgcgatttttgattgatttccggacggaagacatgatccccaactccgtcgacgccttcctctgatctcatccgtctccccccgaaaaaaccaacccagattcgacatactatggtgcgccgccgcccgtcttcctcctctacctcctcgtcgccgatgctccacaagaacctccgcgcgctcggccccggcctcaatccgtttgcccccttcggcatgggcaactactcccgctaatctcccccctcccctcccctatcctctgctcaatttctccccggatccgatttgcttcttccccccttctcgttcttgatttgattggattgctcctctctctgcttgattgcttggttggtttggatctgcttgcaagattggacaaggggccaccatggtgcagctccgcagctcgctcagcatgacccgggcgcgcgctcgcggcggtgactcggacgacgccgacgaccgcggctggaaccagctccacgtcgccgcccgcaagggcaacctcaaggaggtgagacgtctcctgaatgaagggatggatgtcaatgcacccgcatggggaccaaagtctcctggcgctactccgctgcaccttgctgctcagggcgggcatgtgaaaatcatggatgaactactggagcgcggtgcgaatatcgatgccccgacaaaaggagcttgtggctggactcccctgcacattgctgccaggaa

SEQ ID NO: 4842 - DNA, 247 bp, Zea mays
  Clone ID: MRT4577_104413C.1
cggacgtgagggctggtgggaatattgagggctaggggggattttttaaaagaactcacgcttttccttgaacaagatgaaattgatgaatacgagaaatggattaacacagatgcattcagtgattttgaggacaccacacttcaaatagaagaattgctagacaaactaagtgtctcattaactggtgaggaacttgagattattggcaagctctaccagcaagctatgaaactggaagaggaga

SEQ ID NO: 4843 - DNA, 1551 bp, Zea mays
  Clone ID: MRT4577_104414C.1
ctgcgtccgccacttgactcccatcccctctcgcgtggtccttctcctgctcccgctcccgctgctcctcatcttctcgcgccgcggcccccagcctttccccgccgctacctctctctaattgggcggcggcctgccggtccgatggcgttcaactaccacgaccacgcgctggcgatggaccccgcggcggccgccgcggttggggcggccgcgaaccctagctttgtctccggaggtggcatggccggggggcccggctgggagagggagaaggcggccatcgcggcgcacccgctgtacgagcgtcttctcgaggcgcacgtcgcctgcctccgcgtcgccacccccgtcgaccagctcccgcgcatcgacgcgcagatagcggcgaggcccccgcccatggaggccgcggctgcggctgctgcggcgggcggagcacactcgggaggcgaggagctcgacctcttcatgacacattatgtgttgctcctctgttcattcaaggaacaactccagcagcatgtgcgtgttcatgcaatggaagcagtcatggcttgttgggagctcgaacaaactttacaaagccttacaggtgcatctcctggtgagggcactggggcaactatgtctgacgatgaagacaatcaggtggacagtgagagcaacatgtttgatggaaatgaggggtcagatggaatgggatttggcccattaatgttgactgagggtgagagatccttagttgagcgcgtccggcaggagctaaagcatgagcttaagcaggggtacagagacaaacttgtggatattcgggaagagatattgcggaagcgaagagctgggaaactccctggcgacactgcttctaccttaaaagcatggtggcaagctcattctaagtggccgtacccaaccgaggaagacaaggctcgactggtgcaggaaacagggctacaactgaagcagatcaataactggtttatcaaccagcgtaagcggaactggcacaacaattcggcgtcatcctcgtcggacaaaagcaagagaaaaaggaacactgcaggtgatgggaacgcagaaccagcctggtagggcatggtcggggaacgaagtttatgtaaataatgcttctactgtgaagagttccatcatatttgttgctccagaaaagaccctcagaccggtgtttcctgaacccatattcatacaaagacatcagacgatgaataatgttgcgagtagtcaaataaaataaataacttgtatagtgaataactagaaactagcattcatcgttttggtattgtatagcgctagagtgtaattgtttggtcggactgtcttgtataatggtgtaaggttcaaatgcattttgacctagcattcgatattgtattttgtgatgttaaaaaccattggattcgttttgtgttttatccgtggaatagggacactgtttagtgttgccctcaattcggccatgtcgtgttgtcaactaaaaaaaaaaaaaaaaaaaaaaaaaaaaagggcggccgtcgcgcctagaac

SEQ ID NO: 4844 - DNA, 343 bp, Zea mays
  Clone ID: MRT4577_104415C.1
cccactcgtccgcccacaccgtccgagaacttgaacttaaattgaaggatcgtttcaagagatactgtcaaattgcccacaaacgagttgtagataaaccaattactgaagtcagagaatctggaatatgcatgcgtgaaaattctctctatgtacacacattgcgtaactttcgtgatagaagatatgaatacaaatgtcttaacaaaacatggaaaggaaaactcgcataatctaatgccaatggaaattctatgaaaattcatgaagcgcatgatatggttgttctatatgattctttgcaacttgctcacaattgcatattgaattctttttatggata

SEQ ID NO: 4845 - DNA, 873 bp, Zea mays
  Clone ID: MRT4577_104416C.1
caagcaagcagcggccatttctcgttctagtgctgaagccgaacttcgggcacttgctactaccactgctgaaattatttggttgcgctggctcttggctgatcttggtgtctcttgtgacacttctacacctctgttatgtgataacttgagcgctatacagattgctcatgatccaggggggcatgaacttactaaacacataggtgttgatgcatcctttactcgattccattgtcagcggaagactattgatcttcaatatgtgccctcagaatatcaattggcagattttttcaccaaagcacaaacaagagcacaacatcagtttcacttgatcaaactcaaagcttcagatcctccattttcaccttgagtttgaggaggggtgttaaggcccattaggccctactggctatatatattacctacagtccttagggacctttatcaattatctatcccaaggttgaccttgatccttatgggtcaccagctgcattccttgattcagcggttcaatgtgtagcagatgggggcatcttgatgtgctcagctacagacatggcagtgcttgctggtggaaatgcagaagtttgtttttctaagtatggttcttatccattaagaggtaaacactgccatgaaatggcgctgaggattcttcttgcctgcattgagtcacatgcaatccgtcacaagcgctacatagttcctataatatcagtacacatggatttctacattagggtttttgtgcgaatcttcacctcggctagcacagtaaaaagctcaccactcaaattggcacatgtttaccaatgcactgggtgcaattcattttacctgcaaaatattgggaagaattcattc

SEQ ID NO: 4846 - DNA, 1693 bp, Zea mays
  unsure (1)..(1693): unsure at all n locations
  Clone ID: MRT4577_104417C.1
gggtcgacgcaagcctctacactgagtcctgtcacgtcttcaaagcctccgccacttgactcccatcccctctcgcgtggtccttctcctgctcccgctcccgctgctttttatcttctcgcgccgcggcccccagcctttgcccgccgctacctctctctaattgggcggcggcctgccggtccgatggcgttcaactaccacgaccacgcgctggcgatggaccccgcgaaccctagctttgtctccggaggtggcatggccggggggcccggctgggagagggagaaggcggccatcgcggcgcacccgctgtacgagcgtcttctcgaggcgcacgtcgcctgcctccgcgtcgccacccccgtcgaccagctcccgcgcatcgacgcgcagatagcggcgaggcccccgcccatggaggccgcggctgcggctgctgcgcacgagggagcacactcgggaggcgaggagctcgacctcttcatgacacattatgtgttgctcctctgttcattcaaggaacaactccagcagcatgtgcgtgttcatgcaatggaagcagtcatggcttgttgggagctcgaacaaactttacaaagccttacaggtgcatctcctggtgagggcactggggcaactatgtctgacgatgaagacaatcaggtggacagtgagagcaacatgtttgatggaaatgaggggtcagatggaatgggatttggcccattaatgttgactgagggtgagagatccttagttgagcgcgtccggcaggagctaaagcatgagcttaagcaggggtacagagacaaacttgtggatattcgggaagagatattgcggaagcgaagagctgggaaactccctggcgacactgcttctaccttaaaagcatggtggcaggctcattctaagtggccgtacccaaccgaggaagacaaggctcgactggtgcaggaaacagggctacaactgaagcagatcaataactggtttatcaaccagcgtaaggggaactggcacaacaattcggcgtcatcctcgtcggacaaaagcaagagaaaaaggtaatatcacaagaaactagactaagcttctgcttccacatccttgacacctttctggtttctgtttgctgtatgcttatgcttgtaataaaggaacactgcaggtgatggaaacgcagaaccagcctggtanggcatggtcggggaacgaagtttatgtaaataatgcttctactgtgaagagttccatcatatttgttgctccagaaaagaccctcagaccggtgtttcctgaacccatattcatacaaagacatcagacgatgaataatgttgcgagtagtcaaataaaataaataacttgtatagtgaataactagaaactagcattcatcgttttggtattgtatagcgctagagtgtaattgtttggtcggactgtcttgtataatggtgtaaggttcaaatgcattttgacctagcattcgatattgtattttgtgatgttaaaaaccattgtattccgttttgtgttttatccgtggaatagggacactgtttagtgttgccctcaattcggccatgtcgtgttgtcaacttcatattaaacttcaaagttgtttgtatttaataaacttcaaacttcatatataacacgaggttgtggtatagtttcccgattt

SEQ ID NO: 4847 - DNA, 249 bp, Zea mays
  Clone ID: MRT4577_104418C.1
ttttgaataattttaactttattactatttaaatatgggggagcaaggagaggtgaacgaaggaaaaggtgtgacgtacagtagtagagagagttcactgttggtgagaatagtgacaaatgaatcatctgacttagtctgaacaaggaaattataggcagaatatggggcaagagtattttgggagttttctagaatatgaaccatgcttaagggatgacatggttggatagggaataatttgataag

SEQ ID NO: 4848 - DNA, 380 bp, Zea mays
  Clone ID: MRT4577_104419C.1
atcatgacggtttttactacttcatttagaacttaaaaatcgccattgttggttcatgtgggacggtgatcagacgaaacaaccaggcaacagagcgtgttagttctgatcgcaccccaactctcacgcaaaatcttattggtcgggggcaagcacaagatagatctcgcacatcagggccacgcacaagcacgatgtctacggagctagcgccggcgatcccaaaagcggcgagcacaccggggaaggctagcgggaactttaccacgagggggccaccggccgcatttgagctgggaacggggctaaagctgccggcggactaaaaggaaccaggccccaccctcacggcgtgctccaagggcacgttgatgaccacg

SEQ ID NO: 4849 - DNA, 298 bp, Zea mays
  Clone ID: MRT4577_10441C.1
gtggagctatagcacgagagggccactaccaggtcaattgtaggaggtctaagcgatgtttgcctgagaacaagctatgtgaaaggtgatctggggcaggacttacagttggatcacgaaccttttggcagcactagtcggcaccacgctgcttcagccaaggtatctagacttcatcaagatgactgttgacgacgaggggttgacataataacaggacggttgtaataggatagacttcctgtgagaggatgacaaaaagtatgcagaaaatgtgctatagactcatgacctgggg

SEQ ID NO: 4850 - DNA, 390 bp, Zea mays
  unsure (1)..(390): unsure at all n locations
  Clone ID: MRT4577_104420C.1
cccttcctattccctttccccacatttttaataactttattttatttncaataccaccactccaagacaagcttttttctacacgagggagcctttttcttctaaaaaaacccctattccccccatatttcttttaaacgaaaaaatattaattgaacgccccattaacctatttttcaaaaataaaaattgtaaaaaaaattaacctttttttttccaaaaaaaacccaaattgaacccatctatatcccaaatttataacctaaccttaaatctttaacaaaccaatttattctaatctttcattcacacaaataattttaattttaaccaatcttatctccttttaaaaaaaaaattatttccccctattttaaaaaaaaataaaaa

SEQ ID NO: 4851 - DNA, 1037 bp, Zea mays
  Clone ID: MRT4577_104421C.1
cccctgtccagcaacacccacgccagagggtacctcgaggccggccgggtctcgcttagcaggcgtgtaccagaaaccccggccctaaccgcgcccgcaccctcgcccttggctcgccggagattaacgctacagccgtaatcacgtaaattccttttcatggagggtgtgggcgcgcggctagggcgcacttcggcgcgctacgggccggcgacgacgttcacgggccatgtcaggaagtggcgcaaggagtgggtaccagtggtcgccgccgccgccgccgccgccgccaacgccaacaccagcgccaacggtggcacgacgtcctccacggggatgggatctggcggaggatcccgcgggaataatcttctcctgtttaagtggaccccggtgaacggggctaacgggggaggaggggatggggagcagcagcagcaggctgagacggccacgagacgccggcggtatgtgccggtttctttaatggaagagcaaaggcaagaatctaccaaatctgatgatgagaacaaggctaatgatggagatccatcttcgaatgaaactgagccatcaaatggaaagactgatatcaatgatacacctatggatgaatctcaggcaacagatgaggatggtcgagattctggtaaaaacggcggtggaacagacctaaatttgaatttaggtttgaaagacccggatggtgataatgaagttgagacatcagagaaacatgtagcggcaaacaatccgcagacagagaatagatccaagaggaaatccgtaacccctgaccttgagatgacaatgtaacccagaaatttcatttgtcttaattttactatttgccatgagcccatgaggtgtgtaacttgggtacgttctcatcgtagaaacatttaagtaaaatcgattacaggacatacaatagtgtgaactgaagaaacctttttttactcgaacatggagaattgtctaaagtcattgtcaaatataatttaattttccagagaaaaaaaaaaaaaaaagcggcc

SEQ ID NO: 4852 - DNA, 329 bp, Zea mays
  Clone ID: MRT4577_104422C.1
ggcgccggcggcgccgttttcgtcgccgccttcccgcacatgcagaggtgcgacctcatggacctccccacgtcgtcggcaggctaccgccatgcaccggcggcctgtcgcttaccggcggcgacatgttcgagcacatgcggccggttgacgcactcatgctcaagtggatcctgcacgactgggatgaggacaggtgcatgatgataatggacctgctgtacggaagcgaacggtggcaaggaagcatgggggaaggagataataatagacacggggcttggagctggtgctgacgacgacgactacgacaagacgttcagggagac

SEQ ID NO: 4853 - DNA, 202 bp, Zea mays
  Clone ID: MRT4577_104423C.1
gcaaccattgctggaatgtcgccactccctgcaactggaagcccggggagggcgccttcatccggccccgcctctcccacgaggggggcatgaacatggtccccgaggggttcgagacccgcgaccttccctccaacaagggctacctcccgttcaccaagggttatctaggccacggacgggacggacatctaactcggct

SEQ ID NO: 4854 - DNA, 301 bp, Zea mays
  Clone ID: MRT4577_104424C.1
caactttaagagcagcattcatgggagactctggcggaccgctactgtgtgctggtgtggctcatggtattgtatcttatgggcatccagatgcaaagccccctgcaatcttcacccgagtctccacatatgtgccctggattaatgcagtcattaatacaagtagctgaaaagcctgacctgcttgagacaccctccaagcctgagttcatctggtaacttttggttttaacacagcctgtttccagcatgtgtctcagcctgtccctagcctgtctccagctgtctctaagaggccctc

SEQ ID NO: 4855 - DNA, 283 bp, Zea mays
  Clone ID: MRT4577_104425C.1
acgcaagcatgttctacactgcgtctctcatggccaaagcgctcatcaccttctagatacgtctgtcccggatctacctcctgacaataccatcgatgccttgcgcagctccataccccacctccagagagctcatgattgcctcgtatcgtcaccgaagacaatcctcggtgggcgggctcccagggatagatagcttgcccagctaagccccgctccggtttgctgctcggtctgtggccgggttgtcgattgagagaagcgattccgcgactgatacaag

SEQ ID NO: 4856 - DNA, 310 bp, Zea mays
  Clone ID: MRT4577_104426C.1
tcgtaggcgggcacgactccggtcaacggggcgggcggcacccagattccaaactctagcacacgcaccatggctgagcagcataagatccggtggggggagctggaggaggacgataagcttgggacctcgattatacttctccagcccagtagtagggtcagacataacgagaacagcctgaagaacgtaatgaaggaccgatttgacaacaactgcaacaaggtcagtgtcacgaccacaatccgcgtacgtaaactcgctcgggcgcgcatgtatcgcagcgccatcgagcgcgcggcagtggcct

SEQ ID NO: 4857 - DNA, 348 bp, Zea mays
  Clone ID: MRT4577_104427C.1
ggccctcaagctcaaatcaaatatcccatgattgattcattcattcaagcatacaagtgaaatggacaggataatggaaaaggtttctagattttgcaaaggttccttgatgacacaacttattaacacaaatgtgctgaaagcgtggatagacaaactttatcagtagatctcaattatcttaattccatcgagtagtcgagatctcactccacccatgtgtcacatctgatagatcttttagtgttgttccaacgtacaccaaagcaagagtgattggcatcattcccaaccaagaagccagcatgtattcttcaacaccaacaggagtgacagataacaggtagt

SEQ ID NO: 4858 - DNA, 466 bp, Zea mays
  Clone ID: MRT4577_104428C.1
gagcgacactaacgctacgccgccctctcttgctcttggggccgggtatttcaccgcacacgatgacccctctgtaccgcagaggagaacacactctgaagagagagggaaaatggtgcccacaccctcactcccgatctggattttaacccgcgagtgttcttagacatgatacgaccgcggctcccaggagcaccgtattgtgatggagctgggcccacgacggcccaaaccgaaaacttggcgcctgcgcccggacaaagggcgagatctaggcgagatgccgctacactacgaggtctacaactttgaacgtggaacccctgagggcgtgcaccttggcggtgacttcacccgcggccatggcctcggcggcgtgtccatatacggcgagaatggccccgacgagaaggtggtgcgcaagcacacacgaccaagtgtgctctgcatgggcagcgccgggccc

SEQ ID NO: 4859 - DNA, 245 bp, Zea mays
  Clone ID: MRT4577_104429C.1
cttgacagggtaactggaaaatgaatatattcagctcctgccccaagaatttgaacaatgggggcgggcaggcaaaaacaaaccacccaaaaggcagttttcaagaaaattacagaatttttctgaatctttgaagaggacaagcctaaacaacacacattgtgcaaccccggggatatactacatggcttccgcggaaaattaaaaaacttgggcggattttcttggaagcacacccccccgtt

SEQ ID NO: 4860 - DNA, 844 bp, Zea mays
  Clone ID: MRT4577_10442C.1
accaatgttgcaggcaatcacatgttcacgctcgcagccgccgccgccccctgattccgcgtcctcccctattctctcccccctcgcatctctctcccaggccgcctgcatgccgaagccgagcgcccaggccgcacagcaggacgccaccagcacgcgcccagtacccgtcgagcccgtgcccgcgcccacgaagcagccccgcgcagctgactgccattcgcatgcccgaccgcggccatcctgcgcgcgttcctccgtccggccatgtgcccgcgcgctaggagaagcgcccgaccgagcagagcaaccccaaccgcgcagcagccgaccgaaccgcgcaaccgaagcccgacccgcgccgtccatttcatttctgcgttaatggagattcactgcttccgttactctctcccccacttattcttccttgaagacacgccattgatagtgttaataccgactgttcctcttcagcgaccctctctctccctctcctccctctataaattggagccggacctctctccaagcatcccgagctcactcctgttgcccctcacttctcgccgacgaacaaccgtctaccgttcgtcgattgccggagtcgacgccaccgcgcccagcacaccgccgctctgctcacgcgcacccgctgtcgaacctctgctcgtgccgtacacagctcgccgtcgtgaagctcatcgtcggatcgtccgcatccgtacgtcgtccgtcttggagtccgtggagcctcgccggagttcgtgctcaccatccgcgttccccgcggagcttcgcgtccacgcagcaccccgaacagacgatcgcgctcgttccctgc

SEQ ID NO: 4861 - DNA, 267 bp, Zea mays
  Clone ID: MRT4577_104430C.1
cctcgccccggccgggccggccgggtaaaaacttacctggacggggtcgacgtgggatcaagaagccccgtggcctagatcagtggcctgcattgcacttggctggtgcgctggtctaccatctccccaagtgggagagtggacgtcataatttgtggcagagggggtacgcgttcgcgcggcccctgttaaaaaaaaaaaaaaaaaaaaaaaaaaaaaaaaaaaaaagaaacctaaaaaataaaaaaaaaaaaaaaaaggccccta

SEQ ID NO: 4862 - DNA, 556 bp, Zea mays
  unsure (1)..(556): unsure at all n locations
  Clone ID: MRT4577_104431C.1
cggccagcgtgggncggnccgcgtgggtaaggaaagagaaaaaaaaaaaaaaaaaaaaaaaaaaagaaaaagggaaaggaaaatagtagagagggataacaagattgggtgacgggtagtatgaggaggtggatgtggttttgtttaagggatttcctaatggggtggttctttgtgtcggtgttttttctaactttatttgcgggggggggggggtggtcattcccctggtttgtcagcattgtctgggctttccctgtgttgattggttgtgtggtgatcgttgggggggtgaggtagcgtgtcgccttttgctaaactgttctcgcaacctggaatgggtaagtggaaatgcggccttgtacttgccgctttattgggcgtgttttggtgggggttggcgttcagggtttaccggtacagttggccagcgccctggtagaccgttttttctcgcttttttttctttgttttgttgcctcgttttggcggcgtttccctttttgaggtttctgtttcgggggtttgcctctgggggtgtccttatttggggttt

SEQ ID NO: 4863 - DNA, 171 bp, Zea mays
  unsure (1)..(171): unsure at all n locations
  Clone ID: MRT4577_104432C.1
gatgaccattgtnctccgtnncagtgatcaccgctcgcggcttcttcagcgagcgcggcaaccgagtatccatgcgcgtcctntcactnagcacnagancgtgccggcatcgaccacctatgacgtaggacagcnacaggatntctttgaactgaacaaaagnttggacac

SEQ ID NO: 4864 - DNA, 983 bp, Zea mays
  Clone ID: MRT4577_104433C.1
cgggaggccttctctctctctctctctctctctctctggcgacggccatggtgcagcaacagcaacacagaatctacatcttgcagttcaggaagggcgagacggagcaggaggtggcatgcaaagtgtcgcagcccaagggcgtcgggcggcgggtcatgtactactaccaggactacggcagcggcggcggtggcaagagcggcaagacggtgcaacccagggcgctcggcgtgcggcgcttcttggccatgctcctgctctccttcctctgcgtggggacgctgttcgtggcgcccgtgtccttcctctccttcgtgcatagcgatgaaggcggcgcggcggcggcggccacggccgcgcgcggcggggtgtccgggccgtgctcggccgtggggaacaacagcctctgctgcgaccgcacgtcggagcgcgcggacatctgcttcgcgaggggggacttgcgcatgcactcggccagcgcgtcgttccagctcgtgtccaccggcaacctcgacgccgggggagcggatacggtccgtacacgcgcaagtgggaggcgaacgtgatggcgacgatcgacgaggtgcggctgcgccgcgtggcccccggcgacgccgcgcggtgcgacgtgcgccacgacgtaccggccgtgctcttctccaccggcgggtacacggggaacgtgtaccacgagttcaacgacgggatcctgccgctgttcgtgacggcgcgccacctccggcggcgcgtggcgctggtgatcctcgagtaccacgactggtggatgaccaagtacggcgacgtggtgtcgcagctgtcggagttcccgccgatcgacttcagcgccgaccgccgcgtgcactgcttccccgagttgatcgccggcctgcgcatccacggcgagctgaccgtggacccggcgcggacgcccgagcggaggagcatcggcgacttccgcaggctcctggacgacgcgtacc

SEQ ID NO: 4865 - DNA, 709 bp, Zea mays
  Clone ID: MRT4577_104434C.1
gaattagccggcacttaggccaagaatggcacgcctcgccggcgtggcagtggccctagcagccatcgccgcggtggtcggcgcccacgagccccggtactacgggtccgtggagaacccccttccggcgctgggcatgaagctggcgtgccatgcgatgggcgggttcctgacggagctcagcgtggtgccgcgcgggcgcgtgccccacggcagggccgggcggcgcgtcgccgagctgctggtggagcgcgggaagcacgggtgggtgcgctgcaactgggcgtacgcgggcaactacgtcgccgggatcacggtgctggactcgcggtggcccgaggcacggcggtgccaggaccccgccggccagggcctgtgccgcgtcgtcttcgagaacgacgccgtggtcctcaagacgcccgaccgcggcgtgcgcgtcatcggggacctccccgtcaagcgctgccggcggcactggatgctgttcagcaccgggtgcacgtaccccgaccaccgctacccctacgccggccggcgactcgggagcgccttcgagtacttcgccgtctgatctcattcattccagtgctctctctggcctcgcttgtatgatagatgaggggtgccaaccatttggggagtccaattttgtagattttattttacaaagggcttccaataatatatacaatgcagattgcaaacacat

SEQ ID NO: 4866 - DNA, 1952 bp, Zea mays
  Clone ID: MRT4577_104435C.1
ggctcctcaaagatgcttgtttcatcactgcttgtgcttgctgtgttttccggcacataaatagcacaacctctaaccgccaattgttttctatactcttttgctaagccgagccatacccgcccgctccttttctcatagtcatccgggaaacattctctcgacggccatggtgcagcagcagcaacagcacagaatctacatcttgcagttcaggaagggcgggccggagcaggaggtgtcatgcaaggtgtcgcagcccaagggcggcggccggcggccggtcatgtactactaccaggaccacggcagcggcggcggcaagaacggcaagaaggtgcaacctagggcgctgggcctgcggcgtttcttgggcatgctcttcctctccttcctctgcgtggggacgctgttcgtggcgcccgtgtccttcctctccttcgtgcatagcgacgaaggcggctcggcggcagcggcagcggcagcggcggcgaccgccgccgtgcgtggcggggtgtccgagccgtgctcggccgtggggaacgacagcctctgctgcgaccgcacgtcggagcgcgcggacatctgcttcgcgaagggggacgtgcgcatgcactcggcgagcgcgtcgttccagctcgtgtccgccggcaacagctcggcggcgggggaggaagaggaccggatactttccgtacacgcgcaagtgcgcctgcgccgcgtgctccccggcgacgccgcgcggtgcgacgtgcggcacgacgcgccggccgtgctcttctccaccggcgggtacacgggcaacgtgtaccacgagttcaacgacggcatcctgccgctgttcgtgacggcgcaccacctccggcggcgcgtggtgctggtgatcctcgagtaccacgactggtggatgaccaagtacggcgacgtggtgtcgcagctgtcggcgttcccgccgatcgacttcgccgccgaccgccgcgtgcactgcttccccgagttgatcgccggcctgcgcatccacggcgagctgaccgtggacccggcgaggacgcccgaggggaagagcatcggcgacttccgcaggctcctggacgacgcgtaccgcggccgcatcggattcctggagcgcctggagcggcgcgcggctcgcaagcgcctgcgccagcgccgccaccgccgcggcggcggcggcggcgcgcctccagctccaggaggtcctcgcgaggaccgtcccaggctggtgatcgtgtcgcggacggggtttccgcgtgatcgagaacgaggcggacgtgggggcgcttgcggcggacgtcgggttcgacgtgcgcgtgatccgccccgaccgcaccacggagcctgtgcaagatataccgggagctgaacgccagcgacgcgatggtcggggtgcacggcgccgccatgacgcacttcctgttcatgcggcccgggaaggtgttcatccaggtggtgccgctgggcacggactgggccgccggcgcctactacggcgaccccgcggcgcggatggggctgcgctacgtcggctacaagatcctccccgaggagagctcgctgtcccgcgagtaccccacaggcgaccccgtgctgacggaccccgccggcgtggcgcagcgcggctgggacgtgaccaagaaggtgtacctggaccggcagaacgtgcggctggaccttgcccgcttccgggaggagctcgtcgcggcgcaccggtacctggccgcggccggcggccggcggcggcagccgagagcggccgagtgatgccggtctcgagtctcgattaaccaaccgccaccatctcaatggactcattcatctcctcctctgctctctgctctgaacctgtgctgtgctatagttttcattcctacccgttctctcatttttttccttcggctattatacactgacttgaactgacaattctttgcatt

SEQ ID NO: 4867 - DNA, 227 bp, Zea mays
  Clone ID: MRT4577_104436C.1
taaaagtacatgggccatcttttcccgtcatccaagactcactgaaccaggaaagatgggtagaggtggggtagttttaccaagtgataagagagggagacattatttaagggttggacttgtcaaaatcaacacccttttgtacgctgtattgcaggcctccttggcaggtgttgatcagcttttgctaacactcggggcccttaccgagggcaaggagcttttta

SEQ ID NO: 4868 - DNA, 305 bp, Zea mays
  Clone ID: MRT4577_104437C.1
aaacccacactttttttgcattttaactaataattaacaccaacaacataatttgggacacggccatttcaaacataatttggggcaccacccttacaacaaagagatttattcaagccattcacctgaccaaacaatcaaaaaccctttttttaaacaacttaaataacctcattttggcaaattacaaaattgtacacaaccttaaccaatttgttttaagtgttaaaattaaaacaattttctgagaaaaacctataagcggttttgttcttaaccaatacaaccttggacaaaggatggat

SEQ ID NO: 4869 - DNA, 626 bp, Zea mays
  Clone ID: MRT4577_104438C.1
cattgggtacctcgaggccggccgggagcagatagcacagtgattccactaacgaacgaactcttggtccgatcactacctagatgaggtcgacgatgacgactgagctgaacagcaggaagacgacgcaggtgggggtcatgctgcggggagcgacgctgctggcttcttccgcgtcggccagcgatcaccatgcggcccagagtgggaatcaatcgcgtgcaagccatagcatacgcttactacaacagaagaaggctctatccgcgctccactacagtcgtgctgcaacgctccctacagcctacaatcaattgcgagagcggactcagctgcccatcgacaggagaagtgccgctgcctcaagagccatcaccaacaacgtcaagagcgaaaacagggggaccgctcgccaccatacctctccgcaagtgcgtcactgccgacgtaaacaacatcagctagtgcccaccgaactgtaacaagatcgaataacttactaagactcgagtaataagactaccagaacgagccgacatcccgagggatgcaagagcgatgccaacaccgaagacataacataaagctaggtgtatagccatgagaagcacgaagcatcgatctac

SEQ ID NO: 4870 - DNA, 1396 bp, Zea mays
  Clone ID: MRT4577_104439C.1
agatcaaagctctagaatccctccagatcgagaaggctatgcattggatcccagtccaagattcaaatacaaccaaagatagattgagagccacaaacaagagagagagagagagagagagagagagaagcatatacggatggccaatctcaattttcaaccctgctctttgcatttgtcgttcattgatcccaactaaaatttgtgatggctgacgggggaaagttggcagctagcaatctctatttgcacggtgggaacaactgccctgggcttctatagtttcataagatgtcctctttgtttctgagatcattgcactagtggcagaccggtttggtacataacaagaaaatctgaagctatttaaaagaactcatttgaccgccaatggttagtgggttcatgcaactcttgtacccttcatcttgatctcactagcagaagaatttaaacgtataaacctcagagaaacaatctggactggatgtggctacggaagatccctgtacttgagaacatcgatcttgtccaaatcgtactcctggcatatactcaaaatggtatcacaatccaaaccttcatccaagtttctaccctcaagaaacctgtcaagcttttctgatggccgcagcttccaaggagaattccttgcattttcactgggtttgccatcctttactgaattaatcttctcctcaagaactttccacttatctgagcagtcagaaactagtaactcgagcctctcacttccctgtagagctctccaatgagaataagcacgaaatagcacccaaaagaatggaatgtttggtaacggtagtaccatgaaaacactagtaactggaagcaaacaaaccgagccatacagaaatttcttgtgaactgatgcacccctaacagcaatatgccgcaaacgtcgacgcacaagacgagaatttatgctcgccggatgcacgatctcgagcgcgctcacgtccttggtgacggacttcaggagcacctccgacggcctcacccgggacagcagcttcagcccgaagctgtggatccggctcttcatcgacccctccggcgcgctcccgaacccgacccacgccctgttcatcttgtcagcgacgaagtcgacgactgcctcggccttctccggcgccgtgcgggacccggaggagatgccgcgccagaggtccctcagggtcgggcgcgggagggcgccatcggcagcgggcgctgcggcggaggcgcgcgggagggcgaagcaccaggcgcggcccttgacggggaagacgacgacgcgggcctgcatcgcgcggcgcggcgcaacgagtgggagcaagggtgggacggcgcgggggcgggacggtggtgacgagtgacgactggccccggccgg

SEQ ID NO: 4871 - DNA, 258 bp, Zea mays
  unsure (1)..(258): unsure at all n locations
  Clone ID: MRT4577_10443C.1
accctcgaggccggccgggacaaactccaaatccgcagatcgaagncgcgtctatctcagcttgctgcactgcactaccctgccctgccatcatatcntacgtgagccccggcgagcgagagnnagggagaggtatggntgctccgaagctcgcnacgctggcgctggccgtgctcctagcgacgaccgtggtgactcccccgnccgcggtgcgngcgacgatgtcgagctccaccgtgtacagcacgctgatgccgt

SEQ ID NO: 4872 - DNA, 592 bp, Zea mays
  unsure (1)..(592): unsure at all n locations
  Clone ID: MRT4577_104440C.1
actgccaggtggcagtattcgtttcagaattcacagttttttgcttctgcaaaaaaaaaaaaaaaaaaaacaaaaaaaaaaaaaaaaaaaaaaaaaaaaaaaaaaaaaaaaaaaaaaaaaaaaaaaaaaaaaaaaaaaaaattaaaaaaaaaaaggggggaaaaaaaatttaaatagtttcctggggggggaacaacgttagggggaatttgggggggtttcattaaaatgggggggggttggagattgtttttagggggccaatttggccttatgggggggggtttaaaatttaaggggggggggtttaaaaagggggggaggggaaaaacctgggggtaaccaaattaaatggtttggaggaaaatccctttttggcaagtgggggaaaaaggaaaaaggccggaacggatggccttttcaaaaatttgccaaccttgaaggggaatgggacccnccttggacgggcgattaaagggcggggggggggggggtttacgggaagggggaccggttacattgggcaggggccttagggcccggttctttgggtttttttcctttttttttttggaaagtgttggggggtttt

SEQ ID NO: 4873 - DNA, 289 bp, Zea mays
  Clone ID: MRT4577_104441C.1
tcttgacggccgggccgggaatactctagggtgggcctctcctctcgtttgcctgcgccgccgagatcgccaatgggcatggctctttcccaaccccgcccgccaacgccgacggcggcagcgtccacgctaatcccctccccgcgaatacactcagcagcggtaaaggcgcccctagtaatggatctcatacactacaacgggcctccctgtgccacaccacccccaccgcgctgcggctcaccaccgtgatgcctccactggggggaaaaggctgcggacctaccac

SEQ ID NO: 4874 - DNA, 336 bp, Zea mays
  Clone ID: MRT4577_104442C.1
gctacaccaaattggattcgtcgtaaaccagaatcaccttgcccagaccaagcagaagattcaaaaagagcttttgcaatttcaggaatagatgcttcagcaatggcaacaggagtacgcagaccagacttgtacaaagcccttgcacgtgaacccttgacaaatggaattgatgtcagttctgcaatctctgccctaactccaaaagagacacgattttggaatttcgaaacaaggccttctaaatcattccaaccaagcctttgacaaaatgcagaaaccattgaagcaaacctgccagcattttcctgcagtgcctgaatcatacctttggcg

SEQ ID NO: 4875 - DNA, 288 bp, Zea mays
  Clone ID: MRT4577_104443C.1
aagagatggcgtgtatagacatttcttttagagccttgttccttttatcgctcgtgggggtcatgcatggtgagaaggcaaagtcaaaggacaacgatgcataagcgtccggacccgttggctccttctatttcattaattttatcgctttttgttttggcatgactgatagcacgaacgctgttcaggatgcgtgcgcattatcgttcttgttatttttgtagcagacgatcctcattcccaatggcgacttcctcgtcggaccactcaacttcacaggcccatgca

SEQ ID NO: 4876 - DNA, 1304 bp, Zea mays
  Clone ID: MRT4577_104444C.1
ctcgaggcggccgggcgggcgttttcgaagcggacccgcacaccgacgatagaagaggagaggaggcggagctcgagcccaaccgcgcaacttacttccccgtcgcgatttgcattgccctcctcttggcccccgatctcgccgtgccctacccccagacccgctccgccgccaccggagagatcgcgccccccattcccacaatctaatccttccgtccctcgaggagccgagccctccgcgcggccgtgggatggggcggtgacaacaccggtgagtggcgtggggcagggagccggtggcgagggcatatcatggtgcagtgcctggacggggtgaggcagctgctcgcggtcctgctcaagtgctgcgacgtcgagctcaagcagccgcccgggctcgaggaccctcaggttctcgcgagggagaccgtcttcagcgtgagcgaagtcgaggctctctacgagctgttcaagaagataagcagtgctgtcatcgatgatgggctgattaacaaggaggagtttcagttggcactatttaagaccagcaagaaggagagcctgttcgcagaccgcgtatttgatttgtttgacacaaagcacaatggaattttaggatttgaagaatttgctcgtgctctctcagtatttcatcctaatgctccccttgatgagaaaattgacttttcattccggctgtatgatctcaagcagcaaggctacattgagagacaagaggttaagcagatggttgttgctacacttgctgagtcaggaatgaatctttcagatgaaattgtagagagtataattgacaagacatttgaggaggcagacacaaaacatgatggaaggattgacaaggaagagtggcgcagtctagtcagtcggcatccatctttgctgaagaacatgactcttcagtacctcaaggacatcaccacaacatttccaagctttgtctttcactcccaagttgatgataactgattttcatgggattattttggcaagaagcattagaagatattctcgtggggttctgatatggttttctttttcaattattgggttgttggattgactgagatcgtagtgctcataagtatgttggatgttggattcgagaactcaaatcttttgtcaaccatgtttctttcataaacaactctggatgcgcttggaaaatatatgtagtatatgtccaaagttttcttttttttttttaaaaaaaaaaaaaattttttgggggggggggagaaaaaaaaaaaaaaaaaaaaaaaatttttttagagagaagag

SEQ ID NO: 4877 - DNA, 882 bp, Zea mays
  Clone ID: MRT4577_104445C.1
ccggccggtcgccccggttcggcctctcccggcgcctcgggtcatgcccacgagaccacgagctacgcgccgcagacggcagggttccggagccaatgtatgctgctgaggcggcaggactctagcagctctcctatctcataccctattccaaacaacactctgtaaaaagtgtaatgtgacgcccgacgcgcctggatgccgaatcgcctggatcgagacgagtctgggatgagcacggcggcgcctcctcctggccagcggtgagcgtccgtgctgtgaggaagacgtcggcaacatgatgaaggcatgacgctcaacaggagactcaaagataagtctgtcacacgatggcaaaacagcatcatctgcatccatgcatgggtcgttcgtcgtcgtcactgcctctcctgctggttccactcgagtattgccgaacgaagggccctgttcggcacgagaaggctgcgctcgaggtcgagattcgtcatgggtgatgtgctatgcccgctgtcaagccagcccctaatagcttcaccctcataagtgaatccatccgctgcaacgtaagggtctctcatgatctcctggccaccatcaaattacagccatgagtttacccatttcaatgtatttaggtgttgtttggttcacatatttgcaacgtgaacgtaactcatgacgtttaaccactgttgaagtccaaccgtaatcagataccacactaggaactaataccggcccattcaaacttgataccactaatacctcactgcgaatcattaccgctgtcatttatgttacatttgatgaaccaaacaacaccttagtgtcgttatgtgtcaaatgacagttctttacattttattaaaaaaaggacat

SEQ ID NO: 4878 - DNA, 367 bp, Zea mays
  Clone ID: MRT4577_104446C.1
gggttgcgaacaatctaaacttttgcccctaccctgattggataccatctcttcatcatcattcatcaaactctggatcagattctaaatcatcatcatcattggccaaattcatcaaacaactgagtttcaacatttttggctggactttgaaacactggatctcaaacagggtactctagagccctgtgtccccctctattgtacaagtgttggattcgtctggccatccacgaacacttttgtggtgccaaaatctgcaattttagctctctaggtttcatccaagagtatgtcggatggttttagatcactgtgtatcacttcctttcttagtccttgcagataagcaacacctttggcaact

SEQ ID NO: 4879 - DNA, 155 bp, Zea mays
  unsure (1)..(155): unsure at all n locations
  Clone ID: MRT4577_104447C.1
acgcacagctctnttcattattacatcccagcggctttttctaccctcgactttcatctaacggtcacttatcaatatgggcgctatccaaactccttaactctccctttcctctgctcataatacagcacacagcatgttcatctccaacacca

SEQ ID NO: 4880 - DNA, 546 bp, Zea mays
  unsure (1)..(546): unsure at all n locations
  Clone ID: MRT4577_104448C.1
ccggatggaaggatccccgatctcatcttctggcacataccgagtacgtcgnatcgccacggaagctccgaaggccaagggggggataaggaagccctgcgtcggctccatcaacgaggaggaagtggcgccgcaggcagctgaatggggcatgatggatgcgctcgccaagaggtcgtcggtgaaggcggtgtttgttgggcacaaccacgggctggactggtgctgcccctacgacggcgaggagcgggagcaggagctgtggctgtgcttcgcacggcacacggggtacgggggatacggtgactggcccataggagcgaggatccttgaggtcacggaggagccattctcggccgtgtcatggatacggatggagaacgggaccaggcacagcgacgttacactgacctcctgaatgcatctgcctgcctgattctcttgtataatgtacagtatagaggatatttctttatatataaagactaggattttaatataactacacccaaaataaaagcaccggaggacattttattatggccc

SEQ ID NO: 4881 - DNA, 395 bp, Zea mays
  unsure (1)..(395): unsure at all n locations
  Clone ID: MRT4577_104449C.1
ctctaaacaaccgccctggggggggggggtttttaaaaaaaaaaaatttgggggggcgtttttttttttttttttttttttttttttttccatacccccctggggggacagagagcggctaatgggggctttttttttttttttttcacttacaaaaacccccccggtgttagcanaagggtttttttttngaaccaccccccgaagggttccctaattatcctgggaccacccccctacggccaagcagggccaccatcaaagcttttttcctctcaagttttgctcattccccctgggcctggatatcccccctacccggaaaccatgcctccggctccaactctatcgcggggggagggccccaccccccccccatggttaaaaaacccccc

SEQ ID NO: 4882 - DNA, 690 bp, Zea mays
  Clone ID: MRT4577_10444C.1
atgctctcttatatcctggtctgctactgccaggcattcacgtcctatccatctgatgaacctcagctaaggtccccagcggcgtggaggcgatggaggagcctgtgcacgctgtacggcacgatgctctcaccacgctgtgccccgcgtgcggggctgcctcctgcagaaggacatgacgatccagatccagccgcgggacctgtcctacggcgagcacaagtcgacgtccttcctcttgttccagcccttcatccacgaccctgccttcaacgacctcctcatctacgtctttgtacctcagcgctatttgccgctacatatgcaactcctatgcggactctggtaaccacgacctcctcggctgagactaagacggcgtgatcttccgcctcgtcattgaacagtgcatagactctgaaggccacatctttaccccaccgagcttggctatgatcttgcagctcgaatttgcactcatgcatggccggaccactgacctgatgtgaggtcagcacaatgaatccaagcttgccaacgtgcttgatgtgcatgaccaactgctgatgacaaaccaagattttgccttgtgatgattttctcctgtacgaccctgtgcactttgcccatgcagatttccttgtgaacaggacccagcaagcctggcttgatcaccgagagaaagatctt

SEQ ID NO: 4883 - DNA, 247 bp, Zea mays
  Clone ID: MRT4577_104450C.1
gtgtacttcactgatgatgcacactcattagctcacactatcaaagctctagagccctatatcaaaacagcctctactcactttatcctcgaacagcaagtgcccttgctcactgagactttcactcgcgccaaacggtcattggagcgccacatgatataccgttactgacctcacatttaactggaccgacttcatcaacgtcatgatatccgacatgtcagtcacgtacagtagtaatcataca

SEQ ID NO: 4884 - DNA, 727 bp, Zea mays
  Clone ID: MRT4577_104451C.1
cattgggtacctcgaggccggccggggccccggggccgccgccaaaggctgcgcagattacctacccacagcactcccagtctcccacagcccaagcaacatccggtatcaatatcacaagctcaaaagtcagagtcgggaaggatcggagaatggctgcgcaggcggcgcaatgcaggcaacacctcgatgcatcatcctgtggctgtggcccagctaaatccgaagaagccttcagcgagagcgacgacaggctagcgctggtgctggtagatccccagctcgttgcagccgcggcaggcggcggtccaagaacgcaggcaggagaggtccgccgtggcaggagtcacgaggaagaagaagaggaggagaccgacaggctcgcgatcgttctagctgagccgcagcgacaggccgccgctgggcgcggcgacgtggagtccgttctcctggcgctgcggcgggtgaaggagcagctgcgctacaccatcgagcggcggtcgcgggcgcggctcgtcgtcgcccaccaggaactctacggccactagctgtgagccgtacgtgtgtgaatcattcgcagcgctgcactgctgctgtgcagcgattttataaatatagctgtctcgggggtcgatggagtatccgtagagaatggaataagatgtcataatttacaaagagtgaattgcttatttgcttctgtttaaaaaaaaaaaaaaaagcgggc

SEQ ID NO: 4885 - DNA, 276 bp, Zea mays
  Clone ID: MRT4577_104452C.1
cagaaatacacggaagtaaagaatgtgaaagagaagctagtagaagaaaatgttatatagacttctgagatacttgcagtgcaaaatcttttgcaaaaacaacatgttccattggaacaggttgaggctctgaaaaaatctcttaatggcacaattgaaaatctaaaggaagaactgactagtatgcataggtgttacgagaaagagcagcagacagtgaccaaactgcatcaattgttggagaatcaaaagaactcttctgtacacctggcagag

SEQ ID NO: 4886 - DNA, 1189 bp, Zea mays
  unsure (1)..(1189): unsure at all n locations
  Clone ID: MRT4577_104453C.1
gtggtcatcaaatcccacgcttcttttcgaggcctcggccgggctctcccctgtcctctcccagtgcgtcccacatcccacagggagcgtagtgctctgtgcctgtgggctgtggcgcggcgcggtgcctcgtcacctcacgcctcacgccccgaacagaggcgtccgtccgacaccttccgcctcaagccgccgcgccgtcccctgcccgcgagctcaaaagtcagagccgcacgcaagaagcagaagcgccccggggccgccgccaaaggctgcgcagattacctacccacagcactcccagtctcccacagcccaagcaacatccggtatcaatatcacaagctcaaaagtcagagtcgggaaggatcggagaatggctgcgcaggcggcgcaatgcagggtgagcggtggggatggcggtggcggtggcatgaggacggtggagtgcctgagagggaggcttctcgcagagagggtggcgtccaaggctgcaaaggaggaggccgaccaactggccaaaaggctggacgagctagagaggaagctcgccgacgaggtcaaggtgaggaacagggcggagcggaggctcaggagggccatcaggaagctggagtccctcaaggttctggacgtcgggctctcggacggctccaccgggtcgctgtactccaacggacgctccggtcaccaggcgccggaggcggaggtgggggcggaggcggaggagaggaacggccctggctcgttgaccaccgatggctctgcgccatccgctccttccggagacgccgacagggtcgtgtcgtcggagggatcgtgcacccagctcaactcgtcctcccaggacgggagctggtgctccgttgcgtcagagcaatcccagcctggtccttgcatggatcctgccggacacaccaccaactgccgttcggcggggagcggcggctgtgaccgtgattcagagaggtacgttcgcgtgcagatcaactcagtgccaattggtagtgaactttcttgttggtnaaaaagagagagagagacttgcttagtttaagtatttgttttgggtttcatcatcgtaggtgctggatttttagcttccttgttactactgtctttggccagaggaactgccttcttccagacttgcattcctcctctaaaagtctgtttttttttttttgag

SEQ ID NO: 4887 - DNA, 1652 bp, Zea mays
  Clone ID: MRT4577_104454C.1
gtgttctgtggcgcggcgcggtgcctggtcggctcacgcgtgacgcctgaggccccgaacagaggcgtccgtccgacaccttccgcctcaagctcaagccgccgcgccgtcccctgcccgcgagctcaaaagtcagagccgcacgcaagaagcagaagcgccccggggccgccgccaaaggctgcgcagattacctacccacagcactcccagtctcccacagcccaagcaacatccggtatcaatatcacaagctcaaaagtcagagtcgggaaggatcggagaatggctgcgcaggcggcgcaatggtgggctgtggcgcggcgcggtgcctcgtcacctcacgcgtcacgcctcacgccccgaacagaggcgtccgtccgacaccttccgcctcaagctcaagccgccgcgccgacccctgcccgcgagctcaaaagtcagagccgcaatggatagggggattaaggaggagatggacagaggcaggacaacggcgtgccaccatcagacaccaatgcagcatcagttaatgccgccctcaacatcggatcgcagggtgagcggtggggatggtgacggtggcggtggcatgaggacggtggagtgcctgagagggaggcttctcgcagagagggtggcgtccaaggctgcaaaggaggaggccgaccaactggccaaaaggctggacgagctagagaggaagctcgccgacgaggtcaaggtgaggaacagggcggagcggaggctcaggagggccatcaggaagctggagtccctcaaggttctggacgtcgggctctcggacggctccaccgggtcgctgtcctccaacggacgctccggtcaccaggcgccggaggcggaggtgggggcggaggcggaggagaggaacggccctggctcgttgaccaccgatggctctgcgccatccgctccttccggagacgccgacagggtcgtgtcgtcggagggatcgtgcacccagctcaactcgtcctcccaggacgggagctggtgctccgttgcgtcagagcaatcccagcctggtccttgcatggatcctgccggacacaccaccaactgccgttcggcggggagcggcggcggtgaccgtgattcagagaggcaacacctcgatgcatcatcctgtggctgtggcccagctaaacccgaagaagccttcaacgagagcgacgacaggctagcgctggtgctggtagatccccagctcgttgcagccgcggcaggcggcggtccaagaacgcaggcaggagaggtccgccgtggcaggagtcacgaggaggaagaagaagaggagaccgacaggctcgcgatcgttctagctgagccgcagcgacaggccgccgctgggcgcggcgacgtggagtccgttctcctggcgctgcggcgggtgaaggagcagctgcgctacaccatcgagcggcggtcgcgggcgcggctcgtcgtcgcccaccaggaactctacggccactagctgtgagccgtacgtgtgtgaatcattcgcagcgctgcactgctgctgtgcagcgattttataaatatagctgtctcgggggtcgatggagtattagagaatggaataagatgtcataatttacaaagagtgaattgcttatttgcttctgttt

SEQ ID NO: 4888 - DNA, 272 bp, Zea mays
  Clone ID: MRT4577_104455C.1
cacccaagatcatcattaattccatttgcagtaaaaggcagcaaacctttttccatttcttccatttctaggttgaggaaacaaaccttgcaaggacaaggaccaggatcaggtatccatccctcctcaaagagtccaagtgtatacccttcccttatgtacatcaccacacaaaggagctagtacaatactagagtataccaagtcaccaccaaatattaaaaaacaaaacaaaaataaataggccaccatcctgcccagttcccccagga

SEQ ID NO: 4889 - DNA, 216 bp, Zea mays
  Clone ID: MRT4577_104456C.1
cagtggggggggtttttaggttttttctttactaccggtagcggatgcgttcctttctctgtcatattgttctcggatactacttaaccagccacgtgcccataacaattgtgtagctgaaaagtatcgtaaactattattctcgcgtcgccaaattttatcttgggggcggtcgatatcttctttattctatcgaggaggtctttcacctcatta

SEQ ID NO: 4890 - DNA, 270 bp, Zea mays
  Clone ID: MRT4577_104457C.1
gacagtgtttaaaaaaatcctctcgtctatctcacactaaaatacatatctaaggtccagctcgagctatggtcattgtcacatggactacaatgctgctttgtattggtgggatagaggttcagttgttttgtcggccttcgtgagaaggtcgttttcttcttagatgcctgagagctgtcttacttctcgtaggtcgagttttttttaactagtgtgatttgtgccataccttaacatggacctagatgtgcatgttaggaatttagg

SEQ ID NO: 4891 - DNA, 568 bp, Zea mays
  unsure (1)..(568): unsure at all n locations
  Clone ID: MRT4577_104458C.1
naaaaaaacatacttatattatgttattacaattacatcatgcaacatcctctgagctacgaaggccatttttccccgggtcgtcacagctcctgtgtacagtatcatcaccgatcatcagcaaacattgggggcgcctggataaactgatactttgtaatttgtattgtatttacaacaaaataatacgcaggataagcatctgtgtaattttactcggtnaaaaaaaaaaaaaaaaaaaaaaaaaaaaaaaaaaaaaaaaaaaaaaaaaaaaaaaaaaaaaaaaaaaaaaaaaaaaaaaaaaaaaaaaaaaaaaaaaaaaaaaaaaaaaaaaaaaaaaaaaaaaaaaaaaaaaaagggggggngnttttgggggttcaagttttattaaggggggttgggattttttatttttttaattgggggcccctaattaaattcactggcccgttttttaaaacggnggggcggggaaaaacccgggggttcccccatttaaacccttttgagaaaaacccccttttctcaattggggttttttcctaaaaggccccccccggtgcccttt

SEQ ID NO: 4892 - DNA, 642 bp, Zea mays
  unsure (1)..(642): unsure at all n locations
  Clone ID: MRT4577_104459C.1
gtttggtttgtggaatggaatgagttgatccatcatcacctcattcctcatagttagttagttagtagtaatataaggaatgaggtcatcccaccaaatttaaggaatggacccatgatgcaccactatattttggatgtagtgattcctcaaaccaaacacccctaagtttctttctttctatccctaagtggtgcagcgtatggccaggcatccgagaatatccaagaatatgtgtataaaacgtacatgttacatgtacgatagaataaagcggtggttgtagcatcagcatcatcaatttagcgtgtgcacatatgtaatcaaactagctagcatgcatgcttatcaaataattgcctgatctctcatcggtgacacaatggagcaataatcaatgtttgtgcctgatctcatcatcggtgtttgatttgatttcgcttcttcacggatcggatagatgtttgcattgcatggcgaagcaggtgttcgtggtgggtcacgactggggcgccatcatcgcgtggtacctctgcctgttccggccggaccgggtggcggcgcttgtcaacaccagcgtcgccttcatgcgccacatcttcgtncgcgccgnncgcgncgncgtcacgcccatcgactact

SEQ ID NO: 4893 - DNA, 1851 bp, Zea mays
  Clone ID: MRT4577_10445C.1
atggcccacgagttcaaagaacttgcttttgatggtcacaactatcctacctgggcgttggatatcaagatcagcttagcctcaaaaaatattctgagtgcattactccctcccaacgagagggttggaccacttcatgatgcttataagtacaacactttgtacattataaggcatcacgtccatcctgatctgaaagcagaatatgtgatggaagaagagccaaatgtattatggttatctcttaaaaacagatatgggcagcaaaaggctgtaatcttaccagaggcgaatcatgaatggacccatattcgtctgcaagactataagtctattgaaaagcatgatgagcttacgatgaaaaatcataagcaacatcgtgatggagctgctcatatgcctgaaatacatcatgctgtgaagaatgagaagaaaggggatggccccaaaaaccatcccaagaactctgataattcaaagaagcgcaaacgcaacaagcgtccagataagcaaaatacaaaggctccaaggaaagacacccccacttccaagcaagagaagtgtaagaagtgtgcatgcttcaaccatcctactaaaaagtgtcgcattcctcgtcatttagtggcactgtaccagcaatctcttaagggcaaaaatgctgaaggacagggatatgaagctcgcttcaccaccccacctaacttgaaggatggagctggttgctcaagcatggctacaatggaaccaagcacgaccaatcctccgcttctgaccgacaccgattacatggacttggacaatgccatcatcgaatatgattcgaattatgcagaagtcaatccaatggaggaagaattatgccttgtaggcagtggtaccaccaactctattcttcgggaaacaaaatatttccaaactctcacaaagaggtcaggaaatgttttgacaatcgctgggcgcgatgcaaaaatagttggctctggacgagcgactattacgctccctatgggtacacaagtcactatcgatgatgctttattgtatcccgattcaactcgtacccttctgagttttcgagatattcggaaagtgctcgtttcactgattgcatcttgggacgacaaatccatcctgtccttagatcctcgaacccaggaatctgaacttcaagttcaaaaaattatagaattgcaacactttgctaataatctgcctgatgcatttactcactataatggtgtcacaaactccttgaatcctgctgttaatgcgcccagtcgagtgaaggtactaagaaaaaccattcaaccatcttctcaaccgaagagggggagggctgctaagcaggataatgcttctactaagcgtcaaaggaaagagaggaacattcgatcctccaaatcagtaaatgaaagccaaccactagttgatggacaccaagtggatactatacatccacaaaccagcactcatgtgcataattcagatgttgctgcaaaaagaaaggtattcacctctatgatacctacacctcctagaatccatcctgttggattcaaatgggttttcacccggaaacggaatgagaacaatgagattgtgagatataaagcgagattagttgctcaagggtttacccagagaccaagaattgactacaatgagacatattctcctgttatgaatgaaataaccttccggtatttaatttcattggcagtacaaaaacgtctacttctgcagttgatggacgtcgtgatcgcatatctttatgggtcactagattcggacatgtacatgaaagttcctgatggaatactgagagcacctagagggggggtgaataggtga

SEQ ID NO: 4894 - DNA, 401 bp, Zea mays
  unsure (1)..(401): unsure at all n locations
  Clone ID: MRT4577_104460C.1
acgtaagctcggaactgggttcacgacaacaaccaagaaattatttacagcnccggggccagctaacccacaggggggtattgacgaggagaggcctacggtcgcgcgccacccgcggccgccgcgccgccggctactcggaggccgcgcgcgaacgacacctgcaaggcgccgcgagagccggtgaggccaatctgaacaggacggcgctctacgacactgacgtggtccacgggggcaagatggtgccgctcgccggctggagcaagcccatgcaggacagggacttcatcatggactccagcgacaactgccgagccaaccatgggctcataagagcagcccacaggcagcggactgagactaaagggccgcggtggcatcccctcactcgagtccct

SEQ ID NO: 4895 - DNA, 367 bp, Zea mays
  unsure (1)..(367): unsure at all n locations
  Clone ID: MRT4577_104461C.1
cagattgaatctgctacggccacaccctaaccccgggcaccgatcaaatttatacgctccaggccacaccacanggcgccactccaacctccaccagaccgcccaccgaactcccaacacgcacacccacgcccaatcacaaccccaggacgacaacagaaaacacagccaaaccaccaaccactgccgcacccaacacacacccaccacacacccgctcgaccactccagaacccaccccgacgacaacccccaaagcaagcccaagcaggccccctatgcgagctacacacaccccatacacaccttcaccaccgtcgaggaatcccagaggcattacaataacataaaacacccaaccaaaacc

SEQ ID NO: 4896 - DNA, 464 bp, Zea mays
  Clone ID: MRT4577_104462C.1
cacaccattgacgacctcagcacactcactggcatctggtgacaccactgccctattttactctggcggcgccggtaactgcgcgtgcctcctccgctgtccgggttccggatgcaaggaacggacaggccgagaacgagccccccgagcggaacacggtgacgccgcagcaccgacgagagcgccggacgatccttgagtacaactacctcatgctgggaagcacgatcgggtgcgattttatcacgctggggttccgcctggaccactcaggggacgggttcctgctaagcctgctcggcatgaaccgcaactaggagatgatggccagaggtgtccggaagtacgaacgagaggaggacagagccgtcatcctccgcaaggtcggggggctcggagtgagcatcaactgcctgcagtgggtagtgctcgcgctagccttcgtgctgaggaactacgcctac

SEQ ID NO: 4897 - DNA, 466 bp, Zea mays
  unsure (1)..(466): unsure at all n locations
  Clone ID: MRT4577_104463C.1
gtacnncctcgaggnnccggccgggaaaaaaaaaaaaaaaaaagggaggcagaggacccgctgaacgttggtattgggcatgcccatggccatgggccatgcatgaagaaacaaacgccgcgtccgagagccaccaccggcgcggcggcgccacaacaagtatggcttacgtttttcctccccgtcgaagcaaaaacaggagcgccgatgagcataacgaaatcgaagctgcacattctgccaaatgaaaatatcactacttctctcatcatgcaattgctattccgttgcgtgaaatgcagtaatttgaccatttcattcagtttgtttagccttttttcgcaaggatttaattcgtttagcaggcacatgtaaattcgctgtgatactctgaaacgtttgcgaaaagaagcgtcggcaccatttccacaaaaaaaaaaaaaaaaatttgcggccacaaataaaa

SEQ ID NO: 4898 - DNA, 278 bp, Zea mays
  unsure (1)..(278): unsure at all n locations
  Clone ID: MRT4577_104464C.1
ttttgcttccgatacatactatactctcttttggtttattactcgcangcgactcatttggtgtgaaagaaattgttttctacaaaaggaattataatatgtgggttcccttgtcatgaagtattacagtcaaccttatcaacatcatgagtatcttatatgtgtacgatcatatcactcttgctctctttgtgtactctcttgtcaatagatggtttgtaacctcaacgattattactcaaaaaaaatattttttctcaatatgtggtttcccccac

SEQ ID NO: 4899 - DNA, 662 bp, Zea mays
  Clone ID: MRT4577_104465C.1
ggccgcttttttttttttttttttcttttttttttttttttttttttttttttttttttttttttttttttttttttttttttaaaaaaaaaaggaaaaagggaaggattattaaaattccaagggggggaaagccaaaattggttgaaccacccacccccaacccccaaaggcataaaaaccggggaaaaaattttggaaaacaccaggaaaggggggaaagcccccgggcttaatttttgctcccgaaaaaaccaaaaacctaaaaaaaaaaagggccaaaagttttcgggggaaaaacaggtcttaagaaaatggttcccccaggcgatggcccccccagaaccgggaccaacccgaaaggaaaaaaggttggcttgaaccaggaggggaggaaaaaagggccccaaccccaaaaaaaaatttaaaaaaaaaccccccgaccaaaatacccctacaaaaaaaaggggccctccccccaaaaaatccaaccattccccaaattcaaaggaaaaaataagttttttaataattcccatgggggattaattcccaaccaggagaaacctttaaattaaccgaaaattggccaccggccggaaaaggttttttaaaaaacaaaaataatggggaaaaaaggaaaacccccggaataaaacaaa

SEQ ID NO: 4900 - DNA, 361 bp, Zea mays
  Clone ID: MRT4577_104466C.1
cggggctgcccatgcccttgctgacattaactcccgggcttgctgccgattgctctggcttgcgccccatcctctctaatcctgcctttgctggatctgcccgttcctcgtgcgccgaccgagggcggccgtggagcggtctactaatgcggacaggggcggagagcgtgcggactctggacgcggggttccgtcgggtctcttctcgactgctctggcgccgcagctgtctccagagctcaagacacctggcggatcgaatgaagtggtctgactggctacaaacgatccgcgcgcgcatggtagggtgtgtggatgcccgttgtcgatcaaaagcatgcatgacaaaggataataaaga

SEQ ID NO: 4901 - DNA, 1068 bp, Zea mays
  unsure (1)..(1068): unsure at all n locations
  Clone ID: MRT4577_104467C.1
tgaattttccctcttttttcgttatatttctcccttaactataatgattgtgatgaanctttattgttgtggaatttctcatctatgttataagatagctattcaccactttgaggtctgaaataaaacataatagcactcttaggctcactttgaggtctgaaataaaacataatagcactcttaggctcactttgaggtctgaaataaaacataatagcactcttacatgattaccttatagctattcaccactttgaggtctacaggtctcaggctcactttgagaggctagcagatttgcttacttcggatattttgaagccttataccaagccaccaaggagcagggttgcatcggtattactgccaatgatgatccatataattctaatgaaatgagcccaagtgaccaaagacaaaaccatgtttcaacatcgagaaaaagacttatttccctcccaacaagtgaagaagcaaaaactggaaagagacagagagagaatggtgatgatatgatcccaacatcagagaactatagacctgaagatgccctagaacatctccaagatagcaagggaactgatctaccagaatcatttacagtgaagaagttaagggagggtgacaacgatgatgtaggaaacattgtctcttcaagcaatatttttgcggataggtacacgggcgatgatgaggaagttgatgttgattagtgagcggatgctgtcggtggttgataatgatttgagctgtaggaagctatctcaacagacgacatggatgccagcttctaaaactacttttatgccttttgcattgggtaataggggctggtatatctggtagagctatttatgtgcttagacttgagttgtgatgctgtcaaacatatctatacttctttttcttttgtgtctcctggggctcgaagaggatactaatctgtgctcgcctcatgtattattcttagccagtatgagtattatttgagacttttggattggttgtgttaaaaaaagagaataattgtactgatgtatattatcatagagtaagcgcagatgt

SEQ ID NO: 4902 - DNA, 609 bp, Zea mays
  Clone ID: MRT4577_104468C.1
cgcactccccctccctccccgatcccgtctggatcgagatcggggcagcgagcctgatcccatcatcgccattgccccgcccccttcaccccgtcgtcgaccccgccgcctggacaccgcctgtcgctactcgacgccgtctccctcgtcgcctcgctttccccgactcctctccgtctgtcgtccgcggacctcgccatttgacgccacgccgctgcgccccgaggtcgtcgtcgccaccgcctcgtcctcacccccacgccgctcccgccatcgtgttccccctgcatcgggcctccccttcaacgcggaccccgagaccgctactgatgccgctgtgatcgactacgtcgacgacgaccctccttcttgtctgagcaaccagatggtggatccctggagccagatgccaccgtcgatggatgctactacgtggaggccgccgacgaccaggagtagttaggaggtcccaggcaggaggccttgcctcttcgatcgtgttgcttttgtgctagccttcttaaggcatccttgtttaacttatgtctgtactcagatattgttgcttccgctgactctcttgtgtatcgagctatgtattcgagccct

SEQ ID NO: 4903 - DNA, 1962 bp, Zea mays
  Clone ID: MRT4577_104469C.1
catgctatggtcagtgagctttaacaatgctattagaagcttttgcaactaattgaaacatgccgtttgaatacactgcatcaagctatatctgtggctttattgttacctgcacttcaagtatcatcttggaacaagatttttggcagtcatatggataacatctgatcaaatgaaattaaatttatttggtgctattcgagttttggaagattttacgtcatggtgattggaacatgacatctaattaattttggtgattccatccaaatttacttcaggtgattcgtattagaagtactggatcaattctaagtggttaatcatgataatcatgtattggcatctactctttcattagttgtattggctcgtctgtgtttgtggtctatggtgtattggtgttattgtgggccctctaatttttgagctaattgaataaccatatggctcaaggttgtggtaaggttaatgggtttctgtgttgccttgtatctatgcagccccatctaactcttgttctttgatggcataatgtttttttgggtaaatcttccaccttcctgatttgtagggagaagggattacagagatcatgagtttagactcaggcctgatagaagacactcaccccatgggaggtattcccctgaaagagatatcaggcgtcgttcatttcatgataagagaccaagttctgaagataggggtaatcactttttctgtgcacatttgtgccaataaaaatatttgccactgtccattgtatcttctaactactccctgagatttgatttgcaggcagtgatgagaaaaatggccgtgaagaacaattgaaacaaatgcatctggacatggaagcattgcttaagtacctttcatccgtaagttttagaagttcagataacgaagacaaaggaaaagatgaaaggtacttaagcagtgatgagaaaaatggccgtgaagaacaattgaaacaaatgcatctggacatggaagcattgcgtgaagataaatcaaagctggaggcgatattggagaagaagactgatgaagagcgcaaactttgtagcagagtagaagatcttgaattgcaattgaacaaagagaaagatgatttccaaaggatgacctccaaaaccaaaaagctaatcaaagcacatgggcgttatataaaagcacaggaggatttaaagaggtctcaggctcgctttgagaggctagcagatttgcttgcttcagatattttgaagccttataccaaggagcagggttccatcggtattactgccaatgacgatccatataatggtaatgaaatgagcccaagcgaccaaagacaaaaccatgtttcagcatcgagaaagagacctatttccctcccaagaagtgaagaagcaaaaactgggaagagacagagagagaatggtgatgatatgattccaacaccagagaactatagacctgaagatgctctagaacatgtccaagatagcaagggaactgatcgactagaatcatttacagtgaagaagttaagagtgggtgactacgatgatgaaggaaacattgtttcttcaagcaatatttttgcggataggtacaagggcgatgatgaggaagttgatgttgattagtgacccgatgccgtcggtcgctgataacgatttgagctgtacgaagcaatttcagcagacgacatcgatgtcagcttctaaaactacttgtatgccttttgcatcgggtaatagggcctggtatatttggtagctatttatgtgcttagactgagttgtgatgctgtcaaacatgattacatgcgatgctagaattttcttcttttctgtgtttcctgagactcgaagaggatattaatctgtattcgcctcatgtattattcttagccagtttgagtatgagatttttggactggtgttaaaaaaaaaaaaaaaaaaccacagt

SEQ ID NO: 4904 - DNA, 264 bp, Zea mays
  unsure (1)..(264): unsure at all n locations
  Clone ID: MRT4577_10446C.1
acggaanaaaatgaccggggggggcgccacctcccaaagaggggtatccgaccgtcaaaaatttttttctaagggcatggatatgaaccaagcgcgggtgtattttaagagatcagactttgactttccacaagaaccagcaaacttggcaatgcgttgctcttatatttttgaaagagattaactctgtaacgcgtgccgaactcaagccattctgtttcgaggtagtaacaaaagacaagacatactacatctcttgcaaaa

SEQ ID NO: 4905 - DNA, 629 bp, Zea mays
  Clone ID: MRT4577_104470C.1
atttcttactgtgcagcgaagcaactgaaccctcaatctgtgaagaatgcggtatcagtagctaacaatgcttgttgggctattggagaattagcaatcaagcaacaccaagcttttcatggatttcagttggcctgcattaaacatattaacatgtaaggattcgaggaacacatggtggaacccaaaatgcaaaaaagtagggaaaggaaccttcgactttgagatgaagatgcgcacggtatgaaaggcacggtctggaagaatgatgaatcagttccgaagctatggatggagaagcttcggcttagcgcaaagacggtgatggagaatgaaaccgacctaaaggggaaaagactgcttagtcctcgacagattactccttagtcaatagtaaatgtcaaggacatgaatgtaattttacccaggctgcgtcctgtgcctataaatagatgaacagtaacacaatattgttcacgctgatttgtaatcactcgcacgtcgctcttggattcttacattttgtcaagccgaagatacaaatgtaattcaatattattaatgtttgttcatgatcatataaaaaaaaaaaaaataaaaaaatgatttaaaaaaaaactcgagagggg

SEQ ID NO: 4906 - DNA, 472 bp, Zea mays
  Clone ID: MRT4577_104471C.1
cccacgcgtccgatcataaaatctgttgggggccttcgtcttccgaaggtcctcaaaaacatgactaacatgttttccaagtataatatactataacaggaaccttcggctttgagatgaaggtgcgcacggtatgaaaggcgcggtctggaagaatgatgaagcagttctgaagctatgagtggagaagcttcggcttagcgcaaagacggtgatggagaatgaaaccgacctaaaggggaaaagactgcttagtcctcgacagattactccttagtcaatagtaaatgtcaaggacatggatgtaattttacccaggctgcattctgtgcctataaatagatgaacattaacaccgtactgttcacgttgacttgtattcattcgcacgtcactcttggattcttaccttctatcaagccgaaggtacaaatgtaattcaatatcattaatatttgtatatgatcattgt

SEQ ID NO: 4907 - DNA, 256 bp, Zea mays
  unsure (1)..(256): unsure at all n locations
  Clone ID: MRT4577_104472C.1
tangactggagcgacgcgcnactgcgcnaacgctgctnaagaantgctacgangcgntgtcggnaaatggnaaggtcatcgtcgtcgagtgcgtgctgncggtgancacggaggncaacnncnaaggcgcagggcgtcttngacgtngactgatcntgntngcgcataacacggcggnaaggagcggtagagngngagttccgtgcagctcgtaaagggcncggttctcgggttcaaggcnagtnctctatgncaa

SEQ ID NO: 4908 - DNA, 520 bp, Zea mays
  Clone ID: MRT4577_104473C.1
gcacgagatggatttaaaccgacttaataccacccgatccacatgaattaacggtgaaacgaacaagcccttaaactgatttcaaaagcaggaacacagtagttttctttcttagagaatgatttacaataatataaaacatatatacggtagcatcgatgttttaaatagctaatttctgaaattgccttttacagctgtgaaaactgtgatttgaaaccttgattagcatcagtaccagtatatcagccatccgtccttattaggtttccctgtgtaatttcaggcaccatgacttctcaggctcctgtaatgacttcctgagtcctgaactaacctaaggataccgaggctgtacgtggcactggcactccagaatccagatggcaagaacttggcagtgaatccaattgattctaacatttttgttatatgatactgttagctgctctcactaggatgaatgttcaaactgtacatagcactggctctataatatgatctttttatttcctgatta

SEQ ID NO: 4909 - DNA, 302 bp, Zea mays
  Clone ID: MRT4577_104474C.1
ctcagaacagaagccatcaaaagcgaggctgcgagagcggagagagagagagagagagagagagagagagagagagagagtgagggacgcgccgacgccgagtcctctctccatcctgtgactggcgctgtttccgacaggatgtctctcacgaagacggagtacgagcgtggggtgcacaccttctctccggaggggcggctgttccaggtcgagtacgccatcgaggccatcaagttgagatacactgagatcggtgtgaagacaaaggatggtgttgttctcgccgtagagacacgcgt

SEQ ID NO: 4910 - DNA, 214 bp, Zea mays
  Clone ID: MRT4577_104475C.1
cgacccacgcgtacgtatacgatcccactcggcagcggggtgtcgcaatggacacccacgcagctctcggcgccttccgcatacacgccggcgcccggctgcacagcagggcgccgtggttggcaggcacggcgtgcagaggttggacattcgctcacttcttcgggctcacgccggggtcatggtccgcgagcgctgtctgacgggaggcagg

SEQ ID NO: 4911 - DNA, 214 bp, Zea mays
  Clone ID: MRT4577_104476C.1
gtgagatctgagatgtaaaaactacgggaaaaatacacaatagggtgaaaaagtaaggggtttacattgggaagcaaagggtgacacactgacctcctgaggagatggggtagaaagacacacgatctcggaaaccgtaaactggtaaggcataggggataagagagaaaaaaacacccgggacgccaccacgactgggggacaggccgccaaa

SEQ ID NO: 4912 - DNA, 591 bp, Zea mays
  Clone ID: MRT4577_104477C.1
agtccaataacggagtgggcggctcctctttgcgctagcggacgcattagcgtggagatctagagacaagagagggaaggagcgagttgccggctaagccttctctccctacgacgtctactcctccttacgcccgcttcttcctcgctgaatgtagacgccagagccggacaatgtccccgctccgacgcgcagccacgtatgcgtgagccgaacttccagcagccagtgcggatcagtatgcgcaactggggtaccactacctcatatgccacgatatgcacctgctgctgtccccggtgatggcactcgacgatcgtgcaaggtcttttttttttccccgcatgacctcgacgatctgtgagagcagctccgcttcgacctcctctgcgtcgtcagatgctctcacctgctcgacttcctctccaccgtttacttccgcacccgcccgcgccccgtgtacctgctcgacttcgcctgctacaatgccaagtactaccgcaactgcacacgagagaccttcatgcactgctccaagttcgccggatccttcgcgaacaagaacctcaagttccaacgaaagatcctcga

SEQ ID NO: 4913 - DNA, 382 bp, Zea mays
  Clone ID: MRT4577_104478C.1
caaaataaatctcaatcaatattttgattttttttaggaaacacttgccgttttgagggcccctttatcgagtacttttcatatgttttttaaaaaagggcccctccaacgatgggttgctgccacaacaaggcagggttcataaaaaaaaactggttgtatggcaccattttttgtttttgtaaaaaggcaacaaccaaggggttacccaccgttaggggattaagtaactgttgccgttgttgtaggtccccaacaaatttcaacacaatcatttggttaaatggaaccacttgttgcaagtaggcaacagggtttgccacatttagctgagtcaaagctggtacaatttgttgcaacaactgttgttgcaggtatttag

SEQ ID NO: 4914 - DNA, 347 bp, Zea mays
  Clone ID: MRT4577_104479C.1
cgaccaaacaaaccaaaaatgttattaataacaattataatcagtgtaaaacaacagtacgaagtataaaacaagtgttataagcttaacagcaacgcagtgcgagcgcgtcatctcttatctaaaatcgattgtctcgtacaccgtcggtctggagagatcggcctccaggagcgtagccaaggctgcattgccgacgaccgtcggcaccatgggctcggcaagctccgagcaggggctgcctagcatctcgaacggccgaggcagttcagtatggtctttacttctgagacgaggcttggcgtgtcacagttctttcgtccgctcagtgtctccattaaagtgac

SEQ ID NO: 4915 - DNA, 522 bp, Zea mays
  Clone ID: MRT4577_10447C.1
tctcacatgcaccgctacgtccctcaagatacggattttgatacatatagagagagatagatacatacttagggcaagcatgggcatacatgaccacaagcgggacatttccatccgctcacaatcccacccaacagatcaagatcttctgtcgcgccaacaagaagtactgcctgatcagccacgtagctcacattaatgttggtcgcgctcactgcccagtatcaacaccagaaatgtgacaaggacatgtggcttcatgaaccgggcaaaggacgaggaaaggatgccggcgtattggctcgtcttcaggttactcggttctgcatcaatactctctcgcgcacggctgcccggagaagcacgcgctttttcaaccggaccaataggactatccacagaatgcggacatagagcaaggacagagacatgagggcttccggtgaatccgaatgcacaaaaagaaccaactccacttcgatggcttccactccatacgatgaccaccccctgagtggacta

SEQ ID NO: 4916 - DNA, 2477 bp, Zea mays
  unsure (1)..(2477): unsure at all n locations
  Clone ID: MRT4577_104480C.1
gaggaaggaaatgagcttcttagtgctttcaaggtcgcaaacttttccagtggcgaggatgatgcaacattctggagtaggctaatacagccagatcctgcagatattattcaggaaactttggcgcctcgtgctgcacgtaataaaaagagttatgttgaagatccccagtttgacaaaaataataacaggaaaagacgtgcagttgaagcacaagaaaagccaaggaggcgttctggcagaacagtggaaacagttaattcagtaccattggttgatggagcagtagctcaagtacgagagtggtcttttggtaatattccaaagaaggatgcttctcgttttgtacgagcggtaatatacacgtctatctatctatgttaaaaattttgggaatgcaacccagattgacttaattgtggatgatgttggtggtgtactagagaaggcaccacatgaagcacaaatagagctatttgatttgttgattgatggttgtcagaaagctgttaaagagaatacagatatcaagggcacagttttggattttttcggtgtagctgtgaaggcctatgaattgctagctcgtgttgaagagcttcagttgttgtcaaagcgcattgcacgatacaaagatccaatcaagcaataccgcatccaactaccttataaaaagcctcagtggtcagcaagctgtggatggactgaaactgatgatgctagattgatggttggaattcattggtatggctacgggaattgggagaaaatacgtttggatccaaagcttggcctgacaacaaaaattgcaccagcaacacttggtgagagagagacatttttaccacgtgctccaaacttggataaccgtgctagcgctctcctgcaaaaggaatatgctaagtttagcggtaatagctcaaaagtcaaaggaaatgcccgccagacagtcaataacgacagtaatagtggagctcgatcaatgagaggccgacaaaaggatgcaccagataaagaggataataagccgaacaaagatgacattcagaagcgcaaggtaatgatggaagctgaagcaagagaagaaggtgaaatttctgaatcagaggcagagacaaagtatcgtctggacaaagaggagaagtggctcgaatggtgctctgaagttttaaatgaggaacaggaaactttgaagcgcctggacaggctgcagaatacaagtgtaaacctcccaaaggaaaaggttctttcaagaatccgcaagtatctcctgataattggggacaaaattggtgaagttgtccggcaacacagtgaatcttataggcaatcccgtaagtgtagccgcacctcccgcatgaccatgaggttatggaattatgttgccaccttttcaaacatgtctggggagcaattgcatgatctctatttgaaacttagtcaagaccaactggaaggtggagttggcccatctcatggtgccaatttcacatccattccttccagcaagggaggtaactcaaatcaacttcatcctacaagaaaccataggccaaccaggtctctccagtacaattctgagtctttgcacaataatgagagctctggaagttctgaagcctggaagcgtcgacggagagcagaccctgataatcagtttgacacccagcctttgtatcaacctccaattatgacaaatggaaataggttgcaggaatctagtagttctgcaggaattcttggttggggtccagttgaaatgagacggtatggtaatgaaaggccaaagcgtggtgttcatcctagtcattttcctactgggcatggacctttgttgtagctgaaggaattagatgactcgaacaaccttgtccactttggcataactgttcccagtgaatttcagcttccatatagttacaaatggtggaactctgtcggaattgaaattcttttttccataacaagaaggaataaaaagcaagacctgacctggatcgcagttttgaattatatgccttaaaaggtaatgccaggactctagaggcgacttatggaattgttaacagctacactgaatatccttctgacaccatcacagtaaaacgaatacatggtggcttgtcaactgccaagaggattaatcgaggaaattttgtcgattcagttttgtgatctctcaacaatgatctatagttaaatctcaatacataaattatgctttacattgtaatatattgaaatatggttccgttatgctccctccctctcgatgtgttttgtgccgtttttctaccgtgttgatgtaatagatgaaagaaatgcatgttctcattttgaggcaacaaaaagttgcagccgggagcataatagtgaaatgcgatggaattatcggatacttatcgattccatagtgntttccctgagacaatgtactgaaatgangtacggttataagaaatggtgataattagctt

SEQ ID NO: 4917 - DNA, 535 bp, Zea mays
  unsure (1)..(535): unsure at all n locations
  Clone ID: MRT4577_104481C.1
gccacacacaatctctgttctttaatgctctggcgagattcctgcttcgctgccgtttggtgctcgtgttacgtgacaggtgttgcgtatatagcataggtctctaggatcccaccaagcgcaggcctgagcttgtaagccttgctgaatggctgcaacctgtgctggagatacgaccatcccggagcgttagctggtgcacccgggccggctaaactgcttgcgttgcggacacggactagagacttaggtaggagcgaggaggttgtgtgacatacatggnaccctcaggcgatcaggaatgcaccaggcacatgacgactaggagagggtccgtgcatgtgatgcaccacgacatagctctctcgctagcgttgagaccacgcgagagcagcaagtaataactcttgtacagactcaacaagtaagcacgatgatctacaaccatgttgcactatcgacaggtatggcgacaactatcggttaacgcgcacaaacgacatagtgtcaagtgacatcctgcagacgtggccga

SEQ ID NO: 4918 - DNA, 278 bp, Zea mays
  Clone ID: MRT4577_104482C.1
cgcagcatcatcagaatcataggtttccgacctatagcgtgggtcgggaaatccgaccatgccgccaccgttgacttgtgggcggcggcgttggtgctgtcagaggaagaaggtgaacctagggccgtttgatccactggtggcgataggattagatctgggggtgtgtcatcgtttgccattgatgctaatatggtcggccacgattatatcctggcataccgattcggtatgtgggtactggccatccggtggggatcggaggaacgtagttcgat

SEQ ID NO: 4919 - DNA, 668 bp, Zea mays
  unsure (1)..(668): unsure at all n locations
  Clone ID: MRT4577_104483C.1
aaaaanatattaacnnatgtttgnnncatgagtgtnnatttagggcattacaacnaagtcagtannacttgtctattttgnngaattacaatcaagggataccaatttnnncctcgtgacccggtagtgtttctgtnntttctnntcctttnngtatgtaatatgtgggtttggtgacgaaggtcgagnntagttaaacttnngcaatcccttgcaactaatannggtgccccnnattagtgnntctgtcccaaccttcccnaattgtagnncctgtagaaaatggaattgnnnaggaagaagnnttatatnntcttctttaaactannngtgtgtttttcattcnnttcatccattgtannatttatgaatctnngaatttgnnttgggcatttanntgaaanntgtagtnnatcaatnntgggacccaaattgtnnaatgttcttacnnccctatnngtttctnngaagcagnnttggagaaaggcttttatnntcaaannatgtttgggcacctannaaaattgnnntgaagcacaaacacatagnnactccatttaccaccattcagnnatatttaagtaanntgaaatgttaatttaaagttttgtatttggttattttgccaaagaattttgtgaagataggaaggtcgagataatatatgt

SEQ ID NO: 4920 - DNA, 105 bp, Zea mays
  Clone ID: MRT4577_104484C.1
atccgcgtgcacccaactatttacccttcttatggtgctagctaattctgattctcttgctcacgctacacatcgtcttaatgtttatatgcttttatagatttc

SEQ ID NO: 4921 - DNA, 342 bp, Zea mays
  Clone ID: MRT4577_104485C.1
gaagacgggggggaacaggaccggccacaacgaacgcgtttcaacgttgaacacccagaacgacaaggcggggggcgggggaaaaaacaagaacgacgacgcgccccaccccaaggccgacacggagcccgccgagacgcgcaagccacacgagggcgggagacacaggacaccccgaagagggacaggagaacgggaccgacaactacccacagcaagaggacaacgacatgcccgacagcaaacaaggccgaatacaaccagctgcggcacaatcgaggaggagcacggggatgccgcggcccacgccgcaacaaaaaaaatgacacaattgcagcccaa

SEQ ID NO: 4922 - DNA, 2846 bp, Zea mays
  Clone ID: MRT4577_104486C.1
ggcagcgcagaggagagcaaccactcgcccgccgctcgcccaccacgatctgccccccctccgcacgccgcacggggcgttgcagacccacccaaaggcaagccgcgaaccggagcacgccggccggtcgcgggcgtcgtcgtcgccgcctcccgcgccgccgccctgctgctcgctcccgcattggatcgcgctgcggttggcgactcggtgtggtctgctgctggtcactgcgcggctgcgcctagccggcccacgcggagacggcatcaagtttctaacaatttgaagtatcccgaaatgggcgcaagagataacggggaggggagagatgagaagagggggactggatcagattatgtagacgcggattctcccctcgcatccctaagcgacagtagggccccaccgtgtccgtcgaacggtttggcaaaagttagtgctgggagaggagtttccatggagaatacaagatacgcgcaccaaagagtagtatggaagcgggaacaaaggtgatggatgatgacgagcctgtaaaacctaaaatctcttctactgccacccaaatgagagcacaagaaggcctatttgtgtggggtcttcagcaatctctacagtaaaaatgcaacacttccttgtactgtacattcccacgatcctatgtatcttagctcttttgtagtatatagcagcaaaagagggtgtcggcaaagatacagatacagtattgagttaaaattctataatgatatgacattctattcaagaaagaaaaaaaaaaaaaaaaaaaagtagatcaaggcatgaggaattagtgctgaaaatcgacaagttggaacaggaacttcgtgaagttgctgctttgaagtttccctgtcagtagcaatgatgcttcgaggctgacattctggctgtccaacacagttgtcctcagggagataattgtacaaacttttggcatctcacatcaatttactccatccatgacgaatatgagcatgaatggtggtgccaaaaaacttgatgggaaatctatgacaatgctgtggagaaacaactacaatggcacgcaagccaaatttgctgcgaggctgatgccagatgattggcaggaaacaagtacacttttggctgcattagagaagattgagtcttggatattttctcgcattgttgagacagtatggtggcaggcactaactcctcacatgcaaaaacgggcagaaggatcatcaactccaaaggctggtagagtgctaggtcctgctttgggtgatcagcagcagggaaccttttctgttaacctgtggaaggctgcgtttcatgacgcattcagcagaatgtgccccctcagtgctggcggacatgagtgtggctgtttaccagtattagcaaaactggtgatggagcagtgtgtagcccgtttggatgttgccatgttcaatgccatccttcgtgaatcagcaagtgagataccaacagaccctatatctgacccaattgttgacccaaaagtcctaccaattccagctggtgatctaagctttgggtcaggcgcgcagctgaagaactctattggaaactggtccagatggctgacagataagcttggcatagatcacgatgattctgaggacataggagatgttgaagacgaaagaagagccgcagctgaaacgaaatcgtttcaacttctcaatgagctaagtgatctcctgatgctcccaaaggacatgctccttgaaaaatctatcaggaaagaggtttgtccctcaattggccttcagttagtgactaggatcctgtgcaacttcaccccagatgagttttgccctgatccggttccaagcacggtcttagaagagctgaattccgagagcttgctggagcgtcacgccaacaaagacgcgaccagtgtgtttccgtgcaccgctgcccctatagtgtaccacacaccttcaacgttggacgcggcagagagagcggcagacataggaggtggcgcgaagctggacaggaaagcctcaatggtgcagaggagagggtacaccagtgacgacgaccttgacgacctggattctcccctcgcatccctaatcgacaggagcgccccaccttctccgtcaaacggtttcgcacacttcagtgctcggagaggagtttccatggagaatacaagatacacgctcctaagagaagtatgggggctggagcaacggtgatggatgatgatgagcctgtaaaacctaaaatctcttctacagccacccaaatgagagcacaagaaggcctatttgtgtggggtcttcagcaatctctacagtaaaaaatgcaacacttccttgtactgtacattcccacgatcctatgtatcttagctcttttgtagtatatagcagcaaaagagggtgtcggcaaagatacagatacagtattgagttaaaattctataatgatatgacattctcttcacctaccaaaaaaaaaaaaaaaaaagcggtatgggggctggagcaacggtgatggatgatgatgagcctgtaaaacctaaaatctcttctacagccacccaaatgagagcacaagaaggcctatttgcgtgggtcttcagcaatctctacagtaaaaatgtaaatgtctgtcttagactgtacattctgactgacaccaatgaagctgggaacaccctgttctagccttttctttttttaaaagaaatatctatgctactcctgatcctatgtatcttagctcttttgtagtatatagcagcaaaagagggtgtcggcttaggatacagtatacagtattgagttaaaattctataaccatatcacattctcttc

SEQ ID NO: 4923 - DNA, 1032 bp, Zea mays
  Clone ID: MRT4577_104487C.1
ctcaattggccttcagttagtgattaggatcctgtgcaacttcaccccagatgagttttgccctgatccggttccaagcacggtcttagaagagctgaattccgaggtttgttccactcgttctctactccagccttgcacactacatcttgctgacaatgtcactcaaatgcactgatatacatatgctatgcagagcttgctggagcgtcacaccaacaaagacgcgaccagtgtgtttccgtgcaccgctgcccctatagtgtaccacacaccttcaacgttggacgcggcagagagagcggcagacataggaggtggcgcgaagctggacaggaaagcctcaatggtgcagaggagagggtacaccagtgacgacgaccttgacgacctggattctcccctcgcatccctaatcgacaggagcgccccaccttctccgtcgaacggtttcgcacacttcagtgctcggagaggagtttccatggagaatacaagatacacgctcctaagagaagtatgggggctggagcaacggtgatggatgatgatgagcctgtaaaacctaaaatctcttctacagccacccaaatgagagcacaagaaggcctatttgtgtggggtcttcagcaatctctacagtaaaaaatgcaacacttccttgtactgtacattcccacgatcctatgtatcttagctcttttgtagtatatagcagcaaaagagggtgtcggcaaagatacagatacaaaagtatgggggctgaagcaacggtgatgaataatgatgagcctgtaaaacctaaaatctcttctacagccacccaaatgagagcccaagaaggcctatttgtgtggggtcttcagcaatctctacagtaaaaaatgcaacacttccttgtactgtacattcccacgatcctatgtatcttagctcttttgtagtatatagcagcaaaagagggtgtcggcaaagatacagatgcagtactgagctaaattctattctataatgactccgacattctcttcc

SEQ ID NO: 4924 - DNA, 409 bp, Zea mays
  Clone ID: MRT4577_104488C.1
tttattctcacgggccagcactaaaagcaggggggaaggaaaagaaccaaagggggggggaagaagctagacaaccagagaactaagccaccaccaggcataggccgaatgaggaaacgaggagacgaaagccgcgcatatggaacggataaggagcatactctgagggaaccagaagacccctacaacaaacagatggctgctgaacacacaaaaaatcagaacgcagcggacacaccaccttacagcgacaaggactcaaatatagcgtccctaggaacttcggcgaaaaaaactggtggccaggagcaccaccatgcaaaaacccagacaccaacacaaggtgacaaacctaaactcgagccaaaaagggaccatacaagaaaagactgaaagggaaaccgcaacg

SEQ ID NO: 4925 - DNA, 764 bp, Zea mays
  unsure (1)..(764): unsure at all n locations
  Clone ID: MRT4577_104489C.1
ccccgcgtccgcttgttcttgttgcagagtgcagtagcaatgatgcttcgaggctgacattctggnctgtccaacacagttgtcctcagggagataattgtacaaacttttggcatctcacatcaatttactccatccatgacgaatatgagcatgaatggtagtgccaaaaaacttgatgggaaatctatgacaatgctgtggagaaacaactacaatggcacgcaagccaaatttgctgcgaggctgatgccagatgattggcaggaaacaagtacacttttggctgcattagagaagattgagtcttggatattttctcgcattgttgagacagtatggtggcaggtaaatgtctgtcttagacaatacattctgactgacacttcaatgaagctgggaacaccctgtcctagcctggtgtttttctttttttaaaagaaagtcaatgtctcttatggcctacttagaagggcagacctgatgtagtggtgagagctgtctcactgagtcacaaggtcatgcgtttcaaagcggcctcttcacatttgcgggggaggcttgcctcagtttgatccctttctcagactctgggagtctccggcacaggatctgtcttgcggtcttatggctacttgttgtctgaatatgttctgattcttcatgttgtcagttttcttatggatgtttctcttacaggcactaactcctcacatgcaaaaacgggcagaatgatcatcaactccaaaggctggtagagtgct

SEQ ID NO: 4926 - DNA, 1964 bp, Zea mays
  unsure (1)..(1964): unsure at all n locations
  Clone ID: MRT4577_10448C.1
ccggccggggaacaccacacaacacaataatacagcaaaggagctagcagaggtgcaggattaataagctaagctagataaggctagctaccgaggagaaattaagcaaagcataggcacagccatggctacctcctctggttcttgccttattagcctgttggtggtggtggcggcgctgtcggcctcaacggcgtcggcacagctgtcgtcgacgttctacgacacgtcgtgccccagcgcgatgtccaccatcagcagcggcgtgaactccgccgtggcgcagcaggctcgcgtgggggcgtcgctgctccggctccacttccacgactgcttcgtccaaggctgcgacgcgtccattctgctcaacgacacgtccggggagcagacccagccgccgaacctaactctgaacccgagggccttcgacgtcgtcaacagcatcaaggcgcaagtggaggcggcgtgcccgggcgtcgtctcctgcgccgacatcggccgggagtacgtcgcccgcgcggccgggaggcacaccacacaacacaacacaataatacagcaaaggaggctagcagaagtgcaggattaataagctaagctagtagaaattaagcaaagcataggcacagccatggctacctcctctggttcttgccttattattagcctgttggtggtggtggtggcggcggcgctgtcggcctcaacggcgtcggcacagctgtcgtcgacgttctacgacacgtcgtgccccagcgcgatgtccaccatcagcagcggcgtgaactccgccgtggcgcagcaggctcgtgtgggggcgtcgctgctccggctccacttccacgactgcttcgtccaaggctgcgacgcgtccattctgctgaacgacacgtccggggagcagacccagccgccgaacctaactctgaacccgagggccttcgacgtcgtcaacagcatcaaggcgcaggtggaggcggcgtgcccgggcgtcgtctcctgcgccgacatcctcgccgtcgccgcccgcgacggagttgtcgcgctcggcgggccttcgtggaccgtgcttctgggcagaagggactcgaccggttcgttccctagccagacaagcgacctcccacctccgacgtcgagcctccaagcactgttagccgcgtacagcaagaagaacctcgacgcgaccgacatggtcgctctctcaggcgctcacacaatcgggcaggcccagtgctcgagcttcaacggccacatctacaacgacacgaacatcaacgcggccttcgcgacgtcgctcaaggccaactgcccccatgtccggcggcagcagcctggcgccgctggacacatgaccccgaccgtgttcgacgacgactactaacatcccaataagcagtggaagtaggcatgagatggagaaaanaggatcttaaataaaaaggatcccatatttaaatttaggaaaaagagcgtttggttggtttttattttattaggttactatccatatacgctttttggggtctaaagatgagagcaaatccataaaaaaaggagtcggcaaatggagtgctaatgaggtggattctttccaattatatacacaaacaaagttggaattagaaaatggaaggggtgcggtttaaccccctaaaagtaactaattagatgaaattcattctctaacaataagcgaatacggtttatgtatggattccggtaaaataccgggactcgatttcataagagtcgaataggaagttaagatgagggtggtatcatcataaaaatggagcagtatcctaaattatactaatccacgtatgatatgtatgcctttccttatcaaccggaagtagtgcaaaaaaaaaaaaaaaaaaaaaaaaaaaaaagtactctggaaaaaaaaaaaaaaaaaaaaaaaaaaaaaagtactctgcgttgttacccctgcttaaaga

SEQ ID NO: 4927 - DNA, 475 bp, Zea mays
  Clone ID: MRT4577_104490C.1
accaggtcttccgcgtgcgcgcgcgcgctagctaagcctccgcaccgccggccggctctggcatggagaagaagcgggtggtcatcgtcggggccggcgtgagcggcctggcggcgtgcaagcacctcctggagctggggttccggccgaccgtgttcgaggcggacacggtgctgggcggcgtgtgggcgcgcgcgccggcctgcaccgagctgcagacgccgcggcccttgtaccagtacgcggacttcccgtggccggagagcgtgacggagacgttcccgagccaccgccaggtgtcggcgtacctggacgcgtacgcgcgccgcttcggcgtgctcggctgcgtccgcttcggccgccgtgtggtcggcatggagtaccgcggcgtcggcgagcgggacgtggccgcgtgggagggagtggggccggaacggccaggccttcggcggcgccggcgccggcgagtggtctg

SEQ ID NO: 4928 - DNA, 363 bp, Zea mays
  Clone ID: MRT4577_104491C.1
ggggggcaaagcaagaataaaaaacttttttttattcaatttgggaaaagggccccttatcaaaggggaaaaacaatttaaatgccctataaagcaaaaaacttccttgtttttcaaagtaaaagagttaaaaatttaaaaaagttttccccaaacctcgcttttttccagaaaaattaaccaaaaaacaaaaaggatccaccttaaaaaatactgcaactaaaaattgaacccacaaagtattgatgttttgggaaccgcaaacaaaaacccattaataaaaccccttccaccggacccaaatcaaaaaatggattccaccgtaaaaattggggggaaaaacaaccccaacccgaaaaaccc

SEQ ID NO: 4929 - DNA, 445 bp, Zea mays
  Clone ID: MRT4577_104492C.1
aaaaaaaaaaaaaaaaaaaaaaaaaaaaattaaaaaaaaaaaaaaaaaaaaaaatggaggggttccttactaacgaaacacatgcatgcgacttcaataaatcttctatagtgttacctaaacttaattcactgtccctagctttacaacttcaacactggtaaaactcctactttacccaacctaatctccttgcactacatcctcatttcccttgctggctgtatagcaatgacgcctagacctttcgccctttccaacagttgctcatcctcaatgtcaaatggtactcgccctgtatctgtgcattaacattcggcgctgtcgttgtttcgctctatttgaccgttacatttgccatttccatttctcttgctcctttttctttctttcttttcttttttctcactttctcctatctttttcttttcatgctttaaatttt

SEQ ID NO: 4930 - DNA, 289 bp, Zea mays
  Clone ID: MRT4577_104493C.1
ggccggggtacgaacaactgaagggcgaaggctggctgtctgtttcttctgcaggctgttcacacttcactgctgtacatctgcagaacttgcacaggcacatcgggcaagcagatcaaacatcgccggcctctgctagcttgcttcacaccttcgcttcttccagcgaccccctccccttgctcccgctgcggacctcatatccgtgacatcctcgcctagctacctgccctctaccacctcccccccatccccaatcacccgcgaggaaaccatgcgcatctccccc

SEQ ID NO: 4931 - DNA, 178 bp, Zea mays
  Clone ID: MRT4577_104494C.1
cggatcccgagctccgacggccgcagcatcatgcgcggccccccatcgcgtgtcaccgagatggggctgcgtaatcaggggacggttggctagcccaggttcatgctcgtcatcgtcagggatggtggaattggcaggacggcatttgtgatcatggatctcactgtagagtttgaga

SEQ ID NO: 4932 - DNA, 178 bp, Zea mays
  Clone ID: MRT4577_104495C.1
acgtgaaatttctttaaaaaaagggagggggtgggaacaaacacagtttagcaaagatagagggagcgccagattactccgttggatgaaataggattaggtgaccgggaaatacaacagtgttgccccttgtgtcaagttacactaagcacgagaaaacaccagtggaggttccggc

SEQ ID NO: 4933 - DNA, 634 bp, Zea mays
  Clone ID: MRT4577_104496C.1
ggccctaggggccttttttttttttttttttctgaaaaaggaatacgggaaagcgtctacttgtgagaccctcttcaagattgtatatgggtcacaattgcactatgacacatacaacctctactatcctattaacaatgatcaccgaaatgaaaccaccagcacactaatacttcttcttctgcaataaaaaactattgaatctgaaactagtacgaatggtcatatatatcttgcgctatggcaacatactatatacattcccttatcccccatgaactctttatattcatggctgatctacttcacaagcatcaacagattgctgaactggaatatctgatgatgcatctttatctccattgctaacttcctcctgtgcctagacctctactctagctgtttcttaccattgctcttacaaactacttactttgaggaaccgcattatactggatccctgttattggagccactgacccttgcatcagagttggctttctgaatgccctctttcttcccagtttcctaactcttctaccaccaaagatttattgaccttggcttcagattacaaatgggtgacacatgaaaaacagaaagagctatcttgtcacacttttttggatgctct

SEQ ID NO: 4934 - DNA, 159 bp, Zea mays
  Clone ID: MRT4577_104497C.1
gacgtccgagtgggcgccaacaagttctccggagcgacagtccctcgcgcacgccggccgcacggcacgcgacgacaacggactacacagcgcagcccaccgaccggcgcgcgctcttcgcagcccgtgggaggtccaagtcagtgtgtctcttctacc

SEQ ID NO: 4935 - DNA, 746 bp, Zea mays
  unsure (1)..(746): unsure at all n locations
  Clone ID: MRT4577_104498C.1
gcatttttcatttgatttatcatgttttggcaatagggatacttgnttcttgaagtctgttacatgtttgaaccatancaattggcggacgtgtgaaaactgcnnttgatgaataatgaagaaagattgggtgaaatagaaaaggttaagaaaagaagagaagaaagagctattgaaaaggcacaacatgaagaggaaatgacattgctagctagagaaagagcacgtgccgagtttcaagactgggagaagaaagaggaagaggtctgagatcaggttgcgggaggggcgtacaaagcctattgatgttctcctaaagaatcttaatttctcagatgaatttgacattgaattaaatgagccctatctggtgttcaagctgttgtatattctgacaccatcgcacagtacatcaaatgcattttataacttagcagttcctgaaatatgtgtattttgcaataaactggaggatgagatgcacgaggatgaagatgataaacgatattcacctgagcctatacctcaacagacagataaccaatttgaagaggaagatggatccttttctccacagctaatgcatggcaacgaagatgaagatgcaattgatcctgaagaagacaaagctgagctggtagagttctatgtttctattttctaataatattagtttagaaacatgattggaagttcagaactgtaatagttattcgttcaagtgcagttaactgagtagtttaatt

SEQ ID NO: 4936 - DNA, 314 bp, Zea mays
  Clone ID: MRT4577_104499C.1
ggaaaaatgggtaaaacttattaaaaaggggggggggcaaaatagggaaaagggaaaaacacagttttttaaccacaaggaaagacagattcagggataaagggtttaaaatttaaagttttaagaaatttaagtttcccagggggaaccattttggggcaatttttccttggggaaaagaagttcctggggggtctaaggagcaaactaaaaggtgggcccctaaaaaaaagaattgacggggaaagccttttggcaaaacccaagaaaaggcattggggcatggaaaaaaaaaacctggggggtgggggacg

SEQ ID NO: 4937 - DNA, 366 bp, Zea mays
  unsure (1)..(366): unsure at all n locations
  Clone ID: MRT4577_10449C.1
gattttgatgantttattgatgnggagaagnagtatggtgatggtgtgattgaagttttgtttttttttttgattnnnngagaaaatgaaggggggggggtgggtgttaagntnattatgaaagaaggggtgaagaagtggaagggggtttatttttttgaggaaggatngannattagntgggtgnnttgtggaagaaagntnanatggtnttannntggnatgaaattttagtatgggnnnggaatttatttnggaaaggaggtatttgttntggagatggatgggtaattngatagagtagatgaggtnatttatgtggagagnnatgtaagtaagnttttaattaagttttanggagaggtg

SEQ ID NO: 4938 - DNA, 327 bp, Zea mays
  Clone ID: MRT4577_1044C.1
gccctcacccacggtacggcttctcgatccaaggagcccggtcgacatccccagtggaaagaccttgacggcctcaccagtgctgtacatacaattactgtcagccgttgattactcctgcggattattgtcacaggccttgtgcgaatctgctgaacttgaacggcatggactctctcttggatgacaacgaaaacctgaaggcctcatatacatgactgactgcactcccataatggactgcgcttcatggcttactgcagacgaaccgtgcgacttcaacatatgtaggttcagaggagatcaacaaaacacgctaaaaccatg

SEQ ID NO: 4939 - DNA, 339 bp, Zea mays
  Clone ID: MRT4577_104500C.1
atggagaataggtcgcagggtgggcccggtgcaataacgaacggtggcaatggaccggcgtactcgaacttcctcgactccatggaggacgtcgtctgggatcaccgggcacagcatatgcccatgaccactgcgaggcttcggcgaggagggcttccggcgcagcgcgagcgcggtccgatgagtgcgaccctggcgaggctccgtgcgaggcgtgcttccggcgcgacacgagtgcaaccccagcgttggcacaccgttgctgaccttccactcttgtcttcctacgctgccttctcaacgaggaacaagagtgcctcggccagcgccagatcatag

SEQ ID NO: 4940 - DNA, 152 bp, Zea mays
  Clone ID: MRT4577_104501C.1
ccgggcagacacagtgtcactgcatgacactctatcctgtttcgcctatttttcatcttcacacacagctcttcctctttcgggtggagaatctaacatgagcgcggaggtttcttcaaaacgagcacctttcgtgaggccattcacttctc

SEQ ID NO: 4941 - DNA, 323 bp, Zea mays
  Clone ID: MRT4577_104502C.1
gagcccaaaatttctcgccccccgggatggtttaagatttaattctggttcccaataggaagggggtggtttaacaaccccgttttctttatttttgtcggcaaatggggattaatgggggtgcccctgcttaatagggggaaggggggcttttagggtttaaacatgggagcccgggacgggaaaaccttttccggcgattttaccgggggaaaacccccctttcaatttgttggcaaaaattggcggaacaccaggattcttaccctttaaactggttttgttttttcaaaaaaggtttggaccattaaccttttttcaaa

SEQ ID NO: 4942 - DNA, 769 bp, Zea mays
  Clone ID: MRT4577_104503C.1
aattcggcacgaggccgcagcttccaattcgggacgcggccccagtcatcactctgcagtcagtctgcagttctgcacccctccctccttccctccctgcctgcctgttggccgcggctcgcgggaaccaacaccccatcgccacgccgatcccccaccgaccagccaagccgctacaagtcagccgtgccccgcacgcgtgcacctgattggtgcttggccggccggctgacccacccgaggcgggaggaggaaggaaggaccggagaagctgcttccttgccgtcgcccagggggacagggtaagcaaaggagcgggatggagagctacctggaggagcggttcggcggtgtgcaggccaagaactcctccgaggaggcgctccgccgctggcgccgcctctgcagcgtcgtcaagaaccccaagcgccgcttccgcttcacggccaacctcgagaagcgcggcgaggccgaggccatcaagcacgccaaccacgagaagctgcgtgtcgctgtgctcgtctcaaaggctgcactgcagtttctacatggcctcacccttcgaagcgagtacgtcgtccctgaggaagtcaaggctgcagggtttcagatctgtgccgacgagctggggtctattgttgagggccatgatagtaagaagctcatcacccatggtggagttgatggaattgcggaaaaacttgcaacttcgaagacggatgggctaagcacagccgatgatagcattaagcgcaggccagacatatat

SEQ ID NO: 4943 - DNA, 189 bp, Zea mays
  Clone ID: MRT4577_104504C.1
gacacgtcctttggttcgccgcacttacaactcccctgactcttacacggcgagccggggaatgcatggcctgctactggtcgtctgccgaccccgctggtggcttgatcaaacatggctagacgggcgagcaggcaagggagccggcaaatcgcgtgagcctggagacataggacccgttcctgggct

SEQ ID NO: 4944 - DNA, 163 bp, Zea mays
  Clone ID: MRT4577_104505C.1
ttattattttttttagtttttactaccaggttgggttattgtcaggacagaaaaggaccgaccaagaacggaaaaggtgtggaacacaagcagagcacgccacgcacggtagcgaacccacatgcattacacacggacacacctctctctaaagacccacaga

SEQ ID NO: 4945 - DNA, 1520 bp, Zea mays
  Clone ID: MRT4577_104506C.1
attgggacctcgaggccggccctgccgtgcccggttgtgtaaatagaagataggcgacgaacacgaagcaagcaaggcagccgaatcccaactcctgtgtgtgcctgccaacgcctcgtcgcccgccgccgccgctgcttcgcccctctccgccagccgctcccgctcggagcacgccgccgccggcgtgggcgcgcaccgacggccgtcgtgtcgcatggatatggcccccgcggccgtctcctccaacccgcgctcggtcgaggaaatcttcaaagacttctccggccggcgcgcggggctcgtccgcgccctcacctccgatgtggacgatttctgcagcttctgcgacccagataaggagaacttgtgtctctacggccttcccaacggtagctgggaggtctcgccgccggcggacgaggttcctccggagttgcccgagccggcgctcggcatcaactttgcgcgcgacggcatgcagcgccgcgactggctctcactcgtcgcggtccactctgactcgtggctcatctcagtcgccttcttctacggcgcccgcctcaacgccaacgaccggaagcgcttattcagcatgatcagtgatcttccttctgtctttgaagcatttgcggacaggaaacacgtcagggataggtctggcgttgatagcagcggcaagtccaggcactcatcaaagagaggaaacgatggccatgcgaagaactccagggcagcagctcctgctgccaaagagtacgacgacgacgatgacgaggaggacgaggaacacacggaaaccttttgtggaagctgcggcggcctctacaacgcgaacgagttctggatcggctgcgacatctgcgagcggtggttccacggcaagtgcgtgcggatcacccctgccaaagcggaccacataaagcactacaagtgcccggactgcagctcgaagaaaataaggcagtaggtcccagtgtgcaccgccggccatcgctgacctgtctgatcccaaaccatactccattgcttgcctgccttgccccaaggtcgcagctagcagatgcgcattccttcatttgtggggggttgttgtgtgatggatagcctggtaggaagaggcaaaggactgatatataatgactcgtttattgttcatctttttgcctgcttcgtcggtcgtcgcagtcgttgtggctgcatgaactgatgagtggtttgttcgtgctagttgtaggctgtttcactgatttgcgtgcgtatgtggactggtcctgtcaaatttgtaggcctgaaaccgtacttccatttacgtggctacgcgagctgatttgccggtctgcctctcccatctgtatcctggacatggcagtatggtcacgaagtccagatggcgatatgcctgactgccggtaacggagggcagctgtggtgtagtatatctcagtcacatgggaggcgttagataatttttgaccaaatgttataaaataagacactattaaatagtttttttatat

SEQ ID NO: 4946 - DNA, 1273 bp, Zea mays
  Clone ID: MRT4577_104507C.1
aaaagattggcgacgaagcaaggaacgcaccccgaatcccaactcctgtgtccgccatcgcctcgtggcggtcgctcctgctcctgctgctgctgctgctcccccagccgctcccgcccggagcacgccgccggcgccgacgccggcgcgtcgcatggatatggcccccgcgtctgtctacttcaatccgcgctcggtcgaggaaatcttcaaggacttctccggccgccgcgcggggctcgtccgcgccctcacctccgatgtggacgatttctgcagcttgtgcgacccagataaggagaatttgtgtctctacggccttcccaacgggagctgggaggtgtcgccgccggcggaggaggttcctccggagttgcccgagccggcgctcggcatcaactttgcgcgcgacggcatgcagcgccgcgactggctcacactcgtcgccgtccactctgactcgtggctcatctccgtcgcattcttctacggtgcccgcctcaacggcaacgaccggaagcgcttgttcagcatgatgagtgatcttccttccgtcttagaagcattcgcggacaggaaacacggcagagataggtctggggttgatagcagcggcaagtccagacactcatcaaagagaggaaaagatggccatgccaagagtttcagggcagcagctcctgccgccaaggagtatgacgaagacgatgacgaggaagacgaggaggagcacacggagaccttttgcggaagctgcggcggcctttacaacgcgagcgagttctggatcggctgcgacatctgcgagcggtggttccacggcaagtgcgtgcggatcacccctgcgaaagcggatcacataaagcactacaagtgcccggactgcagctcgaagaagatgaggcagtaggtgtaggtccccgcgtgatctgactgacccgtgtgatctgatccaaaaccataactccctccgtttgtttgtctcaaggtcgcagctagcagatgtgaattccttcatttgtggggcttgtttatgtggtggtaggaagaggcaaaggactgatagatagagatacatgaccgttttcttttatatatattcgttgttcaccgttttgcctggttcgtcgcagtcctatcgctgtgtgaaggcatgaactgatgagtgggttgttctcaatagttgataaagaatttcatcggtttcatgtcatcaaaaaagcatgtccgactccttataaaatccaaacgaaactataatgaatctctcccc

SEQ ID NO: 4947 - DNA, 789 bp, Zea mays
  Clone ID: MRT4577_104508C.1
gcacgagtgataagtgagcctgaccctgatgagtaaatcttcacctagttcccaccccggccgggatcaaacaaaagcgttgttctctcttcctggtccaagtgatcttgccaagttacgagcagcaagcagagatcagatcatccatcggcaatgtcgaacatcgggcagtccttccaggccggcaaggcggaggcccagggcgagtaccaggcggagcacgcggcgcagtgcgtcaaggacaccgccggagccgcggccgacagcgcgcagctgcagcagcaccgcgccaccggcaccgttgagcaggtggcgcagacgggccagggcgtggcggcaggcgtcaaggacacggtggcgggcgcggcggttggcgtcacgaacacggtggcgggcgtggcggcgggcgtcacgaacacggtgacgggcgcggtggcgggcgtcacgaacacggtgaccggcgcggcggcgggtgtcaaggacaccgtgaccggcggccactgatcgacgacgcacccaagaatgcttcatgcatggccaagtgttgagggtttgaggccaaagatggcttgaatttccgtccttttttgctttattttttgacattattgttttaacatgtttcattcacccgtctctgattgggattgtgatcacgaccgcctgcaataaaaaaaggccatctttactatgatccaaaaaaaaaaaaaaaaaaggggccgccatcatcaatactacaccatgtgtaattctttgcgttcgagaccaaacgcttcgtatagggcatct

SEQ ID NO: 4948 - DNA, 278 bp, Zea mays
  Clone ID: MRT4577_104509C.1
gtccgcccatgcggcccagaaattagtatcgcaattttttctaccgacaagtatacatttggagcgcctgggtcgtgctctacatgatgctgtccgagaccctacccttttcctgcgccaccgttggggataactttcaggccttgctcccgtataacctgcgcttcctttgccacccctttgctcgcctttttcaccttgtcaacgaccttcttcgccccattctttgcatggacttttggcgcaagctctacgccgagcaagtcctgatgcaccca

SEQ ID NO: 4949 - DNA, 1570 bp, Zea mays
  Clone ID: MRT4577_10450C.1
cacgcgtccgggatctagcacaggtgcaggattaataagctaagctagataaggctagctaccgaggagaaattaagcaaagcataggcacagccatggctacctcctctggttcttgccttattagcctgttggtggtggtggtggcggcggcgctgtcggcctcaacggcgtcggcacagctgtcgtcgacgttctacgacacgtcgtgccccagcgcgatgtccaccatcagcagcggcgtgaactccgccgtggcgcagcaggctcgtgtgggggcgtcgctgctccggctccacttccacgactgcttcgtccaagcaagtctagctgtctcagatgcatctatctatctacttatatataagcatgatttcctttctagctagctagcatcgtcgtgcattttaatttgaagataaaagattagcacgtcgtatatgcatgcgattaattaaccaggaggcatcatggtgaaatttctggtggtccaccagggctgcgacgcgtccattctgctgaacgacacgtccggggagcagacccagccgccgaacctaactctgaacccgagggccttcgacgtcgtcaacagcatcaaggcgcaggtggaggcggcgtgcccgggcgtcgtctcctgcgccgacatcctcgccgtcgccgcccgcgacggagttgtcgcgctcggcgggccttcgtggaccgtgcttctgggcagaagggactcgaccggttcgttccctagccagacaagcgacctcccacctccgacgtcgagcctccaagcactgttagccgcgtacagcaagaagaacctcgacgcgaccgacatggtcgctctctcaggcgctcacacaatcgggcaggcccagtgctcgagcttcaacggccacatctacaacgacacgaacatcaacgcggccttcgcgacgtcgctcaaggccaactgccccatgtccggcggcagcagcctggcgccgctggacaccatgaccccgaccgtgttcgacaacgactactacaagaacctgctgtcgcagaaggggctgctgcactcggaccaggagctgttcaacaacggcagcaccgacagcacggtcagcaactttgcgtccagctcggccgccttcaccagcgccttcacggcggccatggtgaagatggggaacctcggcccgctcaccgggaccagtgggcagatcaggctcacctgctggaagctcaactcgtcctaataattaaggacggacgtccgatagacgatcctgcgcaatcgtatcgtacgtgcatgatacgcatacatctggaaactactataccaatgcaaacagagatctatacgtacgagtatgtataacgacgagtgatgtttgtatggatctacgtatgtaacaaggacctctcgtagcgcaaaggcgcgcgttgggagattaattaggtacacaagctattaccacattatatatcactctcattgtggctacatatctatataaaaaaggccaccgccttgggggtccagtactaattaataataattcagtgcgtatgcaaaaaaaaaaaaaaaaaa

SEQ ID NO: 4950 - DNA, 334 bp, Zea mays
  unsure (1)..(334): unsure at all n locations
  Clone ID: MRT4577_104510C.1
ctcaacccaggatgtatattaactgacggttaaagaccagcggaggtgcatctaggatacgtaattaacgttttccaaccaagttactaccatactataaaaagagccacccactgataacttacgacgcgcagttgcgtatagaaccactctncaattatgttcggcccatgctagcagtgccggccccatttggcgatctaagtaccagtaacccgaggtggtgaatggatcgagccgaacccacatcatggaaaagatctgcgcaaggaggatatcccaaacaacgacaaaggtcatagtgcggctgtgcttacccatgaagcccctgggg

SEQ ID NO: 4951 - DNA, 215 bp, Zea mays
  unsure (1)..(215): unsure at all n locations
  Clone ID: MRT4577_104511C.1
gggggggtggggggggccctttcctgcctgggcgtagcatactcatccaacatagctggcaagagcgcaccctcctccataaaagacagaccacggttctcctcccctgccctggtcttggccctggcgttccaccacgcgctcccagtggtcaaganggggcgagctttccctgctcgcttgagattcaggggggcgcccgggccggagcggtc

SEQ ID NO: 4952 - DNA, 593 bp, Zea mays
  unsure (1)..(593): unsure at all n locations
  Clone ID: MRT4577_104512C.1
ggccgcgtatacaacccgagcattagtacatgtcatttctcaatttacattcgagtagaacaagtgacgatgtaacgtgtaatctataaagacaaaacgttgtataagtagtaggtacatattaaagccaaacgaacaggctctaggtcgatcacgtctaactttataacctaaaaattgtgattatgttcttaacaaggtcgcttgagctacggaattgatggtagaacagcggtcgtctcctaatcaatgctcttcgataatctggaatacagatagccgttgcacctcacaagaagccacttttctccgtacgggtgttcttcagcaagtctgtcaagaacgcgtcaaacgccacgtgagatgagccgccttccttgagaacctccacagccatatccttggccgncacgagcctctgcctaagctcctctccgtcgccagatccgggcgccatcaccagcctnacctttgcttccacctcctccgcctttaccagctcctcctcgacccctccatcaccacgccaaccttcaactcctncatcatgtgcaccttattcatcttctgctccgcgtacaacggccagcaga

SEQ ID NO: 4953 - DNA, 196 bp, Zea mays
  Clone ID: MRT4577_104513C.1
tgtttctgatcactcgcaatctatcattggggggaggtcttgaatttctggactcggagaacattacatattgcggctcactaaatcttattgacaatgaaaacagtgatgtttaagaatgaatttatcgacatactagaggatacttagggcttgggttacctgtatcaattgtaaaacgtggaagacccattgt

SEQ ID NO: 4954 - DNA, 812 bp, Zea mays
  Clone ID: MRT4577_104514C.1
ttgggtacctcgaggccggccgggagctagctcgacgcggactgaggaagccaacagggcgccaaccgctgccacagcaactcgccagccgagttctgaaaccaccgaaggacctaggaacccgatcctttgctgacgatcgctcacactatgatctgtttggtaaaagaaggcctggggatgaagagttcagaaaagcctggcaggaggacgtagatgaagaggactgtctgtggacaggtagtgaagatgatgacgacgacgaagagagcgatacaaaactggagagggaaattaagaaagtgaagaggcaagcgaaggaaaattcaaaccttattgatgctgatgacagtgacgagttaagaagtatatgccctgagagtgatgaagatgatatgactctctggagtggcagtgaagacgacgacgacgacgatattccctctgaggcacatcctagtgaacgcagtgactcatatcttgataaggtgtttgaatttgaggagtcaccaaagtaccacacaatctcagagctgttgaaagcagagaacgaaccacctgagctatctccgggaaagcaagcaaggaaacttgctgtagaaaatgctcttaagaagttaaagaaaggccctgatggacgctacattaacgtatttgatgttgttactgatatagatatcctgattggtgcatttgagaacattgcttcaggaccagaatatgcagaactgcgggagggtggacccaaaaaagctcatatacagttcttttaggatatacaggcacgcatgagggacccaaattttcagttt

SEQ ID NO: 4955 - DNA, 1059 bp, Zea mays
  Clone ID: MRT4577_104515C.1
atcgacgtcggaccggccggtgcgacgcgtctgacgtatctgccctttcccgcggcacgcggccgaaggcgtcgttcccccttccccaccgcctcttcgcccgccggacgcaagccgccgcagctagcccgacgcggactgaggaagccaacagggcgccaaccgctgccacagcaactcgccagccgagtcctgaaaccaccgaaggacctaggcttcccacctattcatggcccgctgcctcgtcgcccgccgcttcctcccgcacctccgcctctgtgcgccgcgtctcctgtctgttccaccgccgacgctgggcatgcttatccgcggtgtcggagtgtcgtttccttcggttcaggcgcctcaaggaacccgatcctttgctgacgatcgctcacactatgatctgtttggtaaaagaaggcctggggatgaagagttcagaaaagcctggcaggaggacgtagatgaagaggactgtctgtggacaggtagtgaagatgatgacggcgaagaagagagtgatacaaaaatggagagggaaattaagaaagtgaagaggcaagcgaaggaaaattcaaaccttattgatgctgatgacagtgacgagttaagaagtatatgccctgagagtgatgaagatgatatgactctctggagtggcagtgaagatgacgatgacggcgatattccctctgaggcacatcctagtgaacgcagtgactcatatcttgataaggtgtttgaatttgaggagtcaccaaagtaccacacaatctcagagctgttgaaagcagagaacgaaccacctgagctatctccgggaaagcaagcaaggaaacttgctgtagaaaatgctcttaagaagttaaagaaaggccctgatggacgctacattaacgtatttgatgttgttactgatatagatatcctgattggtgcatttgagaacattgtttcaggaccagaatacgcagaactgcgggagggtggaccaaaaaagctcaatatacagttctttaaggatatacaggcacgcatgagggacccaaattt

SEQ ID NO: 4956 - DNA, 397 bp, Zea mays
  Clone ID: MRT4577_104516C.1
tcgagcacattgacagcgcaacactacgaagtaccatgcagtccgatagatctagcgacggggtcttccttgatattacagcaactgctgctacagtgactgttagcaccgcgctgctaacgctcgcatatatcgataatgattactcggtgcttatcaccagccaccgcaattaacaagagtaatccactattcctgctactgttcacattccagcaggcaaccacaactaggacagctacgacttgcggctcgtgcctaccaccatcatgaggactattatatgcaacaatactggtgaattcacaggcacaaaacattagggctgaaacagcagcaactccagctctagcagccatcactgcctaatctaaccaaggtcaatccagtcacatta

SEQ ID NO: 4957 - DNA, 366 bp, Zea mays
  Clone ID: MRT4577_104517C.1
gggacagggtcagtctgttctgcctccttcgcacccagatcagttgttgtgctcacatgctcctcctcctggtcatgcttcttcagatgatcaggacttcgccacagccttcaccgagtagttctttgcatcgcctccggggggtgatccctatagtgggtcgtgagatgttacttttccctttttagtgcttggtgtcaagaagggggagatgttcgcggagagctggagttgtttcacttggcgttcgttagttatctttatctttatctttttttttgttacgaacattgggcttgcaataagtatggcatgaactatatgtgatgcaatggatctttctgttatggttacagctagagatgt

SEQ ID NO: 4958 - DNA, 408 bp, Zea mays
  Clone ID: MRT4577_104518C.1
gccggccgggccggaaccctatccgcgaatccgccgccgactcagctccaccccacgcgctcagccgaccccagcaaggagcgcgactacgcggccactcagccgttagaatatccgcctgaggaggctgcagaggaagcgccgaaagatgacggcagagatccaagtaggctgatggggattcgtggatggcgtaccgcgacgtgcgacctatatgcgcttctcgacatgtccactgacgacctcgtccagctcttccccgcgcgcgccaggagaaggctccagagcggtctgacgaggtagcccatggcgctcatcaagaaactgcgccaggcgaaaaaggatgctcctgctggtgagaagcctgagccagcccatacacatctccgtaacatgatcacttgcccc

SEQ ID NO: 4959 - DNA, 510 bp, Zea mays
  Clone ID: MRT4577_104519C.1
ttttgatggctgtaatccaagtatatctttaggtctcagagctgctgatgaggaaagaagaagacagaattagctggtgcaaagggtctcgctcatttggctgcacccttggtagagccttagggaggatcaagtagtctgctttgatcccctaatggatctctttttgtatgcctatttctggcctccgtaaggagggtcttctatagaactttctttatctacttaatatataatggggcgcagttctcctgcgcgttcgagaaaaaaaaagaatccatcgatgtcctcgctcggctagaacaccaagcaatcccactcttgacgcaacttctgttgggtggctctgctcgtgcggatattgctgatgtgtgccacggcgatggcatccttggaggtttccttgttcgtgaggacggcgccatctccggcgggacatcaataaggagggcctccagcgcttgtaacacgtcacatctcacatcttctgggcttgcaacttcaccttta

SEQ ID NO: 4960 - DNA, 988 bp, Zea mays
  unsure (1)..(988): unsure at all n locations
  Clone ID: MRT4577_10451C.1
tcggccgggtattctggtgtcctaggcgtagaggaacacaccaatccatcccgaatttggtggttaaactctactgcggtgacgatactgtaggggaggtcctgcggcaaaatagctcgatgcgcccggccggggaggcacaccacacaacacaataatacagcaaaaggagctagcagaggtgcaggattaagctaagctagataagggctagctaccaaggagaaattaagcaaagcataggcacagccatggctacctcctctggttcttgccttattagcctgttggtggtggtggcggcgctgtcggcctcaacggcgtcggcacagctgtcgtcgacgttctacgacacgtcgtgccccagcgcgatgtccaccatcagcagcggcgtgaactccgccgtggcgcagcaggctcgcgtgggggcgtcgctgctccggctccacttccacgactgcttcgtccaaggctgcgacgcgtccattctgctcaacgacacgtccggggagcagacccagccgccgaacctaactctgaacccgagggccttcgacgtcgtcaacagcatcaaggcgcaggtggaggcggcgtgcccgggcgtcgtctcctgcgccgacatcctcgccgtcgccgcccgcgacggagtcgtcgcgctcggcgggccttcgtggaccgtgcttctggggagaagggactcgaccggttcgttccctagccagacaagcgacctcccacctccgacgtcgagcctccaagcacttttagccgcgtacagcaagaagaacctcgacgcgaccgacatggtcgctctctcaggcgctcacacatcgggcaggcgcagtgctcgagcttcacgacacatctacaacgacaccaacatcaacgcggccttcgcgacgtcgctcaggncaactgccccatggtcggcggcaccagcctggcgccgctggacacatgaccccgaccgtgtcgacacgactactaa

SEQ ID NO: 4961 - DNA, 454 bp, Zea mays
  unsure (1)..(454): unsure at all n locations
  Clone ID: MRT4577_104520C.1
ttgggtacctcgaggccggccggggaatcctccccggacaaccccacccggcacccgttgaccgctgtgcgcctagcaatgagcgccatccactcgcccgccgcgccgccggcgaggccgcctttccggcgcagcacgacgggagtagcgtctcccctccgggaatcctcacagccgcaaccgacgccaccggcgcctccgagcctcacctcccgccgcgccggtctcgtcgcactcctcgtggcagcgncttcgggatctacctcgtcggagagggcgcctacaaccgcctctaccgaccctccggcgacaaccaccactagatcgccggcaggatccgtgactcgctcaagaagttgtttttttttttaccaaccactggcgctgttgatgttttaacagttttgagcttaaaaggccagcaatgaccataatgaaatctgtgaccaggaag

SEQ ID NO: 4962 - DNA, 1289 bp, Zea mays
  unsure (1)..(1289): unsure at all n locations
  Clone ID: MRT4577_104521C.1
cccacgcgtccgacggagtcgaaccggacaggatggccgccgctcgcgcacgggtgctgcgcgagctgccggcaaggtgctggacgaaatgcctccgccgcgcttcccctttcccctccacctcgcccgccgcctcctcgctctccagcctcagccgtgcttccacgtctccctttccgctcgcctctcgctcccggcgccttctacactcgctgccctcggcggcggtgcgcgtgcgcgtgcgcgcgcagctgcagacgcgcttcttggcgagcgaagccgcgcggggcggtgtcggcgggcgcgggccagcagcggacagcgaggaggaggcgcaggagtgggcggtggagtgggaggacagcgaggacgacggctacgagcccgagatcggcgacggcggggacggcggcggggtcgcgctgcggggcgtcggttggggcgagcgtgccctcgtggcggccgaggaggttctcgccggccattttggggatgacatcgcaatgttcgccttcaaggtgtcgcccaagggatacgtctacgtgcgcctcgacaagctgaccgacgtgtacgggtgccctgacatcgaggaaatagagaaattcaatagactctacaagcagaaactggatgagatcgtcgaaagaggcgaaatatccctggacctggcactcgaggtatcatcgccaggcgcagagaggcttctgaaggtgcctgaggatctggaccgcttcaaggacatggctatgagggtgcagtacctcgctgaaggcaacagtgaccttgcgtcgaagcagagcctgctgaaggacggcatcttcttgctcgagtccgttaacgctgaggctgggcactgtgtctggaggctggcagatgtgaaggaaaaccgagcagaagctgggaagggaaggccgctgaacaggaagcagagagactggaggctgcagacttgcttcaccgcagtgaagaaggtgaccttgtacttggacgccaactagtaaatccgggccaggaggactattatggcttgtgaaaactatcctaaccctagcagattatgtagaataagaatgttgggttttctttatatagagtagagctatgttggtaggctgcacaaattggatatccatgaaattgctttgctatgagttgctagtgcgaaattgactgatgtttctcacacttgcagtataatgacacctttttctttactcatttcgttcttttcaaattataagatgctttattatttttagatccacanaaaaaaaaaaaaataaatttat

SEQ ID NO: 4963 - DNA, 583 bp, Zea mays
  Clone ID: MRT4577_104522C.1
tttttttttttttttttttttttttttttttttttttttttttttttttttttttttttttttttttttttttttttttaaattccaaacaacaaacttattcaggattggcaaaagttgggggaaggccccacccacaaaaaaacggggccttttttaaaccaaccctgacccaaaagggaaattcttcaacaccctcctttgggggggggccccaaacaacccaggcccttggggggtttaaacgccccatgatttacggcccccccgggaaacggaccaaaagggggggggggccctcttttgggagggggaacccgggtaggggggggccctcccccagttgttggccgggaaaaaacaaaccctggtggcccggggggagcccccccttggccgggattttccccttcacatgggggaggggggccgacctctcaacccccagggttagggtttttccaggcggggtcttaacaaaaatctggaaacccccccggggggggaaaaacaggggaagggggcccccctttggggggggggcccccgcgaaaggggggccatcctccagttggttgcccgc

SEQ ID NO: 4964 - DNA, 145 bp, Zea mays
  Clone ID: MRT4577_104523C.1
cgactgcgcacggcgccgcgccatgccgctttagaggttctgctccccggccagcaagaagagggattaagctggttgcaagtccggcttgcggatatctcgatctatcttctgtgatcttcgacttgcacattacatggagtgc

SEQ ID NO: 4965 - DNA, 383 bp, Zea mays
  Clone ID: MRT4577_104524C.1
cgtaaaaccctgacggagcgcagggaatacggggggcatttgaagagcagatccggcacattccaaggcggaggcatagacaggagcaaccgcatcacaggagcagccgccaccagacctggccagccggagacatggcacaaagagcgggggccaggcaacaagaacagggggcgaagcaaggaggagaacggctactaggtccagacgatgacgaccggcgaagtgatggcggactacggcgagcccacgcggaggaacacacaacgcgcgtcagagttacccgagaccacggtcggacggcaccagcaaggggagaacgagatctgcaacaacgacggggacaacaaggccacacaggtggagagggagcatcagaacac

SEQ ID NO: 4966 - DNA, 396 bp, Zea mays
  Clone ID: MRT4577_104525C.1
atcgggtactactcctacctaaaacacaggctgttatccttgaagccttcgccgagcatggggcatgtctatctagtaggcgggggaccctgatgaactcatcaacaatgctgcctacatcggtacccatcacaaggctatccttgatgctgatgagggaactggcactatagctaagcgcctttacactgtaaatgtctaaaacttggacgagaaccggcgggctctacgcgagctactgttctgctgccctggtgccctccaatacattgacggtgtgatctctggttctaggagacactataccggaagaccaaggatggcaatccttttgtcgatgtcctcaaggagggaggcgtcctccctggcatcaaggttgacaaggtcaccattgag

SEQ ID NO: 4967 - DNA, 571 bp, Zea mays
  Clone ID: MRT4577_104526C.1
gagaaaaacatatatttctcaccaaggtagaggaacaatactccctccgtcccaatatataaggcaaccacctctggtttaaagactaagaaatatatttaattctctctatcaacactagtactactacatcaatatacgtatctctagatagaacatgccttatattatgggactagaataaaaagtggttacaccttatatactgggacgaggggagtataagagactgcaacataaaggcacgctaaaaccctaaacagtgcaagtaaaaaaatgactgccgcctgtccaatttagtagttgtttatagcattaacactcaccttgagtttttatttttctaagatatattgaattcataaaactatattactagtgaagtacttttgatgatggtaatataaagttttgcttggcaaatctacaccatttttattagcataatggtcttgactcctgagttttgaatcctatagcataactaaagcatttttattagcatgcatccaaggacatttaataaaagttctcttaactctatagaaaactcgaaatggctgttaggaag

SEQ ID NO: 4968 - DNA, 303 bp, Zea mays
  Clone ID: MRT4577_104527C.1
gagctcttctagtcggcggccgccctcttttttgctattgggatcgttatcagagtgtccttatggcaagaacactgcatcaacccatctggattctaggacctaatacacaaaggtatggctgcatcttgtgcaactgctttggacgaatatagtgtacaactggtagccttacagacatagcttgactgttacatacgcacatctatctcgctatggacataatcacatcatacttatatgatccacattactctactgtatatcctttcttcataaatggtgttattcatgctacaactg

SEQ ID NO: 4969 - DNA, 606 bp, Zea mays
  Clone ID: MRT4577_104528C.1
agtcgatacgacttgcgtccatccgtaggctgctgtgctgccccctccgcccagctctgtccctccgttcacacgcaccttgcctccttcttcactccctccctcccgagcgagcgagagagaagcgagcaagcaagaggaaccaaacttgccagcctccagctcctccgcccaacgcaacgcaggcaggcaagccggaggccccgtcccgtcccgtcctcccgtatcctctcccccggccggcgagccgatatacagtcgagaccacttccgtccatcctctggccgatcagtaaggtgaactaggaggatcccctggcctgccctgcgccccccgggtctgtcaggccgaggatcgatggccggcggcgggaccagcatcaggaagtatgtgggcgccctcaaggactccaccaccgtcagcatcgccaaagtcaacagcgactacaagcaactggacatcgcgatcgtcaaggccaccaaccatgtggagaggcctgcaaaggagaagtacatcagagacattttcatgcatcttaattccgggcgggctcgggcggacgtggtctactgcatccgcgccctcgcgaggcgcctctccaagac

SEQ ID NO: 4970 - DNA, 225 bp, Zea mays
  Clone ID: MRT4577_104529C.1
cttggttttttttttttaggaatcatgaaaatcttcccataaataacttgggccaaacacgcaacatgctccacaagccaaaatacacgtagtcgccgatcaaaaattcagtaaattataacagcgaaatattgggcaacttgaactttttttttctccagggggtatattaatgagaacccacagaccgcttgataaaactagaaagcatcccccaataccgcc

SEQ ID NO: 4971 - DNA, 1385 bp, Zea mays
  Clone ID: MRT4577_10452C.1
ccggccgggatgcacaccacacaacacaataatacagcaaaggagctagcagaggtgcaggattaagctaataagctagataaggctagctacgtaccgaggagaaattaagcaaagcataggcacagccatatggctacctcctccggttcttgccttactattagcctgttggtggtggcggcggcggcgctgtcggcctcaacggcgtcggcacagctgtcgtcgacgttctacgacacgtcgtgccccagcgcgatgtccacaatcagcagcggcgtgaactccgccgtggcgcagcaggctcgcgtgggggcgtcgctgctcaggctccacttccacgactgcttcgtccaaggctgcgacgcgtccattctgctgaacgacacgtccggggagcagacccagccgccgaacctaactctgaacccgagggccttcgacgtcgtcaacagcatcaaggcgcaggtggaggcggcgtgcccgggcgtcgtctcctgcgccgacatcctcgccgtcgccgcccgcgacggagttgtcgcgctcggcgggccttcgtggaccgtgcttctgggcagaagggactcgaccggttcgttccctagccagacaagcgacctcccacctccgacgtcgagcctccaagcactgttagccgcgtacagcaagaagaacctcgacgcgaccgacatggtcgctctctcaggcgctcacacaatcgggcaggcccagtgctcgagcttcaacggccacatctacaacgacacgaacatcaacgcggccttcgcgacgtcgctcaaggccaactgccccatgtccggcggcagcagcctggcgccgctggacaccatgaccccgaccgtgttcgacaacgactactacaagaacctgctgtcgcagaaggggctgctgcactcggaccaggagctgttcaacaacggcagcaccgacagcacggtcagcaactttgcgtccagctcggccgccttcaccagcgccttcacggcggccatggtgaagatggggaacctcggcccgctcaccgggaccagtgggcagatcaggctcacctgctggaagctcaactcgtcctaataattaaggacggacgtccgatagacgatcctgcgcaatcgtatcgtacgtgcatgatacgcatacatctggaaactactataccaatgcaaacagagatctatacgtacgagtatgtataacgacgagtgatgtttgtatggatctacgtatgtaacaaggacctctcgtagcgcaaaggcgcgcgttgggagattaattaggtacacaagctattaccacattatatatcactctcattgtggctacaaaaaaaaaaaaaaaaagggcggacgccgactagtgagctc

SEQ ID NO: 4972 - DNA, 233 bp, Zea mays
  unsure (1)..(233): unsure at all n locations
  Clone ID: MRT4577_104530C.1
aactggttcatgataaaccaaangcctcgcttgttcttgtatgcgaaggacacgccgctcccgccagggatctactagcaaaagctgcatcagagagaaacgacagataaagccgctctctcttagaagcacaaaatacagatgggctcaccgccctacatttagcaggccgccgaggctcggaagagcttgaggaagctactgcggattaccaagagaatgcagacatacta

SEQ ID NO: 4973 - DNA, 831 bp, Zea mays
  Clone ID: MRT4577_104531C.1
gtattacaggtgtaccgataaggtcgaagcctaaatggttgtgctccaggtaacaattcaatggcgtggtcaacctgtcttttcggtggcaggctgtctggccggagaaacaagtgctgatattgttccaataatttctgcacagcttctggggtatttttaacaatcaattcagttacagtctgcaattccaaccaatgttgcactgcttcttgctttatcatgaaacccaactgttccccgttcaggctgtaacaggtctgaacctttggtaacacaccctgcacgtgaactctcttcttatcataatcaaactccatccattttgcagcccagtgaactgacataggacagtggcgttctagccagtccatgccaagaatcatgtcgtaaccccctaggggaatgaatttgaaatccgttgtaaaagtggtgcctccacacaaccatttgcagtttggcaaccagtgttggctccaaagaattcccccatctgctactttaacttgcattggcttggtcaacagctgaatccctggtaagacattcatcaagtgacttcccagaaaactagcagagctgcctgaatctactagcaccagcaattgttgacaataaactgaagcccaaagtcggatagtcctgctgccctcaccaccctcagcagcagcagcagacaatgctagcacactgtcttcattagtttccttactgtccccgatacagtcctccagcttctcctcttcattgacaacaattcccacatttcttccacaagtacagaggacattagttgagcagcggtgttcatagcccatttgttccacactt

SEQ ID NO: 4974 - DNA, 393 bp, Zea mays
  Clone ID: MRT4577_104532C.1
cccacgcgtccggtgcaaatctaaagagcttgcactgactgactaaaacatgaacataatatgatccgacatctgctatacaaggctctatgctaatgctctcaaaagctgtagcagtcagatgattctcactgccaaaagggacctatatacctatcaactcaaacctaaactatggctattataacaagtctaccggttgaatatccaaagcctataaaaagctatcgttggatctactgacaactgacaccgacatagtaggtaatttctcaaactaaatgtaatacactaggtaccacattatagaacatcaatgcactgcttgttgtcatctagatctacggtcagagctgacgactgatgactgaaacctgtgatcatgcattacgt

SEQ ID NO: 4975 - DNA, 126 bp, Zea mays
  Clone ID: MRT4577_104533C.1
acggtactgcgaccagggagcagaacgttgctgtttacttatcctggtgtctcctagaggactgtgggtggttggcacgggactcgggcaatttcggcatctgctacgtggtctataacacgcttt

SEQ ID NO: 4976 - DNA, 181 bp, Zea mays
  Clone ID: MRT4577_104534C.1
agcccacgcgtccgcgggaccccttggccccattgttaataaattgcattaccaacaccaattgtgcacataaaatttggcgcattatatgcaatttgccaaggacattacaaccaaaattgaaaaaaaccttggtgtgacggtaacagataatgggaacccagaggtaaaaccaccacct

SEQ ID NO: 4977 - DNA, 302 bp, Zea mays
  Clone ID: MRT4577_104535C.1
gtgcctacattttctttactgtggaactactagtccaaagactttataaatgcaagaccccgagcagagacacaacacccgggaaagaccaaactaatgaatggccagataatgcaaccacataagatggtctccaggcgatctccggcccaagagccaccggactcacagcctcaggttgtcaagcctggcctaattggaaggaggaattacagcaccgggctactgacgtgagagctacaagacttaggggctgacagctacgggtctaaggaggccttcgatgcaagtttaacgatacg

SEQ ID NO: 4978 - DNA, 130 bp, Zea mays
  Clone ID: MRT4577_104536C.1
ttgagaccaatagcaacatatttagcgcaatagtgtaccaacaatggccggccaaggattttgcctagttatgccccttgggctttctggcggagccgcgtgcggcggccatttcgccgcaatgggtccc

SEQ ID NO: 4979 - DNA, 300 bp, Zea mays
  Clone ID: MRT4577_104537C.1
aaagattgcggattgtgcatacaattgagtttaacgaaggaggagctaacatacaaattgtaagggttgctgtgtatgaagaaaaatgggccagcccagcaaatatccatgttgaagatgatacacttgttgaccttaaaccattctctcaaagaagccggaccaaaccgtcagaactgacaggctcctggaaagtatacgaagtcagtgcaacgccaattttcagtgataaagtgcaagaactagagggcggttctccattggtctacttgtgcatggagacggtgaagaagagaaacc

SEQ ID NO: 4980 - DNA, 423 bp, Zea mays
  Clone ID: MRT4577_104538C.1
gggataaaactcaatcaattttttggttttttctaggaaacacacctcggtttgagggcccccttttcgagtacctctcatatgtaatctaaaagatggcccccccaaccatgggttgctgcctcgacaaggacagggttcatcaaaaagaactggttgtttggcaacaattgttgcttctttaggaaggcggccaccaatgggtttgccccttccaatgggttaaataactgttgtcccttttgtaggtacccaacaaaattccacaaaatcaattggttgaatggaaacaacttttgcaagtaggcaacaaggtttgccacaacttgttgagtcaaagctggtacaatttgttgcaacaattgttgttgcaagtttttaggtgcatttcccacaacgagcgggcttaattaaaacaatttt

SEQ ID NO: 4981 - DNA, 315 bp, Zea mays
  Clone ID: MRT4577_104539C.1
gcttgagcaacattgtgttggtgttgcatcgcttgctgcttttctatctgctctgaaaggcaatatggctcggctcccaagtactgctgctaatttccatctcgccatcgtcttgtgcttgctccatcacctcataaacgactacttgttggctgacgctgccattgttgagcacaccttccatgtgggcaacctgagcgtgcacggctggggcagagccaggtgatcaccgcggtgaacgggcagttcccaggccccaagatcgaggcccgcgacggcgacacggtggtggtgcacgtcgtcaacctctccccc

SEQ ID NO: 4982 - DNA, 2307 bp, Zea mays
  Clone ID: MRT4577_10453C.1
ccggccgggaccgatgatgaaatcgctctgtggcaacatgggtcgtcacaaccttgtcatcttcccagatgataccgagcacctctgcgtcggggcacaccacacaacacaataatacagcaaaggagctagcagaggtgcaggattaataagctaagctagataaggctagctaccgaggagaaattaagcaaagcataggcacagccatggctacctcctctggttcttgccttattagcctgttggtggtggtggcggcgctgtcggcctcaacggcgtcggcacagctgtcgtcgacgttctacgacacgtcgtgccccagcgcgatgtccaccatcagcagcggcgtgaactccgccgtggcgcagcaggctcgcgtgggggcgtcgctgctccggctccacttccacgactgcttcgtccaaggctgcgacgcgtccattctgctcaacgacacgtccggggagcagacccagccgccgaacctaactctgaacccgagggccttcgacgtcgtctcctgcgccgacatcctcgccgtcgccgcccgcgacggagtcgtcgcgctcggcgggccttcgtggaccgtgcttctggggagaagggactcgaccggttcgttccctagccagacaagcgacctcccacctccgacgtcgagcctccaagcacttttagccgcgtacagcaagaagaacctcgacgcgaccgacatggtcgctctctcaggcgctcacacaatcgggcaggcccagtgctcgagcttcaacggccacatctacaacgacacgaacatcaacgcgggccttcgcgacgtcgctcaaggccaactgcccccagtccggcggcaccagcctggcgccgctggacaccatgaccccgaaaaagaagttgaattagactactatttcaatctactaatcgattctatgtagattcaagataatataatagaaagaatctaaagtgtggtagaaaaaactatatgtagttctttctaccacactttatgattccaaccagaccctttcatttaagacttggattttttattttctttaatccctttttcatttcttcaatgattaattggaattccaattaatcattttgactggctgtttttacataaataataagtaaaaaggcagtaggaactagaatgaacaatgctgtagcaataaatgcgagaatatttacttccataacctctttatttatttatttttttcacaataactcgggatgtaatcccatggagaggaaaaaggggtatcctgtaaattcaaggggaggacttgcattctgataatactgaatcaattcaatattatgaatattgcatctatcaaatcaattcatggtggatagtggaataatataacataggaagatctcttatccatactaagaccaaaataggttttttgattggattcgaaaccccctctattcttttttcattcttttctacttttgcttttctatatgtataacccaaaatctttcttatcttatccaatttcacttcctttttcttatagttatacatacaattatgtatgtattatatgaccaactttctatgggtcacatagacatcccaataagcagtagaagtagaaatgagatggagaaaagaggatcttaaataaaaaggatcccatatttaaatttaggaaaaagagcgtttgcttggtttttattttattaggttactatccatatacgctttttggggtctaaagatgagagcaaatccataaaaaaaaggagtcggcaaatggagtgagaatgaggtggattctttccaattatatacacaaacaaagttggaactagaaaatggaaggggtgcggtttaacccccaaaaagtaactaattagatgaaattcattctctaacaataaacgaatacggtttatgtatggattccggtaaaataccggtactcgatttcataagagtcgaataggaagttaagatgagggtggtatcatcataaaaatggagtagtatcctaaattatactaatccacgtatgatatgtatgcctttccttatcaaccggaagtagtgcaaaaaaaattctatactgcactgctctctttttactgagaaatgcaaaaaaataaaagtgaagtaagggtgccccatagatatttgatcttgcctcctgtccccccccccccttttttcatcaaaaatttccatgaaaaaagaaaagatgaatttgtccattcattttttttttttttttttttttttttttttttttttttttttttttttttgaggctcga

SEQ ID NO: 4983 - DNA, 1711 bp, Zea mays
  Clone ID: MRT4577_104540C.1
gggggtagtgcgaggccgcccacgcgccggacctgtcactaatcactacctctccctctccgtcgcgacacaggccacggcgggcggcggcggaggcttccgtgcggctcttggcggattgaacgcccactcgagctgcgccggctgctgtttcagccgtccttagatagaccctgctttcctcccgggcaaatccaagttgcccaaatgccgacaccagtgaagtcggtgctgcccgtagtgctcctcggctgcggcggcgtcggccgctacctcctccgccacatcgtctcctgccgtcccctccacgccaaccagggcgtggccatccgggtggtgggcgtcgccgatagctcctccctgctcgtcgccgaagatgtccactccaccggcctcgatgacgcgctcctcacccagctctgcgccgccaagtccgcaggctctcccctctcctccctgctcggccgagggcactgtcagctgttcaagaaccctgaggctaggggcaaagtcatagacgccgctaccacactcggaagaacaactggtctggtgctagttgactgttctgcaacttatgacactgttagcctgctgaaagatgctgtggatcatggatgctgtgtcgtattggcaaacaagaaacctcttaccggtgcttatgaggattttcagaagttggtctccaacttccgtcggataagatttgaatctactgttggagcaggtttgcctgtgatagcttctgtaacccgtattattgcatctggagaccctattactcgtattgttggcagtttgagtggtacacttgggtatgtgatgagtgagcttgaggatggaaagaaatttagtgaagttgtaaaaactgccaagtctcttggctatacagaaccagatccacgtgatgatcttggtggaatggatgtggctagaaaggcattgatcctggctaggcttcttgggcaacagataagcatggagagtatcaacgttgagagtttatatcctagtgaattaggacctgatgcagtgtccacaaaggacttccttgaaagtggtttagtgcaacttgacaagagcatggaagaaagaatcagagcagcatcttcgagaggaaacgttcttcgctacgtctgtgagattgaaagcgcagggtgccaagtaggccttaaagagctcccaaaggattctgcgctgggtagattgaggggaagtgacaatgtggtcgagatatacagcagatgttatcagagctcccctctggtgatccagggcgcaggagctggcaacgacaccactgccgccggcgtccttgctgacataatcgacctccaagacctgttccagacgatggcttgatcgttgatcggcatccacaccagtacaccatcttgatttttgcaaggcaccagagcgtttgatactttgatcggtgccagtggaatcccccactgcccactggtgggcttcgctccttgtcatgtgtgcattttgttcacgggcatgctctcaggctgagagcctgagacgtctgacattcgaaatgtaattttgagcaggcgtgtgggggatttctttacagtttacataaaggaactttgtttcagtgaaataatgtcgcggtctccacattaaactaataaacagtccgagctatattgccgaaaaaaaaaaaaaaaaaagcggccctggcagcctgaaaccgtgg

SEQ ID NO: 4984 - DNA, 546 bp, Zea mays
  Clone ID: MRT4577_104541C.1
attctgggattgccgccctttggagttggcaaataattatttgagagttgagttttgtgaaattttaccattttgtgctgtgcagtttttggagtaacagaattatttactacttctgcaagcaaggtaaacttatggttgattagaagaaacgaaaggcagcggctcaagttttgatgtagcttcttggaggaattcagacaacaagaaagcaaggaacagcggttcaagtttcctaaaaccaacgtgttatgtgcgttggtgtatggtgttacagaacacgttttttgtgcacacgcttatacaacagtctgtgtccagctatggtttccatggcaatttacaggattctttctgctcttacttcacaactattagcaattccagctatgatttcccctaccattctttcttacttgaattgattcgcaggaaggatccaaattacaaaaggatggtaatggcctgcttcattcaagcagtctacctgcttgaactggacagacaggacaagaaaggcgaagaggatggccttgctccaaaatg

SEQ ID NO: 4985 - DNA, 291 bp, Zea mays
  Clone ID: MRT4577_104542C.1
ggaaaaagggccccaatgtgggatcccctgtaaaaaaagggttttgggaaaccttaaaaaggtcacccaaaactttaaacgatacaaaacccaaaaacccaggtttttaaaggccaacaaacttgaaccggtacatttgaaaggggcccccgttaggacccgaaaaaacaggcccctttcttttttaccaccctttttgggggggccgtctggggggaccggaaaaaaaaccccaaaaggggctatttttatgccaaattgggcaaaaaccttaaaagcaaactgggcccc

SEQ ID NO: 4986 - DNA, 376 bp, Zea mays
  Clone ID: MRT4577_104543C.1
aggggcgcgagttaaactagtggcgccgccatttccgtagtgagaacagggagagagagaaagaaccgagctgtgccatcgccggtgggctcgtcgtggtcgctgccccagtgtcgtgccgtgaagctccacccgtgcgtggagaattattgtggcctcgtcacgattgaaccggcgcccggggctcaggatttcttcaccggagactgtgaacccactgtcctccatggccagcctccctgcagactccttctctgacgagcacgccactgtgagatctgaggttcaacaagtagagatagctgagcaggagctcattgaaagagaagaacaagtggtcgaagaggagccgcctaactctgaggcattcgacttg

SEQ ID NO: 4987 - DNA, 210 bp, Zea mays
  Clone ID: MRT4577_104544C.1
gagccctcaagtcggcggccgcccttcctttttggggggtttttttgggaaactgaccgctcaaggccaaacaggcagaaaacaaaatatacaaccttaagcacagactcaaaccgctcaggagggtcagacactacacccaaaccattcacttcatgcggaactataactagcaacaaatcctatgacaaaccgcaggaaaaaaacaac

SEQ ID NO: 4988 - DNA, 132 bp, Zea mays
  Clone ID: MRT4577_104545C.1
gcagcgcagagcacccaacgcagtgagtaccttgatctcctgcgtggcctcgtccctggtcttagttccaccgggcagcgggagtcaggaccgcctgtcctcagacccctccgcagcgacactggcggccgc

SEQ ID NO: 4989 - DNA, 824 bp, Zea mays
  Clone ID: MRT4577_104546C.1
gccgcgcccgcggaatccatcttctccatctccaactgtgctactgtaggagctgttgcaatcggggaggaaacgcgaccagtttgccggcaccaacacggccctgctgccacgctccggcatctttttccggtgcgccaaataacccctcctcttgtctgactgctagtcagggttggggactgaaaactgtcgctgctagttggggttggggactcttgatatgggcatgaacttccggcaaggatcggtccgggaaaaactactcacggtcaacaatctcgccaccagtgggtggcctcatcagccgtcttgtgccttctgcaacggaacctttgagactggtattcacctgtgtctacattgtcctttcgcccgtgcggtgcggagacaaatcctggcttgggaaggtgtaatcctccctgcccagtctgaccttgcttccgccaccaacattcgggaagtggtgggaagctgcgactcccccactaccaaaaaatcagaaacgcgctttcaatggaatcgtgatttacacaatgtggaacatctggaaggagaggaatcgcaggattttcgaaagtgtcgcccttcccccggtccaagtcgccttaagaattaaagaagatgtttcacaatttaggcgggctttgcttcccatgtaattttcatattgctgcttcctgctagcctggaggatttagggtgtggggcttagcctccctttgagtgtgctcgggtgtggtttgtccggtctcagaccgttgtttgtactctctaaactctttccccttaaatgatgggcagagctcctgccgttttcgttc

SEQ ID NO: 4990 - DNA, 696 bp, Zea mays
  unsure (1)..(696): unsure at all n locations
  Clone ID: MRT4577_104547C.1
gaggataaatttgattaggtaatcttcctaaaaacttcacggttgtcaattaatacaataggctacaattgaaatacaatgctcattctaatgcttagtttgggtcaacaagcttcaatcccgtgggcacgtcctcgcagtgccgcacgtgcggcacgatctcgccggagtcatgtcgtcgcttgcagtcgtaggacggcgcgacgtgaaaacacggctccagggacatgtcccggctgcaccagccgtgccccgccgtgccgttggcctgtttgagcaggacccacggcctcaaccctgcgagcccctgcgctacataaccgaacgtcgacttgccggtggtgaccagcatgtccgtcaggcttagcaaatagatctccgcccaggccttgtactcgtgcgacttgacgccgtagtgctggtactcctcgtggctcggctggttcacgaccaccacctcgccgttggccgtcgcgttctcccagtacatgcccttcatctgctcgtagtaccaggccttgagagaggtgatgagaacggcgcttgacttgngcacccgacgcggtcgtcgtcgcggctgccggttcttccgtttccaccagtcccgggagcatcccctcctcttgcgtgcacttggtgatcctctcgaggagctccggagagtccggcttccagggaaagacgcggacctggatg

SEQ ID NO: 4991 - DNA, 321 bp, Zea mays
  Clone ID: MRT4577_104548C.1
attctttctttttcgcctacgggtgttatctttctccaacggactctcttgcaatcattagcgtccagggcccagcccccatcctctatatatagagaggtctaccgccgctcgcccctaatcaacattcgaatattacacttcctattcccaatttcatccaaggagcagtttgatccttttcggacgccagctatccaatccccaaattacttcgggtctacgtggattacaccacccctaggtcgaccgggcctgagcctaaacaccacctaggatttgtcctccccgacggggtccctcccggtagcgagatccaag

SEQ ID NO: 4992 - DNA, 296 bp, Zea mays
  Clone ID: MRT4577_104549C.1
ttcaacaaaggggggggtaaattttttgtgtttgggtgccaaacaccaagaggatacatagtcttggtccacaaacttccggcctctgtctcatgcacataggcaagcttaaaaaaacaaacaaacattatcgcagccacttttccagtgcttcgacagtggatccgaagactagatcgccacccatgcacccgggaaaaaaagaccgcgggcggtcgcaccaagagtggcgaaccctccacaaccaacagttgcaggtactctcggtgaacgatgggccaacttgatagcgtctg

SEQ ID NO: 4993 - DNA, 541 bp, Zea mays
  Clone ID: MRT4577_10454C.1
gtcatgatgcggtaccgaccggcggagagccgcagaagccggtctcgtttctcgtgcaacgcacgacccgatgggaggaggatatggcacacgcgccggcgctgatagactgcaaggacgagttcgacgctgtcatcatggataccgagtcaggatccacatcacgctctccttcaacagcgtcaagaacctcctgaaagtctgcggcgatctgcagaagggccccaagggtaacgagctcaaggtcaaggccccgtacggatgcctaccaaggtgctccacatcaccaccaaaaattctccctgtgtacaatgtaccaacacctgacatcgatttgagatgaggattcacaccagggttatcgatctgctcaaaacaccagaccatgtcaagcacatcaccttactaccattgaaccacgtgtccaggttgaggtgactataagtgacacttaatatgttagccttatcataagcaaaaggcttctagtgaacagcatattttcaattcctactgacaacttgagtaacaaagaaatcca

SEQ ID NO: 4994 - DNA, 359 bp, Zea mays
  Clone ID: MRT4577_104550C.1
ccgcatctggatcccaatacgaggaggaccgcagtcgccagacatcctcgacgcggtgccgttggcagtcgttccgccaaccaactgggcgagtcagccaccgctgccgacccccactccaagtacagagccagtgctgcgatggaggtctccaactccggctcctccttccttcgcgtcggccgcggcgggactccacacgaatgcaggagaatctaacggcgtcttcatcccgaatggccttgggcgtgccctgggcggagacgactccccgggagtggaacgcctcccccgcaactagccgacacatgcgaagataaaggagggggggagatcgacgccttggccagcaatgcaag

SEQ ID NO: 4995 - DNA, 733 bp, Zea mays
  Clone ID: MRT4577_104551C.1
ctcggccggattccggctctgcatgctggcccagctctgggttgcgcgaacagtcggaaccctaattccctccccggggccggcgccggcgccccctagctgcgcccccacgaccagcagaatccagatcgaagttttgctcttgccgcggccccgcctaaactccaaaagtgcgaaccccctaactcatcgatcccagcctgcctccgcctacgcgcctcgggacggggtggacccctcccctatctgcgtgctgcgcgcatccgcctgcggcctgtcccgtgcagccgtgcctcctccgcgcacatctccagggtctagccgagagcagaccggcgtgacgccaccactcgcgctcgcgctcctgacatcggtgtctgccttctctgtctaagatcagagcagagctccatcgaaagcgtcgcccgcctgcttgagccgagcaagggtaacgacgcgatcagggcgatcagatatctgatcgtccgattagttgaacgatcagcctggctggttggattgaaatttcggcccagtggcccagcccagcttcctttttcccattcccaccacgtgagcagaagctgcacaaccaagagccaacagagcaacgcccaggcacacacgacacgaaccaggcaaccagctgccgagggaggaccggagggaaccctaacggaacactgggcaggggacgggggggcgcctcccgggacggggatacggggggatc

SEQ ID NO: 4996 - DNA, 419 bp, Zea mays
  unsure (1)..(419): unsure at all n locations
  Clone ID: MRT4577_104552C.1
caacananagaggggggggccgcaggcgacnaaaccagaaaacacgacacacaaccaacngcagggagcaggggaacacgaacgggagagcgcaanaaaaanaagaaaaacacanccacnagccnnggccgggaggggggcagaggcggacacgggcacgggccanacacacanananggagcaggcccangcgaggaggccnnggaccaaancgcaaggcccgggcgacgacaagcacgcggcnncagnangaagcgaggcagcagaagcagcacanggcngcccncaggcngagccggggggcaancnncaaccccagcgacgcgncgcacccggcgaggaggccnanccaganggaccngagcnccnggcngacccncgggngcccgagcgaggcggcgaaccgccccacgaaccg

SEQ ID NO: 4997 - DNA, 206 bp, Zea mays
  unsure (1)..(206): unsure at all n locations
  Clone ID: MRT4577_104553C.1
cacacaaccagggggggggggggggcaaaagacaggacaccnagaacagcagcaagccacggcgccaaggccgacgcacagaaagaaagcggcacccgaagggaaaaaggccgcaaagaacnngaagggccaagngaagcnagggaannggagacgagangcagaaaaggccgagaggagcaagaacaagggggaagggnaaccaa

SEQ ID NO: 4998 - DNA, 683 bp, Zea mays
  Clone ID: MRT4577_104554C.1
taattttcgaaggggattggtgaataatgaccatcctcctcagcaagcataaagaagatcgtccttcgcagtcgcagcaagcattccggctttgcatctggcccagctctgggttgcgcgaacagtcggaaccctaattccctccccggcgccggcgccggcgccccctagctgcgcccccacggccagcagaatccagatcgaagttttgctcttgccgcggccccgcctaaactccaaaagtgtgaaccccctaactcatcgatcccagcctgcctccgcctacgcgcctcgtgacggcgtggacccctcccctctctgcgcgctgcgcgcatccgcctgcggcctgtcccgtgcagccgtgcctcctccgcgcacatctccagggtctagccgagagcagaccgccgtgacgccaccactcgcgctcgcgctcctgacatcgttgtctgccttctctgtctaagatcagagcagagctccatcgaaagcgtcgcccgcctgcttgaacgtccgcgactaatcgtccgattagttgaacgatcagcctggctggctggattgaaatttcggcccagtggcccacttcacttgcccagtggcccagcccagcccagcttcctttttcccaattcccaccaccaagagccaacagagcaacgcccaggcacacacgacacgaa

SEQ ID NO: 4999 - DNA, 189 bp, Zea mays
  Clone ID: MRT4577_104556C.1
acgtacacgctcattggcttatactctggtgaccacctagatctgtatacttacttattcagactggtccatcttctggcaacgtcataagctcacatgcttacagacgacagattgtcataacaataccttgtcttgtctgattcacataattaccatacgacatccacgaaattgccatcccttgct

SEQ ID NO: 5000 - DNA, 635 bp, Zea mays
  Clone ID: MRT4577_104557C.1
attggtacctcgagccggccatgtttacggtcaaatcactagcctcgaggttggcaggtttggccacacaccggtgaggtaggcagtgttccaccgacttccccccatccacctccacacttcacactcacagacgcactgccctttgattgatatgagtgtgttgagcactgacggtgacctgacgcctagtggcagctaggctgtgtctgtgtgtgtgtgtgtttttttttcctttcctcctgaacttgcaaagggcgctatgccacctgtgttcaaatgatacacagcatccaaagagaaagcatgaggaggaaacatgatgcactcctgcctggcaacagatcctccacatgcctgcactctctacatcactgcacacactttattcttggcagatagtagtacacctctagaaccttgaactgtgacagaaacattagagaacagtccgtacataagtattttcctctctctttttttggtcctggatgagttttggtgtacgaggacagcataattagatggtgtttggtttctacggactatttttagcctcttcattttattccattttatcactaaattgtcaaataggaaaactaatatgaagtatttaatgcataattaggggg

SEQ ID NO: 5001 - DNA, 307 bp, Zea mays
  Clone ID: MRT4577_104558C.1
gacgaagttaaattctggatttggaatcaatgacattcttctgctgcgaaaaagtacaagattatttgataatggaattgagtgtaggcagactttggatactgttattgatagatgttcacctttgcaaaatattcggaagctgttttgactaccagggtatttatcaccacttgtgggctaagtagggggtggttaaatcggccctattttgggggaccaaaatatggctttttgataccttgagggaaattgatggtttgggacaagacaacaagatctatttaaaggaggtgcacagcgcaga

SEQ ID NO: 5002 - DNA, 286 bp, Zea mays
  unsure (1)..(286): unsure at all n locations
  Clone ID: MRT4577_104559C.1
ggcagacacaagggcggacgcaagggcancgcaaaaaacagcaggggacccaacccgaagggaaggagcaggccgcaccaaaacaagggaacaacaggcacaagaccaaaccggagcgagagcgatttttttcggaacgggggagaccaaaaaaacccaccggacgacccaagaacaacacgggaccgagcaacagaaagcagaggccacaacgcccgaccaccacaaagaagcaagccacccggagcgccgggaaaacccagaaccgaagccggcaccacaaggc

SEQ ID NO: 5003 - DNA, 139 bp, Zea mays
  Clone ID: MRT4577_10455C.1
tccgcgaatttgctattggctcgttctgcccacgaccccggacgctatactttcagagttcagactcacaatcgccgggagccaccgcaattcccgccacacgtctgccgtcgacgagttggagtactgcgagttgtgc

SEQ ID NO: 5004 - DNA, 930 bp, Zea mays
  unsure (1)..(930): unsure at all n locations
  Clone ID: MRT4577_104560C.1
cccccccccttcttccttctctttttttttntgaaaaaatctatatcgttacaactataaggtagggaacaggaaccagtccacgtgtctataccttcatgtacaacatctcccttccaagcaggatttgcatggatcttattctaaagctaagtgcggaaggggcagagtgattcgcaaaaatggtccgccggtgcatccgagaccaggctgtcctcaattgctacagagaagtcaccgttttcatcttgctgagctctaccatctgtgcctcttcctaatgaacatgacagcacttcagttctgtcctcgttttcgcttgtcgaaaatttaattgtgcaccctatagattctattgccttcttaattgcagcattctccctttgagcacttcgggctgcggctagagctgtactattaatacgtttctccctctgcaggtcttgtttcatagattccaatttcaatttgatatcctttgccctccactcagcaatatcctttgccttcattgtatctgcatattttttattcatagcatgccactgggattcaagatcaccaccttgtgactcaatggggcatgtccacctcaaaaaaaactggggccagagtgttggggcaagtgctgcagcagggggcaatagtgcgccactatgatttactgggtcatagaatggattatagtgctcatggaagctgccgccagaagctctcagattagccaaatgtgaccacatgcaacgacaggagattgtgacaccagattgatccctttctcgttcactattgcacaagaagttcccaaagcgacacgatagcacacaatccataaaatcaactaggaatttagatgaaaactgaaatgcagatgggtacagacgtaacaactgtgagatacaatcaagccactgtaacaatatagggaag

SEQ ID NO: 5005 - DNA, 146 bp, Zea mays
  Clone ID: MRT4577_104561C.1
ggttgccagccggcggttgcttcactcgctcgctgcagccgcgcggcgatgacggccaccgccagctgcttctccagccccgtcgcgtgggcgcggcctttcgccggcccctcaggtgcgagtgcggccttgctcgtggcccggtt

SEQ ID NO: 5006 - DNA, 385 bp, Zea mays
  Clone ID: MRT4577_104562C.1
aaagcagcatatgccgaggaatctcatttcaatacggaacgaggtacacccgcgtctcgaacatgcaaattgtgcagctggtctttttgatgtcaagaaaatccctctacaaatggaactcattacgagcacggatgtggtcatgaatctcttgaagaaaatggctccccctcttgttactctttttgcagcaaatcctgaaattcaccatgtaatcttgaggaacattaatctgatagttcaaaagagggctaccatactccctcatgagattaatgatttcttttggaagtacaatgaccctatatatgttcagatggaaaagctggagactatgatgcagcttggctcagatcgaaatatacatcatgtgctcttggaattc

SEQ ID NO: 5007 - DNA, 510 bp, Zea mays
  Clone ID: MRT4577_104563C.1
cccaggtaatttttttattttttttttttgtgaagcacccggtccgaccccgggccggacaggggggccccgctttaaggcgcgcgggcacggaatcgtattccaaaaaaagaggaccggattgggagccggaacctccaaaccaaagcttaaaaaattgcctattggcacaagataaggacttcaaagcgtcgaccttcttttggctccttgagttcccggaacgagcgctactcacattggacgaattgtgtccctgttcacacccatgagggggcggaggaattgcgggcttcttattcgacgagtcctgggggcggagcctcaaaaaaccaactagcttctggggagtggcgagagtatctaccgacatggggacgaccttcttcatggactttcgtgcgggcatctcttaagctgtctcagcactgggatcagctgggacctcctgatatgtcatggcggggggaaccaattttgctatcaggggacacactattttttgggagg

SEQ ID NO: 5008 - DNA, 241 bp, Zea mays
  unsure (1)..(241): unsure at all n locations
  Clone ID: MRT4577_104564C.1
acccatgnttttgtttgaagactgtttggttcaaggaatcatctagaggggaatctatccaatgatattttcagggcgcataggtagacctgtaccaaaagacatggcacggattttaggttaggaactttccaaacaaattaatagggtttgaagggggaatagggactcagggaaaattcagggggaaccatagctggaatgctagaagcattaaaccttgggttctgttaacacaaaa

SEQ ID NO: 5009 - DNA, 2693 bp, Zea mays
  Clone ID: MRT4577_104565C.1
aaacaaatggcaaaaatgagattgcatgactcttcagaggaaaaaatgtgctgcaagtattttaaagtccaccaagtaaaaaagaacatagacttgcagcatacgttctgccctacatattctcaatcgcttcagtcagtcagccggccagtctgactagtagccaccattggcttcattttttagccaagacaaacaggaggagggaggagggatggttctccttcgtctctggcacatcctcttcttcctcacatgcttctctccatcctttgttcatcctatggaaccaggcacctaccgttgctccaatgtttccatcccatatccttttggcgttgctggtaagagcccctccctgtcccgtggatttaaagttgtgtgtggacacagtggtccgttgctgtccatcggaaacagcatgcttgggattcttgacatctcgttgcttgatggtcttgtgagcatattggctagtgctagttctcagcagtgcataggagggacggcgaactctagcgttaaccttgaggggaccgtcttcacattctcagacacaaggaacaagttcacagctctgggttgtaacgtggtggccatgcttttgaatggcagcacggggtatagcggtggctgtgcttccttttgctctagcggaaatagcatcatcgacggctcatgctctggtgtggcttgctgccaagcgcctgttcccaaagggctaaagaagctggacttagagttcagtaatattaatataaccaacagcggcatcgattacgggccatgtggtcaggccttcatcgtggagcagaattcatatgtgttttcacttcctgatctgaactacacagtcgacacaaaacctcaataccgacatgttgtgctcgagtggtctgtgaacggcagcagctgtgaagaggcgaaactgtccggatcatacgcctgcgcagagaatgcctactgctacaactcatcaaacggaatcggttaccgctgcaattgctccagtggattcgaggggaacccatacctgcaagggccaaatggatgcacagatattaatgaatgcatcaccagaaatccgtgcaccaataggtgctcaaacacaataggtggtttccagtgcacgtgcccagcagggatgagcggcgacggcctcaaggaaggaagtggttgcaatggagtaagcacactagtgattgcaatagttgcaggattagctctgctagtgcttctcctcatccttggcttctggactcactggcttgttaagaagaggaaacttgcaaagacaaggcaaaggtacttcatgcaaaatggtggcctgatgctgaagcagcagatgttttctgaggaggcgccgctgcacatattcacctccagtgagcttgacaaggctaccagcaacttcagtgatgacaatattgtcggcagaggagggtttgggactgtgtacagaggcattctgtccaatcaagtggttgtggcgatcaagaaggcgcagcgagttgatcaaacccagacggaacaattcatcaacgagatgatcattctttcacaggcgaaccacaaaaacgtggtccagctattaggctgctgtctcgagactgaggttcccttattggtctatgagttcatcaccaacggggcccttttccaccatcttcacaatacgtcggtccccatgtcatgggagagccgtctaagcatcgcggttgagactgcgtcggcacttgcatacttgcacttagctgcaaagatgccaattattcacagagatgtcaagtcgtccaacatactcctagatgacaacttcactgccaaggtgtccgatttcggtgcctcaaggccaataccgcacaaccagacccatgtgacaacattggtgcaagggacactagggtacatggaccctgagtacttccagacaagccaactgactgagaagagtgatgtgtacagctttggcgtcgtactcatcgagctactgacaagaaagaagcctatcatggatgatatcgcggaagacattagaagcctagcgctgcaatttagtatgctattccatggaaataagctgttggaaatcgttgatcctgtagtagctgaagaagctggagtcagacatgttgaaacggtttcgaagttggcgttacgatgcttaaggttgaaaggggaagaacgcccaaggatgatagatgttgcgattgaacttgaagcactgagaaggctgatgaaacaacacttcatcttgaagaacgagtctttgcttcaggagtcatgttgcaatgaagaaatgagcatcgacgcaccatcaagtttgttccttggcgttgatggcatttctgacgatgaaagcatggagatcattccacttacatgtccatccaaaattctcacatcctatccctaactcgcaactatcacaaataaaaaggattttagctgacttctaccttctcaattgccaattccgtcttagtaatctcttcgtcttatgattagcttccaacgtaactacccggttaatggaatatgactgagttatttggcctatcgtcattcagctatgttctccttttgttcctcttgcagttcaaaaggcgatggtagtttcgctatgttggtatctctactgtatcgactgtcaacaaagaaatcaagacacatatgtaccaatctagttttgc

SEQ ID NO: 5010 - DNA, 437 bp, Zea mays
  Clone ID: MRT4577_104566C.1
tggcttggaacctttgggctgatttatgtgcttggaaaaggaccggtctcgatggccgggtctgcgggctttggatttgaatttgatggtcgtcgggggaacgtctgagtcgtctgtgtagtgagagtgggttgatgtgcgttggttgggggatggattgggaatggtttttcagggggttccatttgggtgcagaataattgatctagaatcggcatggataaggggaacctgatcggtcaacctaaatacagtaccgtgatagcttcggaggacgtcgatgtaacgcgacccacgtttagagtctcgaacgctaaagggaagaaacctaattaagtgtgcgcaaatggtgggagcaatcacgatctcaccaatgcagttaaacgttctggtactcaaccagcgatgtgtacgaacggaccaatgagaccctgatc

SEQ ID NO: 5011 - DNA, 498 bp, Zea mays
  Clone ID: MRT4577_104567C.1
gaccgagacgcccgtgccgtcggtgacggcgacggcgacggcgacgatggttccgggcgcccgggctcagcgccggcggcgtggtgctgcgcgtgtccgggcggggactgctcgctggagcccaacccgagcgccaacggcaaggaggacgtcggcgtccggtctctcctcgagcgcaacgacttcttctgcgccgactgcaacccgcacgccgacgccgtcctccccgccagcgccgacgccggcgcggtctacgactcgacgtagcgcaggcccatcgaccggttcagttaggtgctgccacattgccagctactcattcgcgttctccccgcaaacgttgcggcacacaattttctctttttacagatgatggaagaggaaagtttggttccggtggagctggatcggattatcgattccttgctttcttttcttcattgcttccttgcccggaatctgacatgtggttgccggggtgggagccactgatttttg

SEQ ID NO: 5012 - DNA, 292 bp, Zea mays
  Clone ID: MRT4577_104568C.1
cccacgtgcgcccacgcgtccgcccacgcgtccgggccaacaacctttgtgtagtgattatgcacatccttaagatattgttttttctcaaacaacacatgagaactgcgtgcatttcattaagttgaaaaaaaaaggccaaaggataagcagtgtggggcgttgttagccttgggcgtgggtggcctagggaagttggccctttgtataaaagccaaaacagtttgagcacggctgaatgtcctggatccggggattaagaactgaatggctggtgtacacagacatatcc

SEQ ID NO: 5013 - DNA, 368 bp, Zea mays
  Clone ID: MRT4577_104569C.1
aaaaaagaaaaaaccgggtttttttataaaaatataccggggaaagttaaacctgtaaagcatttccttgtggcaaaattaagcaaacccgggttaccaaacaaccttgaagaggttacggtcctaaaaaaaaaaatacggtacatacattacatgctgatttagcagttggccctagctaaacataaggggaaccccaccgttgatgggattgacttgaaaccaaacgggtaatcctttaagtcgcgtttggaacccacaaacgggggatcgctttaatacagtgggcccatggaaaaaaataaaaaactggataaaaatttgcccaacaaaacctccaccgatgatgaccaatttcactttaaaag

SEQ ID NO: 5014 - DNA, 569 bp, Zea mays
  unsure (1)..(569): unsure at all n locations
  Clone ID: MRT4577_10456C.1
gctagnaagggagagccggctggcctatttatgtaatcaatggnatgagnaaataaagtaggcaagaattagaagggagaaaccctcctcttgctctgccatgggcagaggccccggccgacgttcttgcccatcgatacccctctccaatccctcaccgatctaccgaccataacacattgtcagcaggtgttacatcctgttactgaggaagaatacccatattaatgtctgtaccataaagagccttgaatggagccaaaccaatagcagaatgatgtgccgagttataccagagttctgccagcgagagccaagctgaccaatctttggtagatgctgaaactgcacaacggaggtacatttctaagcattggttgacgcgctctgattgcccatccgtctgtgggtgatacgctgtgctagagactaacatggtccccaacagttggaagagatgttgccaaaaactactcataaaggtacaatctcgatctgaaacaattgtggtaggaaccgttaaggcccaggtctactgcctatatatattatatagtccttagggactg

SEQ ID NO: 5015 - DNA, 271 bp, Zea mays
  Clone ID: MRT4577_104570C.1
ggccgcaccgcgctgctcagcaggacacgtgaacacccagacacccactaagggaatcaagtctcgcctccctccacggtggagggaggaactttggcactagcccttggagccaggacaaaagactcgtgtctcaggcagactttactctggttactaagatcatctgtgcatgacggggagggtggaacaggtcccggaggagtcgtgaatggttctcaccaggacctgaatcgttgcttgtgtttgagaattggaggaatgagtcagc

SEQ ID NO: 5016 - DNA, 353 bp, Zea mays
  Clone ID: MRT4577_104571C.1
cctgccattacatacaatctcttcctgtacttgcggaatatgagataacaaaccttgcgtgacgggggatatgacaaggcgggggctacgataatgcccacgaaatgaccaaatgcattcgtgttcgacttgagcatatgcacaccaacttctacgcatataatgtccattttgtgccccttcattacatttaattggcggtgaatcgaaccctgttttgaagattactagcactcataggacggcaggaaaacacatactttacaggattgttctggttaccacacagttatacatgcactcctattgcttagctcgcatggaacaacatgacgggctggatctagagaaac

SEQ ID NO: 5017 - DNA, 288 bp, Zea mays
  Clone ID: MRT4577_104572C.1
aaaaccaaaaagggggagggtttgaaaaacaaacttttaaaccccggggcccgtttggaagttttccctgacgggggaaaaaaaggccctgggattgtaccttttaaaaccccccctcccaaaaatggccacaaagaagggctctcaaaaaaaaccggggaaccccccaacccccaacaggaggcaatcccggtgccaaaggggggggctcccaaaacaaacccctttggtggagcccgacccctgggcccccccctgggtcaccccggaaattccggacccggcccc

SEQ ID NO: 5018 - DNA, 1030 bp, Zea mays
  Clone ID: MRT4577_104573C.1
aaccaatgaacacatagcattcagtgggccttaactgcctgcagttcctgggctgtggaaatcacacacacggcggcatcccggaaggccggaactcgccttcgactccgacagccgacacgacggcggcatcccggaccccaagccggccgccgcgtccgagagcgtcgttgttgaatagatgcagtccaccccgcgtcggtcggcatcctactcccacctactcccctaccaacccgcgggggaggggggacgccatgaggaagactttctgcttcgggggcagacgtgtggccaggaagatgtcggaacgggcgccgatggtcgacgggtgcgtgttctgcgatatcgtccgcggcgcccccgcctccaccaccgctctcctctactccgatgataaggtcgtggcgttccgcgacatcaacccgtcggcgttcaggcactatcttgtcatacccattgatcatataccaactgtaaatagcctccgcaaaaccaaagatgatcaccagttagtgagccacatggtgaaggtggggaaagacttgctcaatcaagatgctccaaattctgaggaacacaggtttgggttccatcagcccccatttaatagtattgatcaccttcatcttcattgcctggcactgccatttatccccagttggaggcaagtaaaatatacccctctgggacctttaggggggtttatcgcagcagaaaagctattggaaagaataaaaccagaagcagaagcatacagttagcatcaatatttttactgatacctgctatccctgcttatttgcattattttgtactcttatttatgggtcaatcacaatcagtacatttatgtgagtatttactctcttccctcttctgtaatcagctgacgcgtattgtgtattgtattcactgtttggacttctcaaagactagatctgtaatgttgaactcaatgaaactaaccactctagaagttaaattcaaaaaaaaaaaaaaaaagcggctgaactcaatgaaactaacc

SEQ ID NO: 5019 - DNA, 836 bp, Zea mays
  Clone ID: MRT4577_104574C.1
accggtaccgaccttcccgggcgaggatgttgggtcaaatgtggcagcatgtacatccaatcatgcaaggcatcttaagagcgtagataacaaaaccgaagataccaggcatggtctgtttaaatttaaagcccgtccgttggatagaaagagttagagaacaaaggtgatggtgtatttcgatgtgcaaaaaggaatacaactgtgcctaaggaatttaacctatcaacaggcaggaaagccaatccagctccgttgtctgaactatttaacaagctttctttaactgcgggtgcacatcaaaatcgtggagtagggcgtcagatcagggatctgccaaattatatcactaccaaggactgcaaagagaacatgattggtaacatgcatcgctagtctgactcatgtcaatgaagaagtagaatatacaggatttctcttttgatagttagtgcctggtttaggctcaacgtcaccccacccgcacagagaccaagcgtttgttttggtgttttggacagttgactcagaaggaagctcgcatcctcctaacctgctcatacattatttgagattaagagcaccatcgctgaggtcgagtgtggaggcactgattctcgtctcggtcatagagttgcttctgctgagcatgttacagttatctcagctgcccggagccaatgagtcatggctgtgatggggtggtttttggacagcaagagataaaccatagtgtaggggcggctcactcggtggatctgcagccctgcgggctcccgcagagactccaaagtgtaacgtattgcaatcgtcttggcaaggtcggcttttttttt

SEQ ID NO: 5020 - DNA, 936 bp, Zea mays
  unsure (1)..(936): unsure at all n locations
  Clone ID: MRT4577_104575C.1
cctcgaggcctccgaattcgcggccgcgtcgacccggaactcgccttcgactccgacagccgacacgacggcggcatccaggaccccaagccggccgccgcgtccgagagcgtcgttgttgaatagatcaagtccaccccgcgtcgggcggcatcgtactcccacctactcccctaccaacccgcgggggacgccatgaggaagactttctgcttcgggggcagacgtgtggccaggaagatgtcggaacgggcgccgatggtcgacgggatgataaggttgtggcgttccgcgacatcaacccgtcggcgttcagctccctgttgcttggattgatctagatgtcgcgttacgggtcatcggacgaactagggcatgggttcatttcatcgaatacctggcactatcttgtcatacccattgatcatataccaactgtaaatagcctccgcaaaaccaaagatgatcaccagttagtgagccacatggtgaaggtggggaaagacttgctcaatcaagatgctccgaattctgaggaacacaggtttgggttccatcagcccccatttaatagtattgatcaccttcatcttcattgcctggcactgccatttatccccagttggaggcaagtaaaatatacccctctgggacctttaggggggtttatcgcagcagaaaagctattggaaagaataaaaccagaagcagaagcatacagttagcatcaatatttttactgatacctgctatccctgcttatttgcattattttgtactcttatttatgggtcaatcacaatcagtacatttatgtgagtatttactctcttccctctnctgtaaccagctgacgcgtattgtgtattgtattcactgtttggacttctcaaagactagatctgtaatgttgaactcaatgaaactaaccctcta

SEQ ID NO: 5021 - DNA, 699 bp, Zea mays
  unsure (1)..(699): unsure at all n locations
  Clone ID: MRT4577_104576C.1
cctcgaagccggccgggaaaaaattcaaaaaaaaaaancnnnaaaaaaaaaaaaaaaaaaaaaaaaaaaaaaaaaaaaaaaaaaaccaaataaaaaaaaaaaaaaaaaaaaaaaaaaaaaaaaaaaaaaaaacccgatttccccagggaagggccaatttctttcgaaactttcccaagccatgggaaccggaacggggaggttgttccccgcgttcttaaggacctaagttccagcggggggggggggcctctccaccaaaaaggttgtgggcgaacccgccgtcttcgaaagccacaccgttaaggggatgcagaacacaagaaaaaagcccccaaggaaattgataaacggggaacctcaaataaaggttgagggccaaattgccgtttgaaaaggggtttttaaaggggttgaattgggccaccaaatcgagaacatcggctttgatcgggaggaaccaaaggggggaaagaacgggggcccccgttaggttcaagtcccccatcacaaaattgaaaaaaaaaggttgttaaccgctgaaaaagttgatttgaggatttaatgggcacacacttttgtcccaaaaggttcggaagggaactttaaacaaggttggggggaaaaaaataaccttggaggatcaccctcttctcgggagatctttaataaacccggcctaagaagggtcaatttttc

SEQ ID NO: 5022 - DNA, 129 bp, Zea mays
  Clone ID: MRT4577_104577C.1
aaaattatgatctgatgttttcaattctttctatgatgaacatagttcagaaatatatcgggataaatctcaatcaatatcttgattgagcggacgcttgggcggacgcgcgggctcgacgcttgggcc

SEQ ID NO: 5023 - DNA, 309 bp, Zea mays
  unsure (1)..(309): unsure at all n locations
  Clone ID: MRT4577_104578C.1
cccgggcgcagtcagcggttttgaagtagcgggcgcgnaggaagaggggggcgcgtgcgggaactattcaccgggtcttcgccaagaagagatgcggattcttatggtcggtctcgacgccgccggtaaaaccaccatcctctacaagctcaagctcggcgagatctttacaaccatccccaccatcnntttctggggtttgactngggagtacaanaacattancttcacnntctnnnatntcnnnnntcanaacaanatcanacctctctnnnancattacttccanaacactcatnntcttatctt

SEQ ID NO: 5024 - DNA, 514 bp, Zea mays
  Clone ID: MRT4577_104579C.1
ggaaggcaggcacaaaagcttccactttaattaaatcacgatcaccacccaactcggccagaaaactagtggccagatacatacgagctacagtctcctgaaagcccaactgccacagcactctctctcgtctactgccgtcgagctttcttgagcagttggatgcgcagcttggctctgccaaacaaacatattactacctcgcatgcctagaggatacatttttttaacgaatatgaatttatgattaactctgagacatattgttgccaccagcaggctttaactccatgcgacgagctctgcaaagggggcaactgcatgtgttgttcgctttctgcccaagccagcccagactgatctcgtttttttcaattgggggaggtccttaagtaagaaggaaacaaaacatgtctccaaatcggacgcgtgggtcgacccgggaattccggaccggtaccagcccgttacaaaacgcttgatgtctgcaaagtctaaaactgctttgacattg

SEQ ID NO: 5025 - DNA, 1060 bp, Zea mays
  unsure (1)..(1060): unsure at all n locations
  Clone ID: MRT4577_10457C.1
ggcgcgcgagaggaggagcaagnacaacgagaagatgaaagcgctgcagagcctgatacccaactccaacaagaccgacaaggcatccatgcttgacgaggccattgagtatctgaagcaactgcagctccaagtgcagttggtgggggcaacattacagcgtcaagctctggggcagtgatgccaccagtaaaccaaagttcaggacttcaagtatttgatccattaaatcctccacgagaccaaccactgtcttttgtattaccaaatgtagacaaaaccattcaagaagctccctttcacttggaatcatcgcagttccaccctcgaccatttcgaatgcctgaatcttctgaggtgaggtagtggcaaagcaccagctaacttcaattcaaggaagagttagtatgccaggaattggtatgaaccccattaggcaagaatcatccactgtaaaagctgatcagtttgatggttgctcacatagcaaagagtgactacgagatatgtgccacaaaatgcatgacaagttcagcttaggaaatggcaaccgatgaggaccgaaggcaagatgacacagttcagtaacccagctgacagcctggcacgcaggcttcccctttattttcctctgttactgcaatagtaacttaaatttttaggcttcccctttattttcctctgttactgcaatagtaacttaattttttttaggcttcacctttcctttttgtttgaaaattagcagggcagtattaattaatagtacaaaaccatgtatcaccaagatttcaggggttgaaacttgaaatgccaatattcaccaagctttcgttttttttttcaaagagtaatttgcaaaggttgtaatgccctctatagcctatagcagacttaacaagcactacaatagaagacagcatcagcagagtcaatgcgtatacacctacaagggaacncaacccatgaagagagttaacaacaagaaggaaacttgtgctgtaactccacatctgttcattcatgacctagtaattaaaggatcagaataagcttcgcc

SEQ ID NO: 5026 - DNA, 118 bp, Zea mays
  Clone ID: MRT4577_104580C.1
attacgcgtgggttaacaaactatcaattaggagatcgatgcttatcatatggagcataggcgtatgatgtattgcataccatgctctagaatgtcattctatgatgtgaacagagca

SEQ ID NO: 5027 - DNA, 514 bp, Zea mays
  Clone ID: MRT4577_104581C.1
taggggccttttttttttttttttttcttttttttttttttttttttttttttttttttttttttttttttttcttttttttttttttttttttaaaaaaaaaatgcttaaaaaaaaatcacatggaaaagccccaacattttgatgggggaaatatgaaggaattataaattacttgacttcttgggggggatggtgaagttaccaattttcccggggacacctgaaaattggaacgtttttcctcttacggaatcaggtttcaaaggtgatttccaactcctccttgccaaccatgaggaaatgaaaccctctggcgatcacctttttggcggccgccctcgtccgaatgaagggttcccacggactgacatggaacctgacgttggccttctccccagctttgaggggggggctcctgaaccctatcagttggctcaccgggcgtccatccgtcgaattgggccaccgggggaaaatgagcaccgagggtttcccgtccatcggaccgggg

SEQ ID NO: 5028 - DNA, 379 bp, Zea mays
  Clone ID: MRT4577_104582C.1
ctcgactccaaggtcatcaccgaccgggagacgggggggtgccgcggcttctgctgtactaccttctccaacgagaactccatgctcgacgctatcgagaacatcaacggcaaagatctctacagccgtaacatcaccgttaaccaggcccaatcccgaggcgcgtgcaaacacctttaaggcttgttcttctacgtcagattgcaccccgaatcctttcagctaataaaaacttaaataaaattaaaaaaccaatccgcttaaaaatcgttccgaccaccaatcctacacaaacgaacaaagccttagtctctgggaatacggtatagctgatctttaggctctcccagattggtttgcccacaggcgcgtgcatttc

SEQ ID NO: 5029 - DNA, 1178 bp, Zea mays
  Clone ID: MRT4577_104583C.1
cactcctcaccttgtattctaaggaaacctttatccatggctggaggtatcatactactcctgcttgtcatccccctcgtcgtgagaattgaagggagtgtcatgggggagagatccaactcgttctcacaggactccaataattctagccctgctgaaaacaaactcgaaccaggtgaaaagtccttcgcatcggaggcatactgtgagaggtgtccagacctagaataggtgtgaagtgtgtgtgcgtgctgggcgcgatgggtggagtgagccactgtaaccaggatacatatacactgtcttgtggagggggaaaaggggatgcataatgagaattatcaacataactcctctcattcccttttctctgttcctgcttcctcttctccgatctctcctcttgtcctctacttccctattctgattaggtctgctgctctggttggtgatccttaaggggttgctaacaattggtatcaaagccattcgatccttggagttttctgcctcgatctgtttttctcaacctcaccgcatcgccatgtcgctcggagccggcgttgttgccgacaactggggcgacctcttcgacaacgacttcgtcgagcaacagtacgagcagcccatcatcgccgacaactggggcgggtgcttcaacgacggcgagcagtactgcgcggtgctggacgcgttgcccaacgacatccactcggacctcctcaactcatccgcgcgtcacagccacgaccatctcttcatcctcaaccccgtggccgctcaggattcctctgccgaggaggccatggtcgcgatggaagcagccgcgaacgcgggggatcccacgaggctcgaccaaccctcgtcgtccccttccctactcgccgcggggaacctgctgccgccttccctcgtggtgccgcagctgcaagctgaggtcgtggacaagcagttccgcaccgcgatgagtccagcgccttctcttcccgtcgtcgacgagctgtaccacgacgacgctgcggggggtgatgtccttgggctcgagtgcgttcaaggtgctcgaccgaatggcagagagcgcgagagccggcggtgtggtggtgaacacgttcgaggagatggaaaccggctcgacggcacttctcgcgggagcgacgggcaaaaatctggatgccaag

SEQ ID NO: 5030 - DNA, 247 bp, Zea mays
  Clone ID: MRT4577_104584C.1
gcgagtacacgctattaatttttttttttttttcatttctattactgatcattctcatttttcttgatcaactgtacctattataacctactattctcgactcatgaatgacataccaaccctgggtgcctcccatcacactgatgccgctagcaaatcacaatcctgcccatactggaccgcctatgaagtgaccaacaccgatagacattataaaacgcaccgaggatgaagcacaaacatcaca

SEQ ID NO: 5031 - DNA, 546 bp, Zea mays
  Clone ID: MRT4577_104585C.1
acaagctttttttttttttttttttttttttttttattttttttttttttttttttttttttttttttttattttattgtttaaacaaaaaaaaaaaaaaaaaaaaaaaaaaaaaaaaaaaaaaaaaaaaaaaaaaaaagggagagagagagggaaaggaagagaaaaggggaaagaaaggaagaaagaaagggggggggaaaggggagagggggggggacgggagagggggaggggggagggcagggggggccaggcccaagacgaagcccagggcaaaggcgagcgaaaggaccaaaaccgggaccgggaccaagcgggggacaaagccggggcaagccccgagcagggggaaaaccagggccaaacccggttcccgtcgcatacccagaaaaagccaaaaaggaaaaaaaaggggggccggaagggggagcgaaaaaacacgaaaagccagaagaggaaaaacgcggggacaaacgggaaaccagtcaggacccctgagttaacaattaaaccaacccacccacaaagacgaaaaaagagtcg

SEQ ID NO: 5032 - DNA, 1326 bp, Zea mays
  Clone ID: MRT4577_104586C.1
gggcaagtttcggttttccagtgttctctccgttctctgagcggctccctctccatcattactctctctccaccgcaagtgtgcacactgcacagtgccactgaccactgcgagctctccctccagtttcacacaccctgatctgttcgcatcagtctcccggtcgcaagcgcctccgaaaccctagactcgcctcgcgagttgcttcgcttctcctgcccccgatggagccgtccccggcggtcgctgcggagctctggtgctcaccgcacctcgccgcgggcggcggccgcccgttggaggcgacctcggccgtcacggagaagagcagcggcggccgcggaggaggcggcgccgtccggaggaggccgagggagaccccggtgtccgaggatgactcgtcccggatcgtctccacttccggcggtggcggcggccaggatttgactgatctagaagcaaagcgttccaaaacaaataagtccagtaataataaaggcagtctaagaacagaggttgaaactgactcaagaagtgctggcaaggctgttagtaaaaacattccagcagcagagccaccaaaacaagattatatccatgtcagggcaaggaggggtcaagcaactgatagtcatagtcttgcagagagggcacgtcgtgagaaaataagtgaacgaatgaaagttctccaagatcttgtgcctggatgcaacaaggttattggcaaagcatcagtacttgatgagataattaattacatccagtcgttgcaatgtcaagttgagttcctgtccatgaaactagaggcagtgaatgcccaggcaaaccagggagttgaagtatttccagccaaagattacggttctcagacatacaacacagctcctgggctgacatttgatacgcaaaccagtagagaatacgcccagggcacgtcgacctcggaatggcttcacatgcagattggcagtggctatgaaagggtttcatgaacgagatgaatccaggcagccgctaaataaagtgaaccatgatcaatcatggccgtgcttgtagatcattctttttcattttttttgaaaccatcatgttccagacgcattttttattcatgcttggagctgtaattccagccggaacatgtatttttgatgaggcgctcatttgtttccccatctgaatctcaagactgtttctgctgttcatgtattccatggaatttctgtagatcgcgttcgtctgtcagaaggatgaataaatcagttgatgctttgattttgaatcaaaaaaaaaaaaagtgggcggacgtgtgggcggacgcgtggg

SEQ ID NO: 5033 - DNA, 192 bp, Zea mays
  Clone ID: MRT4577_104587C.1
tttttatttttttttacttagaacgcgtgccacgataatattgttcaccaacaaaaggttctaacgcggatacaccgcgacaacagacgataaattggtggatgggatgtgggcgtgctagtcactgcagcagacacacgttactgacacaaaccgcttagtccaccttctctatcttggagccagggccac

SEQ ID NO: 5034 - DNA, 349 bp, Zea mays
  Clone ID: MRT4577_104588C.1
atgaacacgccattccaaacttgttgattagaaaactccaggcgttacataaaaaaaaatgccccaccgatgttttttaaaaaaaaatgtaacaaacatttcccccaaaggggctttataccgtttccttccaaacattaaaagccccttttatatggaaaccattatttttgcaaatcccccaaacaaaaattaaaagggccccaactttgccgggggagcattttttatgttccaaaaaaaaaagaaacattccccgcttgagaggactattcatctttttatttcccagcttggggaaagaaaaaacaaaaatcactcccatgctttaagggacccacccccccca

SEQ ID NO: 5035 - DNA, 191 bp, Zea mays
  Clone ID: MRT4577_104589C.1
ctatgatttagggccaaaactaccctggttttgtcttgcaacttgaaacattgtgtattttaaactatataatttgggaacattattttatagactgtggataaccaaatataagatttgtgatttttaatgcttcatttgtgtaaaatcatttgtatattctatttatagtatgcattttctagctcatt

SEQ ID NO: 5036 - DNA, 298 bp, Zea mays
  Clone ID: MRT4577_10458C.1
ccaatcccatccaatcgatatgtattgggaataaccgaacaagccctaaatcagctggtttcgaatagagccaatcctctaaccaaacacgccacaacttattcaactcgtacctcatttacccaagaaaaccgtatctaagcactgctatataccacccgactatccgcgcttacaaactctctatttttctccacctcgtcaagagcgctgatcgccagatatcccccctcccctgggagccggagcgtacagtgtaactgctcactgcgaatatgctccgtcaggcagagcgact

SEQ ID NO: 5037 - DNA, 240 bp, Zea mays
  Clone ID: MRT4577_104590C.1
gggaaacagaccctttattgtaatgaaatgggggataaggtaatgacatatttccagttggtttgcaatgagcatactgtccaaagatgcaatgtgcgtagggcatataatgggtagtttttagctgaactgaaattcaccgaaaacgactgaaatggttcgctttgtccaaaccaaagcccagtgaacacaaaatggggcatgtttgagtccaaagcaagccagctttgacaacatttt

SEQ ID NO: 5038 - DNA, 235 bp, Zea mays
  Clone ID: MRT4577_104591C.1
ggggcgggaccacaacaaggaaaatattttaccatgagattcacgaggggatcacccaaatcatccacaagggggggattggttataaggcaaaggggacaaaaccccttagggcagcaaacaaagggccttcatgggaaaaaggtaaaaaccgaccattgaccacaaaagttttacccgagacattcgcaagcaaagggacccccaaaaaacttaaaaccatcccacgcgtccg

SEQ ID NO: 5039 - DNA, 265 bp, Zea mays
  Clone ID: MRT4577_104592C.1
gggaaaaaagccgggaaaatatttcggcccaagggaaagggcacatcacaggaaggccaaaaaaaaaaaaagggggggggccccaaacaaaaaatccctaaaaaattcttttggtggggcccggggaagcatcccccccccccaataacccgaaggggtccccgggttgatcttcaaaaaagcttcagggtgaccaaaagggggctgggcgaacagttaaacggggggatgggcattttttgccttttcgggcaagggacccctc

SEQ ID NO: 5040 - DNA, 185 bp, Zea mays
  Clone ID: MRT4577_104593C.1
atcctcagagccggccggaactgcaatcaatcatgtaccagcgattcaaagagcgagagatgcatcacacaacagctagttacggagtagcaacagctgaagttgacagaggccttgctacatgaactcgtccatcacatctggatgggaatctgctggggatgacgcacctaagccagcacaac

SEQ ID NO: 5041 - DNA, 370 bp, Zea mays
  Clone ID: MRT4577_104594C.1
aaagacattctcattcacttgctaacgatacaatgagatccatctcattatcaggaaggttactacttacacttacaacctattaatcaacaatcatttactcaaccaattcatacacaacatccctaccaaaatcagtcctattgccttacaaactagatctacctactattattcctataccactgacccaactactgccaaattaacctcttactctatctacaatcacttaactaacattactacctaaagcaccaataccttacaatatattcaataacgacaaaataatcccttgactacctaatatctatccaatcactactacttattctatcaattgcttaattaacttgctgttgccatc

SEQ ID NO: 5042 - DNA, 430 bp, Zea mays
  Clone ID: MRT4577_104595C.1
ccaaaaaaaaggttttttttttaaaatttcaaacccatcctttgggggggggttatccggaggggggggggtttttggaattccccccttcttgggcattatgggaatttggacggacacccccggggccttgttttttttttttgggggtgattttttttggggccccttgggtccaacaggggccaaatttaaacctgggcgatttttagccggggggggggcctttttccctttggggaacgggatggggccctaaaccccgacctgggggttttctctcccaatgggccttttagcgccctttgggggggtaaccatcccctccgggataagggtttttattttaggggcccttttggggccggggatggaatgttattggggggccatattccttaacgattttgggaaaaaaaaccccgggggg

SEQ ID NO: 5043 - DNA, 216 bp, Zea mays
  unsure (1)..(216): unsure at all n locations
  Clone ID: MRT4577_104596C.1
acgcaccgcangnncccaagggaaaccatactagagcggcagagcccgcgggtgcgctccccagncccacccgcaccctagcccgcaggaaacccnaaccgcccgncgccangaaggacaccccgngcaaggccaccggcgccaagcgcaagaaggncggcggcgccaagcgcgggcacacccccaaganngcacacncaaaaggggggggggggg

SEQ ID NO: 5044 - DNA, 279 bp, Zea mays
  unsure (1)..(279): unsure at all n locations
  Clone ID: MRT4577_104597C.1
agatgatggactagcttattaaaaaaacgaaagaccctaagtacaccaaataagggcaggcagatcaagtgcccaaatattgtaagagctattgtataaggagcggaacttacagagcaacacatttgttaagtgcaggggggggataatagaaattaaaaacattggtgcaggaaacacctcgagagggaaggctgccagaaaaggtacataaaagagcgacgggtataatacttnnacaaaaaggcctnnagcagnatgctgatatactaaactggt

SEQ ID NO: 5045 - DNA, 500 bp, Zea mays
  Clone ID: MRT4577_104598C.1
ggggggttttttttttttttttttttttttttttttttttttttttttttttttttttttttttttttttttttttttttttttttttttaaaaaaacactggcattcgccccttttttttaagttagatgggcgggaacccaagggggaggcgggcgctgaccaaggcacacttggtttccacaccggacacaaactaaaaaacccctgggctaggtaccggggccgggggctgcaacacttgacccgaaaaaaaactaccgctgctgggggggggggggggcaaaggcgaggggagcccaaacgttggtcccaacccccttgggctctccttttccggtcaccttaaactggggggggggaaaagctgaataccccccccaccaaaagggcctaggggttgcccccgaagggagccccccccccttgccccggcccggaggacaatctggggggataacgccgaaaaccccccccccatgaacgggcccccccaaaaa

SEQ ID NO: 5046 - DNA, 871 bp, Zea mays
  Clone ID: MRT4577_104599C.1
atttccggttcgaccctagctttcgtgtatcttgcaggtgacatgcatgtctgcaattggttcattggctgctgctgcggagcaggcttttaccctatacgccgaaaaagtccttgagatgatgaaaggttttatggtgttaattaatgacgaagatctgtgtgcacgtgctagggctactgaggttgttgggatagtagcaatggcagttggcagagcaagaattgaagcaatattgcctccttttattgaggcttctatttctggttttggattggattacagtgaactcagagagtacactcatggtttctttagtaacgttgctgaaattttgggtgatagttttacacagtatcttcctcatgttgtccctctcgtattttcttcctgcaacttggatgatggttctgctgtggacattgatgatgccgatagcattgaaaatggatttggcggtgtttcatctgatgacgatgttaatgatgaaccaagagttagaaatatcagtgtgaggactggagtattagatgagaaagctgctgcaacacaggctattggttttttcgcactacacacgaagagtgcctatgctccgtatcctttaggccgtctccagcagttcatccatatggtcatcgaaaacactgttttgcactgttcgtagagtaaagtttaaatatggggatgagtaagctgctggagagtttaagaaatgctaagctgctctagtcacagttttaccgttccaaatttccttgactgacactaggtatctggaggagtcactgaagattttgatccggcacagtggttatttccatgaagatgtcaggctgcaggcagtcatatctttgaaacgtaacttacc

SEQ ID NO: 5047 - DNA, 878 bp, Zea mays
  Clone ID: MRT4577_10459C.1
gaacaaccatcttcatcagtttctaatagagaatctagtgcaaataatgcttcttctctgaagtcccaagaaattacagaggttgcaggcgacgcaagaactcaacaccaaaataaacctcgtcgatactcggagatgaactttggccagtgaacatagtgatgatagtaaatcagtgagggttcattggagctttggatccaagtaagacttgtgcaagagaccctggccttaccaagtgcttccagcatttcactgtctgatgtctagcactatcttgtgacccaaacgaggtttgacaggaggtgttcaaaccatcgctgtggtcatttgctgtgattattctgacgggctggtgttgttacaatcattaggtgagattttctggtactctacgtcaccacaataccagacggtcggtccgtaagtgtgaaggtcttgatggaaatcgtgaggacggaggtctcggtcgtactgcaaagctcgtgtccccgctgtacagtgtacatcacgtctctgactgtgtttgggtgtgcgctgcctctgcctacgaactcttcggtggttgtcgcatttttgaactgacaaataaaaaagaacgtgttgagcaccaaattgagaagggcggacggtccagcccggtccggacagtccgcgcctgtgggctgcacggtctgcgcaagcgcagaacagattagggttccaagttttgtgctacagttgttagctagattcgcaggattcgcttggaaattagtttgtaaatggttcagtccccctcctctataaataaagaggtatacggtcgatttgtaataatcaatcgaatcaataaaacttctatctcgcatttattttctgtgcaaaccgattaaaaa

SEQ ID NO: 5048 - DNA, 708 bp, Zea mays
  Clone ID: MRT4577_1045C.1
ttccattcgaaaccgcggcggctcctctcctcgctttccatcctaccccgggacggaggggtctcgccggcgacatggctccctcaatcgcgccgccctcttctccttcgtgcctccgtgggaaactctttccacggttcactggtaccaacagtcagcccatgaattctgtcttgcgctgcgacatttcagtttcaccaactttggcatcaaacagcttaaggagaaccagttcggttcacttggcaaataataatcgaatcaaaagctttcatgtatgtcatgctggggttgatccgtcagaacgtattgttgtaaatggacaggtttagtcatctaaaactgttcaagctgatgctgctgcattggggaccatatctgctgacatggctcctgtcgtcgatgggttttcagctgatgatgatgaacttgacctagatttgcctacagagggtttctcatctataccagaagctatcgaagatattcgccaagggaaatatgtgattgttgtggatgatgaagacagggaaaacgaaggagatcttataatggcagcatccacggtaacaccagaggctatggctttcatagtgaggcatggcactggcgattgtatgtgtcagcatgaaagaagatgacctggaaagactacaactttctcttatggtagtcggaaaggaaaatgaagagaagctgccgacagcc

SEQ ID NO: 5049 - DNA, 276 bp, Zea mays
  Clone ID: MRT4577_104600C.1
gcgggcatgactctaagatgctgcgtcgaggattgaccggacccgctgaggacaccactgctggtgtggggatgctcgacctgacgcagctctccggcgcccacgtgctgcttgggattgacccgaccgagatctgcacgatcaggcaggtcaaccacgcgtatcgctgcggccactcggttgactatgggtggaaaagcaacactgacgagaactacagctacctggttgatgtcgtcgggagctaccacgatgggaagcaggggcgggccccta

SEQ ID NO: 5050 - DNA, 379 bp, Zea mays
  Clone ID: MRT4577_104601C.1
tggttcgacccacgcgttcgtctactccttcggaataacagataatgctgctgcttggctacttgctattgaaggaggtgataccactgttgagcagactcttttaagcattcaagctgctcaagaccgggtattcagcatgagatcaaatctcaagcatgcaatggctacgaaaaataatggaattacccttaaaattaacacactccggctcagcacacacagctaaaattgctcaccaggaaagggcacagttgctggactgcatgatagatctccccacgacacactaaaatgtgatatggatgattctgccatgcctgatattgctctttcaagctatggataagcttacaacatggatatttttgagaacacc

SEQ ID NO: 5051 - DNA, 145 bp, Zea mays
  Clone ID: MRT4577_104602C.1
tcgtaatcttttctcaaatccatcaaaccgcggttgtttcccacactataatggggacctcccagccaatatcaagatcaaaaacatggcgagcggacaaaccagaaggctgagaaagaaaggcggcaagaggggtgacaatgtc

SEQ ID NO: 5052 - DNA, 235 bp, Zea mays
  Clone ID: MRT4577_104603C.1
aaaagggggaaccttatagaccccctccatttttttgggccaaatggtttaaccagggtctccccttcggagacaaacccccaaaagccccccaatttgaccggccccgctggttacgcaccacgtagaccggaagggaacaaagggggaatgggtaggaagaaaaaccccgggcccccaaggatgggaaggatgtgtggcaacccgaaaaaccctcaaagggggcccaaccccc

SEQ ID NO: 5053 - DNA, 355 bp, Zea mays
  Clone ID: MRT4577_104604C.1
tcgagcgggcggccggggcaggggcaagctttttttttttttgtttttttttttttatatatattttcttttttttttttacctaaattgctaatttacgtaattagcggcaatgatccagtaataaagggggacgcctcaccaattattacaaaatcagtggggggcggtgggggaactaacaatccaaataaaaaaaaaaaatattcttcccaaaaaaaaaaaaccccaaaccaaaaccacactaaataccaaaattccaaaaatccataaaaataaccaccccctttacatggatccaaaagggcccaatctcggtataaaggaaccgtttaggggggggcggccgcgcctt

SEQ ID NO: 5054 - DNA, 224 bp, Zea mays
  Clone ID: MRT4577_104605C.1
aggcaaatactaggtgggatttttatatagtacgtaaacattctttttatacatatgtctgttcggatttcttcttattgcccaaaaacagaccgtattcatttggtcaaacagtagaaaaacacccgcgctgtaacatgcacactgtgaagggggcaagatcaaccggtcttgtaactaaaacactcacccggggggacgagatgaaaaataaagggattccc

SEQ ID NO: 5055 - DNA, 209 bp, Zea mays
  Clone ID: MRT4577_104606C.1
attccacttccacttggatcgaggtaactgtatatggcggtactgtggtggtggccatcgccctcgcttgtcctcccgcgccgttgctgctgtgcttgttttgcctgctggtggttcacggcagcgatggaaccaggcacaacatcaacaatggcggtggttgtggtagttccagcagcagcaagagccacatgcaaggttgaggggga

SEQ ID NO: 5056 - DNA, 660 bp, Zea mays
  Clone ID: MRT4577_104607C.1
tcttttttctcctgctgtaccggtccggggggcccccaccacgcgcggagcgcaacgcaatcctatgtcaggcgcgcaaggagctcagccgaagggcgccttcacggcgaccacctacacatcggctgcgcccaccggtggcggcgccggcgcggcccaggggcaggggcaggggcaagaccaccaggagagacggcagactccgcggacggagctccggtcggccgaggacgagcgcgggctgcctgtcaggaagctggaggacgcggtcgaggatgccgcgggcaagggcgggccggtgttcggcgccggcacggacgacgggaagccggatctcggggtcaccggcaccggctgatgctagccggatgtgcttcttgatgtgacgctcagtcaacgagcgagtcagcaagtgaaagcacaaggatgtgtccagcacatagtgcatacgatcggtcgtgtaaaatactgtacaaagtatgcacgtgcgaaataacactgttttgctgagcgtttgaaatagaaggtgaatgagatggaagagctgttagagatagattaagtatagtgtaccgtgcaaactgtgatgtaattaaccgtgtactgaattacaagttaatccattccaaccttaaaaaaaaaaaaaaaaaagggcggccg

SEQ ID NO: 5057 - DNA, 607 bp, Zea mays
  Clone ID: MRT4577_104609C.1
cctttttttgccggtccggaaaccccgggcggaacggagcgcaacgcaatcatgtcaggcgcgcaaggagctcagccgaagggcgccttcacggcgaccacctacacgtcggctgcggccaccggtggcggcgcggcccaggggcaggggcaggggcaagaggaccaggagagaaggcagactccgcggacggagctccggtcggccgaggacgagcgcgggctgcctgtcaggaagctggaggacgcggtcgaggatgccgcgggcaagggcgggccggtgttcggcgccggcacggaggacgggaagccggatctcggggtcaccggcaccggctgatgctagccggatgtgcttcttaatgtgctgcttagttaacgagcgagtcagaaagtgaaagtacaaggatgtgtccagcacacagtacgtacgatcagttatcgagttatacatcttagttgagatctttatacatgagaccacttctgtaaatttgtgtatagccacaaagagatgtgtgaattctccttgtacaggtttgaatggccctactatatcgagacacttgattgagagtggccttgtaatgggaattatgagatgtagg

SEQ ID NO: 5058 - DNA, 581 bp, Zea mays
  Clone ID: MRT4577_10460C.1
ggtctcggccggggccggggaaaaaaaaaaaaaaccccaaataattaaccatggcatccaataacaagattgtagggatgcctgttgtcttcatcctcgccttgctccttgtttcctgttatgtggaggcggaaatctgcgcaaggcctaatcctcattatcctggcgcatgcaggagcaataaggactgtgcaggctcgtgcattcagcaaaacctcggcaccagcgggtactgcaagggcagtgtcccccttttcaaatcatgctattgtacctttgaatgtcccatggaggacgaggcagaggggggagggcgtctatcaggcgggcactagtcgtgagccgccatctgcatgactaaattcaaagtatctgagtgtttatgtaattgacctgtggaataaggccggcaaaataaacaatatatttgtacacatgcatgctttaaggaatcgtgtgaaagtaattaagagatatgaacaaaagtgttattattgatggcaagcaccccgatcctgggccagtgcgtcgagttcctgaagcatcaatagcaaacggggcggccgcccctagaattccgg

SEQ ID NO: 5059 - DNA, 2271 bp, Zea mays
  Clone ID: MRT4577_104610C.1
agttctcatgaactgcactacatattccctctccctcttgtacagaatacgacattgtccatgtacactgcaaataagatagcaaaagatcaatatgtatgtacagcaaccaaatgtaccaacaacaacaatttaaccatgacaccagaccatatgtatatgaaaggttcccccggtacactctttattcatccttgaacacaaaatctagacgccgcctctcaccatcgggtgtaaaaccaatgagccagacatggtctcacaatgccaactaaaaatcacaatatctgagtacagttatgattatcatattctattagcccatatttccaagaagtcgctccactgcagcatgaacatttccagcggtagcggccaaggctcggatgttctcttgtgtgtcaaagaaacccatttcttggagctgagctaattgtgtggcgtacagttcttctggcggcacattaggagcatttggaacacctaggccaccaccagcaccaagcccgctgaacatgttcatcaaggtgttgaggttgacattgcctgcaccagagcctgattgtgtccgctcctgtccagcttgttgttggccaagttgtgacatcaaagactgctggaatgaaattaattgctgcaatgtttcaggagatgttaactggcgaagaaattctggattctgaatcatttctctcatttgagtattggattccatcatgttacgtacatttggattcatattaagcagctgattcatggactgaggattagacataatgttctgcatcatctgcatcatagttgggttttgcaaaacttgagtcaacaaggtagcaccagagccaccaccactggcaccatgtgtacttcccaaatctgctgaacccaaccctcctaggccacttgctgtagtactcctaatattgctagcaggagaggaccttgctgctccttgggcagagccagcatttgagccccaaggattcggaagtggattagtatttggagctggagaccctgatgtggggtctgaagctctagttgttccatttgcagctgagtctcttgcttggttagacccctgatttcctagaagagcagaaaatggattcgaatttcgatcaccctcgctacccattgttgttgcattcagaaaaggctcttggacagtttcatacatgcgacggagcatgttgaatccttctggagaagactcaatgttgctcatggctctgtctgtgttccgcatcatctccctcatgagttcaggattccgaactgcttcaaaagtctggcgcataatgcttggatcattgaggacatgagcaagatccggattgcgatcaatgagctcgcgcatttgaggattgttcattattatactgcgtatgagttcaggattgttcatcaaattctgcatgagtggcatattcatcatttccctcatcaagttcggattttcagctagctgttgttgcatgtggtctaatccagggggggcagatccaaacaaacccaaccccccactgttagcagcagcccctgtagcacccagattttgcaacaagccacccaatcctgttgctggggaactggcaggagcagcagtggtaggttcttggttggctgcaggtgcagtagatgctggtgatggcacagcaccacgtaccatgtggattgtatggtctgtctccacaccgtagctggctagggtttgctcgtccttcaagatccggcccttgtagatcagccgctgctgcggcgccggcacgtcgcagctgtcggcgacgatcgccttaaacgccccgacggtggcgcccaggtcggcccgcacggtgaacttggagccgttggtgcaccggatgtggagcgtggcctgcgcgtccgcgggctcgccgccggcgtcggcgtcccctccgcccatgccctggccctaggatcgatccgcccggggcggctgcctcgtggctccgattcggctctcggcgcgcgtcaagcgcgagcgacgcggcggagagggaggtggaggactcgtggtcgtggcccccttcggctcgctattttggagttcgtgcgctgggggtgtcggtcacgtgcctgccgtgtgcgaggatgaagaaggcaacgcaccacacaaggacaggccacatgggacgacgggacgggacgggacggatgaataatgtcgttggtggggagacggacgataactgcgcgacagggatggatggccgtgattccttgcgtgctgtgggttggcggacgcgtggg

SEQ ID NO: 5060 - DNA, 166 bp, Zea mays
  Clone ID: MRT4577_104611C.1
gtacacggcggcgtgactagtggatggcgtgcgcggtgctgtagctaatggctgaagggctgggcatcaacggtggtgccagagacacattgctaggcgcggatggtggtgcgcgcggacagagactgaatgctgtgggtgaaccagtatgcatcgacatcggtgc

SEQ ID NO: 5061 - DNA, 237 bp, Zea mays
  Clone ID: MRT4577_104612C.1
ccggccggggcattcgtttaatttcctcgtctctcccgaggccgaccacccccatccattcaccaacccgaaatagaaggccgtgcccagccaccagcctccggagttcctgcggagatacccgtgcgcttgtgtgcgcgctgcaggagggagttgtgactacagcttggagagagcgagtaattggtgtgaggggggggggggttagaatgggagggatgaagagttaggacgcag

SEQ ID NO: 5062 - DNA, 1440 bp, Zea mays
  Clone ID: MRT4577_104613C.1
ttttctgagttatggatgattataatatgttctcgagcaatccaaatacagttttttttagttctcatggtctgcagtacatattccctctccctcttgtacagaatacgacattgtccatgtacactgcaaataagggggtgtttgctttgtagggactaatgtttagtcccatcattttattccattttagactataaattaccaaatttagaaactagaatagagttttagtttctatatttagtaattttgtaactaaaatggaataaaatgtagggactaaaaattagtccctagaaacaaacacccactaagatagcaaaagatcaatatgtatgtacagcaaccaaatgtaccaacaacaacaatttaaccatgacaccagaccatatgtatatgaaaggttcccccggtacactctttattcatccttgaacacaaaatctagacgccgcctctcaccctcgggtgtaaaaccaatgagccagacatgatctcacaatgccaactaaaaatcacaatatctgagtacagttatgatcatcatattctattagcccatatttccaagaagtcgctccactgcagcatgaacatttccagcggtagcggccaaggctcggatgttctcttgtgtgtcaaagaaacccatttcttggagctgagctaattgtgtggcgtacagttcttctggcggcacattaggagcatttggaacacctaggccaccaccagcaccaagcccgctgaacatgttcatcaaggtgttgaggttgacattgcctgcaccagagcctgattgtgtccgctcctgtccagcttgttgttggccaagttgtgacatcaaagactgctggaatgaaattaattgctgcaatgtttcaggagatgttaactggcgaagaaattctggattctgaatcatttctctcatttgagtattggattccatcatgttacgtacatttggattcatattaagcagctgattcatggactgaggattagacataatgttctgcatcatctgcatcatagttgggttttgcaaaacttgagtcaagaaggtagcatcagagccaccaccactggcaccaagagtacttcccaaatctgctgaacccaaccctcctgggccacctgctgtagtactcctagtgttgctagcaggagaggatcttgctgctccttgggcagatccagcatttggaccccaaggattcggaagtggattagtatttggagctggagcccctgatgtggtgtctgaagctgtagttgttccatttgcagctgagtctcttgcttggttagacccctgatttcctagaagtgcagcaaatggattcgaatttcgatcaccctcgctacccattgttgtcgcattcagaaaaggctcttgaacagtttcatacatgcgacggagcatgctcgtgc

SEQ ID NO: 5063 - DNA, 2055 bp, Zea mays
  Clone ID: MRT4577_104614C.1
gatcacaaagagattggaggggttgaggggaaattagttcatttctctttcaatcgccctccaatccctccgtgacccctggtcacggaatcagctcttacataaaacattgtccatgtacaatgcaaataagattgcaaaagatccatatgtacagcaacccaatgtaccaacaacaacaattttaaccatgacaccagaccacatttatatgtaaggttccaccggtacactctttattcatccttaaacacagaatctagatgccgcctctcaatctcaggtctaaaaccaatgaaccagacataatctcacaatgccaactacagatcgcatggatcagaacacagttatgttcgtcatcatattctattggcccatgtttccaagaagtcgctccactgcagcatgaacatttccagcagtggcggccaaggctcggatgttctcctgtgtgtcaaaaaaacccatttcttggagctgagctaattgtgttgcatacagttcttctggtggcacattaggagcatttggaacacctaggccaccaccagcaccaagcccactgaacatgttcatcaaggtgttgaggttcacattgcctgcaccagaggctgattgtgtccgctcctgtccagtttgttgttggccaagttgtgacatcaaagactgctggaatgaaattaattgctgcaatgtttcaggagacgtcaactggcgaataaattctggattctgaatcatttctctcatttgagtattggattccatcatgttacgtacatttggattcatattaagcagctgattcatggactgaggattagacataatgttctgcatcatctgcatcatagttgggttttgcaaaacttgagtcaagaaggtagcatcagagccaccaccactggcaccaagagtacttccaaaatctgctgaacccaaccctcctgggccacctgctgtagtactcctagtgttggtagcaggaggggatcttgctgctccttgggcagatccagcatttggaccccaaggattcggaagtggattagtatttggagctggagcccctgatgtggtgtctgaagctgtagttgttccatttgcagctgagtctcttgcttggttagacccctgatttcctagaagtgcagcaaatggattcgaatttcgatcaccctcgctacccattgttgtcgcattcagaaaaggctcttgaacagtttcatacatgcgacggagcatgttgaatccctctggagaagattcaatgttgctcatggctctgtctgtgttccgcatcatctccctcatgagttcaggattccgaactgcttcaaaagtctggcgcatgatgcttggatcattgaggacatgagcaagatccggattgcgatcaatgagctcgcgcatttgagggttgttcattattatactgcgtatcagttcaggactgttcattaaattctgcatgagtggcatattcattatttccctcatcaagttaggattttcagctagctgttgttgcatgtggtctaattcagggaggccagatccaaacaaacccaaacccccactgttagcagcagcccctgtagcacccagattttgcaacaagccacccaatcctgctgctggggaactggcaggagcagcagtggtaggttcttggttggctgcaggtgcagtggatgctggtggtggcacagcaccacgtaccatgtggattgtatggtctgtctccacaccttcaaaaggagaaagcataaggttacaagagaaaacaaaaacagaataaaggaacacactgctaagtgaagttccgtagctggctagggtttgctcgtccttcaagatccggcccttgtagatcagccgctgctgcggcgccggcacgtcgcagctatcggctacgatcgccttgaacgttcccacggtggcgcccaggtcggcccgcacggcgaacttggagccgttggtgcaccggatgtgcagcgtggcctgcgcggccgcgggctcgccgccggcgtcggcgtcccctccgcccat

SEQ ID NO: 5064 - DNA, 327 bp, Zea mays
  Clone ID: MRT4577_104615C.1
gaccctctagagcgggcgctcgcgacgataatatttaccatgcccgcaaccggcgccgcggggaggattttataggaacacagcgggaatacacaccccaagcttggcgaaacagaagcaggaacgcaccgcgaggaaagacggctatggcgaaagaaggaacgaaacaaccgcaaaggaaccccaagacagcgaaccacttggacactgcgcgaacagaggaggacttaacaaggctcacgcaccagacatgaaggccacaatcggggtcgaaggggaaaccaggaactgatccagctgcacataaaaaaacggccaagcagggcg

SEQ ID NO: 5065 - DNA, 2598 bp, Zea mays
  Clone ID: MRT4577_104616C.1
ccacgcgtccgcttgagtttatggagtatgatttgagaacgaaatacggatttgaaataattgaagaggttgagtttgccagtgttgaccctgatgacctaacaaaccaattctacagcgacattgccatgttgatctcatcgtcgatgtctgttcgtgaaaggacatctgaaagagcccattttgagattttacatgcggaacatagtgctatcaaattgaataatgcaaattcaagtattcacattgatgctgtcattgatccgctaagtcccactggacaaaaacttgccccacttctacgcatactccggaaacaaattcagccgagcatgaggattgtacttaatcctattagttccctcgcagatcttcctttaaaaaacttctacagatttgttcttccatccatggatgattttagcagtacagatcattctgtacacggacctaaagctttctttgcaaatatgccactgtcaaaaacacttacaatgaacatagatgttccagaaccatggcttgttgaatcagttattgccatccatgatttagacaacattcttttagagaatcttggcgatgtcagaactttgcaggcagtatttgaacttgaagctctcctcttgacaggtcattgcatggaaaaggaccgggaccctccccgtggtctgcagtttatccttggtactaaacaaagaccacacttagtagacacacttgtcatggccaacttgggttactggcagatgaaagtctcccctggtgtatggtacctacaattggctcctggtcgtagtgccgatctgtatgagctacctccgaaactcattgccattgatagcttgagaggcaaactaatgcatattgaagtgcaaaagaagaaaggcaaggagcatgaggacttgctaaatgctgccgatgactaccacttccaggaaaagacggataacaaaggctggaataagaaccttttgaaatgggcttctagtcttatcactggtgatgcttcatcaaaaagtaaagctgataaaaccactgaccgtaaggatgcaagacaaggggagaccataaatatattctctgttgcttctgggcatctgtatgagcgtttcctcaaaataatgattttgagtgttctaaaaaagacacagaggccagtgaagttttggttcattaagaattatctatctccacagttcaaggatgtcataccgcacatggctcgggaatatgaattcgagtatgagctcgtcacatataaatggccaacatggttacacaagcagaaagagaagcaaaggattatatgggcatataagatcttatttctggatgtcatttttccactttcactgacgaaggtgatttttgttgatgctgatcaaattgcgagagcagacatgggagaattgcttgacatgaacctgaagggtcgcccgcttgcatatactccattctgtgataacaacaaggatatagatggttttagattctcgaagcaaggtttttggaaagatcatctgcgaggaagaccgtaccatatcagtgcgctttatgttgttgatttggccaaatttcggcaaactgcttctggggatactcttcgtgtcttctatgaacaactcagcaaggaccccaatagtctctccaatcttgatcaggatctcccgaattatgcccaacacacggtgcctatattctctcttcctcaagaatggctgtggtgtgaatcttggtgtggaaatgccacaaaagcaagagcaaagaccattgatctatgcaacaatccaatgacaaaggagccaaagcttcagggtgctagaagaatagttccggagtggactggtcttgacagtgaagcacggcagttcactgcacgaatcttgggtgatgatgtcgagcctgcagatgccacacctccgccatcggaggcaccgaagcctgaagatgatcaggatgtgaaagatgagctatgatcgcaagatgtttccaggcttggtcttactgaatgaaagtttggtgactcgacagtcatcagttcagaacacaggcacacagctagtggagcgcagagggatagtttaacgcaggtgcaaatttgtcaaaacactacacctggaatcctggactacattgattcaggtatttcgtttacagtaatagtttcaagacctttaaccaaatcatatggcggggaagctgcgtccagtaataggttaacaaggcagccagctggggtgtagaactctgtctgctctcagctgcatacacatagactgtaatggtcaacaatttaagatctccttgagacgctgtaaaatttatcggctgccagtcgaaaggcaacagcgaagctggcagctgaaatgcccgagaattttgtagcactcagcaaacggattttttaaacactcagtaagtcaataatgcgacaatgcctgtcgcatgtaacagcaggctattgtgggcatggcagctaaccgttatactaaaaaaaatgccaagtgctttatcagttgggtttaacaaaagccgttgtctgtccagtgaagttcgaatttcgccatgacagcaggtgttgttgatcttgctgac

SEQ ID NO: 5066 - DNA, 143 bp, Zea mays
  Clone ID: MRT4577_104617C.1
agagagagattaaatagttgtattgaacaaaaaccttggatcatatgtttctctaaactcaaaacataaactgaccaaaacaaaaataaacgaaaatctcagatttcagtaaacatgtctagttggagaaacgatctaacagc

SEQ ID NO: 5067 - DNA, 577 bp, Zea mays
  Clone ID: MRT4577_104618C.1
agcacttaaaacctgcctctcttgatctcgaccacgcacctagtgaacggaaaccagttcagccgtcccactccctcgcgaagcttcaaagcaagcacgcgcacgaatagtcgaatggcggcgaacacgcactcgcgtaaggggttcctcctgagcaacaaccgcatcatgccttgcgcctccagctgctagcttcatcacgctgactgtatgcctgatgccgtccccgtgatatctcctcctgttcgtcgtacacgccctcaccgccgtgttctcctggaccgactgctcatgctcctttacagtggccttaactaccgcgactagacacaattggtacaacgcgaggggcgcgatcatggatatcttccaggggttcgtcacgatgatcttgtccactccgtacctcctacttcttgttccaggtactctactacacacgcagcgataattctgacaacatcctcaagatgatataccgtttctgaatgggcatcatcgaacacaatcgcgacgacctcgagatctacttctcactccacctcgatgatgacgacgacgacgatctgaactgcaa

SEQ ID NO: 5068 - DNA, 470 bp, Zea mays
  Clone ID: MRT4577_104619C.1
ttccccgcaaatcacctttacatttaatagaaccaagaacagaagaatttggttttgggtcccaatttggagaaaaacatttttggggtctcacaggggaatgttttttacccctggggcgaggaaaaactgcccccccaaaacaacaccaaattttttttgaaaacaggggagacaattttggcctttgcttcccaacaaaagattggttattagcataagggggaagacccaaaaaacagacccggggttctcactttttttcccccaaaaaaataaaccccgtttagcccacctcctccattttggtttcgccggggtcttttttcaaagggggcatgttggggttagctttcggggccttttttgtcttggggatgctaaggcccaatttgggcttgcgggggatgcggtttccaaagggttttggatcctcgaggttaaacccggggggggagaacgcctttttt

SEQ ID NO: 5069 - DNA, 359 bp, Zea mays
  Clone ID: MRT4577_10461C.1
cacaaaatcagaggcctacggcaaaagtaagtgctcaaaatttaccacctaagcacaagcaggaagtcacaccccacaatatcagggaaattagaatcgacgcacagatccacccagttatacactgcaatacagctggcgggggcggtagaggaggctagaggttcctacactacacgcttatcgccggcacgccacactgattgcatttgagcgactggctcctccagctgatggctattgcgcaatccaccgacacctgcactataggcgaggagaagcctagcacgaggatcttcacgccgacgtctccagtgatgcggagctcgacgcggccaatgatcgcgccaccgcggatg

SEQ ID NO: 5070 - DNA, 226 bp, Zea mays
  Clone ID: MRT4577_104620C.1
caactccgtccctctcttctcagcccagatatttctttcccccgtcctccctcgccttcgggtcgggttcaggagatatgcagcaccacctccggaccaccccgaccctccttctctctcgcgctatggcctagactgatgtgctcaaggttgtcatgtcctgtgagggctgagtctgagctgtcatgctggtcctgggcaagatgttagggtttaagtgctacca

SEQ ID NO: 5071 - DNA, 362 bp, Zea mays
  unsure (1)..(362): unsure at all n locations
  Clone ID: MRT4577_104621C.1
gtttggnaccagtttgggcgccgtgcttggtgtcggttatgtgacttacgactgttatcatgcagctaaataaataagatttgggttgatgccgtgtacttcttatctgtacaatgtgcatatgtgattttttttacatgtaactgccactggtactacgaacgcatcgcaccaattggactgttcagatattatttatatatattcggaagcaattactggcaggcatcctaccatttttgtagcgtgtcatgtgtccgttgcgttgatgatgtgaacaactgttgtccgtcgacttcagcttgccgctaaattttgtaaagactcttttggatccctagatcttatctactctccatttt

SEQ ID NO: 5072 - DNA, 564 bp, Zea mays
  Clone ID: MRT4577_104622C.1
ggcccacaaatatataaaattcgttttagccaaagaaaggcagggaaaacccagtttttacacccgtttagttgttatatactccaaaccaacacatgttttcccaggggaaacaagatgttgatccaaaggaaagtaggatcgattagcccataaacaagggaaacccttgcatgaaacaagggcttgcagttaagttttttaaaaatttttaggggggacaaaatactaccaccccccatgggatcccttcatatgggttattaaaaacggaaaccatgggtgccagcagctccatataaaggaaaaaaaaggggttttaatcctttatcaccaataatctccacaggagccctttccttttttgaagggggggaaccttttggtgcccctcacaaaaagctttctcccaacaatccttgacatgatcttgagggggttggggcagccaccacatatcctcaggtttttaaagaaacaaaggggagcccttggtggagggctaatcaaaccataagcaattgccaccctttcactggggaacaaaaatgcctgttccttggc

SEQ ID NO: 5073 - DNA, 268 bp, Zea mays
  Clone ID: MRT4577_104623C.1
aaaagcgagcggttttactatgggtgcagaattagcataaagtcaactcttggacaaggatggttctcgatccctataattctggtatacatgtcttggcaacttagtggtctatccccatacatacctaaagcctatgccccattatgaaaaacacaagaccacttggcttgcaaacttgatgcggttattgttagtaccgaggtgaccctatggtcaacaacaccttttcttaaatatgatttacattcaatagatttgggcgcgg

SEQ ID NO: 5074 - DNA, 208 bp, Zea mays
  Clone ID: MRT4577_104624C.1
ctctcggcctacgttgatctggcgatgcggttttcaagggtaatggggacgtgatggggaactaaggtgttcaaacaataagtggggataaggaacacggagcagcaacaacaatatcataaggagattgcagacgttggacgcatggaatgccaaatcttcagtcccctaatgatgcttcgcgctagcatcttcagttttctcggct

SEQ ID NO: 5075 - DNA, 206 bp, Zea mays
  Clone ID: MRT4577_104625C.1
acacaaaaaggttggaccaaataatttgaaggaactggaataaaaaactttttaacaaaagagtgtatggatcacggctgatcatttggttttccacaaccaggttcccggccccgtgggccgccccgggtttcccgggccggccccctaaggccgcccaggtttccccattgggggggggataaaaggttgggggacactgggaa

SEQ ID NO: 5076 - DNA, 257 bp, Zea mays
  Clone ID: MRT4577_104626C.1
gaccgccacacggtctaacgttcataatagaaaactctgctctaggagttaaggtttagcataacagtattatgtaggggctaccaaccgacattggggagattacaaccacgctcagatggggattctttgtccaaaataaatgtggcctcagcaactatatacacaaaggagctggaatgttcatctagcaggagcgtctaatgacatttggacgggaagatcattgtgtttggtaaagccagggttacctgtgg

SEQ ID NO: 5077 - DNA, 272 bp, Zea mays
  Clone ID: MRT4577_104627C.1
cggcacgggtctgtgatatgtggcgccaagcgtcaccgacggctgtacgcgacacatccagggcatcattcccccgcccatccggaggcacgccaggaggggccccgccaagcgcctctcggggctgatctcgaggagacccgcggcagtgctctagagcttcctccacaacgtcatcctcgaccctttaacctacacccatcacgccccgacgccagaccgccaccgccaccctcccccccaacgcgctcaagcgccaagggcagaaccct

SEQ ID NO: 5078 - DNA, 518 bp, Zea mays
  unsure (1)..(518): unsure at all n locations
  Clone ID: MRT4577_104628C.1
cggncgcgtgggatatcacaaaccctggtgcatccaaagttccaaacgccaccttaggccttgttcggttacatgagatataatcccaccatggatttaatccgggtatggattgggtgaatccatatctcacacccaatcccatggtaggattaaatccatcaacaaatccatgtgactttcaaagctagttattcttttgatccatggattctaatgtaaacttgtgcaatatctcatggatttgttccatacctaatgggctatggatagaatccatgtcttccatagtttaaaaaattcccaaacctttgggttatattccatgatgggtttaaccgaataaaaaaaattaagtagtcatggattattttggggcatggattgaggcatggatttaattccaatccatgctaatccagagcgggattggtgtaaacgaacaaagccttagtgtttgttcctcccccatcattttcttgctgatgttcctactccaggtgcaataaggggggggg

SEQ ID NO: 5079 - DNA, 523 bp, Zea mays
  unsure (1)..(523): unsure at all n locations
  Clone ID: MRT4577_104629C.1
tcgagcggccgggcgggggggttgaaaaaaaaaaaaaacaaagaacaaaaccaaaagaataaaaataaaaaaagggcttggagtggaaaggtaatgaataacaacataattaaactgctcctactaaacaaaaaaaagacaaattttttttttttttcctgtcatccctgggggggggggggggctctcttctcccccctgcgggggcccttttgggggtgcttgggggggcccctttgggcgtttcggggtggtttttcctcttctgggggcgggcttcttcctctgggcctctggaaaatcttggctgcccccggttctgctgctgctgctgctgctcgttggcggcccctgtctgttcgtttgcttggcctgcctgagtctgccttttcttcttttgctcgatcgctttgggggcgggggcgcctggtgctgctgcttttgcccctgctcctgttgtgcttctcgctcctgttgngctcccctttctcctctgttcctgccctctgtcttctcgtttttg

SEQ ID NO: 5080 - DNA, 274 bp, Zea mays
  unsure (1)..(274): unsure at all n locations
  Clone ID: MRT4577_10462C.1
ttggcgctacctacccgcaggcgcactacccggccatggtgcgcctgtcccggcgcctctgggactaggcccatgccgacccctggttcaccatgctcacgtccacacgggacctccacctggtcccgcgggactactcggatctcgtcagctccatgaggaacggtggagccacctacatgttcgtcagacatgagtcatggacttggncaagaacggtgctgctgagggatcgcgactagtggacgctcatgcaacacctgctggtctgcca

SEQ ID NO: 5081 - DNA, 447 bp, Zea mays
  Clone ID: MRT4577_104630C.1
ttcaggtttggttctcctttcctagctggcctgcacctgcaaatctgttcgtggcctggggctcctgatttgggggaccgaaccgatggctcgcaccggccccggggtttcctgcatgctgttccgggggggggcggcccacctgttaagggggatggccacccaaccagcggcggcggcggcggcggcggccaaccaacccggagctggcccccggctgttggggcaggtgaccggccactccagcacctgtaatggccgaactggcccaatttatggttggccgtgctgaacaactggctgctagctagctggctagctggggggagtctttccggccccgcaagcagccttggcataccaccctttttgcttagctaatgcatgtccagcattacccggtggctgggctcgtcgccgtctttttctgcggcggcggcgccgggg

SEQ ID NO: 5082 - DNA, 248 bp, Zea mays
  Clone ID: MRT4577_104631C.1
ccctcctgccccgaaaacttaatagccgacaagtgaacggttgtttaagaagtacgcaggcacgccgggccacaccatatgaaacgagacacctgagttactgctgctctttacactaccaggcataaagatgcaaaacctatggtgcaaaagaaaccaagttatgctagaaagggcctcctcacacatatcagcaatgcaactacgaacaccttggacaccttcatctgaacagaccattggataag

SEQ ID NO: 5083 - DNA, 361 bp, Zea mays
  Clone ID: MRT4577_104632C.1
aatacttcatgtggtgcacctatcatgcacactactatgcctacttcgctcttgtgggtctgtcccctaagattgaattcaccatacaacctgattttgatagagctcctttgcaggaagacaacacaagagttagatctctacctgatggtacctgcgttatcagtaaagtaatcactgctgtctccaatgatcttagagcacacgacccttaccatcaattgaatgcttacaacatacatgacacatgcttataccaaagatctttatcccaagatcattctttagatctacagggaattatccgcatcaagggacaagtctttagccaaggatgccatgcacttattataaactatta

SEQ ID NO: 5084 - DNA, 392 bp, Zea mays
  Clone ID: MRT4577_104633C.1
gcggcgtggcggtcggcgtggcgctgcacgccgtgacgcacctcacgtgcgacttcccgcgtctgctgcacgccagcgccgccgcgtacgagcccatgaaggcgtacttcggccagcgccggatccccaactactggtggttcctcaggggcgtggaggggatcaccggcgtcatcatggtcgtgctcatggccgtcgcctacacgctggcgcacccgtggttccgccgggggaagctcagcgagggcaacccgctgcgccggctcagcggcttcaacatgttctggtactcgcaccacctcttcgtcattgtctacgtcgccttcatcgtccacggcgtctgcctctacatcaacaggacgtggtacaagcagacgacatggatgtacctc

SEQ ID NO: 5085 - DNA, 151 bp, Zea mays
  unsure (1)..(151): unsure at all n locations
  Clone ID: MRT4577_104634C.1
gcaaaacaacaacaggagcttgcttattagcgnctgcttgtagcaaagctaggcggacggacggaggagaacatgcatatggaagaaggatccatcggcctgccgcggccatggcggaatcggatgagtctagcgcccctcgcccccccag

SEQ ID NO: 5086 - DNA, 287 bp, Zea mays
  Clone ID: MRT4577_104635C.1
cagggacaaagaggactcgccccgatgcaccagacctgagacctgtttaaaccaaattcagagttcatgcaaaccttgcatatgttaaaaaggatcttgctactggtctttggggctaataaaagaccaatcacttctaaggctagaaacttggctagtgcatcaactcttaaggcccctcggtgaaaaacaccagaaagaaacttttgcccatggggaaatgtttgcattgaaaacccttctttaaccataattttattttaaacaggcccggtcaacattttatt

SEQ ID NO: 5087 - DNA, 382 bp, Zea mays
  unsure (1)..(382): unsure at all n locations
  Clone ID: MRT4577_104636C.1
ccgggcacgcgtccncccacncgtcccnnttgccactccacaattttgttcttatccatgaacaccttgataaaaggaaggatttcattccacacgactgaaattccccactcataggaacaattgaattcattcacatccctatgctaccatacaaaccaactatacattgcactctacatttttaacactctctcatcaataaactcaataacaacgtcaaccatagagcctgtaactactactattttctaaacctatactattcttacaaacgcaaaaggatatccttgtttatcaaaacacccatcatagtctgctaactccattctataaacattctgttcatgtcataatatcttcaacatcaaaacacaatttt

SEQ ID NO: 5088 - DNA, 222 bp, Zea mays
  Clone ID: MRT4577_104637C.1
attcggctcgagctcccgctctgaccccctttttcttaaacccgaactacgaacacggacaagggggctattgtcaatctgtgggggagctccacaacagcgactaccaggcggccacgaatcaagcccccaaaccacgttgaggagacccacccataaggcccagcaggcaggggccacaccccatctactaacacactactatcaagtaatgccagaggc

SEQ ID NO: 5089 - DNA, 254 bp, Zea mays
  unsure (1)..(254): unsure at all n locations
  Clone ID: MRT4577_104638C.1
tttgttttttttgtccangccaacaaataaccatttcaatcattaaatttaaaccgggctggcccaatactggtgattcaaaaacaacaaactattttttactcccctcggggaactaatggggctgatgtgttagattttccggttttattggcacaagatttgccaaccacaaaaaaaagggggaaatagaacgaaaaacgcccggccctttccctattagaatttgaatgaaccgatcccgctacattttt

SEQ ID NO: 5090 - DNA, 375 bp, Zea mays
  Clone ID: MRT4577_104639C.1
ggggaaacggcctatcagcatccatattgcatcaggtcatcaaaacacaaaggggggtcatcacagcccctgttatatttcctacttacatcccatttaggctcactaaccaaaaaaatgcctttaaaacaaagggaatgaccctaaaaccaatcatggcgattcgggggacccctaatggacccctgggttgcagccccttcgatgaacatcccagtttgcagcaaattcccgcaacaaaaaccttgccggggcatgggaggggcctgttttcatctaaaccactggtgaattcgggggcgtgaaccctttctccaagaaataagccttttttgcaaaagccagccttgtctgaaatatcccccattttttttt

SEQ ID NO: 5091 - DNA, 342 bp, Zea mays
  unsure (1)..(342): unsure at all n locations
  Clone ID: MRT4577_10463C.1
cgggaaaacccaacccacagccaccgccgccgtcgccgctccctgacccctgagggcgcggatttaacttcaaacatggcggacgtcgatgtcgagccggaggctcctgnctctcgatgggagcgccagacacacgcatacatgcggcagatgcggcagccagccaccgccgccagttcatataccgccgccgcagcatatgccagcttcgggtcagctgccacctactgagcatttcccaccgccggaccatctggcagcgctggtccccctgccaccgccggcccatgagccgcatccgaactatcagccgccgccaccatgccacgacatcaacatcag

SEQ ID NO: 5092 - DNA, 230 bp, Zea mays
  Clone ID: MRT4577_104640C.1
gttgaagccttgtatagatcctctgttcttcttccatccaaaactcttcataagccatgttattcggaagggtagcatgaaaatcatctcctacattgatgtcataagcccttgcactccatggcggggcgtgagcaaaaacccaatccaacacatatgttcttttaggcacgacaacatctgtaaaccaccaatcacaatctttgtcattatgctcgagccgaatttcg

SEQ ID NO: 5093 - DNA, 354 bp, Zea mays
  Clone ID: MRT4577_104641C.1
actgcccattctactgattcaaacgaaacaggaggtacccaccccattactgcacggtagcaaaaagagaccatttgcaactggttttgattgatttttcgcgaacaacatcagcacgaccacaagcatgctgtcgtggcggccactaacggtgggacggagctaggacactacgcacacacacaccatccgaactggcatctgtgagttaatagccaccgccatattcgtattcgccgcctagggatccgaactctcactcgggaagatgtaccacgaccacaccacgatcaccacggccttcagactgcttgcagtgtctctggcacacacactctgtctgggcttggaagg

SEQ ID NO: 5094 - DNA, 745 bp, Zea mays
  Clone ID: MRT4577_104642C.1
accgtctcttcccccgctaaacctccccaagtccaccgtcgccaggcccaaaaaccaccgaggatttttcacacgcgaagcggcacagccatgcgcctcctctgctgcttggccgctctcgtcgtcctcgctctccaacaccaatgccacggcctactcctcccgctcaccaacacgatgctctcctcgctccgcggggccaatggcaccgccacgcccgtgcatcacctcctccgcgcgtcgtccctccgctcggccgcgcgccacggccgccaccgtgcgcgcaggagcccgccatcgcctcccagccccggacgccaccgccagctctcgctcccactctccccaggcagcgactacacgctgtccctgtccgtggggccggcgtccgccgcggcgccggtgtccctcttcctcgacaccggcagcgacctcgtctggttcccctgcgcccctttcacctgcatgctctgcgagggcaagcccacgccgggacgctcgggcccgctgcctccgccgccggactcccgccgcatcctctgcgcgtcgccgctgtgctccgcggcgcacgcctcggcgccgccgtcggacctctgcgccgcggcgcggtgcccgctggaggacatcgagacgggctcgtgcggcgcgtcccacgcgtgcccgccgctgtactacgcgtacggggacgggagcctcgtggcgcacctgaggcgccggcgcgtcccgctgggcgctggcgatggcg

SEQ ID NO: 5095 - DNA, 643 bp, Zea mays
  Clone ID: MRT4577_104643C.1
ttccccgatcgtttaaatattaatagagctcctgcagagatctggggggggggggggggggtcccatccaccccaagttgccgccacacctcaaccagagactcccgggcacattacagttaatcacctataccggtggggtcgaactgtacaatcatccccctccaccgagcgcgcgcttcatctaatacccccctccgggatgtatctcacagattaagtgtatgtgactcactaagttctaggagtagatgaacagtcggaactcttactccaatatttaaaaacatcctctttagatgacctcgttcgaggatatgcagatagtcaactaaacagaagagaagaaacacgtcgttagggaagagaagaagattaaagagaacaaggcgagggttaacgatcttgacgtgataaatagtaaggatggcaacgcgatccatataggttgctaacatcttacaactaatctcacgcagttggtagactgcgctattctaaatatcatagttagggagtagattattactaaccttattcaggttgtctggagtctcaagttgcaatagatgaacaagaaggtcaaggtagtaatcaccgttaaaggaatctcagtcgaggggatagacttaacgcagttatt

SEQ ID NO: 5096 - DNA, 1318 bp, Zea mays
  Clone ID: MRT4577_104644C.1
gtggctggttccttcggacttccctctgaacgacgacgagttcggccagagcagcgctgagagctacggcaacatgctgcagaacaaggctttcggtggtggtacggaccgatctttggttggcaacagactccctccctatgtgtacctccacctggacggcaactatggtttccacgacaaactcttcttctgcgaggacgaccagcagttcctgcgaggtgttccgtggctggtcatgaggacggacatgtacttcgtgccgtccctgttcctcgttccagctttccaggacgagctcggcaggctgtttcctgagaaagacaccgtcttccatcacttggcgcgctatcttttccatccgacaaatggcgtctggtattcggttacaagatgcttcaggtcctacctggccaaagcggaaaaaagggtgggaattcagatcaggatatatgaaaccaaaggtatcttgcagagaaacggcccgttcccacacattctgaaccagatcctctcgtgtgctcaaaacgagaagctgcttccagaaatcagtatggcagagggagcagccgatgggactcggaataaccgaacagcagccgggagtgggactcggaacaaccggacgatcgctgttctaacgacttctctgagcgcttggtacagcgagcagatccatgtgaagtacgacgagcagtcggctgttgatggcgtgtctgtcggcagaactattgttatgcttattgttattcttattttgcgaaacaaaggaaccatacaaaatgtattctttcagatctacctattgagcatgaccgacgtgctgatcaccagtggcttttccacgttcgggtacgctgctcaggggcacgccggcctgaagccgtggatcatgcttaagtcggagaaccacgtgacgccagacccaccgtgcgtccgcgccatgtccatcgagccgtgcttccatcaagctcccttctacgactgcaaggcgaggaaggacaccgatttgggcaaggtagtgccttacgtgaggcactgcgaggacgtgagctgggggctcaagattgtagatcaaactcatttgtagtgtagctgtaatctggtcaggactcacggcagacttgcttgctaactagggcagaactattgttattcttattcttaatctgcgaaacacaaaggaaccatacaaaatgtaaattctttccctcctgtatttgatccaagtgtagatagttgatagacagatccattaatctgttcatcctctgatgtcaaaggaaggggaaacatgtttactatgtgatcatcgctc

SEQ ID NO: 5097 - DNA, 168 bp, Zea mays
  Clone ID: MRT4577_104645C.1
gcggaattcggctcgtggcggaccaaatcgccttttttgacacccgtatattgatgcagcaggcggtgcattgtataggacacacttcatttacaaacacccaagggcaaggctcattgctcgtatgaaccggccttctctgtctaatggttggtcgtatgagctcga

SEQ ID NO: 5098 - DNA, 430 bp, Zea mays
  Clone ID: MRT4577_104646C.1
gatgcaaatgtgagtgcattcaaacatcaacgcaatctgcgaagtgttccttagacatggcaatatgtattacagagttgaattaaggatcaaaatggaccgggatcacctttaccatacggcgctgggaagatatgccatgagacacaaccaatcacgggcgggaaggacgagtggttcagaattagaacggggcaaagccaactgagggatacagtatgaacgggaggggtgggtagaaagccttcaggaggtgggagctgctgtggcagcatgggcctcccacgtgggagattcccgcaacatttggcttgcctgcgttttgaggtttcgacacgggtcctacggaagcagtttgattctgaaaatcatccatgcgtgtgccacccaggccctgcataccaggcggagggcgggttccacccatact

SEQ ID NO: 5099 - DNA, 796 bp, Zea mays
  Clone ID: MRT4577_104647C.1
aagcggaaaaaagggtgggaattcagatcaggatatatgaaaccaaaggtatattgcagagaaatggcccgttcccacacattctgaaccagatcctctcgtgtgctcaaaacgagaagctgcttccagaaatcagtatggcagagggagcagccgatgggactcggaataaccgaacagcagccgggagtgggactcggaacaaccggacgatcgctgttctaacgacttctctgagcgcttggtacagcgagcagatccaggagaagtacgatgagcagtcggctgttgatggcgtgactgtcagagtgttccagccgagccacgaggagtaccagaggtcgaggaacaaggggcacaacatgaaggcgcttgctgagatctacctattgagcatgaccgacgtgctgatcaccagtggcttttccacgttcgggtacgctgctcaggggctcgccggcctgaagccgtggatcatgcttaagtcggagaaccacgtgacgccagacccaccgtgcgtccgcgccatgtccatcgagccgtgcttccatcaagctcccttctacgactgcaaggcgaggaaggacaccgatttgggcaaggtagtgccttacgtgaggcactgcgaggacgtgagctgggggctcaagattgtagatcaaactcatttgtagtgtagctgtaatctggtcaggactcacggcagacttgcttgctaactagggcagaactattgttatgcttattcttattcttcttctgcgaaacaaaggaaccatacaaaatgtattctttc

SEQ ID NO: 5100 - DNA, 174 bp, Zea mays
  Clone ID: MRT4577_104648C.1
ctacaaatgcacttaaacgactccattacatttcatgccatcttaccatgcgtgcacagacaggtattcttttgcccttccgaatgcaaagtttgaaaagctcgtccacggatttgggtcttcttttgcccacccgaatgccaagtttcgaaaggctcggctaaaaaaaagaaa

SEQ ID NO: 5101 - DNA, 204 bp, Zea mays
  Clone ID: MRT4577_104649C.1
ctcgcaggtcaatacaacactctagagtgagtcgtactaccgtctggttcataaatggtaatgtaaatggtaacactaatgatttagactgtgcatgaattgtctcttggcttcaacttttgtccaatatcagccaaaccataggtctagacattgaagtacctttttcaaacaatcaactttttgacaccatcttcttcaccc

SEQ ID NO: 5102 - DNA, 597 bp, Zea mays
  unsure (1)..(597): unsure at all n locations
  Clone ID: MRT4577_10464C.1
cctgcaggttccggtccggaattcccgggtcgacccacgcgtccggcctaagagtcgcgctgtaagaagcaacacctcctcctcgcctccgccatccacccggcagccgcgaagcagcaaccatgcgtgagtgcatctccatccatgttggccaggctggtgtccagatcggcaatgcctgctgggagctctactgcctggaacatggcatccagcctgatggccagatgccaagtgacaagaccattgggggaggagatgactccttcaacaccttcttcagtgagacaggagctggcaagcatgtgccccgggcagtgttcgtagacctggaacccacggtcatcgatgaagttcgcaccggcacctaccgccagctcttccaccctgagcagctcatcacaggcaaggaggatgctgccaataactatgctcgtggccactacaccattggcaaggagatcattgaccttgtcctggacaggattcgcaagctggctgaccagngcacgggtctccagggcttcttggttttccacagctttggcgggggaactggctctggcttacctccctgctgatggagcggctctctgt

SEQ ID NO: 5103 - DNA, 462 bp, Zea mays
  Clone ID: MRT4577_104650C.1
ggccgtcccctctcctccctggcagccgcccaccatttcttcctcctccatagatcttcccctcccccacgcagcaaggatcgagaagaggaggagcaagatggattgaagaggaagagaggatcaaagagatgttctacccccccccccccatctattgtagattttcttggggaaactctaggtggctacactccagatcatgcctagtacatttcttcttcttcgatgaaggtacttgattcatgttgggaatgaggggagtagcagcacgtccaccttcactctcataataacgttgcccaggcacagccatgatttaattagaaacttcttgtcaaaggatgtttgtctttaactagtcatgcacactagttaattcaattcatgtcgttatggttatcttcccattgctagccgattattaatgtctagtatgttttcttatcatgatatctgctt

SEQ ID NO: 5104 - DNA, 400 bp, Zea mays
  Clone ID: MRT4577_104651C.1
ccagacctgccactcctgctcacccggcacggctgtgtcgtcactttttcccagctcggggctgcccccctcacccaaaccccattcccttaaaaccgagttgcagtctcaagtaactccagaccaaagtcatgtctacacctcccgtcacatctcctttttcagtctccgggaccgaggccggtcaacacttcactcaccaaccaacataacagttaagacgcctcccaacacgggcttaaagttaccttgcctgccggggctgacagtcgactcatgcttgctgaacaagacctcacttacctacaaagcggcggctcgtccctccgaagcattgcaggaggctgccaccggaggccctggcttctctcctgcgtcctcttcgcaggatcgacactca

SEQ ID NO: 5105 - DNA, 118 bp, Zea mays
  Clone ID: MRT4577_104652C.1
aacaacgaacagtctgtaacagattggataagaatcaaccaaaccgattttgagtaacagcaacaagcctgactgccgacgattcctaaaatgagcagatgacaggaaccaatatgga

SEQ ID NO: 5106 - DNA, 328 bp, Zea mays
  unsure (1)..(328): unsure at all n locations
  Clone ID: MRT4577_104653C.1
nncggcggggaagcgttcactnctnncggcgcgatctcgaggagggagggagggagcgggaagaaagaggggggcgcgcgcgcgaccatgttttgatctcgcctgacgcccgctcgttccccgactacaactgcccgtagacctcccgatctgaccgcgaagagggaatccctccaccgccgccggcaccgcctctgcgcccgccgctcatgggggcttgccgcgccgaccagcgcctcacgccgctccctccccccaccgtctcccgcgccgccgcgcccgaccgcctcctcccacacctcgcccagccctccgagccgcccccggc

SEQ ID NO: 5107 - DNA, 457 bp, Zea mays
  Clone ID: MRT4577_104654C.1
cggaataccggggcggaccacacgcttccgaaccagttagttttagcaaagaattggcaatttaccgaccgccgaattcaaaacagcccgaggggttagcaaagcggaaggcacttccttcttaaaggaacatggcccgattgcagaatttggcattggcaacggcggccgggggggccttggtgttgttggcggggggaacctcggaggcggccataagttgcgggcagtgggggtcggcaatggggccttgaatttcttacccgcgcggccagggttgggggccttccgccggttgttgaaggggtttaagaagcttaaaaaacgccgccggaacaaccgccgaccggggggccgcttgtaactgcttaaaaaacgccgccgccggcgtaagggtgctaaacgccggaaacgccgccagaatcccttccaagggcggggtaagaatcccttaaac

SEQ ID NO: 5108 - DNA, 200 bp, Zea mays
  Clone ID: MRT4577_104655C.1
caagactcctttccacgcggggcttgtccttttttctttatcagccaaatccctcggtcccccaagatcaaattgtgctaaacccccgctgggaaacaactactcggactaatccagggcttgctttacacatcactacgggagcttgtccaaccttccgcgctaaaagatcatgcacctagtgtacttcaacccatcca

SEQ ID NO: 5109 - DNA, 151 bp, Zea mays
  Clone ID: MRT4577_104656C.1
aaacgctgtaatggaccatggcctaactcattgccaaccctcttgttatttacaagctccaaggccagatttctctagttttcatctcctatcatactaccattgcttaacctgacctgaacaaaattgaataccttatggcagtgttcaa

SEQ ID NO: 5110 - DNA, 323 bp, Zea mays
  unsure (1)..(323): unsure at all n locations
  Clone ID: MRT4577_104657C.1
cgccactttattatttgatttttgagtgtctaattaaattatttggatcaggcttgctttgtttatgtttttatgcgttgccttcattgtttaagttttgtttataaaaacatatttaatagtcattgtatatttatgtacagtaagaagacaatatagagaactcgagacgtcgaacacttcatatnatgccccacaagaacacacaaaataaccaccaaacaaaaaatacctaacaaaaaaaacaaaaaacaacccggaggggcctagaaacacccccccgccgccggggaaaaaaaattttttattaacaccccaccaac

SEQ ID NO: 5111 - DNA, 836 bp, Zea mays
  Clone ID: MRT4577_104658C.1
ccggccgggccgggatcgcggcagatcatcgagatccgatcgggaaatacattactacagaaagcatggcaggagcagcagctcaccaaaccactagccacgccgacgacggcagcccggaatggagcgtggccgtgcctgccgccgcggccggccatgagaacaccaaaagcagccgccgggcctgctgcacgcgggcattggtggtgtgtctcttctcgtggttggcggcgccgatggtcagcctcgcgacgtcgtcgtgcctgtggctgttctcgttggcggccgcggcgcgggacagggtggttggcgttgccaggatggcgtggaggatcggcgccgacgaccctcgcaaggtggcgcacgggttcaagatggcgctcgcgctcacactgtgctctgtcttctactacgtcaagccactctacgacttcaccggccagaatgccatgtgggccgtcctgacggtcgtcgtcgtcttcgagtacacagttggtggctgcctgtacaaaggtctgaacagagccatggcaacgatgaccggcgccgcgctggccctcggcgtgcagtggatcgccagcttgtccgacaaggagttggagcccttcatcctcagtggctccctatttgttttcgccgccgcggccacctactccaggttcctcccgacgatgaaggcccgcttcgactacggcgtcaccatcttcatcctcacttacacgctcgtcgcggtggggagggtaccgcgttaacgagggttgccttcatggcacgacaccgcctgacgaccatcgccatcggcgccgtgaatctgcttcgccgtctgcgcgctcgtc

SEQ ID NO: 5112 - DNA, 271 bp, Zea mays
  unsure (1)..(271): unsure at all n locations
  Clone ID: MRT4577_104659C.1
cccacgcatacgattctatatcccaaaccccctccctttttttctttttttancacacaaccccctatcatgcaatggttatatttcacgcatcaccaacccctacaatatcaactttagcaatcactctaactaacaactgaaatcaaatgataaaaatatccctccaaaaaaaaaaatataaattttctatctctctaattaaaccccccatacctacacacacaaactaccacaacccatttctatcttgctacctaaatacaaaaca

SEQ ID NO: 5113 - DNA, 411 bp, Zea mays
  unsure (1)..(411): unsure at all n locations
  Clone ID: MRT4577_10465C.1
cttacatcgaccgcctaagagtcgcgctgtaagaagtaacaacctcttctctccgccatctgctcggcagccgcgaaacagcaactatgcgtgagtgcatctccatccacgttggccaggctggtgtccagatcggcaatgcctgctgggagctctactgcctggaacacggcattcagcccgatggccagatgccaagtgacaagactattgggggaggagacgactccttcaacaccttcttcagtgagacaggggctggcaagcatgtgcccagggcagtgtttgtagacctggaacccacagtcattgatgaggttcgcactggcacctaccgccagctcttccaccctgagcagctcatcacaggcaaagaagatgctgccaataactatgcccggngtcactaca

SEQ ID NO: 5114 - DNA, 269 bp, Zea mays
  Clone ID: MRT4577_104660C.1
aatgacaactggtttattgggaaatttctgcgtctttgggtatatacagccccaaccccaagcaaaagatttcggaaaaaggaaaaaaaccccttccaaaaaattaaattcttctaccccaaacccaaccgacaataaaggcccggcccaccgccaaaaatccaaacccctaccacccagaggaccacaggatgcttgaccgcaaccaaaccgagccattgggggaacccaagccaaccccctgggtgtttttccgaacgtacaaaaac

SEQ ID NO: 5115 - DNA, 123 bp, Zea mays
  Clone ID: MRT4577_104661C.1
ctctggcgccatagtcggccactactgcaccatttgggcccaaaacagcatattcccagagttcaagccagacgagatgacccatatcgttaaagacatcgacgagcctgggtttctggccgc

SEQ ID NO: 5116 - DNA, 662 bp, Zea mays
  Clone ID: MRT4577_104662C.1
ttcccagatccgatacacgagcaggcgtgcagttgctgagcgtcgtcctcgctttccttctggctctatgtactcctggccgagcagccccaggcacccacgcgcgtgctctgcgatgccgacccagcgaagcctcgcgacgatcatccccggaagtcctccggcgtccgttcctgatgtccacgcgatcgccaaggcggccatctccctctcgtccagcatacccgagcggccatctcccatgtgcggcgtactaggcctgctcaaagccctccaaaaatcctttcctgtaatctctcgtcatgtgttggtcctgcttcctccagcttcttcacgtggcttgcccagcagatcgcgattcgtttctgagcttcggggaatcgacggtcaagcttcggcgaccaaatgatccagttcttcgagttctacgagatcgaagaccctgagcatctgtttggtgaaggttgtccacattgcaaccactgctcaggagaagacgaagtcgtggaaggagacttccaggagttccaagactacgacgagttttaggtgtgggttggcggcaacccccagtcagctgcctgtgaaggccttatctttactgcgtttcgctagcactttgatttaactggtaagttggagactttgggggagggctatga

SEQ ID NO: 5117 - DNA, 262 bp, Zea mays
  unsure (1)..(262): unsure at all n locations
  Clone ID: MRT4577_104663C.1
cacacaccaccagagctcagctaaggtccactgcttcttcaatcacagtggcgaccagatcgtgagagctagttagagggccgcgaaaatgccgatcaataggatcgacttggggagtcacgacgaggtgtaccaccctgacgccctcaaggaggggctcgttgagttctctcacaccctcatcatcgncttcgacgccagcgcttcggcatggccttcatcaagctggccgggagtagtcctacgacatcagagggatctt

SEQ ID NO: 5118 - DNA, 307 bp, Zea mays
  Clone ID: MRT4577_104664C.1
ggtcgaggccacgcgtccgaccacgcgtccgatggagctgaacctgtaggccaacatctgaatggatcttgcagacatgatatgaaccacgcatgcaaccacagccagaggtgccatcgcatgcaacgaatgcttgcatacattcttcatttaattaagaattcattgcaactatgaggtatatatcatgcgtaactctatgtgtatgcatactgacctgcactatatattcaatagcatgtgctgagaacatgcggaggcgaggcattgggcggacgatctagaggatgcatgcttacacctcacg

SEQ ID NO: 5119 - DNA, 499 bp, Zea mays
  Clone ID: MRT4577_104665C.1
gctttctcgcatcgctgcgccgctccatccgctcggctcccacccgtccgtcgtcgcctcgccgtcgagccaccgccctccttgtcaacctctgttgctgctcgggccgggcgggaggagaaaagatgggggtgtacctcagcacgcccaagacggacaagctctcagctgatggagagaacagccgcgtccggttcggcctctcctccatgcaggggtggcggaccaccatggaggacgcggtgagttgcttccgcctccctcgtggcttccgattgggtgggaatgggattgctcccgactgttccgttccatgctcgcatgactggtttggggtgatttagggtgagatgtgcctgtgcctgttggagtttgcggctgtgcagtgtccaaggcgcgatcctgttattatgtgtagctttgcacgatgagaaccaagttacctgttgttgttccccatggtcaacctataataaactatgtcgtgatttaatcgacc

SEQ ID NO: 5120 - DNA, 637 bp, Zea mays
  unsure (1)..(637): unsure at all n locations
  Clone ID: MRT4577_104666C.1
cctagccgccactctcttttcttccttcagccagcgcgttttcttccttctcttccccacggcagcacgcagggagcccggctcctctcccatggcgcccgacctccctccctctgctgtccacggcgagctgccagctaggcgtcgagctccaagctccctgggcgcgcacccctccttcccttctctccatccccctcggcgttctgctccctccaggccgctgccccattttatttcctctctctgctctctcggtcgctggccatggccggaccggcccccagctcgagcacgcgtggacgcccctttcccatggccgagctccagctccagctccggccagcggccgtggcgcggcgcccttgcagcggatgcgcaggagctgctccccatggcgcgcctgctcccatggcgctcctccccgcgtgcgctgcgctcagccctgccgagctctcttgccgccgcttttccacagctcggttctgcccagttcggcgcccatctccctgcttcccagccgagcttcccatggcgcccttcctccttctctctgctgcacatggcgccaagcagctaacagccatggcgcctncacctcccagcgccctccctactcccatggcgctcccctgtt

SEQ ID NO: 5121 - DNA, 2089 bp, Zea mays
  Clone ID: MRT4577_104667C.1
cattgggtacctcgaggccggccgggcgctttctcgcatcgctgcgccgctccatccgctcggctcccacccgtccgtcgtcgcctcgccgtcgagccaccgccctccttgtcaacctcgctgacgacgggcccgtgtgattctgctgcggtgcagtgttgctgctcgggccgggcgggaggagaaaagatgggggtgtacctcagcacgcccaagacggacaagctctcagctgatggagagaacagccgcgtccggttcggcctctcctccatgcaggggtggcggaccaccatggaggacgcgcatgctgccttgccagaccttgatgaatgcacatccttttttggtgtttatgatggccatggtggaaaagctgtatcaaaattttgtgcgaggcatttgcataaacaagtgcttataaatgatgcaaattcatctggtgatttgccaacctctctccataaagctttcttaagaatggatgagatgatgaaagggcagaggggttggagagaactaactgagctgggagataagggaaacaaaatctcaggtatgatagacgacataatatggcctcccaagggtggtgattcagataagataagggaagattgggataccgaggagggtccaaattcgaactttcctggaccaacatctggaagcacagcttgtgtggctgtcataagaaatgacaaattaattgttgcaaatgctggggattctcggtgtgttatctcacggaagggtcaggcttacaatttgtcaacagatcacaaaccagatcttgaggaagagagggagaggattttgggtgctggtggatttgttgttgccggacgggtcaatgcaagtctgaacttatctagggcaataggtgacatggaactgaagcaaaatgacctcctgccagtggagaggcagatcgtgacagctgaacctgaattgaaaactgtccagctctcggaggatgatgaattcattgttttagcttgtgatggaatttgggattgcatgtcaagtcaagaagtagttgattttgtacataaacagctaaagaccgaggataagatatctagtgtgtgtgagaagttgctcaaccgctgtgtggcacctacatctggtggcgaaggatgtgataacatgacggttattgtggttcaattcaagaaaccagctttagctgttgctacttctagcgctgagcagtctgctaccactgcagaagggatgcggcccaaaatttgagttgcctttgtgaacagcgaggtcgatggcccagattaccccccgaagtaggcgttgagtggcacaccgtgctgtggagctctaaccggtggataatagacaaaaaaggatagtgaggtggtgtatataagaaaagggattctattcgacaatctcttatagggtttgttgcttccttctttctagtgttcagagtcgtcgcaacctgtaatacatggcatgttggtgcttaaattggtttttttgtgaaatgcattgatgagttgtcagaagaaaaaaaagaatgagatgggagcaaaaacaaaaatactagaacaatgttcagtgaatgcatggaataaggctcctacagaaagcagcactgcagctgcggcgactgcgagcgtcgccagccacgcggcgctcctggtcccgagcgccgccgcggcggcctcttcctgtgcgccggcgtccgcatggctgctggagcccttggaggtagcgttgtgcgggagcgggtggacagtgatggcgaccttcatgccttgcaggcagaagccgttgccgagagttgcttccgcctccctcgaggcttccgattgggtgggaatgggattgctcccgactgctccgttccatggtcgcatgactggcttggggcgatttagggtgagatgtgcctgtgcctgttggagcttgcgggtgtgcagaggccataggcgcgatcctgctattatgtgtagttttgcacgatgagaaccaagtgacctgttgttgattcccatggtcaacctataataaactatgtcgtgatttaatcgaccaacaaaaaacataatgaaaagcccctaaggcc

SEQ ID NO: 5122 - DNA, 299 bp, Zea mays
  unsure (1)..(299): unsure at all n locations
  Clone ID: MRT4577_104668C.1
ttcataatcacttttaaaattttatgtagatgtgaactgatgtatcgaagtctgatgtaatcatagatgtcaaaatttaataaattagnnaggaatagnatacaaagtgctctgaaattctaagagctaaatttactcttttgacataaagtcaaatgtagaactctagcaatgtattaatctcctttattattggtatagttattattgnatatctaagttcnacatgggctatgtataattttcactgtcatactggaaaacaataaaatttaaaaaatgcattcaaaatggaaaaa

SEQ ID NO: 5123 - DNA, 516 bp, Zea mays
  Clone ID: MRT4577_104669C.1
cttcgccatcctcacagaaatccgtcaagatgaccaagcgcaccaagaaggtcggcgtgaccggtaaatatggtacccgttacggtgcctccctgcgaaagcaggtgaagaagatggaaatcacccagcacgccaagtacacctgcactttctgcggtaaggttaccgtccgaagaaagtccaccggtatctggaactgccgctcctgcaagcgaaccattgctggcggtgcctacactgttgccacccccgctgccgccgctatgcgatcaactctgcgacgattgagggagattgctgaggtttaaggcgttttctttggtacaatggtgaaggattcggctttgcttttcggtctggtgtatgggggacattgtttgcgtgcatacactacgagctggcgaaaaataaacgtcgacgctcgatctttggtcataaacaccggtcgataggcaatgaacaaaaaaaagaaaattgcattatctcggacaaccgaataacgaatgattaatgatg

SEQ ID NO: 5124 - DNA, 216 bp, Zea mays
  Clone ID: MRT4577_10466C.1
gtgtcttacttgaactatgcggggacgatctgcgagcgaagcactgaacgtgctctgagagacatggcgcgacctatgactgtctctaagggggctcacgatgcaaacctgctgtactttttacaggcggtgccggttaagcctatacgtatacattttttgagtatctgacaagcacgactcgctaccttctatgcttgaccatgctcctataat

SEQ ID NO: 5125 - DNA, 286 bp, Zea mays
  unsure (1)..(286): unsure at all n locations
  Clone ID: MRT4577_104670C.1
ctcggggngnnnnnnnnnnnnnnnnnnnnnnnnnccgcggaaaacagacgancaacacccagaacggaggcagggcanngannnagnacacagacagcnaaggcncncagcnaccnnacnccacncaccacagaanncagcnaaacggcnaccaaggggggcgnacaaaangaaccagcaaaagaacagcacagaccggaacagagnnagccnngcncaaaaacaannnncnagagggggccaagcaaagngggnncaaacnncaaacagagcgccaggncaccca

SEQ ID NO: 5126 - DNA, 2530 bp, Zea mays
  Clone ID: MRT4577_104671C.1
atgtcgtcctcttcctcatctgctgcaaatacaccgccgatcggcgcatcgtccgaggacactttgagcaacatggcggcagaggagttacatcctggtgatacagtggagtttggtgtgtcgcggatttcctcggtccgcgttcaggatatgcaacagcttggatattttggcagcggagtgaggcgtgtcccgggggcggaggaggtcctgcggagattcgaggtccaggtccaccagctgacgccgaatgtcgtggtggccctggcgaagtatgtgtgggcgacgacttcgtatggtggtcagccctctgtggaggtcttcgcaaaacattactgtctgcattggcaaaagaggaaaattggacatgagattgcacagtttggatcgtgcacgtttacgccgaggaccgacaagacttcaatggaagtcgtggagttggttccctgcgcccgcaataagtggggcaactggtgggatttctggttttacgtttccgaaggcgcagttgaagaccatctaggactccccgtggttgtcatgtgctcccattattatgtggcgtacccgcagtttgaggtggcggaggatgatgaagacaagggagcccttcgtatgccctcgcgagatgccttcccggggcgggcagcgggtgcgaagtccggccttcgcgttggaattgcatggtcgggatcccgccgcattcgtgcgcgaggcggaagacggtgcggcgaggatcgtgggcgctatgtgccgaagacagagggtctgcggagctgggatatccgtggggccaacgatagattgaatcgggtcttcgaattgaacggcttgccatacggtggttatcccagggaagacaccgctgaccgccacgggaaaaaaccgataggcgtgaccgaggaagagccttcgcaggtggccgccccgaccactaagaagagaaaattaggtactgcagtggggggactgggggtctccgatagttttgctatggagttgatggggacgtgcgcagccctcgggggaaggatgtcttcgcccaagctccgggagtcttcggcgcggatgctggaggtgtttccttacagacggaatattgctgctgttgtgtcggcagtgatgaacaaggaccgtcaagacgctgcgcagaagcgccgggcggtcgtcaggatcgcagatcttaggcgcgaggcgaagagggcgcgggggagtgcgaagagtgctgctgcctccggcagtagcaagccggtgtcggctgtgaaaccggttgtacccggacctagcaaggcgtcggcaagcgcgaaggctgccgcctctggcggaatcaagcctcccccgggcgaacccgcgaaaggacatgagctgccttcaccggagagacgtgttgccgacttcggcatgaacatcagtgtcgaggactattttgttggtaagtcgggtgaggggcaattggttgttgtcccgccttcggcggcaaccacgtcgccaacggcggtggtccgggcgaagggtgccgcgcaagacccgtgggccgctttcagcgcgagcggcgagattctgtcagccgctgtcgctaaggacgtggcgggctccatgtcccagcggctgagggaggcgtcgcagcagctgtcgcagcagctaaatcaagcggccgacttcgccggccgcgtggcgtcggttgtcctgactgcggacgttgctgccgaagtcaagaggcttcgggcgcaacatgcgggtgttgtccgggagaagtcggctgtggaaagtaaaaaccgcaggctggcggagaaagttgccaccatggaggccgagaagatggaccttcggcgccagctggcggaggagaggagggaggcgaatcaggccatcgctgaagcgcagactgcgcgagcggaggccaaagtggcacgggcggagagcagtctcgccagtcaacgcgccgaggagctggaggcaaggttcaacgccttgcgcagccgcgtggacaaagccgaggcctcgacgtgctcgggagttgagcggacgcacgcacagttcgtggacgcgtaccgcgagctgggtgcgcggactgctgacttcgaagtacccgaccgagaagcaggcctttgcttcctcgaatggttgcaggaggagctgctggtgctcccgaccattgtggagggtttcatgtccttcgcctctctcgtcacctgcgagggggccatgaatgcattgtcccgcgagggctgcaggcactacgaggtcttcgaccaatcagatgagaactttgaacgtgaaatttacaaggtcaaagactctgtggtgaagcagtcagtgggggcactttttgataggatgtggggtccgcacggtcgggaggcggtcagggagcggtccaaccgggcgatagagcagatggcgcatgccgaggacgttgaggacctcgaagctctggtcggcgcgctgcccgaggctgcggaggtcaacccggtgctgcccctggatgccggtgaaggctcctcgactgcatccgtgcccacggtggccg

SEQ ID NO: 5127 - DNA, 278 bp, Zea mays
  Clone ID: MRT4577_104672C.1
aataattttcttcacaacacccatccacccccgaaggcctttttaaaacctttttgcgtttacaacaccaacaaaaacctccaccaagggcccaccacacacttgttcctatacttagactccaaacctttcctagatcttctcattcctccattattctcccggcaaaatatcctaatgcttgtttttaacaacctatctccccatatttttacccaaaactcacctacttatttatccatctaacctcgaccccttccccacatccattacctcat

SEQ ID NO: 5128 - DNA, 262 bp, Zea mays
  Clone ID: MRT4577_104673C.1
ggtaatagtcctgaatggtggcagcggtgttgctaggccactggaacctgctctcagtacctaaccgaggttaaaatctctgggccgaaatggccttctttacaagtcagctgggctcttcatgatggtaaagtagactgttattacttgtccgctccattagttgcgtcatctctcattgatcagctgattagatgagacctatccgcgcacgcccagatgggaaccttattaaggatacagctttgacccgagtcaatgg

SEQ ID NO: 5129 - DNA, 153 bp, Zea mays
  Clone ID: MRT4577_104674C.1
atggcaaagcaggtccatggaccagaatatgatctgaggaccaaggacatcgatagagaagtcctcatgaagatcaaagaaggcaagaagcatgtgcagtactggattgccgacagcgcaatcaacttgtcctccactccaactctatcttag

SEQ ID NO: 5130 - DNA, 151 bp, Zea mays
  unsure (1)..(151): unsure at all n locations
  Clone ID: MRT4577_104675C.1
gtcggctagaccaacagtattgtactggatggagtatgcttgccgtcctctcctggaggagtncttgnncngtgttacgtgccacaatctgggcgctttggctcccgtagagccggggttctcgggcctgggccggaggccactgacaagc

SEQ ID NO: 5131 - DNA, 833 bp, Zea mays
  Clone ID: MRT4577_104676C.1
ccgacaccacagtaacccccaatcctcttgccaagctagctagtgctccttccttcctccttcgtcctgctcggagctctccgctcccgcgtcctctgccgcgacattatttctcctctggctggcaacaagcagatactaatggggtgcaaggcgtgccagaagcccaaggtgcagtaccgcaagggcctgtggtcgccggaggaggacgagaagctccgcgactacatcctccgctacggccacggctgctggagcgctctgcccctcaaggctgggctgcagcgcaacggcaagagctgcaggctgcgatggatcaactacctgaggccggggctgaagcacggcgtgttctcccgggaggaagaggagaccgtcatgagccttcacgccaagctgggcaacaagtggtctcagatcgcacggcatctgccgggccggacggacaacgaggtgaagaactactggaactcgtacctcaagaagcgcgtcgagggcggcgcgcagggcaagcacggcgcggcggacccggcgacacccggccgttccgacgtccacgggagcccggacgaccccagcgagaacaacggccaggggtccgtcgtcagccggccggcgaactctgactcgtccgagccggcggtggagtcgtcgtcggccgacgactccagctgcctcaccgtcaccgagcctgcgggcgcgcgcgcaagcgcaaccgccgcggtgcgaccgcacgcgccggtgctcccgaaggtcatgttcgcggactggctggacatggactacgggaccagcctggtggcgctgggtccggacgccggtgtcttcgacgt

SEQ ID NO: 5132 - DNA, 194 bp, Zea mays
  Clone ID: MRT4577_104677C.1
cgcgtccggcgcttatatggggactaacgcccatggatgaactaagctgcataactgcgacatatgtatgggtctaaggcacaccacatggggcacattgactaaaatatacgtcttactgtttgaaacataaggaggaagagaagagaagactaggctgtgtgcaaccaaagggctgctaacggctagggcac

SEQ ID NO: 5133 - DNA, 344 bp, Zea mays
  Clone ID: MRT4577_104678C.1
aaaagggaaacaaacgtaatcccagccccaaccaaaaaattttggaacaaaaatttttccgggccaccaccaaagggggggacacccaaatggggaattaaaaagcaaaccatggccgcaaacccgggggcgaaaaaaaaagtaaaaaatgggccggctccccaagcccaagttggtattaaaaccctaccccccgcgggaaaaaacccgcggtttttttgggacccgggccctgggggcctttcccccaaaaacctccccgcgaggggcgttaggggcaaaaccccccgaaacccgtggcgcggggggctcgttgagggcgaaatccccaacccagggggggg

SEQ ID NO: 5134 - DNA, 753 bp, Zea mays
  Clone ID: MRT4577_104679C.1
gctttgatcatgggggagttaagatcaagaggaatcttaaatagtcacactttggcgtaccaggtaaatgctattaaaatttggtaggtaattgtttcactaacaacggagttgtgcccttatgttttaatgatcaccttgtaagaacactaggaatggaaactgccaagttatataggcttcaggagttaccagttccttaattttccaggtcaccattaactagtgttaacatttattgtacacgcagagtcgggtggggccagttcaatggctgaagccatatactgatgaagttttagtagaacttggtcaaaagggtgttaagagcctcctggctgttccagtaagctttgtgagcgagcacattgagacactggaagaaatagacatggagtacaaggagttggctctggaatcaggcattgagaactggggccgggtccctgctcttggatgcacttcgactttcatctccgaccttgcaaatgcggttgtcgaagccctcccatctgcctcggcgctgggaactagaaagcctgaagacaccgattccagcatggatctgatgcattacctgaccaagatgtttttcggctcaatcttggcatttatcctgctgttgtcaccaagactggtttctgctttccggaacaccatgctttaggtggttaggaaacattggtctcataaatgaatctgtgaaagcacataacgttacaaatcaaaggtctctgtgggcccttctctctt

SEQ ID NO: 5135 - DNA, 426 bp, Zea mays
  Clone ID: MRT4577_10467C.1
cccatcctagcgacgggtggcctccttccggtactctgctcccacctctctcagatctacagagacttaaccgcctagtgttgccaagggcctgacactctatcacggaatcatgcgatcgagtaacacatgaggcttgcgccgagaggagaagagcaggagcatgataggatgaacaaagaaagtgtgaatccaaagcgatagtgaccgcctgcgccaacatgtaatgatgacagacgacttccacatgaggcaggtgagagacaacttatcgcaggttaccagggcagcgacgcatttggcacagcatatatacttagaaggccccggcggccctatggacatgaatgaccatagaggaaaacgggagatggagagcgtcataataattggatgtgaatgaagaagatataattgaaactttta

SEQ ID NO: 5136 - DNA, 712 bp, Zea mays
  unsure (1)..(712): unsure at all n locations
  Clone ID: MRT4577_104680C.1
ccgggnctggagcacgaggacatggagtacaaggagttggctctggaatcaggcattgagaactggggccgggtccctgctcttggatgcacttcgactttcatctccgaccttgcagatgcggttgtcgaagccctgccatctgcctcggcgctgggaaccagaaagcctgaagacaccggttccagcatggacctgatgcattacctgaccaagatgttcttcggctcaatcttggcatttatcctgctgttgtcaccaagactggtttctgctttccggaacaccatgctttaggtggttaggtaggtaagcaaaaagggaatggtgtgataggtaattcttaaaaatttgagattaataatggaaaaactggagagagcttggtgatagtaactagagatcctttaggctttgtttgggtactctagtattgaccctaatccgtgtgttgagatagattgaggtgtaaattagtttaagttatacctcaattcagctcagtacatatagattgagctcaatactagaatactcaaactaggccttagtgcacgaggtagcagcttgtaatttgctgtttttgatattgttcacaggaaacattggtctcataaatgaatctgtgaaagcacataacgttacaaatcaaaggtctctgtgggcccttctctctttgttttaaaaaaaaaaaaaaaaaaaaagcccggcc

SEQ ID NO: 5137 - DNA, 306 bp, Zea mays
  Clone ID: MRT4577_104681C.1
atccagtctagaccaacccatacgcacgtaccctccgccaccgttccctccctctgaatctggggcgtcggtctcgtccttgcatatctcttcttaccttgcccatccgcttcaccaagggtttaagaccggcggtgttggcggcgaagcttggtcacttgttcacacaggtaacgcgtgcggcaggattcgcctagtagcacggctgcacctactacaaggaggtattggagacaaacaagcaatacgtggttcagtcatccaccgaccagaagtgccaggaactctccaagcagctcttttaca

SEQ ID NO: 5138 - DNA, 350 bp, Zea mays
  Clone ID: MRT4577_104682C.1
cgctcgtccactcgtccagggatttcgacgagcgacttcgtgtccacatccaagcggcatcgcgccagctcctccacaccgtcgagcagagatccagagcaccactactcatctccacgctgctgacaagcgactctgcgtccatagccgagcggcaccgcgctagtggatagaagtcctgcctatccgagatccacacagccgtcgtcaagcttctccacggcgccgccgccaaacaactctgcgccaccgcagcagagcgcctagctctggtggtcgtcctccccggccgagcttcgacaagccgttgcaggcgaggaccatgcgcggtgttcgtgggtgtaagtcgt

SEQ ID NO: 5139 - DNA, 138 bp, Zea mays
  Clone ID: MRT4577_104683C.1
ctcttcttatgcgcctgccctcgcggggggactatatacctctagaagctacttaacatatgtctctcacgattaaggataatcagcttgaaccctacagatatggtttactatcactctgacaaacttattcaaaca

SEQ ID NO: 5140 - DNA, 1126 bp, Zea mays
  Clone ID: MRT4577_104684C.1
cgcctcgagacacaggaacggatggcagcgaagatgcaccggccgggctggaaaccaagatgcggacgcgtgggttgatgatggagaaactttccaatggagtaaggttacaacaacaattaacaaccttatccttggtcgagtatattgccatcaccatggcacaatgaacataagtgggaatagacgatattcatgcaaactgacgtttaaagagcagtctttccttgatcggaatcctcgccaggttcaaggagttgtcaacgatgctgatggaagcaaggttgcaacattgatggggaagtgggatgaaagtatgcattatatcatcaacaatgatgcctccaagaccaactcccatggttcacatgagggttctggtgccactttgctatgggagaaaaacgagcctccagtcaatcccactcgctacaacttgtccacatttgcaataacattaaatgagttaacaccagagctcaaggagaagctgccaccaacggattcaaggctgagaccagatcaacgtcacctggagaatggggagtacgagaaggccaatgctgaaaaactgcgtctcgagacacggcagcggatggcaaggaagatgcaggagagtggctggaaaccaagatggttccaaagggacagcgaggatgggacataccgctacgtcggaggctactgggaggcaagggagcagagaacatgggttggctgcaatgacatatttggtaacttgtctagcagcccaaagctgccgccatccggtctcaacactagctcaagtatatagaggtaagggcatactgtagtcagtatgtgttgacgtcacattagtcacttatggtacataattgagaggggcttctctcgtttctgttgtgttacgtgttaagctgtgagctaacatgcttctgtcgatactaggagctgacatcgcattaatcacttgggtttagctgtgagctaacatcacttgtggtacactcaaatcatttgtcacattgaagccaaggacattcaggcttaacccaagcttttgtcgatactagaacgcgagaaatattgccaaaactattgttaaaagaattctttatgatatcattttcttctgccttgcccc

SEQ ID NO: 5141 - DNA, 1894 bp, Zea mays
  Clone ID: MRT4577_104685C.1
gagtatttaagctttattggcactcttccacacgatgttgaggtagttaattcagtagattcaatgtccctgagaagccacggctggagctgttcaagcatgactgctccagctccggaaaatgtagtgaatatagcaacacagaatcttctgatgatgttggcaaacaagagattagtgaactatcagatggagatgattttcatttctatgacacaaggcaaagtttcagtgaatttactacgactcctgctgacctgagaaagggatgtgtaaacaccggaaatgaagatcataaatctgttgaatcactgactgttgatgaggccgagaaatatatgctgtcacatccaaaaaggcgctcacagttgcctgagccaatagaaaaggagaaaggggttagcctttggtcaatgattaaagacaatgttggaaaggatctaacaagagtctgccttcctgtttacttcaatgagcctttatcttctctccagaagtgctttgaagagttggagtactcttatttgctggatcgtgcatatgaatgtggtttaagagggaatggtctgatgagaattatttatgtcgctgcatttgcggtctctggatatgcgtccacagattcccgcccctgcaaaccatttaatccattgcttggggaaacctatgaagctgattaccctgaaaaggggatccgttttttctctgaaaaggtcagtcatcatcctatggtcatggcatgtcactgtgaggggaaaggttggaaattttggggagacagcaatctaaagagcaaattctggggacaatccattcaattggatcctaatggtgtgctaactttagagtttgatgatggagaaattttccaatggagcaaggttacaacaacaattaacaaccttatccttggtcgagtatattgccatcaccatggcacaatgaacataagtgggaatagacgatattcatgcaaactgacttttaaagagcagtctttccttgatcggaatcctcgccaggttcaaggagtcgtcaaggatgctggtggaagcaaggttgcaacattgacggggaagtgggatgaaagtgtgcattgtgtcatcaacaatgatgcctctaaggtgaactctcatggtccacatcagagttctggttccactttgctatgggagaaaaatgagcctccagtcaatcctacccgctacaacttgtccgcatttgcaataacactaaatgagttaacaccagagctcgaggtacacatggaacatacatatatcccataatctgagttctgttagctcttcctaaaaggctacgacacatcttttacgctcttgttaaggagaagctgccaccgacggattcaaggctgagaccagatcaacggcacctggagaatggggagtacgagaaggccaatgctgaaaaactgcgcctcgagacacagcaacggatggcaaggaagatgcaggagagtggctggaaaccaagatggttccaaagggacagcgaggatggaacgtaccgctacgtcggaggttactgggaggcaagggagcagagaacatgggtcggctgcaatgacatatttggtaacttgtctagcagccagaagctcccaccatccgctctttacacgagctgaagtatataggggtgggtaaggccggaagggcatgttcagtagttgttgacatcgcattaatcagagggtttttctctcgtttctgttgtgttaagctgtgagctaacatgtttttcttgtcaattgtcacattgaagccaaggacatccaagcataacccaaccttttgtcgatactaggatacttatgagagatcttgtggacattattgcgaaaagaaatgtcgatgatactatttttttc

SEQ ID NO: 5142 - DNA, 544 bp, Zea mays
  Clone ID: MRT4577_104686C.1
gggccaagcagcatgttgggccagaaccacatgccaggttgtcacatgaatgcagtagtagttttcaagaaggcgacttaaggcatactcctagatcagcttatggggaagaatcacatggccaaattagtgttcttggctcatggcaagctccaggaacctactacaattggggacctcagaatagaactgtttgtcctgagtttcagaacagagggtcttttcaacaaaggtttggttcatatggagctgcagattctggatttggtagggccaatggagacagacaattcaatagtcttgagcgacgagtgccatatggtcgaattggtggtcaaggcagaggaagaacttcctgccaagggagaggatatacaagaggatggcatgaacggtttgtttgccgttggtcagaacctcactgtcaggtgcagaatggcggttcggaaattgcatcccacaaactgctagctcctgggcagcaagggacgaagaggaactggtgtaaagcagaatcatcagattcaccgcaacaggacaacac

SEQ ID NO: 5143 - DNA, 291 bp, Zea mays
  Clone ID: MRT4577_104687C.1
cacgttccttttataatacaaccataaacacggggccgtcacctttcacgtttgttcgtcaaaaaaccaaattatccttccactcatacttcacttacatacatgatcttaatgacaaaacgccgaacaataaataattcccttctctacatcaaattttcttatctaccacctagcatcgccccaaacctttatcaccaaaccattggatctactgctaataatcacaatagctacatgtaaaatcccctccatttacgtcaaacgatggcacacgccatcttatcatct

SEQ ID NO: 5144 - DNA, 571 bp, Zea mays
  Clone ID: MRT4577_104688C.1
tcctttacctatgctgactttgctccaatgatgcaacgcaactgcaaccaagatacccacagatcattcgacaaaatgtcaaccaccttctccaacatgcttgattccacattgatgacaaaccctgccatccatgcagcatgacacactcgcagaatcatactgaccaacaaatgaaggaaacactccaattgatccgaatcaagaaaatcttgcccataatgttcaaggaaggaacataaggaatcctcaaagaatgaattctattgaaacagatacagataatgaaaaatctgaatgatgaaaaacaaaaagtctatatacactttcttcaacacaaccatgaaataatttaatttgagaacaatcccaaatgataacattccaaaccaatgatggaacccgaacattagaaaaaagatagagattgaaccacatgaaaatgaacaaaaaggaatgacaaaaaaagtccaaaaacacgggaaccagattgcaaggaattacaagattgaacgaattacttcagaaatcatgaatggcgaagtgcaaaaaaggacgaaggatgaacatg

SEQ ID NO: 5145 - DNA, 620 bp, Zea mays
  Clone ID: MRT4577_104689C.1
attccccatcctccctgccacgccagcccttccgatctgcgattcaatcgactccgaggctttctcgtgcgcctccatcatgcatatctttgtgaacatcctcaccggcaataccatcagcctcgaggtcctgtcctctgacacctactgactatgtaaatgtctgaaaatccatgtacaaggagagcatccctccggaacagcatgcgcctcatcttcagctggctaaacatcattgatgacggtctcaccctctgtgagtacaacatccagaaggagtccaccctccacatggtgttccgcctcatgggaggaatgcagatctttgtcccgaccctcaccgccgagatcatcaccatgtaggttgaaacatgcgacaccattgaccacgggatggctgagatccagcgacaacgagggcctccctccggagcagcagcgcgctcatcttctctgggatgcagctagacgatgagcacaccctcgttgattacaaccttcaaatggagtccacgctccacctgtggctccgcatgtgtggcggcatgcagatcttcttcaagaccgtcactggtaagaccatcacccttgatgcagagtcctctgacacgatcgactac

SEQ ID NO: 5146 - DNA, 1401 bp, Zea mays
  Clone ID: MRT4577_10468C.1
ggtagctttgtagcaaccatgggaagcgcttgggccaacgtccgcgagatctgccgcgcacagcgtgccgacggccccgcagccgtgctcgccatcggcacggccaacccggcgaactgcgtgccccaggacgagttccccgacttctacttccgcgccaccaagagcgaccacctcactggcctcaaggaaaagttcaagagagtttgccagaagctgggcgtgcagaagcgctacctgcaccacaccgaggagctgctgagcgcgcacccggagttcctggaccgctcctcgccgtccctcgacgcgcggctggacatcgtcaagaccgccgtcccggagctcgccgcgcaggcctgcaggaaggccatcgccgagtggggccgcccggccgccgacgtcacgcacctcgtcgtcgccaccaactccggcgcgcacatcccgggcgtcgacttccagctggtctcgctcctgggcctccgcccgaccgtgcgccgcaccatgctctacctcaacggctgctccgcgggcgccgccgcgctgcgcctcgccagggacctggccgagaacaaccgcggcgcgcgcgtgctcgtcgcctgcgccgagatcaccgtcctgctctttgacgggcccgaggagggctgtttccagacgctcgtcaaccagggcctgttcggcgacggcgcgggagccgtcgtcgtcggcgccgacccggcggccccggccgagcgcccgctgttcgagatcgtgtccgccgcgcagaccgtcataccggactccgagggcgtcatcaccatgcacctcaccaagggtggctacggcggcaacatctccaccaggcaggtccccgtactcatcggcgaccacatcgagcgctgtctcacggacgcttttgcgccgctcggcgtcggcgccggatggaacgacctgttctgggacgtgcacccgggctcgtcggcgatcctggaccaggtcgacgccgtgctcaagctcaagcctgagaagctggcggcgagcagacgtgtcctcagcgagtacgggaacatgttcggcgtcacggtgatcttcgtgctcgacgagctgcgccgccggatgacgaatggggaagaggagggggcgcctgcagagtggggggtcatggtggcgtttggacccgggctcaccgtcgagacgatggtgctccaccgatcaggcaccccagccgagacgaaactaggtgaggcatgaaaaggtggacgtgaccaatttgtgttggaacttggatcaggattgcatcattgcatgcatgttacttggtcaacatattccgactatgtcactattcttgacttcagcctataataaattcaactacataaacaactgttaaaaacttaaaaaaaaaaaaaaaaaagggcgggc

SEQ ID NO: 5147 - DNA, 460 bp, Zea mays
  Clone ID: MRT4577_104690C.1
cctcaccccacccttccctccgtcaccgcaccttcctcaccctctcctcctggtgcccaacctgtctccataaagagctcgttccgtatcctgaacagtctgttcaaccagaaagtgaccaagaaccaccgccatgtctgaaaagatcgaagacgcccagaccaagggtaagctcgaggtcgaagaggctgtccaccacgagcacgccgatgagatctcgcccgagctcgaggccctcctccagaccgaccccaagcagggtttgtccacggaggaggccgccaagcgtcttgcccagttcggccccaacgagctggctgaggtcaagcgcaaccccttcctcaagttcctgagctacttcactggagccatcgcctactttattgaggtcccctgcaccatttccgccgttgtcaacgactggctcgatttcggtattattctcgggctgttgcttgtc

SEQ ID NO: 5148 - DNA, 384 bp, Zea mays
  Clone ID: MRT4577_104691C.1
ggggagacccacgcgtccgcccacgcgtccgaggacgcgtggggacccaggagcgtgtttgttttcgaggctgtgatgacgagcccaaaggaggccaccccggtccagttccacacaaccgggcgcctgagcttgtgctccttttgctttgccagcgcatcagggcggcggcgattcgcggcggtgagggcgtccgaggagacgatggcgacggagtagctgggcatcaaggaggagcgctacccgcccgaggcccgcctatccaagctgggcggccggcagaggccctagagggggtgcgagaagagcaagctcccgtggacctacttcgccaaggtgacgtgctacctgctgcaggggaaggtgatagtgctccccgaaggc

SEQ ID NO: 5149 - DNA, 580 bp, Zea mays
  Clone ID: MRT4577_104692C.1
acgctcgactcatatccgtgaaactatatgagaaaaatcccttccagcgacatctgaacgagcctgccaagcgatcgaaagtctataatggccgaccgaggcgaactgcagctgatggactcatgctacagaccctacgagatccgcgccaaggcgtggttcgggctgaaggggctcagctacccactcgccgagggagacctctcccgcaagagcgacctgctgatgaagctcaaaccgcggcacaggaaggcgcccgtgctggtccacgcatgccgccccgtgcgcgatgcgctcgtcatcctgcactactgcgacaagaccatgagaaggcaccgggacccctctcctccccgtcgacgcctacgaccgcgccatgggtcgcttctgggcagactaccaccacgacaaggcaataacgtgtgactgcagagggcggccggccggccaaaatgctaatccttgcctttttcttcttcttgcgccaagaatctgactgctgctcctctgggactggggagcgtcagtactagttcagatgaccgaacgattccgcgctgtatatgcaggtctacaagga

SEQ ID NO: 5150 - DNA, 167 bp, Zea mays
  unsure (1)..(167): unsure at all n locations
  Clone ID: MRT4577_104693C.1
ggccgcccgggcagggacgcggggtggnnanncccntgccactttctccttnccggtctgcggtttgcttggtgtcggcgccgggtggacgagtgcggggattgcgttcgtccgtggggcgttcagcttgtgggggtgcttcgtggcgggtcacaggttcacccctg

SEQ ID NO: 5151 - DNA, 438 bp, Zea mays
  unsure (1)..(438): unsure at all n locations
  Clone ID: MRT4577_104694C.1
tggtgaccaaattttgcagtggccatgcgcctcacttccccatgaaaaaggttcttttgctgctctggaagacagtgttgtgcactctgggcggctttgaggagctgcagagcatgaaggccgagaagcgcgccatcctggggctccccccgctgcctgaggacagcatcaaggtcatccgcaacatgagggctgcctcacccccggcctctgcctctgacctgattgagcagcagcagaaacggggccgtcgggagcacaaggcactcataaagcaggacaacttggatgccttcaacgagcgggatccctacaaggctgatgactctcgagaggaggaggaggagaatgatgacgacaacagtctggagggggagacgttcccccttgagcgggatgaggtcatgcctnccccactgcagcacccccagaccgaca

SEQ ID NO: 5152 - DNA, 1744 bp, Zea mays
  Clone ID: MRT4577_104695C.1
cggacgcgtgggctcgaaaccaacaatggcgcccgccgctgccaccggcgactacctagacgacgacgagttcgacgactacaacccgcacccctacgcgggcggatacgacatcaccgccacctacggctcgcctctcccgccctccctcgccacctgctaccccgtcgcctctcccgccgcgacgcctgcacccaccgccccgcaggtgccgcggcctccgctccctcagccgcccgcacccgcacccgctccggcgccagcgccacagccccctaagccgagctcgccaccggccccggccccggcccccgcggcggaaccgtactactggcccaagccgtacgactacggggacgcgccgcgtcacctgcccatgtaccccacgccggaggtgttccgcggctggccgttcctgccgccgccgccggggccgcactgccgctccacgtgcgcccgcgtccgcgcccgtgactactggaggcagtgcatgcgggggctggactacctcttcggccactccgacggctacggggagcgccacatcggagtcgactccctcggggtccccgtctacgccaaccggaaggggggcgtcgaggactccgtcgcagtcgaggaggcgccgccggccgtcgggactgtccagtggcacgacgccggcgaactgcagtttcagaacaacagatcgtcttggtatggtgacaccgaagaggaaacacattcttatgagcaacctacatacacttcatacgatcgatcttatgagcaacctacctatacttcgtatgatcgatcttatgaacagcctacctacacttcatatgatcgatcttatgaacagccttcctacacttcatatgatcgatcttatgaacagccctacagttttcacactgttcccgatgagactacctggtttcctaatcagacctaccaggatgtctacaaagaggaggaaccacaattccaggaattcttctcgtatgatgaagacaataaaatttcgtctcaacctatttttagctacaatcagcattttggtgaacaatcgctgcatattcatgttgagcctccagaaacagtttcttctcacaagctggagtactatgagaatttctcgatgtacaacaaccaaaatgatggtgataatctggagagttcaagacaatcatatgagacacagtcctatgtgcacatgccttacgatcaacttgaaccttataggccttcatggtctctgaattcaggatattatcaggcctgcacagaagggataactccagaatatgacaatcatacactggcatctgatgaaaactgggatatgtcaagcttatttatgtctccattctatcctcaagaaacacgaccttatgagcagtctcatggtgatgaaaatgtctaaattggaagagcaactggaacatgctttctgaagataatcatcagatagctaaattgggtgatggaactaaccatattagtcaattctggaacttcggagactacgcaacctatactgtatactctgtgttgtagcaatgttgcttcaggttcagttgtatttgtataactgtatttacatgctgactagagatacattcaccctatgttagatttttcagtttgcctaaagctgaagcggattttgcgtgttctatttcgttaccagagtcttgtctgtaccacaatactctgtgttatagcttcaaataaattattttcttcgttacatgagtgt

SEQ ID NO: 5153 - DNA, 434 bp, Zea mays
  unsure (1)..(434): unsure at all n locations
  Clone ID: MRT4577_104696C.1
gggggggggggtttgatgttctttcgtgtgtttgttttttaggttttttgtttttggtgggttttgtgttttttccnnggccgttgcgggaaaacgggaaaattttggctttgttaagggggctttcaatttgtggggggggggtctgattacagccgtttcaaagtttgtgggcccccgcgggggcgaggtggggaccaatttttagacatggcgggttgcagggggggaaaatggggcattttagtgggggtccgcggggctaaaaacagggggttaaaaaaaaaaaaatggggtttggggtaaggaatacaaccccccccccccggggactttttgcggtttttaaaagggggggtgggtggggggaaaaaggcccggggggaaaaagaggggggccttttgccctaatgggttgggggggggcccccccc

SEQ ID NO: 5154 - DNA, 484 bp, Zea mays
  Clone ID: MRT4577_104697C.1
gtgggggtggggggttttttttaaaattttttttttacagcaactttttttatttcacgggcaaaaacaaagcttaaaaacgaaccccaataaaaaaaaaacagggcgatttttcgtccccagcccgccgccgccacctttgccgggatgatgggtgggccattcacccctcaccataccgccgccaaaaaccccaccaaagaaagcgcaagttgcgcgggcgcggacaccccggccgggggcacgggggcgttgggggacttggacggcgccctggacaaagacccccccgcgccgttttcgccccccgcggacgggccgccggccttgggcgccagggcgggccagggggccttcgccgccgcgggggccttgccggcgaggacaagcttgcttttggcgcctaggttgtccccctggaacacgtgcttgtggggggcgccccccgtggaggaccccccgacctgcccacctgggtcacggg

SEQ ID NO: 5155 - DNA, 636 bp, Zea mays
  Clone ID: MRT4577_104698C.1
ttctccgcgttgagcttccggacctcgtaccttatcttcttggcgaacagcctcgtccgccgcttctcccggtaccgtgttacccgcgcctctcgcccgccgcccatccccagccgtggagtcaccgccgcctccccacccaaccgtcctcctcccgccatccagcccgtgaggtgggcgtggggccagaaatcgtcgagctggacgcttggccgttggccatcggtccacggcgagcttccccagctctcgatgatggcctcgtagttgaggctgagatccaggctcctcttcaagaattgcgtacccgcggcggcggcggcagcgttgctcgccgacgccttctgttcgaaactgtcctcatcctcgttatccatcatcaccgtgggcgagcagcagttgaagtctgtgtccagcacctcagcagcagctgacgacgcctctggcttcatctccgtagggccaaacccgggagcgccctcgccgcgggagcgggagcttacgatgccgttgggctccatctttatccggccgacgtcttccgcctgctgcgccattagccctaggctctccatgtagaacgatctatccagctcgttgccgtcgtccaggccctggccaagaagggcttccatg

SEQ ID NO: 5156 - DNA, 374 bp, Zea mays
  unsure (1)..(374): unsure at all n locations
  Clone ID: MRT4577_104699C.1
ggggggcgttttctagtttggggttattnaaaaggaaacgttcccacccaagcctttaattttttctttttgcaatttaaaccggattaaactttccaggcttaatgtttcaaacaaaatccccccagcaacaaaattttttcgtttttcaagttccaaccaacctttttaaaaacaaaaacttttgccaggttttaaattaaaattttggtaacttcaggcgcaaaacggtaataattttaattcttgaggaggcttactcccttgtataaaatttttgtgttaaaacaataatcccaattgtaactttttcccccaaattgggcctttttctggctcgacatttaatatagtttttgatttcaccttttttt

SEQ ID NO: 5157 - DNA, 273 bp, Zea mays
  Clone ID: MRT4577_10469C.1
ctcacacatttgtggctgaatcgctcggtatggtgatacatacaactagaggccgggacgaccacatgcgggatatatcagttttctgcctatccctgttcatgaatcaccatatggtaacacccgttatgtcctgagccatcgaggatcttctctcaaagctattactaaatgtatgctcccaccgtattacaccagtagctatagacctcgtggatctaatattgacaggagatcatatatttttttttacttaagacacaaccagcgtag

SEQ ID NO: 5158 - DNA, 403 bp, Zea mays
  Clone ID: MRT4577_1046C.1
aaaaaaaaaaaaaaaaaaaaaaaaaaaaaaaaaaaaaaaaaaaaaaaaaaaaaaaaaaaaaaaaaaaaaaaaaaaaaaaggaaaaaaaaaaaaaaaaaaaaaaaaaaaaaaaggtttgtcccttgggccgggaaccaccctaaggggcgaaattttgggaaatatcacataaaactggggggccggttgaaccatgcattaaagggggccaaattccccctaaagggagtggtataaaaattaatgggccggggtttaaaaacgtgggaaggggaaaaaccttggggttcccaaattaaatcgcttggaaaaaaatccccttttcgcaagtgggggaaaaaacaaaaaggcccgacaccaatggcctttccaaaaagtggccaaccctgaaagtggaaaaggg

SEQ ID NO: 5159 - DNA, 1632 bp, Zea mays
  Clone ID: MRT4577_104700C.1
aaagtacacttgggcacttggcatcgcggccgaggtccccgaaaaagagccatgctgggccctaatccagacgtgatattttctcgcgattttgtcacgttagcggccagctacatcctgacgatcctgtcacccgctcgatcggcgggcgctggagcgcgcgcatctagctttgtgcaagtttcacgggatctctagctttgtcggcggcacatgagcagctccaagcacgccgcgggcgccgtaggcggcaaggccgcgcgcgcctgcgacagctgcctgaggcggcgcgcgcggtggtactgcgctgccgacgacgccttcctgtgccagggctgcgacgcctcggtgcactcggcgaacccgctcgccaggcggcacgagcgcctgcgcctgcgcccgacggacccgcactcgacgacgctcgaggccggcgtggcgacggcgacgtggaagaagcgccagcagcaggtcgcgccggcgtggtccaagcgcaaggcgcgcactcggaggccgcacgtcaagagcgtcggggagctcctgtcgaggaagctcgtcgtcgtgcctgaggtgtcccccatcgaatcgtcggaggagcggaaggccgaggaggaggaggaagaggaggaggggcagctgctgtactgcgtgccgacctttgaccgcgccctggccgagctctgctcgccaccgcctccggtcgatgacccgacggcctcatcctgctgcagggatgacgtcgacggcgccgtggagaacaacacaaaggcaccaccggtcgtggtcgcggaatcgcccgtgcagcagctcccggacagctttgccggcttcggccccacggacgccgagctcagagagttcgccgcagacatggaagcccttcttggccagggcctggacgacggcaacgagctggatagatcgttctacatggagagcctagggctaatggcgcagcaggcggaagacgtcggccggataaagatggagcccaacggcatcgtaagctcccgctcccgcggcgagggcgctcccgggtttggccctacggagatgaagccagaggcgtcgtcagctgctgctgaggtgctggacacagacttcaactgctgctcgcccacggtgatgatggataacgaggatgaggacagtttcgaacagaaggcgtcggcgagcaacgctgccgccgccgccgcgggtacgcaattcttgaagaggagcctggatctcagcctcaactacgaggccatcatcgagagctggggaagctcgccgtggaccgatggccaacggccaagcgtccagctcgacgatttctggccccacgcccacctcacggtacgtttatttccaaattcacgctgctcctcctcctcgaccgatcgattgcgagcgctgtcgacgcgtgcttaattatgcttcgacttgcaaagtacaatcgggttcatgtgccaggtttgcgtgcagggctggatggcgggaggaggacggttgggtggggaggcggcggtgactccacggctggggatgggcggcgggcgagaggcgcgggtaacacggtaccgggagaagcggcggacgaggctgttcgccaagaagataaggtacgaggtccggaagctcaacgcggag

SEQ ID NO: 5160 - DNA, 1188 bp, Zea mays
  Clone ID: MRT4577_104701C.1
gtcaggttgaaggctgcaaggttgatctctcttctgctaaagagtaccatcggaagcacagagtctgtgaacctcattctaaggctcccaaggtggttgttgctggtctggagcggcgcttttgtcaacagtgtagccggttccatggattagctgagtttgaccagaagaagaaaagctgccgcaggcgcctcaatgatcacaatgcccgcagacggaaaccacaacctgaagcactttcttttgggtcatcaaggctgtcggcaatgttctatgacacaagacaacacacaagccttctgtttggtcaaggtccttatggtcaaatgagaagttgtgcaagttcttcatgggataacccaggaggcggcttcaaatttgcagagacaaaaggtccctggttaagagctggtggtgttgatgggttgcatcaatcaagtcagcaggtgtggaacaactttatgccgcatggtgtccatcaagattttgatgggttcacagctttcaaaggaaccaatgcaaaggtccttcatcaaggcgttgaagcttctgcggtcgcctccaaccagaacggagccccacaaccggaccttcatcgtgctctctctcttctgtcaaacagctgggctggtgccggtaccgaccagcacccgacggcccagctgcgccaccacgctgccctgagcagcagcctcgccgccagctccgtctccgtggcgcaggcctcgccagcagggctgtggcaggacggcggcggcggcgcggccctgagccaccacgactatgcccacgcacaggcacggttccaggctatcgacgcgctgggcggcgccggcgccgccgccgccgttgcagcgggtcaggagcttctccagctcccgcgtccgccgtccccgtacgacgacggctcctcgtcccgctacgacctgatgcgctgatccttcttccctttgggcttctggtggagcgcggggtttcgatttttgaacgaactctggatggaactcggagttttgaacgaactgctgtatgcttgctatcaaggtctgctggctcgggctcggacgctcgtgggatcgccagcagctccgtgtgcttgaataaatccacagttttttttgtgtgacgctagctatttatttatttcacttgtgtaatgtgatgcgaggaaaaaaaaaaaaaaaaaaa

SEQ ID NO: 5161 - DNA, 507 bp, Zea mays
  Clone ID: MRT4577_104702C.1
gggtggggggttttttttttttttttttttttttttttttttttttttttttttttttttttttttttttttttttttttttttttttttttttttttttttttttttttaaagggggggggcaaactggcccatttataaacaaaaaaaggggggggggaacttttttaaaaatgggtcggcccctcagcaaaaaattaaaacccaaacccttttaaaaaaataaccgggggtggggggcccggggccttgaccattatttttaaaaaccacaggattggcccggggggcataactggggggcaaatgcaaatgccccaggggccctaatggtgttactaccaaaaaaaagccaaaaatcttaagacgggtaatttcattttaaaaaggacccggaagaccccttttggggttactaggatacggggggggtccccgggaattctttttacggggggggatcccaaaaaaaaaaaaaattttggtttccaacccagggaacccggg

SEQ ID NO: 5162 - DNA, 232 bp, Zea mays
  unsure (1)..(232): unsure at all n locations
  Clone ID: MRT4577_104703C.1
cggacgcgngggcaaacccaaaggcatctcccaggcggaggcgccccaaggccccacccaccgaagcnccctgccggcgggagccttaaccctaatgcgatcggctcctcttccttctccaggtcctcgaaggcccagcagacaacagcccctcggtctgctcagccatgtcggaggaccaagcgaacgccgctggtgcgcccgcagagggaaagaacaggcggcggaaggg

SEQ ID NO: 5163 - DNA, 218 bp, Zea mays
  Clone ID: MRT4577_104704C.1
aggagaaactgccaacaggcctttttattattacccaattaatccaagaaaaacacacatttgggggacaattcatttggagctccattgacgggttttttggaaaaaaacaattatcttaaaaaatgccccattaattggaaaacaattaattttttccaccatttaaaaagggtattctttgcggggtcagccggggaccaccttacttaaaacct

SEQ ID NO: 5164 - DNA, 243 bp, Zea mays
  unsure (1)..(243): unsure at all n locations
  Clone ID: MRT4577_104705C.1
gagcaaancgctttcctttggttttctggtaagcngaggcttcttttctaaactggatctggcaacggacattggcttaccccagccgactacaccattattcttaagaaaaaggggacagctccttccctccccccttaggtcaagcgatgaccataagaaaacctgcttcgcgtctgcgtataatgcatatgcatgcaaaagattactgacaggcctgtgttgcgaacttttttggacaca

SEQ ID NO: 5165 - DNA, 391 bp, Zea mays
  Clone ID: MRT4577_104706C.1
gggcacacacgcaccgtgcagtaagcttatctacaagtttacatgtggttgtaacccaacccaaggtcatccacagtcacctggttatcacatgcttgacacgcagagcgcgccgacgagaactttgctcatgactcatggacctggatcactgactatgcttcaaagcaggggaggctaaagcaacatgatgaacaatttgcccatcctaatttaccaaataaaggatgaataatcgcgagacctttctatggagtagtagggcacttattaacgctcctactgaacaaccacttaacttccagagatcttgcctccgccgaaccacctccaggtaactcttatcttgtcactcgaacaggccttgcttgcaaccccggcccttcggcac

SEQ ID NO: 5166 - DNA, 414 bp, Zea mays
  Clone ID: MRT4577_104707C.1
cccactcttccggcaacataaagacatgcctttggttgattaaaaagagcagattcacctttctttttttaaaaaaaaaaaacacaatacaacaactaacacatacatactctttacttacttataccaatgctttgttgaaaaacaaacaataacaagacccccccctttaaaaattccaatttttcttccccctttcttcaaagtaataattcttttttaaccccccctaaattcaattcactcccccttcttaaacaactcctgacctgaaaaacccccttccttccccaatttataccccttccaaaaaattccctttttaccccatgcctataattacccaaaaacccccccccttttccccttcttccaacattttcccccccctctatttcctatttttcccccccc

SEQ ID NO: 5167 - DNA, 155 bp, Zea mays
  Clone ID: MRT4577_104708C.1
agccaacctccaatacctatatatatttcacaagtggatgaacatactcttccgtacgattatcttattcatcatcgccctcctattgcatctccttaacaactctatcatctagacattcctcagcataccacctcactaccccccacacatcg

SEQ ID NO: 5168 - DNA, 446 bp, Zea mays
  Clone ID: MRT4577_104709C.1
ggggcaacaacaaacccgaaacgaacgaaaataaaccctttggactaggggaaaaaacacgggagcgaacaagaaaattttttttggcgggccccaccgctaaattcccccaattcccgggggaattgcccaaaccccccccacgggtgccccccccgaaaccccccccaccaccaccggaacccccggcgccaccaccgaaaccgcccccacccccgaaacccccccccccattacggggccccccacccccgaaaccgccgcctccacgggcaacaacgtacccgccgccggcgccgccttcaagggcgccgggggaatgggcccctttaaccgggaagttggggccccccaactccttggcggtaatgcccttgaagggggtccccaacgccccctccggggaaaaggggaccaaacccaaaccccgggacctttgggtctcc

SEQ ID NO: 5169 - DNA, 257 bp, Zea mays
  Clone ID: MRT4577_10470C.1
cctcgagccggccgttggcggttccggagactagcaggggatcgtagtctatccgactgtctctgcaccctggttgcggcgtcaacatgttgagttatacagccagttcgtccaaggccgtgaatccgcacgacttgagaaaggactactccgcccatctcactcgttacgtccagacggttcttcctgcttgccctgatactgtcgtgattgagcctgtatgggagacccctccttatgaccatgactggtaccct

SEQ ID NO: 5170 - DNA, 434 bp, Zea mays
  Clone ID: MRT4577_104710C.1
ggaagctaatctttggctgtttttatatacattccaatacagaccatggtttaagtctacaggcggtgggacatatatagctactgtactacagtccatgcagttaattgttccgggcaaccatgctaactttccagcggccaagcgtaaaatgtaatccccctgcacaatttttttcgcaatgtccttccccaaaaaaccaaccccggggaagtaaagggcttcaatgtttgcacctttgcccttttcaaccataagcgccagctaagttttgtaactctcttgcaggaactttgacaacataaagcctttggcaatctgaaaatcacgtggtttaagttctgaaaacgcgccctcggggataaaatgcaaaacacctcctctaacccggagccatttcacgttgcaagcatatttgtataactttaggccca

SEQ ID NO: 5171 - DNA, 219 bp, Zea mays
  Clone ID: MRT4577_104711C.1
ctaaaaaaaggcggcaattcatgaaatagagggcgcgaacaaattttaaacccccaaaccaaaatgaatttctcatgccccaacatataccttttcaaataaaaggataccactttgttcctcttctcaataattcttttacttcaccttaaaactaaatcctatttcttaggcttatatacctgtgcctccttttccttttatatctatcaacttccc

SEQ ID NO: 5172 - DNA, 236 bp, Zea mays
  unsure (1)..(236): unsure at all n locations
  Clone ID: MRT4577_104712C.1
aaaaaaaaaaaaaaaaaaaaaaaaatcggtttctcacagcaagcagcaacaggcctgcgagccggcaggtcctcgcctacgcctcctccaccgtggaccgtcaacagatggaagacgaggatgtcgtgcatccagggtcgacaagcttggagagacagggcaagaataactgaagcgattgggacgggagcgacataaacgtaatananaatttggggggggggggggtntatcta

SEQ ID NO: 5173 - DNA, 604 bp, Zea mays
  Clone ID: MRT4577_104713C.1
cccctcgagttttttttttttttttttttttttttttttttttttttttttttttttttttttttttttgggcacccagggtggcccagccggggttttaagggaacccttttggaatggacaggcaatttaaaataggctggccctcagttaataattttagttaccactcacgccccattttccaaggacagaaaaagaagagcctttcatatcccggaatggaattcgaagccttacaaggatcgaccgacccaaggggacaacaggcatggggacacttagtcgagcgcgtcgaaggggggcctgacaaccccctggggccccgttttgaccccgacggggccaagcctttgaattggggggggaaagtcctcaaaaaagggggggcggttgggggggtaacgctgggcaaaaaccctggggggggggtactcccaaaggggggggtcggagggaaacaggccgaggccggggggcaggtttttgtaaaaggtctcggaaaagtcccggggggggacaatgtctttaaaaatggaaacgggggggtcggtgcggtatcccgcgcaggagcgttgaaacgcgcgcgcaaactccgggttga

SEQ ID NO: 5174 - DNA, 333 bp, Zea mays
  unsure (1)..(333): unsure at all n locations
  Clone ID: MRT4577_104714C.1
ccnagcacgacagcacnnccggcgaccaggngcgaggcggccagcgaccggcggacccagcagnccagcacgacagncgacagcacnncgggaccacggcnccgcgcgnncngcngngcaggnncnagcgnncngcngaccacggcnccgcgcgnccaggaggggaccaccagaccaagccnccgcngnccagaccagggggcaggggccggaaaaacaaggcgcaagacnaaggnncnagcnngnngaggnanacaaacaagnccaaanngggganccgnnggagaaaggcaccnnacngggaccacngcacacnccngcnncaaaagagaa

SEQ ID NO: 5175 - DNA, 181 bp, Zea mays
  Clone ID: MRT4577_104715C.1
gacagctcgaactcgaatccctcatcagcctgtcgctggcggcgcggccgcgcggtcgattgctcggatgatatccttgcccataagctgacctgaagcctgcacttatccgcggggcgaggaggcgtgcgaacgagacaaactatcgagcggagactcgagcccatcgactttgactatg

SEQ ID NO: 5176 - DNA, 350 bp, Zea mays
  Clone ID: MRT4577_104716C.1
tttctttctctgcctgttgccgttaccggggctgatttctccacttccgttttccatgtgaccccgccgggccaccatcaccggaggtggccaagtctgttgcagccccgccgccacctgaggtggcctatccgacgccgcccacttgccctcgcactcctacgcgtgtcatcagccgcgcccgcgcgccgtcgtgccaccaccatgatgccgtcgccatcgaattgtcctcgcccggcgccaccattccgccctcattaggactgcgcctcaccctcatctcacaccccagttcctccctcgagaagaacgccgccaactgtctagtaaactgtgactccgtcctcgat

SEQ ID NO: 5177 - DNA, 790 bp, Zea mays
  Clone ID: MRT4577_104717C.1
cctcgaggccggccgggtcctttttcccccaatccgccctttggcttcgctggcggcggcggcggctggggaaggcaggaatcccggcctttgcttgcgcgccactccgggcaccggctgcagctcgcagctgaacaaaatggcctccaatggtaatggaaatctcaaagctgatattcaacaagtagagtcaacagcttcagataatgttcaaggcgcaacaggcgtcaacactcttgccactcagggtgtttcacgaaatgaaaagcggtggagcgggtttagggatttctggaatcgcctttgtactggccccaagttaaagaagcttggtccctccacttcgttcaagtttcaacagatcgcacttcaacgtgatgagttctcacgttcgatccattcggacaaccatgttagccacgggcatttccagtttatccggaagattaattgggaacaactgtgggtgatggctaggaactggataaaagagcctatgaatatggccctttttgtttggattgcttgtgttgctgtatccggtgcaattctcttccttgttatgactggaatgctgaatcgtgttttgcctagcaaatcaaaaagagacacctggtttgaagtgaacaaccagatcctgaacgcattattcacgctcatgtgcctctatcaacatcctcaacggatctacaactttgtgcttctttgtcgatgggagcagcaggacatcttaaggcttaggaagatatattgcaaaaatggaacatataaacctaacgagtggatgcac

SEQ ID NO: 5178 - DNA, 2365 bp, Zea mays
  Clone ID: MRT4577_104718C.1
gccggccgggctgcgagcggcgctggcgagggcgccctgttcgcaaaaggcgtcccaaaacaaatgccactatgcggctgctagagcgtcgtctcctttcctcccccaatccgccctttggcttcgctggcggcggcggcggctggggaaggcaggaatcccggcctttgcttgcgcgccactccgggcaccggctgcagctcgcagaaatggttagccagtagtatgtatgtgcattctgtatatatacaagagagcaatcatttctttggaaaatggcacttccactctgagtgttaaatagggtgccttaccctgtggaaaggggttgaactgtatctgtaatctgacactccacatctccagctgaacaaaatggcctccaatggtaatggaaatctcaaagctgatattcaacaagtagagtcaacagcttcagataatgttcaaggcgcaacaggcgtcaacactcttgccactcagggtgtttcacgaaatgaaaagcggtggagcgggtttagggatttctggaatcgcctttgtactggccccaagttaaagaagcttggtccctccacttcgttcaagtttcaacagatcgcacttcaacgtgatgagttctcacgttcgatccattcggacaaccatgttagccacgagcatttccagtttatccggaagattaattgggaacaactgtgggtgatggctaggaactggataaaagagcctatgaatatggccctttttgtttggattgcttgtgttgctgtatccggtgcaattctcttccttgttatgactggaatgctgaatcgtgttttgcctagcaaatcaaaaagagacacctggtttgaagtgaacaaccagatcctgaacgcattattcacgctcatgtgcctctatcaacatcctcaacggatctacaactttgtgcttctttgtcgatgggagcagcaggacatcttaaggcttaggaagatatattgcaaaaatggaacatataaacctaacgagtggatgcacatgatggtggttgtgatcctccttaatctgaactgctttgctcagtatgccctgtgtggtctaaatgtagggtaccgcagatctgaacgccccgctatcggtgttggtctcactatttctgttgcaattggggctgcagcatttgctggtctgtacaatataatcagccctcttgggaaggattacgacacagagcatgcagataccgatcaagaagcacaaatccatgccacctcaaccgagagtggcagaccaacttcacggcttcagtcattcgagaggagatactctttcatccagagcgatgaacgccgtttcgtggagagaaggcctcagtgggttggcgggctaatggatttctgggaccagatatccattgcgtacttgtcacttttctgcagctgctgtgtctttggctggaacatgcagaggcttgggttcggtaacatgtacgtccacatcgcaacgtttctgctcttctgcctggcgccattcttcatcttcgtcctcgcagccggcaacgttgacaacggatccgttcaggtggcgttggtgctcaccggacttttcctgtgctttttcggtctactgtatggcggcttctggaggatccagatgaggaagagattcaacctccccgaaaacagcttctgctgccacaacccggacgcgtcggactgtttccactggttattctgctgctcgtgctcgcttgcccaggaagtcagaactgcggattactacgatatcacagaggacaggtcgcacacagggcaggtagttggtgaaagccaccgcataatgtccccgttgcagcgcgaagacggtctgcctcttttcaagtcgagcccaagctcgccgtacaggagcggcaacgctagtccgtcgatcttcatcctggagagcccgtcaccgtcggccccacgtaggtcgtctggttcgtcgcctcagggtggtggttcaccgacgatgggccatagggcgatgaaggcgccagttccatctgttcttcaaagagagagtggaccagatcatgcacaggggtgatccaatgaagcagctaccgcttgccagtccaatgagatatgtatatttttgtaaaggagatacatcgtcggcagatattttttttcctgtgctgtctttcttgttcgtaagaaatgtatagaccttcgagttctgttgtgcatttgagctccgtcatgcatggttgcttctgatgtgaggcacgattattgaagagacctctcgtttgctgctcggtatctgccgatgtgtaaatgataacagaagtgtgctggtgctgacttactcaacaaaaaaaaaaaaaaaagcggcc

SEQ ID NO: 5179 - DNA, 2113 bp, Zea mays
  Clone ID: MRT4577_104719C.1
tagttcgcaagggtctgttcgttttattcgtggccacgaacatgggagcgccctgcgcctacaagcctccacgatctaatttaattgatgtgggcgattcgcaacccaacgaagaggaacaacatgctgaaccactaattgaaaacaatgtaaatttcttcccactatttttttctattgtactccaggacgttaactgtgtatatgttttaaattcctaaactttatttgcatgcatgtttttaattttgagtagaatgaagttatgacaaagcagcttggacttttgagaacactagagggttttgtgaaatttgtatccaagaaatcaatgctggtaataggtcgaatgacatcatgactacccgtggtcacaacaacatagctgaaaagtacaagatagcaacatgactgcaccattcaaggcttcaattgaagaataaattggacttactgaaaggtcgacatgaataatattcgagatcaaattgctgcattgtttgctagaagactgtaattttatttatatatactttcttttggccaaataagatgtaccaactggcacaattctattttcgtatctttaaatgtatgatcgttacaatgccataattgcaaaaaatcaaataaacaaataagggcattttttattttgtgtcttagataagactaatctacgtttttataatttaggctacgaaacaactatatatagactacgaaatagttaaataagttactttattgagtggattcaaactgtctaaaataaagagatccaaacggggcgtaagctgaaacaaatagaaccaaagaagctatacgttgtctagccaacttaaagtgattattcggcgtttgaaagcgataaggccagttgggtgtgcgtgtgtgcggtggaggtggggggttcgtcactggggaggtattgaggatgccttggctatctttcagtttcagctactttcaagttgagatgttgtcaaagcaccaacgacctgtacgctgagatgttgtcaaagcaccaacgacctgtagcaaatgtgtctgaaactactactaagatatatgagaggcgtggtatggcgcttactaattttgcgtatatggttctaaatgacgggcatttccttgatagagctgttaatccaaagtaagtcaagtgcaagtgtgagtttgctgttgttgtcgaggatcagagacactgcatatccattgtcaattctattgaagtcaagattttgcgatttacatcagaccaacagcttatcggcattctttttctttctttctttctttctttctttctttctttctttctttctttctttcttttctgaagcttatcaccagcattctgaagtggattcactcaaataccgaaacttcagtcgagcatcaagctgcagagatgttactaatagaataacatgcatcaaaagcaaactgcaagttccatgggatagatcatccaggtgatcgatatcccaatgctattgggtttttcgacatcggttcaatatctaattgtggctcctgagtcagcttggggacaagccaaatttcaaggagggaagggtgtcatatggacctactgagctagtggttagtgcactggatgaagctaggctatacatggggtggggtggaccatcaggttcgatcgactcaaggaagcaagctaccaagtgaagtacaaaaagagtagcagccaaatgatttgagcctgaactcggaggcggcgagcaagagctcgaggtgagcatccgctcgatctacctcttttgcttgttctacctcctgtgtatgggtttccttgtatctagaaccttccgtaagcctatcatatgctacacagcggtcactgctgcttgattgactcaatttatcagcatacatgggccgaagaatcaaatattgacgctgactgaccaacaatggcggaaacagggggacaacaagagcccgtgccccctccctccggattgagatcctctgcagtccctatgaatgtttcggtttacagcaacacatcaattcacctgtttttttttcataatatattatcattgttgttgttgttgttgttattattatgaatactaactac

SEQ ID NO: 5180 - DNA, 258 bp, Zea mays
  Clone ID: MRT4577_10471C.1
atatattattttttttttttttactcttatggttgggtttttttcacaaatcatgcatgcacgacacatatggctttacaacaatttccttacattagaatgctggaagttcaaattcacattgtcaaatacttggatgccccaacttgacataatgaatacaaggcagctaagaaagaagaatgaaaacagtgacagttactcacggtcaggaaaacatataaaccctgattttaccaaaccatccctgatggggat

SEQ ID NO: 5181 - DNA, 305 bp, Zea mays
  Clone ID: MRT4577_104720C.1
tgtaaattaaggttcaagaagcaacaagtaatcactcataatacatatatataatggcggattggggtccagtggtgatagcagtggtgctgtttgtgttgcttagccctggtcttctgtttcaattgcctgggaggagcagagtggtagagtttgggaacatgcaaaccagtgcaatttctatcttggtccacacaatcatcttcttggtctcattaccatctttcttattgctattggtgtgcatatctacacttggctaggcttattctattctttttttggaaaggtttagaaaattttat

SEQ ID NO: 5182 - DNA, 543 bp, Zea mays
  Clone ID: MRT4577_104721C.1
aaaaccccaaaccccgggaagtatttaaatcagttaaaaaaaaggaagcatattcccccatacatattattccaaaaagccccccccaggtaacaaatccaaaataaaagttctaggaaaaagccccacatgccccaccccctctttttacaaacaaaaaggaacggtaaaacccccccccttggacccaggttaaaacggccttttacaaaagggggggaagaacacaaccttttccaggccccaaaccttttttacttttttggaaaaaaattggcaaaggcagggaaaattggcccttttccacacaaaaaaaaaggctgccgaggggggaaactttgggttcgcgggaaaaaacaaaaacgggtggccctttcgtttaatggctcccggggtttgaacccaaccagcagccggggttgcccctaaaaaagcgggggcggggggccaccccaaaagttgtttggccaggggaaaaacttcaacgggggacggaatttttttgggaaaaagaaatgtatggtctatgggagacactccccg

SEQ ID NO: 5183 - DNA, 356 bp, Zea mays
  Clone ID: MRT4577_104722C.1
tcttttataagctaatggagtagcagtgaatgtgtgccttcaacttcactgttttctctccagtcattgactctgatgttactgctgtaaaacaagtaggactaaggcatagtttcagttgaatagcgtttttgccggattctgctgactcacttatacgactgtaatttgatggttcatagttttggctggacatgctgtcttgaataattattcaagccttgtggtagaatagttctttaggccaaagatgtgctaggtagaatttcgaaagtaaaaaatgttggatgtattgggttaagaatggcaggtgtacataatatcctcttccaaaacaggttcgctaaatactgtgg

SEQ ID NO: 5184 - DNA, 818 bp, Zea mays
  Clone ID: MRT4577_104723C.1
cattgggtacctcgaggccggccggggaactctcccctggttgggcctgtgctgtgtggccgctctccctccacccaacccaaccaagaaacagaggcccccgctcaagctccgagagacagagaactccatggccgccatggacctcctctccggcaagctcatacgctccctgcgtctccattcctcactcctcccctctgctccttcctcctcccgcgccgtccccacatcccgccgtcatcaaggccaaggagaacatgaagatcgccttcctcagccaggagttcgaggtctccgcctcccgcaccgtcagggaagagttcttcagcgccttcgaggaggagatggaggtcaagcggcggctcgagcaggtgcaggcggcgctcgagggcgccactgaagacatggacctcatgggccggctcctcgatgagctcgacctgctgcagcgccgctcccaggacgtggacctcgatatggtggacgtcaaggtgcagaagctcatgccagagctcgggttcatgcctgaggacgccgaccgcctcgtcgcctccttcagcggtgggtggaaaatgaggatgtctctaggcaagatacttcttcaggaccctgatttgcttttgcttgatgagcctacgaatcatgtcgatttggataccattgagtggctggagatgtatctcaagacgcaggatgtgccgatggtcattatatctcatgacagggcgttccttgatcagttgtgcacaaagatagtggaaactgaaatttggtgtgtccaagacatacaagggtaactattcagagtacattct

SEQ ID NO: 5185 - DNA, 416 bp, Zea mays
  Clone ID: MRT4577_104724C.1
tggctctggacctttgggctggtttatctgcttggattcttagagatataaaaggtaccaggagtcataccagtagtcggctcactcgatatttgctaggacgcctacgatagagtatcccctcatcataggtccccgtaacataacttcaacgcagtagaatgcgcagcaaatttctttaaataagtcgctctcgcacccgtagacatatagagtagcgaaattaaagactggacacccgacgagcctaatagctcactagccgcacactagaagttactccatacgcccatagacagggagtactgcgggttacccgaacatctagaggactccataagtccgatcgccggggtagaggacttagaaaacgcaaccctcgtttaaagacactaagaaaatgacaacgactcccc

SEQ ID NO: 5186 - DNA, 1047 bp, Zea mays
  Clone ID: MRT4577_104725C.1
cattgggacctcgagccggccgggactcttcctccttccgccgcccgatactctcccctggttgggcctgtgctgtgtggccgctctccctccacccaacccaaccaagaaacagaggcccccgctcaagctccgagagacagagaactccatggccgccatggacctcctctccggcaagctcatacgctccctgcgtctccattcctcactcctcccctctgctccttcctcctcccgcgccgtccccacatcccgccgtctccggcgccgccgccatgcccccctgtactgccgccttaccaccacctcctcctcctcatctgcctccaccaccacaaccaccggggtggaggaagacgtcaaaagccaggacctttcctccctcctcacctcctccgacccttctgccgcgcccgccgtcgggaccaagaagaagcggtcgggcggcagcagcggcgcgtctagcatcccgtccggggtgcggctggagggaatctccaagtcctacaagggcgtgacggtgctcaaggacgtgtcctgggaggtgcagcgcggcgagaaggtggggctcgtcggcgtgaacggcgccggcaagacgacgcagctccgcatcatcgcggggctcgagaagcccgacggcggcgccgtcatcaaggccaaggagaacatgaagatcgccttcctcagccaggagttcgaggtctccgcctcccgcaccgtcagggaagagttcttcagcgccttcgaggaggagatggaggtcaagcggcggctcgagccaaggtgcaggccggcgctcgagggcgccactgaagacatggacctcatggggcgggctcctcgatgagctcgacctgctgcagcgccggctcccaggacgtggacctcgatatggtggacgtcaaggtgcagaagctcatgccagagctcgggttcatgcctgaggacgccgaccgcctcgtcgcctccttcagcggtgggtgggaaaatgaggatgtctctaggcaagatgcttcttcaggaccctgatttgcctttgcttga

SEQ ID NO: 5187 - DNA, 375 bp, Zea mays
  Clone ID: MRT4577_104726C.1
taccggtccaaaacctcccgggcggacgcgtgggcggacgcgtgggggggcctaccatggtggtgacgggtgacggagaattagggttcaactaattaagagtggcggatcggaggaataatacatcttcatcaatcaattaacctaataatatgctacatgaataagctgctgcgtgcatgtggccggccggacttgtggaggagcggtgcaattaacttgtatgcacgtactctatctatatatgatgaataaaaagagatagaattctgatgcattcatcttacctggtcgttcattgtgctgccgcctacgtttccttcgtgcttaatgcccaaaacaaatcaaaattatctgtggctcatgcatacactt

SEQ ID NO: 5188 - DNA, 2368 bp, Zea mays
  Clone ID: MRT4577_104727C.1
gggtgcctcgagaagggccgggttgcattttgctggttgggcctgtgctgtgtggccgctctccctccacccaacccaaccaagaaacagaggccccgctcaaggctcctccgagagacagagaactccatggccgccatggacctcctctccggcaagctcctacgctccctgcgtctccattcctcactcctcccctctgctccttcctcctcccgcgccgtcatcaaggccaaggagattacaattactgccttccgcggaacctttaagcccgagagagggacgcagcgcgcgagaagagttcttcagcgccttcgaggaggagatggaggtcaagcggcggctcgagcaggggcaggcggcgctcgagggcgccactgaagacatggacctcatgggccggctcctcgatgagctcgacctgctgcagcgccgctcccaggacgtggacctcgatatggtggacgtcaaggtgcagaagctcatgccagagctcgggttcatgcctgaggacgccgaccgcctcgtcgactccttcagcggtgggtggcaaagcaggatgtctctaggcaagatacttcttcaggaccctgatttgcttttgcttgatgagcactacgaatcatgtcgatttggataccattgagtggctggagatgtatctcaagacgcaagatgtgccgatggtcattatatctcatgacatgcgccgttccttgatcaagttgtgcacaaagattgtggaaactgaatttggtgtgtccaagacatacaagggtaactattcagagtacattctagcaaaggcggtagcagtggaggcacagtatgctgcgtgggagaagcaacagaaggaaattgaacagacaaaggagctgataaacagacttggtgctggagttaatgcagggcgtgcttccagcgagcagaagaaattggagaagcttgaaaaagaagggttgattgagaaacctttccaaaggaagcagctaaagatcagattccctgagcgtggaagaagtgggagaactgtgttgacgataaacaatcttcaattcggatttgagaataagactttgttcaacaatgctaatctgatagtagagagaggtgaaaagatagctattattgggcccaatggttgtgggaagagcacactgcttaaacttatgttggggatggagaagccacaaggtggtgaggtgcttcttggggagcataatgtgttgccgaactattttgagcagaatcaggcagaagctcttgatttagagaagaccgtgttagacactgtagcagaagctgcggaagattggatacttgatgatatcaaaggtctccttggccgttgcaacttcagggatgacatgctggatagaaaagttcagtttttaagtggtggagagaaggcaaggcttgcattttgcaagttcatggtgactccatctactctactcatcttggatgaaccgacaaaccatcttgatatcccatcaaaagaaatgcttgaggaggcaatatcagaatatacaggcaccgtcataacagtttctcatgaccggtacttcataaaacaaattgtcaacagagtcatcgaagtgaaagatcagactatccaagactatcaaggagattacaattactaccttgagaggaaccttgaagcccgagaaagggaacttgcccgcgaggaagagctcgaggagagagcccccaaagtaaaagccaagtccaagatgtcgaaggcagagaaagccgtcaggaagaagcagaagatgcaggccttccagcagagcaagcagaaatccaagtcgcttaagaactcgaagcggtggaactgagatttttcgtcgttcgtagaggcggcgttggcgttcgtcacaatgccgaatgccatctgagacaccttgcaatgcagataccagtgtttgctactctgcctgctgtgccgtatgctataatagtcgccatatcagcagaagcactgcaaatacatcatcagaaagtagccctagtagcaatgaatgtagaagatcgaaaaaaaaaatactgtaactataagcaggaagcgttatgtgaccttgtacataatacatgcactttcggatggaggaacggcttattttttggatgaacggaataatggaatcaaatcgcacagcatttcagaaaaaaaaaaaaaaaaaaaaaaacagaccctgtttgaaagcttttcaaagaaatgtgcactatactaccttcagaagctcaccacattctggaattgatgaaaagaagggaagggcaccgaattaaaaatcaccctgtactctcaggcatcgagattttcaattcagcgaatgtcagcagaggaatccttgcttct

SEQ ID NO: 5189 - DNA, 694 bp, Zea mays
  Clone ID: MRT4577_104728C.1
ctcgaggccggccgggccgggattctccgaagaagcatagcacttgtgacgcccactttctgccatcactggtacgtgctcataccgtactgcgagcaggcatcacaccaccaatgaaatgcaatatcaaggaagctttcatcgttggcctcaagatcctgtaaactgacgacgaccatgagtggcaagcctattatgaccgaacgatatcccacaaaggccacaggcgtggctatgccagaggagcacaaggacgatggctgcccgatcataggcgtactgtgacaaggagtgcttcccaatgaatcaagcacgtttaagttctgctgccgcaacacgtatctgctgcttaccgctgctccctgcttccgtggacatcgaaggcgcaatgtggatctgaagaggcaatcctgtccaagtccgcatcatgaaccatcacctagtcctgcttatcctttagctgtattcgtcaacaactgcgagaatgatctgccctgaacagactgattctgacaactaaaggtatgagatctcctcgagaggtccatctcgagaatatatttactcaaacgtaacactcttgatgaagtacgcaataacgttgacacttcccgcaggacattcactaccgccaacagggacaacgacatccaggtacctaacatccaacggattgtgacacccttgaccctcc

SEQ ID NO: 5190 - DNA, 278 bp, Zea mays
  Clone ID: MRT4577_104729C.1
ggtttttaagctcgaactaacaacacagccggcggcctttcgcgaggggtcggagacaaaagcgacatacacaatgcccgcgcgacccaaatccaaggcgccaccggaacgcccatcacgtccatacactatgtagacgtaatgaacgaacacattcactcaactcccacagacataaaaatctgcactccctgcctggccaaagaggcagagcatcagacgcctgaggaggacgcgctatagaacctacagtttgcagtgcatgttcatcacaaact

SEQ ID NO: 5191 - DNA, 883 bp, Zea mays
  Clone ID: MRT4577_10472C.1
atccacacggctacacgtctccaaacttcaacggcaacatctacctcaaagtgccgatcggtttcgatccctcggctcggtcagtgtctgcacgtagctcccaaggccttgcttgcgatcctgacggccccgagatcgtgcaaggaactccggacacgttccggacatccagaggcaacgacaaatggtcgtacctgttcgcgttcgccggagtgctgggagttctcgaccttatcctcattgctacaggctggtggtttctctccagcaagcagagcatacccagttcgctagaagaggcaggctacaggatggtgaggggccaattcaggaggttcacgtaccgggaactcaaggacgcgacggggaacttcaaggaagagctcggccggggcggctccggcgtcgtctaccgcggcgtgctcgacaaagggaaagtggtggccgtgaagaagctgacgaacgtggcggggggcgacgacgagttctgggcggaaatgacgttgatcggacggatcaaccacatcaacctcgtcaggacctgggggttctgctcccagggcaagcacaagctgctggtgtacgagtacatggagaacgagtcgctggacaggcacctgttcggcacggcggacaggacgcgctaccatggcgcgagcggtacaggatcgcgctgggcacggccaggggcctagcctaccttcaccacgagtgcctcgagtgggtcatccactgcgacgtgaagccggagaacatcctgctgacgcgggagttcgacgccaagatcgccgacttcgggctggccaagctctagggacgacggcgccggcgacagcgacggcatgcggctgtcgcgcatgagggacgacggggtacaatggcg

SEQ ID NO: 5192 - DNA, 1312 bp, Zea mays
  unsure (1)..(1312): unsure at all n locations
  Clone ID: MRT4577_104730C.1
cccagcgtccgcttttgccgatccagttgtgccgatcggtattttcccgcgtccaccaaaacccgttgccgccgtttttttcgtcgccgccacggaccaggatcgaccggtgccgatgaagccagcggaggacgcggatgcgccggcgccggagacggcggcagcgcagacggtctggtacgaccccatgacttcgccgcaggcgccggcgccgcagcagcagccggcgatagaggctgcgatgcggggggcctcgccgtcggtgagctcgaacgcgcggcctctcagggtgtacgccgacggcatctatgatctcttccacttcggccatgcgcgcgcgctcgaacaggccaagaagtcatttcccaacacctacttgctggtaggttgctgcagcgacgagatcacccacatgtacaaaggaaagaccgtcatgaccgaggacgagcgctacgaatcgcttcggcattgcaagtgggtcgacgaggtcataccggacgctccatgggtgatcaaccaggaattcatcgacaagcacgacatcgactacgtcgctcacgacgcgctcccatacgctgacacgagtggagctgccaatgatgtctatgaatttgtgaaagccatcgggaagttcaaggagacgaagcgcaccgagggcatctcgacgtcggacatcatcatgaggatcttgaaggactacaaccagtacatcatgcggaacctcacccgcgggtacagccgcaaagatctcggcgtcagctacgtcaaggagaagcagctgagagtcaacatggggatcagcaagctacgggagaaggtgaaggagcaccaggagaagttccacagcgcggcgaagatcgctgggaccaaccctgtggagtggatggagaacgcggaccgctggatcgttggcttccttgagaagttcgaggaaggctgccacatgatggaaactgccattaaaggtcggattcaggaggggttgaagcggcaaggcaggtcggagtcaaacctttctggagaggagtccgactcgtagttctgtgatctcctccaaatgaaactagacaaaaggagaactggagatcatttcccagtctgtgtaacagtatgagattggttaattagcatgttattgtaggatgccatggatcattgtttagttgtacctggagatcatgtagttttgaagaacaatcgtgtttctgtatgcgatcagttgctccttcattgagcatatctgcaaaaagcacctgctaggaagtaggaactgctattgntttcatagaactgaagatacgaagaatctgac

SEQ ID NO: 5193 - DNA, 264 bp, Zea mays
  Clone ID: MRT4577_104731C.1
gggggtccaccatttttaacacatattctggtttaaacagttttttgggcccttttttgcccaaattttttacacacaaattcctattccacaatttttggacttgcggctggcattttgaaatccagagaaccaatttccaacatgcctgaatttggaggggggactttttatcaccatttgcatacagaaacaggaaattggtgttggggcctaccgggcaaaacatattggctccttggaacacaaggatcgagggcccct

SEQ ID NO: 5194 - DNA, 280 bp, Zea mays
  Clone ID: MRT4577_104732C.1
aaggttggcggggcccatatttcatgcaaaagatacattttaacatgtttcaaatttacgtctgagaatgaacacccctcctatgtttttgtttgcgtgttctaaaataaactaaaaagtttaaaactcctcatttatgctatacactgtccatggagggtatatttccctttgttttcagtatatgttcataaaaaatgtgtaccatgatttttatttttaaaccctttatatatagattggatattctacacagatgtaaaatgacttatactttttt

SEQ ID NO: 5195 - DNA, 1257 bp, Zea mays
  Clone ID: MRT4577_104733C.1
atgccaaatcctggcatgccatcgtcggcacatggttgccatgtagtgcctagccagatgcctcttagagcaaggttgcacgatttaagagggtccatggttaatcttggcagggactatgaatctgaatacaccacgttatcaacattgtctcaagaaaataagagaaagaaagggaaaggaaagggcaaaggcaagcctctaccacctaagggcaataaagtttgccataaatgtggtactgagggccattttactagggactacacttgccctaagcaccttgttcttttatatcaacaatccataaagaaggaaaagtttgacaagcctggttttgaggctcatttcaattctgctgaagcatcaactgagatgcataatgatgtcaactcaacaggagaggaattatgccttatggacagttgtaccacaaactctatacttagggagatcaaatactttcagactcttaagaagagatggaaaagttttgaacatgcggtgatagttggctctggacgagcaactattaccctccccatggatactgaaattgttatcgaggatacattattgtatcctgattctactcgtaccctcctaagttttagagatatccggcagaatggatttcatattgaaacccatgatgaaaatcaagagtttctcttcttgaccaagccaaacaaatatggcaaacgcatatgcgagaaaattctgtcactcatgtttgggttgtactatacatatattaagaccattgcacatgttgcatataagatttggcatgatcgacttggtcatccagacatagggatgatgaggaaaactacaagcaattctattggtcataatttgcctacaacaaattttcccaaatctaaagattttatttgcactgcatgtgcaactgggaaactgattttgagaccatcatatctcaaaattaaagctgaaccgcttaaattccttgaaaggattcaaggagatatttgtgggccaattacgccaacttctaggccgttcagttctgcacgctaccgaccttatacaactacgaccaactgcatatcattctacttccccaatatatatgaaactgaacaacaagttcagaagattatacatttgcaaaggcttgcaaatgaactaccagatgcattcactaattataaaggtgtcactaaatcattcattcctgctaggaatgcaccagaaagagtgaagtaccaagtaaaaccactcaactcctag

SEQ ID NO: 5196 - DNA, 3354 bp, Zea mays
  Clone ID: MRT4577_104734C.1
atgggtactgaaattgtgatcgaggatgcattattgtatcctgattctacacttaccctcctaagttttagagatatccggcaaaatggatttcatattgaaacccatgatgaaaatcaagaagagtttctcttcttgaccaagccgaataaatatggcaagcgcatatgcgagaaaattccatcactcacgtcagggttgtactatacatacattaagagcaatgcacatgttgcatataaggtaattttccaagatgttgatgcattccagatttggcatgatcgacttggtcatcctggcgtagggatgatgaggaaaattacaggcaattcaattggtcataatttgcctacaaaaagttttcccaaatctaaggattttgtttgcaccgcatgtgcaactgggaaacttattttgagaccatcatatctcaaaattaaagctgaaccgcttaaattccttgaaaggattcaaggagatatttgtgggccaattataccaacttctggaccgttcaggtatttcatggtactgattgatgcatctactagatggtcacatgtgtgtttactatcaacacgcaaccatgcatttgccaagataatgtctcaaattatcaagttaaaggcaaattttcctgaacatcggattagttcaatccgaatggacaatgctgctgaattcaaatctcaggcattcaatgattattgtatggcgctggggattcaagtacagcactcggtaccgtatgtccacacccagaatggtttggctgagtcactaatcaagaggattaaactcatcgcaaggccattattgatgaattacaaattgccttcgtcgtgttggggtcatgcagttctgcacgctgctgaccttatacaattacgaccaactgcataccattcaacatccccaatacaaatggtacgtggaaatcctccaagtatttcccatttgcgcaaatttggatgttgtgtatacattccaatctcaccacctcagagaacaactatgggcccacacaggaaagtggggatctatgtgggatttcaatctccgtcgatcattaagtatttagaacccttaacaggggatctatttacagcccgttttgctgactctatttttgatgaggaacatttcccgacattagggggagaatttaagtaccaaaaagaatgccaggaaataaattggaatactcaatgtgttccaggttctgatccacgtacttcagaaactgaactgcaagttcagaaaattatacatttgcaaagacttgcaaacgaactgccagatgcattcactaattacaaaggtgtcactaaatcattcattcctgctaggaatgcaccagaaagagtggaagtaccgaataaggccactcaactcctagagaggagaagtatggtgaataagcgttgttctgttgctaagaagcaaagaacaatagtgaatgcaaaaggacaccaatatgatacaatgtatcatgtggattgtgatgatccacaacccagctcggatgtgcacataactaaggctgggacatcggaaaatcctagacacatcaatttgggaaattctgatgagtctctaaggaatgatgaaattgccatcaactatgttgagactggtgaaacatatgatagaaaagctactaatgtcgacatatatttctccgagaagattgctgaggaccttcaaaatgatctagatccaaagaccatggcagagtgcactaagcgctcggattggatcaaatggaaggcagcaatcgaagcggagttagcctcgctttacaaaagagaagttttctctgctgtaatacctacaccacgtgatatcttccctgtgggatataagtgggttttcattcggaaacgaaatgaaaatggtgaggtagtgagatacaaagcaaggctagtagcacaagggtttacgcaaaaacccggcgttgatttcaacgaaacttattcaccagtcatgagtgcaataacattccgatatttaatatcattggcagtacaaaatcgtctatctatgcagttaatggacgtagtgaccgcatatctttatgggtcactggattctgatatatacatgaaagttcctgatggaatagatataccaaatccaaaggcaacgcgcaacatgtattgcgtgaagttacagaagtcattatatggcttaaaacaatcgggcagaatgtggtacaaccgattgagtgaattccttttgcgtaagggatacacgaaaaatgatgattgcccgtgcgtcttcatcaaaagatccaaagtgggattctgtatcatatcagtttatgttgatgacttaaacatcataggaaataaacttgatattgatgaagcacgtcatcatttatcgacggaatttgagatgaaggatttgggtaaaaccaaattttgcttaggtctacaacttgagcatttaccttctggaatccttgtacatcaaagtacatatacccaaaaggtattggaaaaattcaatatgcatatgtcttatccttcaaagactcctatggtggtcagatctttggatttaaagaaagatccatttagaccacgggatgatgaagaacagatattgggaccagagttcccatatctcagtgctattggtgcattgatgtatcttgctaataatacccggccggatattgcttttgtagtaaatttgttagcaaggcacagttctgccccaacgaaaagacactgggttggcattaagaatattttccgatacctaaatggcacaaaggatctaggactcttttacaagagaagtaatgatcctagtttgattgggtatacagatgctggctatttatctgatccccacaatggccgatcgcaaacaggattcgtattcttacaaggtggaactgccatatcgtggaaatcatctaaacagactttggtgaccacgtccaccaaccattctgaaataattgcattatttgaagcatcacgtgaatgtgtatggcttcgtagaatggtgaatcatgtactcacaacttgtggtattggttctcttgacttaccaacaattatctatgaagataattcagcttgtgttgttcagatggatacgggttatatcaagagcaatatcaataagcatatttctcctaaacttttttatccccatgaacttcaggaaaaaggggatataaacatcttgcaaactaagtcttgtgataatcttgcagatctattcacaaaatctctaccatactctacatttcagaaatgtgttgaggggattggtatgaggagacttaagtgcttgcaaggttcagggggagtaattccccatgatatataa

SEQ ID NO: 5197 - DNA, 639 bp, Zea mays
  Clone ID: MRT4577_104735C.1
ttgggactctcgaggccggccgggagaagacttccccatatagaagctgctcctctacgattacaatccatcagcacgccatctccgactccgcgtccggctcgcgtgggaatatattcagtagatggaacacaaggaggtcggctggcacatagccgtgactgcgcccaatcctcatagatcgatatagtgtggtttcttctgacaagcgcgtgccaccatgaacatcgatgctccaagtgccacaacggagcatgatcacatcgaagcaggagcaggcccagatggctgcctcctccatcgatagaatctcggcaatgtgccgcacgtataatgaggaaaggacctgcaattgctagcaactgtatgtgtggcagttcctcaagtcgaggagaacactatcgtcgagcagcctatgcatgtcaatgaaatcaacgaggctgctgctgttatctggaaggacaacgaaggaccaaaccggtgcgccacctgtaagaagcgtgttgagttgcaccggcattaactgccgatgcctcaacacgaactgtacgatgcaccggtactccgagaaacactactgccagttcgactatcgaactgcagctacagacgctatcgccaaggacaatccagtgctga

SEQ ID NO: 5198 - DNA, 247 bp, Zea mays
  Clone ID: MRT4577_104736C.1
cgcgactcggtgcgtgcggtctactcctctacctactcatttacagaggggcaaattcactatgtcccctagagttgttctggctccgctaaccactcagaggttttacaacgtcgtacggggaccccaggccatactgtagtactctgtgagaactttctgcgggggggttctgacaactgaagggactgcgtggatctgacaccgggttaaggcggttctcaaacccagggggtatgggctaaag

SEQ ID NO: 5199 - DNA, 352 bp, Zea mays
  Clone ID: MRT4577_104737C.1
caaaccccatgtagaacgggaggaccgcattgtttcacggccgacgcgaaccaaactttacaaagcaaccggcttgtgtccatgctgccgtcgggcctggttaaaccaaccgtcccttaacccacccacgtaatttaacgcaacgacctgcggacggaaagcccaccacacatggcctacaggcctccgggttggtttgtgggtgaacctaaacaaaaaacctacttttgcaggggcaacaccccaaaacaacacccattagtgggggcgcacaaaaactccaaccaaaaccaccaaggggggggaaaccaaaacgggcgcggagaaaccaaccaaagggccactccccccc

SEQ ID NO: 5200 - DNA, 174 bp, Zea mays
  Clone ID: MRT4577_104738C.1
ttgtgaatggttgccaccactccctccctgatggtcttatgagggccactggcgctataaacccccgcaatggcggtaaccacatccgcataccaactacggcttcacggactccaaccctatccgtcccgtcacctaccgtgcggtctacgagctttaaaacaccatttttac

SEQ ID NO: 5201 - DNA, 222 bp, Zea mays
  Clone ID: MRT4577_104739C.1
cccatcccagctgccctcggcggtgcgcctggtcttggcacctacctccccccgggggactcgccgctgccggaagaagtcgggctgggggagccgctctcctctactacccatctaaccccctataaagaaaaagaaaaaaacacagagagagcgagcgaccggcgggtcgggagccatggggcacgatgtaagctgcgcccacaccggtggggggggggg

SEQ ID NO: 5202 - DNA, 268 bp, Zea mays
  Clone ID: MRT4577_10473C.1
aattaaaaaagaaaaatgaaccataaaaacatacagactacatattcaggttagttcacccgatcttgaaatgaaccattcaagagaaaagaagataacataacacaaggccgacaaatatttattacagccacccaggttaacataaactgaccccgatcaaatgacaagggggccaaaagatatatctcctgctacatatttgtcaataagtgggcaaaaggatggttaagagaggagagttttgtcctttggtagctgaaaaagg

SEQ ID NO: 5203 - DNA, 106 bp, Zea mays
  unsure (1)..(106): unsure at all n locations
  Clone ID: MRT4577_104740C.1
cccattcgnccgtacagatgcaaagaatcttatggaagcaggtaaagtcaggatggctgcgggaacatcgcatgaggcatatgcaccgctccctgaagccttctca

SEQ ID NO: 5204 - DNA, 524 bp, Zea mays
  Clone ID: MRT4577_104741C.1
aacaaaaattgtgctaggggcttttggccattaatccgggggcacctttacttttacctttatgggggaaatttaaggggattaaaacctttcggtttttacccggggggccggcctggggaccacccaaggggacccctttgaagcctcatccacagggggggcccgggacgctttttccacgcccgccccccccaaagcagaaaacactttccaggggttttacaccttttttttttggccgggccgtccgggcgtttcgcccgtggaagcacttttattacaggacctgtatgagggggcccccggttttttttttgctcacgccgacgaacgagggtttatcaacaagcggtgccgaaagcgggccggggggcttcatggggtaaaatgggccttggaaaacaacccgggtgcggttgggaatagctcaaaattccagaccgggccgcttgttttctccggggccccttgactggtggggcacctttgccgggggcccccccggtatagccttggggggc

SEQ ID NO: 5205 - DNA, 324 bp, Zea mays
  Clone ID: MRT4577_104742C.1
aaaaaaatcagttcatgacaaaccaagggcgccaggaccttttttttggtctttgaaaaccccgggaaatccacctttcgggggcctatttttttggtcgtcaggcaatgggggaaaaactggctggggccattttttttccttccatgcgggggggcaacttttttgcccggcctgttgatgagcaacttcaacactttacaaattttttttttttttcaatttttggccccaaaggggctttttgccttgggaaaaccattggccggccggaacaacccgtccatgtaaacaaatgtcggggcatatttcccttactttttg

SEQ ID NO: 5206 - DNA, 217 bp, Zea mays
  unsure (1)..(217): unsure at all n locations
  Clone ID: MRT4577_104743C.1
gtgangcnggggctnatgctgcgcaagccctacatcaccaaccctnaacgtgttccaggcctaacncgctgaaancggatnagggacnncaacttcaaggtgacnccccagccgccgctgtccaaggagttngccgacgananacaagcccnccgaaactngtcaagnnnnagccngcganacgaatagncgnncagacctcagaagacacgtnatc

SEQ ID NO: 5207 - DNA, 625 bp, Zea mays
  Clone ID: MRT4577_104744C.1
ctccccactcgccgacgacatatgctcatctgacgcttacccctcctatttgtcctctctcgcttgcaagatcaagcttcatcctaccccgtgagtaaggagaacatgcacatcaaaattgacgatcttcgtgcaagacgactctgagaaggatgaccaccaccggacctactgcactctacaagcttgcaggcattgaccaatgtgtaataccacagtgatgtcgagaacgaggactcgctgagatagaacaaaaacaccttcaaggatgatgtagcgatgctcgacaaactcaaggctgatggtgatcactccatcaccattgatattgatcatgtgtcaactggataccaccaatgattactgcagctgaattgatgtccctggacaccatgacttcatctcgaatatgatcactggaacctcccaacatgactgagcatgacttatcattagacatctcactcactgagtgctgttgaggatgacatcaccaatgatgagcacgatccgtgagaatgttctccttagctatgctgctgtagagaaacataagatttgctgatgcaacgatatgaatgctgagactctgaaatactcgatcgctggtgatgacaacattgat

SEQ ID NO: 5208 - DNA, 243 bp, Zea mays
  Clone ID: MRT4577_104745C.1
tgtcacgcgtacggctccgggtcacaacaggcgccgattctggaaaaagacaactatttgaagctctgcgactgtaagctcgccacacaaatagactgactccaactcacacccgatagctattaagactgacactcagaggggacggcagatacaagagcactacaaggtggtcgacaaggactgaactgaggagatcatgatggtaaggaagctcggcacccttacaagtccggcagacgc

SEQ ID NO: 5209 - DNA, 292 bp, Zea mays
  unsure (1)..(292): unsure at all n locations
  Clone ID: MRT4577_104746C.1
ggttggggatcaattagctagccaaaacagccccctgaacgcccaattataaccatggtcttaatgacgacctataacaaccataatcccttatcttatagtgtattacagggaaaactacaggcaactggctgactgcgggccaaaggaccagaatggtcccaccacttctctcttccacatggaggaacgaacccccaacagcccccgaaagcggtgttacagctatcaccttatcagccctgagctcaancatatcgcggactaacgggcagtaatggggcggcccggc

SEQ ID NO: 5210 - DNA, 460 bp, Zea mays
  Clone ID: MRT4577_104747C.1
cacacacacccagagagagacagagattcatcgatatggcggtttcttgcaaccactctgcgattctcttctctccatcatccaccgctggttcctcctccgttacttcttcctcgtcgctcatcggctttcctcgtttccaaacgctgcgtttcaaatcaagaagcgtttattcgaaatctagagtttcttctcctgtctcggcattgcctttacgttctctagaagctctgattttcgattgcgacggcgtgattctcgaatccgagaatctacaccgtcaagcttacaacgatgctttctcgcatttcgatgttcgatgtcctccttcttcctctgagtctctcgattggagcctcgagttctacgataagtttcagaatctagtcggaggtgggaaaccgaaaatgcgttggtatttcaaagaaaatggatggccaacttccaccatttttgactc

SEQ ID NO: 5211 - DNA, 557 bp, Zea mays
  Clone ID: MRT4577_104748C.1
atcaaaaaaacattcttagggctcacaaagccctgggtcctcgcataataataacaccagtaatgttattacgatcatcacgggacattgttattacgctgtacatggacttttttttctgaaattaaaaattttttagttccatacaaaaagacatggaccctggttggccaaattatacattcccagctccaggttaaaaaagcatccttccacaaggtatagaatttaaagttccccaggcatactacgtccactgatcaacgtttttttcccaccagggaaaattattggatcctcttttgaaaaattgaagggaacttccctttttttcttgtaaaccaataactcccaaaaggaattgtttcgcctgtccaaaaatgaaccgatcttaactttcagcgacacatgcatagaaaccatcagcctgtttcaatatgacctgccaaggggctgtgtattggcggaatacaggtccactttaattcactatgtatggagcaaccgggattgttttgaaaatgcacgctgtcggaataaaacctggggggaattga

SEQ ID NO: 5212 - DNA, 355 bp, Zea mays
  Clone ID: MRT4577_104749C.1
aggaataggatctgcacattgccacccttttgaatttcaaaacaagccagccatgggagaaaaacaaaaccaaaaacaaaaggggggagggccttcttcacaccacaaacaaacaaaaacgccgggaacgcgcggggcatgatgacaatggataaccaaaaaaaaaggagccagccgagcgagctataaagctatttggcttgggcgggggaggaccaagggcgccacaggaagtcgaggaggactcggttgaagaggttggtgtccttctgctgcgggaggggccccccgttggggatcacctttaccgtaagctttttcccgagcttttattttaccttgtgccctttgtcca

SEQ ID NO: 5213 - DNA, 416 bp, Zea mays
  Clone ID: MRT4577_10474C.1
actcactttttttcccattatacgcggactgtagttatgatgcaatgtgcacatcggactcttcctatacgggcgaaagagatagcaagccctctccgtcgaagatcaggatcgactgggggcatgtggtaccgcaccacagagagaacttatactggaaggaacggtcagctagctagaatttttccgctcgaggcgttagatactaataccttcactttctggtagcgagccggccgaaagcgtttcggaccgaccacgacaacgtacttggtttatgcagccaagctccagttacgctagggtgagttttattgggacagcgcattctcctgcgcgaagagggagagtatcatcttctccctctaccttttactttcttcaagacatcatggcacgtgcgtttttcatacccc

SEQ ID NO: 5214 - DNA, 379 bp, Zea mays
  Clone ID: MRT4577_104750C.1
atttaagaaatttgccgcttgatgtgtggatccgccgtggctgccgtcaggcatagacaccaagaaccggacctcggtggtggatcatcggggtcgcggaggtctactggatggggtctagaagtatccgggcaagtcgtctctgggaaccctgcttattgctcgccgatatgttttcaggcgtcgcgatgcagctgtgtgccgtggctgggtctcattgccgtcttcaatcgaggtgaggccacgaggatctgaagaatcaccctggtaactggaatctcaagtgccaggtgtgacagccgccgtcgacccgagacttcaccgtcttcccgtcgtcctccatgtgctcccgggttcgcactcatggagaagaataggt

SEQ ID NO: 5215 - DNA, 485 bp, Zea mays
  Clone ID: MRT4577_104751C.1
taattgcatttttaccagatcgaatagttatttatgtttaagagtgaatatttacgagtatgcacatatgatatcgttctgggatacatattgatgagacaagtctaggatgcactcactcgagcacgaccttgccctacataggtattaaaaaagagaccttgcaatggctgtaaagccaagcatattgcttactagccccgaaccgataatagagtggtttggatgagatgcaaccccgcctgttcactcaatattttatgtgtgcaagtttgtttcgaacctagtacatcccatagaatggctctatattattgatacgctactaaatactgcacttgaatcgggtgattcctctttgccgaataagcctgtgctcgtattaatagatcatgggcttttctggtcaaaacgtagcttgcctttattactttaacatgaggtactgtccttgattaacaatacttgttgttttgccgctattt

SEQ ID NO: 5216 - DNA, 326 bp, Zea mays
  Clone ID: MRT4577_104752C.1
gacagaggataattttttttggcgccctgtgggaaaaacaggaagtggtggatgcaggagtgggctaaactttggggaacccttctcttagaggcccccaagcccatccgtttggggggtcagcatgatttttatacacagtatatttttagggagggctccactgcttagtagccacaaaactcccaacccttttgcttttttttaatgccacgggaggatctccttggccatctcccaggaatgtttgcccttttaagtctgttgcacttctaggagggagtcaccaggcctcagtcattcggccaagaaaactgatatttttg

SEQ ID NO: 5217 - DNA, 185 bp, Zea mays
  unsure (1)..(185): unsure at all n locations
  Clone ID: MRT4577_104753C.1
ctcgtgaccaaagggtaatctgaaccatcgagccantgccgccaagcagacncgtctccacagtcngcgcgtacgtcttngngccacctnctcctctcatcccaatgaactgatagcactctagtccaggtatgtccaccatggcaattgaatgcgtcagcgccatcagctgctttcggagtatg

SEQ ID NO: 5218 - DNA, 261 bp, Zea mays
  Clone ID: MRT4577_104754C.1
attcggctctagctcacgcatctttttttccacaccagtcccgacacctaagggggggtcttatgggcgccctgggctgcttcctactccaccagtcggcgcgccccgttaaggaggagagatgtgcgtggacaaagacacgatagctatctcccaggtaatacgatacaaggcccggaagcagctggaggtccgcttccagaacacctcttcgatgagggcatcgatcgaaggactggccaggacaacggccggcacctg

SEQ ID NO: 5219 - DNA, 1012 bp, Zea mays
  Clone ID: MRT4577_104755C.1
ataaaactaaattcgcaaagggagcgccctgcgccggcctttcgccgagagccagtagccgccccgcgcctcgccgccataagtaccacgcccgtgtcctcgtcgtctcacaccaccaccacagagcttcagcgcactcgcacctcgggcaccaccacacacacccaccctagcttgtcgatcggctgaggaggcggcgatggccaaggacatcgaggcggctccacccggcggggggtacgcggccaaggactactccgacccgccgccggcgccgctcttcgacgccgaggagctgaccaagtggtcactctaccgcgcggtcatcgccgagttcgtggccacgctgctcttcctctacatcaccgtggccaccgtcatcgggtacaagcaccaggcggaccccgccggccccaacgccgccgacgcggcctgcagcggcgtcggcatcctgggcatcgcctgggcgttcggcggcatgatcttcgtgctcgtctactgcaccgccggtgtctcgggcggacacatcaacccggcggtgaccttcgggctgttcctggcgcgcaaggtgtccctggtgcgcgcgctgctctacatcatcgcgcagtgcctgggcgccatctgcggcgtggggctcgtcaaggggttccagagcgccttctacgtgcgctacggcggcggcgccaacgagctcagctccggcttctccaagggcaccggcctcgccgcggagatcatcggcaccttcgtgctcgtctacaccgtcttctccgccaccgaccccaagcgcagcgcccgtgactcccacgtcccggtgctggctcctctgccatcggcttcgcggtgttcatggtgcacctgggcactatccccatcaccggcaccggcatcaaccatgcaaggcggcttggttgctttctgccatgggcttgatgatctacaacacgatcaatctggaataggaaagactgctactttctgaattgacaattctccaactgcttgcttatgt

SEQ ID NO: 5220 - DNA, 669 bp, Zea mays
  Clone ID: MRT4577_104756C.1
ttgggtacctcgaggccggccgggacgctccccggaacgaacgacgcagcccaaccgagttcccaccaaaccagcggcaccacccatggcttcggcggcggcgagatccggtctccggtcgctggcggtgcgcgccgccccgttgaggcgccgcatgtcctcctccgtccacgacgacgcctatgagacggccaagtgggagaagatcacctacgccgggatcgtgacctgcaccctcctggcggcgtacaacctgtccaagggccacccccacttcgatgagccgccggcgtacccctatctgcacatccgcaacaaggagttcccatggggccctgatggcttgtttgagacgaaggaccaccactgagccctgattagcacaccttcaggagctggtgcatgcttaaaagagttatatggttgtttcagtgattttccttttcccttgagacctatttgctgcaacaagaaataagaatgaccaaactcttgtattgacagtgaggttttaactgtgttagctgttaccggcttgtctatttttctttgccgtccgaaaaaaaaaaaaaaaaaagcggccgctggtaccggctagaggaatgcatgcatggcgctggcggagagtaataaaataatgctgctggcatctaaatccatatctaggtg

SEQ ID NO: 5221 - DNA, 315 bp, Zea mays
  unsure (1)..(315): unsure at all n locations
  Clone ID: MRT4577_104757C.1
nnaaaaaaaaaaaaaaaaaaaaaaagaaaaaaaaaaaaaaaaaaaaaaaaaaaaaaaaaaaaaaaaaaaaaaaaaaaaaaaagaggggggagaaaaaaaaaaaaaaaaaaagggggggcccgtttttgggggtccctttttttcttcccccttgttttcttccgtggtgcgtcttttttttagcgctccccttggggggggtgccttggcccttccctttcccaacgccggtgcctgggaaaacccctggggttcccccccttattcgcctgggggaacgtccccccanccccccctggtttattttcgaggggg

SEQ ID NO: 5222 - DNA, 172 bp, Zea mays
  Clone ID: MRT4577_104758C.1
tacctgacccccgaaccgcatcgcacgcctggggaggtttttgacagtttctctcctacgctgtggtctgactggtgcgcgtttagacgaggaactgaggggggccaagaccaatcggccatgggtacccgtattcaggttgagatcaactgggaaattggagccttttcca

SEQ ID NO: 5223 - DNA, 354 bp, Zea mays
  Clone ID: MRT4577_104759C.1
gtatatgagggcaagcttcgactaaaccgaatgccggggaacctccctgaaaagcctcggttgaaaccccccttatggaacataaattagatacccctttttttttttccacaccaaatttctctaattgcggtccatcccgtttatccaaagttcacctgtttgcactcaacgagaaccaccaattttttacccgtgccggaaaaccctaattttgcatattccggggaggcccttttttattactggaaaccctttcccctttaaatacggtgggatttgtcgggaccactccttcacgacttagtgtgcccgatatcacccccataattttacttacagaaccccccccgg

SEQ ID NO: 5224 - DNA, 578 bp, Zea mays
  unsure (1)..(578): unsure at all n locations
  Clone ID: MRT4577_10475C.1
ctctcccccccacacacacacccactccatgttccacacaagcacacactagcacaaggatcgttcgatcgttcttcgatcgttcgtccccctgttcttagtttgttcgttcgttcgtccgatcgttcgatcgttcgtccgatcgttcatggttcgttcgtccgttcgttcgatcgttcgatcgttcgtccgttcgttcgtccaaataatctttttcctaccgttatgctgccgaaattccgatcgttcgttcgttcgatcattcgatcgttcatcgttcgttcatagttcctattcatcgttcatcgttcgttcatagtccctattcatcgttcttccagataatctttgtcctgccgttatgctgccgaaattccgatcgttcgttcgtccgatcattcgatcgttcgtccgttcgttcatagttcatattcatcgttcatcgttcgttcatacgaactatttactatcactattcaccattactattcaccattactattcactattactattcatcgttactattcacatacactattcatcatcgntactatttatcattactattcatcatc

SEQ ID NO: 5225 - DNA, 363 bp, Zea mays
  Clone ID: MRT4577_104760C.1
gtcgttagctatgtcgctttgttgttgtgttgcgagatttctagttaagcagatccgctctgtgtcgaggatgggttgtaggcctgcactaccagtattagaagtattttttatcgctatacatgtccaagtgaacgcactaccagtattataagtatttttatcgctatacatgtctaaatgaactctatacatgtccaagtgagggtacctcaaatgaaaagaagcgacacataaaattcttactatggagtttcatcttctacaactgtatggagtttcatattcttactatggagtttcatcttctacaactgtatggagtttcatattcttactatggagtttcatcttctacaactg

SEQ ID NO: 5226 - DNA, 738 bp, Zea mays
  Clone ID: MRT4577_104761C.1
gggtacctcgaggccggccgggacacacaggtcttccgagaagcaagcactgcgccgaacgagcagcgagtgtgttgaggcaggcaggcagtcagtgacagtgggagtaggagacaaggctaccgagatgaagggcctctcgttgctcgtcctcgccctggtcgcgtccgctgcatgcctcgtggccgtccgcggcgcgggcgagtgcggggcgacgccgccggacaggatggcgctgaagctggcgccgtgcgcgtccgcggcgcagaaccccagctcggcgccgtccaacggctgctgcacggcggtgcacaccatcgggaagcagagcccccagtgcctctgcgccgtcatgctgtccaagacggccaagaagtccgggatcaagcccgaggtggccatcaccatccccaagcgctgcaacctcgtcgaccgccccgtcggctacaagtgcggagattacactctgccatgagctgcgcgagagctgcttgagcacatgtgcatgatccgtgtcggagttagcacgacgtccgcaggaagtgacggtgacgtgtcagtgtatgtgtgcgttggtaataaacgtcgcggcacttgttgtgattaccatacatgtggaagtccagtatgatatgagtgtctcgtatcgtatgtaagtgtcagggttccagagatgctgtcctgcatcctcgaaataaaacttgtcttcttggacagatttggttaaaaaaagcggcc

SEQ ID NO: 5227 - DNA, 274 bp, Zea mays
  Clone ID: MRT4577_104762C.1
gtaccacaccactccgcgctagctgaggactggacagcggcacagaggtgcgacgtacgaggacgacgactcatgcgccacacatggcatcccaactctacgccgccgtgccacggttccacggactacggtgctacgccgcgcccagatccgcggtggcagcgctgccgtccgtgaaggtcggcaagaagaggtcgtcgtcgcaaggcatccgctgcgactacatcggctccgccaccaacctgatcatggtgacgacgacgacgctgatgct

SEQ ID NO: 5228 - DNA, 749 bp, Zea mays
  Clone ID: MRT4577_104763C.1
gggacctcgagccagaagggacacacaggtcttccgagaagcaagcactgcgccgaacgagcagcgagtgtgttgaggcaggcaggcagtcagtgacagtgggagtaggagacaaggctaccgagatgaagggcctctcgttgctcgtcctcgccctggtcgcgtccgctgcatgcctcgtggccgtccgcggcgcgggcgagtgcggggcgacgccgccggacaggatggcgctgaagctggcgccgtgcgcgtccgcggcgcagaaccccagctcggcgccgtccaacggctgctgcacggcggtgcacaccatcgggaagcagagcccccagtgcctctgcgccgtcatgctgtccaagacggccaagaagtccgggatcaagcccgaggtggccatcaccatccccaagcgctgcaacctcgtcgaccgccccgtcggctacaagtgcggagattacactctgccatgagctgcgcgagagctgcttgagcacatgtgcatgatccgtgtcggagttagcacgacgtccgcaggaagtgacggtgacgtgtcagtgtatgtgtgcgttggtaataaacgtcgcggcacttgttgtgattaccatacatgtggaagtccagtgtgatatgagtgtctcacaatcttcaaaagaaatatgggtcgtatcgtatgtaagtgtcagggttccagagatactgtcctgcatcctcgaaataaaacctgtcttcttggacagatttggttc

SEQ ID NO: 5229 - DNA, 314 bp, Zea mays
  unsure (1)..(314): unsure at all n locations
  Clone ID: MRT4577_104764C.1
agagagaggaaggacggcagcggcagggcagcgcagcagccggcccaggaggaggaggccgagagccaggccgcggagaaccaggccgacgccgggcacggcgacggcggcgggaacaccccgaccccgacgccggccaccccggcgggggggggccncgaagccccccaccaaggggaccaaaccccacacccccaccaaggcagcacacaccgcccaaagagcacgggcccaagccggacaaaccagccaaggcgcacaaaccgacgccggccacagacacaacggaggccaaagccaagggcgcggaccgg

SEQ ID NO: 5230 - DNA, 766 bp, Zea mays
  Clone ID: MRT4577_104765C.1
gtaccctccgagggctcggccgggagaagtcattccgagaagcaagcacaagcaccgcaccgaacgagcagcgagcgtgttgaggcaggcagtcagtggcagtgggagtaggagacaaggctaccgagatgaagggcctcttgttgctcgtcctcgccctggtcgcgtccgctgcatgcctcgtggccgtccgcggcgcgggcgagtgcggggcgacgccgccggacaggatggcgctgaagctggcgccgtgcgcgtccgcggcgcagaaccccagctcggcgccgtccaacggctgctgcacggcggtgcacaccatcgggaagcagagcccccagtgcctctgcgccgtcatgctgtccaagaccgccaagaagtccgggatcaagcccgaggtggccatcaccatccccaagcgctgcaacctcgtcgaccgccccgtcggctacaagtgcggagattacactctgccatgagctgcgcgagagctgcttgagcacatgtgcatgatccgtgtcggagttagcacgacgtccgcaggaagtgacggtgacgtgtcagtgtatgtgtgcgttggtaataaacgtcgcggcactccgcacttgttgtgattaccatacatgtggaagtccagtatgatatgagtgtctcacaatcttcaaaagaaatatgggtcgtatcgtatattcgtatgtaagtgtcagggttccagagatgctgtcctgcatcctcgaaataaaacttgtcttcttggacagatttggtt

SEQ ID NO: 5231 - DNA, 584 bp, Zea mays
  unsure (1)..(584): unsure at all n locations
  Clone ID: MRT4577_104766C.1
cccacgcttccggtaatattcacacggtctacgtctctcccaagggcgccgccaacttgtaaaaaaaaaaaaaaaaaaaaaaaaaaaaaaaaaaaaaaaaaaaaaaaaaaaaaaaaaaaaaaaaaaaaaaaaaaaaaaaaaaaaaaaaaaaaaaaaaaaaaaaaaaaaaaaaaaaaaaaggaaagaagggaaaaaaaaaaaaaaaaaaaaaaaaaaaaaaaaaaaggggggggcgtttaaaaaggaccaaattttaaaaaccctggcgtaaaaaaaaaaatttttttttaggggcacccaaattaaaacaacgggcgcaatattaaaaaggcccaaacggaaaaaacccgggaacacccaaaaaaaatgactgggaaaaaaaaccccctttggcgagggggataaaaaacaaaaagggccgnaaatacccccctttaaaaaagttgcccacgcaaaaggggaaaggggccccccccttatggcgcccataaaggccgggggggggggggggaaccccccaggaaacctttaaatttgcaaagccctaaaggccccccatttagggttttaacgcccctttaccc

SEQ ID NO: 5232 - DNA, 264 bp, Zea mays
  Clone ID: MRT4577_104767C.1
atggaatccaagtgtaccactacattcgtctcgtcgagagcttcgtcccagtgccttcgatccatcgatccgaccgatggttcatccctaatcgacgattttgtgctcagctacgataatgttccgtgcgcggaggtcgaagaagttgcagaagaagcccttgagcaacaacagtttggtgcagggggctcgagcgtttcccgagtgcctttcagtaaggatctgttcgttgacagaccacctgggatagcagtacaaccatga

SEQ ID NO: 5233 - DNA, 681 bp, Zea mays
  Clone ID: MRT4577_104768C.1
cggctatcgggcatcggctgggtccctgagagatgaacaccgtgctcactgctcacggcggccggcggctccctagcggcggccggcggcagaccggcagtgtgctagtgcggcagaccggcagcggcagtgcaggcggctgaccctctccctcaggccttcactcccttggcggcgcgccggcgcggcaagctggcaagctcttggccgtcggagacagtggcagtggtttgcatcaccctcactcccttcatcccttgcttgttgctttgcttgatctactagttcatgaacttgttaatctatttcaggttttttatttctatttgtaatgtcaactccgggagacagtggcagtggtgctggacctactagtggtggtggtcgacgcgattctagagctccaactccatcatctacgccacgagatcctactcctacaccatctgatggaatagcgcctactcctactgatggtcaaggtactggaaccaccaacactgatgctgttgaaatagatgaggatgttagggttggtagtaaaaggaagcttaaatctgatgtatggcaagactttgaaagagtctgtgtaggtggtacttggaaagctaaatgcaattggtgtcacaaaacactatcagctgtatgtagaaatggtacaagtcacttgcgtagccacgt

SEQ ID NO: 5234 - DNA, 855 bp, Zea mays
  unsure (1)..(855): unsure at all n locations
  Clone ID: MRT4577_104769C.1
ggagtcctgagaagcgatgtaatggattaccactgcgaagcaaatcttaacttccgtggccttgacaagaacgtcaaagaggttcagaaatgtgtacaagttctgcaggataagcaagagattgctgaaactcagaacgagctagctaaacttcagattgtatacgaagatgctgcacaaaagagtgaaggtactgccccatcagtttttatggccaaggaaaatgatggcagcttcccaggtgcaaaacacgagcttgcccttgtcccgctgcaccaagtaaatgctgcgcagtctcctgctatgcaattccaaagctgcaatgggcttattctacagcagcttgtgcctgtgtcttttagcaaccaacaagaccagccacgttcgaaccaacctactgtttactgtatgcaaaatcaaggccagcctgagcgcaggcaggcccaaacatttcaacctacacctcattctatgcagccgcaggcccagaaccctcagccacagactgtagttgaggcaccagagttctacctccaagctcagcaccattggcaacatcaaactgtccaggatgttcactcgcaggcaaggcaaccacaacaacaaccacaaccacaaccacaggtggcacaacagcagcagtaccacaacatgcagcaagttcctgctcaggtagttcaactgcaaacatcttccccgcaggcccaaagtgcccctcatgtcgccctgttctatcctcccttacgatcccaacagcccgcatgtggtaacaccgaggcactttctagaggcatggntgtgcagcctgcctattctacatctcttcttccagcgaagcnacatgaagctgctcag

SEQ ID NO: 5235 - DNA, 534 bp, Zea mays
  Clone ID: MRT4577_10476C.1
atggcaactctctccccccccccacacacacccactccatgttccacacaagcacacactagcacaaggatcgttcgatcgttcttcgatcgttcgtcccctgttcttagtttgttcgttcgttcgtccgatcgttcgattgttcgtccgatcgttcatggttcgttcgttcgttcgtacgatcattcgatcgttcgtccgttcgttcgtccaaataatctttttcctaccgttatgctgccgaaattccgatcgttcgttcattcgatcattcgatcgttcatcgttcgttcatagttcctattcatcgttcatcgttcgttcatagtccctattcatcgttcttccagataatctttgtcctgccgttatgctgccgaaattccgatcgttcgttcgttcgatcattcgatcgttcatcgttcgttcatagtccctattcatcggtcatcgttcgttcatagtccatatccatcgttcttccagataatctttgtcctgccgttatgctgccgaaattccgatcgttcgttc

SEQ ID NO: 5236 - DNA, 814 bp, Zea mays
  Clone ID: MRT4577_104770C.1
cctcgaggccggccgcgcccggttcgttcacctctgattagcgattacacagaattccctcccaatcggcggcggcacgatgcgcctccgcagccgggcaatctttcccctcgtccgcaccaccgccaccaccacgtcggccgcgtcttcgtcgccggcggtgctgagcatcggccacgcgctgcgcgagcgccggctgttcacgggggacgacgtggcggcgtacgcggcggtcagcggtgaccgcaacccggtgcacctcgacgacgccgtcgcccgggagctgagcgggttccagcgaggccgcgtggtgcacggcatgctcgtggcgtccctcttcccttccatcatcgctgccagcttccctggcgctgtgtacgcgagccagacgctcaagtttgcggcgccggtgtacgtcggagatgaggtggttgctcgagtccaggcactcaacatcaggatgatggcggcggcgacgaacagctgcacggcaagacgatatgtcgtcaagttcgcaaccaaatgcttcatggacgaagaggagggctctgttgcaattgaaggcgaagcaatggctgtcctgcctacactggagctcagctctcagtcgactagcaactaggagtggcctcaaaccgggtgactagtcacaagttgctgttgcttaatcatacccgaccttgtaatccctctcttcaggaacactgtgtagaatgcgtgtaaactaaacttagtgtagccttcacattataagcgaggagggaattaaagctgttgtttatgccagaaaaaaaaaaaaaaaagcggcctcgag

SEQ ID NO: 5237 - DNA, 564 bp, Zea mays
  Clone ID: MRT4577_104771C.1
ccggttcgttcatcctctgattagcgattaccagaattccctcccaatcggcggcgccgcgatgcgcctccgcagccgagcaatatttcccctcgtccgcaccaccgccaccactacgtcggccgcgtcttcgtcgccggcggtgctgagcatcggccacgcgctgcgcgagcgccggctgttcacggtgtacgtcggagatgaggtggttgctcgagtccaggcactcaacatcaggacgacggcggcggcgacgaacagctgcacggcaagacgatatgtcgtcaagttcgcaaccaaatgcttcatggacgaagaggagggctctgttgcgattgaaggcgaagcaatggctgtcctgcctacactggagctcagctctcagtcgactagaaactaggagtggcctcaaaccgggtcactagtcacaagttgctgttgcttaatcatacccgacctggtaatccctctcttctgcaacactgtgtagaatgcgtgtaaactgaacttagtgtagccttcacattgtaagcgaggagtgaaataaagctgttgtttatgcct

SEQ ID NO: 5238 - DNA, 571 bp, Zea mays
  Clone ID: MRT4577_104772C.1
agccgttccaccctgaccgctccgtttgctctccaaccaaaagcagaatggatcggctccatcccatctcactcaaccaaatggaccttagaagagcagtagatgaatctaagcggcaaatgtggatggaaatagttcagctagcttcaaccattattttttcagttgaagaggatactatgaatctatgatttggcaattcacttctaatggaatgtacttgtcattctttatataggattattaacttcaactttcagcggtatatataattccagtttacagtacaggatgtcagttgtcaagggaggtggtgtggtggccaaccactggaaagctaacttttgctctgagtataaaatatggtggcatccttcctggctatatatacttgaatgaagtaccaagctagagttggagagcaacgtcaaaggcaagtgatcatgggaaagggacaatgcaaggctggtggctcaaagacgtacgttctgaagctggacatgcactgccaatgcaatggctgtgtcaagaagatgagggacgcggtgaaggagatgatgagcctgtcgca

SEQ ID NO: 5239 - DNA, 888 bp, Zea mays
  Clone ID: MRT4577_104773C.1
ttgggtacctcgaggccggccggggtcagtctctcggttcgttcatcctctgattagcgattacacagaattccctcccaatcggcggcggcacgatgcgcctccgcagccgggcaatctttcccctcgtccgcaccaccacgtcggccgcgtcttcgtcgccggcggtgctgagcatcggccacgcgctgcgcgagcgccggctgttcacgggggacgacgtggcggcgtacgcggcggtcagcggtgaccgcaacccggtgcacctcgacgacgccgtcgcccgggagctgagcgggttccagcgaggccgcgtggtgcacggcatgctcgtggcgtccctcttcccttccatcatcgctgccagcttcgtactttttctttccggcatttcgtccaacagcgcgtgagcgtggagcctcacagtgtggcttggcctgatagatagttgggttttgttggttcagcctggcgctgtgtacgcgagccagacgctcaagtttgcggcgccggtgtacgtcggagatgaggtggttgctcgagtccaggcactcaacatcaggatgatggcggcggcgacgaacagctgcacggcaagacgatatgtcgtcaagttcgcaaccaaatgcttcatggacgaagaggagggctctgttgcaattgaaggcgaagcaatggctgtcctgcctacactggagctcagctctcagtcgactagaaactaggagtggcctcaaaccgggtgactagtcacaagttgctgttgcttaatcatacccgaccttgtaatccctctcttcaggaacactgtgtagaatgcgtgtaaactaaacttagtgtagccttcacattataagcgaggagtgaaataaagctgttgtttatgcc

SEQ ID NO: 5240 - DNA, 459 bp, Zea mays
  Clone ID: MRT4577_104774C.1
gtgcttagaacaaatcactctctgtttttaagatgaggaactgttcgagaaaaagagtgaagatctcaacagaaaggtacattgtctaccatagttgcatcaactttccttttgatcttcttcttcgacatgccgccgattatatccttcagcgatgcgcacttggttccgtgtggccatcgcgcccgcagtagcggggggccgtgcccgccactcacctgagatagtgcacgttggggccgatgctgcccgcatggccggacccgtgcgcgccgctagatggccgcgactcatgctgctgaggccgagccggatcgccgtcgaggccagggttgaggtcgtctgcctggccgggcccacgcgtgcccggggagccgtgcccgcgctccatgtgaaatcaggacaaactcccgccgaagctgggggccgtgttgcccacctcgcccgcgctgcaaggga

SEQ ID NO: 5241 - DNA, 313 bp, Zea mays
  Clone ID: MRT4577_104775C.1
ccggccgggagcctaccatagcactcggctgcgctacctgggcgcgctagatcctcaggacggcgctgaagactggtggcgtcttgatcgtccatggagtctgtaggtgccacgggatgagcgagcggacgagagatccaagggctcgagcagagagaacagcttcacgatagagagctacccgaagaagtgcagagaaaagaagaactactgttaggaggaaagccagacactaccgggatctgcatcgtgactctagaacccgggactaggggcatctctctacccggaccccgagaggagaaaacaccgt

SEQ ID NO: 5242 - DNA, 381 bp, Zea mays
  Clone ID: MRT4577_104776C.1
acgctttcttagcaagatgtttttatctctgtgctatagctcattagaaattttatcttaaaaatattattctgatttgaactcaagaatagggagaaattgtgaattgtgaaatataatgcaacatacactgaaacatattagagtcgattaggctagagtatgacatgttttccctttcaagaatggatacagaatgactcatatgaatgaagacagtgcttgttttgtagaagtctaaatggttacctatgtggcatctgattttgggttctagacatatttccgttaatatggagctatatatgaagatgtgaaatttagtttagttgttttatgtttcctgtctgttgagttctagtcgagtccaccccacagcat

SEQ ID NO: 5243 - DNA, 358 bp, Zea mays
  Clone ID: MRT4577_104777C.1
gggatgcgtacgcgtcggcttctcaggcgttggaagagcaagcacatctccaggccatgtaccctgtcatggaggatgatagcaacttgaggacctatcctagacaacgtagccgtcaagaagctgttcaccccacacaaaccaaaggataacggggtgctgaatggagactctgaagagaggtccatggatgttccccaacacgagctctgggagaagctatgtccaactaaccttgacgagcaaacgtatgtcttacctgggtggatgaacgaatcaaaccgtgccgacgttacattaactctgactgagttctaagttcccaagggaaagcgtgccattgagcttctgtcaggct

SEQ ID NO: 5244 - DNA, 417 bp, Zea mays
  Clone ID: MRT4577_104778C.1
aaaggggaggggttcatcaactttttaatgtctcaaaaaaaaaatagctcggatcacaaatgttttacgtggccagtgcacggggaatttttcagagttcattccccaccgtgaccagaatagagttctttttcccactgggacacatcgatctgagggggaccttgcgggcgcgttctaaagtatccgccacattgaaccttatgctctttttggaaaaaaaggggtggcgatcttatcccttccttaatgccgtgaaacccccttgacttccgtgcctttgaacacaatggggccaagccggctgggtttccctgatagctttaaaggggcaacttgctctttttcatattcaactggttcaactagcactaggttgagttggtggtcattttcctttaaaggtcctgttacttg

SEQ ID NO: 5245 - DNA, 334 bp, Zea mays
  Clone ID: MRT4577_104779C.1
ggaacgcgatagaccacaacgtgtgtgtggttattacacaaccggacatacaatacaaggaatacctttcgttgaacaaggaactaattcaatagcagcagcaacacctttagttgccacaataacccattagcccattccgagttccttattcaaattctaaagaacgccctttatttaaaaaaaaccatcatcaaagctggtcaccgaccacttgccatccttacccctttttgcctgctatccaaactgggtgaatgggtcatatccatagacctcctcttggttcgagtggatgaaggttaactcattctccagaaactttacaaattcc

SEQ ID NO: 5246 - DNA, 1197 bp, Zea mays
  Clone ID: MRT4577_10477C.1
atctttaaaactagatgagtctgtttatgcatagaagagataagacttatttcatcgtgggggtgagacgagacatggatccgtgataagttaaagcttggagcctgacgcgaaaagcttctgcaacacacatgagttgatacacgaaacaaaaccctggggtaaagaacagtatcacaacaattgtggctgctacagctgcggctcccgggctgggtcaagctgccccgcgccgacctttcaaaagagggggcctggccgttggatgacggagtgactgtacgtgaaaaatgactccaaatcacagagactagtaaacaagatcatacatcgccccatttcacaactcttcggccgagacaggcctatcgatgatgagaagaaaggatgatgagaatgccagagagcctatagtgtcagtgaatagtaatgatgaataggaacggtgaatagtgatggtgaatagttcgtatgatcgaacgacgaacgatgaataggaactatgaacgaacgatgaacgatgaataggaactatgaacgaacgatgaatgatcgaatgatcgaacgaacgaacgatcggaatttcggcagcataacggcaggaaaaagattatttggatgaacgaacggacgaacgatcgaatgatcggacgaacgaacgatcggaatttcggcagcataacggcaggacagtgattatctggaagaacgatgaatagggactatgaacgaacgatgaacgataaataggaactatgaacgaacgatcggaatttcggcagcataatgacaggaaaaagattatttggatgaacgaacggacgaacgatcgaatgaccggacgaacgaacgatcggaatttcggcagcataacggcaggacaaagattatctggaagaacgatgaatagggactatgaacgaacgatgaacgatgaataggaactatgaacgaacgatcggaatttcggcagcataacagtaggaaaaagattatttggacgaacgaacggacgaacgatcgaacgaacggacgaacggacgaacgaacgaaccaagaacaggggacgaacgatcgaagaacgatcgaacgatcgaagaacgatcgaacgatccttgtgctagtgtgtgcttgtgtggaacatggagtgggtgtgtgtgggggcgggaagagagttgccatgaaatggcttggagt

SEQ ID NO: 5247 - DNA, 709 bp, Zea mays
  unsure (1)..(709): unsure at all n locations
  Clone ID: MRT4577_104780C.1
ctgtacacgatcttattattcactgcctgccgcagccttatgactttggttacatgcagattggatgggatcaagggacatataatgccttgtaagtatcatataatccatggattatatgtccatcaatcccatgcaccctataaagcccttaaataatcctttctggaaacaaaactcactgcccgattcttcacatcggaccgatatacagaaggggaaggggggggngggggggggtgaanataaaaaaacctncaactaaattaaggaggacaaacaaactgctgctataatgtagccggaagaaccaatcacataatttacagacaaaaccatccgatcccatggctgcgcttcaaaaatccagccactcgaatggttttcggagagaatttggggcaagtttgcttcgaactcagatccccttcaccgctgacccgaggcttcacggttagttacctagccgccgatgagctgctgctccaccggttaatctgtacccaatgcgtgttagccatcttccacgaaaattctgccgatgaactcttgaaacctcctcgagtagagcttgggttccacggcagagatcgagttggggtctgtctgcaatgacttgtaactatgctcgagccgctttttgacgctgtaatcctgaaggatgtcaattatcccgaaaaagagaatcacgtcgtgcacttcgccggtc

SEQ ID NO: 5248 - DNA, 1588 bp, Zea mays
  Clone ID: MRT4577_104781C.1
gggtaccctcgggccggccggggattcccaccacggcgcccgcactgccttgccttctcctccccattgtttccatccgcaccggagggcggtccgatacaagcaacggcaacgcctcccctctcctccacctccccacctatattgattctgattcatccacccagcaggcagcagctacagcaagatggtgcacccgatcgcggaggccgacgagcggagccccttcggccgcctgacgccggacgagttctacgcgcgccacggcgtgacccactccgcctcgtccttcgtcaacccgcgggggctccgcatcttcacccagcgctgggtgcccagtggggacgcccccgtcctgggcgccgtcgccgtcgtgcacggcttcaccggagagtctagctggacaatccagctcaccgccgtccacctcgccgccgcgggcttcgccgtcgccgcgctcgaccaccagggccacggcttctccgagggcctccagggccacctccccgacatcaaccccgtgctcgacgactgcgacgccgccttcgcgcccttccgcgccgactacccgccgccgctcccctgcttcctctacggggagtcgctcggcggcgccatcgcgctgctgctccacctgcggaacagggacctgtggcgggacggggccgtgctcaacggcgccatgtgcggggtcagcccgaggttcaagccgccgtggccgctcgagcacctgctcgccgcagccgccgccgtcgtccccacctggcgcgtcgccttcacgcggggcaacatccccgagcgctccttcaaggtggactggaagcgggcgctcgcgctcgcctccccgcgccgcaccacggcgccgcccagggcggccacggcgctcgagctcctccgcgtctgccgcgagctgcagcggcgattcgaggaggtgcagctgccgctcctcgtcgtgcacggcgccgaggacaccgtctgcgacccggcctgcgtcgaggagctctgcaggcgcgccgggagcaaggacaagacgcttcgcatctacccagggatgtggcaccagattgtcggcgagcccgaggagaacgtggagaaggtgttcgacgatatcatagactggctcaaggcacgcgccaccgctacagccgcgggcgcgcaccacggcgagcagtagtttgggcacgcctcctgcgtgcgtgcgtgccatggccaggcttgccttcaaccgcgcgtggtccattcaccatcccagattctatcctaggttccttccagctatattcgagtacggatccagcaataaacttgtgctgtctgctgattacagaatttgtttttgctccaatactacgagatctcgtctgatggtcccgatccgccatctgcaaccgctccagatgcctccatgcctgccgatgatgaatcttgcaactttcattcattaattaacgaatcagatatattatttctgccaacagctgtagctgcatggtacaagtggttgggagttgtcagttgggacttgggagagtaaatcaaaatgtgccgcattcttttataacaaaaataagctgcctttgtttcaaaa

SEQ ID NO: 5249 - DNA, 514 bp, Zea mays
  Clone ID: MRT4577_104782C.1
ggctatgcaaaccactgaactaatcttgtttaggacaccaaattgtttcaagcttcatattgtgaattcagaaagctcttggtacaattacaagcaatcaactttaaacaaccgaaacattatccccacaaccacaaataaactaatgaatccagagaagaaaaccaaaatgagacctgacagcaatccttgtcagctatcatcttcctgtttatgaagctccgaaatgttcacagtttgcaaccgttcttcctctggaactaaccgccaatttggtgactgcactgccttgagccacttgaagtcatccacattagcccaattaccagtctcctcctcaagtccggagtccttcaaatcttctccaatcccttcataattcaaaacatatggtgcaaatctcacaccactgcagtcctcaatgataggcctgctcctcacccgcaagtagaaatccgtcaccctcgcctcatggatcctgatctggtgtgctgccatcacaaatatgcagcca

SEQ ID NO: 5250 - DNA, 388 bp, Zea mays
  Clone ID: MRT4577_104783C.1
cccaggacatctctaagctacaagaagctaataacaggacggagcagctagccatctagacccaaacaaaaaccgaatatatggggtaataaacaccatgggggggggccaggaggctaaggaaagacaccagctaagtctattaacacccacgcaggaaacaaaggaaccacggatggggggcagcccagcctttaaccgggggggggggggtatgcaagtatctgagcgggactatcaacacagggctccccattttccatcagccaacctccgttcttagggggggggggggtaaactttatgtcccaaaagggccttgccatgagcatgaggtctcggccggtttgggacgctttgtacccctaaccccatccgttcctggggg

SEQ ID NO: 5251 - DNA, 364 bp, Zea mays
  Clone ID: MRT4577_104784C.1
ggcaccgaaacattaagctaattatgggaaaattcgttccaaaaacacttgggacaaattactttactaaattgtccaaaatgaaaaacgagttattttgtttttacagatttctgactacttgaattttttacagcaaaagaactggggccctccaaaattaggtcctataactagaaaaccacctttttgacttcttacgcttttttggggcaggtgcaaacggagcagtttctgtttttggtgctagaaaaggttaccttggtccctgaagcaaaattttttacctgcttggaatttttctctaacggaagccttgtttttggctcgtttggaataaaatttatccagaaaattttttttt

SEQ ID NO: 5252 - DNA, 539 bp, Zea mays
  Clone ID: MRT4577_104785C.1
gctgggtttattaagtgactgactattggtattgcatacctttagacatcatattcatttgtaatacagctgttcaaagttgcatttgtcttgaaagattatattttcagtttgaggtaggatattatatgtgcctaacttttcaatgcaaggcatgaaattctatgcttatcattcaaatggctcgttctgtacaattttagttaggtattggagttggtatcaggacgacctgacagtttacaatttgcaacaatgtatctatttctcaagattgctgatattgatgttgttacatttttcctgttttcgttatcattggtgtggttctacatttttgttagctatttagcatgatatttgacttttatgggatgggttgagggaatcccatagaggcaacattaaaatgaatctaggggatccgaggagtgaaataggatataaatttttttataggaaaatagtaccatctagtgttatccatgttttacatactaatttgtgataatgcatactacatctagtgttatccgctc

SEQ ID NO: 5253 - DNA, 380 bp, Zea mays
  Clone ID: MRT4577_104786C.1
ggggggaagaggcagggacacgtttaaaactataacactttcaagccttttacataggagacccacaaaactgcaagggaatgcagctggggccaaacaggccggtccctatttcttttttacagggtaaactaaatatggggagccatacacatacttaaccttccaattttaatactaacaggtgggccactttatcctggtggcactaaaaccccaattgggtgcccaaactgctcccaaaacagggtctatcctccttttttttttcaactagccatgactagatgcgatcgaataaaagttcaggaaaaagggtgggaaaagaaaaaaacaggacatgaaccccattgccactggaggtctgaaaactaacacaa

SEQ ID NO: 5254 - DNA, 605 bp, Zea mays
  unsure (1)..(605): unsure at all n locations
  Clone ID: MRT4577_104787C.1
ggacccccgatctctggccggggatgcgtancgatcaattaatataatacaacaacttccgtgctcaagctggtcaccgaatagtatgtaagagtagcaataattatatattctataaagatatatgtaacagctggacttgctcttccatgaaaaaaaaaaaaaaaaagcgaacctaagagctccagctcgggccccctgcaccgagggttaatcgctcgcttgccgtaaacatgggcacagggggcacctgtgggaaaaggtgatccgggcagcaaaaccgcacaacatacgaaccggcaccaaaaagacgaaacgcaggggtgcctagtgagggcggtaacgcccattgagtgagctgagctaactgaccggctttcagcgcagtgacctgtctgcccacttgaaacaaggaatcccacaacgcgcagtgagaggcgcaacgcgcatagagcgctgttccgcgtactgggcgattgacccgctgctctcggacggacggctggggctagcgggatcagctcactcgaaggcggtaagacggctcaccgcagataatggggatatccccggaatcaacatgatgacccaggagccagcatgag

SEQ ID NO: 5255 - DNA, 413 bp, Zea mays
  unsure (1)..(413): unsure at all n locations
  Clone ID: MRT4577_104788C.1
aggacacatgggctctcccggcacacgagggcgcaccgttgatggtggcagcaccgacggacgcaaccgtcgcggccgccagcatggacctcctctaggacgatgacgagttcgcaaagttcgagatcaacgacaaatgcgatgaccacgcagaaggcatcgaagccctccaacagtgggacgatgagtgagataaccatcacctgcacgatgatttctcgctgcaccatatcgaaaagctggacagaggcaacgggcagcataactgaggttttatttctcgacattacacaaatgacttttatatggcagccacttttggtacagttgatgtgcttaggttatccaagtttttggccgtcagaacctcaagcccattancgaaagtggcggggagccgcctcatgggaaac

SEQ ID NO: 5256 - DNA, 1342 bp, Zea mays
  Clone ID: MRT4577_104789C.1
ccggccgggcttcttgctgcgggttcaacgcaaatttctcaacgtggatagcgagcacatttgactgaccgccatagcaacgagaggaaacaaagcggcgaccgacgagccaagcaagcagcagagcatggacgcgggcgaggtgcggcactggaacgcggacgtcaacggcgtctccatccacgtcgccgagcggggccccgaggatgggcccgcggtgctcctaatccacggcttcccggaactctggctctcgtggcgccaccagatggccgcgctcgccgcccgcgggttccgcgcgctggctcccgatctccgcggctacggcgactcctccgtgccgtccgaccccgccgcctacaccatcttccacatcgttggcgacatcgtcgcgctccttgagcacctccaactcacaaaggtgttcgtggtggggcacgactggggcgcgcaggtggcgtggcacctctgcctgttccggccggaccgggtgcgcgccgccgccgttctaggaataccgtactacgctcgacaagctcaccccatcatggaggtcttcgcggcgtttggcgatggcttttacataaatcagtttcaggagcccggaagagctgaagccgcattcgctcattacgatgttgcaactgtactaaagaagttctactccattgaaatagatgaactcactgctcctcctggagtggagatcatagactttctcgaggcatctccatcaccacttccttggatcagcgaggaagaactgggccagtacgccgaaaagtttcggaagtctgggttcactggacccctcaactactaccgcatgtgggagacgaattggagacttcttgcaccctggaacgaggccaagattacagtgcccgtcaagttcatagctggtgataaggacatcggtgtccagtcctttggggttgagaagtacatcaagagtggggaattcaagtccactgtcccagatcttgaagtcgccgtcattgaaggccaccattttctccagcaagaacaggccgagagggtgaattcggagataatttcctacctcgtcaggtttactagccaggaggcatcatcttgatgttttgctcccagttgaacctgaccagaaaaaaaatgatgtgcgatgggactccatttctttctgaactgaaaaggtcttgaattgccgaataaagtgtgagtagagttgaaaagggatgaaaaaaaacctgtcccgacccgtaccgttttccaaatttgccctgtccgttattgtatttgcgacataatctggaaatgagcgcggaaaccccaaaaaacaacaagttcatttttgtggaaa

SEQ ID NO: 5257 - DNA, 416 bp, Zea mays
  unsure (1)..(416): unsure at all n locations
  Clone ID: MRT4577_10478C.1
tcgcntattcctgctgatcaaagcgatatacagcncttcttcggaagaaaaagaaggtagaacacgctaacgagacaacaaggatcatggggcgcgggcgcggccacctcctgctgccggcagcagccgcctgcctgtggacgctagagagcgcgctgatgctgcgcgcgtcccctcaccgcgctggcgccggcgccggcgggctgctgaggatcgggctcagcaagcgcagagggcgggactcgaccagcgcgcgctggcggcggccaaggccgngaggcaacaggaggcaagccgtctcggggcctacggcggcggagacgtccttatcnnngactaccttaacacccagtactatggggtcgtcggcattnncacaccggctgagtactttaccgtcttcttcaacaccggca

SEQ ID NO: 5258 - DNA, 568 bp, Zea mays
  Clone ID: MRT4577_104790C.1
gccggccgggccgggaatcacggatgactctaaagcaacctttgtctgaacctatgaagtagaggcatatcgcgactactattacagattcatccacatcatatttgacgcataatgatggaaccaatgcctacttgccattgcttgctatgatattcgtaaaatctagtgcacacattgacatttgcatacgcattggaccatgactgactccatatctcaccctcttcattctgttttacttttactatcgaaaccttacacagattgctggtgatttctttgaacattgtatcaataatcaccgaaatggtcaaactccggttgctgatgatatatatagtatagaatacatgaactgacacgtcatctaaattgctggtgtcgacactctataggatgtgccttgtgacatactgacgttcatctccatgtaagactcgaatgactgcacgacaacgaaagagagctagatacgagaagcacgacagccaccctctgaaattgatgctgatagtctgagacatatcagtcgctcatccacatttcttgcgatcataggtgtccc

SEQ ID NO: 5259 - DNA, 319 bp, Zea mays
  Clone ID: MRT4577_104791C.1
ccaggcaaaaaacatttgagtgggactaaggggtctccccaaaatgtcgcgaggggttgataggctttaatcgtttaataaccccggacaataattgcaacagcaatcctggcgggggtggggccattgttagactaaaggaaacccccaacagtaaatggtaccaggtttttgcaaccgagagtgaatgtaatcgcaagccccctataaaatcccaacctgttgcccatgcttgtttcctaagaccaaagccgccagacccccaacaaagcccattggggcccccccagcaacgggaactagtccttttggccccgcc

SEQ ID NO: 5260 - DNA, 507 bp, Zea mays
  unsure (1)..(507): unsure at all n locations
  Clone ID: MRT4577_104792C.1
gggcacaanccattattattttatatttcaaaaaacaaaaagggctaaaaacatgcgtgtatgggaaaaggggaaaaaacacgatggccccaaataaatagacaaaagggcccatgcaaacaaacctcaacagtccacacgaaaaccgcaacgaccacaaacaaaacttgggaggaagaaaactaggtattggtaaagcacggcgcaggaacgcaacatttctttttggcagccgccttggacaccttggcgccggacggggccttattacccacactcttgataactccaacagcaaccggttgcctcaggtgacggacagcaaacctaccaggggggggaaaccctgaaaacgtctccaccaccaagggcaggggcggtatcattttcaccaaaccagcatcaccggtcttgaggaacttgggctccttctcaagctccttgccaaaccgcctggcgatcttgggaaggagctcaccaaacctgacagcaatgtgggaggggggg

SEQ ID NO: 5261 - DNA, 306 bp, Zea mays
  Clone ID: MRT4577_104793C.1
gccacgcgtctggtcgctcagttttttcgtcagttgttgcgctcggtgctggtctagatccgggcacaaatccagccagcaacctataccatggcctgcaccaaggcgggggcagccgtggctgtagccctggttcttgcgctcgtgctggcgctctccgagggcaactccctggtcgacctgctctcgaggctgagggacagcctcagggacctgcacagctgggaccacacgctggacaacacgcgcatctagctctacatctggtgcgacctgaactaccacctgaacaacctagatattggc

SEQ ID NO: 5262 - DNA, 959 bp, Zea mays
  Clone ID: MRT4577_104794C.1
gggtacctcgaggccggaattcggcacgagggaacgacgaagcgtccgacgatccaatagggccggctagcaagtgcatgcacacgcgtagcagctaataactgcccggtgcctgcctgtgtcagacatatagagaggcagctaccgactaccgtacggtcgagagagagatagcttagatcgatggaggcgaggaggagcagcgcggcgctcgtatccgtggccgccgccgccgccgccgtcgcgctgctgctggtgctcgccgccgagccgtcccgagcggagcggttcgtcgtcggcgacgcggcgcggtggacgtgggggtacaactacacggactgggtcatcaggaaggggcccttcttccagaacgacacccttgtgttcatgtacgacccgccgaacgcgacggtgcacgcgcacagcgtgtacctgatgcgcaccgccgcggactaccagtcgtgcaacctcaaggcggccaagctggtggccagcgtcacgcagggcgccggctccggcttcgagttcgtgctccggaagcgcaagcagcactacttcgtgtgcggcgagcgcggcggcatccactgcaccatgggccagatgaagttcgtcgtcaagcccaagagctctgcctgccgcgacgactgactgacacgccgccggacgccgatgtcggtgcgcgtacgtgtggcctcgatctcgtcctgtctttgttcgatctctgcatgccgccttctcagtcagatcattcctcctgtccaattgttgcgccctgcttgtaagttattattactatcagtcggtgtggatttactcagtgtgttgacgtatgattcgtgctgtctgatacaccagtgtttatggatgaaaaggttggttcaaaaaaaaaaaaaaaaaaaaaaaaaaaaaaaaaaaaaaaaaaaaaactcgagactagttctctctctctctcctcgtgc

SEQ ID NO: 5263 - DNA, 241 bp, Zea mays
  Clone ID: MRT4577_104795C.1
tgttaattaatcgcgcgatgcagaagacgacccaagtcgaccccaagcacgggctactccacaggatgatgctgatggacacacctgaagatgatcgtcaatcggacgtcgtctaaccaacactaacatagtgtttattccaggttatagttttgtgctgctgttgatggtgtccagtgccgatcggctcggccttcttatataggtataccccgtctttatcttcttatgcacgatggtc

SEQ ID NO: 5264 - DNA, 290 bp, Zea mays
  Clone ID: MRT4577_104796C.1
tcgggggctacatctcagatccacacactctagaactccatttcgatcccattctgtaatcaggccatcctctatcactccgtctatcagcctatcacccgtatggactggatctacatcgagagcaacgggctaagcaggatcggaaggctgctggccagagcggccctgcagagcgacgacgtccagctcgtcaccgtgaacgaccccttcatcagcaccgattacatgacctacatgttcaagcatgacacctgtgcacggccagtggaagcaccatgacgccaagg

SEQ ID NO: 5265 - DNA, 298 bp, Zea mays
  Clone ID: MRT4577_104797C.1
gggcaggggaacgacaagcttagttggtggaacctgttgcacgttcacaatacgaatacatgggcggttcttgagcagcagcttcagggtggggttacagttcagggccagttttcaaccaccagctgggcttgaagcaaaagctttgccttttttttttataagttggggggcttctttggaccaccctttgactatgcccttattttttaaaataaacccttttttttttttttacgggttattaatatacctgggataaggacctaatacgtacacttgtagtcttgtacacccc

SEQ ID NO: 5266 - DNA, 1456 bp, Zea mays
  Clone ID: MRT4577_104798C.1
cagagcactgcctgttgtttcttcttcctcctctctcccctctcgatcgatcgatccaacaagctgagcttggtctttgctttctagctgcctggtacggtctagcgaccgatcgatcgatcgaccatgtcgtccttgctatgtattagccgcaggaacaacaagaaggacagcgatggcgatggagagtacggtggcgagcagatcatcatcagcacgggcggcgcggccatgaggaagggcccgtggacggacgaggaggacgagcagctggtacggttcgtgcgcctgttcggcgaacgccgatgggatttcttagcaaaggtgtcaggtttgcgcggtggcgggtgcgtcgaccgatccgcctccatgcaactccgcatgcacgaggagggtcggtcggcctcgatcgagcagctagcagtgttcttaaccgtttgcttcttcttcttcctcctcatctttgtcgcgtatctgcgtgcggctcttgtggatacggacggcgacgtgcgtgcaggtctgaggcgcaccggcaagagctgccgcctccggtgggtgaactacctccacccggggctccggcgcggccgcatcacggccgatgaggagcgccgcatcgtggagctccacgcgcagtggggcagccggtggtcgcgcatcgccaggagcctgcccgggcgcaccgacaacgagatcaagaacttctggaggacgcggaccaggaagaaggcgctcgaggagaggagggctgccgcagcagcaacgtcgacggcggcggagtcggcgtcctcggtgatgacggtgtcgtcgtcgtccgagtgccgccgcccgcccgtatcgtcgtcgtcgtcgtcgtcttcgctacggcgggacgaagcgcggcgcagcggcgacgagaccgaggaggcgtccacgcccaccgcggcgccggcgaccaagcacgatgaggaaccccagccgcagccgcaggagtgctacgacttccccatggaccagctgtggaacgagatcgcggcagccgatgcggcggcgatgagctaccttgtcgtggacgcctgctggggcggagctgctgttggtggtcactgttattactacggcgccgccgcagcctcagccgcctcgccgccgccgccggcctcgccgccgtgggagtactgcggctccgatttttcgctgtggaggatcgacgaccaagagtactacaagaagatgctcgactcctcctcctgatcccggcccgcgactcatatcgtttggcgaggacacacgtacatacgcgctctgtgaatttgctagctcatatatattatccaggcgaggcgaggaacgagctgagatcatggtggtgagatgagatgagatgagatgagagagtagtgtgtattaatggtggttcagatcgagtagtgtgataaattaacagaatatatataataatttacgcttctctccg

SEQ ID NO: 5267 - DNA, 309 bp, Zea mays
  Clone ID: MRT4577_104799C.1
ggtaccgcgaccctctcctcgagtttttttttttttttttttttttttttttttttttttttttttttttttctttcgttggctatgttccctcactatttaatcgcagtgcggccggtacactctgaagacagccctctagtagagggaccactcttgctaagaacctgcggcctgacctacgggcaataaatggggattacaaacagtgctaagagatcgctcgggctaatgacctccatgttctttacaacggggccctctggtaagtcaagtagcgtccaacctggagaattctttcccccgtgc

SEQ ID NO: 5268 - DNA, 196 bp, Zea mays
  unsure (1)..(196): unsure at all n locations
  Clone ID: MRT4577_10479C.1
tgtgacgtagagtcgatggctcgngcgtcgagtcgancgctcgggctcgagctatttcagctatgttatctgagaggtcattctgaagtgtacatgactgagtgtgactatgattattacatgtcaactatctacgatgtagctgcaatagtaatatgtactctgtgtgtctgaagtctaactaatctcctaattc

SEQ ID NO: 5269 - DNA, 235 bp, Zea mays
  unsure (1)..(235): unsure at all n locations
  Clone ID: MRT4577_1047C.1
agggggggttgggggggtgttttttaaaaaccctgggggggggccgttaaatgacctttctgtgagcaccaacagggaccacctgccaagggccacaaagaacaaacaccaaagggtccggaacacaaagagggacttgtgtaacacacaaaactaacgcgggttgacggggccaactaangcttccttcccanccaaccaaaacacaacaaccaaaaaactaacagaaaaacaa

SEQ ID NO: 5270 - DNA, 462 bp, Zea mays
  Clone ID: MRT4577_104800C.1
gagtaccaaacgttgcgacagcattctgtctatgccaccggctggtgcagtagagcatatacgaactgctctgattaaaagaggatacagcagaaacagaaactccttgtatgctctgctacattacttgctacagctgctgaactaatgacagaagaactccttaggcttcttgagcatgatattgcaaaacatcctaatggattaaaaaactccaaaagagaaaaagaactgcagcaagcgtcatctaaatggacgacctcattgccatgataatgatgattttgatgaaaataaactaaaagaggctagctttatggtttaagaggaaatccaataccttgtaatgggcatggctcatgaaaatgaatattttgaggacttcgtaatagcacatgacacatgccaagactaccttatgactttttctaccactaatagctatagcatatactatgtggc

SEQ ID NO: 5271 - DNA, 433 bp, Zea mays
  Clone ID: MRT4577_104801C.1
gttccttgaaccacagatacatgccggcataaatcgcttccaaatcgatatggtagttaacgtttcatctgctattccatgtagaaaaaaatggatattggattgagagtgggccacggccacccaatttattcagaaactagcttcaataagttcttgctttcttgcagtcgatgtacccaatcttggagaggctccatgatgcatacatgcaaattcccgcattccaagccgcgcttcctaaaaatcaaccagacgcaccttcatcataatcatcaagattatctcaataatttgcatgtcattttgtaataatttggatagggagccactgcttcctccatcccgttgtggatcaaaagggtgaacgattggcacttacctgcatggtccaatacctattatatttcttaaacagatactatttacggcc

SEQ ID NO: 5272 - DNA, 461 bp, Zea mays
  unsure (1)..(461): unsure at all n locations
  Clone ID: MRT4577_104802C.1
gcacaacgcgaaggcaggaactccngagccgcgcacccgaaaaacagggngaccaccggcganccggcgcgggaggggagccacgagcagccagcaccggggaagcagcnggcagacccngangagaacagagaccgaacaacaggcgaaaacaaggcccancggggccagggggccncngcggaggaggcgggggggaaagangaaccgancgcccgccnccgcncgcngggggaacaacagaaccgagangacaggccgacggggaccaaagaagaaccggcgcaacccggggcagagccgaaagaggagcccgangacaccaggccnaagcngggcaccggccgnagannaacaaacgccngaccgggaaaacccnggcgcaacccaacnnaagcgacgggcaacacagcccccccgcggcagggggcaaaaaagccaagaggcccgcaccgaacgcc

SEQ ID NO: 5273 - DNA, 1408 bp, Zea mays
  Clone ID: MRT4577_104803C.1
gccggcgcaccagcagatcatgtcccattggctggcgtgttccttgaaccacagatacatgccggcataaatcgcttccaaatcgatatggtagttaacgtttcatctgctattccatgtagaaaaaaatggatattggattgagagtgggccacggccacccaatttattcagaaactagcttcaataagttcttgctttcttgcagtcgatgtacccaatcttggagaggctccatgatgcatacatgcaaattcccgcattccaagccgcgcttcctaaaaatcaaccagacgcaccttcatcataatcatcaagattatctcaataattcgcatgtcattttgtaataatttgcattgagaatccctcgataaccgtctttctgttgaattcaactctgctctagctagcagtgcagctccatcttctatattatactcaaggcaaggaattaggagcagaccggagacttgggggcttcacctgctgtatctcattaccatctgcatctggttgcccgttgattgagaaggaggagctgagggccatggcgaccgagaagcccatcctgtacaacgcctggatcagctcctgctcccaccgtgttcgcatcgcactcaacctcaaaggtgtggattacgagtacaagtcggtaaaccctaggacagatccagattatgaaaaaatcaatccaatcaaatatattccagcattagtagatggggacatagtcgtttctgattctcttgccatctcattgtatttggaagataagtatcctgagcatccactcctgcctaaagatctcaagaggaaagctcttaatcttcagattgcaaacattgtttgttcaagcattcaacctcttcaaggctatgctgttattggtctgcacgagggtaggatgagcccagatgagggccttcatattgttcaaagttatattgacaagggattcagagcgatcgaaaagctgttggaaggatgtgagagtaaatatgctactggagatgatgtccaattggcagatgtgttccttgaaccacagatacatgccggcataaatcgcttccaaatcgatatgtcgatgtacccaatcttggagaggctccatgatgcatacatgcaaattcccgcattccaagccgcgcttcctaaaaatcaaccagacgcaccttcatcataatcatcaagattatctcaataatttgcatgtcattttgtaataatttggatagggagccactgcttcctccatcccgttgtggatcaaaagggtgaacgattggcacttacctgcatggtccaatacctattatatttcttaaacagatactatttacggctattgtaatttaagcccaatacctgcaaaaaaaaaaaaaaaaaaaaaaaaaaagcggcc

SEQ ID NO: 5274 - DNA, 928 bp, Zea mays
  unsure (1)..(928): unsure at all n locations
  Clone ID: MRT4577_104804C.1
ggtgtcggtattggaacttcttgctttgaagggtggggggctagggcgggccgcactgcgcaccgagcgggcgccgggcggacgacgaagcggcgaggcagtgactggggagagatgtcgggcggcaggaggagggggcttgtgtggagcctccccgtggcgaggtcggatgcgctcggcaaactgggccctgccttcggcatcggcgctggctgcggcgtgggtcttggcttcggcctcatcggaggtgcaggcatcggagctggattccctggtttacaattggggtttggagctggagctggatgtggaataggaataggttttggttacggctttggaaaaggcgttgcatatgatgaaagtggaaggtattcgaacatcaggagaccgttccagagctccagaagcattgctttcgatgagaagttcgatatcatgtttgacgaactgatggagagcaccaggaagctggtcaaagcaacatcaaaggagatcgacaaatggaggcgaatgtagaagcgagcaggggcagcacttataggatgaactgcgtagcgagagaaagcgatgccatcagaatctaaggtattaatgtgtgattggatcaagtggcctagaagcttctacttgtgtgtaagaaagaaagaaagctaataaaagcgagttctccagagtacgaagccaaaagttgtcgaggcactctacacgtgcttcttctgtgtgtccgtgggaaccaaactgactaaaaagcaagttgctcgcttgctgttccatggaatatttttcagcgattcatgagaaagaaaagcctgccgatgctgatgcaaaaaaaaaaaaaaaaaaaaaaaaaaaaaaaaaaaaaaaaaaaaaaaaaaaaaaaaaaaaaaaaaaagggcgggccgccaccgcggtggagctnccagtc

SEQ ID NO: 5275 - DNA, 326 bp, Zea mays
  Clone ID: MRT4577_104805C.1
tcggccagagcagaagagacggcaacccactccaggtctccaccccagccagagagccctggagcctggaggggcggggtcgcagcaaggctgaattccaggaagaagccatcgcagccgcgtgtcgcctccttccacacctcagtcacccgttctataaatacgcgccaccgcgtaaaccgcgaagaaaaagtaaaagggaggaaaagggtccggtgtggcgaccatggaaaagggcggcggcggcggaaactagatgatgatgacctcgggcgcgacgggccggatcgtgccggtgttccgctccgtgctgtcgcggcgcgctc

SEQ ID NO: 5276 - DNA, 161 bp, Zea mays
  Clone ID: MRT4577_104806C.1
agttaaaagcatgcctcaccacattgatgcacttctatttctgggggattaagtgagccaatacatgttggggctcctaacttgttcttagactgctatatcctataactatattcttcttatctacagtgtatgctatatttgaagctaaaaactataag

SEQ ID NO: 5277 - DNA, 1372 bp, Zea mays
  Clone ID: MRT4577_104807C.1
aagttggtcgtcgttcttgtggattttggatcgatttggcttggttaaagttttgcccacgcgtccgcacacgcgtccgcggacgcgtggtcagatctttgcagccaccgttctatcttccttatcttcttctccagaacggcaatccttctgcccggtccttcctccagttcggctagcggggcagcgctccctgctgcttctccctccctggtactcctccagtcgcggcctcccactccccagccgatttctctgcgcgcgatactccctccagtcctccctgctcgcgtcgtgaattccctgccatggacgcgcgccgagctcctcgcgcgggtctctggtgcccagccgactagctcatctcccttttctctgatggcgcgcccaagcactgctcctgcaccgtgccgcgttccagctcagactaccctgctcctacgcccggttccagctcgctggagctcctgcgcacgtcggatcccagctcgcggagcttcctcctgctctgctcatcggtcgcgccctgctctcccagccatcttcctcttccccaccactggctcgaccgcacgccctcccagctcggccatggccacggcgccgtggagccctgcgcagcggggtgcttctttcctgcccctcccatggcggctcccctggatccctcctctgctcggtcgcctccctggagtccaagtccggacgccgctccagccttctcctttctctcttctctagccctgttcggcctcaagcttcagccatggtggcgtgtccatctccctggtatttccccaagccgcgcccctctgcttgactatggtcaccgtcacgcccaggatttggccgcgcctgtagtttccaaattcgtcttcagctcgcggcgctcctcatcttctgccccagtcctatcttcaacctcgactccaccacccatggtgtaatcctgtggttcgtgagggtgaatcacagtttgagattgaaaaaggagcttagaaggtgtagataatgaagctccagattgacgtttgccagatgttcggtggaacgcctgaatcaaagttcgtcgtcgttcttgtggattttggatcgatttggcttggttatagttttgtgctgctgttgatggtgttaagtgccggtgggatcggccttcttataagtctaagtaacttttctatactttttattgagcatggtcacttgagctagcatatattttaaaattataaataatttataatatttcaaagtttatttctttgaatcactattgtaatcactccgataaacataatgtaaatttgatgtaacttgtaaaatttggtaataagagttccgctgcaaaaaaaaaaaaaaaaaagcggcc

SEQ ID NO: 5278 - DNA, 476 bp, Zea mays
  unsure (1)..(476): unsure at all n locations
  Clone ID: MRT4577_104808C.1
ggttataaaccttaaaaaaacagcaccaaccgccaagacaaaacgaacaggcggccaaaggccagagcaagcagcaaacaccgagagcccgaaagaaacacagccgccccaaaaaaaaaacagccgccgacacacgcacaaccgggcaaacagccaaaccagcaacaaatagacggaccgagccgctcaaaaaaggacgcaaccgactaacccagggcgaaaggcaccagcctcaccggccgggacgcggcataccaagggggggccgagcaaacgatggggaaggagggccccgccaggaccaggaggggccttgcgggaacccgcatctcccgggggagcccaacccaaccggaaaaaaacccaaccccccacggcggcgagaaaagacagcccaacagaggaaaagaagggccncggaaacggggaccaaaagacccgggacccgcgccaagcaaagaagaagccccgcaagc

SEQ ID NO: 5279 - DNA, 566 bp, Zea mays
  Clone ID: MRT4577_104809C.1
cattgggtacctcgaggccggccgggtgccagatgttcggtggaacgcctgaatcaaagtcgtcgtcgttcttgtggattttggatcgatttggcttggtaagctagattcaggaaaagcacttaacttgtgatgtaaaattttagcttaaggacccacttctagtaagcttttctgaaaaaagagtctttgaaacttgatgctttgatagtcttttctttagtcgggtaattcttgctgagtaatttcatactcagggttttattacctgttgtttttcaggttatagttttgtgctgctgttgatggtgttaagtgccggtgggatcggccttcttataagtctaagtaacttttctatactttttattgagcatggtcacttgagctagcatatattttaaacttataaataatttataatattttaaagtttatttctttgaatcactattgtaatcactccgataaacataatgtaaatttgatgtaacttgtaaaatttggtaataagagttccgctgcaaaattgttggtgaaacaaaaaaaaaaaaaaaaaagcggcc

SEQ ID NO: 5280 - DNA, 300 bp, Zea mays
  Clone ID: MRT4577_10480C.1
ggcgcccctgcgctctaatgctgcgccgttatttaggccctaatgcgccacgttagggcagcagtcgggttcatgacgatggacgacctcacagggtgcagggtggacactggctcatgctctctagcctgctccatgtggttcaccttcctatgtatgtacacatcgtccagcgctactgtatgaatagagctcatgcagtacattctacaagggtacagctagctcaaaatcttgaacgaaccaactgtcatgaacctgttaatatagaacatgatgcacatactgaccatctgatca

SEQ ID NO: 5281 - DNA, 401 bp, Zea mays
  Clone ID: MRT4577_104810C.1
cacgctttgttcggagcagacttctttaactgtgacaaacatatagaaaatcatgcatacatctataatatgcggtgagctccaataaattcttgatgccaatagcgaagctagagtgaatcagacgatatggtgcagacgctttgagggtgcgcattaacgatatatagctggtgcatatatggtgaaaattcgctctaaaccactgggtttacaaatttccgagggtgcatatgcactctttctcgtgcatgtagctatacccctgtatttatgcaatatattgtagatagagaactgatttggacgtgtagatgggaatatattttatacaagcacgggcacagttagagacatccgaccctggacaaatccaagatggaatgtaaatttgcaatgga

SEQ ID NO: 5282 - DNA, 167 bp, Zea mays
  Clone ID: MRT4577_104811C.1
tcctactgccgtaatatactgttcatcaccaagatcctccataccatctcggtcctggcggagttcgaggtcttttttgggcggggggggtaggaaccctaaatcgttcctgtcgatgcttaacaagagcattcagagagctgctttcaagacctcgagcgtccggt

SEQ ID NO: 5283 - DNA, 348 bp, Zea mays
  Clone ID: MRT4577_104812C.1
gcgctcacttatccgtgaaagaactcactcttgcttcacgtccttcctaaccaaataaaaggccggaccttttgcgacattcacaggggggacaggaaatcagcgcacatggcctggactccggcaactaccttagccgtctttttatacagacgtgttctgtccgcagctggaaccgccgtcgacaacgacctctccgactgcgacatccaccgccgtgtatattagaacacctgcctcgccgggtgcgagaccaatgccaccgggtacagtctgcgcgccaaggtgaggctcgagtgcaggcactggggaagctgcaagctcgagcgctccatagacggggtgacc

SEQ ID NO: 5284 - DNA, 378 bp, Zea mays
  Clone ID: MRT4577_104813C.1
tcgtgagagtacttgctgagtttaagggtttcaatgagcggtggggaagaaacttagggggcttcggctaacaacgcgtcgagatcaaggagccctccagcttcttaaacaggggcggcgaccgctgtattagcaccaaggaacttggcactgtgatacgctcattgttgcataaccttactggggatgcgcttcaggacatgagcaatgtcgttgatgctgtttgcaatggaaccagggactgtcttgaagttttcaacctgcggcctcgcaggatagaatgacaccgactttgacgaggagcttaaggaggagttgcttcttttttccaaggaccatgtccggtccatcttcggtgctgaacttttccatctgatg

SEQ ID NO: 5285 - DNA, 546 bp, Zea mays
  Clone ID: MRT4577_104814C.1
aaaaaaaaaaccccaattttacccggaaaatcccattcggggtttcaaggaacaaaaaagcaattttcccggttgacctttcaaaaaccagcatggggggatgggaccaaactttttttttaaaatcaaaaaaacagttttctaacaccccccctttttttccgttgggggggacggccctatttgctaatcctttaaaaaaaaaaaaggtaccccttttttttgggcaggaaaaaaaatactggaaccttgttgtcgtaaaaaattgcccccctcccgtttttgaggacatgacctacttagggcccccagggggtaaagggccccttttggttaaaaaaccccatcagtttgtttttgccatttcctttgggaatatatggggcatcagcatttacattgttaggggaaaaatcaccaaatgctgaggaaaattcttcgggggggttaaaaacccaggctggagttttttcgatattaccaccaaaagctttaagggcctttttggcaatgttttcctggaatccaaaggagatagagagtttg

SEQ ID NO: 5286 - DNA, 243 bp, Zea mays
  Clone ID: MRT4577_104815C.1
ggacgctgggcccggacaatcccgaacgcccggactgggcttacggccggatcgccgtcgtcattcatacacccgctctgtttccccctgtgctttgcgacgactgggctaccgacgccgacgccctcgcaggtctagtacgcgagtgtgtgctgttgctcgttgtatacgtccatctggtgttaatctgtatggtttctggcacctactcattctgaatggcggaccttacagacatcggtt

SEQ ID NO: 5287 - DNA, 751 bp, Zea mays
  Clone ID: MRT4577_104816C.1
acatcgggctctcggggctcgccaccgacgcccatacgctgtatcagcggctggtgttcaggcacaagttgtaccagctgagggaggagagggacatgaagcccgaagcctttgccagccttgtttcagccctcctctatgagaaaaggtttggaccatacttctgccaaccagttattgctggcctaggagacaacgatgagccgtttatatgtaccatggactgcattggtgccaaggaactagcaaaagattttgtggtctccggtactgcttcagagtcactttatggtgcttgtgagtccatgtataagccaaacatggaacccgaagaacttttcgagacaatctcgcaagcattgcaagcatctgttgatcgcgactgcctcagcggctggggaggttatgttcttgttgtcacacccactgaagtgcaggagagagtgctgaagggaaggatggactgatgagtgctgccatgtagttattctaggagagattgtttcttcattcgccctgacatactcgcccctgtcctacggcgtacataattcagagaacctgtgcaccacgtttacgtcaagatgcgagcaagcgatgctgcttccgcctcagcattttggaattgcatggcttgtggcacttcagttctggtgatggacggcatacctgtttgaccagttaacagggacgtccgtgccgcacggggtttgtcttggaagaatgacagtttcacctcatttcttattct

SEQ ID NO: 5288 - DNA, 1112 bp, Zea mays
  Clone ID: MRT4577_104817C.1
cattgggtacctcgaggccggccgggcggctcttaaacccatagtacggataggcccagcatccagttacagtccggagtctggttagtactccgcatgttcgtttttttacgccgacggaaatcaacctgcgccgctgccttctccgttctcgccgtcgcctccgcctccgctgccgccgcgcaggtcagggtcatgtcgatcttcgagtacaacgggagcgccgtggtggcgatggtggggaagaactgcttcgcgatcgccagcgaccgccgcctcggcgtgcagctgcagacgatcgccaccgacttccgacgggtgttcaaggtccacgacaagctctacatcgggctctcggggctcgccaccgacgcccagacgctgtatcagcggctggtgttcaggcacaagttgtaccagctgagggaggagagggacatgaagcccgaaacctttgccagccttgtttcagccctcctctatgagaaaaggtttggaccatacttctgccaaccagttattgctggcctaggagacaacgatgagccgtttatatgtaccatggactgcattggtgccaaggaactagcaaaagattttgtggtctccggtactgcttcagagtcactttatggtgcttgtgagtccatgtataagccaaacatggaacccgaagaacttttcgagacaatctcgcaagcattgcaagcatctgttgatcgcgactgcctcagcggctggggaggttatgttcttgttgtcacacccactgaagtgcaggagagagtgctgaagggaaggatggactgatgagtgctgccatgtagttattctaggagagattgtttcttcattcgccctgacatactcgcccctgtcctacggcgtacataattcagagaacctgtgcaccacgtttacttctcattctgaatgaacattgattcagtagttgccttcgcctttaagcaaggcgaaggcaactactgaatcagcattttggaattgcatggcgtgtggcacttcagttctggtgatggacggcatacctgtttgaccagttaacagggtcgtccgtgccgcacgggtttgtcttggaagaatgacagttt

SEQ ID NO: 5289 - DNA, 351 bp, Zea mays
  unsure (1)..(351): unsure at all n locations
  Clone ID: MRT4577_104818C.1
gcgtcggcaactccgcttcgccggccgggccgtctatcgtctaaaaacctttcagggcacggggctagctgaaggagagggaacggagggggatggcgtcccggcgacgagataagccggctcttcgatccgccgcacgggatgagatgctgccnaccgcggatacggtgccgcgacgaacaaataagctcgaaaggccaagttcatgacgctcggaaccccgccgccggacgagctcaccttaacgccacaaagtgacggccatcggacagatctacggtctttctaatgaggcaaagccgggggaagacaacaggaactacgtcgagaagatgaagaacgagaacgtct

SEQ ID NO: 5290 - DNA, 329 bp, Zea mays
  Clone ID: MRT4577_104819C.1
cacgaacctgcagaggactggtacgagtacctgcctgacgtaagcccgtgactttctgcgggggggatctgaacaggatgaggctacgactcatcgactgaaaggtgtcctgtatcgtgacggccataaacggagacagcctcacggcgctcttgttgtccaacatcggacatgagctggcccacttactcacgcacctctaccgtcagcttacagctctggctgtggatagtgtacattgcacctaggcctgatcatcatgctcaccttcatacgcatcggattcaatgacctgatcgacgactacttacagaagtgaagcggattag

SEQ ID NO: 5291 - DNA, 695 bp, Zea mays
  Clone ID: MRT4577_10481C.1
ttcaaccaccaatggcatcagcgcatcggttttgctctcagcccgggaccgccaatccctctcctccgccgccttccgcgcacccttgctcttgacgaacaccgatccgacagaggaggataacgctgctcgacgaacacaatggccaagaaggagagcaagcatttcgagacgccccatcctgaccgttataagaggcctacttcattctgatccagtgacatagtgtgattagactacccgtcggcaggcaggatacaccgaagggcttgcacacgtgaatggctcagacctgtggacttacggcggtcctccatctaactcatgcctagtgcatctactgtctcccagacaagcgtcacagaagctggaaggagcactgtgattactgaactgcacatgatcatgacgcgccaccgaacctactgtaccgagatccccgcaactgttgccccaacagccctcaggacactggctcacgccccgatcaaatccacattgagtgcacaaactacctcggcaccctctgaaagcactaggataaagagcctgattacttgaaataacgtgcaactatatcctgccattcccatttgccggaaactactctgctttgcgcattgatataacccactatagcagacagttgctacactgtgggtaccaagatgaaattcaatgtggcactatgctac

SEQ ID NO: 5292 - DNA, 566 bp, Zea mays
  Clone ID: MRT4577_104820C.1
tgctgtcgatgcttcaatatgaccattctatgtcaggaacgagatcatccatttagggaacagaaaatggctcaggcaaagaaaaacctgtcaccacctaagcatggagcaaccaaatccggggttcagtcaaaatagaactatcagaacacaaactaaagttatttctaattttcagtcaaacctaaaaaattaacctgtgggaggagaggtgggggcaagacagcttccagccattgcgttaagaaggccttctcaaacagattgagataacccctgtactaaccatacacagtggcaccgtagcccatgtgagaacaacccgatcgaaccttagacatgtgctttgccatggaacagggtatgggatttttctaaacccaacctgaaattcgctcctgtgagaggtcaaacaaagaacgtgaggagtgctactcaagccacctaaccaactcaactagagaccctttcgtaattttcaattgaacctatccataatatcatgctggaataaatgcacatgccaaacatcacgctcatatgtgccaagacacccaaactctagt

SEQ ID NO: 5293 - DNA, 237 bp, Zea mays
  unsure (1)..(237): unsure at all n locations
  Clone ID: MRT4577_104821C.1
ggccggccggatccatcctctactagcccgacagacacctacccttcaccctacactccttcctaccagtatatacccttacttaacaaactaacaccatgcgatccttcgtctacgttgcttgcttcttggctgctgctgttgcggccagcccagttgaacatcatgcccggtatatcaacagcgccagccagcaatcggccaaccaaggctcacagtncgcgagctcgatgaacg

SEQ ID NO: 5294 - DNA, 335 bp, Zea mays
  Clone ID: MRT4577_104822C.1
ggggggggggcacactctttttttttctttttttttttttttttcctctcctgtcggtctttctaatggtgaacattaaaaaacactgagacctcgcccctgaccaggccaaggtcgaatcccagctcgctggcgcccgggactaggggctccgcgggggggccgggcttgccgtcaccctggccctccctgtctgctcgcggggcctgttatccattcccagcggcccccaacggaggagccggctgccttaagtggcgggcccctggcggcccgggttccagctaacaaacctggctggccaaccgcccaattcccgggggccacgcgcggga

SEQ ID NO: 5295 - DNA, 460 bp, Zea mays
  unsure (1)..(460): unsure at all n locations
  Clone ID: MRT4577_104823C.1
cgttgctgtcgatcgaatgcattacttacccgggcaagctccccgatctcaaggtcnctatattatatgacatagaagatcatgattattaatttagtatatatataattggagtctacattatatttcaagtagcatttaagtgtcctcacattaccatcaaatgtagtaggtaataatttaaatggttccggcctcacctatataggggcaaattaaaaggtaacgacaacttgaaagaagaaagaaagtagtattcacttagacattaagaaataacatgacttgtttgctgaaagaatcaattcctgcaaatgcgtgcctgaccccaaaacacaaacaactacagatgaaaagatagagcataaaaaagagaacaaaaaattagaatgcaggtccaaatagatgcaatgatagagggggttattaagccaaaacactggactgatatagcatcgac

SEQ ID NO: 5296 - DNA, 761 bp, Zea mays
  Clone ID: MRT4577_104824C.1
gccccgtatacagattcagcaccaatttacaaccgaccgaaccatttgtcaaaagcgcggcataaaagataatgcgggggaacgggcatagtggttaccggcgagatcatggcgagctttgcggtgaagcctcctttcctccctggtgcgggacggcgaagcgacgggaaaaagaggacagtttcagaagaacgggaaaaggattatttttcccctcgattggattttatttttggaacaattggatttataccattaaaagatccaaactttagatatataccatgggccccacatgtcattgactcatgtggacccacatgtaagtgagatagtaatggtatggatccaaagtggtgatcttttaatggtatggatctaaatttcccagaataggaacaataactttgtcaagatataaaactaaaattctaatagaaaagggggctaaaataaaaaaaacatcaccgcaacatcgtctgcgtggcggctgaaaacgacaagtggtgtcacctcgagttcgactgggcagacgtaaaacaaaaaccaaatagacgtgcgtatgtagcgcgggctaacggctactcatatagagggtatgttcattttataggtcatctttgtgatatgactgagtaactgatcgggcagaaatggcgcataaatggcagaagcagaaaatattagaattctaagaagacactagctgctggaccggggctgccccggcggccctggtcctggatctgcccctgagtatg

SEQ ID NO: 5297 - DNA, 334 bp, Zea mays
  Clone ID: MRT4577_104825C.1
attgaacatcacgagcaggggcccgacacgcttcatcctcaccttcctgtgcaccgcaggtgacatgtcgaccatggtgtcaggtatcttgatctcaatgtccatcctctttaagaatagtgaacaggtaaatgaatgggcgttacctagattagacgatttacaggacatacaccttgctcgagctgccgtactaggaattcagcacggtgcaatcggccatcgaaacagtggccgacggtaaatcgcaatgggtaagcgtccagtaccggtctagtatgcacaggggctgtgttgtgaaaccggagagtagacgcttcatcttcgagagggg

SEQ ID NO: 5298 - DNA, 264 bp, Zea mays
  Clone ID: MRT4577_104826C.1
gagaaacaacagcggctgtgagtgggaattaatcgttcgacccaaaatgcgggggtgggttcgcgtgtctttttatcccaagcggttgaaggagcgggtggaactacaaaaggtgaatggggccgctaaacctggggggtggttctcggcccttttcggaactaagtttgggggaaaaaacggagagcaaaataacacccctaaataatcttttttttgggtgctgttgtttcgggggggggggggcgtggaacaaggcctggg

SEQ ID NO: 5299 - DNA, 359 bp, Zea mays
  Clone ID: MRT4577_104827C.1
ggaaagaaagactgtatgcatgtaaatatgaccaacaaagaggattacatggtcagattacaagtcacatgttttattgacttgacaataacactttctcacgataccttgtttatcgcaagaaatcaattatatgcaacaaggaggtggactcaaagacagcgatgccctgctagcagctttctcgaaagaaagggatatgtaaagggaaagatccagcatgttctactacaactacttggacccaacttcgtactactgacttattatagcccaaaagagcctcgtgatttttacaccactgacgaccaacaaattatcaagaaccacaaaaattgctgagcaccattgctctattt

SEQ ID NO: 5300 - DNA, 228 bp, Zea mays
  unsure (1)..(228): unsure at all n locations
  Clone ID: MRT4577_104828C.1
tcgtgattaccccgcgcttctcctctaccgcgcgtgccacctttcgagaggctggagccctgatcccacgctgtgggcggcggtgttaaggagtntaacgttagcgaggtggcggccggtggcactgcttgtagtggcgctgacagcggttctgtcatcagttcagtggacggatgctctctcagtgacggtgaccgacacctaatgaatttcactagttcgttcata

SEQ ID NO: 5301 - DNA, 468 bp, Zea mays
  unsure (1)..(468): unsure at all n locations
  Clone ID: MRT4577_104829C.1
cgcgtccgcccacgcgtccgcccacgcgtccgcgagccttctcgccctcgcggacttgcgannntggactccagtcccttccaatcaacaagccgctatactagtcccttccaaaatccacactggaaccggaacctccatctccaatccaatcgcaactccagatccgcctccctgctgcatccccatcccggacgagcaccaccccttgtcctctccgactctacatctcatcggctggtgcacctgctccctcctctgctcggcccctccctgccttctggcgctacgggagcgtggatgcacgagactacaggtgcggcaaagcggacatccggcgggagtgcagcggccggcgtgcctctacgtggtatggtgacacgaagacgcgaggcgaggcgagcaaggccagctccggctcccgctctggctccagcgaggatggtgagcgaaccggccccgtgcctt

SEQ ID NO: 5302 - DNA, 277 bp, Zea mays
  Clone ID: MRT4577_104830C.1
ccttctttttttttttgttttttttttaaaagcataacccttagtcttgatacggctgataaaagggaaccgccttcacataacaaagacggaccattgttcagcccacagtgacacaattcaggacgcgaaccgctcataatgacacgacctgaatacggcgagaggggacgagcccacgcaggcacatcgtgagttaaaacgacctacgtcttactgaccacactgggagcttgaccccaaggcgcagggggggacccttatgaatgtagaagga

SEQ ID NO: 5303 - DNA, 558 bp, Zea mays
  Clone ID: MRT4577_104831C.1
ggccgcttttttttttttttttttaggggggttgtttgacgggaaattgattaaacattacgggaggcgcaaaatccattaaaccttacgtaaggagcacgaccccgttaaccaaaaggaaacagttccccgcgaattagggaatgcccacgatcttatgcgaactagatcatgctccccacgggggaaggcctcgccgctgctgaagacgttgtatatggcggaggcttcctgggaggcagctaatcactgatgccttaaggtggtcaccccctcccttgtgaaaaaatccgtcctttccctggggggggataagttccatacattctaaggcctgggcgccgtgggccatctttttgcccccaacccccatgaccgggtgatggggccccaactcatggcactgggtgatgagggccgggttcatgccaccaagggagacaggaagggcgtggaaaaagaacccatggtggatgcgcaggccttgaggaactttcgggcgcagacatccctggggaagcttgctaaataggacatcagaccgtaggcagggaaaat

SEQ ID NO: 5304 - DNA, 206 bp, Zea mays
  Clone ID: MRT4577_104832C.1
ccccccttcctatattttttttttttgtgttattctctctttccaacacaaaccaatccggccggtttcaacacattcgtttgttgggcgattagactggctcgagttgatagggcaaaacagggaatgcgaaatccgagatgacaacactgtttgacactgttcgcacaggggtgtttgaaaaaggaaatataatacggcatgag

SEQ ID NO: 5305 - DNA, 1975 bp, Zea mays
  Clone ID: MRT4577_104833C.1
ccggccgggatccaattcagtctagaccgccatacggaggttgggcgtccgacgcgcgccggcggtgcttccagagcccctgcccccctgccgcgcgtccccctccgacttcacccgtgagtcttcttcttcccggtcatgccccttcttccctgagtaggaggcgacagatcagaatcctcctagctcgtgcggcaccgtgcgaggagcacggctcggctccggtgcccccacgcgtggaaggagcgcgggcgaggtgttggcggctccggcggcgcggtgtgcaaggcgagcgcgtctctgggctgaggccaccggaggtcgagcgcgcaggagggctatctgcttccgcgtgcggagctcttatctcagcacgacccacccctcccgacgggatagagtattgaagtacacaagtgcatatgcagctggatttggagtggtaaagacgggaaccgaagagctggtggatcagaggtgtggggagatgtaccgtgggggccttgaccgcttcaagaaggcacagaccttggagcccttctcagtgaagtctgagtcaggcaccaagaaggcacctgcagctgcaggaacagctaaagcactggctccgttgacactgccactgaattctaattttgtgccaggtcagaaccaccaaagtccccaaggaaccatctcaagggtggctgggcaaggtggtgatgctccagggcatgttgggacacaggtcggtggagggcagtcgacgtggcaacctccagactgggcgtttgagccgcgcccaggggtctactatcttgatgtagtgaaagatggggaggtcattgacaggatcaatttggacaacaggaggcatctattcgggaggcaggttcctgcttgtgacttcgtgttggaccatcagtctgtgtcgcgtcagcatgctgctgttattccacacaggaatggaagcatctatgttatcgacttaggatcggttcatggcacctttgttgcgaatgagagattaacaaaagacaacccagttgaacttgaagttggtcagtcacttcgctttgctgcatcaaccagaacctatatcctgcgaaagaacgcagctgctctattcccaactcctagccttccatcggatgttagtttgccatctcctccggaccccaatgatgaagatgctgttgtggcatacaatacagtacttaaccgctatggtataagtaaatctgacatattatccagttccaaagattcttcagggggtgcctctggtgcaaatgatgataaacatgcagttgaaaggctcttgaagagaggtaaaaagcgcagagtgtcatttagagatcaggttggtggagaacttacccaagtggttgggatttcagatggtgcagatgttgaaactgaaccgggccccataggtgtaaaggaaggcagtcttgttgggaagtatgaatctcttgtacaggttactgtcataccgaagggaaaggagcaagcatcacgaaaagaatgtacctctacctcaccgagtggggtaacagataagctacaagaggtgcttaaaaaagtaaagagcgcaacaagacctggaatctacgatgacctttatggggattctgttccagcaaaagtgggctcatcttgggcatacaaatcagatgatcaacctgttgaggagaagacacatggcatgaatttaaacatgaattcagccgatgacagtgacgacttgtttggtgactagtgattcagaattgtcagtggatacaaaaaaatatatattcttcagaattttgtggcagggttgtttcatttgctagatgctttttttttcttagtttatacatgattgtaccctgctgcaaatcaaggtatgttcttttgcctaatgttagcaacctaaggacatgctttcttgtagtgatgctcttggtgagtttgctctagaagctattatggtttaagaaaaaaaaaactt

SEQ ID NO: 5306 - DNA, 738 bp, Zea mays
  Clone ID: MRT4577_104834C.1
cccacgcgtccgcttgaagagaagtaaaaagcgcagagtgtcatttagagatcaggctggaggtgaacttacccaagtggttgggatttcagatggtgcagatgttgaaactgaaccgggccctataggtgtaaaggaaggcagtcttgttgggaagtatgaatctcttgttcaggttactgtcataccgaagggaaaggagcaagcatcacggaaagactttacctctacctcaccaagtggggtaacggataagctacaagaggtgcttaaaagagtaaagagcacgaccaggcctggaatttacgacgacctttatggggattctattgcgacaaaagtgggctcatcttgggcgtacaaatcagatgatctgtcagacaaagcccagcctgttgaggagaagacacttggcatggattcaaacttgaattcagccgatgacagtgatgacttgttcggtgacacgtgattcagaaattgtcagtgaatacaaacaaatgtattcttcagaatttcgtggcatagttgtttcatttgttagaggcttttcttttggcttagttatacatggttgtaccctctgcaaatcaaggtatgttcttttgcttaatgttagcaacttaaggacatgctttctcacagtaatgcctatgatgagtgtggcctcttcggaagcactaagcttttaagaaattggtttatggcaaaaaaaaaaaaaaaaaggcccctagggcc

SEQ ID NO: 5307 - DNA, 334 bp, Zea mays
  Clone ID: MRT4577_104835C.1
accaatttctatcacacattctattactcttctcctccaccccacattgggacacttgcgacatttatcaacagatacgccctgcccacccaaactcacatatctcacactatcttccctccacatcttcccatacatatccgcatctataaacccataggatgacacacttccaaacttccatcctacacaatacctcattttccatccacatactgcgtattcctacttccctaccaactagaccacgactgctactcctctcaacttatctaatcctgcaagactatactttatcccaacagcttcctatgattcctctaattacatccac

SEQ ID NO: 5308 - DNA, 409 bp, Zea mays
  Clone ID: MRT4577_104836C.1
catcaagcaacatataaagcggaatacagtatcaacaatagagccacactggcggccaagatattgggcatccttatgctccttgctctgtctgcatgtgttgctaacgcgaccatttttcctcaatgcttccaagcttcttatgcctgccttcttcccccaatcctttccatcatggccccttcaagatggggaaaaccaatccttttaccctataagctccaacaagcaatcgcaacaagcaacttacctttatcacccttggtttttcaacaatcaccacccttatttttgggcaatcattggtacaaaccataagggagcaacatttgaaaaaacttatgttcccagtgaataaacaaattgttttggaaaacctttttccctacttttcaacaacaaccatttt

SEQ ID NO: 5309 - DNA, 370 bp, Zea mays
  Clone ID: MRT4577_104837C.1
tcactcgtatgctctatatgtaattcacatcatatatcaggatgatagactatctacatgaaccgtactccacaatctttcagaactgaacatctattcatatggtcacttgaaacccaaaacagccctatatatcgttatgtactgactacttctctattaatgtatatatctgcacactgtactaaacgagccgtgccgctgccattgccgcaaacgatgtacagacattagctgctaacttgccaagctatgattacgaacatgagatatccaacatacgtcgataacaggatgacgtgcatcacatactcacataatcctcaggtagacgactttgtgttatcgaagcgatccagctggttctaaa

SEQ ID NO: 5310 - DNA, 256 bp, Zea mays
  Clone ID: MRT4577_104838C.1
actgaactctgcgaaatgaattaggatcctatcccctcaacaaattcagcagatcatctcagatgatgatcaggggaacaatggccactccaagcagggctgcacatgctcagatcgttgcaatggttgcaagcgtctctgcggctactacacttgtaactcttccatcggggtctacgactggttcgactaatccgatcagggaaatacgagatgacaatgatggctgtgaagagcagatacgtgtcagcgatct

SEQ ID NO: 5311 - DNA, 570 bp, Zea mays
  Clone ID: MRT4577_104839C.1
cccgtgcggcgaggcgtacagggggaaaaactgcactgacactcgcccttcgtccacaccatcaacggccagaggtacccgctggatttaacctgttccacaggagcgcccactgtcctcttgcggtcatatttatcctttaccagctgggctcccctgactccttctactaccacctgaagcggcatctgtgctagatggtccacgaccggtgctacttctccgatgaggatgagttgtggatggaggccgttctaattcacctgcgctcgctgcataatctcaccggcagctactttcgctacactggctcccttaccgtgccgccctgcaccgagaacattctctggagcgttctctgcaaggtgcgccaaattatccatgaccagttgcagctgctcaaggcgccgtttgcccggagcgacgctcgcccaaccatttcgttaacggcaggaccgttcaattctacaacccttccatcataccatcttctttcagatctaacactataaatactttggaatcttaatatagagtaactctgttttgaaaaatcatttctatcatttg

SEQ ID NO: 5312 - DNA, 1030 bp, Zea mays
  Clone ID: MRT4577_10483C.1
gggaccctcgaggccggccgggccgggcaggacagatcttgggaatgccaatatccgcttgttccatgcaaaagaaaatggagacgtggctcgttttgacggcactcctgctttcactctctctggctgccgccgccggcacggagacggtgaaagtgatcaccaccccagtcttcccccacatccctcgacttcaggcaagcaaggatttccaggtgctcgtgcgcgtcgaggcgccaccggcgctgcagcagcatagacgcgtccccgtcgacctcgccgtggtgctcgacgtgggtgccagcaccggcaccggcaccggcgtgccgaggctggatgcggtgaagaaggcggtcaagtttatcatcagccaggtccacgacgacgaccgtctcgccgtcgtcgggccgtccaactatcggctagtcaccgggttcaaggacacctacgacgcccgacacaatgcccagaaatccgtcgagcagctgcagcaccgtggtgagttcacgtcgggcgccggcttggaggaggccatcaagatcctggaggagctaccggcgacggcgagccgtagcagccgcgcgcgcttcgtcatcttggtgacggacagggcagtggcagagggcagcagcagattcagcaagctgccgcgcgagtccctccccccggtgcacacgttcgggctcggcgaggcgcacgaccccagggagctgttgcatatcgccagggaatcccagggcacctactcattcgtggacgaccagaacacggacggcatcaccggcgccatcgccgtctgcctcagcgggctcaagaacgtggtcgccgtcggcgcgcgcgtccgccttgagacgcccgtcgggagcggggtcaccatcgagaggatccagtcggggggatacacatacagcaggactcgccccatcaccaccagagacgacaagacgtacgtcgaggtcgccctcggcgccctatacgccggcgaggtgaagagcttcctcgtccacctcagggtggctgctcttcttgg

SEQ ID NO: 5313 - DNA, 424 bp, Zea mays
  Clone ID: MRT4577_104840C.1
cggacgcgtgggcggacgcgtgggcggacgcgtgggcggacgcgtgggcggacgcgtgggttggatttgaagcaggggaggccaacatatcttttcgttctcccggaattggatatcaattgtacagattattgattgtaaatttgcttattcaatcaagaagcaattcatcgagtcaaattacaattccttgcccgaccacctgatctatttcagcgtcttcctatcattgcaagggaagtgacggcatgatcacgattccatcgatttggatcgcgccgtaaagttgcttctaattactactacttttttcctcctctttttgacttgcgtgagacttggtatgacgtcagtattggttcggtgattttactgaacaaatcgtgttgacggtaagataatgatgactttgggacataatcaa

SEQ ID NO: 5314 - DNA, 1997 bp, Zea mays
  Clone ID: MRT4577_104841C.1
gacactatataagagctagacggacgacgcacgcacacgtacgtaatctcgcaattcggctcgagcacggaagcaagcagaggcatgaaaagctttcgatggtgcatccactgacaggcaaaataacgaagttgtgacccaaataggaaaagggtcttgaaccagattgtgtacgagcttccatcagaacatccactagctgaaacaagaccgctgcgagagctgctagggcacacacctccacaggtatttgctggcggagggcttggatttgcagcagccacatttacagcgatgatcgctgggcttggtagttgactccgcattcgaagaaatggccaacattcgcattgaagttctggaattcaaaattcacacctcataacccgccagtcaatgattgatttctgtatgcgtatattataggattgaaggttccatgatttgttcatttgatagttatttacttgccagcaagcatcattgtgactggtaaaataacctgccggtaaattgatacatattttgatggtattcacaattcagtgcttctgagaatcaagagcaccaacaagccagctagggcatatactgcatttgtggctgctgaaggcccaaccatcttcacccatgcaggatgtgatcacaaggggtggaccaaaatattgctatcgcaaggtttcatacgaagtgatcaagccatcatacgaagactcaactaccgacgaggctgaggcgaggatggttgatcaggagatgaatgagaggaaccacccctatatcgaccacgtctttgcccataaaacccattaggcattacttggcgtgtcgaccttggtatgtcatcaccatctgctgcaggaagtggcccaagagatccaaattcaattggttcagatgaggaagcagcatgatttgagccttgctcataagagtacaccataaaaaatggtggtcctggagggccagataaagcactggtaccatttgaatacgtagatggtggtgtataaaccccatgcactgtgtttcctggtttgcgcatagagcttgtggatccaaaaggttggccctgcacaagatacgtgagcttgcctcatgccggtacgagtcatttctataagttcgtcgttgcctatcagaccggctctcatcagtgacctgtctatcagacctcatgccggacctctctgactggctacgtccatagccgcggtttggatttcgttgttttgagtttatccagcttccctccttatcattatagtcacccctgtcaccattataacctcctctgtagttccttgaatttgagtgtcggtccctaaaatgaaccttaggatttggcaagtaggttcctgtgcctccacggtatctgggtgcatcttcaccgtagtgctgaaaaacacccagttctttctgtagccggttgtacaggcatcacaggaaatactcgttgaccgcccacccatttgtgtccagttaacatttggtgcagctggtcttccaggcccatcccatggaacatggccctgtaaatacatcggtggcaccggaacagggtatagaacaggacccatgggacgaggattctgacagagtcgcccatactgtaaattgtgccaatggctgacaaaatcactatgcaagatatcaggcttgtgttcaccagatggctcagtcatagtactggacgatactgttgagatagcactggaatcttgttggtgaacatcattaagtgaaccaaaaaattgacctacagtattggcaggaagctgatcaattccttcgcttctctcaaactggggaccagaaccatcattattccctggaacaaacgggagcaacaaaaggaactggtggacctgttggaacaaaagtaagtccagagctatcagcttgcctatgctgtggtgatccaataagaaaaggtgtaaacactggattaggcatgccaactgtgatggacccggccggcctcgaggtacccaatg

SEQ ID NO: 5315 - DNA, 2124 bp, Zea mays
  Clone ID: MRT4577_104842C.1
ctagtgtggtatctaattacgattagacttaaacaaacataatttaagattattagttactcattacgttacaaatatgtgaccaaacggcacctttgttcctacgtttcacttagctcatagtacatcttagtgaatagtgtgctgtgtgttacatgagcttaatcctacctaaaaatggtacgagaattcattattagctttcacttacgcacgcccagacacattaaaacccaaagcattccagattgtttctgatgcagcgccacaatgcttgttcctgctccatccatactaatattgttattacccttgacacaattcatataatgagacggccagagcagagttcgtccttgctcataatcttctattcaattctgatttctgtgtgaagatattctgggtttgatggttccatgatttcttctgaagataattgttttgaatccaagaagcaccattgtgactggtaaaataacctgccgataattgcttttgacggtattcacaattcagtgcttctgagagatcacaaagcaccaagaaccaactagggcatatacttgtgttttttttttttgtggctgctgatggcccaaccatcttcacccatgcagaatatgatcacgaggggtgaaccaaaatattgctatcgcaaggtttcaatgacagaaaccaagtgatcaagccatcatatgaagactcaactaccgacgaggctgaggtgaggatggttgatcaggagacgaatgagaggaaccgcccctatatggaccacgtctttgcccataaaacccattagccattatttggcgtgtcgaccttggtatgtcatcaccatctgctgcaggaagtggcccaagagatccaaattcaattggttcagatgaggtagcagtagcaccatgatttgagccttgttcataagagtacaccataaaaaatggtggtcctggagggccagataaagcactgggaccatttgaagacgtagatggtggtgtataaaccccatgtgatgtgtttccttgtttgcgcatagaacttgtggatccaaaaggttggccctgcacaagatactgagaacttgcctcatgccggtacgagtcagttctataagttcgcctttgtctatcagactggctctcatcagtagtctgtctatcagacctcatgctggacctctctgactgactacgtccatagccgcggttcagatttcgttgttttgagtttacccagcttccctccttatcactatagtcacccctgtcaccattataacctcctctgtagtttcttgaatttgagtgtcggtccctaaaatgaaccttaggatttggcaagtaggttcctgtgcctccacggtatcttggtgtatcttcactatagtgctgaagaacaccggttctttctgtagcaggttgtacaggcataacaggaaatactcgttgaccgcccaccatttgtgtccagttaacatttggtgcagctggtcttccaggaccatcccatgtagcatggccatgtaaatacattggcggaaccggaacagggtataaaacaggacccatgggacgaggattctggcagagtcgcccatactgcaaattgtgccaatgactgacaaaatcactattcaagatgtcaggcttgtgatcaccagatggctcagtcatagtactggatgatactgttgaggtagcactggaatcttgttggtgaacatcatgaagtgagccaacaaaatgacctacagtattggcaggaagctgatcaattccttcacttctctcaaactggggaccagaaccatcgctattccctgagacaagcgggagcacagcaaaaggaactggtggacctgttggaacaaaagtaagtccagagctatcagcttgcctatgctgtggggatccaataagaaaaggtgcaaacactggattaggcatgccaatttgtgatggatcaaaatcatttggtacttgactagttcttgattgtgttgaaaaagaatcagaccctgttactatctcagaagcttcagtaatgattggtaccactgtcccatttccggggccatcattaacttcggtcgagagatgctcagtggtatttccc

SEQ ID NO: 5316 - DNA, 1016 bp, Zea mays
  unsure (1)..(1016): unsure at all n locations
  Clone ID: MRT4577_104843C.1
gggccgtttttttttttttttttttgtatttattctgctaatatagatgaaagcatgatgatttgtttttttacagataacataaggttttattacatatttgtgatgtgattttttcagactactcatactaaaacggcgataaacaaagaatacaataacaagtattaccgacgaggctgaggggaggatggttgatcaggatacgaatgagaggaaccgcccctatatggaccacgtctttgcccataaaacccattaggcattatttggcgtgtcgaccttggtatgtcatcaccatctgctgcaggaagtggcccaagagatccaaattcaattggttcagatgaggtagcagtagcaccatgatttgagccttgttcataagagtacaccataaaaaatggtggtcctggagggccagataaagcactggggccatttgaagacgtagatggtggtgtataaaccccatgtgatgtgtttccttgtttgcgcatagaacttgtggatccaaaaggttggccctgcacaagatactgagaactcgcctcatgccggtacgagtcagttctataagttcgcctttgtctatcagactggctctcatcagtagtctgtctatcagacctcatgctggacctctctgactgactacgtccatagccgcggttcaaatttcgttgttttgagtttacccagcttccctccttatcactatagtcacccctgtcaccattataaccccctctgtagtttcttgaatttgagtgtcggtccctaaaatgaaccttctgaacagaagccatagaattgacagcttagttttccacagtccagactatgaatttcataaaaagttgcttaataaatctatcacttgcaaaacatggaaatcgaagtgcctagaactaccataagaatacctacatcatacgtaatccagtaatatatcttaatccagtcacaaaatggaccaagttttcttcatgggcaactcaaaagtttttncccgg

SEQ ID NO: 5317 - DNA, 464 bp, Zea mays
  Clone ID: MRT4577_104844C.1
attcggctcgggggagcgcagcgacctgttctggtgggtgagagatccgggggaacgggggggttactggctagggagagccaactataaccatcctgaggagaggctgtacaatggttacatgggtcagcctagccagagagttcaagtgtgggatgaggcttctggcatgatgttcccgcatgggcaaatcgagatgagtcagcaatgaggtcgatgtctgctgattctttgagctgagctgctgaggccttgatcctgtatttaatatgtcatgcctggattctttcaccaagcgcatggaaggaaggaagcactgcgcctgttctgagctgccgacagctatcactgcgtaagagcttataagtccagactaaaactagacatgcttacaggagaattaaaaaaaaaaaatgggcgggccccgactagtgagtctattcgaccccggaataatgacgacc

SEQ ID NO: 5318 - DNA, 269 bp, Zea mays
  Clone ID: MRT4577_104845C.1
cgtgtataacaaggccctcttgtaccaatgtttttcttggccatcgcggagggtgccatggcactgcactgccacacttaaggtgatgatggcttatggattttgtctacaacgtcagcagtataggctcacaagtgccccctgccctctggtttggtcgccttcggtttatcaggttttcctttggtacttgttcgcagggagtcatgaaaatgtcaatcaggtgtttgccaataataattccgtggtttcagccagcagcttttttt

SEQ ID NO: 5319 - DNA, 143 bp, Zea mays
  Clone ID: MRT4577_104846C.1
ggggaaagggaacgccaaataatgtttcttacacacagtatcactgctgactgacaacactgtgtgtgttgtttgtcacagataacggtgcctttgacgtagcacttttgacagattcagggctggaatttttttctggtgat

SEQ ID NO: 5320 - DNA, 298 bp, Zea mays
  Clone ID: MRT4577_104847C.1
tagaccacacgcgagcagagacccggaggggggacttcaaggacgacccgccgcccaaccgcgccccgcgcgacagacaaacgcactggcacgagccgaaaacaaagccatagcagaagaacggccaaaaacgaaaagcgagaggacgagcccaaagaccgaccgggagaaaaggagccaggacggcaccaaaccacaaacgaccgagaccgggaaaggaaaggtgccacaggtgagcgaggggcaaacgaaactgtgccagagcggcacccccgagctagaccgcaagaaacacggc

SEQ ID NO: 5321 - DNA, 619 bp, Zea mays
  Clone ID: MRT4577_104848C.1
cattgggtacctcgaggccggccgggatcttgatcttgtgctcgaggactctgttctacggcattatccctgactcttggtaacgacggatgaacatccagcctgatttatggtctccacgatcacttccgcctcaggtattcccggggtctgcttatgggctggttatcccaccgccgacgattctactttcttgcctttccttcatgacctactcatgaccttctcatcccgccctatgtcattgggcgacgcacgtcaagctatacacgtgacacattcgcggagttcgtgcgcgttggacgcaagcttcctgcggcggtgactggcactgcttgagccctcacccctacagaccatgacgatgaacatctctctggtcgcccagcaggcgtgacaccctctcacgaaccactccacgttcttaatctacgatacactcgccattccaaactcggactcgcgatctcctctgatactatgcctactgcagctgcgtccaagcctaaccatagcattctgtctatgatgcaagctccgcattgacggcgtgcttgactctactggcgccttcttgtatgagtgccaatcgtcgacattcatccatgatgcgtgctag

SEQ ID NO: 5322 - DNA, 361 bp, Zea mays
  Clone ID: MRT4577_104849C.1
atggggctcgagcccggagctattttcttcctggacctgcccccgtacagctcctgcaggctcttccaggtgcccagggggtgagcctgagcaagaagccgactgggatgtgatgagtgaggtgcacggagcaaaaaaaagggggaggggggacctccatcactatactatgggaatgaccaacaaggtccgtctgtggtgacgacaagagactatggaagatgagcaaggcccgcaaaagaaagggagagcctctgcacagtcactcagagctgccaaagacacataaatcaggctaaccaaaagaaagggagaggagcgccagtttagtttgaagtacactaatggggccatgctgaca

SEQ ID NO: 5323 - DNA, 622 bp, Zea mays
  unsure (1)..(622): unsure at all n locations
  Clone ID: MRT4577_10484C.1
gtaccgggccccctcnctcggtttttttttttttttttttttttttttttttttttttttttttttttttttttttttttttttttttttttttttttttggcaaaaacaaacccgggggggtttttttttatgggaaaacccgggggggttaaaccagctaacccagggccacgggtttaaggaattattctaacgggaaaaccaaaggggggggaatcttgaaaaccccgggccggggggcaatcgccttcaccctttggagggacaaaaaaaaagggcgggcttaccccttcctaaaaaaaaaagccccccaaatattttggctgggacaaccctggggggcccccccaaaaacttcggctttgggaatggcccggctaaaaaaccaacgggcttccctccgaggacccccccctgggattacgggaaggaggatttgccatgtatcaattcccaaaatcggggggcccaaaaaacccccccgggggaccaaaaggatatgcaggggcatggccccaccaatgggggggaggggtttttttggaaccaaaacccttcccggggggggcccaaaacaaagcacttgaggttgaggcccccaaagaactttgaacccttta

SEQ ID NO: 5324 - DNA, 331 bp, Zea mays
  Clone ID: MRT4577_104850C.1
aaaacaaaatatgggttgggcgcttttaaattacgattgccaaccaaacataatgttcaaaacataacaatccaagccctactttcttggtaataggtcaatacacacccaattttttttaataatcatggaatcaacttctccggttaaaaaaatgaattgcttagaagtcactcactggcactggtaggggtagtacaacacaacaggcctaagagggattttcattgaaacttgtcgaagaaactacaggtttctttccccaaatgggccgggtgggggggcctacagatttattttcccaactgtgccgggagtggtaaaacaaccc

SEQ ID NO: 5325 - DNA, 134 bp, Zea mays
  Clone ID: MRT4577_104851C.1
ttacggttccgtagtaaaaaccctagtgatagtttttcgcgggggctccctgtgggggtatttatttcgtttgccctgtattgcattggttgggtcggccgagtagtaaagccctgtcattctgtattcatatt

SEQ ID NO: 5326 - DNA, 393 bp, Zea mays
  Clone ID: MRT4577_104852C.1
ccggccggcctgctctaaactactaggctggcagggcccgaaactgctacagaggaacaagctgagatctccagtatggtgaggggaaggcttgactataagatgatcatgaacaccaccagccgggatgcgagcgtctggcagcgccgccatgggcccctgaagaaggagctggatgctcgcggtctatgcgacgccgatgatggcgctcgcacgcttctgcatacggcgacgcctgtgggctcaccccaccggcaccgcgagggctacgagtgacaggtcctgatggcaagcggcactgtctctcgctgtggccccccagtgttagagcacagtgcccagccagcctaccagctggagctccgggaactgcgtaatcagatccaaatgctg

SEQ ID NO: 5327 - DNA, 448 bp, Zea mays
  Clone ID: MRT4577_104853C.1
ctggcatcaaaaagcgtggtttccatttggtccaaggctcgttaggatagttaagaaagctgcctattggctggagggagaggcttaggcagaagccctattactttgcaaggggcccttcagaagtcgctgggctcagaaggctcttagtcgtgcttgagagtgagcctttcgaagagatactcgcccagcccagcctccgggccacccagcctgtggaggttggtcaggtggtcacccatcttcttgataagcttcacttcctcatctaggaagtgagtctccaggaagtcacagagatgggggtccgtgcgggcagaacccagggcatgaagatccaaaagggcctggttcagctttttctccagggccatggcagctttcatggcgtctggggttttaccccactcatcttcagctggcttcttgatgtcctggaagagagcgc

SEQ ID NO: 5328 - DNA, 398 bp, Zea mays
  Clone ID: MRT4577_104854C.1
gaaaggcaaccttgttcatgcatctttgttccatacttccattccacaaatgggttccatactgggcattaccccttatacagattataaactcctacatgggcctagaatcaacaagacccgatagccccttggaagccatactcatattctgataaaaacccacatgaaactgcttgtatgaaacaatggggggagaaacttacccttggcctatgctccaatctaaaaggttctccatctggatattgctcttgaggggcacctactccccaagggaccctccaaggggctcatacaacccaatccggtcaatctgttggttgtggaaggcctttcaggcgtaaaaaaaaaccctttgcacgagcagtcccagcaaattgacccaaacaaaaacc

SEQ ID NO: 5329 - DNA, 223 bp, Zea mays
  Clone ID: MRT4577_104855C.1
gcacgagcgagggcaaggcgtactgcctgtgctgtgcatatgcatgtgtggttaattagctggagtgctccggtcgcttaatctgttggatttgatggtttgttggttgtgtgcgcgtgtgtttcagtgatttgctcctttttttttctttctcgtggatctatcgatggatgaacatgaatgaatgaaccgaactgcacagctccgttgtgagctgatgcat

SEQ ID NO: 5330 - DNA, 265 bp, Zea mays
  Clone ID: MRT4577_104856C.1
tgtgggggcacgcgttcggtttgcactactatctaactcgtgctacgcacattgtactcatctcatctctatctatgggggggcgcatgatgagaggaggcggcccactacttgcatggcgcggcggccatagatggccactactcgcccacgggctcctcctacgaggcgggcggcgagctgctgttcctcggcgatcggaagctgccttggggcaagggggcggcggatatccgtgacccgcacaaggcggcccggttctggc

SEQ ID NO: 5331 - DNA, 109 bp, Zea mays
  Clone ID: MRT4577_104857C.1
ttctgtaaccagctggggctgcctctcgcgctcttgtttgccgatctggtgggaggcccgcaatgccagagctctcacggcggtggcggaagacccgcttaccttactt

SEQ ID NO: 5332 - DNA, 570 bp, Zea mays
  Clone ID: MRT4577_104858C.1
accgccacctctctccgcgcgcaccaccgccagcgccactcgaaaccccccaacacttgcgagccctgagatctactcgagatgtggcgcggctgtgtctcgcgcggcctctccaaggccaaggcctcagcctctaggctcttctccacgacctcgtcctcgtacacggtggtggaccactcgtatgacgcggtggtggtgggcgcaggaggcgcaggtctccgggcggccatcgggctctcggagcacggcttcagcaccgcctgcatcaccaagctcttccccacgcggtcgcataccgtcgcagctcagggaggcataaatgctgctctaggaaacatgagcgaagatgactggagatggcatatgtatgatacggtcaagggaagcgactggcttggtggacaggcctaccgatgtgcatgtgctgctgacaggacagggcatgctatgctccacacgttatatggtcaagccatgaagcataacactcagttttttgtagaatattttgcactagaccttctcatggacaatgaaggcaactgccagggagtcattgccttaaac

SEQ ID NO: 5333 - DNA, 2313 bp, Zea mays
  Clone ID: MRT4577_104859C.1
aattcggcacgaggcccaaatctcccatggcttcttcccctccccagccactcacccgcaccgtcctcgccgctaccctgctcctcctcttgcacaatgccgccgccagagccgacggcgcgtcgccggcggtgaacccattcacggcgaaggcggcattcatccgatactggaaccgcaaggtgcccaacaaccgcccgcacccggccttcttcgtcgccaaactctccccgctcccggccgctgactccgcctccttcccatccgcgctgcccgacatccgcgccagcctacccgcgctctgcaccaaagccgcgctcctctgccccgggccggctactactgatgcggcgtcgctgacatcgggccgcaggggcgggggacctttcaagggctacaacaacgccaacttctccaactacggcaccggcggcgtagcggggaccgactcgttccagaagtactccccggacctcaacatcgccgccgacagcttccgccgctacggccgggactcgtcgggacgcgccgacagcttcacctcttacgaggccgacggcaacgtcgtgaccgccaacttcacctcctacgccggcggcgccacgggtggttcgggctccttcgccgcctacgccgccgagaccaacgtcccggactccaccttcaccaactacgacgccgccgccaacggccgcggccggagcttcgcgtcctactcccaggaggcgaaccatggggagaacggcttctccggctacggcaagaacggcaacggcgtgcgcgagacgttcaagtcctacggcaatgagtccaacgtgctggcctccggcttcgccaactacgggcagtccgccaacggcgccacggacaccttcacgggctacggcgtggaggggaacgtccctgagaacaggttccggagctacggcgccggcggcaacgctggcgtcgacaccttcaagaattaccgcgacgacggcaacgtcggcgacgacaggttcacctcctacgccaagggcgcaaacggcggcgcggcggagttccagagctacggcaactcggccaacccgggcagcaccatcttcaagggctacggcgagggcaccaaccccaaccaccacattgggttcaaggagtacgccggcgagaacaacaccttcaagggctatgccaagagcggtgtggacttcaaggggtaccacaacaccaccgtctccagctccaccgccgcggcgctgacggtgtcggcggaggcagcggcatcgatgcatcacgagcacctgaagtggtcgccggagcccgggaagttcttcagggagcgggagctcgtggccgggaaccgaatgccgatgccggacatcagggacaagatgccgcccagggcgttcctgcccagggccatcgccgcgaggataccgttcgagcccaacgccgtgtcggaggccttcgggctgcccctcgacacggcgctggggaaggccgtggcgtccacggtggcggagtgcgagcgcgcgccgagcaagggtgagacgaagcggtgcgcgacgtcggccgaggacgtggtggacttcgcggtggaggtgctgggcgacgacatcgtggtgcgcagcacggcgtccacggcgggcggcggcgggcgcgtccagctgggcgccgtggccggcgtggacggcggcagggtgacgcggtccgtgtcgtgccaccagagcctgttcccgtacctggtgtactactgccactccgtgcccaaggtgcgggtgtacgaggccgacatcctggccgccgatggctccggctccggcgagaagatcaaccgcggggtggccatctgccacctggacacgtccgactggagcccggcgcacggcgcgttcgtggcgctcggcggcaagcccggcgaggtggaggtgtgccactggatcttcgagggcgacatgacgtggacagtcgcggactgatggagtgagtgacgttcctctctgcctgcttgcaagagcacacgactaagaagaactactaagaagaattattttctccctctctctttctctctctcgcaaattattatttttgtccactcctttctcgatctaccttatatgacgaaggtggtaagaattggtccaggagaaaaaaaaggtttggcgaacgatgagaatgttgtaaactgtaaatcttgggtaggggaatagctggcgatgtgattgccttggatcaaatcgctgctgttgttgtcatgatggtggtgcaaacaaagggagtttctgtttttccaaaaaaaaagcttggtaaacattcggttcccaactgaag

SEQ ID NO: 5334 - DNA, 620 bp, Zea mays
  Clone ID: MRT4577_10485C.1
ccccccccccccccccccccccccccccccccccccccccccccccccccccccccccccccccccccccctccccctcttttttgggaaaaaacctttccaaaaagcactttaaaacgatggggtgttttaaaaccccactggaaacaaatccttgggtcttccaacaaaaaaacccaccccattttaccccttggggggttccgggggcaaaaggacaaaaccaaaaatcccaaatcagggccctttttttttaacaatgtcccccaaggttaaggctcttttgggggcaacgggagaaaacggccctttaaggccccccaaagtccgggaatttttttcacccctggggcccaaggaccccacaagcaacccggcccccggggtttccagggtttttgttaaattgggcccccccttttcaaaaataataaggatcagggggaacaacaaccgttttgccaaagattgattttgccccacccaggggaatctggttgcaagggcctttttttttaccacccccttttgttccagttgtaacgtttccaaaacccccaaggggggggttttaatttttggggcccccatgccttttgttcaaaaaattgtgggggggc

SEQ ID NO: 5335 - DNA, 355 bp, Zea mays
  Clone ID: MRT4577_104860C.1
ggcataataactggacattcattggggcaaaaggcgtggttccaagaacctactactgcgcatagaatataactaaatatatcacaagcgggtcaattctgacattgagccgacttgggtgcacagaaccaggaaacttgaagcctgaggttcttggaaggggccaaattgtgaggggctgacaaagaaagcggaccttgacggaatccaagcgcatgcggtggcttcaaaccatgggggcttgcgttgcgagaccatacttgataccaggactaactactagtgaaaatggaaatcaggccactcagttgttacagaagagggacatgagaagactgggtaaggcggcaggaat

SEQ ID NO: 5336 - DNA, 583 bp, Zea mays
  Clone ID: MRT4577_104861C.1
agtgctttcagtaccagactaattaattaggttcttctatctctagctaggctcgtatgctgctagaaggtaacagtaacagcaggtatggaggggaaggaggatgacgttcgtctgagcgccaacaagttctcggagtgccaacccatcgaggacggagacgcagggcatggtacgacaaggactacaaggagcccccgccggcgccgctcttcgagtccggaacagctctagtcctggtccttctaccgcgccgatatcgccgagttcgtcgacaccttcctcttcctctacatctccatcctcaccgccatggttcgtctacaatgccacctccaaatgacgccaccgccggcatccatcgcatctccatgaatcctttggcggcatgatcttccccctcgtctactgcaccgccgtcatctccggtgagcacatcatcccggcgaagaacttcggcgtgatcctggtgaggaaggtgcaccacaccagtgcgaaggattacatcatcatgcagcgtctgcgtatcatctgcgttgctgacgactgcaacgggctccagcacttgctgtacatggataac

SEQ ID NO: 5337 - DNA, 296 bp, Zea mays
  Clone ID: MRT4577_104862C.1
gccggccggtccgggatcatcgtgcacttgacgaccctcgaaagatgaaaagactcatcaacaacagcatcgtacacaagaggaagagaagacgccagaacatgccccccgaacagacatcgctttgtgacaattgttccggccgatgggatcgtatcgggttttggcactctagtcctcctggtacggaggaatcacaagaagaatggggtcatgtccttgaccggaaattcggtgaaatagagaagaatagtcaatgtagcttttgccaaaaaaaaaaaaaaaaaaggccccta

SEQ ID NO: 5338 - DNA, 427 bp, Zea mays
  Clone ID: MRT4577_104863C.1
cggacgcgtggggggaggcattcatcagggttatatttggttgtcaaaaagtactgtacggaattcacatctttcacatttttcactagcaatagcagccccaaattgctttcctgactaggaacatattctttacagcttctccatcagactgatgatcccatattcagtgtgctgcaagtgatttgacatatgtggcttatccttcaggggagctgcctgatcatttatgtcagcagacagctacagaagaagttcctcctatggaatcattgcagaagggacattcccctgaacttcataagcgcatcacatgcttacggcctgccgataataatcatccgcgtggcgaattgaattggatccacatgcgacgggaggagcgagtgcgtaatagtagcacggctactccatcctactggcgttg

SEQ ID NO: 5339 - DNA, 147 bp, Zea mays
  Clone ID: MRT4577_104864C.1
attcgtctcgagggcagattgctatctaacatttcttagcaggtcgggcagtaccatctgcccggccacgtttctgtttgccttgcgggaaatttaacatgctaggcaactaaccatattctgcacaaacattatcgaattttgaga

SEQ ID NO: 5340 - DNA, 266 bp, Zea mays
  Clone ID: MRT4577_104865C.1
catgcaattactttacctgctaatactataactccagctactatacacactacttcttctgcatttactattaaaaaaaccccaaatttaaagcattatacatatccgattaccgacaatggataatagcttttaaacacaatgaatctactttgactacccttactattgtacattttggataactcatagaaccacatactcttgattatttacaaaaacttaattctatccaaaacatgtactctaaatctgcaaaacttttc

SEQ ID NO: 5341 - DNA, 448 bp, Zea mays
  Clone ID: MRT4577_104866C.1
cagtgtgttgtcgccgagtacagcctttaacgagctactgtagtccaaccgacggcttcaacacagacagatcttttgggatcacattaataatgctccaaacgtgttcataccgctgcacgctcttcaacttaggtcacacctaagctatcaagcactttattacattcggctggcattactgactaaaggtgctggaggaagctatgactgttaaatattcgctaagttactggttgataatatgatcggttgatgatactagagtggtgagcgtctcctcttcgtcaagtttatgcctgatgagaccttggtaaagtatcttttccactgtgagacaaatccgaatgagttgaacaatgaggacgaagtctgcattttatatggcacaagctttggaatactgcagtagcacaggagggcactctattatgacctgcatgcatac

SEQ ID NO: 5342 - DNA, 833 bp, Zea mays
  unsure (1)..(833): unsure at all n locations
  Clone ID: MRT4577_104867C.1
aattcggcacgaggtttgttctcccgttccgcatagcgtacgctcgctccctctctatctctctctctcggttctcccgttcccccgcgcggcgatctctctcgtggcgaccagcgggcgaccgccgcacgcccaggtcgtcattggctcctcagccaggtgctgttcgggcccctaaactgggcgccggcgacgagcacgcgccaggactgtaatctgatctcgtggtggtatggttcgtcctaggattctcgtggcttgttcatgctccgagactccgagttgtgctttacctcgaattgctgcagtatccgtagggggcatgattgatggtggaacatcctcaccagtgtcagaaatgtcaatgtagctctaacgttcatttctcagtttgctgaagtaaacgatttcgggatgggtttgcctcaaattcctgtggttaaggaggaagagcctactgaagtgagtacacctgccggttctagtttcagtgtcgacggcccctgcgattcgggtaaacttctcgagggaagctcaagtggaagttggtttcagaacccatcatccatcagcgacttcaagagaaaatttgcaccaggtgcttcgaatggattaaacagtcagttcagaactagacatgccgccgatgatcctgcgggctaccaaagcctgaatcctanaccaagagatccaaaatatagatcatgcactanaatcaaatctactctacagatacctgccatgagggttgntgggtttgattcaggaactgatggttctaccgggggccctgatataatggtatctcacaaatgcattcatctttagtcatt

SEQ ID NO: 5343 - DNA, 333 bp, Zea mays
  Clone ID: MRT4577_104868C.1
ggcccaggcggcaccaccccaaccttcatggacgtccggggttttgggcctggcttcaaaatcaagtgcaatagcccggtgaattgctcggggaagcccttggtggtgcacatcacggacatgagctatgagccaaatcgcggggtaccactttcaatttaccaggcacggcgttcggcgccatggacaagaagggcgatgacgagatgctgcgcatagcgggcatcatcgacatgcagttccgaagggttaagtgcaagtacgactccaaggtcaccttccaccttgaaaaagggtgcggccccagatacctggcactgctggtcaagtacg

SEQ ID NO: 5344 - DNA, 1063 bp, Zea mays
  Clone ID: MRT4577_104869C.1
gtattctctttccctcagttattcttccagcagcagttcgcccaaatcgattggcgttcctggccccaacggcacatgccctcacctcctcagccatggagctcacgagcatctccctctgcgcaccccctccgtgcgtccctgctccctcgtcaccaggtgcacgcgcgcagcttcctgcgcaccgggatggccctccagccccagctcgcccctgccctcagccatggcgcctggccaccgccgcccctgctttccatggcggcacttcctgcttcctactggtggttgtctccatcccctccatggcgagcttgcccctgcatttctgcttgcccaataccccttccctgttccagccacttcccatggacgccagccctcacctcatagtcgccccagctcgcccagccccctctctgctggttgccggtcacctctgctacttccattgtgtggcacttagggtatttaagatggagtggaatattgcagcacatcacacaccaggtgttcggtgaaaggtccaaaccaaaagtcgtcgtcgtttcagaatatatcgagtcgattcgatttggattgctgcatcagttcattggagaaatatggtgttggttcttgtggtccacgtggcttttatggaacaattgatgtccatcttgactgtgagtcaaagatagctaaatttttggggactccagactccattctttattcatatgggatttctacaatattcagtgtgatacctgccttatgtaagaaaggagatatcatagtcactgatgagggtgttcactgggcagtgcaaaatggtctccatctatcaagaagcgttgtggtgtacttcaagcacaatgatatggcttcacttgcaagcactttggaaaaacttactcgtggaaataaacgtgttgaaaagattagacgctacattgttgtagaaaatttaccaggtgcagtgcttttgattgttttgtgttgatttgtgttgtgttttttatgtccttatgaaagtttggaaaataaaatgtccatttaacctgtgcaacctaggcaattc

SEQ ID NO: 5345 - DNA, 666 bp, Zea mays
  unsure (1)..(666): unsure at all n locations
  Clone ID: MRT4577_10486C.1
cacatannnnngaattccttattaaaggatgatgatccgattgcagctacaaattattccttcttactccatacaggcctaccaatcatcctaatctcccagacatcagcagtaacagatcgatggaatggaacgctacattggtgttgaagacagatgaaagaatgaaatctctatagcagcaaagcacagaaacgaaccaatccacttccacacaatgcagcatcaccgatccatggatgaataccaccatcacttccccttctccttctccttctcctgcgccgcctcttcctccacctcctgcttgccgttggcgtcgtccatgtccttgaggagcttgagcttgtccttttccttgtcggccctcagctcctcggcctccttgagccagaggtcggcgaactcgcagtccctgtagcgctcgaaccacggcccgccggaggtgtagtggatggccctggggcgcgtggccgggtcggccgggtcgacccggttgtggcccacgaggaagttccaggcgaagggcacctccccgatctcgtcgtcgtcgagccaggcgaagcggtggaggaaggcacccgtctgggtgctgacggcctccggagtgagcgcggccacgttcttggggtggccgcagttgtagagcaccatggaggaccagtt

SEQ ID NO: 5346 - DNA, 278 bp, Zea mays
  Clone ID: MRT4577_104870C.1
caatcgggcaagcacacgttggagccgtgtggacgtatcatcggacgcagtgccaggcaccaactgtggacggcggacgcaacgaatgcatcatcattaataacagtagcaggggctggtgcttcaccgggatgtgtcgatcaacaaggtcaaggcgtgccattaaaagctgatgtacttaaaagaggagtactaacgcgcctgctccgacatgcttttgctcgtctgtagcgtcagcgctccctggattggatggtgataaaaatacttttggttac

SEQ ID NO: 5347 - DNA, 292 bp, Zea mays
  Clone ID: MRT4577_104871C.1
cgggggagcgccaacaagcaccattttttccttaggattaacctaaaacaaatcctgacaggggtaacaagttccatcgatccacagcccatgctggttgatgcatggatctgctggagccgcggatgaacacacctctaacaactgacacagagggaccttgcaatcaaaaacacagatgggcagcaacaaacgagacgaacgtagataaaccctgtggactaggggaaacattaacgtgggaaccaggtttacctggccactcgtgcccaacagactagttcattcagtt

SEQ ID NO: 5348 - DNA, 511 bp, Zea mays
  Clone ID: MRT4577_104872C.1
cttccagcagccgttcgctcaaatccattgccgctcctgcccccaacagcgcatgccctcacctcctcagccatggagctcacgagcatctccctctgcgcaccccctccgtacgtccctgctccctcgtcaccaggtgcacgcgcgcagcttcctgcgcgccgggatggccctccagccctagctcgcccctgccctcagccatggcgcctggccgccaccgcccctgctttccatggcggcacttcctgcttcatggtggtcggcgccctccccaacctctctgctggtggttgtctccatcccctccatggcgagctcgcccctgcattcctgctcgcccaagatccccttccatgttccagccacctcccatggacgctagccctcacctcatagtcgccccagctcgctcagcaccctctctgctggtggccggatcaccactgctgcttccatggagtggcacttacggcatttaacacggagtggaatatttcagcacatcaca

SEQ ID NO: 5349 - DNA, 208 bp, Zea mays
  Clone ID: MRT4577_104873C.1
gaagcctcccggtcttgaaacaggtccataaagatccacaacggacaaaagttaagagggcgggcaatcactctagtgccttccttacatcaagagaaagcgtcggacctgaacacaacatgcatcgactgtgctatgacgatcatggctggcgccggcgctaacattggcatcgctgtggctcctgccatccatgtcaagaagaaaa

SEQ ID NO: 5350 - DNA, 704 bp, Zea mays
  unsure (1)..(704): unsure at all n locations
  Clone ID: MRT4577_104874C.1
gaaaaagcgcaggagaactgcgctctcatatactaaatcagaggaaataagggtcaaaaggacccagatacaacacactccttatggaggccagaaacaggcatacagaaaactatccataaggaccgagactaagggcccgtttggcaaagctccagctcctgcttctttagctctagatcctgatcctcgtgaggagctgatcctcctgattctcctagaaaatcagaatcatttttaaaatcgtttggcaagtaaactgattcttgtcttctgagaattggtggtctgtggcgattgtctgttttactctttgcagttcaactttattacaaaccaataagtaggatgcatatacgggaaaaaaatatgaaacaataacatataaaatgttcccatcatagtagtgcataaaatggtctcaaatgtttaatctataaattggctcgttatgtttttgtccaatggcaattgcgggtaatttcgaccaaactttaaggggaggtccatatttggttggttgaggagctgttttaagggaggttggagcaggttttttttagatcccacctttcttcacanaaacgactcccgatcttttggcttcacacgagaatcaggttaaaaaaatacccgtttggcacgggtcctccagatccttgtttaaaattaggagctggggctatgccaaacgggccctaaaa

SEQ ID NO: 5351 - DNA, 591 bp, Zea mays
  Clone ID: MRT4577_104875C.1
gggtcttggacgctcgcgcaggatgcctttatggctaaatgtgtcctagcttatctaaggttagtcattcgaattaacgaactaaggacccgtttggcaaagctctagctcctgcttctttagctccaaatcctgatccttgtgaggagctgatcctcctgattctcctaaaaaatcagaatcatttttaaaaccgtttggcaagtaaactgattctgtcttctgagagttggtggtctgtgacgattgtctgttttatcttatgcagttcaactttgttacaaaccaataagtaggatgcatatatagaaaaaaaatgaaaaaaataatatataaaatattctcataatagtagtgcataaaatggtctcaaatgtttaatccataaattgggtcgttatgtttttgtccaatggcaattgcgggtaatttcgattaaactttaaggggaggtccatatttggttggttgaggagctgttttaatggagggtggagcaggtttttttagatcccacctttcttcacaaaaacgactcccgatctttcggctccacacgagaatcagtttaaaaaatatccgtttggcacg

SEQ ID NO: 5352 - DNA, 572 bp, Zea mays
  Clone ID: MRT4577_104876C.1
cagggtgacagcatgtttcttccttcctaggacgtctctccttacaaaacgatcaaaattatatgcacattgattaggaaacaccaatagtacaacatagaactcacataaatactagctacattacttaattagtacaagaagaaaactacttctcgaagttgtatatgccagatcaagagatgtccttctgatcacttgcttgaagagtgccttcagtcatcggtcggttgttcggttgtatattttctgtcatcttcaccctgacctttgtcacttgatgttgggtttcggacaatgtacaatcttttagcagacgctaggaataattcccatggaacgtcaccaacctgcattcggtcaccctcgaagtcttcatacagaaatatgaacttgtcattattggttggaagatctttttctcccgtgcctgttgcgcctgtagaacagtctgcgggcgagtagaagtttgttgtcatgttggtgagcaccctggagagggaggcatagccgccttgcgccctgaggttgatcttcctgccaatcgcgtagccgtccatgtgtaccttggc

SEQ ID NO: 5353 - DNA, 290 bp, Zea mays
  Clone ID: MRT4577_104877C.1
acgctaggatggaggatgactcgccgctgacgattactattaagggtgcggtgacaggactcggctgggggaccatctggggcagggtcgacaccacctgatacgacttgccccgtgtggagcgcaacatgcggctccctggccttatcacaaccctaaaaatgtgcagcactatacggggccactttacccaccatcgggggcctatacatcggattttaccagttcgtacaaagccagcccaaaaagcgtcactttaaaaagggacccctgtgcgctttttttcccaa

SEQ ID NO: 5354 - DNA, 327 bp, Zea mays
  Clone ID: MRT4577_104878C.1
atggctaccacccaggaggtcgatccctttttaaaggcgactcaccccactcgcgtccttagtcgtcgcgggctaagtcttcaccaacgcgctcaaaggtcctccccctacgatacgggggttgggtcccgcacgccatgcaagctggccaggacagaagaagccaaaccaccgcgcgcggagcatgtaaccgcccaacggttacgggcactcctccgtcttcgcctaaaccagtgggcgaaagggcggaccggcatgcgggcggcatgcaaccacaccacgaggatgcaccccttcgacttcgacgcgtccagcatggagtcctag

SEQ ID NO: 5355 - DNA, 255 bp, Zea mays
  Clone ID: MRT4577_104879C.1
tctctagcgggcgcccgggttttttttttttggtttgttgtttgtttcttttttttttttctttttttttttttttttttttttttaaagagaaagcgatttttcgccgcttttgagttacattacccctacccaccgtttatttttcttttggactgcccccaaataaattctttcgctttgcagcctcctgcgaaaatccacctttttgtgcccaatagaaaaagtgatctggctccttttggacccaaagaa

SEQ ID NO: 5356 - DNA, 1337 bp, Zea mays
  Clone ID: MRT4577_10487C.1
agaccatctaagttcgaactttgggtgataatacttttagctgttgcgggggtgtcatttgctgctttagtggctgctctactttggattatcatgcacagacattattcccgtgcctcatcgatgaagatagagttgcaagttgcaagggaattctcgtaccaggagctgtctgcagcgaccagcaacttcttcaaggacaggaagctcggcgcgggccagttcggggaggtgtacagaggtgagctgccggaccctctcatgccgccggtggcggtgaagaggctgacgaggcagatggaggcgcggacccggaaggactacgtgaccgagatcatgaccttgggccggctcagccaccggaacctcgtgaagctcgtcggctggtgtcaaggcggcaatgagctgctgctcgtgtacgagctggtaacgaacaggagcctcgacgagcacctccacaggtcagagcgcctgctggcgtggcctgagaggtacaggatagtgctcggcataggctccgccatagagtacctccacaccggcgaccagaaccccatcctgcaccgcgacatcaagcccagcaacgtgatgctggacgatgacttcgaggccaagctcggcgacttcgggctcgtgaggcagatccatccaggacatggctcttccctcgagggcaccgtcatgatcgggactagggcgtacatggatcccgtatgcatgagcaccaacacggcgagcacagcgtccgacatatacagcttcggagtgctgctgttggagatcgccaccggcctgatgccgaccgaggtggcgggccggggaggcctcctctccaacaccctcatcagcactgtccgggaatactacggcaggggatcggtcctcgagatggctgataggcggctgaacggcgacttcgacgagggcgagatggagcgggtgctgctcgtcggtctcttgtgtgtccagcaggatcgccgtcaccggccggaaatcagaatcgctgtcaacatgctctcgaatctcaagcttccgagtcctagaattcgttcctgaaaagattcactcgccaataatagggtgccttgcctctcgaatctcaggcttccgactcccagattcgttcctgtatgtacatagtgctttgtgagttagcatttggtctggctttgatcacgtattcctctataaactagcaagctggctcgcacaagaactaatgtgatgtttggttcacatatttgtaatgtaacgggtaacagataacgttaaataaaaaatatctaagtccaaacaaaaaaaaaaaaaatttgcggaaaaaaaaaaaaaaagcggcc

SEQ ID NO: 5357 - DNA, 426 bp, Zea mays
  Clone ID: MRT4577_104880C.1
cctcgcacgcggcctctgccttccttccttccttccttgcgcttgcggcggcggcgcgaaaccatcggaggacttttgccgggggagcgagttagggtttgtgccgcggcggcgcgcgaggatgtcggcgtacgacgaggtggagatcgaggacatggagtggagcgaggagctgggggcgtacacgtacccgtgcccctgcggcgacctcttccagatcaccctcgccgacctccgcctcggggaggagatcgcgcgctgcccctcctgctcgctcttcctcaccgtcgtctacaacgaggaggacttcgccgacgccaaggagcccccgcagaagccgccggccgccgcgcagcccgtcgccgtcgcctgagcggcgcgcaccgcaccccccgtgggtggctcgtcggcatggacggtatggct

SEQ ID NO: 5358 - DNA, 308 bp, Zea mays
  Clone ID: MRT4577_104881C.1
aaaaaaaaaaaaaaaaaaaaaaatttttttaaaacatactaaaaaacataaaagcaggggataaatacaaaaaaaataccgatataacgaaaacacaaatcaatacgactactgcataaaaaaaaaactgatgtgaggacacgcacattattacaaatcgggggcggctgttttaaaagaatacagttttttttccattagctgaaactcaaaaattctttttttagcacgacaaacttatactgttttcgccgacttttctaatcacaggtttttaaaaactgtttatttccctaaatttttaccgt

SEQ ID NO: 5359 - DNA, 2865 bp, Zea mays
  Clone ID: MRT4577_104882C.1
atgcccccttcaccaccacagggaattccggctgcaggaggagaccctgaaagagacggagacgacaatgacgacagtggtagttcgagccacaacacggagctcttggaggagaaggagccagagggatggatcgctagacccatcactcgtggcaccgctcgcggttgtcacttccacaacactctcgacctgaagtactaccctcgttgttcggccggtagtgttggaggtgtgattgtctcactagttggtgagggcaatcccatgctaaacaatatggtcaacctggtcgttgtgctcaacaccgagctggaccacgcccttgacgagttgggcaaggcttaccacatagacactgaagactggttgcgcacagtggagcgggagctgcacaccgctcagtgcaacaatcatgagaaggttctgtatggtccccgtctcctaaggggagcagcacagtcctggtgggagtcttacctcgccacccatgcagaccctaaagccatcacttgggaggagttcagggacaacttccatcatcatcatgtgcccgaaggattaatgatcgtgagaaaaaaggaatttctagcattgaagcaaagccccctgtctgtcattgagtacaaggacaagtttctgcagttgtcacgttatgcacccgaggatgtcaatacatatgctaagaggcagtaccgttttctgagagttcaagcaaggtcacccgcaaggtcaccagcatcatcatcaacgtcagcaccagcagcagtatcagaggcagttccctcagcggcagtagtaccgtcagaacaaccagcaaggaggaaatcaataccagtgccagaacaaccaggcaccttgccttcctgccccagcaaccaaccagaacaatcaggcagcgccagcgcaagaaggaggtcgtggatgtttccattctggggaacaaggtcactaggtcaatcactgcccgaagaaagtagttcaacagcatctagctttcaacacttcagcaagacaaggagcacacagcaagcaccaggaggtcgtggccaggcctacaatcgtggcaaggtgaaccacttggaagccgaagcaatccaggatgcacccaatgtggtagtagaagaaggagcatgtcaccatttgtctgtagatggcaaggaggccaacctgattgaggatattagaattgtgtcggagttccccgacgtattacttgaggagttaccagacatgccacccgagcataaagttgagtttgccatagagcttatcccatgcaccgcccctatctccaagagagcctatcgagtgtccagaccggaattggtggaactcaagaagcaaatagacaaactgttagagaaaggctacatcagaccatgtacctcaccttgggccgctctagttttgttcgtggagaagaaagatgggacaaagagtatgtgcattgattacagatctttgaatgaagtcaatgtcaagaacaagtaccccctgccccaaatcgaagacctgttcgatcagctaataggagccagtgtgttctcgaagatagatatgaggtcaggttaccatgagctcaggatccggccttcggacataccgaagaccacctttatcaccaagtatggactatatgagctcactgtcatgtcattcggtttgacgaatgcgccatcttatttcatgtacttgatgaacattgtgttcatggactatctcgacaagtttgtagtggttttcattgatgatatcctcatatattcccagaatgagcaagagcatgaagaacacttgaggaaagggaaagtagtggcatactcatcccgacaattgaagattcatgagaagaattaccccacacatgatctggagttagcagtagtggttcatgtactgaagacctggaggcactatttgtatgggcagaagtgtgatatctatatagatcacaagagtctaaaatacatattcacccagtcagaattgaacatgaggcagcgaagatggctggaactaatcaaagactatgagctcgagatacattatcatccaggcaaagctaatgtggtcatagacgctctgagcagaaagatccaagtcaacatgatggtcgctcacccgatgccgtatgggaaaggcaaagatttccgtgaagacgcagaaggcgtggtgtggttcaaggatagattgtacattcccgacatcaaatcgatccgggaactgatcatcaaagaagctcatgagacagcttattccgtacaccctggtagtgacaagatgtaccaagacttgaaggaaagattccggtggtacgatatgaaaagggagataggagagtatgttaccatatgcgacagctgtcagagaattaaggcagagcatcagaggcccacaggtttgttgcagccgttgcagattcctcagtggaaatgggatgagattgggatggactttatagtcggtctgcctcgcactcgagctggttatgactccatctgggtggtgttcggtctcgatattttgctagaagccaaagagaacatcaaaatggttcgagagaatctgaagacagctcagtctaggcagcgaagctatgctgacacaagaagaagagatctgagttttgaagtgggagactatgtatatctgaaggtgtcaccaatgagaggaatcaaaaggttcggagtcaaaggcaagctagcaccacgatacatcagaccgtaccagatccaggcaagacgtggagaagtagcatatcaactcagcctaccaaaaagtttgtcagctgtgcatgacgtgttccatgtgtctcagctgaagaaaagcttgcgagtaccagaagagcaattgccaacatag

SEQ ID NO: 5360 - DNA, 119 bp, Zea mays
  Clone ID: MRT4577_104883C.1
ttttgtttgtggcaacatacaaaaggggctctgttattattaaccaattcaattgaacaataacccacctacacgatctctgaaatggagaatgcaccatcttagaactattatacgga

SEQ ID NO: 5361 - DNA, 588 bp, Zea mays
  unsure (1)..(588): unsure at all n locations
  Clone ID: MRT4577_104884C.1
cggccgcgtggggtgagatcggntagctgacctgatcacctggaactcgttcaatgatccgttcatttccatttcgagctcagatcgtctgtcaggactcagggttctccatcgtcttgcattgcagctaagcttttgatctagcaatgcggtgttgggtgtaggacacactaggaaataatgcttcactgatcatcaccagcaccagacacttctactaccgcactgcgcactgtcaatattctattgcctgcctgacatgctttcgagacgacatggcgtcgaacgcaagcatttggacggttcaacaccgcaccccacggggctacagtatgcagtgtctcggtctacaagctcggtgttgcctagtagatctatagttgttgttagcatgattgggtgtgtggctgcgtgagtgagtgatcgagtggccacctcatcccggacctgttgggtagggcctggcgtccggagaatgattttgcctgaacatgcatgcctccactacccccctctgcgcactttgattgcctgagcatttggccccagagaccaactccattccttggttttctcttccttttccct

SEQ ID NO: 5362 - DNA, 974 bp, Zea mays
  Clone ID: MRT4577_104885C.1
tattgccaaaaaaaaaactacggttccggctttcggtggctattcttgcatctgcaagctccaccagtcacagccacacggcggaaaaacgaaccgaggaacaatccgggttctgcaggaacccactccaactgtgcggcgcgtccaaaaatacaaaaggcaagcgagcgagctccaagttcggctgctccaatttcactcggcatggctcctcaggcgtgggtcgtggcggagaacggcgaggacctccaacaacccagggaattcctgccgctctctaagcttgaagatgttggcgtgttgtattggcatttggaccctaagaagtctgaaagcgaggaggaactagcaaaaatccgcagagacagaggctacagttacatggatcttattgagatatgtcccgacaaactggaaaactatgaggagaaggtgaagaacttcttctgtgagcacatgcacgctgacgaagagatccgctattgcttggagggcagcgggtactttgacgtccgcgacaaagatgacaagtggattcgaattcggataagagaaggagacatgatcatcctaccagctggaatttatcatcggttcaccctcgacagcgctaaatacacgaagctcatgaggcttttcattggggaaccagtctggaccgcgttaaaccgccctcaggaggaccacccggcgaggcaagagtatgtcaagaatgtgagtgcgggcactggatttgctcttgcagcacactgaatatgttttttccctttcccgtgtataagaatatatggtcacttggattcatgtaccacgtcatagtatcatcatatggtatgacgcaaccgtattttatcatcaggagtcatgaaaccttgctgcgtgttcagttaaatctgtgcacataaaactgcaaattatgggaacgcacggtgtaaatcaggagtcatgaaatcaggagtcatgatcttatggtg

SEQ ID NO: 5363 - DNA, 492 bp, Zea mays
  Clone ID: MRT4577_104886C.1
gttttcgcgccgccgccgccgccgcttcgtcgtctccgccgcagcgatgaccttccggatcaagaagaagctggcgaagaagatgcgccagaaccgccccatcccctactggatccgcatgcgcacgggcaacaccatcaggtacaacgccaagcgcaggcactggcgccgcaccaagctcggcttttgagcgcgcggatcggccggctcctgcgtcggaattctagggtctctacctttcctttgggtttaacgatgtctcttggggttctgtaagctagcaaacagttccagaaagcttttgttaagattttgatgacgctaagaggattgatgctactatgctggactcaggattccatgctgcattgcgatgctaaattaaagaacctccgtttcctttcttttaaaaaaaaaaaaaaaaaaaaaaaaaagaaaaaaaaaaaaaaaaaaaaaaaaaaaaaaaagtactctgcgttgttaccactgctt

SEQ ID NO: 5364 - DNA, 225 bp, Zea mays
  unsure (1)..(225): unsure at all n locations
  Clone ID: MRT4577_104887C.1
catggagagattctcagcgtatcctacccttggtaggtttgctgtccgtgagatgaggcagacggttgctgttggagttatcaagagtgtggcgaagaaggaccacangcgcgaaccgtgacncaggctgctgccaagcagaactgatgcgatcctccgcctgctttcgcaatacctagttctcatgattagaagttttgtttgtggtcgttgntgtcattgtgt

SEQ ID NO: 5365 - DNA, 616 bp, Zea mays
  Clone ID: MRT4577_104888C.1
cattgggtacctcgaggccggccgggaagcttctagggttttcgcgccgccgccgccgcttcgtcgtctccgccgcagcgatgccgtcgcacaagaccttccggatcaagaagaagctggcgaagaagatgcgccagaaccgccccatcccctactggatccgcatgcgcaccgacaacaccatcaggtacaacgccaagcgcaggcactggcgccgcaccaagctcggcttctgagcgcggggatcggccgtctcccgcgtcggaattctagggtctctacctttcctttggttttatcgatgtctcttgtgtttctgtaagctagcaaacggttccagaaagcttttgttaagattttgatgacgctaagaggattgatgctactatgctgtactcaggattccatgctgcattgcgatgctaaattaaagaacctctgttaccttactttatgtgtagtgttgcagtgattgagtcctagatttgatcactgggtcagttccgatgcatggattgtggtgtctctctttgactacgctggaatgaaatgaatacataagccattcatataaaaaaaaaaaaaaaaaaggaaaaaaaaaaaaaaaaaagcggcc

SEQ ID NO: 5366 - DNA, 268 bp, Zea mays
  Clone ID: MRT4577_104889C.1
aggattgacatatttgacttttcttcttccccatatttgtgtgtgaacatattgcttgccttcttggcttatttgtatctgacatttaaattttcatgttttacgattgtgtgatattaaccattctacttggacgttaccctctgtagaacaacctttggctgaactgtaataacttagagcctgtaaccactttgaacacccgcatgtcctggttgcaatgcatgatggacaggggtcttgttggctctggaactctaaaagatct

SEQ ID NO: 5367 - DNA, 133 bp, Zea mays
  Clone ID: MRT4577_10488C.1
ggttgatgaagatttatgtgagctgatctcacgaatcaggccagaagatgggaacacggagttctgggaacgccgttgtctgggagaaactctatactatctttgtgaagaagatagtaaagaagacggtcaa

SEQ ID NO: 5368 - DNA, 511 bp, Zea mays
  unsure (1)..(511): unsure at all n locations
  Clone ID: MRT4577_104890C.1
gccggccgggcctgcaagcttctagggttttcgcgccgccgccgccgcttcgtcgtctccgccgcagcgatgccgtcgcacaagaccttccggatcaagaagaagctggcgaagaagatgcgccagaaccgccccatcccctactggatccgcatgcgcacggacaacaccatcaggtacaacgccaagcgcaggcactggcgccgcaccaagctcggcttctgagcgtggggatcggccggctcccgcgtcggaattctagggtctctacctttcctttggttttatcgatgtctcttgtgtttctgtaagctagcaaacagttccagaaagcttttgttaagattttgatgacgctaagaggattgatgctactatgctgtactcaggattccatgctgcattgcgatgctaaattaaagaacctctgttaccttaaaaaaaaaaaaaaaaaaaaaaaaaaaaaaaagaaaaaaaaaaaaaaaaaaaaaaaaaaaaaaanngnaggccc

SEQ ID NO: 5369 - DNA, 536 bp, Zea mays
  Clone ID: MRT4577_104891C.1
aagcttctagggttttcgcgccgccgccgccgcttcgtcgtctccgccgcagcgatgccgtcgcacaagaccttccggatcaagaagaagctggcgaagaagatgcgccagaaccgccccatcccctactggatccgcatgcgcacggacaacaccatcaggtacaacgccaagcgcaggcactggcgccgcaccaagctcggcttctgagcgtggggatcggccggctcccgcgtcggaattctagggtctctacctttcctttggttttatcgatgtctcttgtgtttctgtaagctagcaaacagttccagaaagcttttgttaagattttgatgacgctaagaggattgatgctactatgctgtactcaggattccatgctgcattgcgatgctaaattaaagaacctctgttaccttactttatgtgtagtgttgcagtgattgagtcctagatttgatcattgggtcagttccgatgcatggattgttgtgtgtctctctttggctgcgctggggtgaggtgggggcgtg

SEQ ID NO: 5370 - DNA, 354 bp, Zea mays
  Clone ID: MRT4577_104892C.1
tgcaggacaaggtcgacgacgccgcgggccgtggagtggaccaccgcaccttcggcgccaagaaggagcgccccgacgacagcgccgatgccggggcaaccggcaccggcggcactgccgcgtgattgtgctgggcgacggcgatggtttgtgtgcggcaccgtacgtgtgcgtgcttttgtgtgcgctgcttggctgctctgtctacgcgcgcgtggactgtgaagccaaccagccagtggtagtgtaactgtgtaagatagattgcaataaagtaaaaggaccgtctgatctgaatcctatacataggccttgtttagtttataaaaattttcaaaatttttcgttacattg

SEQ ID NO: 5371 - DNA, 887 bp, Zea mays
  unsure (1)..(887): unsure at all n locations
  Clone ID: MRT4577_104893C.1
cctcgaggccggccgggccgggtattctggtgtcctaggcgtagaggaaccacaccaatccatcccgaatttggtggttaaactctactgcggtgacgatactgtaggggaggtcctgcggcaaaatagctcgatgccagaataggcttctagggttttcgcgccgccgccgccgccgcttcgtcgtctccgccgcagcgatgccgtcgcacaagaccttccggatcaagaagaagctggcgaagaagatgcgccagaaccgccccatcccctactggatccgcatgcgcacggacaacaccatcaggtacaacgccaagcgcaggcactggcgccgcaccaagctcggcttctgagcgcgcggatcggccggctcctgcgtcggaattctagggtctctacctttcctttggttttatcgatgtctcttgtgtttctgtaagctagcaaacagttccagaaagcttttgttaagattttgatgacgctaagaggattgatgctactatgctgtactcaggattccatgctgcattgcgatgctaaattaaagaacctctgttaccttactttaaaaaaaaaaaaaaaaaaaaaaaaaaaaaaaaaccctaatcgcatctgcttccagagccccccgccgccgctgcgccctcctctcggtcctgccgtccgtcgaggtaaaaggacagcatggtgagggtcagcgtgctcaatgatgctctcaagtccatgtacaatgctgaaaagatagggaaacgtcaggtcatgatcaggccgtcatccaaggtgatcatcaagttcctgacggtcatgcagcgccatggctacattggcgagttcgagtacgtggatgaccngagctgggaaaaatcgtggtggagctgaat

SEQ ID NO: 5372 - DNA, 415 bp, Zea mays
  Clone ID: MRT4577_104894C.1
ccgcgtgggcgtcttgttcccagtctcgcctgctccctggcctgtttttttttttgagctcccccagactagccgccggggatggagccgctcataccatctccctggtgctgagctccttattccccacctctcgccgaccacgcgtggttccttggaagatccgagctcgcccaagtcgcccgctgccacccatctcggactgtgccctactccctgctctcggcgaaccaaccatggtcgcgcctcccatgtccttggagcttgccagcgccagcacctcaccggtgtcatccccgtcacgccatgatgcttggcctcgtcctgtgcgccgatcaaacctcaccagccatgttcaccatgccctcgggattgccttcccagccggacgcacgagcttgctccggcgtaaacc

SEQ ID NO: 5373 - DNA, 739 bp, Zea mays
  unsure (1)..(739): unsure at all n locations
  Clone ID: MRT4577_104895C.1
tttctttcccaaaagtttacgtgcgaanggggagctcggaaaggaaaaaaaacatgaaatggaggtagaagaaggttctgtgatgtgaggggaaattacgtgggacattagacataagccaaatccattgaattctctcgtcggttgcttgagccgagttcgtctgagtggcctcagtgctgtgaggagcaagctctgcgtcttgctattcctgactatttttcttgccttttgtctctgtttccaagcggcatcctaatttctgaagacctcttggaggaattctctgcttcatttctcgggcggttcctagcttgcttcgccggttgtaagatttgctgtgaaacagaagaggtgcagcctccagtccaggaaatttctgtagagagagctgcagattgctgcagattcgtagctccgctcctgcttccgcacacctgttcggtgtggaactgtggtatgatgaaggtgagcccgtctccggagcaaggagtgatggcgggaagggagccgttcgggctcccgaagaccccggcgacgccgccgtcctccgggggcacgcagggcctgcgcatggcgtacacgacggacggcaccgccatcttcaccccggtgagctccgtctcgtgctgcccgcgacggcgacataccagcccgtgggcggcagcgccgcgtctgctccagcttgctggcgtatgagcaatggtggcgcgcccgtgcactcggtgcgcgggtgagc

SEQ ID NO: 5374 - DNA, 265 bp, Zea mays
  Clone ID: MRT4577_104896C.1
taactctacacaattcctcctaacttatccttctacacactgaactatgctactgatactcaaaccacacaaattactacgattttgaccattcaatcctatcaatgtatcactctaccttaagacaacaagactccacactcagctctaaacacctctcaaatctatcacatgtctaatacattgttatcatcgtaataacctctctttgcacactaaatgacattacccgtgaattcctacacaaatacacttttgacctccc

SEQ ID NO: 5375 - DNA, 365 bp, Zea mays
  Clone ID: MRT4577_104897C.1
gggatgttttaaacagtcaagaattcatatattagagtgcatatatatatatataattctgggagacgttaataatcgagacggcacgcatgttccatcctgccatcattctgcttctcctgctcattgcgaccacccatgtaagctcaagcagcaaaagaattctagaaggacacctagctattacttggggcatgcatgacgtcagacaactgcgcctacgctttccacgatcaaaccttcatctgcgaccatttcagcacctttcaccgtcagttcatctgcactaaaccgcgctaaattaacctactttcggcatctctatcgtggacttttattctatttaatgacttacttgatttttt

SEQ ID NO: 5376 - DNA, 1591 bp, Zea mays
  Clone ID: MRT4577_104898C.1
ggattataggaataggagcgggggagtccgaggataggcaactcattgcttctgaatctctctctcctcgtcgcgacgagatcctctgcatctctacttccccggggaagtagctgctggcgtgtgtatctgactctcctcatcccgagttcttcactttcaggcatggtcgccgtgaagcagctcaccggccctgccagacccgctcacacgtgcgctgctcatgctcaccagctgctcagtgctcgatacgatcaccgtggcgcgtctcaagctgaattaccggaccggatttcgccatccaacgcttccacgttctgcacgagcatgtactcgtcgtcggcggcggattcctccaagtcgtgccggcaggcaggcgctctgccgttcctgccccatcctcctaaacgtgagcagcagcagcagcagtcatccagctctccatcactgctcgtctgtactgacctcggcaacggtggtcaagacgaggctgaagcggaacatccggctgagctcaaggacttcctgaacctctctggagaagcttcatggagaggcggtttccatggagagagcagcggcgtcgctttcagattcagagagaaggtggagtttcagttcttgtctgaacagctcgggatcgccatcaccgaccacgacgagagccctcgactagatgatcaggaggacatatacgacaggccgccgcaaacctcttcttgtccggtactgtcttgctccaaccaagaagagggtctccagagggcagggtctcctgttaaagctcagctgagttcatatcgagctgcatgtaataacaagccaagactgaggtggaatctggagctccatgagcttttcgtgaaggctgtcaacaagcttggagggccagaaaaggcaactcctaagggcgtgttgaagcttatgaaggtagaaggcttgaccatctatcatgtgaagagccatttgcagaagtatcgctttgccaagtatcttccggagacaaaagaagacatgaagtcctcttcagaagacaagatgccaggaagcaatcctggcagaaagaagattctcaaaagcttacaagtagcagaagctcttcggatgcaaatggaggttcagaaacaacttcatgaacaattagaggtgcaaaggcagctacaagtgcgcatagaagaacatgcaaagtatctgcagaagatattagaacagcagaaggcaaggaattccttatcagctacgacaagttcaatacaaacagagctttctgaatctacaaaggaagagaaacctgagacacaagcggatacttcttcagctcagttgccaaataaaaagaactcagatactgacatggaatgactcataaccaaagaactcattatgttcatagccgtgatgaacaactgaacatgttgactcgccagacactttccttctctaaccttgtagaatacaagcacttctgcctagatgcttctctcttgtatcatcatccctagtgcttgaaagagttctagctagccattgtatatgatttattttcagatgaaaatgctacaaaaaaaggaggaggaccagccattcatct

SEQ ID NO: 5377 - DNA, 393 bp, Zea mays
  Clone ID: MRT4577_104899C.1
gggcagggcccccccccaagggggccaattaatttaaaaaaacccgggggggccaaaggttttttgccccaaaccaacaaaagggaaaaggaacctaaaaagacccctttttagaaaatttttatggaaaaaaaaatgggggccttttccttacatcactttggaaaatgggacatttaaccaaccgggggaatggaaaattaacccgggggggggataaaaacatttttggttaaccaaaaggcttacctaaaaaattaggtggggccgagggtaaaaacctttctctctaaaaaaagttaaaaaaaaaaataaccggaacccccaaacaaacagccccaaagaattaaaccgattctccccctatacaaacacgggggtggaggcaaaaat

SEQ ID NO: 5378 - DNA, 434 bp, Zea mays
  Clone ID: MRT4577_10489C.1
aagaatgccgggcccctcccttgcctggactggtagagggtttacattagcgcatgaggacccctataccttcactttcggttacagtaaccaggtttgtgcaaatgaacatagacccgcaaaaaagaaccaaagaatggggaaaattgcacaggccccactgtacattcctatttatttacacatcaaccgttgcaaacacaacaggcgcctgggccaatgacggagttactccttgttcccgatcctgccggaacctgatcatgctgttcatcacaataacactaatgggttccttgtcatgaactcaagcctcacgcgtgttggaggtgtcccgattgcccctaatcctgcaccgacggggcgccccgcccttgaaggcttccaccactactttgaggttaaagctatcacatgctaaccaatgccataaa

SEQ ID NO: 5379 - DNA, 287 bp, Zea mays
  Clone ID: MRT4577_1048C.1
aacatgcgttccggcacaccaaaggggcacaatttttatcggaagagaattgagctcaatgaaaaatggccttccagtccaggacctttggatcgagcaccccccgcctgaggggtgtttccacggtgagggggccgaaacaaaattaaggggccttaattaaaaaagctgccaatggagcgagcaccataaccttaatcggtaataggggaacataaactctgggctccaaggacaatgccatctggaacgggcatggcctcactgcgggctctgagaacatgggc

SEQ ID NO: 5380 - DNA, 1063 bp, Zea mays
  unsure (1)..(1063): unsure at all n locations
  Clone ID: MRT4577_104900C.1
agagtttgctgcagtcccagactctcgttctcgttcctgctcttcttcttcctccaccatttgtgcttgtgctgtttcagtggtctgcttgggaaccgaaccaccatgaacctaaccttgcgtgggctctgcattcctttccttccgattcctgctgcctctgtgtctcctccaatccatgtgacgtgaagcagctatgatatatatatatatatatattccagagtcttgactcttcaggcccagaggctccgcaatgaactttttggaatctattgcggtgaatggacacagagaccgacagcatggaggcgtcatgagcagacagagcatggtcgccgtggagcagctcatcggccctgccagtgccagacccgctcacacgtgcgctgctcagcctcatgctcaccagctgctcagtgctcgatacgatcaccgtggcgggttgaattaccggaccggatctcgccatccaacgcttccacgttctgcacgagcatgtactcgtcgtcgtcgtcgtcgtcggcggcggcggattcctccaagtcgtgccggcgggcaggcgctctgccgttcctgccccatcctcctaaacgtgagcagcagcagcagcagcagtcatccagctctccatcactgctcgtctgtactgacctcggcaacggtggtcaagacgaggctgaagctgaacatccggctgagctcaaggacttcctgaacctctctggagaagcttcatggagaggcggtttccatggagagagcagcggcgtcgctttcagattcggagagcaggtggagtttcagttcttgtctgaacagctcgggatcgccatcaccgaccacgacgagagccctcgactagatgacatatacgacaggccgccgcaaacctcttcttgtccggtactgtcttgctccgaccaagaagaaggtctccagagggcagggtctcctgttaaagctcagccgagttcatctcgagctgcatcatgtaataacaagccaagactgaggtggactctggagctccatgagctnttcgtgaaggctgtcaacaagc

SEQ ID NO: 5381 - DNA, 257 bp, Zea mays
  Clone ID: MRT4577_104901C.1
ctcaagcgtacggaggggcgcagatcagacgcaggtgaaccattgaagctaggcctgatacatgagtgatcggacacgaaaccacacaagggaaggacggagaagaagacaaccatgctgatgaacaggaaccagcttctttttttggctgggggaggggaccttaccccagggggaccaactgaccgaaactaacctgccgggagagcgggggcgacaaagctatcaacagagaaaatggcaagaacctggggatt

SEQ ID NO: 5382 - DNA, 297 bp, Zea mays
  Clone ID: MRT4577_104902C.1
ggaagaaaaactgccccctgctaaaatgttaataaagcccccccatgctaaaaatcaaatttcctacccagggggggacattgatgcttgatgagaataataactcaaactggattcaaaggaccgaacttgtaaatttaggataccagggacctcggaactgggttgggaaccccccgggctacccactgggggggggatttatttccagggctcaacaaaggaaggtttgacgattcgggggccacacggggcgctcttccaatttaaaaaaatagggtgcgacaccttcattca

SEQ ID NO: 5383 - DNA, 127 bp, Zea mays
  Clone ID: MRT4577_104903C.1
ctgagcacatggaatacagttctttggatactttgaatcactcaaatccaccgaaaactaagctccattggcaccggaggttaaagatgctccgtgatatctgtagtagcctcatgtgcatgcaccg

SEQ ID NO: 5384 - DNA, 1015 bp, Zea mays
  Clone ID: MRT4577_104904C.1
gggatattgaagatttctacaaggagaaaagtaagacaaacccgcagttccttttcctaagtggaggagctggctgtaactattacatgagaaagttatgggagcatcagcaaaaacatattggtcagcgatggcatgattctgcaaaatcaaagacttcttctgataagttgacagcagagaatcgtgggaaaattcttggtgaaaggccccttgacagaactactaaagtacatagcccatctctttctgcaaaggaagctgttcaactgcaatctaatcttactgagacatttgtcaagccaatatcccttgatggcctaccagagtatgagaagccttttagcaatgatcctgcgaaacaagttagatttgagcaatttcttagagataaatacaagggaggtcttcgtgctgcaaatgttacacctacaagtactatgtcagaaggtgatcgtgctcgggaaaggcttgattttgaggctgctgcagaggcaattgaaaagggcaagggaaaaaaagttattgatcctttgtcagtgttctctttgcctggaatgaatgagcaacgctttgtagcggcaacccaaccagagagctctgtagtgatacaagatgagaagcccatctatccacaaaggcagcagtttgaatggcggccttctccaatactgtgcaaacgttttgatattgttgaccctttcatggggaagccaatgcctgttcaaagaccaaggagcaagatggagaaccttatctttatgacagaatccaacaaaggaacaaatgatgaagtggagagctcgagtagaagtttgcagcatgcttctatggaagcggtatctgatgttgaatcacgaggagctgctactgatcctgactttgagcccagcagcttgcaaagacctgttgatctttacaaggctaccttttctgatgactcatatgatgatgcagatgaaattcttagcaatcaactaattgatccattgaagacatgtgaaggtgccaacat

SEQ ID NO: 5385 - DNA, 385 bp, Zea mays
  Clone ID: MRT4577_104905C.1
ggaaaaaaaagaacttattgatctccacggggggatcccagcaggggatttttttattacagggggccggtgacggggttttcagagcttctcatacagtaacccagggccccaacaggggttttttcctcgcggcttttcaccaaaaaagcctacccgggacagaaacattttgggcgggcactggtactgactgggaagctggccttccttgacgatgtagttctgcccggggaaggcctcgcccttgaaaacctattaaggatggccctcacaccatccggataccggagttgggcataaattggtgccccaaaaatgtgagggggcatggcatggtttggcatgtaacgccaggggggaacctttggggctgggtggggga

SEQ ID NO: 5386 - DNA, 345 bp, Zea mays
  unsure (1)..(345): unsure at all n locations
  Clone ID: MRT4577_104906C.1
tcgagccgccggnaccagatcgatctgattctgaccccgacttcacttgtgacctccgatctccgtccggccggcgggcgaccatggatcttcccccaccccaaaccctaattctcttcttcctcctggcctcgctgtagnnngagngggagcggccgacaacaagcaacccacgcacatcacccaacatgatccaaatacaagtaatagactacagattcaaaggaatccatgccgacgcacaagacctcatccgcgacgccgcgattaaataccgccaccagctccgcatcaccagagaatatccacgaaaaaatcctacaaatacaattcaactcccaaaaa

SEQ ID NO: 5387 - DNA, 295 bp, Zea mays
  Clone ID: MRT4577_104907C.1
cgacccacgcgtgctcccactcttcctttctcctttcctgcttcttcatcttctctccaagggcccccccttcggggagtgcggcttcttacagacgagcggcccctccatcttcttccactccatcatcttcttctccctcgcctccgtcttcctcatctccatcggggtgcacatcaccacttactatccgtctagccccatagccgggacccagatctttcttcgttacagtctgcctttatatacttatatacatacattctcatttacattccctctaccacttttttca

SEQ ID NO: 5388 - DNA, 1072 bp, Zea mays
  Clone ID: MRT4577_104908C.1
ccggggagaaccctagcaaagcctccccgtcaatttcgatccccttcgcccgcccgcccaaccaccatgtctcgacgcggggcaatgccatccaccgccccgcgcgcgcggctctcgccgccggcacccgcctcccacccgccgcggaaacgtggccgctctccatcggctcctggaagcacggcgtcgtggcgcgcgtccgccgagaacaccgtgcccctctaccaccgccgccgctggcacaacccggagcgtgcccctggtcgcgtctggcagcggttccgcgcgccccagcctgccttactctcctccaggctttggatttgctcggaggacgcctcgacctcctcctccggagatgcctgcactatcatgtcatacaacatcttggctgattacaatgctcggaatcatcccgacctttatttggatgccccctgggatgcaatgaggtgggattcaaggaggcgacttattattcgtgaaattaggcactgggatcctgacgtagtgtgtcttcaagaggtggataggtttcaggacattgctgcaggaatgaagagcagagggtacgaaggtatatttcagaggcgtactggagatactagagatggatgtgccatattttggaagtcaaaacagttacatctggttgaggaagatagtattgactttagtgaattcaatcttcgaaataatgttgctcaaatatgtgtttttgagcttaatggaacacacaaatttgtactcgggaatattcatgttttgtttaatccaaagcgcggtgatgtaaaactgggccagattcgcatgctacttgagaatgcaaatgctcttgctgaaaaatgggataaaattcccatcgtgcttgccggtgatttcaacagcacacctgatagtgctatctacaagttcttgtcgacaatgaagctgaacatttctttgcacgatagaaggcatttatctggacttgatagcactgaatttgggtatgagctttgtagcctgctcaagtatcaatggactgatgaagaagtgagaaatgccacagggtattcaaatgtcatggtgg

SEQ ID NO: 5389 - DNA, 196 bp, Zea mays
  Clone ID: MRT4577_104909C.1
gctgtggtccacaggccctctttcggctcggatgtcgacggcttaacggggactgccaggccaacgacgctttctccggtgaggtgcgatcccaaacgacgggccgtctccaatgcgcgcggctacgcggattaccagtcccaacgggtgtctttccgtgaggtgcatcccacacgacgtgcttctcccaagctgg

SEQ ID NO: 5390 - DNA, 362 bp, Zea mays
  Clone ID: MRT4577_10490C.1
ctgcattgaaacaggcagatcctattaacaactccggattggctctctgccccagccatggacccatgacatcggtggtttcgcgcacctcaaagacatgggtggggaggcatcgcggctgctgcacgccctctagagaatgcttatcgatcatcaggtgcattcaattacgctttcggttgctgcattgagaaatgaatcagtcgaactgtgaaccaactacttgaaatttcacgtgatgtggggtatagtggcaatgcataagcccacatggagcactgggtcttcgaggtgacacactgacattgcaactgaacacacttgtctatgtggctatggctacggtatacatagagtcgtac

SEQ ID NO: 5391 - DNA, 244 bp, Zea mays
  Clone ID: MRT4577_104910C.1
gtcctcgctacgttcaccggcagtagaaagggcagctcgggtggacagcagagcgatggccctatactccacgagcttgagcgacgagggcggaaacgtgccatggcgcatgcggcttaggaatggccccggtgacaatgcataataccgcgctgatagctaagcggcggcgggggaccaccagcccgtgtacggtcagaccttgtgctgtatctgctgccactgacgccagctccggctacct

SEQ ID NO: 5392 - DNA, 1544 bp, Zea mays
  Clone ID: MRT4577_104911C.1
aattgtgcaggttaggagagggtatctgcctaaagattttgttgttccaaagtctccagaaagaatattgttttgtggttggcgccgtgatatagaagatatgataatggtacttgatgctttccttgcgccaggatcagagttgtggatgtttaatgatgtccctgaggttgacagagaaagaaagctaattgatggaggtttggacttcagtcgcctcgataatattactttggtgcatcgtgagggaaatgctgttattcgccgtcacttggagagccttcctttagaatcattcgattctatcctgattttggcagatgaatctgtagaagattcagcaatccaagctgactcgaggtcacttgcaactttgctgctgataagagatattcaggcaaaacgtcttccatgcaaggaatcattgatttcacatgttccccgagggaccttttctgaaggttcttggataggggagatgcaacaagcatctgataaatctgtcataatcagtgaaattttggaccccaggacaaaaaatttgttgtcagtgtcaaaaattagtgactacgttctttcaaatgaattagtgagcatggcattggcaatggtcgcagaagatcggcagataaataatgtcttggaggagctcttccctgtccaaggaaatgaaatgcaaatacgaccttctgatctttaccttagagaagaagaggaattaaatttctttgaggtcattctgcgagctaggcagaggaaagagattgtcattgggtaccgtcttgaggcagctgagcgtgccataatcaatccaatagacaaagtttcaaggcgaaggtggtcacccaaggatgtttttgttgttatatccgagaaagaatgaggtttatcagatcacagttgacacaaaagcaagctcctgaccagtgaccacacctaatgaagaacaggcagctgcgccgcacacacacacacacaccgaccagcgcatagagctatttgattcagatgcgcatttggcagaaggcaagcgctgagcgcgaaggagtaaaagcatgatcagatattcagatctttgatcagtctagactgacaccttaggtcgccctttacaaatatgacttaaaaaggatgtgaacagagtagtacagcacatgctttggaagtttggatattcttgtccgtgtaacttcccacatgaacaacgagcaaagcatctcctgcatatgcatcaattaatggcttaaagctattgagtgctgatactgagcagttttccagtgagcctgttacaccctccctggctatagagcgtagacgatagcgatagttcagcattctgtacattgcataggcgcattctgtaaacaactttgccagtccatgtaaacaacatgagatgtcggccagtccatgtaaatatgtaatctggaagatcatctgtaggtactgttgcggtgttggatcttgtgaagaatgcagagagcaatgctgaagcgtgtcaccttgcctcattgtacttgagcaagatatatattatgtct

SEQ ID NO: 5393 - DNA, 403 bp, Zea mays
  unsure (1)..(403): unsure at all n locations
  Clone ID: MRT4577_104912C.1
gggtacctcgaggccggccgggccggggcctgcctgttgcattcctcgcaaaccacctcgcctgttatcttcgaagcctccgtcgcgcctagcatccatcttgtcggactactgaggaaagaaccccgatgagatcttcctgaatggtggctacattgggaccccccccaatgcatccttgctgttgccgagtccactggcaccattgggaagagcctttccagcatctctggtcgagaacgctagaggagaaccgccgtggcctccgtgacttcccattctgctgccctgatgctctccaggacatcagcggtgaggtcctcttctgaggataccctgtatcatagnaacaaggatggcaagcctttgtgctgatgtcctcaaagatggaggatgacctccc

SEQ ID NO: 5394 - DNA, 849 bp, Zea mays
  unsure (1)..(849): unsure at all n locations
  Clone ID: MRT4577_104913C.1
gaggagctccaaggtggaatccattccatcctgagacccgaaatccatccatcacgcccttggccttggcagccgcagcagacgactcgcctactctgcgcctgcctgagccggggacggggaagaaggagaggagggagccgctgacggagtgggaacaagaaccacggcaggtatcgactgccggatcactgtagcaagatgagcgacaatctcatggacaaagttaacgccctgggcgagcgcctcaagatcagcggcgcggaagtcagccgcaagatgtccaccggcgtcactagcatgagtttcaagatgaaggagtttttccaaggccagaacatggccgacaagattgttgacgaggccaccttggagaccatggacggccccgattgggctaccaatcttgagatatgcgatatggccaacaccgagagggtcaacagcgtcgagctcatccgcgccatcaagaggcgaatcatgctcaagagcccgagggtgcagtatctggctcttgtcctcctcgagaccattgtcaagaactgcgagaaggctttctccgagattgctgcggagcgggtccttgatgaaatggtgaagcttattgatgacccacagactatagtcaacaacagaaacaaggcgctcatgcttattgaagcatggggagagtcaggagaagagctccgctaccttcctgtgtatgaagaaacttacaagagcttaaggtctaggggaattcgcttccctggncgcgatgatgagagccttgcgccaatatttactcctccccgttcagtacctgcagctgaaccatattctgatgcagcacaggacgggtatcaagaa

SEQ ID NO: 5395 - DNA, 1013 bp, Zea mays
  Clone ID: MRT4577_104914C.1
gttccccgagggaccttttctgaaggttcttggataggggagatgcaacaagcatgtgataaatctgtcataatcagtgaaattttggaccccaggacaaacagtggtaacaacgcagagtacgcgggtgactacgttctttcaaatgaattagtgagcatggcattggcaatggtcgccgaagatcggcagataaataatgtcttggaggagctcttcgctgaacaaggaaatgaaatgcaaatacgaccttctgatgtgtaccttagagaagaagaggaattaaatttctttgaggtcattctgcgagctaggcagaggaaagagattgtcattgggtaccgtcttgaggcagctgagcgtgccataatcaatccaatagacaaagtttcaaggcgaaggtggtcacccaaggatgtttttgttgttatatccgagaaagaatgaggtttatcagatcacagttgacacaaaagcaagctcctgaccagtgaccacacctaatgaagaacaggcagctgcgccgcagcacacacacacacaccgaccagcgcagagagctatttgattcagatgcgcatttggctgattcagatgcgcatttggcagaaggcaatcgctgagcgcgaaggagtaaaagcatgatcagatattcagatcttggatcagtctagactgacaccttaggtcgccctttacaaatatgacttaaaaaggatgtgaacagagtagtacagcacatgctttggaagtttggatattcttgtccgtgtaacttcccacatgaacaacgagcaaagcgtcgcctgcatgcatcaattaatggcttaaagctattgagtgctgatactgagcagttttccagtgagcctgttacaccctccctggctatagagcgtagacgatagcgatagttcagcattctgtacattgcataggcgcattctgtaaacaactttgccagtccatgtaaacaacatgagatgtcggccagtccatgtaaatatgtaatc

SEQ ID NO: 5396 - DNA, 298 bp, Zea mays
  unsure (1)..(298): unsure at all n locations
  Clone ID: MRT4577_104915C.1
ggttgtgtaatttgttgttggtggttgtggttttaagtttgtgaaagtgatttatgcatttgtgtgggtttttgatgattttgatatgagggggggggggggagtgatcaccaagggattgattgaaacaatntgtagagttgttgtgaatgtggtaaatgccgatttgacggggaagtagaggggagtttgtatgagggaggagaggaggataatgaacgggttaggtgaaacagctatcgtttacatggcaagttgagagtgggaatgtggagtttaagggtggagtgggatgtgg

SEQ ID NO: 5397 - DNA, 396 bp, Zea mays
  Clone ID: MRT4577_104916C.1
tttttgtatttcatttagacccaagaacatgctgatcatgtattcaatatgtatgctataaatgctatggtacctatgttgtatattattgtaaaattattacataattttagtaaatcatggggtgacgatttgattattacatttttagttttcagtaattaaaaagatttctgtgaattcttaaaaaaacaaaaagaaaatcattgaattactgttacctggcacaaatttgctataaaatctgcctgggtggatgacccgtatgcatgcattgggtttgagggctagttagccattccattgaacttccatttgaaagatatgagcaagctttgtcccaatccatcaagggagtctgtttccaaccactcatatacactgaattagaatatc

SEQ ID NO: 5398 - DNA, 1289 bp, Zea mays
  Clone ID: MRT4577_104917C.1
ctctaccagctctacaccatcacgcacgaccagaggcatctggtgctggcccatctattcgacaagccatgcttcctgggtttgcttgcggtgcaggctgacagcctttcgaatttccacgccaacacccatattccggttgtaattggcgggcagatgagatatgaagttacaggtgatcctctttataaggaaatcgcgacattcttcatggacacagtgaactcctctcacgcatacgcgactggtggtacatctgtcagtgaattctggtccaatccaaagcgattagctgaagctctgaccactgagactgaggagtcctgcacaacttacaaattgggtacctcgaggccggccgggttcagatggacgaaggagatcgcgtacgcggactactacgagcgagcgctgatcaacggcgtgctgagcatccagaggggcagggaccccggagtgatgatctacatgctgccccagggccccgggagatccaaggcgaagagctaccatggctggggaactcagtacgaatcgttctggtgctgctatggcactgggatagaatcgttctccaagctgggagattccatttacttcgaggagagaggtgagaggccggcactgtatgttgttcagttcataccgagcacgttcagctggagaactgcaggccttactgtcgcacagcagctgatgcccctcagctcgtcggatcagtaccttcaggtctcgttctccgtatctgccaagacgacaaacggtcagtttgcgacgttgaacgtgagaataccatcgtggacatctttgaatggcgcaaaggcaacactgaatggcaagcatctggaattagcatctccagggacatttctcactatcagcaagcagtggggcagcggtgatcagttgtcactccagttacctatccacctaaggactgaagcaataaaagatgaccggccggagtacgcgtctatacaagcagtcctgttcgggccgttcctcctcgccggcctcaccaccggagactgggacgccaagaccggcgccgccgacgccgcagcctccgactggatcacccccgtccctgtggagtccaactcccagctggtgacgctggcgcaggagtccggcggcgaggccttcgtcctctccgccctgaacgggtccttgacgatgctgcagcggcccaaagacggccgcggcaccgaggccgccgtgcacgcgacgttcaggctcgtcccgcagggaggcgccggcgcgggcgccgccgcgatgctcgagccgct

SEQ ID NO: 5399 - DNA, 219 bp, Zea mays
  Clone ID: MRT4577_104918C.1
acgctcggcccattcgtagttcaacacccgccaacagtcttcgcgcggagagcgcaatcaacagacagaggaactgctggaagctagcatcttacccactcataagctatggcagttcatcgcaccctctttgcttgcgcgtcgtcgcatgctacgcactacaatggcggcctgaccgcgcctgtgcatcggacgcaccctgcctgtcgggctgtctcg

SEQ ID NO: 5400 - DNA, 241 bp, Zea mays
  Clone ID: MRT4577_104919C.1
gtactgtcataggcacacctaattggttaccatgtgcgtggttcggtgtctacacacccttgattcttgcgatgcttctattctgatacgagcaatatttttgccctgaaattagcgctctgcaactatggacgtctccttagatgctgtataacgcatgacgtgccatgattctgctgcttcggtgatgcttagcatgcaatgagaatgtgatggaacgaagatgtcttgtattgaaaaa

SEQ ID NO: 5401 - DNA, 306 bp, Zea mays
  Clone ID: MRT4577_104920C.1
ctacaggcaaatggttaagcaattccgattcgtcatctggaacattttttccagagaacattgatatgaactaatctgaattattaccaaatgtctctaaacaacaaagaaaagaaaagagtcccacagaatagaatagacaatagaatgaaaaaacaaacaaatccgacgaagaaaactatagtggcaactgggttcaggcgcgagtggcccatgaagcttcaacggtgggcccaactgggtctgtgaatgtaggtggtacatttcattgcactgcgtcgcttatttggaatgaactttattgat

SEQ ID NO: 5402 - DNA, 560 bp, Zea mays
  Clone ID: MRT4577_104921C.1
taaaaaaaaaaaaaaaaaaaaaaaaaaaaaaaaaaaaaaaaaaaaaaaaaaaaaaaaaatttttttcgttgtcctcccttttgggcggctttttggggtttttcttcccacttggcggccgttctggcttcctttttgggggccctttggggggtcttttgggcctttttttccttctttggccggcgtttttcaccctcttttctggggaaaccctgtggttacccccctttttccccttgttgcgcttctcccttttttcacctgttttgttggttgggaggtccgccccgttggcctttccttccattttttcggcctgttttggcgggtggtcgcccccttttgcggcgcttttttcgcggcgtttgtggtggtttctctccgggtgtccgctttttttgcctccccccttgctcccccccttttggctgtttttcttgctttttttgccgggtgtttcgttttttcccttcggtttctctttcggggggttccctcttggggttccctttttgtggctttttcttccccctcttcccccctcctctttttttttt

SEQ ID NO: 5403 - DNA, 822 bp, Zea mays
  Clone ID: MRT4577_104922C.1
cgcccgagtggcccttcgcccgctgcacgctccgcaacccgctgagcgccgccgcctgcgcggcgtgcgacgccgtgcgccccgtggacgtcgacggcgcgtcgctgggcctgtccgccgtcgtcgcctcttcgtcgtctcgcccgctcccgccggcccagtggtcctccgctccccgcagcgcaacccaggcgatccgcgccggctcctccccggcgcttcaggaaaaatggccgagcatctcttcgaggacatcttccacgtgaccaggatcgaccccgatggcaagaagttcgacagagttaatcgcattgaggctagaagtgagcagttggagatgtacatgcaattagatatcgctacctatgtctacccaatgcatatgggtgacaagttcaccatggttttagctccgacactgaatctggacgggaccccagacactggctactatacacaggctggtaggaaaacacttgctgacaagtatgactatgtcatgcatggaaagctttacaagatttcagaggacaattccagcaaggataaaggacctactaaagtggagatctatgcatcttttggcggcctcctgatgttgctcaaaggcgatccttcaagtgctgctaacctcgagctggatcaaaggctgttcctcctcatccgaaaggtgtaagcgtgtaatctaccggataaccagtgcttgtagttcactcagggctatactgagcctgtgatcgtttggatgctaatcgtcctacacccttatgtactcttttggcggtaatatgactctagattggtaccatcttctctgtagca

SEQ ID NO: 5404 - DNA, 760 bp, Zea mays
  Clone ID: MRT4577_104923C.1
cggacgcgtgggcggacgcgtgggcaccgccgttgttgcagatgttgggggacggctccggggggggacaggttggattcggatctgaggggcggcagcggcaggggcgggaggcgagcgccgccggaccaggtgttggagaacgtggcgtagaggaggaggactcggactcgtataattgaaatacgaagggacccttctgccttctccgtaaacgacggcgaccctgtgagccctcgcgccaaggatagggagcaacaggagaagtttggcggtccacgtcgacgagagcaacagtggtgagcctcgccgtgttgtgtcccgtcttcaatccgtgggcttgaagatttcctgttcacctgctgttctctacagcacactcattcctcaacgtgcctctaattgatgcaggattatcaacaactagttttggaaatcttgcaagttgtatttaccaccagcttttcaacatcatcaacagctggtttggaaaccttaaaagttctatctacgacaggtgcaccacaaatatttaggttttaccaatcattagttgctatttttcaactccttccccacctacatacaatacaactgattttttgtttcttactgtttaacccacagtcatctacttttttttcgaatagttgcctgttgatttggaggacctataaattccatctgtaacagtttaaaaactatgaaagactgctaaaccctaaactatgaaagactgcaaatcatttacatactgttc

SEQ ID NO: 5405 - DNA, 375 bp, Zea mays
  Clone ID: MRT4577_104924C.1
aggaggcgccgggatcattcttcagtttcggaccttcgcctccactccctggttgatggagtggtttggatatgtggcggtggcagcagactctcctccgccggctcccgccgcctatggcggtggcacaggctccggcgtcctgggcggccgaccgtctggtatgctactacgggtctacgccggaggcgagggagggaaaggcggcgcctttgcaggcgcggggcatggtctacaggttccagatgcgcgccaagggcggcgacggcggcaatggctgcgtcagcctccggcgctctaagtccaaccgccacggcatgcctgacggtggtaatggacggaagggtggtgatgtaattcttgagtgctcacgtt

SEQ ID NO: 5406 - DNA, 332 bp, Zea mays
  Clone ID: MRT4577_104925C.1
tcggctccaggacgtacgtacgtacgtttatcgtttcatcgatcgctagctagctgacgaccatggcgtccctctcctgggccggcatcacctccccttccttcacggtcgcgcccgctcgcgcagtggtcatcaggaggtccttcaccgtgcgtgcctctctccgcaaggccactgccaccgtcgccgtggccgttgccgtcagcgcactgcttgcctgcggcggcgccatgggccatgaggtgcttttgtgcgcaggctactgcagcctttgtcttttagcccagccagttcacctgcaaggtctgcgacatcttcatcttcaagaacaa

SEQ ID NO: 5407 - DNA, 267 bp, Zea mays
  Clone ID: MRT4577_104926C.1
aataattcttccttttttcttttcttaggggggttttttaacgccaagcggccattacaccactgatgacactgtttgcagagtgcacccgaaaacagactcccatacggaatgagaccaaaaaacctgtctcaattgtctcacacaaccactgacagcccgctcccaacaaaagcaaggacccaactcattttgaaatccaccccatgcaaaaccaccgatggagcctcttttctttctatcaaccaaagcggaccactcccggaa

SEQ ID NO: 5408 - DNA, 355 bp, Zea mays
  Clone ID: MRT4577_104927C.1
cacgcgtgcgtgggctcggtattcgtttcttgcaagggagaaaatttcccccctctttataaagcaatacacttaataaaacagggggggtttataggataggaggggcgccaaggttccttctcgacggttcttgcctcgttgggaagggatggcatccgaggtggaggacaaggcgtcgactccactgttcaccaactgtgcacccgacgtccgccggaggagggacctaccaaaggcaattctcgcccacacaccccgtcaggatcgccaccaaggcccagcatcatgagcgcttcatctttaaggacacacacttccttgaaaattttggatttgcgggattttgctattt

SEQ ID NO: 5409 - DNA, 522 bp, Zea mays
  Clone ID: MRT4577_104928C.1
ccacccaccccgtccgcacaaaactaaaacaagtaccaaagaccgccgaaagacccctatttaaactgaaacaaaatctaaaaaatccaaaaagggaaaaaaaaaaaaaaaaaatgatgacttcctctggctgttactacctgagccgctacctttaccggcctcctcctctcaagtcaaggatttcatttcgctgcccaagcgccgacccgccaggacccagttttaccacctccaccttgaagaaacccgatccatttccaaaccaaaagctctgtgcctatttcccttttaaggcagttgatatacttccgacaggaccagacaatatactcccttatctttgatctgccaggctttatggttgaaaatgacgcaccccagttcctaaatttaatgatggacgttttttactattactacccgaagccgcttgccctagctctttctgtagatgctccatttttttttcaaccaatgtggcttgttgccaaacctctggtgtaatcatatgcctcccta

SEQ ID NO: 5410 - DNA, 289 bp, Zea mays
  Clone ID: MRT4577_104929C.1
atgcggccgcccttcttttttttattttatatagctgtggcttaatttattgggggtattttttgaatgttttatgcttttttacaaccacccaagaggtactttttacacagcgtgagaacccagagggtacaataaaaatggtgctagggggcaacacgtttttgaagaaaaagggggaaggtgaaacaccccatgagagtccagggtagacagattaacatggataccccttgggggtacccgatggcaagattaactgggggcaaaccaagcgaccgcggtgggc

SEQ ID NO: 5411 - DNA, 200 bp, Zea mays
  Clone ID: MRT4577_10492C.1
ttatcacatacacacgtacgacaactcaaaatacaactcaaactatgctattgttgaagtgacgcatttttaaggtttagggccgtttacggcaatgcagttctttttattgttcaagtgacataactataatttaagtatttgtttacgccagtttaacaaacatattttaagtatacttcacataaatatagtttaat

SEQ ID NO: 5412 - DNA, 824 bp, Zea mays
  Clone ID: MRT4577_104930C.1
cattgggacctcgagccggcgggaaaattacgccgccgtttccgccgtctacccttctgccgcgtctcctcgccggcggcgaccaccacccgcccccgacctccacctcctccccggaacaccccttcctctccgcgcatctcgtcctcccctccccgtctccgtcccccgccgatttctcctcgccgcacctacccctcgctctcgccttcgccttcctcaccgagccttccccgctcccgcggcgtctccttgtcgtcctccacgccgccggcgcacgcttccccgccttctaccatgccttcgcgtccgctctccactcccttcccttccctctcctcctcccccacccgcgcacccgcctcctcctcgccgcctcggagctcgcccgcgcgacggcgccggggttcgcgcccctcctcgcctccctcctccgccgcgtgccgttccccggggacgcctgcttgctcgatgtcttgcacgaccacgcctcgtttcttgccgacgaagagccccagctcctcgccaccgccgtgtacgccttcctccgactcctttccagaaaccgcttcgtttcggcctcaggtagcatcgagttgaaggattgcgaggagtgcaagggtgccaaaaacctgcaagaatgcagggcaaagctggtgtctttctgcatctccatgctgcaggatcacttccaagtgtgcgcactgctcggaagggaccttgtgaggtcgctccacgagctggcgttggtgccagagttccaggtgttgtggcgagacttcatacttgaccatggctgccatgtctgtcggatcggcacaccc

SEQ ID NO: 5413 - DNA, 113 bp, Zea mays
  unsure (1)..(113): unsure at all n locations
  Clone ID: MRT4577_104931C.1
cccggtgtcgaccccacgcgtccggtggnagggaagaatctgaaaacgaagtctgatgaccaaacnnctaaacataaaggtacctgagngggtattattcagaatnntgaaaa

SEQ ID NO: 5414 - DNA, 182 bp, Zea mays
  Clone ID: MRT4577_104932C.1
catggttccacattttttttttataatgatagtaccaaaaagtatgactatgacaatgtggatgcatttgaaaggatagatagctgtcaccctaaaaactgtgattgcattagatgccaggcgaccaacaatgagggggggatccccaattgctccttgatttaaccaaccatcctaaccaa

SEQ ID NO: 5415 - DNA, 501 bp, Zea mays
  unsure (1)..(501): unsure at all n locations
  Clone ID: MRT4577_104933C.1
ttccattaaccgagctagngtaaattaacaaacgatggtnntgtggaatctgcgggttttnttttttccattacctgcaagcgccngaaatttactttgnttcattacatacgcttggttagctttttctggtttttactgggttctctcttccagatcttgacggggtatggaagctgaagccgatactcgacgggaaatngattatgggagtnatgcaggtcaagtccggaggtccactgataggaaaatgggtacgttgttgaccctgctttgnccncnnntnctttttcccagatcaggctagtttttgactttgaaaaaanatgacaaaggaagaaaaaaaaaattgttttgttattgnagnaanaacgtgtgttgaagtggnagtttgngnattttggaggaaccgtggacgagtgcgtngagtggatgaagtagttggagttaaaaagatagaaagtggagtttagtaggtgataataaaaaattgaagtttgg

SEQ ID NO: 5416 - DNA, 299 bp, Zea mays
  unsure (1)..(299): unsure at all n locations
  Clone ID: MRT4577_104934C.1
aagataaactcatttttatcattcctttgtggagggcagcacatctccaacggcgaagaagagatataaacagnagccaatgctacgctcagctctcctcaaccagagatcctcttgtcgatgctattgtgtcgatccaccctctttgatgacggcaaaaaggtaaactgattttatctctattgttaaatttgcaccatttcagtcaatgctactatttaagtattgaatagttattctataattgttttgcgcacttctctgcccggtggctacaacttcaagttttgaattgcatt

SEQ ID NO: 5417 - DNA, 500 bp, Zea mays
  unsure (1)..(500): unsure at all n locations
  Clone ID: MRT4577_104935C.1
tcgaaggcggccgggatccactcgcgaaccccgncatcgatctcgtttcaaatccatccatcctcgtttcctccgtcccgcagcatctcaaccccatggccaagatcaagatcgggatcaatgggttcggcaggatcggaaggatggtggccagggtggccctgcagagtgacgatgacgagctcgtccccgccgcaacgaccccttcatcagcaccgactacatgacctacatgaccaagcaccacactgtgcacggacagtgaaaacaccatgcaagtccaggagaaggactcccaaacccttctcctttggcgagaacgaggctgctgtgcatggctgcagcaaccctgaggagatcccctggggttcggactgagatgaatatgatgctgaacctaatggcgttttccctgaccaggcaaaggctgaagcccacttgaaggacggcgccaagaaggatgtcatctctgctcctaacacaggatgcccccatgtttg

SEQ ID NO: 5418 - DNA, 296 bp, Zea mays
  Clone ID: MRT4577_104936C.1
aaacccccgtggtccctcaacaaacctaattcaaaaatggtccacccaagagggttatacctaacaataacgggcgggaatccaccttcctacctggaactaatacgtaccacgaggtaacaccggggaggtcttgaagagaccttgatcatttccacacggtttcatttggatcactgaagatgggattatgatgcccgaaccaacactggatgacctcaatggagatgcaggctgggggggaagcatttttcaaggggatctgggaagaagcattccagccaggcttattaaaa

SEQ ID NO: 5419 - DNA, 845 bp, Zea mays
  Clone ID: MRT4577_104937C.1
cattgggacctcgagccggccgggaactattgtccctggctgtgcctacacgcttgccttatcttctcccgttcaccccgccgtgcgcgcgcccccgcggcgacaaccgggcgaccgccgccgacctacgccaggtgccaagccgttcctcagtcccatcacgaggccttcaacgaacccttcgccggcgacgagaaagagctggaactgacggagatcagggatgtgctgcgctgtattttgcacaccatatttttccatagaaccctcagcctggttcgccccaaagatgttgactgtgatttcctcgatattacttatgtacaatgtggtctaccggaactagaaaaggaagttgacgaaaagatagaccagttcagtgcatgggtggagaaacacccaaaccgcagaagccagatctgcctctcctttttcgacgagaaacacagacaccctggttggtttgtcaacaaaacagagcgcatctattgggagcaatggttcatcaatttgcaagtcatgttccccaaaagatacagcaagtcaaacagctccaaagggctgacaaacatccaagcaaatgccgtggaggagaccagcacaaggcgtgctgcattggaggcgtcgattaacgaagtgctgttccagatcataaagttcgccaacgagaaaaaggaccacattcctgctatccctgacaggattttcaatcacgagatcatgatcccaagctcggattcagtatttggatggaacacggacgtcattcgcagagttctgaatagcgggcacccatactcgctttaactgaagacgacatctcagtgggcgcccgtattcagttt

SEQ ID NO: 5420 - DNA, 1027 bp, Zea mays
  Clone ID: MRT4577_104938C.1
gactgcagctcacatcgatttatcaatggagctgcagcaaaaacacatcttggtttgttgcgatttggatttatacagacagctttagaaccatacatacatgaccgcttttacacatcttacaccgcagcaccctacaatcttcagtttcagcatctgacaatcaatatacacaatgtggcatacggtggatatatctcaacttctcatgggcaagctgcaggctgcaagagttcgttagactgattttacaggagctagtttcagcatccgaactaaagcatgaactgttatagaccagcaaggtggaatctgaactgttatagaccagcaaggtggaattcttggctagtttgggaactccatttttccaagggatttctattttctcaaagaaaaatgaactaatttcccttgtaaaaatggggttcccaaactgctctaaaccatagaactcaggtttcctcgcttccgtcagtatcagatgggtacagaaaatgtaacggagcatccacttgaccatctctgtactgtatttgattacctttactatcatgtccatgggaaatagatcatatagtagttgaattagatcacgaaggaccactctttccgtctgaactcacaaaaagcccccataagtaattctcaccatctatccactgagaatcagggggaagcacttccgaggaatatatcaacaactttatgtcatggatatatgcccttagaacaaagttgttgtaagcttctaatacattagagtgtttcttttcacacccatcaggtttattaggaaaaaagaacaagccaatgtcttcatgaactggatgcatagtctcaaaagattttggccagtcatccattcgatgtaataactccagctgtaaaacagtgggcatcatcttgacaatatcaataactctggatgacacttttgatggaaagtaggctttaaacgaatccgtgcgacgcggggctggatctcagtggatcgtggccccggccggcctcgaggtacccaatg

SEQ ID NO: 5421 - DNA, 381 bp, Zea mays
  Clone ID: MRT4577_104939C.1
cacgcttgccttatcttctcccgttcaccgcgccgtgcgcgcgcgcccccgcggcgacaaccgggcgaccgccgccgacctacgccaggtgccaagccgttcctcagtcccatcacgaggccttcaacgaacccttcgccggcgacgagaaagtacaatgtggtctaccggaactagaaaaggaagttgacgaaaagatagaccagttcagtgcatgggtggagaaacacccaaaccgcagaagccagatctgcctctcctttttcgacgagaaacacagacaccctggttggtttgtcaacaaaacagagcgcatctattgggagcaatggttcatcaatttgcaagtcatgttccccaaaagatacagcaagtcaaaca

SEQ ID NO: 5422 - DNA, 423 bp, Zea mays
  Clone ID: MRT4577_10493C.1
agcaccacaaccggtccttttttttccccgacatggggctattattacatgaacaaacttggggggggggggcacctccattgcccaaggatttgatcctatttgaactaaaatttgggcacgttaatgaaaagggaaaaattactctatggactattggttggttacaaaaaaaaaaacaactgccactaaaatttcagcaagaaggggcgtatctccatggggcctagttaaacgactagagccctactggcaactgggccaccttttactgggggaggaccagtttcaggggtcccaaagaccctccagctgagctttttaatggctgactttttttgggtcggggagaggctagtctccggaaattccttggaagttctctttccgaacacctttttaaaaacaacctttgccaccttg

SEQ ID NO: 5423 - DNA, 225 bp, Zea mays
  Clone ID: MRT4577_104940C.1
cttagaatagcttgaataaaacggacagagtggatacactacatagcgtacgataaccaccgagaagtttcctcgagaatctccagtctctacttccccgcacccactctatatccacgagcgacgacgacacatgacagaggcgaaaggctcgagcttatcttaatttgccctgccgcctacattgggacgagaagaggtccttttcttggacgttctgaggag

SEQ ID NO: 5424 - DNA, 1397 bp, Zea mays
  Clone ID: MRT4577_104941C.1
tgggtagccggccgggccggacctcgtatccgggcctaaactaaagcagtctggctgtgcctacacgcttgccttatcttctcccgttcaccccgccgtgcgcgcgcgcccccgcggcgacaaccgggcgaccgccgccgacctacgccaggtgccaagccgttcctcagtcccatcacgaggccttcaacgaacccttcgccggcgacgagaaaatctaattttcccaaacccgcttcctcgacttcctgtctcgactctcccaagtcacaaccctcgacctcccccctactccaactactggaagcgccgacccatcaggttctgatcgattcttctgccccgatccgcagcggcaagcggagatgaactgcgagacctgtcagctgaaagagctggagctggaactgacggagatcagggatgtgctgcgctgtattttgcacaccatatttttccatagaaccctcagcctggttcgccccaaagatgttgactgtgatttcctcgatattacttatgtacaatgtggtctaccggaactagaaaaggaagttgacgaaaagatagaccagttcagtgcatgggtggagaaacacccaaaccgcagaagccagatctgcctctcctttttcgacgagaaacacagacaccctggttggtttgtcaacaaaacagagcgcatctattgggagcaatggttcatcaatttgcaagtcatgttccccaaaagatacagcaagtcaaacagctccaaagggctgacaaacatccaagcaaatgccgtggaggagaccagcacaaggcgtgctgcattggaggcgtcgattaacgaagtgctgttccagatcataaagttcgccaacgagaaaaaggaccacattcctgctatccctgacaggattttcaatcacgagatcatgatcccaagctcggattctgtatttggatggaacacggacgtcattcgcagagttctgaatagcgggcacccatactcgctttaactgaagacgacatctcagtgggcgcccgtattcagtttattagcgtgctgccgccctctctggaagacggctctgttaaccatcgtggtgaaccatataatatgcttagggaaaacctagttctgtgtacataaccctgctcatctggcttgtacatactgtgttgggatcttgctcatcggtcaaacattcttaagtttgattaagtttataaagaacaatattatgattctaaataagtttatcatgtaaaagtatttttcatgattgatacttattgcgaagcatctcccgagtgagttaggtggttcgaaaaaaaaaaaaaaaaccttaagtcttgaattcgaattttagactagggttagcaaaaaaaaaaaaaaaaaagcggcc

SEQ ID NO: 5425 - DNA, 785 bp, Zea mays
  unsure (1)..(785): unsure at all n locations
  Clone ID: MRT4577_104942C.1
gaaacccccgtcctggccccgtcccgttcgcccacatcccccacctcccccatccccaacgctgccatggcctcgctccaccccacgacagcaatgctggcccagcgccattcccctgccccctctctcagcgcatcgtcgctctcatggtccgcctccatcgccgtctcccgcatcccgccagcccctggcctcgcgctccacccactagtgaatcctcccgcctccggcaaccgccagagcccggtggtgtgtgcggcgtggacgcggcggtcgcgcggggaggcggagcagcggcccaaccgcaagtcgtggaagcagcgcacggacatgtacatgcgccccttcctgctcaatgtttttttctccaagcgcttcgtgcacgcaaaggtcatgcacaggggcaccagcaaggtcattgccgtcgccaccaccaactccaaggacctccggctcaccctcccatctcttgtcgacgacaacgcctgccggaccatagggaggctcatcgccgagaggtccatggacgccgacgtctttgctatggcctatgagcccaagaagaacgagaggatcgagggcaagctcgggatcgtgattgacaccattaaggagcacggcatcatcttcgtataggcaggtttcagggtaggagtagggctgttatgttttagtttcgactcctgtagcctggaaactgttaccttattgagataaaaacaaatacaaaaagtatcaatctagaaaaaaaaaaaaaaaagaaaaaaaaaaaaaaatttgcggnc

SEQ ID NO: 5426 - DNA, 289 bp, Zea mays
  Clone ID: MRT4577_104943C.1
acccaatcagatacttttaatcggggctcgacacccaacattttttggattgacttacagcttacatgcaaaaggggggggggggggggaaattgttgagcacataaaaaacttgttacatacaccgggccggggcaattccgccctttaaaactcaaccccgacacataggaggttttatccggataaaaactggaaaccggacttagacaaatttcaccccatgccaatacgggcaaaaatgggttgggttgggtggttaaaaaaccccggggggtttttttttggc

SEQ ID NO: 5427 - DNA, 228 bp, Zea mays
  Clone ID: MRT4577_104944C.1
atgtggaggacgtgtcttttataaccaccaatcccgacattactcaaactgtgtacgggtgataactatgtacattgcaacaaataaatagggggggttttaactaggtatatccacaacttctggctactcaagaattttttaccagtacattgtgtatttccattttttgtataaaaagtattataactttgttatatacaagtcttaatttttttcttttgaaaa

SEQ ID NO: 5428 - DNA, 496 bp, Zea mays
  Clone ID: MRT4577_104945C.1
aaaaataatagtgtaaggacacggcagttagctatagatcactcactcacatacattccaatatgaataatatgagtgatagagccttgttggtacttatgttgcttctatctgtattattcgttgcgcaatgcggtcgtcctcatgatgatgaagttgttggaaccgcaaggggccgccgagctgcttttagcctcaccgagaatggatattgtgacacggagcaccaaaactgtaaagtggtctactgctgctcgcatccacagccaaagcattgctatgccacttttatgcagtgtcgggccaattgctacgttcataaacgcaagtgatccatatctgatgctgtggttctaaaaacatcatcattgttagcttaaacaatgtactttacaatggttggtaatataataatatggggaagtcgttcgatggttgttccaacactagctagtgtgtaggaaaatcttaatgatactaaccggagatctccaac

SEQ ID NO: 5429 - DNA, 428 bp, Zea mays
  unsure (1)..(428): unsure at all n locations
  Clone ID: MRT4577_104946C.1
cccacctganaggacgcgcagtcgtctcgcttcgcttggagctcacgcagccgattcggctggagctcgtgcaggaacctgtatcctagcctggagctcgcgctagggttgctctcccacccgccgctggagaggtactactggcaaaatcgtgtgctgaacagctcaaaacgccctgctatatgagcactgtatgctgagcctgataagagagagtatgcggtatagatgaagaacactgctgaaagcacatattatattttcttagataagcactggatacccaggttttaattggacaaaatgacaccatcgatggagttggcactttcttcagcatggactctatgcaccatatgttgggctcaacaccagaacattcatgagtgcatttggggccaacctggtccgatcctgaggcggggacc

SEQ ID NO: 5430 - DNA, 188 bp, Zea mays
  Clone ID: MRT4577_104947C.1
gtgagggggcttttaaaaacaataaaggtgcaaagaaatccaacagacattttggagaaacagacttaacaaaacatgctcctaacatgtaccgacaagattccagcactgtaaaaacagccgaacgaccccaaaatagaaccatgacacccccctatgacaccaatacgaacgaagattagtttctc

SEQ ID NO: 5431 - DNA, 273 bp, Zea mays
  unsure (1)..(273): unsure at all n locations
  Clone ID: MRT4577_104948C.1
ccgttgccagccgtcgatcgcgccgtgggatctcagggggcgaagcgggcggcgacggcgatgtcaagggaggcggcnaggactaggagccgggtcctggtggttggcgccaccggccgcctcggtggaagcatcgctcgggccaacctcggccggggtcaccccaactttccgctcggtcgggcccaacaattccgaagccccggattccccgggcttgggccggttgtaaccctccgggccaattttgttcaagggtcacttgaagaatac

SEQ ID NO: 5432 - DNA, 513 bp, Zea mays
  unsure (1)..(513): unsure at all n locations
  Clone ID: MRT4577_104949C.1
agcattctgagttgcaacgcacgggcactattctttttagatgatatttattcaatggtactttattcttacaatctactagcacaaataaataagacattgaaacttgacttatgattggagatagtngggttgttctgtcatggatggcacttttgcactaagttttgtgagtgcgtgagtttattgtagtgttttttgtgtgtatgggcaggctctgctttcataggggctccttacccccctctcattttctcatattcttaatataaaactatgcagctcttcttcgtttcagaaaaaatacagttatccatgtatttgatgttatatgatacaatattctgtgggtttcttgtaatcttgtgttgctatccgttatgcaatagtagaacatgaattaactatntttgtttagggtatgtattaaaatgattgttttatactatagaggttttgtagactccagctatagagctatgttagaagattcaatttttttggaactccgat

SEQ ID NO: 5433 - DNA, 195 bp, Zea mays
  Clone ID: MRT4577_10494C.1
gccggcttgcgaacaccttccaaccacgccactctgctgtatgctgcagacggtacccacggacacagaaggcgtgcgagcatgacgagcgagcgacgaacgtcgagcgcgtccaacggcagtcgtgcactgccctaggcgtctgcgcgcgcgcgcgcagcgcctccgtactctcagcgcgccctaccgtgtcgt

SEQ ID NO: 5434 - DNA, 1360 bp, Zea mays
  Clone ID: MRT4577_104950C.1
gcctccgcccgcgaaccgcagcagcgtctccaactctccatcgatggcggaggcgaacgtggcagcggcgtcgctcttcggcgctgacggccgcctctgctcagccgacatcctcgcgccgcctgaggtccgggctaggatcgaggtagcggtgctcaacttcctcgcagcgctagcctccccttcctcgccggccatctccgtcctccccctgattagtcggagctctgccaactgcagcctgcgcagtgggttgctgaacgacgtctcgtcggtttatctctcatacaccttctgcaagaggtctctgacgcacaatccaaaggcgttcgtaagagtgtggaaggtcatggagatgtgctacaagatcttgggggaggggaagctggtccagcaacgggagctgttctacaagctcctgtccgactcacccaagtacttcagctgtcaacgtcatgtcaaccaagccattcaagatgttgtttccttgctccggtgcacaaggcagagcttaggagtcatggcatcaagcagaggggcactcattcccacgccttgtgttgcatgaaccggacggggagcagattgattgctccattcttggagcttcagggcatgcaattacgggggacctgaacctgttgagcaaattaaatttgtcttcgggctctcggtacatcattgtggtggagaaggatgccgtatttcagaggctggctgaagaccgcctgtataatcagctcccttgtattctgatcactgcaaaaggatatcctgatattgccacaaggttcatcttgcatcgactgagccagacatttccgaatatgccgattttcgcattagtggattggaacccagcagggcttgctatactgtgcacttacaaatacggaagcatatcaatgggcctagagtcatacagatatgcttgcaacgtgaaatggctcggggtgagaggaggtgatctgcatcttatccccgaggacgcgtttcaagagctgaagccacgtgatctgcagattgccaaaagcttgatgtcgtcaaagttcctgcaggagagtcacagagctgagctggcgctgatggtggagaggggcaagcgtgcagacatcgaagccctctactcccacgggttcgatttcttggggaagtacatcgcgagaaagatcgtgcagggcgattacatctgacgattggccgctggaatgttagcatggttgcacggaacaatgagctgcatggactgtagtacagtagctatatatgtccaaccgcctgtagactgaaacgatggtctgtatgggaatgtatataaatacaacaagagtagtctaatatcgatcatcatcggccaccg

SEQ ID NO: 5435 - DNA, 291 bp, Zea mays
  Clone ID: MRT4577_104951C.1
ctcccacggacacaccatgataaggacgctgctgctgtccactttggtggctggagccctcagttgtggggaccccacttacccaccttatgtgactagggtggttggcggtgaagaagcgaggcccaacagctggccctggcaggtctccctgcagtacagctccaatggcaagtggtaccacacctgcggagggtccctgatagccaacagctgggtcctgacggctgcccactgcatcagctcctccaggacctaccgcgtggggctgggccggcacaacctctacgt

SEQ ID NO: 5436 - DNA, 387 bp, Zea mays
  Clone ID: MRT4577_104952C.1
ccgcgggccgccgtgtattcggccctccactgcggcggcgttgttcgagactcccgatggggcgcaggaggatgaccacagtgccagcatggacctggaccgcggcgcgctggcggcgcggcatcaccaccagctgcacgagacgcacgatatctggctgctatgcccgccgaaggccatgatgaaggacaggtccgagcacctcggttgagtccaccctcaagcgcaggctcctctggtgggccttgtggtgcgttgcggccgctttccggctaatcgcactgcccataataatcgacactaacatcccgcacaagaagccagccctgccggctcctgagcaggacagataggcgtttgacaccgctctactgttcttaaacgccg

SEQ ID NO: 5437 - DNA, 380 bp, Zea mays
  Clone ID: MRT4577_104953C.1
gggaacccatctcccaacccctacactcccggcggacggcgcaggcaccagcagcaaccagcacgccagtagtgtattggtgatagcttcctcacagcccggcaaggctcgagatcctacctgtagggcacgattcgtcggcaggtagaggcggcgatcgtgcgcgtgttcgaggagggcacccgcgaccgcccctacggccactgccttgtcgtcggcctcgccaagaacccgaagagggtggtccgcatggtactcccccatgaagacggcgaacaaggctcacgaaaagtgctccatcaagctggttaaattaacacaactgatgcagacgccgttatcgccacccgtccatcccagtgctgttgctccacggggtc

SEQ ID NO: 5438 - DNA, 289 bp, Zea mays
  unsure (1)..(289): unsure at all n locations
  Clone ID: MRT4577_104954C.1
ctgacgcgtgggcaagggtggtccagaaaaatagctaaaagcaatacagtacttggnnanaagggagtgtgagtacgaccagaggatatccattgatttctgcaaggaaggagaacccttgaaaccagctgtgacggccgttttagcgttcgtttgcactccacatccaattggcaacaagtactatcttgggcctggtcctctgcaggatatgggaaggcaaattgctacagccaatggccctactggctataatagggattacctggtttcaatggagaaagcatta

SEQ ID NO: 5439 - DNA, 329 bp, Zea mays
  Clone ID: MRT4577_104955C.1
ccggcagagagtatgattatgtaggaggtaggcaccgcctcagagtgcacgagcatagccggctcctagggcggaggaggagagttctggcgcgccccggatctccagagtaggctgaccaagcaaggcgagtatatcaagatatggcggaggcagtggtcttgctgctcaagcagaggcagctatctctggttcaaggaatggagccgcacgcgcgcttccgagccccgatgtgtcatccctgaggcctcctgcctcaccgaaaagggcgcagaagacgtcctcaaccgaccctaagcctgagagctctgcacgccgagcgagatcat

SEQ ID NO: 5440 - DNA, 374 bp, Zea mays
  Clone ID: MRT4577_104956C.1
atggtaacgcggcagctgagagatcttccatgctcaatgttgacccgaacgtgctctggtaattggtagttttaatgctggaggtcatggttaaaattggcagagaaacaagtagtggctgatattttagcaaaaaatagacacgttttgattcttagtttttgttctcttgtgagtcttgagcacattcctgaaattgtactattcaggtggctctcaaaagctttcaatggagtgttttttagcctatctaaataatttgcatttaaggtttaaatgaaagttacccttaaaaacttgcaagttttctatgtacatgtaacggataaaagtggatatccgaactgtttgaataaatttaatattttaatatt

SEQ ID NO: 5441 - DNA, 406 bp, Zea mays
  Clone ID: MRT4577_104957C.1
ccaccaaaaaataaaattttttttataaacccgggttccctaatctaagggggggacggggcagcccattccttcctagacctaaaagtcaggggtccaatttttttaaacaggggcccaagggcttttaatttggaaaatcaagcggaatccatctttttagggtccatgaccccccacaaggctaaaacccagagtccacagcagaccccgaagaatccaccgccacaagaggcgactgcaaagcttttgctgtcttcacccccaacaagaaggcggcattcccccatagaggggtcagggtaagttttcatcccaggcccaccaaaatcacaacttttggggccctgcttctgctgctgaaagaacctgtggaaagcatatgaaacattgcctttctccccga

SEQ ID NO: 5442 - DNA, 366 bp, Zea mays
  unsure (1)..(366): unsure at all n locations
  Clone ID: MRT4577_104958C.1
ccgggccggaaggaataagccggctcgacgagcagcatctanaggcggccgccgccgagcacggaaagggggaaatttagagaagagggaccccacacacacccaaccgagaacgagcccaaaggggaaccatacccacgaggagctggaagaggccaaaggagacgaggaagaggaacggacccgaaaggacggtgcccgcgcggagggagggcacagtggagcgaaaagcgggcaggacgaaaagagcccggaatcaaaacccgccagagccggcggacgacaatgcccagactgcaacgcatgcagatacaccgaccccaacctacacgccgaccgccaacacaaccagacccggaaacacaa

SEQ ID NO: 5443 - DNA, 841 bp, Zea mays
  Clone ID: MRT4577_104959C.1
cttggtttgctcgttttcggccgggagaggctgtggcatccgttttgtcaggctagctagctagcttcttgcctaaagaacaccttattttgttcaaaggaggcatcagagagtacgtataggacactgaggaatgggtcactggaagagccgtcaccgcagcggaagggacgaggcagctcgagcgaaggaaacccggtgcttggctctggcctgctgcccctgctactacgtgctcggctccgtcgccaggggggttgcgaggtgcctcttcgtggcttgctatccagtgatacaatgctgtggcctcgacgagtgcaggcaccaccaccactccagcaacttcagccacttcagatgatgcatgcatatacatccatcaagctagtaggagtgcatcttctacttgatcagcagttcatccatttgccctctctttcagcgaagaaagtagggtttgttagaagtttaactaaatcgtgcaagattctgaagaaattttcttcacgtctttttacaagttctcggtgttcttggtctccttctgttttggtttactagttgtccacttcttcgctggaggagacagacctgcctgcatcaagactatgactaacgcaataagatagatgagtaaagctgaagaaaactgcctgctaaatggctattggtctcctggaagttattcatagagtggttggttggtgacttattcatagagtggttggttggtgacaacgctttccgattgtttcttccctacaataatgtgcctctcaggggaaaaaacatactcctaataatttcttacagctggttctgggtcccctttctttagccc

SEQ ID NO: 5444 - DNA, 321 bp, Zea mays
  Clone ID: MRT4577_10495C.1
gtaagtggttcgtaggtttcggttggtatcttaactcgatttgggatcctttttcttttgggtttcgatttcatccattttgcagcccagccggctgtgcttttcggtggcgggattcgacgaatagggtttcagctttttattcttcgatcatgatgatgttttagtgcactttgggaattcttcttgcctttgcaggctagggtttgaggaaggggctcttactattggcttcaaatggatttctttcctgctatgtttttctttgttatatagttccttttctctgattctgctcgatctgtcattatctgcagtcaa

SEQ ID NO: 5445 - DNA, 307 bp, Zea mays
  Clone ID: MRT4577_104960C.1
aatttcacgaatagccacttatgctgcacattaataatataccccgccagagggacccggttgggctaagcaagggaacggccccggaccttctcagcattttaccatgcacgggaacggatttgaaacttacacgcgcctctgccaggcctatttccggatgggacaccctaggtgatacggaaccagcggtacggatggaaggcattcatgaaaagtgggggcgctgattgctaagagggcgatctccaataatgacactgggggctcgtaggccacggaccaataggttagactctgtagccca

SEQ ID NO: 5446 - DNA, 614 bp, Zea mays
  unsure (1)..(614): unsure at all n locations
  Clone ID: MRT4577_104961C.1
acactcggcacgaggcgccggacggggcggacggcggcggcgctcccggtcgcctcaaggaaagcggtgcagacgcctcaaggggaccccctggccgaccgcctcggagggccgacgaccctacgcccacgcctcttgcgacctgcggaaactggcccccgacactaagcccgtcgagaaggcctcactcttccccaggactacctttttcactgaaatgtcagaaagacaagccgggactaggaaataaaggaagacctaaaagtttaactcaccgaaaacaaagagccttcgacccttcttccagaaaattatacaatacccgaaggactatanagggcttgttttcaagaattcgaaatgtgggcgaagaacccttacagngccccggtttcaaaagtgccccttggtaaaagatatggaaccncaagaagntttgccanagccttcccacttaaaacttcaattcaagcctttgngaattgtcanagaaccaaagtgaccacttacagaaaatatttttcttgctactaattcannatgttgccccagaacttgaatgcttaagaaacacccactttcttcaaccttttaatcttaaagtgcagcatggt

SEQ ID NO: 5447 - DNA, 308 bp, Zea mays
  Clone ID: MRT4577_104962C.1
aaacaacagcaacagggattttcgaccgaaaactttatgctaagggattaaacaccgggacttcccaaaaacggggggttaaatgggtttttggaccctttgggacaaaaaaacatttatactcaattaaaggccccggcacttgtatttttggcccggggttttcctaaaagaaaaaaagggggatccccccgccgcacttggaaaagaaaaccgccccccttttggtggagagaaatcttggcacctaagctgggggcaattcccgggggcttgctccttattgggaggaaaccccggggctggcc

SEQ ID NO: 5448 - DNA, 307 bp, Zea mays
  unsure (1)..(307): unsure at all n locations
  Clone ID: MRT4577_104963C.1
cgaccagcaactgatcgctcacttttgcctctcgatcaatctttagctgcgctaggggtagccatagatcgtaggtagccactctgtccagtaatcattactcttcttatcgcaacccatggccactgccgaggtgcagaccccgaaccgttttgggacctatgaaacgccggcgggggagaccccacatactgccgccgtcgtgcccgaggaggctgctcccgaccccaaggccaaggcggaggagccagctgccccggcaagaaccgagccaattgtctactgtgcacccaagatgncccccgtg

SEQ ID NO: 5449 - DNA, 540 bp, Zea mays
  Clone ID: MRT4577_104964C.1
caccgtatagaaccggcattcccgccgcacactatatatttcctttattcgcgtactaagcaggtccccagtcggtgggaaaatatattaccagaccctcgctgcacacgaaaatcggatgtggcccaagacatgcataagaatgctacacacaatagcccttactgttaatcggggtccaccgatacctaattgatcaccagaaaaaaccctgctagcatcatttcaaaaccgagaacaggaaacttttaaacacaggcgtgcaaagcacgtttgaaaaggaccgctctttgccgccacacctatcacgaaaaggccttaacaagtggctaaggtctcataaaggaaagaccctcacttccagagcttgtgcaaggacaatatactcacacgatgtttcttgattacctaggccaacgacattagacaattcctcctgggaaacatgcaccctcctttcacggagagcaaacatctcaatctatgtacataccatcttgaattcaacacccagggccccattgatcttttgtgcgaacc

SEQ ID NO: 5450 - DNA, 231 bp, Zea mays
  Clone ID: MRT4577_104965C.1
taaaaaaaaaaaaaaaaaaaaaaaagaattagattaaaaaaaaaagaaaaaaaaaaaaaatgtaagtttaaaatcagaagaggtacccaccttacatactcttacatccaaacttcataactcttatataccaccacttaaatccaatttacttccccccattttacaacatcttttctttcaaaaccctaccattccccccctaaatcttcttttatcccatcctaattt

SEQ ID NO: 5451 - DNA, 326 bp, Zea mays
  unsure (1)..(326): unsure at all n locations
  Clone ID: MRT4577_104967C.1
caccgccgcaaccgggggggggccggcgccncccgcaacnncaagcaccgcaaccccgacnnccagcngcaggacggcggccgcaagcccaaggncgacgccccggcnggcacccgccgaaccanggccgccanccgcaccgccancncccacggccagaaccncancgcaggcgggggcaagggnnnccgcgacaagaagcggnncgncaacgcccaccggcccagcaacgccnccancaccaacgccaacgccgccanggagaccagaaacccccccggggagaagaaggncacgaaggccgacacgcccgaaggggggaccac

SEQ ID NO: 5452 - DNA, 264 bp, Zea mays
  Clone ID: MRT4577_104968C.1
gtctgtctgcctttggagccaatgcaaccgctccgaacccagaccgacgagtggcgctttcagagtcggctcacgcaggcaggaggaccagcccggagatccgacggtgaacggatcgcgtgcggacactacaaacatccgtggccggtatgtcaacgtctgtccgcccacctcgctccgcccactctcaccattagcgcagtctacacgatcatcacctggttattgtgaaccatgcctcagacttaactagctacataccac

SEQ ID NO: 5453 - DNA, 254 bp, Zea mays
  Clone ID: MRT4577_104969C.1
cgcaccctttcatcagcctgcctgtccactgtcggcttggcgacttcctccgctccgctcccctccgctcccgaacggtcgatctttgcatggcagcagagctggctccaaggggcggggatcgtggaagttcgtcagcggtcctcgcggaagccgctcgcgagaggcgtgacgctcggcgtacgacagactggagacagtggcgcgtcggcgacgtgatgcaggcggaccgaaatatgagccaccaaacggtg

SEQ ID NO: 5454 - DNA, 1782 bp, Zea mays
  Clone ID: MRT4577_10496C.1
tcgaggcgggccgggccgggcgtccgcccagcacccgcacctcgtcagtcgtcaccgagaagcagaagcagcagctgctgcctgctggtcgttcgttcgcctcgttctctccgcctccccccccacccccgcctcgcttcctcctccgcgcttccttcgccgaggcgtaagcgtcagcgagggcgtataaatcgctcccctccgcacattcgccaccgcctctccgctcctcgacaagaccaatggcggctgctgcgtcctctgctctgcacgccgttggcgccgtcgcctccgccaagcctagatccgtcgtccccgcggtggcgacgaggaggagcgtgcgcgtggcgcccgcggccaagcgaggaccaggctcgggaggaggcaggctcgtggctcgcagcgccgttgcagccaaggcggatgaggcggccgcggcggcgggatccaagtcaggcggccatgagttgctgatgtttgaggcccttcgtgaagccttgatagaagagatgaatttggatccaacagtgtgcgtcatgggtgaagatgttggtcattatggaggttcatacaaggtgaccaaagggttggctgagatgttcggagatctccgggtccttgatacccctatcgccgagaactccttcactggcatgggagttggagcagcaatgaaggggctgaggcctgttgtggaaggcatgaacatgggcttccttctccttgcctacaaccagatctcgaacaactgcggcatgcttcattacacctcaggcggccagttcaagatcccggtcgtgatccgaggccccggcggtgtcggtcgccagctcggtgccgagcactcgcagcggctagagtcgtacttccagtcgattcctggccttcagatggttgcctgctccactccttacaacgcaaagggcctgatgaaggcggccataaggagcgagaaccccgtggtgctgtttgagcacgtcctcttgtacaacctgaaggagaaaatccccgacgaggagtacatctgctgcctggaggaggcggagatggtgcggccaggtgagcacgtgaccatcctcacgtactcccgcatgaggtaccacgtgatgcaggctgccaagacgctggtgaacaaggggtacgaccccgaggtcatcgacatcaggtcgctgaagccgttcgacctgcacacgatcgggaactcgatcaagaagacccaccgcgtgctgatcgtggaggagtgcatgcggacgggcggcatcggcgccagcctgcggtcggccatcatcgacaacttctgggactacctggacgcccccatcatgtgcctgtcgtcgcaggacgtgccgaccccgtacgccgcgacgctggaggacgccaccgtggtgcagcccgcgcagatcgtggccgccgtcgagcagatctgccaatgatcagtgatatcatggctttgttgagtacctgatctgtggagtcagattaccgtggttttgtttctctgtcgcatcgcgactgtcaccgtgccttagacaagacatgtttttgtattttgcaacgcagaagccatactcgtactggatgccgtttgtgggtggcctatttgttcattgtgcaaagttggatgccatactcgtacactattattatcaggtttcagcattcttttgtaaaaaaaaaaaaaaaaagcagcgccgtgttgcgctgtcggcatgaaaaaaaaaaaaaaaaaaaaaaaaaaaaaaaaaaaaaaaaaaaaaaaaaaaagggcggccggacgcgtgg

SEQ ID NO: 5455 - DNA, 273 bp, Zea mays
  Clone ID: MRT4577_104970C.1
tctagactaagtccgagtatctacgcccggccaagctgccgctgcaggggcgtcggttcgctatccccaaaaccgcgggacgtatcagtgtcaggggtcccccgggcccaaccgcagcagaaccacaaggtaaaggaggagaaggccaaggcggcaaccttcccccggccgcaggccccggaaaaggagccaaggaaggggaacccccattccctgcgccggaaccctttggcgagaaccagaaacttgacccgcaattacggcggccattgc

SEQ ID NO: 5456 - DNA, 427 bp, Zea mays
  Clone ID: MRT4577_104971C.1
gcttcggacaaagaaagcacggcctggattagcttcagagctacagatatttacatcacgtccatagcaaggcttcagcctcacccattgcatcagatgcttaacacattgacgcatgcaacactttaccctgctttatttacgtgaccgaactacacacactgtctcgagcccacaacattctttcagcacgaacacatattccatctttggcacactaggcatgctcaatgatggttgtttatgcttttgcatctttttttacaccaccattagactaccatcatcctcataatcaaacccgaccttaaggacattacattgataattggggacaggcatactttattatgaattaacacgactactgccactaatctctcatgctagcaacatttcacccttactgagcactatgctgacagat

SEQ ID NO: 5457 - DNA, 168 bp, Zea mays
  Clone ID: MRT4577_104972C.1
cgcgagagcaactaatgcgttcattattccacacagctcactagctccgagtgccattattccaccgctcctgcgtatacatgctttcatgcgcttgcaagagacatctgagcaagcctatagggtacgacaagctcttgcagtgagcgtcttatatacaaccaattg

SEQ ID NO: 5458 - DNA, 239 bp, Zea mays
  Clone ID: MRT4577_104973C.1
cagcaagatataaagcacaggagtgtaccaacaatggtatccaatttatattgcctccttatgctcctgggaatgtgagaaagttcagagaccgagaccattgacaaggattctgtgcatgatgctactgctgtccttagctcatatgaaatgtcaagatcaacaacacaggctcaggcacctgcagtgcttgcaagagcttcaggatagcctgctagactcgtaccgacagaatctaa

SEQ ID NO: 5459 - DNA, 896 bp, Zea mays
  Clone ID: MRT4577_104974C.1
cattgggccctcgagtccgcaatgccgggttcccacctttcggcttgtttacgctacgcctttttaatcccttccgccctctccgctccccggggcccccacccagaccaaacccaggcttcccgttccctcgcttttgtccggcggccatggcggaggagcagcagcatcagagatggcaggagggccaccgcctgtgcgccaacaattgcggcttcttcggcagccccgcgacgctggacctctgctccaagtgctaccgcgacctataccagcagcagccagcaggcgcggcggcgggcccctccgctcccaccgcgtcggccttccagcattcctcctcggcagtctccggcgcggcggcggtctctcccgatctcgaacctcccgcgacggcccctgctggcgccaaggcgggcaggtgctccagctgccggaagcgcgtgggcctgacggggttcgcgtgccgctgcggagctaccttctgcggcgtgcaccgctacccggagcggcacgcgtgcgccttcgatttccgggccgccggccgcgacgccatcgcgcgcgccaaccccgtcgtcaagggcgataagctcaaggacaagatctgaggagcaggaaccgccgcctctcgcttcagagttcatgtcttccccccgtcagcggaactccggaagagcaaggacgaccgacggccagaagggacggatcgtcggattgtacgaattactcccgtgtactctacgattggtataaaacccaagcccgtcggttcgattgtgtaaagctggcggtgaaatcgctggccgtttactgaatgaaaaaaaattcaaatagaaaaatatttacttttcaaaaaaaaaaaaaaaaaagcggccctaaaaaaaaaaaaaaaacac

SEQ ID NO: 5460 - DNA, 492 bp, Zea mays
  Clone ID: MRT4577_104975C.1
aacctacctctcacgcacgcaagccttttcccccattctccggcggcggcagctatggcggcggtggcggcaaggtccgggctccgacggatgttctccatcgccgacttcgcgacgccgaacacgcgcatgttctccatctcggccttcgcgccgccgagcccgcccacgcctcccccgaaggccgacccctcccccaacctcttcgtctccgggctaagcaagcgtacaacaactgatggacttagagaagcttttgcaaagtttggggaagttgaacacgctcgagttgtcacagatcgtgtcactggtttttctaaggggtttggctttgtaaggtatgtttcggttgaagatgcaactaaaggaatagaaggaatggatggaaaatttctggatggatgggctatttttgccgaatatgctagacccagaccaccgccgcagatgggaggggcaactccgcagccacaacaatcatggggcactcct

SEQ ID NO: 5461 - DNA, 437 bp, Zea mays
  Clone ID: MRT4577_104976C.1
aagaagcagctgtacgtaactacttaatagatccatatatacaataacaagtcgcacacctgtggatgatttacttacaaaattcaaaggaaacatcgtttacaaggaaccaaattagtacaatacggccgtttatctgagatacctaaggcccagtgggttattcatgcgcagctatctaaaggagagggtataaggtcccaagatggtggacgctggcgttgtacaagtaaaaccgatgtaggggtaatctggacatgtcctgggtcttggttaaaaattcgtctagaccattgcacagtcaggaatgtgtcctctgaactaaacaccattgattacctactctggctagaggcctacaaaacaactggttatatgggctttggaactggtaaatgaccgattgttatttaatgcttcccgtttgggtttgaacc

SEQ ID NO: 5462 - DNA, 295 bp, Zea mays
  Clone ID: MRT4577_104977C.1
ctttaacctacgctacgactccgcaaatgcttaactcatttttcgggtggcgcacgcactatccatcatgaccgaacttttagtcttaaaaacttatgatcagactattaattttccaaatctaagttcactgtatgtccaaagtcctaaagactacgtctgtcgagaagactttccacaataacgcttagacaccacatcatagacaactactgtgccctcgccattatgaatcctgtactcatgctgctcttccgatggcaagctcaaccttcattgttccgtgcctttgttc

SEQ ID NO: 5463 - DNA, 679 bp, Zea mays
  unsure (1)..(679): unsure at all n locations
  Clone ID: MRT4577_104978C.1
cgggatgggaagaggaggacagcccctggaacaccgacacgggcctgtggtggtggtgcgggtcccgccacttgagcggtgaagacgagtgcgagtgcgagtaggagtacccgccnccgccggcggcggcgctcaggtcgtcggatctatcgtgccacagcgcgccgaggtcgtcatgagccggggtgcggggtggtgcggccgcagctgccggcgaggagaagaggcaagacaggccgccgccgccgccgccgccgccggagggcaagcggtgcgaggcagcgggcggcaggagcgcagcggtggtgcacggcgacgagccgcgggaggtcgggtcgaactccgaagagtagaccgcgccaggcggactggtgtacagggaaatcgcgggcaacgacatcgccggaatcggggatgcctctgacgcgctcgaactgaaactgaattccgcggcgaaaccagacgggattgacgtcgaaggcagcacagaatccgatgcccagatttgatctcagtaggtggagtcgacgaattaatcggacaaaaaaaatgtgtagtaattaggcggtggaaacagctgaaatcaaatctgcagattacacgaattcaatgccgaaagtgagctcggtgcgatcaagcaggaggaatttggtggggagggcgagcctcgtgccgaatt

SEQ ID NO: 5464 - DNA, 222 bp, Zea mays
  Clone ID: MRT4577_104979C.1
tggaaatgttgcgttgttcaatatatcggtctccaatcttttaaaaaaaagaatacactatgggataataaaaaaaacgggggggcccccctttagggactccgtcacccggggattaattccctaccgggcccctgaggtcaaccaactttcccctatggggggccgttttaaacctgggggaaaccagggcaaaagctgttccctggggaaaattttttc

SEQ ID NO: 5465 - DNA, 137 bp, Zea mays
  Clone ID: MRT4577_10497C.1
ctgcagttccggtccggactcccggtcgaccagcgtccgttgtgctacctatgttaccaaagaaaagtgataaggtttttagtaaaattgtgctgcccagctagcaagtgatttcccaaatacttctgaaagaagtc

SEQ ID NO: 5466 - DNA, 401 bp, Zea mays
  unsure (1)..(401): unsure at all n locations
  Clone ID: MRT4577_104980C.1
cacgcagccgcatcccgtcgtgtggggcgtacaagtatgtcttcggagttatgcgaggaggaagcaatccgacgtgatgcggttcgtgcagcgcgtgcgctgtttttttttttttttttttccggccatcgnccgtttttggggcggggccgaccagacaaggcccgccgcctcggttacatgggggggggggggtattttgtttaccgagaacgtgtcaagcgtggcggcttgaataggcctgtgccgaagggtttngtctatggcatgtccaatcaccatggnatcacccatttcatgttccattagaacaatatgnctgnngtctgaggatagggctgtttctaaagcttggtggactcatggttctcaacccctactgtttgatttaggatagcacc

SEQ ID NO: 5467 - DNA, 270 bp, Zea mays
  Clone ID: MRT4577_104981C.1
cgagccccacataaagatttctggatcaaaatttcaaggggaacaggccatatatcaaacaaacctttaacataaaatttttggggggaagaagttttgtttgctaataataactaaaaattttttttgggagcccaccgggggcccaaaaaaaaagattggcgatgacattgctgaacttcacggtcttacacgtgcggaatggtgaccttaaccttaaaaccggggttaattggggtgggggggatctgcttcaccccatttgggggg

SEQ ID NO: 5468 - DNA, 1128 bp, Zea mays
  Clone ID: MRT4577_104982C.1
cccacgcatccagcacaaataatgcttggttgtggacagactcaaacagggtcatttctggatgctgctgctcctaatggtctttttggacttggaatagatgaggtttcagttccaagtattttagctcagaaaggtttgacatctaattccttctcgatgtgctttggtcgtgatggtattgggcgaatcagctttggagaccaagagagctcagaccaagaagagacacctcttgacatcaaccgacaacatcccacatacgccatcactataagcgggattactgatggaaataaaccaacagacatggacttcattactatttttgacactggtacttctttcacatacttggcagacccagcgtatacttatataacccagagttttcatgcgcaagttcaagcaaatcgccatgctgcagatccgcgcattgcttttgaatattgttatgatttgagctctagtgaagcaagatttccaattcctgatataatcctaagaacagttactggaagtatgtttcctgttattgatccagggcaagtaatctccattcaggaacatgagtatgtttattgcctggcaatcgtcaagagcatgaagctcaacattattggacaaaatttcatgactggtcttcgtgttgtgttcgatcgggaaaggaaaattcttggatggaagaaatttaattgtttctcaccttcaacatctgagaactactctccgcaggaagcaaggaacccagctggtgtttcccagttgagaccactgaacaattcagcaccagcagcgttatatgatagcttgctcctgatgcttatcttggtccacctggctgtaaattagtttggttcttaaaatagatactgtagagcttgactagaggtacaccatagagaacaatattgtttagtggttacacgtcctgtaatagagatacttgtgatgccgattttttatggctcattgtacaaccattcccccgtcttgttttcactcaaaagggtatctcagattttatctgtaaccagaatctgtttctgcgaacttgtcgtgtgcaagatgcatcatataaaattgctacacatagaagtttttatataaaaaaaaaaaaaaaaaaaa

SEQ ID NO: 5469 - DNA, 295 bp, Zea mays
  Clone ID: MRT4577_104983C.1
gcaaatggccccaagaaatccatctagaggccgccgccaggggaattaatggcgtcgtcgtctagcagcagccaccgccgcctcatcctcgcagccgccgtcctgctctccgtgctcgcggctgccagcgccagcgccgtgacctcctgcgtgccggggagggccattccgcacaacccgttcccgagctgtcgctggtacgtgaccagccggacctgcggctttgggccgtgccttccgtggtcggagctgtagaggcgatgctgccgggagctggcagccattccagcgttct

SEQ ID NO: 5470 - DNA, 356 bp, Zea mays
  Clone ID: MRT4577_104984C.1
ccggggaaggcataccccacgttagccgcaaggaagttccccgacggttttttccaaaacaaacaaaaaaagggggcggggaaaattacaaaacagttctgggccatggatggggaaacccccgccggggcttaactggggggacggacggaaaaatttccccggctgggggccccccttcgacttccgggggttttttcggctttggggggggaacctcttttgggtctcgggttccccttccccctgggggacaaaaaaccctgttatttggccaaaggattttttggggccgggaggcacgtcgccaaaaaaacccctcaccttggaaaccacgggttggagcccccccctct

SEQ ID NO: 5471 - DNA, 644 bp, Zea mays
  unsure (1)..(644): unsure at all n locations
  Clone ID: MRT4577_104985C.1
ccccgtgtccgcccacgcgtccgcccacgcgtccgcggccttcgagatctcatcggtgttcgtctcagcccagaaggggctacggcgcggagtcggcgagttccgagtggaacctgggttcgattcggtgatcggcggcggaatgggggtgccggaggcggtggcgctggagatacctgcggtggaggaggggtcgccgacgccactggccagggtgccaccaaggatcaggcggaggctcctccaggcgggcagcggagaaaacggcggcaaggcgccgacggctgaggagatcgagaccaagctacgccaggcgcatctccggaggcagcaattccatgaagcattgtcctccaaagcaaggcgctcaattaagagcccttcagggtcattgcaggaggaggatcgagggcagcttcttgaggcaaagctcctggctgccaggcagaagaggttgaccctcttggaaaaggaacagagccggttggctaagctggacaaactgcgacaggctgttaagagtgatgcagagatgaggttcgagagggaaagggaagaactcggaatgaaagttgaatcacgggttcaaaaggctgagaacaatcgtatgcaactaatgncatgatcgtttgaagaggcaggct

SEQ ID NO: 5472 - DNA, 411 bp, Zea mays
  Clone ID: MRT4577_104986C.1
gtctctcaccaagagactcgagagcctgggaaacactgacttcccgtcgtggtcggttggaccctggttcacgctacaccagaaggccttgggtgcaaccctgggtactgcacactgggtcacgcctgaggtgggggcgctgaatggggaaacacgaggaatagccggggctacatactaggcggggcctcataagggtactattgggcaatctactattgggcctgcacacaggaggatcgggatactagaggtgctcatggactcccaacagatagtgcaacttgacactaacgtcaccaggggcatgtctgtctgaattctggtgagtggatcctacaacaacgtacagaccaatctgacgagcgcgtgaaccaccaactggtagggctttcatagggctggggggtg

SEQ ID NO: 5473 - DNA, 1283 bp, Zea mays
  Clone ID: MRT4577_104987C.1
ctcctgagtcctgatctccgatcgctcgccacctcacgaccggactcccctgctccagctctcacctatcctcgaagcagcaatggctgaagccgtggagagcggcgggcgggcgctcctggtctcggagttgggccgcgtgcaggacctggtgagccagctcgagctgcagctgcgcgcgcccgcggacgcggactccgtcgacctctgccgctgcctcgtgcaacagatcgtcgcgctcaccgaccgctccatcggcatgctccactcgtcaccggacctcgccccctcgccgctgaccgccacggggagcccgataagcagtgacgccgcctccgaccaccaccccttccgccccgccggcgccagccccaagaagcgcaaggccacggcgcgctggaccagccagcaggtgcgcgtcagcgccgacgacggccacagctggcgcaagtacggccagaaggacatcctcggcgccaggcacccgcgggcctactaccgctgcacgcaccgcaactcgcagaactgcctggccaccaagcaggtgcagcgcgccgacgaccaccccgcgctcttcgacgtcgtctaccacggcgagcacacctgcaggcccgccgccgccggcggcgggtccaagagggcgcagcagcacaacccgcacgcgcaggccgcgctgcagggcctcgccgcgcggctcacggtggccaccaccaccacggacaacgccgccgggctcccgccgatgacgcccgagagctgccccgtgcggggcgcctcgtccccgtggtccctcgcgtcgcccgtcggctccgacttcaacggctgcctgcaccagggcatctcgccttgcccggtgcccgggtacagggactggacctcggacgtggacctccaggaggtggtgtcatcggcgttcgccgccgtctcgtcggttgcgccccttccggtgcctgacgacgaattcatgcctctcgaatgcgtcgaatacgtattcgaccagaacttcgacattgacaccgcaatgccaagcctctactatccatgagaagagcaactgatcggcagcactgtccacttctccaagacaggagggaggagcagagctgcagcagaggagcctattcctgagaactgtgcagtagcagaagccagcaaagcttttaggatacattttaatgtctcattatcttttctttctttctttctttccctttcatgggttgggttttgttgatttcactcagcaagagaaaagttaatttttactaaaaaaaaaaaaaaaa

SEQ ID NO: 5474 - DNA, 195 bp, Zea mays
  Clone ID: MRT4577_104988C.1
ggtttggcaagaaacgtctgtccttgacatgcatacatataggtctggactgtatgatggacattctacaccagaagcttcgctacattgaccatactatgcactgaggcgcgaggccaatattatacaggttacggataatgctagagctagaacgcacagcccggacactatctggaacactagttacgccga

SEQ ID NO: 5475 - DNA, 251 bp, Zea mays
  Clone ID: MRT4577_104989C.1
tgcggttatgttgctgtgccgcgcgggttttttttagaatgggggttatttacaaaccaagcggggagcccgagatgttctttcggaccatgtcaaccaccaactacaatgaattagccacgcggtggaacttacgagcctcgattaaggggaacaatacataaccttcaaggtggactcacacttgataggtccgaaagggacgggataaaccttgttcatcgtagctaaaatataggtctagccgacta

SEQ ID NO: 5476 - DNA, 251 bp, Zea mays
  Clone ID: MRT4577_10498C.1
ggacgagcatcagtctatcgctacttacgtctagggactaatactcggaaggtgagcgcccatatcactccagggagcaccaagccggtccagctcatctttcaccccaccgacctccgtgattagtcactcagcagcgccgtaacggccgtatatctggccacaagatggtacagcatgctgatcttaggtatgaatccgactcgcgtcggaggcacaatccagctcatagaccaattaatgcgcacatt

SEQ ID NO: 5477 - DNA, 322 bp, Zea mays
  Clone ID: MRT4577_104990C.1
cgggggccaatacttgagtcaaaaacaaaaacccacacacaccgaaccattacaaaagttacaggcctgcccccccaaacccatagagccaaaatgcatggaaagggcaattcagagaaccgaacaccaaaaagaaaagaacgggtccaagaaaaggtaggattataagacaaaattcgtgccgttgttctgtggagaaaaagtcaaagggggcaaaaccagggctggggagaaccctagaccgccccaaagccccacccaggggcggcaaggcccaaaaacgcaaaccggacagaaccagtcccggctatgtccaccgaac

SEQ ID NO: 5478 - DNA, 422 bp, Zea mays
  unsure (1)..(422): unsure at all n locations
  Clone ID: MRT4577_104991C.1
gacacttccaagtgaagcgtctgccgaactttctcttgtcctcaccagtgctgggtctcgcgggttattctattgtccataacacaaaactgcttcaccggcgttaccagagatctagcgcccacaagcagattatcactgctctagagaaaaggccgagtgcgtcgtanattttattaggtgtttgtnactgtnattgtagtatttcnctgttgctttcgtaccaataaagcacaagggaactctaaggctaatcagataaaaccagttgctacctagatagctgctgctgacataccatgacagttccacgccagctaaccaaatcattttacaggatcaggactcttgctgcatactactactaccaatctgtctgcatctagcctttatggcatgcacagccttggtcgtgatgcacg

SEQ ID NO: 5479 - DNA, 400 bp, Zea mays
  Clone ID: MRT4577_104992C.1
cggacgcgtgggctgttatacattctgataatagcactgaggtgccatcaagccactcgcgcggagtgtcattatacgactgcgcggagtgtatgaaaaggatgtctaaagggtcgctcatcaaaacactgattgtgtacgcttacgacgctcaagcacatgagatcacatgaacactgatacgaccttctacatagacgctcactacgaactatatgctcaatatgtaactactgtgcataattcaacgacacttgtacattaaagagtgacaatcacacactgatactctcgcctctattgctgcagtctggcaggaacataagggacttcctaactaatatcaggtctcgcattaaatcactctggggacgtcgacatctgcctgatatgcttcaca

SEQ ID NO: 5480 - DNA, 807 bp, Zea mays
  Clone ID: MRT4577_104993C.1
caatccccatccgcccgtctctctcctacgctctccccgctcctcccctgcagcagccgcagcggcgagctactcccgagccagggagagacaggcggcggcagcttccccttcccccctcccctcccccgccctcgccgagcaacgagggtttcctcttccgtcagcaatggagaacatgagatccgagaaccaccggggcgcggccatggagggcgtgaagctggcgtcggaggcggcggccaacaccaaccgcagggccctgagggacatcaagaacatcctcggcgcccctcaccagccccaggccgtcagcaagaggggcctgcaagaaaaacccgccgccgccggtgccaagagccaagctggcgccgtcggccaccggccggtcaccaggaaattcgccgccatcctgcagcaaacgcagcctgcaaacgccccgctggcaccaattggcagtgagaggcagaagagaaatgctgacactgccttccatgctccttcagacatggagtgcagcaaggcttcagatgatgaccttgatgagatgatgaccaatgagctcaaagaaatcgacatggaggacaccgaagaggaggaaatgcctgacatcgacagctgcgacgtcggcaactcccttgcggttgttgaatatgtggatgaaatttacagcttctacagaaggaccgaggagttgagctgtgtgtcccccacctacatggcacaccaatctgacatcaatgagaaaatgcgcggcattctggttgactggctgattgaggtgcactataagctggagctactggg

SEQ ID NO: 5481 - DNA, 1037 bp, Zea mays
  Clone ID: MRT4577_104994C.1
gataaaaaaagaacatgtatgtccatgtcctccggcctttcaacgggaatgaaacatacagatcacaaggtagcacattgttttcgaacaacatacattgtcaatgccacaattaaacatttcaaagggtcagacaggtaggcccaagtcctacccagctacctcatgcctcaatgaacacaagagacagctgcactcaacggtatggcctcaaaggggtggtcctgtctgtcaaaagcgtgtccccaaaactaaatcacagccacattgtcaatgcacatccacctagcgcctccagctaatgctccggccacttggtgtccccgatcacaatacatgacattaactcgttgcatttctgtcaaaggtctcctgttaccggaaacctagttgctagtggcaacggggacttggaacttttgtcgagaaaatccagaccaaaatttgaatttgagaatgttagctaaccatccattcttttttaaaaatgaaaccattaacctgcaaaagttccagaaagcttgcaaagatgcaaaattaaaaaggcatccaagtgagcttgtaccctttctaacacggggggccgggcggtcaaatcggcaaccattatctaaattttgtcagctgatcgtgtagtgaacacgaggacatgcaatctttggaatctcgggagggcttgagtgggggtgcaggctacaccaggtgctcctacaccgcagatcaatgcgccacatggtgccggtcgctggcgatcacggtatgatctgtttcaagtcatgcagcaaactgaaacaaccgtccttcaggatccatggctgcccacaggattctgacttctgcaatcctgtgcagttcaccattatgctgctggcatggcatctggttgcagtggtgacggttgaagcagcagctcactgcgcgttcagtctccccgacgccgcagtgagttcattgttggcatggccaagcagaaaaaagcatagttttaataggtaacctgattccatcgactaagagcagaggttatggttctttgc

SEQ ID NO: 5482 - DNA, 502 bp, Zea mays
  Clone ID: MRT4577_104995C.1
cacccgtccgcccacgcgtccgccgagagcaggaagaagaccgggattacagttgccgactggtcgccgtcttattcggacaggaggatgtcgagcgtgaccgcggaagggccgcctccgccgcttcctcctccagccgtcgcaggcgagcagtgcagctcgtcaggcggctctggattgccacagcgggtagggggagggggaggcaggctgaagcagagcctcaaggagaagctgatggaggcgaggatggacgatcagaagcccctcccctccgtgtgcaaaaaccttgatgacgagcaacactaccaaaattcatcagatcacaaattctgaatatatggtattgatacatccatgtactactccctgtattatattatattatattgcattatattgcactcctacataacatactagtcttgatgtccaatgtacattgttcacatcagatatacagatcatgacgctaacagtgacagaggcctctaactcattt

SEQ ID NO: 5483 - DNA, 551 bp, Zea mays
  Clone ID: MRT4577_104996C.1
ggtaaagggggtaaaggcctctgtcactgttagcgtcatgatctgtatatctgatgtgaacaatgtacattggacatcaagactagtatgttatgtaggagtgcaatataatacaatataatataatataatacagggagtagtacatggatgttatggtggtatttatatatgcctattaatctatcaataccatatattcagaatttgtgatctgatgaattttggtagtgttgctcgtcatcaaggtttttgcacacggaggggaggggcttctgatcgtccatcctcgcctccatcagcttttccttgaggctctgcttcagcctgcctccccctccccctacccgctgtggcaatccagagccgcctgacgagctgcactgctcgcctgcgacggctggaggaggaagcggcggcggcggcccttccgcggtcacgctcgacatcctcctgtccgaataagacggcgaccagtcggcagctgtcctcccggtcttcttcctgctctcggtgatggcggacctccagacctgcgtatagcgcggtgt

SEQ ID NO: 5484 - DNA, 169 bp, Zea mays
  Clone ID: MRT4577_104997C.1
ctgctctgccgcctgttgcacgagagtcgccaccaccaccaccatccagtcagccccttcccttccccagtattagactccagccgcagccatggacaaggcaccgtcgcccacctccaactcgggggcagcggacctcacatctgctaccttgcgctcacagcccgcc

SEQ ID NO: 5485 - DNA, 269 bp, Zea mays
  Clone ID: MRT4577_104998C.1
atacaaaccatgtgtgtatctttttgtaacatcaaagcctacataacttacaaatctatctactgatccatttacccacaaaaattaaaatcaccttaagcaaaagttttttttaaaaaaaaaaaatctgccgattactacaactctaccaaaaacccaacggacacaggaacggctgcattccacggcccccgaaagctcttggtcccaccgctgtccattttccagcttttatttgcgggcggcgcaaccccctttaaatttgggtt

SEQ ID NO: 5486 - DNA, 337 bp, Zea mays
  unsure (1)..(337): unsure at all n locations
  Clone ID: MRT4577_104999C.1
ggcgcctccgacctgcatgtattgcacaccttggngcctacatgtctagcttggcggccacgcacttgggccagggtgcgtggctccacatttgacatcagctcaggggctatggagtctctagagcttgactcttttgggctttctattgtcctttctagcttgctcagcacgtactgatcatttgtcgaacacgtgctgaatatagtctctgatacatcccgggcgcatgaagacaccctctcacgtgttcaaacgttaacacaggacattttgggcactcaaaacattcacgagcctgctgatgacattcaccagtacggtggatttggagtca

SEQ ID NO: 5487 - DNA, 190 bp, Zea mays
  Clone ID: MRT4577_10499C.1
tactattaataatatcccccacaagcatatatccaaaggggggcttttataatatattttccggaaaaaggcgccaacacagaagcacaaaacagaaacacgcaacatggaggttcattgacacaaggggagggggcaccgggggaaggacaacaaacagggacgtaaaacaaaacaagtatcaagcggg

SEQ ID NO: 5488 - DNA, 190 bp, Zea mays
  unsure (1)..(190): unsure at all n locations
  Clone ID: MRT4577_1049C.1
ctnttattatttttaccgaagncagtctgctaccaggggtttttattaatgaagaatgggaccacccccataacgaagaaggctccaaactccatcatccggccaaaagtgagagcttgatgaagcctccaaccgtggattccccctggaacaacgtgggacggcaactcgaccagatcattttacacgt

SEQ ID NO: 5489 - DNA, 308 bp, Zea mays
  Clone ID: MRT4577_104C.1
ctatactcatctcctcactctacctgattcgaaaactcggccactcatgactgcccgtagctgggatatcattgctctcaggtcacacgcacatgcatcttctcttgcagcacactcttcccgtccgcctggccctgctaatctacaaaactcatgcccgccatcatcaatatcgtctattacactcatgacaattacacactctacacctcattcgacattcacaatgactccgacttacaccccaactgtcgactcatttgggaaacaggatttcacagtcctgcacctactcaactgtcctcatt

SEQ ID NO: 5490 - DNA, 442 bp, Zea mays
  Clone ID: MRT4577_105000C.1
aattacaattttttttcttattcaaatttatagaacaaacatcataatgtatgggcacattatagcttaacaccgttataggggtaggacggctagggagaaacaccggttgaggggcaaacaccactagtggcaacgctgctgcaagggcaaacaccgcaaaaggagtggcacaagccgggcatttttgggagggatgggggggccaagccgaacaccaccggacggtgaggagcttgttgaaaaacacacaacccacatggggggggttggtgggacccccagaacatagatggaaccaggtggtgcaccgcctggggaatggattgaaccccaatgtgcctaggatggtgaaagcattggggctgaaatacccggaaaatactagaacgttttaaacgggataggggaaaaggccttggcaaagggcaaacactgttgg

SEQ ID NO: 5491 - DNA, 256 bp, Zea mays
  Clone ID: MRT4577_105001C.1
cggctcgacccactcgttcgcttgcaaacttagcgtcccagcttcgaataccgacccgcactggctcgatcacgggaggggctagttgccaggcgagaggccagtccgcaaacgataagatccgacgtggcctactgccgacatctcgggactgtgccgtgcgagtgcatcactcctggtccggccaaccaatgctccatccatgcatgagccaccaccacgccggtgcggcaacgtgcggcggcgccatactgtc

SEQ ID NO: 5492 - DNA, 390 bp, Zea mays
  Clone ID: MRT4577_105002C.1
ggacaagggaatgcatttattcataactggttcatatattaaaaaaaaccaaatccggggggggggttttttaattaaagaaacgtaagcacaacgggttgaaaaattttggcccaaacccttttttccatttataaaaaaatgaaacaacccacgacgggttgatccatttccaggcttataaaaatcatatttaattcaaaaccactttttaatcgatggacggagcggaacaatggggggcttaaaaagaacctccaaacgtgtcaaaaaagggggtatggagtgggtccttaagggggggggcccaattgttgagtggcccctttccggtggggggggccttcacgggaaaacccagaaaagggaccatggcgaagcccccttttt

SEQ ID NO: 5493 - DNA, 330 bp, Zea mays
  Clone ID: MRT4577_105003C.1
cccaaaccctccagcaaaaccccatagcggagaagatctcaagattttggattcgggcgcgaggtcaccacgggcagatacccgacgggcacggtagcatgcaccagcccacattcaagatcttgtgtaaggtccactaggggtactgtcttaacgagcgacgaccgcaacactgatgcctggacaccataactgggatgacgaggcacatcgctggtttatggacatgcatttacacgacgaggttaatgtcgatgtgggctaacctgtttttataatggacaacaacggtcgtgtgcgtgacatctatgcatttgtttgacataccca

SEQ ID NO: 5494 - DNA, 514 bp, Zea mays
  Clone ID: MRT4577_105004C.1
gaattccgttgctgtcgggtacatggagcatatgaaagagcacttgttaaccattccctagcgatcttttgatacagtgagcgtacagttgcaacccaagcaggatcactgactggaccagaagtcaactcattgtgaacagaaataagaagtaaatccaagcatgaagagttccagaggacctgtgggaacttttccttcagctgcgttaaaagcttaacactcacatcacgaacatgctcgtctctctgggacatgctttttatcagaaagcaagcatgaacagaaagaaccgattctctaacatcagctccttcacctatgtcagatatgcgatcatccagccacgacagcactgtttcaaaagctctatgtgcaactgccgtcaaacactgagttactgctggggtcaaatttggagtgagcagggattcaaatacacaactgaaagcactgtttgatctattcaatgtagatgtagccgagagtatgccaccattgcaactaaaacgta

SEQ ID NO: 5495 - DNA, 803 bp, Zea mays
  unsure (1)..(803): unsure at all n locations
  Clone ID: MRT4577_105005C.1
aacagatgtgaatcacgtttctcagatccgttacatttcattaactgtttcagttgcaaaaacaaaagaaaaaactgatgcgacacagaggaaccgaaccgccgaacaagaaatagaaaaaggaaaccggatcgacaggtggggtagccatatgaaatttggacgaggcagaaacgtacatgacgcttgatgcccctcgtccaatcgtgtgtaggcgtctatctgggcaccttgcaaagggcaaaaacctccatggatcgccggagggcacccgttcgtctaatgatgccgtcccaagaaccagatccaagaaaccaaaacaaaaaaacaaaacaaaaaaccaaaacaaactcggattccgaacgcaaaagagacgaagctacttgggcgaggcgagcttgcgccgaggtgtggccaggtattgtggcttggaactaaaaggaagatggatctccaaacaatcttctcctggcttgggcgtcactctgggctccacgcggcagtcaggacgccatcgaacggcgcctgctgttgactcataatatagagccgggtttgattcagacgaaaaaattcagaaagcatacatctttgcaactacttcataccgaaaagaaaaacacagatggaaatttcaaacgaacaaatccaacagattttcncaccggaccgcgaatttcctcccagattcaaaatgcgaaagagatggagaaaagataagcgaggagaaattctgcgacgacgaggcggcgccggcggcgggcggcgccggcggctggaggtagcgagcacccacgcggccg

SEQ ID NO: 5496 - DNA, 130 bp, Zea mays
  Clone ID: MRT4577_105006C.1
gtctgcgagactacagtctaggaaccggggcccgagactgcgcctgctgcggcaaccagaaacacagcgagcgcggcggacgcacgaccgaggggcgctgaaccgggacaaataaggacaccagcccctg

SEQ ID NO: 5497 - DNA, 160 bp, Zea mays
  Clone ID: MRT4577_105007C.1
gctctttatttcttttctccagacaaggccgtcgccgctcgtgccaccctcccgcagatgtaactacctttgccttcctcatctcaccgcaggcctcatgacgccctcatcaccgatgactggtagaaccgtgccctgatgctggagaacgggaccatgg

SEQ ID NO: 5498 - DNA, 205 bp, Zea mays
  Clone ID: MRT4577_105008C.1
gccaggaccatggccgacgcgtggatcctactgccaaggagtattttctgttttctgcagccaagtctatacgatggatattggtgaaagctaaacacccaatgcataaacttaccatacgatgtacatcattcctacacatttcgtacatttatcgacatctgacaaataaactacaaaccgtacgtgacagcatgtctgcagc

SEQ ID NO: 5499 - DNA, 420 bp, Zea mays
  unsure (1)..(420): unsure at all n locations
  Clone ID: MRT4577_105009C.1
aggaccgagcanaagaaancnacaagaaagnngaagaacncaaancgancaggggaagaaancaagaagccanannagcngcangccnanananngcnngnagacaagaagaacggccnagaacngngaaagaaagagggncagnngcnaanggggccacaaagaaagaaannggcagagcaaaagaannaaaagngaaacaacnggaagnngagaaggggcaancaaaggagangggaaccanncacgcnncagaaaancggagacgnngcngcncaacncnngggaggaacaagcaagcggnnagggcagcccaggaagcagnnaagcacgcggaggagcnnngaanaaggaggagcccaancccaanagcagccgcaggcaggnaaaagagaacccaacgcgcagaggacaagaagc

SEQ ID NO: 5500 - DNA, 577 bp, Zea mays
  unsure (1)..(577): unsure at all n locations
  Clone ID: MRT4577_10500C.1
cgtatatcctttcctgagtaggagagagagttgagttaggagttgttgtgctgatcatctcggacgaccgagagatggaccaccacttcactgagatagaggggaagatggcgcacgagccactggcacacagctccaccttctccgatgagacgaaagacaaaatggagcacgattcactggtgtacagtccacgcagcatcgcgagggccacaaccaccggcatccctgtcggcgatcaaggcgtggccgtgctacgtgggccgcttatcgtgggtgcagggccggcgggtctggcatgcgcggcgttgctcaccatgttatacattccctacgtgctcctagagcgcgacgtgtgcgtagcctcaatgtggcaccgtcgcacgtaccgcaggttgtgtctgcacctacccaagcgctactgtgagctcccgctcatgcactttccacgcacctaccccacatatccaacccggcagcagttccttgtctacctcaatgagtacatgcgcgcatntggcatcctgccatttttcagcctcgaggttgtcgctgccgagtacaacggtgaatactg

SEQ ID NO: 5501 - DNA, 313 bp, Zea mays
  Clone ID: MRT4577_105010C.1
aattaaaaaaaacgacggacatcaagcagctttcatcgtgcattcaccaccacttccccacactactgccgccttagtctcgtgtcgcaccccatcgcgccattactacccaagctcccacctttttcacgttgaatattcacggcgccaatatacacatgcctccaccccttgactaatactgcttgccctatgtcgcgcgttctctttctcttctgttgcatgacatctacgcctaccccatcgtgccttttactcactgtgtggtggtcaacatccctcccgtcaccattgtccttccctatgatttctc

SEQ ID NO: 5502 - DNA, 196 bp, Zea mays
  unsure (1)..(196): unsure at all n locations
  Clone ID: MRT4577_105011C.1
gggagcatgtattcccgcgtggcggcctcttcctcttccagttcgaactacaggacatgccagacgtgtgcggcctgctattatccctagcgctacacacgcctgttattgaagttgacaccagttacttcttcgtatggctgcggcacgacgacctgaagaggtactatgagctccaacacggccnncctcctta

SEQ ID NO: 5503 - DNA, 831 bp, Zea mays
  Clone ID: MRT4577_105012C.1
acagtagaaacctaatcttccttcatttgttatatacgtcaatcttttcaaaatgtttattacaataaaatctattcttctttaaggactttctctgcaacttcgtttagcaatttgttgatgactggggcgacatgggattcatccatgtttatgatgtccagcgcttccttcatttttggataagctaggggatcgaacggttccgacggcggagataattcagctatacgcttttcgcgctctgcagcttcttcagctcgtcttgcttctgttcgggcgttgcgggtgtctttcacttttatttataatttcatgggccatctctcagccaccattcacccagacatcattgtaaaatttcctgcccatcaaggttgcttcagctgaaggatccttcgtatcatctacggagaaggcagcttcggcctaggctacggctttaatgtgatcgcatcccgccttcttcaagatttccctgcgcaccataaaacgcgcaaatatccccgcgatcactcaaaatttcctcgaaggtttcagcttctccacttatccattcaacaacaccttcagggttgcctcgtatgaaattttcttcagcagagtaggcgcccactttggcgaagctagtttttaatttcttcatgcaatccaaggatttctcaaagcaccattccttggattcgcaaagttctttaacatttttctcttgcttaattttccaatattcactgatttcttgattagcctgtgcgagtgcgcagttctctttagcttcacccagctgtctccgaagttcttcaatttcggttttctgggcttcagcctgag

SEQ ID NO: 5504 - DNA, 1231 bp, Zea mays
  unsure (1)..(1231): unsure at all n locations
  Clone ID: MRT4577_105013C.1
atgctgccgtacgcgccggggccgccgccatcgctgctgctagaccggcggtacaagcagggcggcgaggcggcgcccagctgcccgcgctgcgactcgcccaacaccaagttctgctactacaacaactacagcctcagccagccgcgctacttctgcaagggctgccgccgctactggaccaagggcggctccctgcgtaacgtgcccgtcggcggcgggtgccgcaagaaccgccggggcaagtcgtccttgcggtcggcggcggactccatcgcgagctgcggcggcggcggccgcgacgcggcgttcggccaccggttcccgggccctgtccgccccgacctggtcctggaaggcatggtgggtaatcacccgtcgaacccagctggccaggcggcgatgcccggcggcgtgcccgctgcggctgatggctccaccattgatctcgcaatgctgtacgccaagttcctcaaccacccgccggcggtggaaggcgtcggggccgtggcgccggagtcggcagggcaggtcgacgaggcgttcgacgcgtccagtgacctgatgagccctggtgctctggcgccggtgcagttcgatccgtgccagccccaggacgggttcggtgagtggtctggcgtgccagtcagcagcgctggcccctcgagtacggctagtactaccgccgcaaccaccatgctgtgcactgacgtgagcgtgcaagctgcattcggcgagctcaacttcgccatggaccagaactgcttcgactcgctagggttacccacggacgacgtcggcaacctctcgtcgtcgtggtgttcgatcgtgccaggcttgtcgacgttagaggacgccaagtatgacttggattcgttcccagatgacgccctcagccttcacgacgagggcatgattagcgggactgatcatgattggagcgtggattgccaaggattggagactctctacatgccgtaactatacacacgaccaaaattcttcttcttctcttcttgctaatttgttcttgttcttgtgatgattggtttcctacatatttttctctttcttttctttcgntaaattcggtttggaagaaatatatatagagatatatatatatctatggatctatgttttgaagagaggtacgtgagggacaagtcgcgcgctcatgtaattgaattaatgattcggtatacttgtgagatagatcgatgcaatacat

SEQ ID NO: 5505 - DNA, 263 bp, Zea mays
  Clone ID: MRT4577_105014C.1
gtcgtgcggttatccgctgacccctgggccctggcgaagtgtcgggctagctatgggttttgttcaagggggcactcaatcgtggccgttgatttgcatcctacggacggggctgctctcacttttaactggaccggtaggacgaaccggcctaaaggccactttgcgggccttaggccaacgctaggaagatgcggtacaagaaaaaacgttgagaatatatgtatatatattcttcgaaagcaaaattggagctttggcta

SEQ ID NO: 5506 - DNA, 304 bp, Zea mays
  unsure (1)..(304): unsure at all n locations
  Clone ID: MRT4577_105015C.1
catctatctcctcccacttttctatatcatattatctcaattatcctancggacacctaggggacctatctatttcaggctaccatattccttcatttcatgaaatcattaattatctttacctcaaagccctctatggctataccttcttccccttcttaaccctctacaatatcttctatgcccattaacacctctcctaatggctcatcctctgatgccacactcttaattatctactcgttcatcattggtacattcatattggtaataaagtctgtcttatcaccacttactatttctt

SEQ ID NO: 5507 - DNA, 277 bp, Zea mays
  Clone ID: MRT4577_105016C.1
gttgattttgtttttttcctctttgatgattttgttgatgttgtatttttactttttttctggccaaacggaaaacatgcggaattttttccatatagagcgaacgaagggctttgccgggtggcttttagggacaagctcaatgtgagtttccccggggggacaaaaaaaaacacactgccgggtgtaaaaccaaaactaatcccccccggtctttaaaaaccctccattttacaaggggaaaaggggggggaaatgccagaggaccccactcggg

SEQ ID NO: 5508 - DNA, 538 bp, Zea mays
  Clone ID: MRT4577_105017C.1
atgcttgcttcgtacttctccaccatctatggagagaacgcctacccgaaggcgctgtctaaggctaagatcacgaacatgccctaccacccagcgcccatgaagaacaagggcgaaccacgcgatggcaagaacatggcccgcaggctagcgcaccatgaggatatggaccccaaggatgtgaacgctgctgcggccaccatcaagaccaaacgcaccatccacatcgtggattggtgcccgactggcttcaagagcggcatcaactaccagcctactaacgttgcgcctggtggcgacctgcccaaggtgcaacgtgccgggtgcatgatctccaactccaccagtgtcgtggaggtgatctcccgcatgcaccacaaactcaacctcatgtacgccaagcgtgccattcgacactggtacgtcggagagggtatagacgaaggtgagttctctgacgcccgtgaggacctggcggggctcgataaggactactaggaggtcggcgctgagttcgatgaggacgacgatggcgacg

SEQ ID NO: 5509 - DNA, 1025 bp, Zea mays
  Clone ID: MRT4577_105018C.1
ggcttcgcgctatgacatttgcttgcatgttgatttatgccttggtggctttgtgctgccttttgctcataagcttgggtaccctattcctccctttgatttttctgtcaagggtgttacatccatctcatctgatgttcataagtacggattagcaccaaaaggcacaagcattgtcctgtacagaaatcatgaaattagaaagcatcagtttgttgctgttactgagtggaccggtggcctttacgtttctcccacaattgctggaagcaggccaggtggattgatagcgggagcttgggctgctatgatgtctctcggactgaacggctacttggacagtacaagccgtatcatggatgtttcaaagaaaatacaaagagggattggagagatcccagggttgtttgtgatagggaaaccggatatgaccgttgtggcgttcggctcagacgttgtcgacatatttgaggtgaacgacataatgtcatcaaaaggttggcatctcaatgctctgcagagacctaacagcttgcatatttgtgtgacccttcaacacacgactgtttacgaccaattcctgaaggatctgcaagactctgtgaacactgtgaaagcaaacccaggcccgattagcggcggaaaggctcctatctacggcgccgcagggaagatgccggacagaggcacggtgagggagctgctcgtggagttcatggacagctcttgctgaattcattatggcttgtgagaagaatttgttcttgtacatgaaacttctatttctttttcaactgaaaaggcagagctcctaccatttgtttcaaaaaaaaacattatggcttgtgaaaaacagtcgcagggctgtgatttgttggcctaggtatacaaagttgtcattaggaaaagcggggaaagtcattgaggcgatacaaccacatgtattcacgattacaagaagtttgtccgtatgattgtatatcaatatcacagcatgcatacgcaatgtgtctggttatatattt

SEQ ID NO: 5510 - DNA, 655 bp, Zea mays
  Clone ID: MRT4577_105019C.1
tcgagccggcgggccggaaataagaatactataagcgtaaagtcgttcgcagatacatctatccggatcgccgttgtgagtcctcgaccaagagattacgagcatgaaagatggctgagcggcaggtcacctgataagcatcgagtgacctgccctacatacgctaggaaagctatgacacatggatgactagctgcgtgacatcgaggagatacagaggacaagtgctcgtcggacccctctgctacaacgtctgcgtgaggatgatgatctctctcctaattccgccgtctcggcttggaaggctggccacacgcagtgtcactcgaggaaatacagagggctggtgaaaagaattagatctgatgacactgctctcctgggcagtgtgactggaccgaagacttttgtggagtgcatcgaggttgatgagatcggctctcatctgctggtgaggtacggtgaacattgctcttgggtcgtcgtctagtgactccagagagaaatatgagggccttatcatagtgcatgaccatcgcaagtctcataagatgcttgacatgaagcagtgatagtcttgagatgaacctgggcttcagattatgcttatgaatatgctctttgtctatgagattagaacattttactagcccct

SEQ ID NO: 5511 - DNA, 529 bp, Zea mays
  Clone ID: MRT4577_10501C.1
cagagaagttggtatataaagacttctacagcagtgttcttttaaaatgcaagcatgcttagcaacaaaaaaggggatacacagatatagttttattatcaacttggccaataaaggttcttcctaacatttcactcaataaaacagcaagaatgagaactggctattgattttaaaagtggaataacttttctgccctcaaaattgtttttgtcccctcccccccatatgagtcatacctttttttgaatagcttttgactgtttagagcactttcgcagttctgttttctcctcacaacaatcctgtgaggtagttaaagtattgtttattcctactttggagctggggagactgccgcacggaaccctcttgtggttacagagttcattaatggccagtggaagagcttgatcttaagctcttgtctggagtcctgggctggaacccttactcttctactatgcttctttctgctgtccatcaaaactgtcccacctagctttaaattcatgtcagtctttactat

SEQ ID NO: 5512 - DNA, 318 bp, Zea mays
  Clone ID: MRT4577_105020C.1
accaacacattactcctcttcctcacataaatttctcttaccttttaagtctttcaatcttaattctatctatcatatactttatttacatttttccatcattctattttataaaatatcttcctctttatctttcgacatactattcatcaatcatacttaattcaattcttactacataccatctatcattgatcattactattattttaaccctattctaaactatccaaaatctatcccttcaatcacattatcttttatctcattcttaacatttaacattttttcttatactactttttacatctatatact

SEQ ID NO: 5513 - DNA, 401 bp, Zea mays
  Clone ID: MRT4577_105021C.1
cccacgcgtccgcaaggttgttccttttgctctgagctcagtgtttctctaccagtccccagctcaaataagagtgtgattcacttaccagctggagatggtttgcctagcaccactgcttgttcttccatgattttgatttttctgaaggggctggacggccaagcacctttcactgattgaattgtagtgttgagtgtggacattgaaatggctgaacacttacatgtcatgctggtggagagtctctgttggcatccttgtgctttgtacatatctgctgatggacaaattacattagcggtgaatgctcaccacatgtatgtgatgcatagttctcagttcttgcttgccggaataacgataagacactgagtagctcctataaaacatcactacta

SEQ ID NO: 5514 - DNA, 605 bp, Zea mays
  Clone ID: MRT4577_105022C.1
cccacgcttacagacggacagacgaggtcagggctgttgtccgagatctggacccacaacacccgagccccggtcgctatgcaggtcactgacctggacactgtgctcgccgtcatggtcgccaggaggctggagaggatcacggagatgctgtcgtacctctatctctgtggcagtgtctctctaggtgccacaacttccaccaggaactgccacagacagacagagagaatgctgctccagattatgctctacgatcgcgactaccagcaggttcagcgacaggctcagagacataatgagacgcctagcatctccgacagcaactgcaactacaaggactccttcatggtcacgatcaggtgcaaggtcatgttcaagattgtgtgcaatacgacctgctctctgactgacttgcagcatgctaacatccacgcgaacatcaatgccgctgacaatcaatcttatcaggagtattatgataggtatgtgattggctctccaatcaacactgaaaccgtcaggttgtgagtcatacaatgcctggaaccaagcatctaacggagggtatatcttgatgtgaagcttgacctctgcaccaacct

SEQ ID NO: 5515 - DNA, 1948 bp, Zea mays
  Clone ID: MRT4577_105023C.1
ggtgaattggattggcaggatcacaaaacaaaccggtgtagattcaggctggatttgagcctgtttagcagcgctatccgcttggcccaattcgtctactgctcctccagctcctccgctgcgccgccggtcgccgcccgacaccgccgaagaagagcagacgccgagtccaggacgtcgccgcggggctcggggaacgcggtgttgccatcgcgaggaaggtcggaagttcgctgttcgcccgccggatcggcaccgtcgccaccgcccatggcaaccgtcgcccccgtcgtctccgacctcgtcgacttcctcaacgcgtcgcccaccgcctttcacgccgttgacgaggcgaagcggcggctgaaggcggcggggttcgtgcagctgtcggagcgggaggagtgggcgggtctcgagcccgggcgcaagtacttcttcacacgcaaccactccactattgtcgcttttgccatcggcgcaaaatacgttgctggcaatgggttccacatcatcggtgcacacactgacagcccttgcctgaagctcaagcctgtctccaaggtaaccaaaggaggttaccttgaggttggggttcaaacgtatggtggtgggttgtggtacacatggtttgaccgtgatcttactgtagctggtagagtgattatacgggagaagaaggatggcgtggtctcttatgcacacaagcttgtacgggtacaggaaccaattatgcggatacctactttggctattcacctggacaggactatctcctcagaaggtctcaaggttaacaatcagagtcatcttgttccagtgctggctacatgtatcaagaatgaaatgcagaaatttgtagcagataatggcccaaagcaggcatccgagaatgcgaacacaaagcatcatccattactattgcagttgattgctaaagaggctaactgtgagcctggtgagatatgtgactttgaactgcaattatgtgatactcaaccaagtgttgtagcaggtgccacgaaagagttcatcttttcaggaaggcttgacaatctttgcatgtcattttgttcattgaaggctctaatagattccagttctgttgaacactctcttgatcatgaatctggtgtgagaatggtagctctatttgaccatgaagaagttgggtctgattctgctcagggagctggttcccctgccatgttggatgctttatcaagaattactgggtcttttaactcttcaggttccaagttgctagaaaaagctattcagaggagcttcctggtctctgctgacatggcacatgctttacatcccaactatatggacaagcatgaggagaaccaccagcctaaattgcatggaggacttgtgatcaagcacaatgccaatcaacgatatgctacaaatgctgtgacagcatttatttttcgagaaattgctgagagacaccagctacctatacaggattttgttgttcgcaatgacatggcttgtggttcaacaattggcccaatacttgctagtggtgttggtattcgcactgttgatattggagcaccccaattatcaatgcacagcatcagagaaatgtgtgccgctgacgatattagctactcatatgagcatttcaaggcatattttgaagaatttactgaattggatggcaaggtcaaggtggattactaaggcatatagcacaataggttagctttgttacaagctgtacttttatacaaattcgataagcaagtggagaacaaatttgggagaatgtgctagttgtgtttgcattgccatacgatgttctaaattgtatctttttatcgaacccaagtacccacatgtttgaaattcttttggtgaatgacttcctatcaagaaaatgaactagactataaaatggctccaacatgcagcctcacaaagggctgtgttt

SEQ ID NO: 5516 - DNA, 1322 bp, Zea mays
  Clone ID: MRT4577_105024C.1
ttgggtacctcgaggccggccgggactcgcccctccccacacctccgctcccggcctgtgccgccgtcgccaccgctcgctcgcccgcctgcctgcctgcctgggcccgcagcaccgactctgacagcgcccgtcctgcttcctgtaccggcaggcgagggagaggactcagggagtgtgatggcggcaatgccggcgccgcttctgcctctgcttctgctggtggtggccgcggcgatgacgctctcccccgccgccgcccgcattcccggcgtgtacgtcggcggcggcggcggctggcagagcgcgcacgccacgttctacggcggcagcgacgcttcgggcaccatgggcggcgcctgcgggtacggcaacctgtacagccaggggtacggcgtgaacaacgcggcgctgagcacggcgctgttcgacgaggggctccgctgcggcgcgtgcttcgagatcaggtgcgaggagcagcccgggtggcggtggtgccggccagggaggccctccatcctggtcacggccaccaacttctgcccgccaaactacgcgctcccctccgacgacggcggctggtgcaacccgccccgcccgcacttcgacctcgccatgcccatgttcctccacatcgccgagtaccgcgccggcatcgtccccgtctcctaccgccgggtgccgtgccgcaagtccggcggggtgcggttcaccatcaacggcttccggtacttcaacctggtgctgatcacgaacgtggccggcgcgggggacgtggtgcgcgcgagcgtcaaggcggccagcaccgggtggctgcccatgtccaggaactggggccagaactggcagtccaacgccatcctcgtcggccaggcgctctccttccgcgtcaccgccagcgaccgccgcacctccacctcctggaacgccgccccgagcacctggcagttcggccagaccttcgagggcaagaacttcagggtctgatgcatgggatgggatgcgatgggatgggacttgggagaagaagccaaaactcttttctttctttctttctttcttcttatacgtaattattactactcactcctgctaccgtactactgctactggagtactaagcgcgtgttactgtgttagagggtggtgggtgttgtcaatgcctgttttaaggtcacgccttccgcccgccttaatcccaggtccaggtcctctctgaaaaaatggagtcttttcttctgaacaagatgtgtggatgggattctctagagtttgtcagggtatattgccgtctcttcggtccctagcaaaaaaaaaaaaaa

SEQ ID NO: 5517 - DNA, 412 bp, Zea mays
  unsure (1)..(412): unsure at all n locations
  Clone ID: MRT4577_105025C.1
ccnntaaattataattncaggngcacaagcatccggtgggcgcttaaagggggaatgggaaaatacacaancacaggacacanaccatgaaacgcacagcagcctcaggctggcggacacccacccagaaccgcatcagggccgaacagctagcacgcgcagccagcaggaacacacacacacacacacacgaaacatatgcacagggaggagcgccccagctggcccagctacaactggctctaaaagaccacaaaagctggaagaagaggcttgcggaaccgacaccgaacgaccggaggtctgcaggcctaaccagtgcccggcacagcgggcaagaccgcccccataggaaccattcggacacacaatcttcacaaaagacatgtttgcagcacaaaaggatgggaac

SEQ ID NO: 5518 - DNA, 468 bp, Zea mays
  Clone ID: MRT4577_105026C.1
aagagatggaaattgattctatagatttacatgctacttaacaatttacaacttatagcacgctcgggtactttcttctctataacataaatataatgtataactatctctctcatatgatttatgttaatataaaaatatattacatgtacaaatatattaacttaattagtttcctctaaattataattagtagaatgaaattcaatttcaacgaaacaaaccgggcccaagagagtattggactgtatggaaaacaggggtgatgagaaatcctcaagatctccaattttttctctactgttttttttaaaatgtatgtcaataatagtgtccatcttgggaatgcaaactaaacgttcaacaacattctgttggtaggctctgaagatataagctcatatgttgtctttatgattgatagtcagtgataacagttctggagttggcaaatgcacatttaaattc

SEQ ID NO: 5519 - DNA, 1248 bp, Zea mays
  Clone ID: MRT4577_105027C.1
agtcccatagtctccacccggcctgtgccgccgtcgccaccgctcgctcgcccgcctgcctgcctgggcccgcagcaccgactctgacagcgcccgtcctgcttcctgtaccggcaggcgagggagtggactcagggagtgtgatggcggcaatgccggcgccgcttctgcctctgcttctgctggtggtggccgcggcgatgacgctctcccccgccaccgcccgcattcccggcgtgtatgtcggcggcggcggcggcggctggcagagcgcgcacgccacgttctacggcggcagcgacgcttcgggcaccatgggcggcgcctgcgggtacggcaacctgtacagccaggggtacggcgtgaacaacgcggcgctgagcacggcgctgttcgacgaggggctccgctgcggcgcgtgcttcgagatcaggtgcgaggagcagcccgggtggcggtggtgccggccagggaggccctccatcctggtcacggccaccaacttctgccctcccaactacgcgctcccttccgacgacggcggctggtgcaacccgccccgcccgcacttcgacctcgccatgcccatgttcctccacatcgccgagtaccgcgccggcatcgtccccgtctcctaccgccgggtgccgtgccgcaagtccggcggggtgcggttcaccatcaacggcttccggtacttcaacctggtgctgatcacgaacgtggccggcgcgggggacgtggtgcgcgcgagcgtcaaggcggccagcaccgggtggctgcccatgtccaggaactggggccagaactggcagtccaacgccatcctcgtcggccaggcgctctccttccgcgtcaccgccagcgaccgccgcacctccacctcctggaacgccgccccgagcacctggcagttcggccagaccttcgagggcaagaacttcagggtctgatgcatgggatgggatgcgacttgggagaagaagccaaaactcttttctttctttctttctttctttcttctgatacgtaattattactactcactcctgctagcgtactactgctactggagtactaagcgcgtgttagggtggtgggtgttatcaatgcctgttttaaggtcacgccttcccgccttaatcccaggtccaggtccaggtcctctctgaaaaaattggagccttttcttctgaacaagaggtgtggatgggattctctagaaaaaaaaaaaaaaaaaaaaatagg

SEQ ID NO: 5520 - DNA, 1257 bp, Zea mays
  Clone ID: MRT4577_105028C.1
ccggccgggagaacctcgaggccggccgggactcgcccctccccacacctccgctcccggcctgtgccgccgtcgccaccgctcgctcgcccgcctgcctgcctgggcccgcagcaccgactctgacagcgcccgtcctgcttcctgtaccggcaggcgagggagtggactcagggagtgtgatggcggcaatgccggcgccgcttctgcctctgcttctgctggtggtggccgcggcgatgacgctctcccccgccgccgcccgcattcccggcgtgtacgtcggcggcggcggcggcggcggctggcagagcgcgcacgccacgttctacggcggcagcgacgcttcgggcaccatgggcggcgcctgcgggtacggcaacctgtacagccaggggtacggcgtgaacaacgcggcgctgagcacggcgctgttcgacgaggggctccgctgcggcgcgtgcttcgagatcaggtgcgaggagcagcccgggtggctggtggtgccggccagggaggccctccatcctggtcacggccaccaacttctgccctcccaactacgcgctcccttccgacgacggcggctggtgcaacccgccccgcccgcacttcgacctcgccatgcccatgttcctccacatcgccgagtaccgcgccggcatcgtccccgtctcctaccgccgggtgccgtgccgcaagtccggcggggtgcggttcaccatcaacggcttccggtacttcaacctggtgctgatcacgaacgtggccacgcggagtacatggtgcgcgcggtcgtcaaggcgctctccttccgcgtcatcggcagcgaccgccgctccgccacctcctggaacgccgccccgcgggactggcgcttcggccagaccttcgagggcaagaacttcagggtctgactgtgagctcaggccgcgagtggcgcggcgagaagaagccagagctctcaaggccttgttccgccgtactattataccgtgattactgctactagtcgtcgttataaagcgcgtgttaggggtggtgggaatgtacgtgaatgccccgtttagggtcacgccgtctcgccctggttcatccaggttcaagtactctctgcaaaaaaaagggagcctttttcttcttctgaacatgtgcgggcaaaagggagccaagtatggtgattggatgcttaaaaaaataaataaccaaaaaaaattaagggcggccgccgaatgagggctcgtcgaccagggaaat

SEQ ID NO: 5521 - DNA, 1717 bp, Zea mays
  Clone ID: MRT4577_105029C.1
cattgggtccctcgaggccggccgggactcgcccctccccacacctccgctcccggcctgtgccgccgtcgccaccgctcgctcgcccgcctgcctgcctgcctgggcccgcagcaccgactctgacagcgcccgtcctgcttcctgtaccggcaggcgagggagaggactcagggagtgtgatggcggcaatgccggcgccgcttctgcctctgcttctgctggtggtggccgcggcgatgacgctctcccccgccgccgcccgcattcccggcgtgtacgtcggcggcggcggcggctggcagagcgcgcacgccacgttctacggcggcagcgacgcttcgggcaccatgggtacgtacgtccatccatggatacatacacatacatatacatacatacaaaagaaacgtcgtctggctgatgaaacgaaaggaaacctggcactgcaggcggcgcctgcgggtacggcaacctgtacagccaggggtacggcgtgaacaacgcggcgctgagcacggcgctgttcgacgaggggctccgctgcggcgcgtgcttcgagatcaggtgcgaggagcagcccgggtggcggtggtgccggccagggaggccctccatcctggtcacgggcaccaacttctgcccgccaaactacgcgctcccctccgacgacggcggctggtgcaacccgccccgcccgcacttcgacctcgccatgcccatgttcctccacatcgccgagtaccgcgccggcatcgtgcccgtctcctaccgccgggtgccgtgccgcaagtcccggcggggtgcggttcaccatcaacggcttccggtacttcaacctggtgctgatcacgaacgtggccggcgcgggggacgtggtgcgcgcgagcgtgaaggcggccagcaccgggtggctgcccatgtccaggaactggggccagaactggcagtccaacgccatcctcgtcggccaggcgctctccttccgcgtcaccgccagcgaccgccgcacctccacctcctggaacgccgccccgagcacctggcagttcggccagacattcgagggcaagaacttcagggtctgatgcatgggatgggatgggatgggatgcgacttgggagaagaagccaaaactcttttctttctttctttctttcttcttatacgtaattattactactcactcctgctagcgtactactgctactggagtactaagcgcgtgttagggtggtgggtgctgtcaatgcctgttttaaggtcacgccttcccgccttaatcccaggtccaggtccaggtcctctctgaaaaaaatggagccttttcttctgaacaagaggtgtggatgggattctctagagtttgtcagggtatattgccgtctcgtttgtctctaacgcttctctacttctccgtaagtgtgtggttatggatcaagtttgtgcctttgacttgggggtgactggtgggtttctgtgtgagctgctcaagtggctgccgagctgcggccctaatttgggggcagcgcggtgagcgtagcccgcagctgctcgtcatcttcttccgtcccgtcccgtcccgtgtctgtgtctgtctccatgaccggaacacacctttgttatctatctagttatacatcatggttcattgccaggtgattggacttgtaagaattccctttttgcgtgaaaaaaaaaaaaaaaaaagcggcc

SEQ ID NO: 5522 - DNA, 415 bp, Zea mays
  unsure (1)..(415): unsure at all n locations
  Clone ID: MRT4577_10502C.1
gtacacccgtttattacatctcgttttattacaaaacggaaaaaaaaaccccggggccccccaccgcacgggtcaccagacaaaaaacccctaaatcaaaaaaaacaccaaaagggaaaacaccgcgagaaaaaagacacagatttacgctttgaaaacacatctgggaaaacccccgggggaaaacaccggggggagtgcaagagcgctgctctccccaacacaaatctcgaagtgcgagcccagactcatcacaaacagaaccgagtgcagggccccggccccccctacagaaaaaatggaagccccgcatactacaaaacggacttgaagagggggccgggaaaccacacccgcacaaacaaaaattgaaaacccccttttggtagngcgggaaagaaaaaaaaaaggcatt

SEQ ID NO: 5523 - DNA, 282 bp, Zea mays
  Clone ID: MRT4577_105030C.1
cccttacccaatcccctatttcaaaaataatgcgttagtccccccccaacccccacagtgggggaaaaacaatgaaggccttgcaaatgaaagaatttttaaaaaacccgggagttgttcccttgaacaatttcagagcgctttgggcgtcctgatactgtaattggcagctgttaatcagggggcccagggccacaaatgcttttttggcaagggttttacaagagctggcgggtaaaaaaaaacttaaagctgttgcaaaaccggggtttatttgcgggc

SEQ ID NO: 5524 - DNA, 1521 bp, Zea mays
  Clone ID: MRT4577_105031C.1
cattgggtacctcgaggccggccgggactcgcccctccccacacctccgctcccggcctgtgccgccgtcgccaccgctcgctcgcccgcctgcctgcctgggcccgcagcaccgactctgacagcgcccgtcctgcttcctgtaccggcaggcgagggagaggactcagggagtgtgatggcggcaatgccggcgccgcttctgcctctgcttctgctggtggtggccgcggcgatgacgctctcccccgccgccgcccgcattcccggcgtgtacggcggcggcggcggcggcggctggcagagcgcgcacgccacgttctacggcggcagcgacgcttcgggcaccatgggcggcgcctgcgggtacggcaacctgtacagccaggggtacggcgtgaacaacgcggcgctgagcacggcgctgttcgacgaggggctccgctgcggcgcgtgcttcgagatcaggtgcgaggagcagcccgggtggcggtggtgccggccagggaggccctccatcctggtcacggccaccaacttctgcccgcccaactacgcgctcccctccgacgacggcggctggtgcaacccgccccgcccgcacttcgacctcgccatgcccatgttcctccacatcgccgagtaccgcgccggcatcgtgcccgtctcctaccgccgggtgccgtgccgcaagtccggcggggtgcggttcaccatcaacggcttccggtacttcaacctggtgctgatcacgaacgtggccggcgcgggggacgtggtgcgcgcgagcgtcaaggcggccagcaccgggtggctgcccatgtccaggaactggggccagaactggcagtccaacgccatcctcgtcggccaggcgctctccttccgcgtcaccgccagcgaccgccgcacctccacctcctggaacgccgccccgagcacctggcagttcggccagaccttcgagggcaagaacttcagggtctgatgcatgggatgggatgggatgggatgcgacttgggagaagaagccaaaactcttttctttctttctttctttctttcttcttatacgtaattattactactcactcctgctagcgtactactgctactggagtactaagcgcgtgttagggtggtgggtgctgtcaatgcctgttttaaggtcacgccttcccgccttaatcccaggtccaggtccaggtcctctctgaaaaaaatggagccttttcttctgaacaagaggtgtggatgggattctctagagtttgtcccggtatattctcgtttcgtcggtccctggcactggctcctgcttcaagttatgttttttgactttggggtggctggtgggtttctgtgtgagctgccaaagtggcttccgagctgcggctccaatttgggggcagcgcggtgagcgtagcccgcagctgctcgtcatcttcttccgtcccgtcccgtaccgtgtctctgtgtctgtcaccataatagaaaaacacctttgtataaatactcgtt

SEQ ID NO: 5525 - DNA, 181 bp, Zea mays
  Clone ID: MRT4577_105032C.1
ccccaaaactcaattgcctttatcaagctaatgagagaccaccagcctacaggaggagaggagtctgaattctgataaggtttcacttccccagttactcctgcaaataacatcacttttctattgtagataggcattttgtgatatcctttcaggttttgtgtgtatctaacagcatggc

SEQ ID NO: 5526 - DNA, 240 bp, Zea mays
  Clone ID: MRT4577_105033C.1
caacctgagtggctagctagagctagctagctccgggcgcccgcagcatggccacgaacagccaccgcattattgcgcccggcctcctgctggtcgcggccacgacgctagtcgtcgtcgttgttgcgcatatcgcggcgccggctgccgactgcccctactagtccgacgccgacgccggcccctccgtcaccgaccccgcccccggtggtgaacccgccagcgttgttcacgccgtgc

SEQ ID NO: 5527 - DNA, 257 bp, Zea mays
  Clone ID: MRT4577_105034C.1
tacaaaaccctatactgagtcgtattatgcagacacgtcctgctgcccagacaaatactgcctacaacaagggcatagcccatgcacattatcctatctgcaaagatgatggtgtcagtggactgtaccacggtcctggagatacctcattgggaatcggccccaacattgcagtagccctcaccgtttacgaatcttaacactcgcactgccagatagacaagccatgtgctccccctgttcggataagtttggct

SEQ ID NO: 5528 - DNA, 247 bp, Zea mays
  Clone ID: MRT4577_105035C.1
gtttgcagaacagaaaaccaccggtcaactggtgtgatcgctctggtttcatgaggcaggagcaacacagaaggacacaacagggggtaccgaacacctgaatccaaaggtagaacggacacgaacacggggccagaagctaacgggaacacgaacctataggtggttgacggaactcgcacgaaggcaggatgggcccacacatgaggcgctgcagtcggcggcggcggcgacgtagacggcacca

SEQ ID NO: 5529 - DNA, 199 bp, Zea mays
  Clone ID: MRT4577_105036C.1
tttaggaacacaggatttttttttattttctggctacacagtggacccccgatacatataccaacttatgttacaagtggtttttctacataagactagatttggttcaactggtacaccatattttggcagttgatttacaaaacaagccataaacgggtcacagaactggttgtaacctgggtggcaaagggtccac

SEQ ID NO: 5530 - DNA, 529 bp, Zea mays
  Clone ID: MRT4577_105037C.1
aaagcatcacattcttcatcacacttccatttcgcgcagatacataaataaccattgtttgttatttgtttgcacaaacacatctcatggggtcaccaaagaactaaaattcgtcggtttttgctcactgaattcacctctaagaacactcgcagccctttgaatcgcacggcagactttccacacttcatgctgcattgccacctcctgttccttgtcactcagattggcggaccgtgagatggcgtcagcgatcccagggaagaacgacagcttgctttcgtagtcctccggaggcgagtacaacagatgcttaaaccatcctcttccttggagcccttcaggttgcaggaagcttctttcagcaagtaggaggcgatcgttcaacaatcgccttctcatcctggcgtgttcatcatataaatccatctgctgtagtttcttcatctccttcagaacttccatagctgcaccagaaagatcattgacgcacccattcatcaaatttactgcatggccattgctcgtc

SEQ ID NO: 5531 - DNA, 391 bp, Zea mays
  Clone ID: MRT4577_105038C.1
cggacgcgtgggcggacgcgtgggcggacgcgtgggcggacgcgtgggttggaatacatctgcccccattgtagcttagcaaactacaagaagaagccaccaccaccaaaagcagctaacggtttttcaaatacagcatctgtaccacgaaatgtttaattttcttgtttttttccttttcctttggtcccatgtttgtgggaggaagagtcattagagtagagaataggctgatggaaagatgggcaaggccttcagggtatgtagtgttcgaatgtatcatctcgttaatttagtggttatgaggttatatagcatgtaacaactgataacagagacaagttcctacagtagttggttagatgcggggtgtatgcgtcatgtttatatt

SEQ ID NO: 5532 - DNA, 235 bp, Zea mays
  Clone ID: MRT4577_105039C.1
atgacatgtttgctggtagctagaatcttgctcttggggtcctcgttttttgtttgcccttgaaagttgtatgcaaacaatgactcgatcatctgttcatcaaatctgcataacgtatgctgttgtaagatgtaataataataggagatgaaatgacaatctagatgggaatcattttttgtagcttaaaacaaaaaacaattaaataacaaaacccaaaccctttctttgatgt

SEQ ID NO: 5533 - DNA, 293 bp, Zea mays
  Clone ID: MRT4577_10503C.1
gggtcggcccacgccttccgttaaggcccatttccatttaacgcaaaaaggttcattacaagctatatggcctctctttgggtgaggcttaagggttaccaaagcttatttcttgttacattgaatgtttgaatatccaatgtttaaatatcaatttttagtattaaatataagcttattatatttaataaatctgcctcgtttttttatttaatactcattattgatatttaaacattcgaaatcattacataaactaattttcttgttccttcactcatgcgtgattgcac

SEQ ID NO: 5534 - DNA, 694 bp, Zea mays
  Clone ID: MRT4577_105040C.1
cgggagggttcctagttccttcccaatactgacactcgactcccagtcccagaggctacggcggctaccttctcacttctaggttcgctctgaatccagcggcgcgaagagcaccgcgctcctttccggctcgcaccgaagccctaataccgtcttcttccgtccggcgcggactgctgggttcccgttcccgcatcgcggactgctgggttcgccgtttctgcacggtgcggacgccatgtcgggtgtcggcccacccccgtgaagcggttttgccgcccatgatcccggaaaaaacccaatcgaggcgtcaagtcgatccctgtccccaggcgatcggcggcggcggatcgtttccgttgcagacagcaggtcctagagcgtcaacggctggcctctggatgcgatgtcccaagaatgacgtactcccctcacctacgttttacgggggccaccctgctgcgttgatttcctccgagaacggaaggttaggagcaaaatctgggagtttcccagaccaattttttctgacttccagtggctagcaggtttatgtaattttgagtttccatcctcagataatgggtggactactgtagtactgcctaatgtagtaatgttggcatgtactactacctagtaccataggtttacttgacattctgagaaaaaaaaaaaaaaaaagcgggccctg

SEQ ID NO: 5535 - DNA, 390 bp, Zea mays
  Clone ID: MRT4577_105041C.1
agcggacagaagatcattgagtgggttttttcaattacattccgagctagggcctacgaaccccaccttacggtacaactgcatgtctccactaaattcccacgtaccatccccagtctgtggtcgtaacattgtcacctatattcatagaaagacacaacgacaatgctttctaccacatctagtcaagctgcaactgaccacaggatttcttcctgcatgcttaccgagaccattgccgacgggagatttataatcgtgaacaaccccctgcccgcgaagcctgcggtgcccctatccagaccaatacttgactgcaacctaatcgagaggatctatgtcgacacgcggacgtagtacatgaccggtccacacagctagctgacttgg

SEQ ID NO: 5536 - DNA, 1508 bp, Zea mays
  Clone ID: MRT4577_105042C.1
tgcactcgaggccggaattcgggacgagggaacaacacaaattaagtagtggagtgtcagaacttgggaggcacaaattaagtacaaagcagtctaatactctaatgacgggcccgatggagattccggtgatcgatctcggcggcctcaacggcggcggcgaggagaggtcgcggaccttggcggagctccacgacgcctgcaaggactggggcttcttctgggtaagcagagcaccaacgaatgcttgcaattaatatttgacaacttcttcccatatgcatgcgcgcgggcgtacgtacgtcattatgatgcgccggcgccgctcgcatccgcatccgcaggtggagaaccacggcgtggacgcgccgctgatggaagaggtcaagcgcttcgtctacggccactacgaggagcacctggaggccaagttctacgcctccgccctcgccatggacctcgaggccgccaccagaggtgacactgatgagaagccctccgacgaggtggactgggagtccacctacttcatccagcaccaccccaagaccaacgtcgccgacttcccagagatcacgccgccgacacgagagacgctggacgcgtacgtcgcccagatggtgtccctcgcggagcgtctggccgagtgcatgagcctcaacctgggcctcccaggcgcccacgtggccgccaccttcgcgccgccgttcgtgggcaccaagttcgccatgtacccgtcctgcccgcgcccggagctggtgtggggcctgcgcgcgcacaccgacgccggcggcatcatcctgctcctccaggacgacgtcgtgggcggcctcgagttcctcagggccggcgcccactgggtccccgtcggccccaccaaggggggcaggctcttcgtcaacatcggggaccagatcgaggtcctcagcgccggcgcctaccggagcgtcctgcaccgcgtcgcggccggggaccagggccgccgcctgtccgtagccacgttctacaaccctggcaccgacgccgtggtcgcgccagcgcccggcagggacgatcagggcgccggcgccgccgcgtaccccggtccctacaggttcggggactacctcgactactaccagggcaccaagttcggcgacaaggacgccaggttccaggccgtcaagaagctgctcggctaagcgaacagctgcaagtaggcagaggcagcttagctcgtggactatgcatagtttcaagcttgctgcttgcttcttgttcgatccattgtctgcatgcgtagtgtgcactggcgttgcgtgtttaaatttagcaaatcttatacgtagtcgttactggtactacgtattctgtggttgacaatacattgttgcggtttaagggcgcatccgtttggtggacttgcacatgccattcgacaaaaaagttggctttccttgtcaattaatagtcaactagtacaatgacacgcaaatattcggtaagcacacatgtccacatattgaaaa

SEQ ID NO: 5537 - DNA, 270 bp, Zea mays
  Clone ID: MRT4577_105043C.1
tggactcgactagctcgaacaccacaaccgtgccctttttaattagcccataagcaagcgccgccgctagtaggctcttacgctcgatgccaaaagcccgatccttacatgggcattggctaccatgccacgaatcgcgcgctgtgcagcctcgccgagggcaagcttccggaggaggcgatcgaaggcaccgtcgatgagccgctagtgcacgagccagatgccgaagtatgacacagggcactgacagaggaagcagacacagggcaa

SEQ ID NO: 5538 - DNA, 475 bp, Zea mays
  Clone ID: MRT4577_105044C.1
agcagaagacccgggaccctaccaggacaaaaaaaggcaaaccactaccggttcagacaagggaagagggtgcagacagaacacccggctggggccgggggatcaaccccccaagagggggaaccaattactaacagcacccgcggcacataaatttgggggaaatgcccgaaagggagaaaacaagaaaagaaaaaaaaggaaggcccaaaagggaacaagaacaggaacaggatggccctccaaccccaagaggaggatgggatccgcccaccaaaccggaatctggaaagcgccgtaaaacaccaaaaacaaaacaacctttcacgccttggagaacttggagccccacattggcaccctcaaagggttgggggcggggggacgggcccccttttcaggggggcccagggaaaccaaaaacaaaggggccgattcacccccccttgcccggatgggtgggggggaggcccct

SEQ ID NO: 5539 - DNA, 343 bp, Zea mays
  unsure (1)..(343): unsure at all n locations
  Clone ID: MRT4577_105045C.1
gcggtggctatggaggtggcggtgggtacggaggctacggtggcggtggaggaggaggtggcggtgggtatggcggtggcggcggcngcngcnggttcaggactgcntcgccgtcgcgctcacttccaaggccgccgccgtcgcgcctgccgccctgttcaagaccccccacttcgcctgcggctccttctngccctcgcgcatcatcngcgcctnctgctctttatatccccccctacccntctgggcgtccccggcccagacccaccagctgtctgcctccctcgttgccttcccctctgcgtcgccttcccatgcctgcctatcccttctcccccgcctt

SEQ ID NO: 5540 - DNA, 319 bp, Zea mays
  Clone ID: MRT4577_105046C.1
aaaaccccacaagcggggggaccccccgggaaatttggaaaccaggggcgtttaaaaaacccccccccggggttggaacccccctaatacccccaggtaatttcccccgcccctgcattttccccccgggagggccgtgggcaaattgtaaaagggcaggcccccttggttgtaactggggggggccggaccctctaaagggggcatttttaaaaccggttaagggggccttggatccaggccaggaccccgatctctttttttaaaaaatcggcctgtttttgggccccctcggcgtggcgggggattgggggaaaaa

SEQ ID NO: 5541 - DNA, 379 bp, Zea mays
  unsure (1)..(379): unsure at all n locations
  Clone ID: MRT4577_105047C.1
ctaggttttgtttttttaattttttttttttttttttaaaacccgattttttacatcattttttaatcattttgttttttgaaaacccgtttgcaccctcccgccattaaaaaaagggtgaaaaaaaacaattatccaccccaaaaaatttcctcttaaagggggggaaacccatttttaaccgctaaaaaaaaacaaaaactcaaactagggcttcctggggggtaaatactaaaaaaaaaaggcgagcctgctctctgccattnttttgtatgctcgactaaaaccgggcaaaacacccagacatttttgttctctgccagtctaaaaacagttacacccacaataatcatgtaagttgcgatttttctggaccaaa

SEQ ID NO: 5542 - DNA, 311 bp, Zea mays
  unsure (1)..(311): unsure at all n locations
  Clone ID: MRT4577_105048C.1
ggaacatattacactacctaggggttccaattgcggtgaggggccaccactcccagagtcgaaccgattcacacattttgactagcagggcgtttcaatcacacaaggggcaatcatggtgccagaaggcggcctcaaacgcttatcaggtaccggtagttcggatgttatgtggtcacgaggacagaaacaagacctggcttgccttgctaaaatgcgatggaccgacttgctgcttccttaaatttcctccgggtttaaacntggtacctcaggtttttctcacttgggcatcatgaccttgacgaact

SEQ ID NO: 5543 - DNA, 430 bp, Zea mays
  Clone ID: MRT4577_105049C.1
agaaaattttgaattaaccttgtaaaagatactgtaatttaggaatcaaacactactctataaatttgtccataccttgtaatatatttttacctttccatccatgtatgaactgctttgatatggacgaaacttgtattttttgagccgaaggcgaaaaacaccttcccttcttttcgtacacaacgaagcgtaaaatttgcttcttttgtactcattgaagccttgtcattagagccgaagcaactatctgtacactatgatatgataatgatgatcctacgaatgtctaagtgaatgtgtatgaatgcaatgaatgatgtgatgtaatgtgcaaatgaatgtcaaacacacgcttacgaagccacacccagactctgcatccccttaggaacgactttggagtcttcttcaccgtttattttttggt

SEQ ID NO: 5544 - DNA, 402 bp, Zea mays
  Clone ID: MRT4577_10504C.1
cttgcgtacttgccgacgtttagtctcctcgtcccctctcgaattgcgcgatggcaccccaccaaacactggtacgcacaaaaccacagggctggcgagatctacgagaataccagacgggaactaccgaaccaccggagagaaggaaacaagcggcccgggcgcagagaggacaaaaggagcactgcaggggggaaaaaaggaaattcaagcctggtaggcaggaaaaagagcttgcaaagttgattactgacaacctcaaagttggggagaccgccttttagagacacgccggcccaatctctggcattctagccaggagggacggggttagcaacttcctcaaaaaccccaccctgtgccgcaaagaaaaatagctccctttggtcggaacaaaggggg

SEQ ID NO: 5545 - DNA, 285 bp, Zea mays
  Clone ID: MRT4577_105050C.1
ctcaaaagaaaaaaaacagtcagaatttgatctttttacggtccacggtaacagctaatcctacttgggttgctggtatcttctacttagatcctgcgcctaaagtttagacagtagcgttcaaacctcccccgcatgtgagctatgcccgctacaaaatacagcagcttcggattaataccaacatcagttgatgtggaactttatggctggaaatgataaaaaacaccattgagaaagttaaccatttttcacatatattctgtgggctactctcattacttg

SEQ ID NO: 5546 - DNA, 714 bp, Zea mays
  unsure (1)..(714): unsure at all n locations
  Clone ID: MRT4577_105051C.1
gacccccgggttcggccgggcccacgantcttacgactcagtcgggtgaggccgaccccacctgtcagctggagctcccccttcttccccgctaacagaacaccacgcagccataaccgccccatccgagatcctagccaacctaacaaccgggccgagatccgctcgacactatccggctgcatcctgccttctatatatcaaggccaacccctcctttcatcctccttttccccaacgacacagagcagcgagaaatcggctagtgagggaaagagaaggttccgccgcgtggtgtcgcatccgcgtcgtcggtgtggtcacgatagtaggccagggtgctccagcatgatttccggtgtgcgtgcatggcctcacttggtacgataggagcacgaggcgcagacaatcgctcccggtgcttcaccaccgtcacggatccgcggtgcgctgtgggcagactgcggctcgactgggaccattacgagcaagtgattgaggacccaggtgttcagcaggtagaagttgctgagcaggagctcattgaaggcaagttgtgcccttgaccacttttatttatccaataatgttctatataatcattttgacatgcataggcttaattntgatgggacccaataagtcaccctagnttggtcatctttacaccttgnttaccccttgaactttgggtagtctttgctattgctataa

SEQ ID NO: 5547 - DNA, 374 bp, Zea mays
  Clone ID: MRT4577_105052C.1
atcttcgttttaaaccaaccttggcaatttgccgtagcctttcacccttgtgagtcccgacctttcgctgtcgccgcacagattgtacccaaggctgagaagaagcctgtggccaataagccctcggaggaggagcccgctacagataaggtggagaaggcttctgctgggaagaagcccaaggccgttaagcgtcttctggcggtcaagtccaaggatggcggcttgggcaatgattgggaaaaagaaggtttataagtttcgtggtgactctacaagatcttcatctttaaggtgctttagcatgtgctcccctacttttgcatcttgttcaaggccatgttcattattaacttcttttttatctacatttt

SEQ ID NO: 5548 - DNA, 237 bp, Zea mays
  Clone ID: MRT4577_105053C.1
acgtgctcccatggccgtcaccgtgatctcagtccgtctccacccaaccgtcgagcgccatgtggcctccgcccgccgtgcccgactcggggccagtcgtgcgcaattcgagcgggtggatttgatggtgcaactcaagtacttctaccactagcatattttaagggatcgcaccatcatagaatatttttgacaaaacacctcatgtgtataaagacgcatttggtgctgcaagtg

SEQ ID NO: 5549 - DNA, 255 bp, Zea mays
  Clone ID: MRT4577_105054C.1
ctcagacgtgtatcacacgatagtatactacaattcgaagctctgtgtgatcgtattcatggggaaaaattaaccaaccgtgagcgccgatttcagtgaggtcttctagaaagccaggcgcaagcatgaagcccttatcgaagaaaatagctgagctccactaatgctacgtcttgcgtggcattctgttgggacattagacgtttagtttatgaccgcgcatctctttgcaactatgaagtgccaagtgcaact

SEQ ID NO: 5550 - DNA, 335 bp, Zea mays
  Clone ID: MRT4577_105055C.1
aaagcccaactttttttgaataaaaggccccacccttttggcccccccaaaatggaatttttttttttggttccctgggccacaaatgggggaaaactgggcatttcaaaaaactcccagccccccgggggggggctaaggtgcccttggggttctccctggttttggggacccccacacggcgggggttcctcccgccaggaaccatgaccacgttggcgagcgaaaacttggggaagtccatgttcttggggggctccaaaacaatctcaagggggcgcccggcctttaaaaacaagtcggggggggggggaaaaaatctttgatagaaaact

SEQ ID NO: 5551 - DNA, 136 bp, Zea mays
  Clone ID: MRT4577_105056C.1
atgcctcgtccggtcctcgcggctctcggtgagggaagggaaccaaaccgagacggaggcggagtacgacgcctgccttccctcttcgggcgagagcccgatgcgagattcgcgtccctcctcttcatcttcatcg

SEQ ID NO: 5552 - DNA, 184 bp, Zea mays
  Clone ID: MRT4577_105057C.1
caaaaagttcatataacatattctttaatacaagggccacataacatagttcacaataaatagtccacattacaaggttgacatcacaaagttgacatcacaaggtctacattacaaagttttaatcataaggcccacataaccatgttgcattggttcttttttttagtaccacatttgttcc

SEQ ID NO: 5553 - DNA, 590 bp, Zea mays
  Clone ID: MRT4577_105058C.1
agcttctcctctccagaggtgctgattcacaagccatggatcgagatggtaggacagcattacagtatgcaatcaatggcggaacaagtgacgaagacattcttgcgttattacaggatcatagtagataatcttgcaaccaataccttcagtaaatcgaggcactcttggtgtggtcgactcaactaacaaggcaccagccccgccaggccccagcttgtcgtgcagacaatcctaaatttatggcatgaaagcaacctatgtacatgtcgttatagggcttcagtatcatgacgcgcctgttgtttcttcccccaccttgtgcttgtttaggataagtcatccatatttagtcatctggcaaacggtttggttttgtttgctgcaggtgatgcatagtaagcctgtaaatggagttatttctctttattttctagtcatcttccgtcacgaagtagatttggcattctgatgaaagatgattgtacatatcgagatgtgtgatgttggggacttgttctcaaatgctatgaattaaaaaaaaaaaaaaaaaaaaaaaaaaaaaaaaaaaaaaaaaaaaaaaaaaaaaa

SEQ ID NO: 5554 - DNA, 286 bp, Zea mays
  unsure (1)..(286): unsure at all n locations
  Clone ID: MRT4577_105059C.1
gtggaccggcggcggcaggtggaccggttttggctgccagccaccgccggcggttcatgtaccgacaacgcaccatctgccgcgggcggccctgagggcgccctgtgcgcgttgacgggtgacaagtccaaggagatcttctccgaaaccgcctccaagtcgcgggagatcgcccctgatggtcatcaagcaagccgacctctttggggggggggcaatctctttttttttaacctccctaaaccttanatcctaacaatacactctatctatcctatccattatc

SEQ ID NO: 5555 - DNA, 265 bp, Zea mays
  Clone ID: MRT4577_10505C.1
tcctcctccccgaggaaaagatagggactgcactactcaagctgtcatctttgagcatggttgacacttgacacaacacctgtggtccatatctgctatagaacagaattcgtgagctaacgatatcagctatagaacacctgtcatccttgattagttttgtatgatcatattccgagtgaatacttagtcctttggtattatgtgttagcattttctgttcagaagttgtcagcagctgtaacgtaacagtctgatctcttga

SEQ ID NO: 5556 - DNA, 1025 bp, Zea mays
  unsure (1)..(1025): unsure at all n locations
  Clone ID: MRT4577_105060C.1
ggtaccctcgggtctcggccgggtgcagtgtggttgtctcctaaacggggtgcctctcttccagtcttcctcaagggggcacttctctctcgatcgaagtcgaagcacaaaccctactgcccgcccacctcccacgtagtgtgtgtgctactcgatcttgggtacctcgagcccacgcacaaccttccacactaaccatgctgaacaacgttcttcttcacctaaccagctagcagttcgatcgatcgatggaggggagcagcaacagcccggacgggcagtcgtcgggcggcagccccgaggagcggggaagcggcggtagcggaggccggggcaccggggagccggcgcggtcgcggtggacgccgaagccggagcagatactgatcctcgagtccatcttcaacagcggcatggtcaacccgcccaaggatgaaaccgtccgcatccgcaagctgctcgagcgcttcggcgccgtcggggacgccaacgtcttctactggttccagaaccgccgctcccgctcgcgccgccgccagcgccagatgcaggccgccgcagcagcggcggcggcggcggcggcggcatcctccgcgtccaacaacagctctcccgcggctagcgcaaccgtcggccttccttctggcgctctacaatatcctttggccatgggcgggaccgccgcctgccagtatgagcagcaggcgagctcctcctcgtcgtcgggaagcactggcggctcctctcttgggctgttcgcgctcggagccgccggggtgcccggcaccggcggcggtgggtacttccaggcgtcgtgtggcgcttcgtcgccgctggcgacagggctgatgggggacgtggacagcagtggcggcagcgacgatctcttcgccatctcccgccagatggggttcgcggcggcgagcaccgtcgcctcggnctctgtggcaccgagcttcaacgcacaccaccagcagtattactcatgcgaatcacctgcagcgacgatcacggtgtttcatcat

SEQ ID NO: 5557 - DNA, 816 bp, Zea mays
  unsure (1)..(816): unsure at all n locations
  Clone ID: MRT4577_105061C.1
tccgacgcccacatcagccaggtgatggtcgattacgagttcatcctgcacaattctttcttagtgttgagtatgttgttctttttttctagacataggttacaagtttatttcagaaataagtttatgcaatgtttttctgcaatgtgttgggttcagtcatacattggacagtcacaggtaggttacaggtttatttttgaaataagtatatttctgagacataggttacaagtttaccgatcctctccatgcaactggtctgttatgtttcattcgattttcagttaagtcatagtactaaactgcacagtctcattcgatttttagttaaatcaatctgttaattttgtaccataattttaaatatgttcatcttctctttgtgcgtttaaatatgttagttttgtacaattcaagtctgtcaaaccaattttgctagactatttagtagtacggatatctttaactttgttgcctgctctttgctcatgctccagctaatttcagtgcctaatgctactcatagtactaaactggacagagtagaccttacaattggacgtactgatacgcctgggccttctaggagtgcgtaagggcgaatagaggagcagcgcagcctgngacagggacctgagagcgtatggtgggagaagagcgagaggaagaagcaggagcaagatcaccgtcggccagggtgaccgagatagtgtacagagccattgcgatgcccgtgcctttgcccccgnctccttcgcccttgcgacgcaacatcactgcaaacactcttagcagtgctagaagccatggctg

SEQ ID NO: 5558 - DNA, 789 bp, Zea mays
  Clone ID: MRT4577_105062C.1
ttgggtacctcgaggccggccgggctaaccccactcctcgactcgagcaatccctaggtctccgcgcgaggcggtggcggctgtgaggggattttgattgatttggctcgagatggcggaggacaaggtgcggcggatcttcgtcggcgggttgtcctggaagaccacggagcgcacgctcgagcgcaccttcggtcagtacggcaatgtcatcgaggcacagtcttgcaattttaatctgacagcaactgctgattcagagaggctgcagtcacttccatttctatatgttaggatcttaacaaagttgcaggaaaagaaattcactaatcaattgagctcactggttagcatctgtgggatgatggggtcagtaaaagtcaattggagaagtatgcactattaggttcaattttccgagatgtgctctgttttgtggacagaacttgagacttccttttgccttgctagtacataagagtataagacaactgccgacagctttagagcacagaaaagaatcatcacgggcatgattaatgaactccacgaaccaaacatggtcgccagtgctggaatgaacttgtggcaaaatttggttgcatcattgttctggatcagtttgatacgaaacacagagaaactatttgtcctttcagtagtgaggcaccactggtgatgctggagagtgctgtatgctcatctgtgcctacttctgcttcaaagagcattattctcagtttccattgtgcccttccaattgcaatggaaatgcttagttattcatgc

SEQ ID NO: 5559 - DNA, 694 bp, Zea mays
  Clone ID: MRT4577_105063C.1
aattcggcacgaggcagtctcttcctatttacaagttgaagaaagagcttatacaagctgtacatgataatcaagttttggttgttattggagagactggttccgggaagacgacgcaggtgacacaatatttggctgaggcaggttataccacgcggggtaaaatcgggtgtactcagcctcgtagggtggctgcaatgtcagttgcaaagagagtggcagaagagtttggttgtcggctgggagaggaagttggttatgctatccgtttcgaggactgtacgggtccggacacagtgattaagtacatgactgatggtatgcttctgcgtgaaattcttgttgatgagaacctttcccagtattctgttatcatgcttgatgaagcccatgaaaggaccatccacactgatgtgctctttggtttgctgaaacaacttattaagcgcagatctgatatgaggcttattgttacttctgccacccttgatgctgaaaagttctcaggatatttctttaactgtaacatcttcacaattcctggaagaacattcccagtagagatactgtacactaaacaacctgaaagtgattacttggatgcagcattgattactgtgctgcagattcacttgacagagccagaaagagacatcctttgttttctgacagggcaggaggaaatcgatcatgc

SEQ ID NO: 5560 - DNA, 511 bp, Zea mays
  Clone ID: MRT4577_105064C.1
gggggcccaaaaacggttccgtttctttaaggggggggtttttcgaagggcccttaaaaggccttgataaaacccccctttttttaaaaaaccggggggggggggcccttttctttccccaaattcaatttttccaaaaccccactgaaaaaaacccggcccccccctaaaaggccttttaactaaaaaaaaacttgggggggggcaaagaccccaaaaaaaaccccccggggccgggaagggcccccctaaaaaacaaatttgggatcgggaaaactttttttggcctggccccttaagccctttttttttttttccccccccaaaaaagggaaaaacgggtcctttggcccccaaaccccgggaaaaaccccgggaaccccaggtcccttaaaatttggaaaagggcccccttggccccaaaaaaaaccttaagccacaagactgcttcttttcccgcttggaaaacttggggaaatggcggccgcccccgaaagggccggaagttttt

SEQ ID NO: 5561 - DNA, 419 bp, Zea mays
  Clone ID: MRT4577_105065C.1
cccccaggcaaggatgatctatgtgagcaggggattgggggcccaaaccggggtttaaatggggggggggaaggggtgtttcagggggaaaggaaaattgacaaccgggccgggacaaaaaagaccccgctggggcccggactaatttttaagctaaaacaacaaaggggggtacaaaaaaaacaaaaggtgctaaaaattgggcaaaaaaggggggaacaaaaaaatcaaacaaaacctttctgttgaaaaggccccaatattgggaaaccctgtcttatttttgagaaaaaactaaaaggggggggtggccaaaaaggggggggccatacgcttacaatttggggggaaaatttccaccacagggggttggaacccgtggccttccacatatttttccaactttagcagaaaatttc

SEQ ID NO: 5562 - DNA, 341 bp, Zea mays
  Clone ID: MRT4577_105066C.1
ccggccatggtgcggccaagcccggcggctcgttgcggcatcgtggtcagcaccggcagcagccccacctctgctccctgctagcacgacctctgtccggcgagtttcccctgcacggcggaccgtcaagccctttgcgcgatttcgttctccctgtgaaggctggttcctgcgtgttggttgaagaagagcacaggaaatcccaccatccagatcttctgtggttgcgtcctctgcgactcccggtatagcctcgttttcgtccaaaagaaatgtgccatgtcatttaatccatgaatcgttggttattcaggaaaaaaaaaaaaaaaaaatttgcggcc

SEQ ID NO: 5563 - DNA, 1075 bp, Zea mays
  Clone ID: MRT4577_105067C.1
cctcgaggccggccgggaaggcttttctcggagttgtagcacacacggcacaccacacggtttcgtcctcgtccaccatgctatcgtcctcgcacctcgttaagctgcccctcctgccgcgcggcctcctctcgtacctccccgcatccatcctcccgagcgggcgcgagagcaccgcggacgcagcaccctccacgccgccttcttccaagaagatgtcgtcgtccgcgcagcagcagcagcagcagcaagcgggcagcagcaaggcggagtcggcggagctggcgcgcgtgttcgagctgttcgacaaggacggcgacgggcgcatcacgcgggaggagctggcggagtcgctgcgcaagctgggcatgggcgtgccgggcgacgacgagctggcgtccatgatggcgcgcgtggacgccaacggcgacgggtgcgtggacgcggaggagttcggggagctctaccgcggcatcatggacggcgccgcggaggaggaggaggaggaggacgacgacgacgacgacatgcgggaggcgttccgcgtgttcgacgccaacggcgacgggtacatcaccgcggacgagctgggcgcggtgctgtcgtcgctggggctgcggcagggccgcaccgcggaggagtgccggcgcatgatcggccgcgtggaccgcgacggcgacggcagggtcgacttccgcgagttccgccagatgatgcgcgccggcgggctcgccgcgctcgggtgatgggtgaccgtcgccggccggtgctgcctcctgctcctgcacctgggcctggccatggagcgccgggcacctttttctgcatctgcgtgcttgatttcgtgtgctagaaagaacctgtagatagatattgcttgcttggagcgaggggggagctcacgtcacgtaaccgcgctgttccatcttcgttctgttgctttggtttcgttagaattgattgattgatgggcttgctaattaagtgttgtatgtactggttgttgccctgcccttaaggattgctcggggacaaggtttcccctgttttattcaggtcagggctttatttcttc

SEQ ID NO: 5564 - DNA, 1004 bp, Zea mays
  unsure (1)..(1004): unsure at all n locations
  Clone ID: MRT4577_105068C.1
tgggacctcgaggcggccggggccaccgtccattcccccgttccatccatccatccacccacccaaaagccacacacatggacagcagcggaagctaggcctaggcggcgtcgtcccgtccagctacgcacgcagctatagcctatagctcctccctcccgcaccatccccagcagcatgtcgtcgtcgtcgtcgtccagggcgcggcggggcgggagcgggagcctgcagcagttcccggtggggcggtggcggcacgtggcggtggtggacgccgggtgcggctgccggccgcgccgggccacaaccaggctgctgagccagctgccgtccttcctccgcccgtccccgaagccgccgcagccgccgccgccgccgcgcagcagctcgcgctcctcctcgggcttcttcccgtcctcggccgcctccacggcctcctcatccgccaccaccttcaccaccacccactcctcccactccaacagcaactacgactcctcctacacccaccaccccaccgccaccaagcacctggcgtcggccgccgacaagccgccagcgccggcggcggggaggaggaggcagcagctgcagggccaccaccaccaccaccagggcagcaggaggaagaagcggtacgagaagatgggcggcccgggcgcggacgcggacgcggacgcggacgccgccgcacagaggcggcgtgggcgtggccgtggagaaggagtcctccgacccgcgcgccgacttccgggagagcatgacgcagatggtcctggagatggggctgtgcggctgggacgacctgcgctgcatgctccgccgcctgctcgcgctcaacgcgccccgccaccacgccgccatcctcgccgccttcgccgaggtctgcgcgcagctcaccaccgcggccccgccgtaccacgccgccgnctacgactacgactaccacttccactactgaaaaataaataatttaattaacacgggtggcctggttgtgctcc

SEQ ID NO: 5565 - DNA, 432 bp, Zea mays
  Clone ID: MRT4577_105069C.1
agactattatgtggcgtttgtcactgggttgcttagttgtggcataaaagctgacggcgagtccaccgatgacaacaacgcatcgttgtatgctgctcactgctccttcctcctccaggctatgatgcgcctgacgacgtgccaccaggtaagtctatgatgcgcctgacgacgcgccgccaggtacggtctaccttcacacgatggcacgctaagactatccgcaaccgatacccctaaatttttccccctatatcactttttgcctctatttttccccctattttttcatctcccgcagcgggatccccctaaatactccccctataccccactaccactataaaatatcattttctataccaactatcaactgtttatctactaataagtacgtcgggacccacagtacagtgttgtagggagtgaaca

SEQ ID NO: 5566 - DNA, 969 bp, Zea mays
  Clone ID: MRT4577_10506C.1
caatgaggcacgggtgcgccggcgacaagcggccgttggcgttgcccgagcccgccacctcctcggactcgtcctccaccggcggctcgcccaagaggcggaagcgaggcgaagccgccgccgccaacatggccatggcgctggtgcccccgccttcccagcttagccggccggcccagccatggttccctgccgccgcgccggtcgagcaggcggcgatggcgccgcgcgtggagcagctcgtcatctagctagccccgcgcgttaaaccgggctcgcggcgagacaatgaggcgtgcaagtgcaacgacgggtgagccggcggaaggcggaggaaaacaggacgaggcccttgcgcgaatgcgacggcgcgcggaatgcgataagctcgggagcaattgggggtccggatgccgctgttgctccgtgcaactcgcgcaagtggaaagaagctgtctgtgtgtagattcatccaagtgtcttgtctgcaaacggattttcggtatatgcgtccttgtcacctgtcagggtggtgtggtgtgagggcttgggcttgggcttgtgctgctgataagtttggagatctgtacaaagaaaaaacgtagggagaagattagatcaagaacagtcgttgaaaaacagaaaaaaagaacaaaaaatgggagcgccgtggtctgataaatatcctgcggctaaaccaggcgcgcaagtcaacagaacagcgacctcaactcatggcatggaatcgaaatcgaaatcaccaccctgaaaccaaaactgcggaggcgaagcgagcactaaaacaaacgctgctctgctgacgtggcaggaaggtggcttgctcacggcagcagtatcgagacgagaggtgggtaccacagctccaacgttggatttggactgagccgattgagtatgtaacgaaacgatatcatcgtttggctttaatctatatcgagattttgtctt

SEQ ID NO: 5567 - DNA, 153 bp, Zea mays
  Clone ID: MRT4577_105070C.1
gctcattttatttcaaaaaacaccttaccctgggcgtcttttacaagagttggggacaccctccttctgccaagtccggtgaaacgggacttgtatcacatgcacaagcgaaccctctcttggtagggactccctctctcgtctaaagctaat

SEQ ID NO: 5568 - DNA, 283 bp, Zea mays
  unsure (1)..(283): unsure at all n locations
  Clone ID: MRT4577_105071C.1
acaccacataaccaccaccagctagcagcagcagtttcggagggagcttaccgncgctgctagtgcctgacaactgtcgtgtgctgtgctagctccgagaagcttagcgcgagccaaaagccaaaagaagctttcgccggccgggtgatcgaaatccgccgaatgggaacccgactgtgctggcttcggctcgggagctggccggtactactaagcccaccaagcggggttccaaccagccgcggcggccgtccagaaaggtccggccaaccaacaaggacgg

SEQ ID NO: 5569 - DNA, 165 bp, Zea mays
  Clone ID: MRT4577_105072C.1
ggggggggaatcttggcaggaaggaaaagcgggttaggaaggtggacacctttgtgccgtacaacgttggccaccaatggaggaagttcggggagaaaaagatcaacatcaccaactttcccaggtattactacagttgcgcgttcaaggtcaacatgtactgcc

SEQ ID NO: 5570 - DNA, 306 bp, Zea mays
  Clone ID: MRT4577_105073C.1
gccggccgggccgtcgacaagaaaccgaccagacgagtgtttccgtagttgcccaactccactactccaatgtggctcacaggaaggctgcggactcgcttcaagctcaccactacctggtaccagcctatctccaccacaaggagggagtgcatgttgaccgtctacaccttgctggtgctatcgttgcgggacaactgctgaatctgagactgagcaccccgtctactgagcattgaaggtcgcaatgccgatagatatgccaatgcgctgacagtacgtgaccgatgcgcatacatgacagct

SEQ ID NO: 5571 - DNA, 414 bp, Zea mays
  Clone ID: MRT4577_105074C.1
ggaaaaaaaaacctttttggggggcccaaaaaaaaattgggccccataattggggaatttttaggttcccccaaaaaaagcccaaatttttaaaccttttttaaaagccgggggggggtttaaaagcccaaaaaaaaaaaaacattttcccccgggggttgggtttgtaaggccggttttttaaaggagtttccccaaggttttaggagagccaacctggttttttccccccccggggcccgggtgaaaaaaaaccctggccagttccaattttttgggaaaaagggggggggggcccatggtttttttggggaccttaaacgggggggggacggcctccttggggggaaagccccccttttaaccccctttaaaaatggaccgccccgcctgttttttggcccaaaagggggg

SEQ ID NO: 5572 - DNA, 952 bp, Zea mays
  Clone ID: MRT4577_105075C.1
gtagagccattataaggtattgccatcaatttgcttgcccaatcaattctcataggactgtgtgcttcaagccaatccattcctacgaccagttataagttgtgataggcaacaacagaaggtctgacacgaaactgaaatcttgtataaaccattccacttgcaatagctgatgttcacagcagagaacatcttcgttggccagtcgaactgataaaggaaatggcctggtagagaaaccatgcaaagaaggtgacaatcgtgtactaaaaaatgtgtgagaactgccagagtctaccagtattaggagaggtgtggactgaatggaacccttcagtttcagtgtttgaggaccctcggtgccagtccatgttgcttgagataaagccatcatgatctaaggagaaacaggctctgggattttctacttcaccatcagtactgaccagctccaacacttcctctaatgcatgaagctgaactgatgatgcacacatgtgcccatgcgaccacttctcggcgcagcgaccacacagaccacgtgctcaccgataactgcgaagagaggccagtttatctgaatgtgaagagggcttgctcacatcagtgaatttagcaatagcatagttgcctttagggccccgatcggacttggctgcttcatgaattgtataaggggtcttctgagccgtccggttgaatgatgcctccggatgccgagattgagtgaaatcggtcgcttcttcctgcaccttgacggggtcgcgcgtttgggatcggtaccaaactcacaatcccggtgatgttgttcgaagcggtggccaaaaggcccgtcgacagtgaagctggcaggtgggcgctcggctgccgacccgtgcggtccgaaaagacccggttgctggaaggctggggcgcgatgctcgggttccatgaagcgcctagcccgcctcgt

SEQ ID NO: 5573 - DNA, 258 bp, Zea mays
  Clone ID: MRT4577_105076C.1
gacttctcatcgccctcgggttcggcttcgggttcatgaggttctccggagttcggttacatgcgtggatggctcgtgatggctgtctccgacgctgcttatcgccgcttccttggcggcagcgcctgagccagcgacgaaggttcgcttcatagcagctgcaacaactaatgagatgtcatcgagtccaagattatacgcgatctgtagagtcatcggtcatgcagtgtccacttcctcagatgctgcacagaggaa

SEQ ID NO: 5574 - DNA, 343 bp, Zea mays
  Clone ID: MRT4577_105077C.1
aattgtatatttgtggaagcaggatattcagctgtgcatatcctgaaaattcgaagtgtcacagaatgattatacacacacatttaaggctacatttttattgcaataattccattacctttttttccgtgaataaaaaaacatgaatatcttatctgcatgtggtaacaacaaatattggcaactgcatacgctgaacatttcatttgccctagttttctggaaacggatcataaccttgtgaatattcaaggcaaactggagttataacttacaccacaacaaaggctcctaattacacgacaaccaatgctgtgaagttcacttagaaggcctttgtgcc

SEQ ID NO: 5575 - DNA, 516 bp, Zea mays
  Clone ID: MRT4577_105078C.1
ggggaacggggatttaaattgatgatttttaaggcaaacctggaaggaaacgttgttttaactggggggctcccatacatggttttaaaataagttcaaaggctttattttcgttaggacaacagttttggggatctggcataaccaagtttacaactggggaggcaaaacacaagcccccccggcccatagccagtcttcaaacataaaccccctttgcaagaagcccgaacagagacccaaagcccaaaaaaacaaaagcaacaccggggggggggatctcctttgacaggctacggttcctccgggatgaagttgcttcataaatgaaaaaggggggggggaacatgaggcctacggatcccatgacaacggccaggggggggtaccactccaccggcacggggctcgaaattgccttcccccccattccgggaaatctgctgccgttgtaatcgccgcccgttccgcctgccttgtggcccccttggggccgccgggacctcgggccgaatt

SEQ ID NO: 5576 - DNA, 443 bp, Zea mays
  Clone ID: MRT4577_105079C.1
cggaaccccggggggggggttcttatgggcccgggcaaaggccttgggagaattaaccttggggcggggagagccggggcccccccaaactaatggaacaaagacccctccggggtccccggtccccccactacgggggccctcttaacccctttttttggggggggcccggaaatatagggtttccccaacagggaagggcccttggcccgggtatccaacgggaggggggttctaagacggggggcccgcctttcatttggggtcaaaagggttggtggccagggctacaaacgggaccccccccggggctttatggggttaagcttcccccccataccctcgggggacagcagcccaggggatatacagcgggggcccaggggaccgggagggctgctgcttaactgaaccggcccggaaagcccctaccccaggggggg

SEQ ID NO: 5577 - DNA, 230 bp, Zea mays
  Clone ID: MRT4577_10507C.1
attcggctcgagggcatgattttctggacctgtttttcctgatggtgcccctgatcctaatgttgacatgcacattgccaatcgcggtgatcatagcggcacggtcctgtcctgctaccacaatgaagatggccgggccaaaggtcgtcccgacaagcaggagggacgacgtgctctactggatacatggttagaaccgaaacttgctgatccttgaggggtgtcataaa

SEQ ID NO: 5578 - DNA, 419 bp, Zea mays
  Clone ID: MRT4577_105080C.1
attcggctcgagcaaatactctgagctgtaccgggcagaagggcacgttctgttcgcatacttggagaatgatgatgaaagagcaaactgcacgtattgctgaacagccgctgtgcacaaataacaaaggtagtcgcgtcaaactactgtactgaccataatgttactactgtatgcttcttctgggctatgaataataataataatcatgaatgagtcagtaatcctcaccgagtgacctagatcacttgctaatgaaaagcggacccggacctgtgccagtaccttcaactccaacgcacggtagtttaataacttcagctaccactggcgctctttcactcttagaccaagagtgccacgactaatagtcgcgtgccgggtcatagtcgcgcacgccatttgctgatacaaggtgg

SEQ ID NO: 5579 - DNA, 1480 bp, Zea mays
  Clone ID: MRT4577_105081C.1
cctcgaggccggccgggccctctctctctctctctccaaccacaacggaatcgaaggcaaaccaatagacatccttattaacttggcctgatgcactcctccattcctcagacaatcaaatatccccagatagctaggtggttggcacgcatggagaagcagctgcctgctcttaccggtggctcaaaggcggccaccacgacgcccttctacctcgccttagatcacagagccgccgccacgtcgtcttcaccgccggcggaggcgccaacactgccgccgtctgctgcggctgtctcagatccttctagacagtccaacagcgataggggatccgagataatcaaagccaagatcatgtctcaccctctctatccggctctcttgagagccttcatagattgccggaaggttggagcgccgctcgagattgtcggtcggctttctgccctcgctgatgacgtcgaaacgaattcagacggcagacaagaagaacaaccagcagacccagagctcgatcagttcatggagatctactgtcacatgttggtaaggtacagacaggagctcacaaggccaatccaggaagcggacgaattcttcaaaagcatggaggcccagatcgactcattttcattagatgacaatggctatgaagaaggaggcggttcctccgacgaagatgagcaagaaaccgtcgacttgggcggccttccggtccctgagaccggcagcccgtccggagagggcaaggagctgaagaaccacctcctgaacaagtacagcggctacctgagcagcctctggagggagctctcgaggaagaagaagaaaggcaagctgccgagggacgcccgccagaagctcctccactggtggcagctgcactacagatggccctatccctcggagctggagaaggcggcgctggcggagtcgacggggctcgacgcgaagcagatcaacaactggttcatcaaccagcggaagcgccactggaagccggcgccgccgacgatggcgctaggcacaccagattacaggatgggccagcacggcggcggtgcttctagcagctcggcctccgctggtctccgcgtgcaggggcagtacttcaccggcggaagctcgtatccccgtggcccgtgacgatgcatgcgtcgcctgcaggctgagcgcgtgaggtgtcgacatggattgttgccgtgcatgcatgcatatcagcatacgtatacatacatacgtgatcattatttgggtatagatggtgtggacgtgtcgtgtttcctatacagaaatttgattgtctccttacttgcattgctcatacgcatacatatctacatatatgcagctgatgccagagttataaagttgtaactatatattattattatttgtcttactaacatgagagcagttgtacacgtaaaaaaaaaagaatgcatggatgttccttctaaaaaaaaaaaaaaaaaaa

SEQ ID NO: 5580 - DNA, 536 bp, Zea mays
  Clone ID: MRT4577_105082C.1
aggcgtggcggcacctttaaataggctggccccaagaactagagaacatgtcaatactgtttaccctgtgcttagacgtttcccacctaccacctatgagctatcatatactatatgcttctggaaacactactaatgacatgcaaagggggggaagccactccaagacatactggatcactccatctaattcaactgccccttctaccgactcttgctgctgtgccatcaataacgcaactattagttgctcatgctccaatgacactaaaacaactacgaaggtcttgctcatgcacaaagcggaaactgttgtttagcataccagagcgccattaagcattgttaccactgcgaaaactgcaacgtgtcagaaaactgatgataccatatagaaggcaccctctgggggaagcatagattccaactgcaagatcaacccaaccgactcagagatgaataatatcaaggcaaacgggctactaatgtccaagaagagagaggtttgaggcataaaacgtaatgagatataataa

SEQ ID NO: 5581 - DNA, 155 bp, Zea mays
  Clone ID: MRT4577_105083C.1
tccccctgtcgatggcaccgcaccgcatttctccagcattctggccataggcgccccccttggcgatgagaacggtggatgacatgaaatctctccttatagaggaaggcggaacgtccgcaggcgtgcgccgcatcgggtattgaggcgcaagg

SEQ ID NO: 5582 - DNA, 191 bp, Zea mays
  Clone ID: MRT4577_105084C.1
ttaataaatttgatcaatcggcactaatgcccggggggataaatatgagaataggcatgtatatacagtagcagtagcacgtatgacacatcacacacttcctctactagagcttaacatcgcatgggggccacaagcatgcatgcatgtggcatatcgccgttagcggcggaagcgcaattatctcccaa

SEQ ID NO: 5583 - DNA, 332 bp, Zea mays
  Clone ID: MRT4577_105085C.1
ggccccttttttttttttttttagattgatcatctttcttgttttactattgcatgccaccattattgtatacgtgcatggcaaggttgtatacgtgcatggcaaggtgatcaccttccatctctagtgcatgactatacttagaaggtactaatcaggtgatcaccgtccatctctaccgggcactgtttctatgaaccggttggagcctagtctatatattgttggtcttgttaatcaataatacaacaatcattcgactatcaaaaaaaaacttggtgcaccaccatgttcaagccatatgattcatactgttccattggctcaggatc

SEQ ID NO: 5584 - DNA, 3681 bp, Zea mays
  Clone ID: MRT4577_105086C.1
tcccctcctacgcccctgccgattcttaatcttcacaacgtctgcgcgtagcaggctagcagtcggcacggcttcctcagatctgccggacgacttgctgttcgtcaccgactcaccagcaaccaacgtcagccatcaggcggcggcgcatcgagaaacagggcggcggcggttgcttcttccacctctccggagtagaagatgccttcacacaggagatcaatcattcgtacgtccctagataccatgtgttgagttggatggaaactgtggaggggatggtggccggtgtggcgtcgcttccgccggtgtatttgatactgaacagagatcttcttgagacgggatggggatggaagaggctggtgccctacagacctggttatgttgagttgcatgtgttcaagaaataccttggggactatttcgaccataatcgtgaagcttttctttgtgccgagcagaagcctgatccatttggatggattgttgctgaaaagagtgccctgattgctgcagccaaatcgggcctcaattcggacgaggccggggcggcgtctcggggactcgcttcctagcagtaccactccttcctccattcctccaagccacgccacacctcggcgcgtcccgccaaaaccccatcgatacccaaaccctagccagcccctctcccacgcgccatgtccgtcgcgtctgcggcggcggcggcctccctcatcgcctctacctcgctctccgtcccagaccgcatccgcctccatccccgccccgcgcttcctccactaccgtgcttccgccggcgatcgcgggtctgcctcgtacgcgccatcctcgaggaccgcccgtccccgcctgccgaggaggacgccaagcgctacgggctcaacgggaacgggagcgggctcggatacgacgatgccgccgtccaagcgtacctcggaagcaacggtaacggtagcgccagcggtaacggcggggcggtgaagcagaaccccgaggttgccgggagcagcgcggccatagtcccggccccggtcccgccggcggagggtgagaggagaaggaaggagagagtggaggagatcgggagggaggatgcctggttcaagcagagcagcgcagaggtttctgttgctcctggtggtcgctggaatcggtttaaaacctattcaacaattcaaatgtgttcaagaaatagcttgggggtttttacatttatattcaaggcttggctcaacaatcaaaagttcacatacagagggggatgactgaggagaaaaagataatgaggaggaaagttcttgccaagtggctaaaggagagtcttttgagattaggccccacattcatcaaaatagggcaacaattctcaaccagggtggatattctcccacaggaatatgtggatcaactatcggagttacaggatcaagttcctccatttccttctgagacagctgtaaaaattgttgaagaagagctgggggcatctgtaaatgagatatttgatcgatttgattttgaaccaatagctgctgctagcctcggccaggttcatcgggcacgtctgaatggccaagaggttgtgatcaaagtgcaacggcctggtctgaaggagctgttcgatattgatctgaagaatttaagggtaatagctgaataccttcagaaagtggacccaaaatcagatggcgccaagagagactgggttgctatttatgatgagtgtgcgtctgttttatatcaggaaatagactatatgaaggaagcatttaacgctgaaaaatttgctgaaaacttcaaaaaattggattatgtgaaggttcctgaaatttactgggcacacactactcctcaggttttaacaatggaatatgtcccaggaattaaaattaacagaataaagcagttagataagttaggagtcgatagaaaaagattaggtcgttatgctgttgagtcctaccttgagcagatcttatcccatgggtttttccatgctgacccgcatccaggaaacattgctgttgatgatgtcaatggagggagacttatcttctatgacttcgggatgatgggaagtatcagtcaaaatattcgggaaggattgcttgaagtattctatggagtttatgaaaaggatcctgacaaagtgcttcaagcaatggttcaaatgggtgtccttgttcctactggagatatgactgctgtcagaagaaccgctcaatttttccttaatagctttcaagagcgcctagcagcacaaaggaaggagagagaaatggcaaccgcagaactgggattcaaaaagcaattaactaaggaggagaagtttgaaaagaggaagcagagacttgctgcaatcggagaggatcttttggcgattgctgctgatcaaccatttcgcttccctgccacatttacatttgtggtcagagcattctcagttctagatggtattgggaaaggccttgatcctaggtttgatattacagagattgctaagccatatgccaaggaattgctaagatttaatgacgctggtgttgaaatagttgtgaaggatgcaaagaagagatgggaaaggcagtcccgtgccttttacaatttgttccgccaacccgatagagttgaaaagctcgcacaaattattgaacgtttggagcaaggtgaactcaagcttcgtgtcagaacgctggaatcagaaagagcatttcaaagagttgccgctgtacagaaaacaattggatatggagttgctgcaggtagtttgatgaaccttgcaacaatgttgtacttcaattcaatccggggaccagcaaccattgcatactccctctgcgcatttttcgggctgcaagttctgatcgggcttgtcaaggttaagaagttggatcggcaggagagactgataaccggtactgcatgagctatgagttattcatgatcaatcggtgagaactgaaccgccacttttcagcgttgtgcgtcgtcgcgacaccttttttttgcttttgcccaaattttacccccaccacgatttagcataggcatgccggttacccctccccccccggttgtatgatagttgtatgtaaatgtgatgataacatataaagatgtacatagtgtataatagacattctccatgtattgtttcgttttcatgatgtaccagtacgtacaggattttctttcacatgctacctgattggtttgctggctgcgcatacccaggctatcgtcagacttgtggcgggtccgatatggacatttttggcgtaggcaaataacttcaaaaggacttattttgtatccgctcatggtactaacgtctctcgcgtgcaggcaattaaatatatgctcggccaaagtcaatgcacattggcgcataatgagatggtatggataaccaaactgatggatgatgattcaaggtgaaatgatcgatttggaaagtgatttttctatatctttctcacaactttattgctgacccgagtgtttgagattcgaacctagagcatatgatgacgtcgttactcaacatatcatcaacactactctagcctaacattgttgtgaatttaatctacaataactcttcgtcaaattgatatgttcttgaccttgttggacgaccaaagggtgatcctccggatcaagggcccaggcaag

SEQ ID NO: 5585 - DNA, 1825 bp, Zea mays
  unsure (1)..(1825): unsure at all n locations
  Clone ID: MRT4577_105087C.1
ccacgcgtccggctgaataccttcagaaagtggacccaaaatcagatggcgccaagagagactgggttgctatttatgatgagtgtgcatctgttttatatcaggaaatagactatatgaaggaagcatttaacgctgaaaaatttgctgaaaacttcaaaaaattggattatgtgaaggttcctgaaatttactgggcacacactactcctcaggttttaacaatggagtatgtcccaggaattaaaattaacagaataaagcagttagataagttaggagtcgatagaaaaagattaggtcgttatgctgttgagtcctaccttgagcagatcttatcccatgggtttttccatgctgacccgcatccaggaaacattgctgttgatgatgtcaatggagggagacttatcttctatgacttcgggatgatgggaagtatcagtcaaaatattcgggaaggattgcttgaagtattctatggagtttatgaaaaggatcctgacaaagtgcttcaagcaatggttcaaatgggtgtccttgttcctactggagatatgactgctgtcagaagaaccgctcaatttttccttaatagctttcaagagcgcctagcagcacaaaggaaggagagagaaatggcaaccgcagaactgggattcaaaaagcaattaactaaggaggagaagtttgaaaagaggaagcagagacttgctgcaatcggagaggatcttttggcgattgctgctgatcaaccatttcgcttccctgccacatttacatttgtggtcagagcattctcagttctagatggtattgggaaaggccttgatcctaggtttgatattacagagattgctaagccatatgccaaggaattgctaagatttaatgacgctggtgttgaaatagttgtgaaggatgcaaagaagagatgggaaaggcagtcccgtgccttttacaatttgttccgccaacccgatagagttgaaaagctcgcacaaattattgaacgtttggagcaaggtgaactcaagcttcgtgtcagaacgctggaatcagaaagagcatttcaaagagttgccgctgtacagaaaacaattggatatggagttgctgcaggtagtttgatgaaccttgcaacaatgttgtacttcaattcaatccggggaccagcaaccattgcatactccctctgcgcatttttcgggctgcaagttctgatcgggcttgtcaaggttaagaagttggatcggcaggagagactgataaccggtactgcatgagctatgagttattcacgatcaatcggtgaggactgaattacaccacttttcagcgttgtcgcgacacctttttttttcttttgcccaaattttacccccaccacgatttagcataggcatgccatacccccccttccgggttgtatgtaaatgtaatgataacatataaagatgtacatagtgtataatagacattctccttgtattgtttcgttttcatgatgtaccagtatgtacaggattttgtttcacatgctacctgattggtttgctggctgcgcatacccaggctatcgaaaaaaaaatgggaaaaagnaacngncaaaaaaaaaaaaaaaaaaaaaaaaaaaaaaaaaaaaaaaaaaaaaaaaaaggaaaaaaaaaaaaaaaaaaaaaaaaaaacggaaccctggataggaaaagaaaaactcacagcataggggggacgaaagcacgctgccttggctgggacgtggacaacatccgggggtggggacatccctgggcctttcccttttgctcccctcccttatccctcc

SEQ ID NO: 5586 - DNA, 2195 bp, Zea mays
  Clone ID: MRT4577_105088C.1
tttggcagtatagcactatagcatttagagacatgtccttttctatgatggttctttttcttgactttaacatagtgagtgtaactggcactgtttaatcgaatcagttagagttcatcatttcatcctttatgcggttctgatataacattcatattggatttccttgccatgttacgttatggagactgttttgtcttgactagagctttggtaacaaaagggagactgaaattcagagtgctgagacgttaccagatattcgtagagatgaaatggctggctcatccaaaaaaattgaactacaaaataagtctaatgatggagtaaaaacaaaagtggatgcgtcaaaagatagcgatggtaaagaattcaaacctggtcacatgattttatgttaacttatgctctgttgctggtaagttagtagtgtgctattctattgtgcacatgtagcagtaatttgttatttcattgcatgcaggtgctccaagtggaagtgagaagaatgtgcgttccaaatgccttaatggtattacttctgcaaaggtggctgagcaaataatggataatgccttgaggatcacggatgcaagttcacgtcgtccaaccaatcttggcaaagatttggctatgactgaaccagcagctgatagaaaatgccaatctttagtgatggaaaataatgctgtcaaagaaaagaaccctggtgaaaagtcgaagagtgctgtaataggtcatgctgattcttacccctcccaatttctcgagaccaacttgggaaaacaacagtatcgtaatggttacaagaatcaagaattcagggaaaaagatatctttaatcactcgaattcttctgccttctcaagatatggcaataaaaggatagaaccatcaggtgagattcagtttttcccttctccctgcgtcattgggcaagggcatgttaatggcaagaacccagttttccaacccgatggggtgttgctgcctcccaatgaacataatacaggtgagagtacaaggcaagctcgaatttctctggacagtaggacagagggtgctgccatcctgtgttccactagtgccagggaagatgctggtgcaaatagttcttcccatagaaaggacagtatgagccatccctcatatgggtttatacctgttccaattcctgttggtgccacgatgccgtaccattatggtgcgattctgcagcccgtatactacccacagagtcctcttatgcactgtgattcagctggaatcaacaaggcagcaatccagcatgcctctgggcaacctaattaccatgaagctcccggtaaaccatctcatgttcttattgaacacaaacagtcagaggaaaaccaccagttgcatcattcaagacaaattcttcgggaatcaggagaaccaattgacatggcgagagctcacgtggatcgtgctaaccagactgcaagctgcagccaaggtatctgtaaaggaagtggatgcacatgtagtggtgaagccgatatcaacgcaaacacaatggttgccctagagagtggcaacgagagtggaatccaaaatggtgacaggtctcgccgtgaagctgcgttgatgaagtttcgcatgaaaaggaaagatagatgcttcgagaaaaaagttaggtatcatagcaggaagaagctcgcagagcaaaggccaagagttaagggacaatttgtaagccaaaagctgaactcagctacaacaacagacgcagaagctgactcgtgaccggcgtcaagtcatcactgtaacttattcttcccttcccaccaggtgtgggcaatcggacttgtaagactgaaggctggcagaagttttttcccttccatggttagcctttctgcacaacgggtgaactcttgtgtcgggtgtttggtgccgttgtggccttatttttgtaaagtgcatcaaattgacaaatgttcagaggggaatgggttgggggtttaggaaaacggtgcagctgccagatttcgcctatgtacttagatgtttgtgggggtgagaaagcagagcatgtacagcttattcacccattttgttgccattacactagtagtgacttgtactatgacaacagtagacattgttgtacagccttaccagtcagcagcgggtctttctcattttatttattagttattaatcctgtgggt

SEQ ID NO: 5587 - DNA, 2568 bp, Zea mays
  Clone ID: MRT4577_105089C.1
cattgggtacctcgaggccggccagttcggcacgaggctcgcaggcggcggcgcatcgagaaacagggctgcggctgttgcttcttccacctctccggccatccggcggtccatcgttccgtgccggcggcctcccctcctacgcccctgccgattcttcaatcttcaccaacgtctgcgcgtagcaggctagcagtcggcacggcttcctcagatctgccggacgacttgctgttcgtcaccgactcaccagcaaccaacgtcagccatcagccggcagcaggggaagctgggcggagggtcattgcggcacggcgtccaggcgtacagaaggcaccagcaacagcccatggcaaacgccgcagatgaccctatggcagatgaagccggagtagaagatgccttcacacaggagatcaatcattcgtacgtccctagataccatgtgttgagttggatggaaactgtggaggggatggtgggccggtgtggcgtcgcttccgccggtgtatttgatactgaacagagatcttcttgagacgggatggggatggaagaggctggtgccctacagacctggttatgttgagttgcatgtgttcaagaaataccttggggactatttcgaccataatcgtgaagcttttctttgtgccgagcagaagcctgatccatttggatggattgttgctgaaaagagtgccctgattgctgcagccaaatcgtgcctcaagatggagaaggcacttctcaggtactgtgctagctttctcactcctgacgacaaaaggctgatcctccggatcaaggaccaggcaaagcaaatgatccaatcagaggtgcttcaagcaatggttcaaatgggtgtccttgttcctactggagatatgactgttgtcagaagaaccgctcaatttttccttaatagctttcaagagtgcctaacagcacaaaggaaggagagagaaatggcaaccgcagaactgggtttcaaaaagcaattaactaaggaggagaagtttgaaaagaggaagcagagacttgctacaatcggagaggatcttttggcgattgctgctgatcaaccatttcgctttccctgccacatttacatttgtggtcagagcattctcagttctagatggtactgggaaaggccttgatcctaggtttcatattacagagattgctaagccgtgagtactttttgcattactagcatctgaatacttattcaaaaacacgcaaagcttgcacatcttcacttattatgtactgtctatattttcatcttgaacttttctggtactgacttgaaatgtctgttaaatttgctagaaatgccaaggaattgctaagatttaatgacgctggtgttgaaatagttgtgaaggcaagtttcaacatttggtcaaagctgttaacctatctctatgatagcacatctcctaagggttagggcttgtttggttaggagcggattgaaggggattggaggagattaaatcccttgctagtcaaaattgaatagaaagtgatttaatccctctcaatccgttccaatccccgcaaccgaacaaggtctaagtattttcatagtgagagttttaattgctcttgattgcaacattatgtcaggatgcaaagaagatatgggaaaggcagtcccgtgccttttacaatttgttccgccaacccgatagagttgaaaagctcgcacaaattattgaacgtttggagcaaggtgaactcaagcttcgtgtcagaacgctggaatcagtcagagcatttcaaagagttgccgctgtacagaaaacaattggatatgtgagttcagaattattaatatattgcttttttctatgttacttcatgctgaaccatgaaaagataaaggcaaacttgtctgctggatgatactgtcactaagtgcatgcaaattcagttagcctgcactggaattgttacaagaaaattgagagagggcgcctgcacatttgatgcaagaaatctgatcaagtcatcaagagaaacaatccttatatcatgaaattgttttctttctttgatacagcacattttcccctgaagtttcatatcatcataatgtgctttaaatcttgctctttgtcattcagggagttgctgcaggtagtttgatgaaccttgcaacaatgttgtacttcaattcaatccggggaccagcaaccattgcatactccctctgcgcatttttcgggctgcaagttctgatcgggcttgtcaaggttaagaagttggatcggcaggaaagactgataaccggtactgcatgagctatgagttattcacgatcaatcggtgaggactgaattacaccacttttcagggttgtcgcgacacttttttttttttttgcccaaattttaccccccccacgatttagcataggcatgccatacccccccttccgggttgtatgtaaatgtaatgataacatataaagatgtacatagtgtataatagacattcctcccttgtattgtttcgttttcatgatgtaccagtatgtacaggattttgtttccc

SEQ ID NO: 5588 - DNA, 798 bp, Zea mays
  Clone ID: MRT4577_10508C.1
atatgctaccgtcaacgccacacccaacagtactttcagttattcattcggaaattcctactatattaaatgtgttagtggccacgcgtccggcagagagacaggtcctagttcgggatgatgaaacgggaaagtctgttgcatttgatcagaggatacggaatctgaaggaagtatatacttctgatggttgcaaaatgttttgtagaggttctgttcagaccattcttcctgcaaataggaactggagagctggtcgtttgtgcacttctctagaagaaaaaataactgaaatggagcaggaagctactgaaattaagcaaataaactcagagaggttggatcgcaaaaggaaattatttgctgatcgagacagcatcgatttagaattgagacagttaaagagaaaaagagaagatgaggagttgcatgtggagcgtaaaaaggcacagttggttgataccaagaaaatttctattgacaatagtcatgcagctgctgtggatacctctgagctagtagttgaaatgatgcaagtgaaggaagacattgagaaccaagaattagttgtgcagaaaattaatttgaaacttacagatgctttgcaagaagagaataatagaagagcgtcttacaaggacttcattgagtctgtacatgctgaaatggggtctattagcgatgctgagcgtgaattgcagcttgttgaagaaaaaatacatgatgctgagcaagagaaggctcactatgaacgtgttatggaaacaaagtttttaagtcctattacagcgactgaat

SEQ ID NO: 5589 - DNA, 879 bp, Zea mays
  unsure (1)..(879): unsure at all n locations
  Clone ID: MRT4577_105090C.1
gcacggtgctcagtgttgcaggcggtgcggtggacttccttgtgaaaccagtgagaaagaatgaactgcgtaacttatggcaacatgtgtggaggcggcatgcaatgaattgccagacaaatggatcagaaaataatgcagccagcaatcatattagtgccaacgttgctaatgggtcaaagacaggagaaaacagcgacgaggaaagtgatgcccaaagctttggtagcaagagggatactgaaattcatagtgttgaggcggtacaagatattcgtagagatgaagtggctggctcatccaaaaataacgaactacaaaataagtcttatgatggagtaaacacaaaagtggatgtgtcaaaatataccaatggtgctccaagtggaagtgagaagaatgtgcggtccaaatgccttaacggtattacttctgcaaaggtggctgagcaaattatggataatgccttgaggatcacggatgcaagttcacgccgtccaacaaatcttggcaatggtttggctatgactgagccagcagctgacagaaaatgtcaatcttcggtcatggaaaataatgctgtcacagaaaataaccctggtgataagtcgaagggtgctgcaataggtcatgctgattcttgcccctccgaatttatggtgaccaacttggggaaggaacaccatcttaatggttacanaaaaccaagaattcagggaaaaagatatctttaatcactcgaattcctctgccttttcaagatatggcaataaaaggatagaaccatcaggtgagattcagtttttcccttctccctgcgtcattgggcaagggcatgttaatggcaagaacccagttttccacccgaggggtgttgct

SEQ ID NO: 5590 - DNA, 1010 bp, Zea mays
  Clone ID: MRT4577_105091C.1
aattcggcacgagggcgtgtaacacctggcgtaccggacccgaaaattttcttcgaacgagctctgagcagtgtagccctcctgtccgctgttcggtgcccgctgcccacctccctctcctccttccgacctcgccgcctccctccctaaactctaaaccctccaccagccgaagctactgccgcggccgcagcagaggtcgcgacgacgaacgctgaagaagcgccggcgagggagagtcctttactttttcctatgctgtagcaaaacaagcctatatcatcttccaaatatactcgttccgtgccggcggcctcccctcctacgcccctgccgattcttcaatcttcaccaacgtctgcgcgtagcaggctagcagtcggcacgacttcctcagatctgccggacgacttgctgttcgtcaccgactcaccagcaaccaacgtcagccatcagccggcagcaggggaagctgggcggagggtcattgcggcacggcgtccaggcgtacagcaggcaccagcaacagcccatggcaaacgccgtagatgaccctatggcagatgaagccggagtagaagatgccttcacacaggagatcaccgattattcgtacgtccctagataccatgtgttgagttggatggaaactgtggaggggatggtggccggtgtggcggcgcttccgccggtgtatttgatactgaacagaggtgcgattttcttttatatttcttccagttcatgttctccttgtgtggctggtgctggattcaaccgatctagggaagagatgttagttgatttgctgtaaaaatcaatatgttaacagagatatatgatacatgctcctgcttgctcatgatgccggtttggtgccaaggctgtatgccccccttcctatctatgttttttgttctataatttgcaggtttcttagttttttactctagtatttgcctattacgtatcacgttgcatctaattagctcttcttcgttgcccatgcc

SEQ ID NO: 5591 - DNA, 1261 bp, Zea mays
  Clone ID: MRT4577_105092C.1
aacaaaataattataacccgttattttttaataagacgagtggtctaagttttttttttaaaaaaaagtcaaggtaccatatatttaccatatatttaagacatatatttaccatatatttaagaacggatgtattactatgctaatcaagtggaggtgtagcaaacggctagtaaaagcttattcaagcaggcgtgaacgtgattgatgattaaaaacagaggatgcagttcaacgtaaaatgctgagcatctacaaggccatttctgttcctagctggcgctactgacgagcgcgtccttgtaagacccgggcggcggcggcggtatcgcagggcccctccggccgccgtgtccgtgctccaggatgagcggcaccttgccctcccgctccaaggccagccgctcctgcgagccgccgcgcagcttctccaggccccggccgcccatctgctgcgtcttgaacaccttgagcaggttcagcaggccgccggcaaggaagaggaggctcccgaacaggcagaaccacgcccagttcctccccagtaccacgaagccggagtggcggctgcggcggtcgtgccggttgacgatgccggcgatgaggaagagggtgctccccagcagcagcgggatctgcacgctcttctgcaggagctggacgtgcccgctcgcacgctcgtagaactggcagatgttttgcacagaccccaggcaccacagtgccggcccggctatgagcaggttcaggccgtgcatggctaggctgtgccggtagcctctctccatctgaatcacaaagaagacgacagcgacgagcatgagcgcggtgccaacgatctgcacggcggggacgccgagctcgacgagccccatctgcgcgtcaagcccgaccaccatcccgaggcggtaatcgacgccggcggcgtgcgcgaggaggtcgtgcgtgttgacggccagcaagccggcgagcccgatcgcggcgaccacgagccccgggctgctgggcccgccccacggcaggagctgcgccaggaacccgccgaccaggaggaccgccgcgaagatgtacaccccggcgttgatgtactcccaccggttgcgcaaccccgtgccggaccccgcgccggcgccgaggctgtatgcgcggcactcgcgcgccgtcgccagcttcaccatggtggctgtggcctgacgctgatggagcgtgtccgcgtactgatggctaacttcactcccggccggcctcgaggtacccaatg

SEQ ID NO: 5592 - DNA, 687 bp, Zea mays
  Clone ID: MRT4577_105093C.1
tggtcccttatcatctgcgcctctactgttcttctctctctgctcgtccggctccggatgatccatccaagacagggatcgccatgtcgtgctctgaggagcacctcttccaattgatacgccgacgctcgtggcgtacgagacctacccgtagcagggtggtgccgacggaaagaacggcttcgtcagcatcaggaaccgcccctgcaaggttgaggaggtttctacctccaagactggtgatgatggtcacggcaaatgccactttgtcgacagagacatattcgatgggtgaaacttgaatatattgttccttcatcacacaactgtgtgtttctttatgcgaaccgcactgagtatcagctgattgatatttctgaagaaggatttgtgagtcttcttacttctcatgggaactctaaagatgatcttatactccctactgatgagactcttgtggcccagattaaagaaaggttcgatagcgacaaagatcttgatgtgactgtccagtctgcgatgggagaggatcacagctgcgcggtgaaagatgtacacccccatcaacttccttggctttgtggacggaaccctactgtatctcaacttagatccgaaaacaagcgcatcaccacatgtattgctaccgagacattcaccctgacttgagctggcttttgctatagc

SEQ ID NO: 5593 - DNA, 373 bp, Zea mays
  Clone ID: MRT4577_105094C.1
cttgtccaacgtcacgctagagaggaagagcgctcggagagcgagagcccggtagaaacagccgggcgatggcgagaatggtgcagcgggctcacctaccgggagcgccacaagtacgcacacagaatacaatctgaccctactgggcaacacccctggtgggaggctgagtgaccaagacaccaagaagcgcgcgagcggaccgaaatgcccggtcatcgccaagaagatcctaggaatttcacaccagagacctgctgagtacaaaacgtgcaaggagctactgaaccgtacgactgagataccgacatatggcagatgctctgtctggttccgcatgtgagagagagtgatcatccgagcctttttggat

SEQ ID NO: 5594 - DNA, 596 bp, Zea mays
  Clone ID: MRT4577_105095C.1
aattcggcacgaggctcttctccttcatccggctgttcctttccagagccgccgagagtaggctagagaaggtccgtcgcactgccccaccaccagcagcagagaagccaaagccgccccgagccgtcagcgaagaagaggtgcgcgcctgcctgcagcgcctggacagtctcgagtcgctgtgcggccaccttgccaccaggcctgcgcagatcccggaggacaaagagcgcgttctgctgagctcgttcgagcggatccggtctgttgaggctgacctcgagaggaccaaaagagtgctgaacgcgaccgtggcgaagcagaaggcgctggtggaggaggtggctctggagtctgtgcaggagctgcctagagccaaggtacacaacagttcgccgattcaatgtcctccgccctcttccaatggtctgctggaatgaatttcgcccgccggtttcggtagttctgctaatgagcttgaacaacacgaccctgcctccctccctgtgtacgtcgcagagaaggatgttctgttgataggacatggaggtcaacagcacgcaccccgaaccatgtcgtcgacattaaccgaccga

SEQ ID NO: 5595 - DNA, 501 bp, Zea mays
  Clone ID: MRT4577_105096C.1
atgtgggtaaccccgtggtgcacggtcgggtcacaaacacagatagctggtgcgccagatcaggaaggcgtcctgcaccgcattgcggaaccatacaagaagagatcttctctaatggcgccaaatgcgggagcaggcttgcctcgcccaactccagcaagaactgcactgagcaattctaaggtctcaaacatcgacaagtacgagcctgagcaggatttgtcggccctttcccctcggctctcggcaatgcaaagctcgttgtccatctacatgatcgccgcccagtccgctggagcaacggaggacgtcatgaaaatgtacttgcccatcgtcctcgggcaagctttgggacctcaagtccatcaagcgacaaagcaacaagatcctccgctcgttcctgaggtgtttcaaatcatgaggaaccgcatctccgacattggggaggctgccatgatcaaggacttctatagtgggtctaacgactcggccttcatctag

SEQ ID NO: 5596 - DNA, 246 bp, Zea mays
  Clone ID: MRT4577_105097C.1
catgagccaactgtcaagagggttaagaacccctaccaaaagggtaaggtgctcgtagtgcctgggagtggtccatcgtatcgagctgcgggaaagagagagagagagagcaagcaatggccacagcagggaaggtgatcaagtgcagagccgccagggcgtgggaggccggcaagccgctttccatcgaggaggtggaggtagctcctacgtaagccatggaggtgcgaatcatgattctttaca

SEQ ID NO: 5597 - DNA, 373 bp, Zea mays
  Clone ID: MRT4577_105098C.1
tgtggctttccagtgtgtttatagaacttgccagtatggtttgggcacactgtaaaccggtcaggtgtagggctagacgaaatgctcgagacttgatgactcactcgattcatggtcagcccggctcggctcaaattagctcgtttaaattttttcacgaactgagctaacatcatagctcggttcgttaacgagctagctcgattcgttaacgagccaactcgcgagctaccatattccagcaaaacgaaactatatgcatatcatttatagaataattgatgaacatattatttgtatgtgaggtgtctatgacctatgagttaaactaatgattaatgaactatatctatgtgttaaattggtttatgtg

SEQ ID NO: 5598 - DNA, 199 bp, Zea mays
  unsure (1)..(199): unsure at all n locations
  Clone ID: MRT4577_105099C.1
acgggannggaagaccgggccgacgcacgcgttcgagcattattcaaaaacacacgaagcggttcgcactaacagcatcaataacaactgggtagtgaaaatatatgaccgtccttttgctcttttccctttttgagagcgcaccacatacgtgtatattattacacagctctcactgtgcttatagcgccaataccac

SEQ ID NO: 5599 - DNA, 136 bp, Zea mays
  Clone ID: MRT4577_10509C.1
agagccgacccgtgcgagtttagacgccatacaacaaattacaacgcagagcacaggaaaaggccggaaaaggggcgcgggataatgcaggaccggcaccgggccagacagagcaggaactcgcatacactataca

SEQ ID NO: 5600 - DNA, 463 bp, Zea mays
  unsure (1)..(463): unsure at all n locations
  Clone ID: MRT4577_1050C.1
gccggaaccacagagcggccgcccattccaactatagaatcttcccccccaccgcccccccggggnggggttaaaaaaaaaaagcgggccccgaccaaaggaaaccaaaaaagcccaaaaccaaaggggaaaacggccccgccacgaaaaacgaaccaagaggcccgcgggcgaaacaaaccccggcaccccagggaagaaaggggcccaaaaaaaaggggaccagcaaacaaggagcccccagaaaaaaaaaacccgggccccgggaccagaaaaaaaaaacaaacggagccccgaacggaaaccagccacgggcaggggcaacagccccccaaaaaaaaaaggaccgccccaaaaccaccaacaccacgggccgaagggcccccgcaaaaaaacacgaaaccgcccccgaacaagaaaaggcccccagagaaggacaggggccccccccgcaaaagggggg

SEQ ID NO: 5601 - DNA, 776 bp, Zea mays
  unsure (1)..(776): unsure at all n locations
  Clone ID: MRT4577_105100C.1
cattgggtacctcgaggccggccgggagcctgattcaccggagtggcacagatctcacgtcctgtgtagtcgtctgtctcgcgcgtgcagtgtgctcaagcaccgaggcccgcgggattggaaaaaagattcctcgcccaaccctaccccaggcgatctcgcatcgcatggccaccggaccgcggtctctccacgccctcctcggcggcggtgcagttgccgacttgctgctgtggcgacggaggaatgcctcggcggcagccgtggtgggcgccaccacggtctggttcgtcttcgagcgcgcggggtacagcttcccctccgtcctctccaacgccctgctcctcctcgtcgccatcctcttcttctgggccaagtctgcgttgctgctcaacaggcctcttccacctcttcctaatcttgaggtctcagatgcgattgttgaaaaagctgcaaatcatgctncttgtatggatcaataggctggctggctgttggtcatgacatcgccatcaagagagataggaaagtttttataaaggaccaggttgatgagaaaaggtggtgtagcgtacagtgtactatcaaggcacatagataccatcatntaccaggngctgggcaatcagccaagcagaagaagactgagtanaagaaaacgttttgctgtattgtggaacatctctggttgtcaagtgaaagtgacagtgngcctttcatctttgaccctctattccactaatatgaacctcgatagnctgatctgagggtctgat

SEQ ID NO: 5602 - DNA, 1356 bp, Zea mays
  Clone ID: MRT4577_105101C.1
cattgggtacctcgaggccggccggggaacagattaatgaagagcatagatttggagttgaatgtatgctgcggataggctgatcaccggagtgagacagatctcacgtcctgtgtagacgtctgtctcgcgcgtgcagtgtgctcaagcaccgaggcccgcgggtcggccgggtcctgacctaccccgcttcaaaacggccaaactggaaaaaaagattctccgtccacgcctcgtcccaaccctagccccgtcgatctcgcatggccaccggcccgcgatctctccacgccctcctcggcggcggcgcagtcgccgacttgctgctgtgtaggcggaggaacgcctcggcggcggccgtggtgggcgccaccgcggtctggttcgtcttcgagcgcgcgggctacagcttcccctccgtcctgtccaacgccctgctcctcctcgtcgccatcctcttcttctgggccaagtccgctttgctgcttaacaggcctcttccacctcttcctaaccttgaggtttcagatgcagttgttgaaaaggctgcagattatgctcttgtatggatcaataggctgctggctgtcggtcatgacatcgccatcaagagaaataggaaagtttttataaaggtgatattgattttgtggctggtttcatttgttggaatgctcttcaactttcttacactcatttacattggtgtaatgctttctctgttggttccaccactctatgagaagtatcaggatcaggttgatgaaaaggttggcgtagcgcacagtataatatcgaggcacataaataccattgttaccagggctgggcaatcagccaaggagaagaagactgaataaaagaattgttttgatgtattgtggaacatctctggttgtcaagtggagttatgatagtgggcttttcatctttggactctccatatggccctccacttacattagttctcgatatgctgatctgaggttttgatgtgcgctgttgatttcaggaaatgagacggcttgtgtatttttttctttttgaacatgaggtttactatgggcgcatatcttactcgaaatgatattttgagaaattgcaactcgtgcatacaagtgtgtgggctgcttgcgctgttagccatatgatctctctgtcactgattttaaattttaggctgctccgaggaactttgcaggctgctccgagcaattatgcaggctgcttgctcattcgatgcccatctactggtagctcgttttctgaaatactagtacctaataaggtgtattctacgtagacagttgcatatcatgtgaataaataggtattttctggcggcttcaattcttc

SEQ ID NO: 5603 - DNA, 229 bp, Zea mays
  Clone ID: MRT4577_105102C.1
cggtttcgcgctcaccacctacgtcgcgctgccgctgctctactggacggacacctactacgccaggcgcttcccgctcatctcgccgcacgtctacgacgacgccggaaggccctacgacactggccgcgtcctcaaccgcgacaccttcacgctcaacctcggcggctacgacgcctacagccgcatcaacgtcagcgtgctcttcgctgtcaactacggcatcggc

SEQ ID NO: 5604 - DNA, 234 bp, Zea mays
  unsure (1)..(234): unsure at all n locations
  Clone ID: MRT4577_105103C.1
ctncgatatatcactagctgccctcaccgatgaggagagggcccagcgtgatcaacgggcccggcttgctcaacatgccgagggggctcggcaatatagccttgctcccgctacgactgctcccgcgcaatggctccctctgctccagaccctccgccccggtcaggctttggcgcagaatacggttgggaccaagcggagggtggcacgccaatgttgcctctgaactgagcg

SEQ ID NO: 5605 - DNA, 1212 bp, Zea mays
  Clone ID: MRT4577_105104C.1
aggccggccgggagcctgatctaccggccggagtggcacagatctcacgtcctgtgtcgtcgtctgtctcgcgcgtgctcaagaaccgaggcccgcgggattggaaaaaagattcctcgcccaaccctaccccagtccccaggcgatctcgcatggccaccggaccgcggtctctccacgccctcctcggcggcggtgcagttgccgacttgctgctgtggcgacggaggaacgcctcggcggcagctgtggtgggcgccaccacggtctggttcgttttcgagcgcgcggggtacagcttcccctccgtcctctccaacgccctgctcctcctcgtcgccatcctcttcttctgggccaagtctgcgtcgctgctcaacaggcctcttccacctcttcctaatcttgaggtctcagatgcgattgttgaaaaagctgcaaatcatgctcttgtatggatcaataggctgctggctgttggtcatgacatcgccatcaagagagataggaaagtttttataaaggtgatactgattttgtgggtggtttcattcattggaatgctcttcaattttcttacgcttatttacattggtgtaatgctttctctgttggttccaccactctatgagaagtaccaggaccaggttgatgagaaggttggtgtagcgtacagtgtactatcaaggcacatagataccatcattaccagggctgggcaatcagccaagcagaagaagactgagtaaaagaaacgttttgctgtattgtggaacatctctggttgtcaagtgaagttgacagtgggcctttcatctttgaccctctattccactaatatgaaccctcgatatgctgatctgaggttctgatgtgcattatgggaaatgaggcggcttgtgtatttcctttttgaacatggggtttactatgggtgcatatcgcactcggaatgatatcgagaaattgcgactcgtacatgcaattatgcaggctgcttgctctgttagtcatatgatctttccgtcagtgattttaaattttaggctgctccgaggaactttgcaggctgttccgagcaattatgcaggctgcttgctcattcgatgcccatctactggtagctcgttttctgaaatactactacctaataaggtgtattctacatagacagttgcatatcatgtgaataaataggtattttctggcggc

SEQ ID NO: 5606 - DNA, 408 bp, Zea mays
  Clone ID: MRT4577_105106C.1
tttttacatttttttctttgaaccctaaacgaattatccatacgggcgatcagacagggcgctgatgacacactacagtacatgcagagatcagcacttcccagatggatgattcctgaagctgtctaaagaactccagcaatacaactagcaaccatatgatagcacattcacaagtttagtgctcatgccgcacccccaaatgaacgtgaaaaagggaaacgggatgccaatagaggatccttaaagataggcttctgaggacccatgtgaactttagaatggtacatactagcgtagatcctcgagaaaactaacattgctggagctgaccgcatgaggcccctccacaggatccttaaaaggagcctgatgactcaactctccaaatgcgggaacaacattgtg

SEQ ID NO: 5607 - DNA, 293 bp, Zea mays
  Clone ID: MRT4577_105107C.1
gagctataagtcggcggccgcccctggtcgcggtgagtcatttatggaccgtctttcgtgcaagcccacagccaaggtcacccagggcgggaccgagaggccggcctctcagctccactacacgaggtcactccaaagcctcttcgcggagtccgagatgacaacgagccctgacacctccgcgcacgagctgctgtccaggggccggcctggcctgacgggcctgctggtggacatagagtgccacgagcgagcggccttgttgaggaacgagcgcagggggcatccgcagg

SEQ ID NO: 5608 - DNA, 309 bp, Zea mays
  Clone ID: MRT4577_105108C.1
cgaccacgcgtccgctacgcgaggcgtccggacacttgcagcttgcctctgatgacggctgagagagaagtgctcccgctctttccttatcttttcctttcccttaggatcggacgatgaagatggttgcattttttaatggccttatgcatttatgctgcttgtaatgaactattattccgtcataactaccagttactcatcatgtgctcttttttttattaaaaaatggacttagttcttttcaaccgagccttatgctagtaacctctcaagtctgccaacatatgcaccaagcaaggagatgga

SEQ ID NO: 5609 - DNA, 1164 bp, Zea mays
  Clone ID: MRT4577_105109C.1
cataggtacctcgaggccggccgggccgggctttccccgtccgccgccagagcggggaacacctgcaccgccttcaccagcacttgccggagaggacgtgacctctcccgccgacaaatcggtcctcttcgtccgggcgtttatcaaggaataggtattcaagttttgtatcaccaagatggtgcagtacaattttaagaagatcacggttgtccctcctgggaaggacttcattgacataatcctgtcccgcacccaaaggcagacaccgacagttgtccacaagggatatgctatctcccgcattcgtcagttttatatgcgcaaggttaggtattcccagcagaacttctatgaaaagctctcgaccatcatagatgagtttcctcgactggatgacatccaccctttctatggtgatctcctccatgtgctctacaacaaggatcactacaagcttgccctgggtcagattaacacagctaggaacatcattgcaaagatatccaaggactacttgaggttgctcaagtatggagactctctttaccggtgcaagtgtctgaaggtggctgcactaggtcgcatgtgcactgtcgttaagaggatcagtcctagtttggcttacttagagcagatccgacagcacatggctaggcttccatccatagacccaaacacccgtactgtgctgatttgtggatatccaaatgtggggaagagttctttcatgaacaaggttacaagggcagatgtggatgtccagccatatgcctttacaacaaaatccctgtttgttggccacacagattacaagtacctgcgctaccaagtgattgacacaccaggtatacttgaccggccttttgaagataggaacatcatagaaatgtgtagcatcactgcgctggcacacttgagggctgcagtgttgttctttctggacatttctggatcttgtgggtacagtatcgctcagcaagctgcactcttccacagtataaagtctctgtttatgaataagcctttggtcattgtgtgcaacaagactgacttgcagccacttgaagggctttctgaggatgacatgaagttagtcatggagatgaaggcagaggctatgaagactataactcaagctgttggtcctaatgaagagggcgg

SEQ ID NO: 5610 - DNA, 279 bp, Zea mays
  Clone ID: MRT4577_10510C.1
cccacgcgtccggacaaactctcaaattccaatgcacttttccattttaacaacgggggctaaaaaccatgggtttgggctactccttagcgtttatgaacccgatccaaaccataacgtttttgcacaatgctcacaactctcctatctctcgctttgatccccaatatctctcatacaagctgtctttaatgtgtgaaaacacaatcgttcaatcatacacgatccaacaggcatttgcaacatgcatcttaccatgataatccttgttacttcaac

SEQ ID NO: 5611 - DNA, 512 bp, Zea mays
  unsure (1)..(512): unsure at all n locations
  Clone ID: MRT4577_105110C.1
cgggcaggcaggtgtgccagtagggcaggaagacacgagaccgtgccgtgcgggggctcgggacaggcacggtactggacctcaatatctcagatccttcctgcacgcacgtacgtgcccgagtacacgtcgttgttgtcgggcgagccacacctgcgggatatgatactacatggagatcaggtacgccacaggctgagctacgggactgagggtattcggctacggctccgtgatctggaaccgtggcttcgacttcgactactaaatcttgaggtcgatcagaggctacacgcgcacctttaatctcgcttgcatggaccagagaggcacaccggagcatccggcgaggacctgcactcttganacgcgccacgaggacatatgctgcggaattgcatattgctgaaggggaggcccacatgatgagctaacagcactgcaatacttggagagataggttgggagtacgaccagaagatatccattgatttctacaaggaaggagatcc

SEQ ID NO: 5612 - DNA, 450 bp, Zea mays
  unsure (1)..(450): unsure at all n locations
  Clone ID: MRT4577_105111C.1
gggggnaccgctacgagcaaaaaaancnnnangngaaaacccaannctncaaccctacanganccaacangcaancncancgggcatcnnacctnnancaccctngnncctccaacaatcatcagccctattacatcagttacctttggtgcatttggttcgcagggcatcannttttttttctacaacaacttntcctancaaaccttactncctactctcancaacancactcccctccattcaaccaactannttcattnaactttncttcttatttncaacaacaacaactaccattcanccanctacctnccncctacccccancaatttcttccattcaaccaactancancattnaactctcctncttatttacancancaacaactactaccattcanccanctanctnntntaancccttctaccttcttnacacaaccac

SEQ ID NO: 5613 - DNA, 439 bp, Zea mays
  Clone ID: MRT4577_105112C.1
gtaggtgcttaggatgagcgtccattgttcctactcctgacttaccaggaactgatgaattcacttaattgtggtgcttatgcaactaactagaatgagagtctacagcgtgagaacttctttatccctcacacaaagatgtctaccaccaagaacacaggttgtactacctgttagagaggaccagttcagatctgctatctaccaatcacactgatcatcatgacctccttaaatgacctgaaggcgtaatttgtgccgatgatgccgtagctctatgctaccttgaaggcttaaaacaatgttttacatgtacaaccttttatgatgcagcatttgcaatcgattattccaggtatcactgctctgcttgctacgcagttagtatcacctttattatcagctttggctaaaaactttttaatgtggaccttgttcg

SEQ ID NO: 5614 - DNA, 327 bp, Zea mays
  Clone ID: MRT4577_105113C.1
ctgactcatgtgtccgaattcccatgcaggcttgtcggcgaggacggcttgatgaccgaagagcgatctttgcgggggctcgggaccgtaacgtcacaggaccctataatctcagatccttcctgccacttcccgccgtgcccgtcaacacatctttcttgccggacgcgctcaacgtctgctctctcctcctacagggggatcggatacaccacatgctgcgcgttagtgctctgggtcttgtgctacggttcactcatttggaaccccggctaagactattacgacaaaatactccgtttcatctaaggctacaagcgcaccttt

SEQ ID NO: 5615 - DNA, 399 bp, Zea mays
  Clone ID: MRT4577_105114C.1
gatcttattgctctccagtgcggcggcctgacgattccagctctcccgagcgacaggggggcttgctaccgcttactttgctgctgtaatgatgccgaactcctccagaaaatcgccgctgaagtgtgctagacgataggccactgctactcgagtacttggtgtctaaggagaaatcgtatcttaagcgaaaacacagcagggaacaatgagcctatcacgaagtatgatatcatgctcgcacaaaggaagactcgcactccttgacatacaaggtgctcatggaatgaaattgcaaatcatgaatggtgctatgtataacaacggccggccaatgccaacaggaatgatgtgtcttattgtacccatgccggttaccttgctactgtgacctgacac

SEQ ID NO: 5616 - DNA, 200 bp, Zea mays
  Clone ID: MRT4577_105115C.1
caaacatcaaaccgaccgactccacacagggcaatgcagacctgaatcgggggcgtcgtcgttgttgcgaagatacatactattggaggagtagctaggctgccatgtccaacgtgtccacctgcctacgcgactcccccctcaccgtcttccgcctcgtgatctccagctccgagccgtggcccatctcttcctgcctc

SEQ ID NO: 5617 - DNA, 360 bp, Zea mays
  Clone ID: MRT4577_105116C.1
actgacacagcgtctgtactccttgaagccattgggtacatcagattcctccatagtcaaattgaggtccagctcttctctctcacaccatctttctctctctctccatgcgtgcccatgcctgcagccctggcctcaaactgtagcacagtacaaggatcatagataaagcattgccttgcatgcatgcaatgtaattgttccgttgtttgttttcacacttgtgtgcacttaacaccaagcactttttggagagctgctttacaatactacagtctatctatttgctacagtctacagtaacttgctgcggcttcagagctacacgcacttaatacatgtcagacatatgcatgaggc

SEQ ID NO: 5618 - DNA, 664 bp, Zea mays
  unsure (1)..(664): unsure at all n locations
  Clone ID: MRT4577_105117C.1
gccagnntgtgatggggatatctgcatgtaattcgcncccctttcgagtcgggcccgcccagaggcagggtacannagctttttcttttctttttctttttttcttttttcttttttatactttctttttttttttttttttttttttttttttttttttttttggagaaaggggcccggggcggggccccggggggggggaattccaacacacgggggggcggggggaggggggcccgggcggggacccagcggggggggaacaagggcaaagggggcccccgggggaaaggggggccccctcacaagtccacacaaaaaacgaaccggaagcaaaaaagggaaagccgggggggcccaaggggggggccaacccaaattaaagggggggggcccaccggccgctttccaaaagggaaaaccggcggggccgcgggggaaaggaaacggccaacccgcgggggggggggggtaggggatggggggcccttccccttccccgggcactgactcgttgggccagggcgatgggggggggggggggggttcaggccacggggggggggggatacgggtctccacaaaatcggggggcaacccaggaaaaaaaggggagggaaagggcaagaaaagggccggaaccgaaaaagggccccgggggggg

SEQ ID NO: 5619 - DNA, 973 bp, Zea mays
  Clone ID: MRT4577_105118C.1
tttttttttttttttcagttggggacagatggaatttactcccagattctgtttcatggttttacgaagaatgttagaagcctctcgggttgcttccttttgttttggagttggggacgagatggaattttactcccaatattgtgtttcatggttttacgaagaatgtaggcaccatgacaggatgcatcctatagtcgacaggtgcaccacttacaggagcaactctggtttgcgcactcagttgttcagagaggtccgctcgacgctcgttaaacctagtgtggattatgggggccaaaacttccaactagatcttcaaatccacaacttagatggcaataagttgccaatgcggcaacttcattacctgcaaacccaacaacaaaaaagagacatacggagcctacggcatgctacgatttagcaagcctcggaaagacagatatagatctttgttttcgggaccaaagatctcctcagctttcttgagagtttcctcacgggactgcttatgggcattgagttctttgatgttggctaagaatgctccaaattgttcataggatagacgactcctggcttggcgaaaaaattcctttccatcaacacgaggagtccgacctgggtttgaacctcctcgtggaggtgagctagctgccgaggactgcttgcttgatggataccatggtgtcattgacatgtgagcttcaattcgagattttgttggcgaggtagcaccagacatcagcttcggtgttgctgtggtagatatttgccttggagaagcagaagtggacattattttaggagtggccttgggggtaagccaaggagtgatgtgcgatgagagggcatatttttggatcggaggccttgaggcggtaccgtctcggttcgtacttccagcatccaaagattcactaaatatatttgttgtagggtggctgccagatccaccatctgtcgtgcc

SEQ ID NO: 5620 - DNA, 286 bp, Zea mays
  Clone ID: MRT4577_105119C.1
agaaccaagagtgcttaaagcgacagactgtaattacaaatgcaaattctatagcaaatcagcaagtgatgatggaaggaaacacccaaacattacccaggggggccaggacacaaacaaaggtttttcaacaccacaacctggtttgacagccaaacagattcatgcaagcagatcagtattccttctcctcgttaccgtaattacttgcgccctttggggggaccttctctgtgttcttctacaaggggggcaagtccttgggtggcttggagaaattcccctt

SEQ ID NO: 5621 - DNA, 331 bp, Zea mays
  Clone ID: MRT4577_10511C.1
cagacagctttcacagttaccttatcactatagcacagcatcaaccgggaaagtcacattgagatcgtggtcagcgagcccaccagataccagagagaggatggcggacatatcgttgctgttggcggagcacttcgagaagacagcaaggcgaggcgcccccggcggggacagcggtagcgacagcgggaccgccggcgagactaggaacttctgggccgcggccacagtgtggagctcttgtgtggagtccgcctccgccgccgcgtacggggtcagattcaccgtctcggtgcacatgtagcccaagaccgggctcgcgctggccgcc

SEQ ID NO: 5622 - DNA, 579 bp, Zea mays
  unsure (1)..(579): unsure at all n locations
  Clone ID: MRT4577_105120C.1
aaaaatacagagagaacccaatcctgcggaaactcgagcgatggccagtgaaatgctggcggcggcggcggcggcggcgaaacggccgtcgacccccgcctcctccaccaccaccaccgtctcctccctcggcgaagatgagattctcgagatcttcctccgcctccccgacctcccggcgttcgtccgcgccgcgctcaccccgccgctcgtggctcggcgccgtccgctcctccccgtcattccgccgcctcttccgcgccctccacccggcgccactcctcgggctgttcctcgacccgaccggcaccgagatccccacgttcgtctccgcgcgccgctccgaccccgccgtcgctgccgccccgcggcgacttcttcctcacctccctcccgcagaaggacgactcttccccggggtggcaggtcgccgactgccgcgaaggccgccttctcctctggaacttgctcgactggacgcaggtcgccgccctgaaccctcttacctgggncgtggacttcctcccgatgccgcttgacgatatgtttgcggagagcggtgaccagttcaacttcgat

SEQ ID NO: 5623 - DNA, 554 bp, Zea mays
  Clone ID: MRT4577_105121C.1
attgcggatgaaagattaagctcacaagttggggtctcacaaaccgatctacggcgactgttcttgacagatctaaacttatgcaaaacccgcctctaacaaggatgtggcggctattaataaagacactagggttatgcaaaccctggacgcacccctaatgggctcaacgaagatacatggcccaaaagcccaaaagacgacgtcacaacgccggaacagattctgaacgctgacttgttttgacgattcccgttgattccagacgaattttatggtggaaccagttgggttggttagataatctccttatctttccaaccatatcaattctgtcgcaatcggagtccggatgcatcttgggcatcgattttagtgcagactggtcctgaaaaccgagatggagtcgcagccgagtcagacttgatctccttcttgttgtggcgcccttgctgctcctcctcaacacctaggcctttcccaagtccttgctgatcctttccaaggttcctaatcatcaaaacatccatggccccaagcgtaagctctaaaac

SEQ ID NO: 5624 - DNA, 254 bp, Zea mays
  Clone ID: MRT4577_105122C.1
tacgtaagctcggaattcggctcgaggtctgttgcaccacggtgttcactccacggtcccaccgaactattatcgcggctcccatgattgggctgccgctgaagccacgaaagcacacaatggcgaagtagcttaaccagcatgggcagcgaccactgtgaaaactacatggggagctagataccaaggtggtgcgagccccagcgactataaggcaggcgggaggggggcaccattgggagtgtcagagccgg

SEQ ID NO: 5625 - DNA, 315 bp, Zea mays
  Clone ID: MRT4577_105123C.1
aaagcaaaaataaacccatcttttatgggttggaattaaaacccggtgacacccccataaaaaaaacatttaaaattccaaatgggtcaaatccccaggggcttttggagaaaaagggcctaatttcctagcaagcccaaaacgcaagcttaattttaagcccaaacccaaagggggagttttactgaaacgggttacatttagggggactggacaaactccggccctatggaaaggccctaaaatttttaaccggagtccttgacaacaacacaggagcagcctaaaaccttttttgccttgcccttggagtaa

SEQ ID NO: 5626 - DNA, 714 bp, Zea mays
  unsure (1)..(714): unsure at all n locations
  Clone ID: MRT4577_105124C.1
ccggccgggaattccttttccaattcccctttcctctcaatcgcatacaccagcggcggcgccgggaccccgaaaaccctctccccgcacaccacggccaacaggaaccactccgctcctccgagccctagccgtcccgggccgggtcgggctcccctacatgacgccggcggcgggcaacggcagcgccaccgccgcgccgccgccaccgttcctcatgaagacctacgaggtggtggacgacccggccacggacgacgtcatatcctggggccccgggaacaacagcttcatcgtctggaacacgcccgagttcgcccgggacctcctgcccaagtacttcaagcacagcaacttctcctccttcgtcaggcagctcaacacctacgggtttagaaaggttgatccagacagatgggaatttgcaaatgagggttttctgagaggacagaagcatctgctgaagactatcaacagaaggaaaccatccttgcaggggaacagccaaccacagcaacctcagtcgcagaacgctcctgtgccttcctgtgtagaggttggtaagtttgggttggaggaagagattgaacggctgaagagggataagaatgttctcatgcaagagcttgtcaggctgagnacagcacagcaaacaactgaccatcagctgcagactttgggcaagcgtcttcaagggatgggagtcacggcagc

SEQ ID NO: 5627 - DNA, 300 bp, Zea mays
  Clone ID: MRT4577_105125C.1
caaatggattgaacttctgaagcaaagtgacgaatattgggaaatgggtgacatcgtgcacaccttaacaaatagaaggtggcttgaaaagtgtgtcacttattgtgaaagtcatgatcaagctcttgttggtgacaagacaattgcattctggttgatggataaggatatgttgagcgcgtgcgtgcgtgccctgatcgagcaccgattgccatggactctactacgacgacagctccgctgctgcatccggccgccgccgccccgagcaaggaggagccggcaccggcgtccccgcac

SEQ ID NO: 5628 - DNA, 1756 bp, Zea mays
  unsure (1)..(1756): unsure at all n locations
  Clone ID: MRT4577_105126C.1
cctctccccgcgcaccacggccaacagnaaccactccgctcctcgccgtaccgggccgggccgggctcccctacatgacgccaccgttcctcatgaagacctacgaggtggtggacgacccggccacggacgacgtcatatcctggggccccgggaacaacagcttcatcgtctggaacacgcccgagttcgcccgggacctcctgcccaagtacttcaagcacagcaacttctcctccttcgtcaggcagctcaacacctacgggtttagaaaggttgatccagacagatgggaatttgcgaatgagggttttctgagaggacagaagcatctgctgaagactatcaacagaaggaaaccatctttgcaggggaacagccaaccacagcaacctcagtcgcagaacgctcctgtgccttcctgtgtagaggttggtaagtttgggttggaggaagagattgaacggctgaaaagggacaagaatgttcttatgcaagagcttgtaaggctgagacagcaacagcaaacaactgaccatcagctccagactttgggcaagcgtcttcaagggatggagtcacggcagcaacagatgatgtctttcctggccaaagcaatgcaaagtcctggtttcctagcacagtttgtacagcgaaatgagaacagcaggaggagaatagtagctgcgaacaagaaaaggcggctgcccaagcaagatggtggactcgagtccgaaagttctgctgcttcgttagacggtcaaattatcaagtatcagccttcgatcaacgaagcagccaaagcaatgctaaggaagatcctaaacgtagattcttcgcatatgtttgaatctatgggcaattcagataatagtaataataataataataatctgctggaggattatatgccggccggccaagcttttgagagctcttcgtcgacaagaaattctggggtcacccttgcagaggttccagcaaactcaggcttggcgtatgtcggcacgagctcggctatctgttctcctccagcggcccctgaaatgcagtgcccagtggtgctggataacaaggcgtacaagcaagtggccagcatgagtgctgtgcctcctgtttcaagtgacatgggtattattccggaattctcagatctggcagacttggtctctgtggatattcttggaggggcctttgagatgatgcctggtcctgagttccccctgccagaagaaggtgatgatgggaccaccatgtacaacaacaacgacgaggaggctcagagccttccaggcatcatcaactccatctgggagcagttcctggtaggcagccctctatctaccgataatgaggaagttgattcagcaggcggactatatgcgcaggaggatggatggagcaaagtggggaacatcgctaatcttacagaacagatgggacttgtatcatcaacaaatcaccgggactcagggaatgggctgtactagtatcttaattaatacagtagactgaggattctggtaataagtgttgcatgctcttttcttatttaattattttcccccttttcgccaactcaatatgggaggtggggggtgaggagattcaaaggcatgtttggctcgttacctaagttgacacactttgccaaacttacttttatgactaaggttagttatttaatttggacgactaactttagacaagtgtgacacatttagccacaacccaacagaccctctgtctttcagac

SEQ ID NO: 5629 - DNA, 2212 bp, Zea mays
  Clone ID: MRT4577_105127C.1
cacaggtggcgggcgggcggggcgcgaagtttccattcccctttcctctcgatcgcatacaccagcggcggcgccgggaccccgaaaaccctctccccgcacaccacggccaacaggaaccactccgctcctccgagccctagccgtcccgggccgggtcgggctcccctacatgacgccggcgtgaggcaagtgcttagtggatcgcgctggtgggaggatgcagggcggtgtcatggcccatgccgccgccgccgcggcggccgcgtcgacggtgaccacggcggtggcgcccccagtcacggcgcacgcggtggcggtggcgcccccggtcacggcgcacgctgcggcggcggcgggcaacggcagcgccaccgccgcgccgccgccaccgttcctcatgaagacctacgaggtggtggacgacccggccacggacgacgtcatatcctggggccccgggaacaacagcttcatcgtctggaacacgcccgagttcgcccgggacctcctgcccaagtacttcaagcacagcaacttctcctccttcgtcaggcagctcaacacctacgggtttagaaaggttgatccagacagatgggaatttgcaaatgagggttttctgagaggacagaagcatctgctgaagactatcaacagaaggaaaccatccttgcaggggaacagccaaccacagcaacctcagtcgcagaacgctcctgtgccttcctgtgtagaggttggtaagtttgggttggaggaagagattgaacggctgaagagggataagaatgttcttatgcaagagcttgtcaggctgagacagcaacagcaaacaactgaccatcagctgcagactttgggcaagcgtcttcaagggatggagtcacggcagcaacagatgatgtctttcctggctaaagcaatgcaaagtcctggtttcctagcgcagtttgtacagcaaaatgagaagagcagaagaagaatagtagcggcgaacaagaaaaggcggctgcccaggcaagatggtggcctagactccgaaagtgctgctgcttcgttggacggtcaaatcatcaagtatcagcctctgatcaacgaagcagccaaagcaatgctaaggaagatactaaagctagattcttcgcataggttggaatctatgggcaattcagagaatggcaattttctgctggagaattatatgccaggcgctcaagcctttgagagctcttcgtcaacaagaaactctggggtcaccctttcagaggtttcagctaacccaggtttgccgtatggcggcggcggcggcacgagctctgggctgtcagccatctgccctcctgaaatccagtgcccagttgtgatggacaacatgtcgtctaaccaagtgcccagcatgagtgctgtgcctcctgtttcgaaggctacaattgacatgggtattcctgaattctcagctctggcagacttggtgaatgaaggctccgtcgatatccctggaggggcctttgagatgcctggtcctgagtttcctctgccagaaggcgatgacagtgtccccatcgagaccgatgagaccatgtacaacaacaacgacgagactcagagccttccaggcatcatcgactccttctgggagcagttcctggtaggcagccctctctctgccgataacgatgaagttgattcggggtcgccacaggagaacggatggagcaaagtggggaacatcggtgatcttacagaacagatgggccttctgtcatcaacaaatcaccgcgactcagggaatgggctgtagtgtatcttaattaatatacggtagactgggattatcggtaataagcgtcgcctgcagtttttgttatttttccttttggccaaaaaatgatatgccggtatatcaaccactcgctcgacctatatgcgcgggaggggcagtcttccagctgagctctgaatgccacagccacctgcttgtatcaatctatgatgttggcagtcttgagaacaccactgtgacttgttaaatctgtatgcttattcccactctagttgctgatattgtttagtttgttatattggtgcggaaacacgggggttgtttagcaacaaagtacaacacgttgcttcattacaattcgattctgtacaattccatactccaaccaatatttttccagcaaggggatcaaaaaaaaaaaaaaaa

SEQ ID NO: 5630 - DNA, 1595 bp, Zea mays
  Clone ID: MRT4577_105128C.1
ggtacccccgggtccggccggtcttgcaccttgatgtaaaccttgacatatctgatggttctgcttgcacaacatttattcagagaaaggtaataatatattctgctacgtgttataaaaaatatgttctacctttgttagagtattgttttgagaatattctgattcaaattattgaatgttgaaatatctattggtggtagagttataagtgtcattcaaattaagaagaagacctttgtttatatttgatcaaagaaccttgtgtggattgtaactagcaatagttgcattcgattaatatctcttgctaagtaagtagcttgcatcgatcaatataaactgaagactggaactaaatacctcctctgctggtgaaagcaagtatcctggttggcctggaactactgtgttcaggatgttgattcctgcacagaaggtcggtgcaataatcggccacaaaggtgagagggtcagaagactgtgtgaggaaacaagagcctgtgttcgtattattggcggtcatctttgtgcggcagagcaagctgtaatcatttttggaagggagcagcttgatgagccattacctccagccatggatgccctactaagagtatatcagcaaacaattaacaatgactctttagatgtgggacccgataatgtgattgtgaggcagattcttgcaccaagtgagcaggcaacaagccttattggcgagcatggtgtgatgattaattcaatcatggaagcttctcaaaccgacatttgtgttcttgttacagaacaagcagagaactcactgtacacggtctcttcttgtactgaactgacttgatagacacactactaaagtggatcccaagcaatgatgaggagcttaggcttcgactgtcctcccgtagcaccgccacaccgcacgcgtgcgtggcggcgtccgcctcggcgccggtctcgcacaccgctccctggctggggaagttcatcgcctccgagcccttcaacgtggggggattcgactgggcgatctacttctaccccgatgggaagagcggcgaggatggtatgttgaagtgacatgctctgaactgctcttggcttcaggcagtcaggcgggataacaagcagaggtttagtctgttggaggaagatggcgagctgttgatccgggcgaaccagggacacacagtaatactaaaaaatatagtctggaggtgacctcaatcttattggacagaatactctcttatgagacaaagttgcataagcccatcaaattttgcagtaatcagttccttgagttcatgtgcaggtttgaaacttttaactgctggtcagcaagtgcattgtgatgctgttaagtggggtctagatttagatacttctgtttcaaatgtactggttaaaatgtatggggaatgtggagctatgtcagattactggaaggttttcaactcaatggctgaacacgatgaagtttcttggaacactatgatgggtgtcatggccagttcacaaacacctatttctgaaattgtcaaagttttcaacaatatgatgaggggtggtttgataccaaataaagtaacatttat

SEQ ID NO: 5631 - DNA, 1596 bp, Zea mays
  unsure (1)..(1596): unsure at all n locations
  Clone ID: MRT4577_105129C.1
atttattagttacagaacaagcagagaactcactgtacacggtctcttcttgtactgaactggtattcagcttcattcaaagagttttggtaaagtataaactgtgctagaacttttgagctccttaattttcatgtagtatttttgttacttgatttttcgcctatcttgcaatagcaactttaacactgaaaaagattgcttatggccactggcaagtatgaattgatcaaattctcaaaacatatcatttgctgatttgatgaagcacgattcttaccttatttgtatctaatttgttacattcactgtttacagcttctcttgtaacattggatataatgacgctgctacatgactattattttgacatcataacctacatataaagattagagactaatctgtttttttctgaactaaggtgttaacacatttccaaatatcgaacatctatcttttagtatgcaagcattttagtttctcagaggtatactgttccccatctctgtattttatttcatccactgcccttgctaatttgtaggaaatgaacttccatcagacttgatagacacactactaaagtggatcccaagcaatgatgaggagcttaggcttcgactgtcctcccgtagcaccgccacaccgcacgcgtccgtggcggcgtccgcctcggcgccggtctcgcacaccgctccctggctggggaagttcatcgcctccgagcccttcaacgtggggggattcgactgggcgatctacttctaccccgatgggaagagcggcgaggatggtatgttgaagtgacatgctctgaactgctcttggcttcaggtatgcttatccatggtggaaagaaaaagtgattgactcagacttgaaaagaaaagatggcctttgcccattgacgcctgaggtaagccatcaagttttctattgtatcattttggctggcgtgcaggcagtcaggcgggataacaagcagaggtttagtctgttggaggaagatggcgagctgttgatccgggcgaaccagggacacacagtaatactaaaaaatatagtctggaggtgacctcaatcttattggacagaatactctcttatgagacaaagttgcataagcccatcaaattttgcagtaatcagttccttgagttcatgtgcaggtttgaaacttttaactgctggtcagcaagtgcattgtgatgctgttaagtggggtctagatttagatacttctgtttcaaatgtactggttaaaatgtatggggaatgtggagctatgtcagattactggaaggttttcaactcaatggctgaacacgatgaagtttcttggaacactatgatgggtgtcatggccagttcacaaacacctatttctgaaattgtcaaagttttcaacaatatgatgaggggtggtttgataccaaataaagtaacatttattcnaatggctgaacacgatgaagtttcttggaacactatgatgggtgtcatggccagttcccaaacacctatttctgaaattgtcaaagttttcaccaatatgatgaggggtggtttgataccaaataaagtaccttttat

SEQ ID NO: 5632 - DNA, 281 bp, Zea mays
  Clone ID: MRT4577_10512C.1
agagcaaacattattgccgccaacacaaacaccaccattttgtcctccgggaaaacttaacacaaaacctgaccggagagacaggctacattgacccacataacgtgctgcaacgagcatgggtcatgatagcaaccatgatggaacacagatactaacaactgacacagagcgaacttgatgacaaaaacacaggtggccaacaacatgacctgactaaccaagatacacccttcgggctagggctaacataacggacaacaacaggataacttggcccg

SEQ ID NO: 5633 - DNA, 378 bp, Zea mays
  unsure (1)..(378): unsure at all n locations
  Clone ID: MRT4577_105130C.1
gccacatgccgctctgtgtggaccttcgcgtccgcgcagccggctgccgatggcgtctcctcccgctcgccctcagggtccggcggtntttgcntcaatgttatctcgtttatggtatctagccttcatcgttctttcgattgactacattttctttttttttttaaatgtgtatgagcttattcagttttgtgcgttatttttctttttttttttttgatatttctttttttttgtgttttaaatctattgatttgttttttttttcctgctgctttatggtgaatggcccttcttttgtttgtttattgttaataattctacgtgggcgttcttgttgttttgtttgttattattgtaaatctttgtttttttttt

SEQ ID NO: 5634 - DNA, 765 bp, Zea mays
  Clone ID: MRT4577_105131C.1
aggaacaggcccatgaactcgctaaagcgcaggaggcccggctctgttctgatatatcgctccgccgctagggttttcagggatcccgcctcacaccgccgcaaggactcgcgacggacggagcaacggaggaagcaactacgcggcagccatggtgaacgttccgaaaaccaagaagacctactgtaagaacaaggaatgcaggaagcacaccctgcacaaggttacccagtacaagaaaggtaaggatagcctttcagctcaagggaagcgacgttatgaccgcaaacagtctggatatggtggtcagacaaagcctgttttccacaagaaggcaaaaacaacaaagaagattgtgctgaagctgcagtgccagagctgcaagcactactctcaacacccgatcaagaggtgcaagcactttgagatcggtggtgacaagaaaggcaagggaacctctctgttctaagcgtatcataaacttgctcagggtctcaagtatctgtcagaatttaccattacaaacaccctgtgcttagcttctgcatatgttcttttgtcacatctttttggtacgttgtagtttgtatgagaccaagctattgtttcgtgttattattatatttcatgaaattgtcaacatgaccgtttgcttgactgtaaacatagttctgagctttgggcaaacagtagtttaatttatcgtatccatcttgagactgttgtttgttcgaaatataatggtggaatgacgtcgttaagcac

SEQ ID NO: 5635 - DNA, 645 bp, Zea mays
  unsure (1)..(645): unsure at all n locations
  Clone ID: MRT4577_105132C.1
accaacttaccatttccctgaccgaccctgcctgaccccactcccactaccggctcctccccactcagagccatcatggccctcgcctcccgctccgccgcagccgccgtggcgcgcgtcctcctggcgctcgccgcctccgccgcggaggcgggctccaactcccctgcaccggcgccggcggcggactgtatctcccaaaccgccaggctgatcgactgcatcgactacgcccagaaggggagcagcgcgcgccgaacgtccgctgcctgctgcggcgaggtcaagaccgcagtggccagccccggcatcgagggctgcctgtgctccctcgccggctccaactccaccaacctgggctttcccatcgacatgaagcgcgagctggcgctccccggcgcgcgcggcgcgtccaacgccgccttcagcaagtgcaacatttacgagctgtccccaaccgaagcacctgcaccggccgccgtcggggggccatcgagcggcggcgcgaaggcatcttcaccgcacgccgcgacggngagcactcctccgatgaccgcgaccgccctgatggctgccgnggcggctcccctgctcgcctaccactgctgatacctcttccgacggcccccttccgctgctgctgcc

SEQ ID NO: 5636 - DNA, 1013 bp, Zea mays
  unsure (1)..(1013): unsure at all n locations
  Clone ID: MRT4577_105133C.1
agcagttcagcacccaattcggcacgaggcatgtgacccgggcaccccgcccccagcccccgaccatttctgcacatctacagctcgcgagctgagcaccagaacacgccaggccagcccaacctctccaagaagaacccaagcagcagcccccgaccgaccggccatgccaagagccatcggcggtggtgcggcctacaagggcggcatcaagggctactggaagcgccgcggctacgaccggatcgacgcggccgcggcgcagcgccgcccgcgccctccctacagcggagcttggcggcggcgaggcgcagcctcagccagcgggtggtcggcgccgccgcgggtggcgcgttcgccggcgagcgggcgtcctcggccggcgcctcctgcgcgcgctctccccgcggcggctgctggcgcggctccgcgacgcctacgtgaacgccatgctccgcctcgcgtcctccgccgccgtggccggctacggcggcgccgggccatactgcaccgccgccgacccgttcgcccggccgcgcccgctcaccagggagtacgacgagaaggcgctcgtcgagatctacaggtccatcctcgcgcgcggcgaggccgggccagtggtcgccgccgcgcggctgcccgcggtgctctgaggagctgatgacgacggggacggacgggcgggcgccgggtgacgctggcacgcacgcgcgctgggagccagctggccggccctgctggcgcgctccgtctactctccttgcctcatgcatgactcgtgtacgctagaatctcgctttcatgtagcgcacagaatttgcatgtcggatgaaaagtttcagctggtcattattccggtaccaagtacttcgaacctgtgaattgtttcccaaggatttggaacgaagaatactagtacagaatgaaactctctgccgacggttctacacatatcctngctgttaatttttagaggaattccaccagtgtaaaaagtagctaggtgaaggtca

SEQ ID NO: 5637 - DNA, 712 bp, Zea mays
  Clone ID: MRT4577_105134C.1
ccggccgggccgggatcccttggagaacgtagagacagcactgaagtaccacttcctgcactcactgtgctagctgctcaaaccgaagcactaacagcccatcaccaccaatgtgtcccaaggttgcgatcttccttgccctgagcctcctgtttgctgccaccgcgcatgactgctaacccaactgttctggaccaggcaacccaacgtcaccaaccgtgccgactccgtcaacgaaactacacaggcgctgcccgatcgacacgctcaagctcaagagagtgcaaccaatccgtctacgcctcagccaggtccaactaccccagcacgaacaatgctgccctccgctggaggggctgctgcaactcgacaccacattgtgcctctgcaccgacatcaaggccaacgtcctcgaaatccacctcaacgcgccacttagcctctaattcatcctcaacacactgacttgaggattatgaccacatgacttcacttgacccaactaagctcgtcatcccttgtgtgctccatcacgctattctatttacgaccatgtactgctcttgcaatattaacgaataatttggtcgctacaaattctttcgctgagacatcgactattgtatctgcgtgaacttatatttgaaattctactgatcagtaataaatattacaggtttatatcttgagaagccgtcagttggagtctctg

SEQ ID NO: 5638 - DNA, 585 bp, Zea mays
  Clone ID: MRT4577_105135C.1
gcggagatccgctgccacaccgatcgtggctgctccgtatctatctcacgacctcaaggaagatacctatttcaccaataacggcgagagagtgaacacgcacgcacgggccatcatggaccagagcatactacctgtgctggtcgtgctggaagatcatatggttatgtgtttgcatactgatgccgcggaaaagctgagtgctggcctccgaaacctttggggtgaagcctacccaactgtgatagagaccgaccgagctatgccgcacgccggtattaccgttgcacaaaaggacgtgtgctgaactactttcatatgtgaaccttatcaaggaggacggccgctctatcggagccgaactgaccaacacctgcgagggaatcttgaacctgcttgtctcccacctaaagccttcttctacggccgctgaatcacaggcttctaccgcaaaaacactggcgactatcacaggaatcttgcggaatttaatactgctgctgacaggaaggaatctgctgaaaacaccctggcggactataatgctgatcaggacattgctctggctgagctggcacctaccca

SEQ ID NO: 5639 - DNA, 562 bp, Zea mays
  Clone ID: MRT4577_105136C.1
gggggaggccgcggccggcggaacgagcgtggtgaaggacgagtccacttacaagctgcttccagacgtagaggtgaaggacgtgataggcaaagatcttgtacacgcgaagggcgtctttaaaggtcgccgaagaataactcgggcttaggccatggccgtacagtagacgatgggaagggcgagaacttcatcttctttgcggcttgactggctatacaaggacatttgtgttccatgagtgagatcaacaagagctacttctactgtgacatacgaaataagataaagctcgtctaaagcagggcacaagtactaggagtcgcgatgggatgagtatatgtacgtactacaactactgtgactatggatagggacatgggtttcatatgggtaagaaaaaggacatggtggtttaaagaaaaaaaaaaaaagggcgaagacgtctatatgatccatggatgaactacgctgtgcatgcgtgatgcatagactggtttatggggcaacatcaaggcaattaactgggccctcgtgtgcaacgggaacactgggaaaagat

SEQ ID NO: 5640 - DNA, 282 bp, Zea mays
  Clone ID: MRT4577_105137C.1
tgttctccaaaaacagagtctgtaggtgttttgtccattactcctgtcaagtttggagactttgatgaagttccaggtctatcattaccttcagattcatacagagaccataatacttctagaggccacagacatactgaagatgttgcacatttaaaaaatgtgcaaaaagatgcaagtgaactcaaaccggagacagacacttgtactacaattgatgaggcatctccaattatggtacaaggaacagagacacccaatcatgatagtggtttgatagcc

SEQ ID NO: 5641 - DNA, 1398 bp, Zea mays
  Clone ID: MRT4577_105138C.1
ccccgcgtccgccccgcgtccgacacacacaccttccaccgggcttggctttaaagctgtacttactatttatttctccctccccccacaaacctcatctcttctctcccgccgcgcgccactgaaaaaaaaaaaacaaaagaagagaaaaaaccctccatgtgttccatatttccttcgcattcagtcatcggcgtatcgtcgcaggcgcaggctgctggcggcggcggcggcgggtttcagagcccagagagcagagccagcagcatgagcagcggcagcggcggcggcggctctctgccctccccttccggcggacctgcctgctccagatcatggtccatcagcgaggactcgctgcggaggtacgtgggctacgcgagcgagagctgcatccaggagctgctggcggcgtcgtcggactccggccgcggcggcgacgacgacgacgggtggaaggtgctggtgtaccacaacggcgtcgagatatccaagcggcggacggggccggcgcacgtcttccggagcaggtggctgctgcaggacgtctcgccggagcagttcatggccgccgccagcgccgtcgacgcagccaagcagtgggagtcggaccagctggtggagtcttcgtacatcagggagctcggcgacgacctgagcatcatccacctcaagttcggcgacgcctcctcctccaccaggaggcccgcccggcgccgtgacctggtcgtctatgagcggcgccaggccatggacgacggcacgctggtggtcgcggtggcctcgctgcccaaggagatcgccgcggggctgctaccgccgcccgcggccaccggcaagggcggcggaggctccgtcgtcggccgcagcctgctgctgcagtccggctgggtcgtcgaaaggctcgacggcgacgccggctcctgcgtcgtcacctacgtcgtgcagctggacccggccgccgggtggctgccgcggtgcatcgtcagccggctcaacagcaagctcgtcatgatcatcgccaagctcaggaggatcgcgcaggccaccgtgcctgccgccgccgcagaggtgtgacgtgcatagctaccagcaagtgatcgaaatcgaactagcagcatcgggtcagctgcacgtttagttgcattgtgtgtgtgcctaagtaaatactccctagatatatacgtactatatgtcttctttttgtagggacagagggcatgcgtctatcttgggatgcacccgcatctgtatacgtactgctacaagactatgtcagtgagaattactatgtgtgcacgttttagtgttatagaattcgcctacacgactgttgatctttagcgaccttaatttatttctaactgttgggaaaaaaaaaaaaaaaaaaggccccta

SEQ ID NO: 5642 - DNA, 169 bp, Zea mays
  Clone ID: MRT4577_105139C.1
cttcatctgatcacaacttgttatgagacaagcctcactcaagaaacacaagcaacagcaagatcactgttgtgaagaaaatgaagagagtctggacaagccgaatctctctgtttgtcctattctgcagcaaataggacagaacttgcataagaatggcagccataat

SEQ ID NO: 5643 - DNA, 381 bp, Zea mays
  Clone ID: MRT4577_10513C.1
aaaccagaagaccttttgaaggccacaaagttcagacctatgcctgtcactcacatgagtcctgggccccaacgctgttggcgctactttttccaaaacatatgtagctatcataatctcattataacctaacgctagctctaaacaggttcctccggactggtcgtcttgcacagtagaatgactgctttgcgaagccgccactggacgaatgctatattggatgcgctgccaaggaggaatgcgcgggactccactactgagcttgcgaaactacctgaagattttgttggtcctcctgttccagtggcagtaccttgatctcccacgatgagggctacgcctgatggatctacgagagctgcttgacagctccaatgc

SEQ ID NO: 5644 - DNA, 588 bp, Zea mays
  Clone ID: MRT4577_105140C.1
atctacatccaccgcgcagaccctctgttattatgtgtatactctcactcgacgccctgtgctgtcgcaacgcgaaatgcagtgtgagaccgcacctggaccaccgccccctcaacaggtcaacaacgcacaccgcggaccccttgaagtggggccaggggacaaagggtcttactgggacccacctggacgactcgaatacgatggcggaggataccgcgtgcctctggagaagatcgaacgcgccgtgctcagcgaccgtaacgcgccactcagctccccgccgtccacaggtgcctctgcactaatccgcacgaccccgcctggagggtagccgcgagagactcttcgactgcaccatgaacgcgacacatacctacggcgtcaccaccgcgattcggaggcttgctgaacactcgccgcacgaaatagctctccgtgctccagaaagagttcatcctatacctcctcgtctgctgctttggagccagcagcagaaacggctacacgctgccaccagagatcacgcgcgcgcccatgatcgcgcgcatccacccctcacccaagactactcgtctatccgcttct

SEQ ID NO: 5645 - DNA, 452 bp, Zea mays
  Clone ID: MRT4577_105141C.1
atataatattttactcacatactttctactgaccatcaaacaccaacaacgctgaactctatatacaatggctggggacataaccaaccaacttgggtcaaaaacttgtcgggcacatctgaaacattgaacaggccatggcccagcgcacccttggtacacaacatggttcggcaacggctcaaacaaaagggttaaaccgcgatgagtgtgagaaatcaaaactcggtctaccgcagcatcttccgccttgagctttgcaagaaacctctggttattatccaatgatttgaagcttccgctcccacattttgacaatgtttccattaaatacaccaacaattcttccaatcatctccgggacaattatcttattgaggacatggggagggacaccaccctgttttttggacacacaaacaagccctttgtccttaggcaggtacccttta

SEQ ID NO: 5646 - DNA, 258 bp, Zea mays
  Clone ID: MRT4577_105142C.1
agccccttttgaaatttttttagacaaatacgagtcggtaagcatgtaggttttgtgtttctttttacacaacgaccggcttgttcgctgcggctacggtgcggctgcggctgcgggggactacagtatttttctctctatggattggaggggggcaccccaaacagctgcaacattttcatcttgcagtctgccccccccccccacaagagggttttattaaaaaaaaaaaaccccccgcccctatatgctaataat

SEQ ID NO: 5647 - DNA, 273 bp, Zea mays
  Clone ID: MRT4577_105143C.1
caagaaagaagagacaggggcagggcgggccatacgcgccgacgccgcaggacaagacagagccaaagacgaccagggacacccgcgcgcagaagggagccgagacgagaggcgcccgcgacacgacggacaaggtgaccaggccggcggacacgctgagcaacacgagggagacaagcaaagacatcgccagcgccaggcaagcgggctcctgcaacgacagcgagcgtcaatggaacatcatatgcaaccccgcggccagaggccacaacg

SEQ ID NO: 5648 - DNA, 2314 bp, Zea mays
  unsure (1)..(2314): unsure at all n locations
  Clone ID: MRT4577_105144C.1
ggnaagcactagtgatggtctttggggggggagtgttggacgggaaagtagcagttctatgatcaactggagtgtccagaacaaggatcagagcttctttcaccaacttgaaggtgtacctcttggattacattcaaataaagtaaccacactgtttaattatgcaagattactgggggagtgggtgattctgtcagagcaagcatcttttaccgttttataattttcaagtaccctgactacatagatgcctatctgaggttagcggctattgcaaaacaaagaaacaatgttcaactgagcattgaactgataggtgatgctttaaagatagacgagaggtacccaatccggaattcacgggtcgacccacgcttgggagtcttgaactccagagcgatgaagcctggcttaccgcaaaggagcatttccgtaatgcaaaagaggccaccaagggagatacctactctttgcttcaattggggaactggaattactttgctgccaatcgtcctgagaaaaaagccccgaagattgaggctactcatagggagaaagccatggaactctatcagactcaagtactaaagcagcaccgcagtaatatgtttgctgcaaatggtattggaatcttatacgctgagaaggccaaatgggatgtcgctaaggagttgttcacacaggtgcatgaagctgcatcaggaagtatatttgtacacatgcctgatgtatggataaatctggctcatacatattttgctcaaggtcattttcaacaagcagttaaattgtatcaaaattgtttgcggaagttcttccacaatacagatgcaaccatcctattataccttgctcggacacactatgaggctgagcgatggcaagactgcaggaaaactttgcttagagctatacatttggctccatcaaattacttgttacggtttaatgtaggagtgtcaatgcagaaattctcagcttcaaccctgcaaaagacaaaacaaacagttgatgaggttcgcgccacagtcactgaacttcagaatgccattagagttttcagtctgttatctgttgcatcaacgtaccactcccatggttttgatgagaggaaaatagaaactcatgttgagtactgtaaacatttacttgatgctgctaaggttcatcgtgatgcagctgagcaagctgaacagcagaataagcaaaaaatggaagttgctcgtcagattgctttggcagaggaagctcgccgaagggcagaagagcagagaaaatttcagttagaaaggaggagggaagaggatgaactcaagcaagtaaaacaacaggaggaacacttccagcgtgtgaaggaacaatggaaaacatccagcaacacccctggcaagagaaaagatagatctaagactgaagatgaagaggtgggaaataaaaagcggaggaggaagggaattaggaggaaggatcaaaaaacaaagatgcagtatggggaagaggaagatgagtacaaagatgaaccagaagcagatgatgactatgcagacctggcgaggtataatggcgctgacaattcagagagagccccagatcaccttcttgcggctgctggccttgacgattctgatgccgaagatgacatgggtcatcctcaatctgcaatagaacggaagagacgagcttggtcagaatctgaagacgatgagccagtgaagaagccagcagcacaacctagcccgggcgctgatggtttgagtgaatgaaagaaaccgagatgatgttcttgcagtgaagattaacatgcatgggtctttgctttaggttagcatggtgttgaattggggagattcagaacttcactatacatagctgatagtcaaggactatgtatataccttgttgccaatcttgtttatcgcattagattatggagttgtttaatctgctggtttctgcaatataacatggaatccagtcctattagatggtgacttgtaggtgttttagttgggatgcaaagttttgcacgtcaagtttcagcagttagatttcccaatggacgtatcatgaattaatgatatcacattggccgatatataaaaagaaatgttgaacacgctcgtcatctcagcaagaggacataaaactaagccaaaacaacaaacttaagagaaatgttgaacgggctagttatctcagcaagaggacataaaactaagcaaaaagaacgagcttaggacttgtttgaatgtacttgtatctatcgtaatccattatatctaccttaagactgtttccattatatctatctttt

SEQ ID NO: 5649 - DNA, 413 bp, Zea mays
  Clone ID: MRT4577_105145C.1
ggcttcctcttcggaccaccttcaaggctcttggtgtagcttgccactctcaccatataagtttggatgtctggggggaccattcatacgccaactaccttctatcccttcgctgacgccaactcgtggggactctggtgcagcaacagggtcaaaggactacgttcacgtgcgcagggatctacgacagggaggcaggactctccacaacccgcacccttagaagaatggatttagctacatcaagatcctcaatgatctcaagaaagagttctgctgcaatggtacagtggcaggacccagaacttggacggcgctgttagttggaccgtcagcactgacaaaacctaaagtgtttcctcgcacaacgccgcattgtgaaaaaggagcacatcaagattcatcacgtatat

SEQ ID NO: 5650 - DNA, 388 bp, Zea mays
  Clone ID: MRT4577_105146C.1
tggacttcatctacgcagtttcgggtgctttcaactgagagtcatgtgtgtttgttgggggttccttggtactccctccgtttcgttttagttgtccctggatagtgcatatatgaactattcagcgacctctaacgttaaaccgagatattatcatcaacaccatgtacgtgttccctactaccgctactaggcttgcttttctgagcatgagattcagaaagttcatcttgtattacaacacaatgcacggctgctaactgatgccgtaacccgtgaatgcaacactcaacgctacagcagatgtacgagcctccatttataggatgcagtcttaagaactctcaacttcgacatcattcgattgctataccagaacctctaatac

SEQ ID NO: 5651 - DNA, 349 bp, Zea mays
  Clone ID: MRT4577_105147C.1
gcgacgcgtgagccgacgcctgagccgtgtcgtgcgcttcatcaatctaatccaactccaaatagtccggcggtactaacgatctaagcctacgcacaatactattcgatgtcatgtcctcgaatcctggctttatgtccagtgacgaaagcatgatccggtatttcggcccgttcaagccaccgagctacaaccagtagatatgaaaaatcctctaggagctagagctatacaagatggacctgcactcgtacgacgacaaatcagatcggtacagcatcagctccggtgcgtcgtgggagcacgaaacgccgtcgtccaacgcatggctaatgatgacgatttgcct

SEQ ID NO: 5652 - DNA, 232 bp, Zea mays
  Clone ID: MRT4577_105148C.1
gcccggccgcacagactcaatgccgcgcggagctacggtggcccttttcgccggtccatcaaggaggcctgccgcggggctctcggcgggctttgattccacgcaggaaaagcccccggcggagctcgcggctcggatttggcgggggcctcatggcatgaacggggtttaggcgatccgaacatcttataaaaaagaagcgacccataacaaccggacagggccccaagga

SEQ ID NO: 5653 - DNA, 478 bp, Zea mays
  Clone ID: MRT4577_105149C.1
ctgctgctcccgcgttcgccttgacatgataatgcgtggtcttttagccctgcttgccggttccgactgcgctcaaaccgggaggcttcgacttctcccctgctccaaaatggttaatcattgggcaccccgacctgtggactgccgttaccttcatgcctccgactttcggcgagaagatctgcatacccgacctcttctagatgctcatcgagaggtcgctgctcgagatgaccgccacctgcggatgtacgcacgtgtggagatctacctcaccagaacccgggtcgggatggtacagttacacaccaactagtacaaggcagagatcgtcggggcctactgcccctataagacaagtacgccgagcgcttccagcaactactccatcgcttgtgcggtttagcacttcaccaaaccgtagaccatgcacatgtggccccccgcgatgccttccgtgttaaccccctctatatcc

SEQ ID NO: 5654 - DNA, 1038 bp, Zea mays
  Clone ID: MRT4577_10514C.1
cattgggaccctcgaggccggccggggacaaaccgttcagctcccccatgacgtgtgcgtgacctcactctcagccagagatccacaaccggtgaaccgccgcgaatcctcggcctcgcatccgccggtggccgccgggggcgtggagcaccaacttcccacctgctgcgagacaccccccccccccccctcacctccacggaagcacacacccgaagaagaagagaaggcgagaaccatggcgccacctgctgtgtccatctcgcccatctgctgcgtcccataccccgcctccggcccccgtcgcgctcgcacgcccccctcctccctcagaaggttccccagattcgcagcccggaggagtagcgggggcggcgggggcacgcgcccggagcccaaaccagatgacaacgagagcaaagccgtcctcgacgccttcttcctcgggaaggccttcgcagaggcgctcacggagcgggtcgagtcggtggtgggcgaggtgttcagcgtcgtcgggcagtggcaggccgagcagcagaagcaagtgcaggatttccaggaggaagtagttcaaagagcccaaaaggctaaggagaaagctgcaactgaagtcagtgatgataagggggcgaagtctctaagggaaccttcagcaacaattgtggcgactacaactacgtcatctcccccagctactcccacacagacagaatagttgtagacttcttggtggcagtgaagagttgttgctgcaagttgatgcagttctttgtgcagccaaaaagtctgtagttggctttcacatgatatatgtcgatggatagtatatctgctagtgaaacatccagcatttctagtgacaaacccagcatctcaattataaaaaaaaactaatttacattttttcatatgaatggaagtactttttgcatttagtgcgttctggtatatgtgtaatatatgttatatgccctttttaagaaatgcagcttcaaaacccttgggtaagaatatagaattcctgtctcgatttatgct

SEQ ID NO: 5655 - DNA, 258 bp, Zea mays
  Clone ID: MRT4577_105150C.1
gaagggaacccaaccaacaccaagcaaaaacctggtgggggttttatttcatgaagcaacagttcgtagtccaccagtgcaaagcctttttatggatcaagattgctaacagcacacacattttatttcccccacaagtttgggtttaaccagggccaaatataagggggtaaaggagtgaggagccacgctgacctggatttgtttcggggggttgctcagctgggttttcaccggcgcaaccttgtttgggttaat

SEQ ID NO: 5656 - DNA, 443 bp, Zea mays
  Clone ID: MRT4577_105151C.1
ggccgcaatgttaattttggtccatttaaggggggggtttttttacagggggccaatggacggaggctgagggccaaatgtgggccagattagcaggaccgggggaaccaggggccccccccccacaaactttatctgcgtctaccccgccccgctcccttcgatgaaaggcgggggaaaaaaacccctttccgggtccttgaccttgcgacgctccaatctgacggcgaaaaatgttggctccctattggttggccatccggagaataagtttaacaaaggggcttttaaaaccaaaccggttcttggcctggaaaatcttcaacctcctgcccccaaggaagccgtttaaaaccaaatcctcctcggaaaaccccatgatccccttaagggacccctggaaacccaccttaaaaggtgtttgaccctcctgaaagggggcc

SEQ ID NO: 5657 - DNA, 248 bp, Zea mays
  Clone ID: MRT4577_105152C.1
cgcacaatcaccggtcgcctctcttccgctcccctgcaaacctaatccctccggccaccccgaaaccgctcgctcgctcgctcgctccccgcgcccatagacatccccggataccgtgtctgactatctcactgaccaccaaatgcgcgagttcaacgatgccttcagcctcttcgataacgacagccaccgtttcatcacacccccctagcttggaactgtcatacgttcattgcgtcacaacccat

SEQ ID NO: 5658 - DNA, 162 bp, Zea mays
  Clone ID: MRT4577_105153C.1
acattgattatcatgccattaacatcagggatgcaggatccgcaagcaggagtgggaacagcgatataggttgatacactgaacactgcacgctgagtctgaatttattcgtacaggttcgtgctgaggtgcaaaccctgcagcttggcatcgagcacctcg

SEQ ID NO: 5659 - DNA, 421 bp, Zea mays
  Clone ID: MRT4577_105154C.1
aacaacacacgggcccaaaataactttttttcacagccacgatccacccaaaaagacctttgattgggttttaagctagggtagttaaaaacgaggggagatccaggggcacaataaacccgcttgggactacagtttgaaaccaccaccaaagcgggggatttactttccaggaaaggaggatttgggggctccttaatgccgttttgggcactggggcagtttttgttgaaaacaatgttacaaaccgcagggggggttttggcactggggcaatttttgtgtgaaacaatgttacaaaccggagtagctccagggagctggataccccaaggaaatgcaaaaggatcgtgttggctgaaccctaaacaaggaaaatttttaaagcaagaacgggactttgtccagggggtatcccctg

SEQ ID NO: 5660 - DNA, 269 bp, Zea mays
  unsure (1)..(269): unsure at all n locations
  Clone ID: MRT4577_105155C.1
tggccgacgcgcactcgtccgcggactcgtgggttactattagtcttctgttcccccacataccctcttgataccggatggaacatttttctgtaggggggcgcaaatntacaactagtatttctgctatcttgtacagattacagaattctccttgcttgcttgagttattggtgtaacatatctctgttaatttgacacatgatctgaccagcttgtgtatctttattttttccctttcctatctcttcatttcatatttttccttt

SEQ ID NO: 5661 - DNA, 610 bp, Zea mays
  Clone ID: MRT4577_105156C.1
gtctccggcctcacctccgccgcagcggcggcagaagatcggctcttcctccatccggtgccgttccagcttttcctgcgcatcttttggagcaaagttcgcgccggaaagcctttttctcgctggaggaaaaggtcgcgggttcaatcacaggtggaaagctcgtcgcttttgctcccctgtccgtcttctttggcgggggctttggggaaagaggaggagagatcgctcgctgctggcctgggccgcaaaagtgacggaaagctcattcagaagaccttggctgctaggagatcggtgaagttctggttgtcattgcagagtctccggcagatatgtctttccgcagcatagtccgggatgttagagagagcttcggaagcttatcaaggcggggctttgacgtgaggatttcaggcctccctggtctttccggccatcatcaccgggggaagtctttcgggccaccgggtgagccgcacggcggagctgtggtggctgatcagaatggctgggttggtcttcctcctgaattacttcgtgatgtgatgaaaaggctggaggaaggcgagagcacttggccctcgcgcaaagatgtcgtcgcttgtgc

SEQ ID NO: 5662 - DNA, 1474 bp, Zea mays
  Clone ID: MRT4577_105157C.1
agcagtccggctcgtcactcgcagcaggtcgccagtggctgccctgcctgcctggcctacaactacaagagcgagcggacaagcgccaccgccacgggcatgccaagccagttcacgagcccggccacgaacccgggcaagaccccgccaaaccgcccttctcctcctcctggctcctcgtgcctcgcttgactcctcgcgccaatttcgggaaacaggccatgccgggagacgggggagcagctggaagcgcgaggtgggtttgcgcggtcctttcggtgttcccgccgccgtccaaggccaagaacgccagcttcgagcagggcgccaacttcgccatcaccggcgccaccgcgctcgacaccgacttcttccggaagcgagggctcggcagcaccgtctggaactccggctccctccgcacgcaaatccagtggctgcgagacctcaagccatcgctctgcagctccgcgcaaggcacacgatgcaaggagttcttcgccgagtgcctgttcgtcgtaagcgaattcggtgggaacgactacaacgcccccaccttgtctggaacggacctcagggaggcatacaagctgatgccccacgtgatccgagccatctccgatggagtcgaacaactgatcgccgagggggcaaaggatttgatcgtgcccggagtgatgccatcagggtgctttccggtctacctgaccatgtacgctgaccccaaggaagggcatggctcgcgcaccggctgcctcaagcggttcaacactttctcttgggtgcacaatgcgatgctgaagcgcgcgctcgtgaagctccgagcgaagcaccctggcgcgaggatcatctatggcgattacttcacgccaatcatccagttcatactccagcccaagaaattcgggttctacaaacaaccaccaagggcatgttgtggcgcgcctgggaggggcccttacaacttcaacctgacagcgaagtgcggtgagcctggtgcctcggcttgcgctgatcctaagacgcactggagctgggatggtattcacttgacagaagccgcgtatctgcacattgccagaggctggcttcatggaccgttcgcagaccagcctgttgtccaagcatcttgagttgagtacagtacaccccagccgctcctccctgctgttcttgcacctctagagtgagtgtaccacaatagcacacaccgtgcgtgacaccaaactggatccgataaggtaaggtagtagtagttccagtgcagtcgggtaaagagctgagataggtctattaattaaagcttgattcctttcattcaggatggtggtataagtacaatgtaatgcacaaaacaattcatatgagtaccagttagaaatcactatggtggttagcttgctccaacttctgtatctaacttttgtatctatttatatattttttatatatataggacatatcatgtacaacc

SEQ ID NO: 5663 - DNA, 301 bp, Zea mays
  Clone ID: MRT4577_105158C.1
ggtccttgaagaagtctgctgccctctggatggatgcttactatgaatgatacagagccttgcatttattagtatctctgaagaaggtggtggctgtgcatgtgcttttctctgattaactgagaattaactggcaaaagtggcatacatgagtgtcccaggaatgtgagtcccaaggacacatattaacctttccctgaaggtcttctctgtaactgagaggaagaagaaacagaaaagtgacttctgtcagaatcacaaagggaagacactagctcactgttttcacattttcattagg

SEQ ID NO: 5664 - DNA, 1163 bp, Zea mays
  unsure (1)..(1163): unsure at all n locations
  Clone ID: MRT4577_105159C.1
accggcacgggcatgccaagccagttcacgagcccggccaagaacccaagcacggccaagccaaaccgcccttctcctcctcctggctcctcgtgcctcgcttgactcctcgcgccaatttcgggaaacaggccatgccgggagacgggggagcagctggaagcgcgaggtgggtttgcgcggtcctttcggtgttcccgcttctagcggcggcggcggcggcggcggcccagggaaggtaccgcgcggtgttcagtttcggggactcgctggtggacgccggcaacctggtcacggagggcatcccggactacctcgccaccgcgcgcccgccctacggccagacctacttcggctaccccaccggcaggtgctccgacggccgcctcgtcgtcgatttcatcgcgcaggagttgggcctcccgctgccgccgccgtccaaggccaagaacgccagcttcgcgcagggcgccaacttcgccatcaccggcgccaccgcgctcaacaccgacttcttccggaagcgagggctcggcagcaccgtctggaactccggctccctccgcacgcaaatccagtggctgcgagacctcaagccatcgctctgcagctccgcgcaaggcacacgatgcaaggagttcttcgccgagtgcctgttcgtcgtaggcgaattcggtgggaacgactacaacgccccgctgttcgccggcaaggacctcagggaggcatacaagctgacgccccacgtgatccgagccatctccgatggagtcgaacaactgatcgccgagggggcaaaggatttgatcgtgcccggagtgatgccatcagggtgctttccggtctacctgaccatgtacgctgaccccaaggaagggcatggctcgcgcaccggctgcctcaagcggttcaacactttctcttgggtgcacaatgcgatgctgaagcgcgcgctcgtgaagctccgagcgaagcaccctggcgcgaggatcatctatggcgattacttcacgccaatcatccagttcatactccagcccaagaaattcgggttttacaaacaaccaccaagggcatgttgtggcgcgcctggnaggggtccttacaatttcaacctgacagcgaagtgcggtgagcctggtgcctcggcttgcgctgatcct

SEQ ID NO: 5665 - DNA, 259 bp, Zea mays
  Clone ID: MRT4577_10515C.1
cgaactctcctgatcactgtctgtctgtatgtgcaactgcgagcaaggaaattaattaaaagaagatcggcaccatggctggaacgacgacgacggtgatgcagatgatgcacgtgcaacatgcggcagcattgctgatgtgcttggctgtgttgactgcgtacacgccggtagtgtgatcatctgcagtgactactgatggatgatgcaacggatggaccatcgtatgacagatatactgtgccatcgcatgctacgg

SEQ ID NO: 5666 - DNA, 323 bp, Zea mays
  unsure (1)..(323): unsure at all n locations
  Clone ID: MRT4577_105160C.1
ccgggccggccacacccttccgatttaataattatactttgtccaattttaccattaatccaaccttattaaatttgggcctgtgccacttttactatgtgccggggataaaaaaaaacnaanccatttaaaaaaaatccttttttttcttttaatttttaacaagaatcccttccacttttcccaaaatgctttttccaatttacaaacccacagttgtaccattaactacctaatattttttttttttaaagtaaattttttttgtttccattaaaccctttttttttttttttaaaactattaaacaatttaccattttt

SEQ ID NO: 5667 - DNA, 1017 bp, Zea mays
  Clone ID: MRT4577_105161C.1
gtggtcctgacataaaggccctcagtgggaagagatttgagcaacgcactcatactttgaaagaattcacaatttctacaggtaactgtcttccccttaatgttgaggacaactatcctcttccatcgtttgcagcgggatggaactctcatgacaagacctagcgatcctgccctctactacccaaggtgtgaacatgaagtccaactgcatgcccactccttgggatctaacacatgcaccgaaacagggtcaagggggaaaaaaaagcaagaggaggagatttgagatggtggcctgattgtagaggtgctccactgtgtctccattccagttgctaggaccccaaagtttcataggcagcttcagaaacaggctaaagcatcacatgcagctgctattcttccacaaggcacgtgattctccagctctcagggatctcagattcctggctaatagcgatgggctagtggtagtagaactacatctttccatttcttccctctctatgtcaggaggcccacgttcacctagaccttgtctctgatatctcttcccctgaggctcatgaggtagcaccacgctgtaattgcctaatgtttttcaaaggccaggtacaaatcgagacttccatggacagggtaggggagctgctttgttccataccctcctaaactgtaaccccacagtctctgtaattttcttccttcatgtggtgattggtatgtacactgctttcatttcttgagctttgtaacccatagatacgtcaactatttccaaagaaaattgcctgcattggttgagccacagactaaggcgggaagcctggcaaggaactgttgtgtcaccttcaggtgtgagagcccttttctgacatggaagctgaagtgctggcacctcgggaaaccgtgagggtgtgtgagcagcgttcaaagtcatgttggaagtgtacgatgtcctgcagatttgtatcatttctatgatggtagtttccaaataaagcacacttgcagt

SEQ ID NO: 5668 - DNA, 356 bp, Zea mays
  Clone ID: MRT4577_105162C.1
gatatctacagaatgcacccttactagcagccgcctcggtcttttactctttgacccaacaaaaagaaaatggaacattgtcacatgataaacagacataaagttacatgagatctctcttactatccttgttcctagttcttagcttttcaccgtagcgaatcatccgtgtcttgcaacgccgtggttagagatctttaccttttcctctcactacgtggttcaaggcgataactgtcaaactaactgcttcaaccgtatcataacgctcaacagtcaagtccaaacccttgaggaccatcatggcgtttgccatttcattaaaaatgctatctcaagagtctctttctctttta

SEQ ID NO: 5669 - DNA, 278 bp, Zea mays
  unsure (1)..(278): unsure at all n locations
  Clone ID: MRT4577_105163C.1
gggggggaacaattaatttttttttggatgggcctttaatttaaaccggatttggacactttcannnaacaccatgacagggtaaactgttgggctgggtttccgaccttattttcattggagggaggtttttatttttcgttaaagggattggtttgggtttaggttggaccacgacattttcttgagggttggtattttgggaggggattaaataaatcctggtgcggttggttaagagggcctttaatggcggcccgttctggattatattacca

SEQ ID NO: 5670 - DNA, 717 bp, Zea mays
  Clone ID: MRT4577_105164C.1
ttcgatgctagctccctctatataaagagcactcgccgcgtgatccaaacagacacaggcagcagccattgcttgccctgcatctctcctagctaggtgtcttctcttgctgagtgaagataaaacaatgagttcgtcctggaccgagagtcaaaacaatctcttcgagcgtgcgctggcagtatatgacaaggacacaccagaccgctggcacaacgttgcgcgggcagtcggctgcggcaagacagccgaggacgtgaagaggcactacaagtacctgaagacggacgtgaagcacatcgaaaccgaagaaggcggccgaggatcccagtccagcagccctgctggtgctggtgctggtggcagtggaagcagcagcagcagttcttggggcagggacaacggtgacaagaggatgacgaggcaccccaacatgccgcagtgaagtggatgtgatcttggagagagccttatctctagagcctagagcagcaataggtccacataacaaacaaacaaacaaaaagagacatgatgattggtgcgctctctagagatgttaactaactatgctatttcgtggcttccattccgatccatccaagtgtacgtcgtcgtcaggccggtttgctgtattctgctacctatatatgctacggtgaaagtgaaataaatctgtggttccttgtgcaaaaaaaaaaaaaaaaaaggccccta

SEQ ID NO: 5671 - DNA, 766 bp, Zea mays
  Clone ID: MRT4577_105165C.1
cggccgggcctgggcaaacagacacaggcagcagccattgcttgccctgcatctctcctagctaggtgtcttctcttgctgagtgaagataaaacaatgagttcgtcctggaccgagagtcaaaacaatctcttcgagcgtgcgctggcagtatatgacaaggacacaccagaccgctggcacaacgttgcgcgggcagtcggctgcggcaagacagccgaggacgtgaagaggcactacaagtacctgaagacggacgtgaagcacatcgaaaccgaagaaggcggccgaggatcccagtccagcagccctgctggtgctggtgctggtggcagtggaagcagcagcagcagttcttggggcagggacaacggtgacaagaggatgacgaggcaccccaaccagccgcagtgaagtggatgtgatcttggagagagccttatctctagagcctagagcagcaataggtccacataagaaacaaacaaacaaacaaacaaaaaaggagacatgatgattggtgcgctctctagagatgttaactaactatgctatttcgtggcttccattccatccaagtgtacgtcgtcgtcaggccggtttgctgtattctgctacctggtagcgtttgcgtgctatatatgctacggtgaaagtgaaataaatctgtggttccttgtgtaaaaaaaaaaaaaaggcatgcatgcattccgtaaaaccacacattaaaaaaaaaaaaaaaaagggcggcacgccgactagtgag

SEQ ID NO: 5672 - DNA, 632 bp, Zea mays
  Clone ID: MRT4577_105166C.1
attcggcacgagctatgacagctctgctaaaaaagaatgccaagtttgtgtggtcagataagtgtcaagcaaacttcgaggagtcaaagaagagattgactacagcacccgtgttgattttgcctgatctaagcaagaactctatctattgtgatgcatctcgactgggtatatccgctaggtcttcgttggcaccttccctgacgacgagcacccacatggtgtgacttgaaggtggtgagcgatgcaaacgtcttcttccccaattgagactgtcctggcacacctcggcatgcatggctgcttctccgagatcaccaccaacctggcgagcgtcgacaccgatggtggtgtttagatctcaccgttctgtggccacgccccacaggtgcaagctctgctctgacaacatgtgcaagcgttaggctgatcatttaattgtgcatatgtgggctctttaattgtttgtgactacatatgtgtattgtaggaaaaaaaatccatattttgtacattgttaaatgcctgtcatttctatattatattgtactacataattaatatctgcatttctatttacagccataaggtggaagggccttggccggattttatattctgacaaaaaaaaa

SEQ ID NO: 5673 - DNA, 575 bp, Zea mays
  unsure (1)..(575): unsure at all n locations
  Clone ID: MRT4577_105167C.1
taggctggggctgctaaatggaaaggaaggccttctcgatgcgtgtggtagcttgcttgcatctcaaaagactaatnagatgcgataacacgttccagcctgaataaagccatgccaatgagcactgatggcttgattgatggcacgaaccatgctaggtagaatgaatggctcaatggacacaaccttccttacttgcccagaagaatatgaattaaatagaaatacctcgctggtgatatacaacatccgtgatgctaaaaatactgcaaatggagctcctacacctagctgtgatggtgaaaatgagtagatcttcaccacaatatgctagtaaagaaataccagaaagtctaatacaactattaactaataatcaacattgatacagttaccataactcacaaaatctgtgcgtggctggggtattgcattccggggctgtggagagcggcttttggggatcggcggaccaagagatccaaggtgacgggatcatccatctccattcttagatcccaagtgaggggcacatagaaatagaacatgagccgaagcaaaccaacaggtaacac

SEQ ID NO: 5674 - DNA, 556 bp, Zea mays
  Clone ID: MRT4577_105168C.1
ccccctcgagttttttttttttttttttttttttttttttttttttttttttttttttttttttttttttggtcatttttcatattttttttttgggaaatccctcgggggtgttaaaaaataagggaacccaccccccggggccaaagaaaaatccacaaagggagggttttaattgaaaaaaggaaagggttttttttttcctggggggcccctttacattccaaaaaaatggtttttttttttttggccgcggccccccgttgcctgtttttacccttgttttgggctcccgggggcttttttttatctttttaaaccccggggtttttagggttttacggttaaaccacaaacccctttagtttgggccccctttttttgccttgggcaaaactttttttggggttgggggccttaaggaaaccttttgggggcgcgggacaaaaaacaacttttttttgtttcccccctgccgggggctaaaacctaccctcgtcccaatttttggaaccccgggggcttttttatttccaaaaaggccccccccgtgggg

SEQ ID NO: 5675 - DNA, 155 bp, Zea mays
  Clone ID: MRT4577_105169C.1
acgtagctcagagcgactctgcttcaccgcctccggtgcccaatgccaggccaacagttttgaggtggtaatggcggaccaggctgaccatcccactgtccttcatgagctatgtggctagttccaactgagctccagcttctctgaaggtgtac

SEQ ID NO: 5676 - DNA, 182 bp, Zea mays
  Clone ID: MRT4577_10516C.1
caagaagagcttgacgtgcctcctcccgtacctaagctttaattcgagtcgaggggttttcagccattagcttacttggcgatacccaggctaacggtggcgaaccatgagggtgctgctccgaccctcgctctcctcgctctgctggggcgccaactatctctacaagccgggctgagatg

SEQ ID NO: 5677 - DNA, 291 bp, Zea mays
  Clone ID: MRT4577_105170C.1
ggcgcgctcgacctgactctgcgaggcggaggcggacatctcctgctttgactcctcactacctggagtacgggtcgttctgaagcaccgctatgccgacttcatcgtgcatgaggttgcccgcgatggcgctctcatgcagctcacctagatcgacctccacaccgatagcgttggtgtgaacgaagatgacatggctgacccttccgctgaagcggatcactcacaagccctacagtcgttccaggcgatctgcggcgatgccgattgcaacgcattgaggggtcttct

SEQ ID NO: 5678 - DNA, 161 bp, Zea mays
  Clone ID: MRT4577_105171C.1
caaatgggggcagggatctcccacctgagatgttgtctgagctatatcactcaatcttgccaaatgggattaaaacaacacccgggccggggttgggatattttgaaaaggctcctaatcggtggatagatctaatgcgggaggcaaaatctacctcccca

SEQ ID NO: 5679 - DNA, 237 bp, Zea mays
  Clone ID: MRT4577_105172C.1
ctatactcgcctcattagttagactctatgtaaacgttgcattatatatctacagcatgtcctgtcatgcaaagcacgcgtctaaaacagtatgagcgcttgtaagcaggatacctgtgtaatcatccctctggaatatccacaagacgatttccataccttaaaactcatctctcatttacatgtggttacagtgggaatggtcccctctagacagaactcaggatcaggtcgcaa

SEQ ID NO: 5680 - DNA, 295 bp, Zea mays
  Clone ID: MRT4577_105173C.1
ttctacttgcgcaccgcatgccaataaaagccgagatacgtgcttgcgactcacacacgatgccgaagcaggtgagtgcgggtaagagggcagcagctcgaccgcatacaagtgccttacaacgaagtagtccatgccaaaggccattgagtccggtctccagatgcaagttcaagcggatgcgcgcttgtacttcgaacattggcctattacttcgtcacagtgttcgaccaccggactacctcgcctacctggtcgatatgcttgtatacctcaacgtttatgatctggagct

SEQ ID NO: 5681 - DNA, 317 bp, Zea mays
  Clone ID: MRT4577_105174C.1
tttatttaatttttttagggggggtggttttgggatggggggtggttttaaaacccccaaacccacatttattgaaaaaaaatgaaaggaaacctaaaataatttaccccccaattcatttcaacaaatggggattgagaacaatattaaaggccccaaaaaaaaccttactaggtggagcaaaaatgggtaaaaaacaaaaaaaccccggaagggacgaacgaggcccactactatcgagtttcgaccaacaagaaaaattggcctttgacaaaaaaacgcactcagttcaactttaaaataccagaaacacccaa

SEQ ID NO: 5682 - DNA, 307 bp, Zea mays
  Clone ID: MRT4577_105175C.1
tgtttccgtatgtgggatatatgagggaggaatccagcggtggaacgagcaggcctcaaccaatacttgatccacaactaatgattatccgcatgtttggttcactgctgagatggtgcagctgcatccgcggaactttaaagcacattttgtttggttgttggataagccaatacaagcgtccggcatgcagaaaggacagacgagtcaggctccgcagagacgctcgttgactgcgtacccgcgcgtgcaagcacgcctcatacagcctcatgttcatgcacgcaaaaccaaaaacatttttggt

SEQ ID NO: 5683 - DNA, 607 bp, Zea mays
  unsure (1)..(607): unsure at all n locations
  Clone ID: MRT4577_105176C.1
ggatagctacaagtctcagtggtcacacacaatgcaggcatcacgagagatggctaggcttggcgtcctcgtcttggttgcgcttctcgccgccgacaccaccacagctcaacttgctcaagcgcaagggtcctcctactcctacggcagtgctcctcctcctccaagcccaagcccaccagcccagactccaccaccggctcctactccgccaacgccaaagctgaggtacaacttctacaagcgctcgtgcccttacgccgaggacatcatcaagcaagccgtgaggaacgccacgaacgtcaaccccggcctcggcgccggcctcatccgcatggccttccacgactgcttcgtccggggctgcgacggctccgtcctgctcgacgcgacgccggcgaacccgcggccggagaagctcggcccgccaaacttccctagcctgcgcggctacgaggtggtggacgcggccaaggcggcgctcgagaaggcctgcccgggcgtcgtctcctgcgccgacgtcgtccagttcgccgctcgcgacgccgtcttcttcctcagcggctccnaggtggtctacagcctccccgggggccgcttcgacggc

SEQ ID NO: 5684 - DNA, 1673 bp, Zea mays
  unsure (1)..(1673): unsure at all n locations
  Clone ID: MRT4577_105177C.1
aattcggcacgaggccccctcccctcgacacggtacgaggtccgggctgatccgccgcaccgttgaccccaaccgttccccccgccatggcttcgaggcggacgcagaggcgacggtgggatcgtgccaacgaagcacaacaatgggtggcacgcagcggccgccgacgggcgatgacgcgcctccatgaacggccatgagcgccgacgcttttctcgcctcctccaccaacaacggattctccacaaatggccctggatccgttcgtcgctgctctcttatctgctcttccatccaagcatgtatgcccacccccaatcggaccatcgccggcctcctgcagctaggctgccatcacctccttcaagattcattggctatcgtctttgccattggcgtgcacatacgtgtacagttgggggtcgagcagccagctgctggacgaggatggatggatcggaggatgcatgcatggatcgagcagcggngtgtccaaatcgcgcgcctatgagcggctcacatgatatgcatcaccggcggngcgttgtgccatgacagagctccagggcctaacctcatctctcctgccgtangacatgcgacagttgtgagcatttcgagtattgaggaactgagggctataatttcaagaggctctgagaggaggcacactgccggaactaatatgaatgatgagagttcaaggtctcatttaattctttcagtcattattgaaagtagaaatcttcaaacccaatcatatgcaagaggcaagctaagttttgtggaccttgctggttctgagagggtgaaaaaatctggttccgcaggaaagcaactgaaagaagcacaaagtataaacaaatctctttctgctttggctgatgttattggtgctttatcttctgatggacaacatataccttaccggaaccataagttaacaatgcttatgagtgattctctgggagggaatgcgaagaccttgatgtttgtgaatgtttcaccagcagagtctaacttggaggagacttacaactcgctgatgtatgcttcacgcgttcgatgcattgttaatgatacgagcaagcatgttgctccaaaagaaatcatgagattgaagaagttgatcgcctactggaaggagcaagcaggcaagcggagtgatgaggacgagctagaggaggtaaaggaagagaggatctcaaaagagagagcagacaatcgcctgactggctgacaacttgacacaaccactgaatgctcctggttccgttcttccattacctggagaagaggtgattgatgctgatgagcatttgcaactgccacgagttctgcgatcgctctctaacagaatgttccgatatcatctgacctgtacatacagtagctacgtattatatactatggcagcgatgcccgtttgtacaaagaggaatgtagcacacattgatagaaagggaaaaggttgtgtgactgggaggcttgatgcgccctaagcctataacagctggatcatgtctttttttcccccttggagcaggtatttaaagcattatgtgagcgtccttacccaattctttcttatcttgtgtaaaaatcgggtagccttggatggtcagtttatcgggttgtttggatgattaaacacgtaaacttcactttggacg

SEQ ID NO: 5685 - DNA, 313 bp, Zea mays
  Clone ID: MRT4577_105178C.1
gagctcatttgtcggcggccgaccgtgatgcatcatgccaaacgcaagcatgccatgacacggtgtggctgagctgatatcaccacacagtcagtggtgtacctatcagcgagagcccggactgcctttacatataatcacacgcctatagggatacacaatacgcatattctgataaagcggaaggctctaaatgccaatacgggcagttggtcaacctaactggatcactggactacatcttaagaatgggatgcgcggacaccatcaggtataacacctacagaactggatctgaggatactatgcactg

SEQ ID NO: 5686 - DNA, 659 bp, Zea mays
  unsure (1)..(659): unsure at all n locations
  Clone ID: MRT4577_105179C.1
ccgggtcgacccagcgttcgctgnanacgggctgctgcagctacgtgccgggctcggggtctttgccaatctgcgaccagctgtagttttgccgcagttggtagacgcatccactctgaagagagaggtagctgaaggtgttgacatcatggttgtcagggagcttactggaggcatctacttcggcaaacccaggggttttggaacaaatgacaagggagatgatattggcttcaacacagaagtttattcagccactttttactcacaacttcactccgaaacaaactgtaagatcatgtctcataaaccatggcttacagtcttgaaaataattctgaaactaacaacatatgaacatgataaaaagaatggcaagcgtactgaaaactggagtcgtctttattactgcactaacatatttattaccgcactaacatatttctctaagtgtctttaaaaatacaatttcataactttctcttcgtctttcttggagtcatctttcttggagttgttgtcgaagtctccaaagcttgcgaagaagcctcctgtgatgtcccctctcccatcaaaattccaagacgtctacatatgtaaccatatatttatcaaaattcacttgttttcaacataatgcatgcatggtgacaattatg

SEQ ID NO: 5687 - DNA, 358 bp, Zea mays
  Clone ID: MRT4577_10517C.1
gggtcgagacaagcgtctaatctaactcatatcagattgagagagcagaccaacctagccacgcagcgagaatcgtcaaataggatgggaaagtgtcgtcatggcatcgattgacgcttcaagtagggcagttccgctagttcgtgctctggataaactcatggaagcgtcgtctgcgccagggaatggcaccgccctcaggcatgtggcagtcgcctgaggactccgtggctagaatacctgcgctccactccgacgctacgagggagcagcatcggaagaccagaatctcggatagtaccagtagctgcaccgccagctcggactacggcgtaccgatcctgttctcagatatttt

SEQ ID NO: 5688 - DNA, 5515 bp, Zea mays
  unsure (1)..(5515): unsure at all n locations
  Clone ID: MRT4577_105180C.1
gcccaaaccgaagagccaccaaacaaactggggttgggcaccgccactgcggccctgccgaccgaggcgactgaccgcgcccttccactgaacggcccatgaagcgcccgacgctttttcttcgcctaattcggcacgaggggattctccacaaatggccctggatccgttcgtcgctgctctcttatctgctcttccatccaagcatgtatgcccacccccaatcggaccatcgccggcctcctgcagctaggctgccatcacctccttcaaggatttttagtgaagtcctataatgtgagcactggactactcattatgtttttttgcaggattacaagtttattctgtttttctagattcattggctatcgtctttgccattggcgtgcacatacgtgtacagttgggggtcgagcagccagctgctggacgaggatggatggatcggaggatgcatgcatggatcgagcagcggggtgtccaaatcgcgcgcctatgagcggctcacatgatatgcatcaccggcggggcgttgtgccatgacagagctccagggcctaacctcatctctcctgccgtangacaaacaaacctttgaaaccagctgctttgtttgtcaaacggatctttccacgaattagcctaagttgatccctgctcttccacccttggttgacattggatacggtgagcatactgaatcagaaagcgaatgcctatcacttttagacagattgcctcgtagactcttggcgtttaccagagcaaagcgagaagtcgagcataccacaagttcactcgatcggttattggaacacttatcatagtgccatctatggcaacaagttctcagtggattaaggcccctttcgcatcgggactatggtattattcgtgtccatgatttgcacgatagtcgaaaggtactaccaggaaaaattattctgggaaccaacaaacgatggggtcattttttccgtccagttcccaaggaatatcttcattctgcagagttaggagacatcatgcattttggtagcagcaatactgctgagttcctttaaaagtgcgagttggtggtgtacttcatatctttcaattggaaacaaagcaggacgaagaaatatgtgtagagcttcaaacactttaaactccagtctttgtgagttgagcagaaaaagatttaatgtacatcatccaaaggaagcagacgtgttttcttcttccaaagccgttgtccagcatccgacgaagaacagcacggccacggcgcccctgagacagcccgcaacgcctcatccctacaatatgtcaagtctcaaacataggagatctaatcctaacataagcaaaatatacatcagtatattacaaatcgaataaactgtaccaagcataatgtcgattagtcttccaaaatctctacataatgttttttaaatattaataggtgagtggaaagaaagaacaatcttcgccgcattccattagagagtttactcgaatcaatacaaaatcagcatgatgcagcgggaaaacgtgagccatggacttatgtgtctgttgggccacaaactcgcgagaagttcactttggaagatatgctgtgctttcaaaaggattctattccaacttcattactaaagataagcaatgaccttgtaagccgctcgattaagttgttccatgtcatactaaagtacatgggcatcgattcaccagcaataattagtttggaggagagaatagaatttgttgagaagctctacaagcatacgttaaagcgttctgaacttcgagatgaactctttgcacagatttcaaaacaaacacgtaacaatcctgataggggttggtcaataagagcttgggagcttatgtacctgtgtgcatcatccatgccaccaagcaaagatattggggcatacttgtctgagtatattcactttgttgcccatggagccacaactgatgctgatgttcgagttctagcactgaacacactaaatgcattaaaacgatcagtcaaggcgggtcctaggattacaattcctgcatgggaggaaatagaagctctcttaacaagccggaagcttacaacaattgtatctttcttggatgaaacatttgaagagtcacctagacatggcacaactttgtgatgctttgagacttgctggcttataaactttcagtatatatgatcgtgtttttgatgcaaacacaagtcaagaagaaatatttgaggatactaagtacctggtacaatcagctgttgatggatataacgtttgcatatttgcatatggtcaacctggttctggaaagactttcactatttatggttcagatttcttcattgcaaactggtattcaagaaacgtctcttccgtgagtcggatgaggctgtgactgatccaatgtttgttcagctatcatatgtccagttgcaacatgattacattttgggaaactatcctgtcggcagggatgatgcttcacaactctctgctcttcagatcttggttgagattggattcattgataatcctgagtcctgtgttgaatggatatcacttttagagagatttcttcctagacaagtggcgattaccagagcaaagcgagactgggagcttgacatcatttcacgctttcagttaatggaacacttatcaaaggacgatgcacggcaacaatttctcagaatcttaaggactcttccatatgggaactctgttttcttcagtgtccggaagattgatgatccaataggattgctacctggaaaaattattttggggatcaacaaacgaggggttcactttttccgtccagttcccaaggaatatcttcattctgcagaactaagagacatcatgcaatttggtagcagcaatactgctgttttctttaaaatgcgagttgctggtgtccttcatatctttcaatttgaaacaaagcagggcgaggaaatatgtgtagcacttcaaacacatataaatgacgtcatgctccgcagatattcaaaagcacgctctgctaatagtgtgacatcgcaaaatgatgttaaccatgcatataagccaccaaatattgaaatgtatgagaagcatgtccaagaactgacaaaaacagccgaggattctcagaagcaagcagatcagttgcgagaagatttacagttgaagacaaaacaagaaacagagatgcaagaagagttggaagggctaagagataccttgcaatctgaacgacaaagttccaaagacataaaaaatgagcttgataagctaaaatctctatgtgatgagaaagaatctgctttgcaggctgccctgatggaaaaaagtagacttgaaaccagattgactagtggccagggccgtgagagagatacattgacaactgtaggcagcgtcaataatgacattgagatgcttgccaagcttaaggaggagttgaaatcataccaaaaagagcttgatgcatcaaaagaggtctcaaagaagctaatgtcggaaaagaatattcttgaccagaaagttcaaaggcttgaaagaatgaaaaatgaagagaaaagcgcaatggaaaaggtttatgcggatgaatgctgtaaactgaaatctcagattgctgaattggagcagaaattggaagttgctacacgatccttaaatgtggctgaatcaaatcttgctgtaagaaatgctgaggttgatagcttgcaaaatagtctgaaagaacttgatgagctaagagagttcaaagcggatgttgacagaaagaatcaacaaactgttgagattcttaaaaggcaaggagcacaattggtggaacttgagaatctttataagcaagaacaggttctacgaaagcgttactataatacaattgaagatatgaaaggaaaaataagagttttttgtcgcttgcgccctctaagcgacaaggaactttcttttgaggagaaaaatatagtttgcagtcctgatgaatttacaattgcacatccatggaaagatgaaaagtcaaagcaacatatatatgatcgtgtttttgatgcaaacacaagtcaagaagaagtatttgaggatactaagtacctggtacaatcagctgttgatggatataacgtttgcatatttgcatatggtcaaactggttctggaaagactttcactatttatggttcagaaaacaatcctggtcttactccaagggccacatctgaactttttagggtgataaagcgcgatgggaacaaatattcattttctttgaaggcatatatggtggagctttatcaagataatcttgtggacctgttattgcccagaaatgcaaagcagctgaagttagagataaaaaaagattccaagggtgttgttaccgttgaaaatgtaacagttgtgagcatttcaagtattgaggaactgagggctataatctcaagaggttctgagaggaggcacactgctggaacgaatatgaatgatgagagttcaaggtctcatttaattctttcaatcattattgaaagtacaaatctccaaactcaatcatatgcaagaggcaagctaagttttgtggaccttgctggttctgagagggtgaaaaaatctggttcagcaggaaagcaattgaaagaagcgcaaagtataaataaatctctttctgctttggctgatgttattggtgctttatcttctgatggacaacatataccttaccggaaccataagttaacaatgcttatgagtgattctctcggaggcaatgcgaagaccttgatgtttgtgaatgtttcaccagctgagtctaacttggaggagacttacaactcgctaatgtatgcttcacgggttcgttgcattgttaatgatacgagcaagcatgttgccccaaaagaaatcatgaggttgaagaagttgatcgcctactggaaggagcaagcaggcaagcggagtgatgaggacgaactagaggagatacaggaagagggatctcaaaagagagagcagacaatcgcatgactagctgacgatgctcctggtttcattcttccattacctggtgaagaggtgattgatgccgatgagcatttgcgactgccacgagttctgcgatcgctctctaacagaatgttcctatatcatctgacggccctgtaagtgtacactaattgtatagtagctacgtattatttctatggcggcggcgatgcccagcctgtttgtacaaagaggaatgtagcacatacattgatagaaggggaaaaagttgattatcgcttctttgctgggaggcttgatgcgccctaagcctataacagctggatcatgtcttttttcccccttggagcaggtatttaaagcataatgtgagcgtccttacccaattctttcttatcttgtgtaaaaatcgggtagccttggatgtcagtttatcggttgtttgatgattaaacacgtaaacttcactttggactagactacttcgattttggccc

SEQ ID NO: 5689 - DNA, 946 bp, Zea mays
  unsure (1)..(946): unsure at all n locations
  Clone ID: MRT4577_105181C.1
gatagggccccccacgcacgcggacgtaatttttttttcttttatatcggccgcccttttttttttttttttttttttttttttttttttttttttccactccatctttgtgtttctcctaaactagagttgcgctgactgcgctgtcacacccgaatttaagggacaagccgggtgcatctcatatatgcgtgaaagaagacaacacatataataacagagtgtatagagataaatgtcacaataacatcaaagtacttattacatagcggaagtctntacanaataaaagattgatcgaactaaagtccatccttggcgccataaagtcaactgggagacgccaccttgatcaaatcgacctcctcgtggtgtggctcctcttgaaccacctactcttctcctggcacttgagattccaggtaccaggatgattcttcagatcctcgtgacctcaccgtttgaaggcttatcggggcgggaatgccgtctgtagttcacggctcgcgatgcggcgcggatcacgggcaaattcagattccgacgaggaattgcggtgacgaggcgcccccacaacatcgagcgatgcagcggccatactccacttgcatgggtgattctccactcctttccaccgggatttgggcggcggcatcgtcgattcgtaggtgcggcaggaacccctcccttctctcagcgactctgctctttctcgatggcgagggatctctagtgacgatgcgaggtggttgagcaagaggcggggctcagttttgtaggtcacggcgatggcgcaacagccgcggccgaatcggctgggaggttgacgaggtctggttgttagcttcgtccatggagcaaaatccgcgcgaggaagacgaccggccgatggggctcacatgtaggtgaaacagaaaaaaagaacggggagagagaccccggccgg

SEQ ID NO: 5690 - DNA, 334 bp, Zea mays
  Clone ID: MRT4577_105182C.1
tcgggcagaccaggtgagcagccacatgaacactagcaccgacgcattcgcagccatatgtatagacctcggtgtcggcgggagggacaagaagacgaaccacacaacgccgcactccgacgatgattatgtcaagcttcatgtcaagctctaccgcttgttggacaggaggaccaagagcaactccaatggtgacattcttaagaggcttttcatgaggataatcaagagcccaccaatttgcatgcgccgccttgtgaagttcatggaaaggaaggagaaaagcattgctgtgaatgttggcgcaatcgcagatgacaagacggatcacgag

SEQ ID NO: 5691 - DNA, 480 bp, Zea mays
  Clone ID: MRT4577_105183C.1
ctcgaggcttggccgggaggagtgttagcaccactagcaggatggccctcgcgctcgtcacgaccccactcgggcatatagaccttgccccgccctcgatgttaggctgccaatgctcggtgctgctgctcccgcgccgcgcgtggcccgcccccgcattcctctctcaccgacgatatcgcggacgtcagaccaagaacccgagctcggcagcggaggatcgggggccggcgacggagccggatgtagcggcggatggagcgaccagaggggaggagggcacgaaggagacggtgaggaagagaagatggagcatagcctgtccatggcggataaactcaacctcgactacgccgagctagtcggagctggaggtgttatgggatatatgaagagcggatgccagatatcctcggctgcacagacgcatatcatggcctgatgctgtgcgtcatgcacactcaactcccagtgagacct

SEQ ID NO: 5692 - DNA, 251 bp, Zea mays
  Clone ID: MRT4577_105184C.1
ctgtaaaactcggacgtccacgtcaagtctccctacctatttcagatctgtgtttaggctggggtcgctctcgtctctcagggtcgggcgacgctccacgacgaatgcgaggccaacattttcgagatagatatctcggatcgtcgaccatagtttatggctattcaacaccataatcgccacttcactgacttcccttcaacatcacctcggaacgcttattggtctaatctcgttggcagatatgacgc

SEQ ID NO: 5693 - DNA, 643 bp, Zea mays
  Clone ID: MRT4577_105185C.1
tttttttttttttttttttttttttttttttttttttttttttttttttttttttttttttttttttttttttttttttttttttttttttcggctttggaaaaaaaaaatcaaaagggggcttacccccggaaatccgccccaaatttttttttaatccccccctcatttggaaaaggggggtttacctggcttggtaacggaaaaaacggccaactttaaggggaaacccaacaaaagttttaaaaaaccaaacccattcttggataaggggaaatttttaaaaagggggggctaaacaaaagggccagggaaaacaccacccagggggccccaaaagtggggggggacggcccaaattgggaacggagaaccgaaaactttcggttttgagggctacccgaaaaaaaaagggtttttgttactgggggggttttattgggggcccaacacaaaaaggcggggacccagtccctttacttgtggggaaaaattgggggaacttggggaacaacccggttttccaaaaaaaccccccgggaagaaaaaaggatccggaaaagaactaaaggggggaacccttctagggggaccagggaccggaaccccccaaacccaaaaaccggggggaccttttgtttcc

SEQ ID NO: 5694 - DNA, 146 bp, Zea mays
  Clone ID: MRT4577_105186C.1
attcggctcgagctcatctgcctggtcatctctcaccccaaaggcagctggatcctgcggacatgtgaaggctacacggccactgccaatgacgggtcccaccgattagaacgcagacgctggctcccattcgatgccaacatcat

SEQ ID NO: 5695 - DNA, 505 bp, Zea mays
  unsure (1)..(505): unsure at all n locations
  Clone ID: MRT4577_105187C.1
tgaattcggcacgaggctctaccaaccgcggcttgccaaccttctaattagcctttgacccacccccccgccggccgccgctgcagaccatggagcacgcgtncgcctttctcgcgcgcgcgctcaccactccgcttccggcatccgccgccctcccgcggggccgcccggctcgcgtgggcggcgccgccgttgtttctgagcgcaagccgcccggcgcggtggcgtccaccaccaactacgtcgtgccggtcgacgcggcgcccttcgggatcacgcgccccgctcgtcgagatccttcgggacctcaacaagcgcgtgccggacgccatcgtgcgggccttcttccggggcgcctccgccttcgaccccggattccctggtaccatgcccataagagggtcagcttttatgctccagggtcacagggaggctggtgggacagcatcgctgagcgatgaacgggtcgacgaacccctgtctgcgggaaaaaagggagcgttct

SEQ ID NO: 5696 - DNA, 284 bp, Zea mays
  Clone ID: MRT4577_105188C.1
gttgggtcaaaggggcgttgcggttcaccaattgcgggactcacttcagctgtggcaagcaccgttcattacgccggtactattcaccctacgacacaagggtctggtggttgcccgtgagccttccaccatctggagcagaataccacatcggcaaggggtggagcactccagcctgaccatggcccaagaccggtcctgttagtactcctaagcatcagaaccttgctcaccctaatcaaagtgagacaccgagctgcttctgtagcttctccagcgcatgt

SEQ ID NO: 5697 - DNA, 430 bp, Zea mays
  unsure (1)..(430): unsure at all n locations
  Clone ID: MRT4577_105189C.1
ttgcacaaaataataaagggggtacaaagtacatacaagccagcgccaacactagatggcgatatattattttacagcttcttccaaatataaaaaatccacgagagccttaaaaaagcatccaaccccattttctcagatgcagaagcaaccatttttgtgtttgtacacccaccccccanaaaaaagacaacaacacgttttttcacgcaaggcccccccacacatacatatatgtatgtaaatatatatatatatctcacggatagacttaaaaagcaacaccagctccaaattccttcaggatcttggattccctgaaccctgctttggggaaaaacccgctccattctttttcatctctctgccccccttttggcatgggcatcaagcccacgcccatcaggaggggaggttccaccacaagccc

SEQ ID NO: 5698 - DNA, 572 bp, Zea mays
  Clone ID: MRT4577_10518C.1
ggccgccgatgccgctcaggcacaccgcgcagtctccgggctccggctccagctccagctcgtcgaaccgcaccacggggaggacctcctcgatgaccatcgccggcaccgcccggaactccgggcagcggtgctgctgcagcagcagcagcatcgccgcctgctgcggcaggtcccgcccctgcgccgcggcgccgtgctgctgctgctgctgctggtcctgcagcagcgcctggtggtcgtccccgagatccagcaggtcgccgagccccacggcgtcgaacgcccagaggaggaagcggcggatgtaccccagcagcagcaggaggtggagcagctgcttcgggagcaccagctccgagtagcccaccgggaaacccatgcctggcgcgaccggggcagcgcttgtccggatttgcgcctggtttccctgggcgtgtccgtgcctcttggcttgcggtggtgggaggggggaaggtgggggcgacgcgatgtgcctggtgcttcttgcggatatgccgatatggcgcggtggcgatgcgtggacggcggccgccggccagctacccaat

SEQ ID NO: 5699 - DNA, 348 bp, Zea mays
  Clone ID: MRT4577_105190C.1
aaacggaaattagggggcctttttttttatttgggggcacaaacatttgatgtattcttttcgaaggcggacactttttacccagattgagatatacaaacaattgattcccacactggtatcacaacagcagcaagcagctacatatatatcagggcactgtgaaaccgttctttaacaaaccttacagttgggatgaaaaaaaaaaacctaccagtgtcatgggccatggcccttgcaagtacattaaggcaaaactgggaaaagcaaaaaaggcccaacaattttttttttacaaatttccctaagatgccaccaaaggcgggatttggcccgaatcttcttttt

SEQ ID NO: 5700 - DNA, 434 bp, Zea mays
  Clone ID: MRT4577_105191C.1
tttgtcttaccacgtcacggcgcgcgacgcctagccccttatgcgcagcggcgaggtggaggcagcggtcccgggtctgccgccagatgcgtcgcggcggcgctgggtaatgttcggtctccacgatggcggggcaaccaacgtagacgagcgtggtgcgctctaggaatctgatggccgtagagcgatacagttcaagtgtgtggatggcaatgctcgaaaatgggacatgcggcctaggctggcccaacgaactgcagatggtgcttaggctcgcggtgagcagaactcgtgcggtctgcagaccttggacctctggtgcacggcagaccacatgaacacatacgactgcggtcaccacctgtatacagaactgacccatgtttggaataagaatctggcccgccttgtgggatactgtgtggaaaggatac

SEQ ID NO: 5701 - DNA, 136 bp, Zea mays
  unsure (1)..(136): unsure at all n locations
  Clone ID: MRT4577_105192C.1
ttcatatcggactcgagacggggaaaaccagggcgcagttatctggatctctgaaggtttgtttaatgtaaagaaatggtggtccatcatctactcaaatttttttctctttnaaaaaaaattaggggtatcaaat

SEQ ID NO: 5702 - DNA, 464 bp, Zea mays
  Clone ID: MRT4577_105193C.1
ctttgtccgggagaattctggatttactttcctacaccaaagaaaggactaagcggatgtggtccttccgctagcgacctccacattcctttccccactcgatctgtgcacaaatcatgtatatactcagtggcttttctttctaccaaatcaaatctagtctggtcaggttatttggtagatctgtttgatatttattgttaggtcctcggtttgatcgattggttatttcttcagtttggccccccttttttgttgagaggtcaagtttatattgcaatgccaggggtcggatgcccttggtcaggattccgagctgctattggaaaagctcgtcgtccttttagcgtctggaaaggttttccacggctactagtcagtcatttgtgtcgttcatttcaatcttcgacatgttgtaaattgcaacaaagatcatagttacaaggaattgcacattgatgacg

SEQ ID NO: 5703 - DNA, 170 bp, Zea mays
  Clone ID: MRT4577_105194C.1
cccacgcgtgcgttctatacaaataaccactatatggctatctagctgcttcctgggtgtggccaaaccaaacagggtggtgctaattccctccttgaatgttccacttgatctatttctatgattattttgtaacggggttggttaaggtttcctcttcaatgctctaa

SEQ ID NO: 5704 - DNA, 993 bp, Zea mays
  Clone ID: MRT4577_105195C.1
ggccggccgggaaaaaaaatataaaaaaaaaaaaaaaaaaaaaaaaaaaaaaaaaaaaaaaaaaaaaaaaaaaaaaaaaaaaaggaaaaaaaaaaaaaaaaaaaaaaaaaaaaacccaccaccaaacacagctaacagcttggtgggatggggggaaaaggcttccctttggcttgcctgtgagtgggatctcttcttcctcccccagagcccctgccctcttccgccgacagcgagaaagcacgcggcgcacagcaacacgtccctgccgttccttttgactccggggatccctctcctccttgcctgccgaggaacccactagcttcctactacttcccctccgtcctctcgatccctctccccgttcccttgaccacccgagcatcaagtggcggggagggaacgcggcggcgcgggcgaggaccgatggagaaggggagcgcgccggcgatggccctggcgctcgccatgcttctcgcctgctccagcatcgctgccgtcacggcgcaggagaccgagcggatcgaaggaagcgctggtgatgtgttagaagataaccctgttgggaggctcaaggtctttgtctatgatctccccagcaaatacaacaagaagctgctgaagaaggatcctaggtgcctgaaccacatgtttgccgccgagatcttcatgcacaggttcctgttgtcgagtgctgtccgaacttttaatcctgaggaagcagattggttctacacgcccgtatacacgacatgcgatctcacccccaagggtcttcccttgcctttcaagtctcctcgaatgatgcgcagcgcgatccagctgattgctacgaattggccttactggaatagatcagagggcgctgatcatttctttgtcacgccccatgactttggtgcttgctttcattatcaggaagaaaaagcaatcggacgggggaatccttcccttgcttcagcgtgctacgctggttcagaccttcggaca

SEQ ID NO: 5705 - DNA, 377 bp, Zea mays
  unsure (1)..(377): unsure at all n locations
  Clone ID: MRT4577_105196C.1
gncgtttatgttccacaccgagaaatttctggttctcgtctgagcctctatcttagggacgaccttngcgttatctttgaacgggatgtgctcgncccagcgcaaagcgtccccacctgaccaatgtcttctcgcnctcggatcggcnctcggcgaggcccgggcccttggagcccaaaaggaaggggcggtgctcccgacttacgactccacggaagtatgtcaaataacacttcaaaagtagttggtatttcactttgtcgcccggaaggctctccacttatctctacancctctcaaagtcatattcacnacaagtcggactatgagtcaagcctcaacaagggtgcttctttcctccgctgattcccgccaag

SEQ ID NO: 5706 - DNA, 1943 bp, Zea mays
  Clone ID: MRT4577_105197C.1
cccacgcgtccgctgctgaagaaggatcctaggtgcctgaccctcctgcggccggccgggctctctttctctgtagcctctgccaccaaacagctttggagtgggatctcctcttccttccccgccctcttccgccgacagcgggagagtacgcggcgcagcggctacaccaccgtctccaggctcccaaacacgtccctgccatccttttttgactccggagtccctcccctccttgcctacctggcgaggatcccatacccaatcccatccaactagcttcctactacttccccccccgtcctctcgatctctctccccgttcccctgacgagccaggcgtcaagtggcagggaggagaggaggcaccgcgtgtgaggctcaatggggacggggagcgcgcgggcgctggccctggcgctcgccgtgcttctggcctgctccgacgtcgccgtcgtcacggctcaggaaaccgagcggatcgaaggaagcgctggtgatgtgttagaagatgaccctgttgggaggctcaaggtctatgtctatgatctccccagcaaatacaacaagaagctgctcaagaaggatcctaggtgcctgaaccatatgtttgccgctgagatcttcatgcaccggttcctgttgtcaagcgctgtccgaacttttaatcctgaggaagcagattggttctacacacccgtatacacgacgtgtgatctgacccctaagggtcttcccttgcctttcaagtctcctcggatgatgcgtagcgcaatccagctgattgctacgaactggccttactggaatagatcagagggcgcagatcatttctttgtcacaccccatgactttggtgcttgctttcattatcaggaagagaaagccattggacggggaatccttcccttgcttcagcgtgctacgttggttcagacctttggacagaagaaccatgtctgcctgaaggatgggtccatcacgatcccgccatatgcgcctcctcagaaaatgcagactcaccttatccccccggacacccctcgatccatctttgtgtacttccgaggtctgttctatgacaccggcaatgaccccgagggcggatactacgcaagaggtgctcgtgcatcggtctgggagaacttcaagaacaacccgctgtttgacatctcgaccgatcacccaccaacatactacgaagacatgcagcgctcggtgttctgcctctgcccgttgggctgggcaccgtggagtcccaggctagtcgaagccgtggtctttggctgcatcccggtgatcatcgcagacgacatcgtcctccccttcgcggacgccatcccgtgggaggagatcggcgtcttcgttgcagaggatgatgtcccgcagctggacagcatcctgacatccatccccacagacgtcgtgctgaggaagcagcggctccttgcgaacccgtcgatgaagcaggccatgctgttcccccagcctgctcagccaggagatgcgttccaccagatcctgaacggcctagcgcgcaagctcccgcacggcagcaatgtcttcctgaagcctggtgagagggccctgaactggaccgctggaccaccaggcgacctgaaaccttggtagcgtcctgtggatctgagatggatacgacttgttctgaaaggaaatatggagaacatgattatatatatacccgtgcctttgagttaccatgggtgcatagtgctgacaagaagccaaatgtacatcgttctatgttctttttctataactgttatatacatataaatatcttcgtttcttcttcttcttttttccatttgttcacttgatgatataagagttccaaaccctgtcgaccatgtgtggatatatcataaatggaatttacaagattgtactgctcgttcacaaaaaaaaaaaaaaaagcggcc

SEQ ID NO: 5707 - DNA, 399 bp, Zea mays
  Clone ID: MRT4577_105198C.1
gcggcggggcggacgggcacaagctttttttatatttttttttaaataaatttttttttttaaataaacaaaaacattaaactataaaattgaatcaaatgaaatcgatcatatccttcaattgtgccgcaaaatggcgccattttttccgcctcaacacgggacctggggaacatgtccaggagtccaagaccacgggaccaccttttatgaatcactccttggcccacatgcccaccccttgtagccttgccgggttggcccggggaaactggggccccaaggctgggtaggatttgcccgccttttagcagcagctaatacatccttggcctgccccgtggggcaaccccccatgttttttgggggggcctctggccggggccccccctctggggg

SEQ ID NO: 5708 - DNA, 1609 bp, Zea mays
  unsure (1)..(1609): unsure at all n locations
  Clone ID: MRT4577_105199C.1
cattgggtacctcgaggccggccgggtacgtaaacccacatcagcacggctcgccgtgattctcgcctgctccgacgtcgccgtcgtcacggctcaggaaaccgagcggatcgaaggaagcgctggtgatgtgttagaagatgaccctgttgggaggctcaaggtctatgtctatgatctccccagcaaatacaacaagaagctgctcaagaaggatcctaggtgcctgaaccatatgtttgccgctgagatcttcatgcaccggttcctgttgtcaagcgctgtccgaacttttaatcctgaggaagcagattggttctacacacccgtatacacgacgtgtgatctgacccctaagggtcttcccttgcctttcaagtctcctcggatgatgcgtagcgcaatccagctgattgctacgaactggccttactggaatagatcagagggcgcagatcatttctttgtcacaccccatgactttggtgcttgctttcattatcaggaagagaaagccattggacgggggatccttcccttgcttcagcgtgctacgttggttcagacctttggacagaagaaccatgtctgcctgaaggatgggtccatcacgatcccgccatatgcgcctcctcagaaaatgcagactcaccctatccccccggacacccctcgatccatctttgtgtacttccgaggtctgttctatgacaccggcaatgaccccgagggcggatactacgcaagaggtgctcgtgcatcggtctgggagaactttcagaaacacccgctgnttgacatctcgaccgatcacccaccacatactacgaagacatgcagcgctcggtgttctgcctgtgccccttgggctgggctccatggagccccaggctggtggaagctgtggttttcggctgcatcccggtgatcatcgccgacgacattgtcctgccctttgcggacgccatcccgtgggaggagatcggtgtgtttgtggccgaggaggatgttccgaagctggacagcatcctgacgtccatcccaacagatgttatactgaggaagcagcgtctccttgcaaacccgtcgatgaaacaggccatgctgttcccccagcctgctcaggcgggagatgcattccaccagatcctaaatgggctcgcgcgcaagctcccacatggtgacaacgtcttcttgaagcccggggagagggttctgaactggaccgccggaccgccaggcgacctgaagccttggtagcatctgcctgcctagaacctttttgggaaaaaaagcaagaatgagaacatggtgatatacatacatgcgcctttaagttaccatggttgtatacttgtatagtgcttgctgaccacaagccaaatgtacattttggtttgttctttcttctttccctgtagctgttataccatatatcttcatttctccctctcttctttttttgccctttctcactagggtatgagaatgtcagccttgtcaatcatgcggatatcatagtcgaaatctacaccattttactctgaaaaaaaaaaaaaaacccacgcgtccgcccacgcgtccgnccacgcgtccgcccacgcgtccg

SEQ ID NO: 5709 - DNA, 410 bp, Zea mays
  Clone ID: MRT4577_10519C.1
cggacccgtgggcgatgatgatgaggatgacgatgatgatgacaagggtgatgatgaactggatgggccagaaggggatgggagcggcaagtccaagccaagcaggagtgaaaagaaaaaccccaaggccctgctttagcctggcatggagcccatcactggtggcaacccgggccctgggaaaaaaagccagaatatgccttttggcatctcgaaaccagatggggtccagaacccaaacctcgacccccatgtcatttttcgggaagggaaaattcaagaccctaacttccaacttcagaccccagcctcaaaacaattcaagggttctgaccctgacccaatgatccccaagcccgaaacctctagcccgggccctgaagaccaccaagaagaaggaggtgaccaaa

SEQ ID NO: 5710 - DNA, 243 bp, Zea mays
  Clone ID: MRT4577_1051C.1
tcgagcggccgcccgggcaggtacaagcttttttttttttttttttgtttttttttgtttttttttttttttttttttttttttgcacaaataacatcaccagcatgccatgcaaatactacgggatggcagacaagccccataccagggcagggaaagcaccgggggcaaccgccaactaggggggctccaccccaacacaactagggtttctcccaaaatcaaccagccaggggagatcac

SEQ ID NO: 5711 - DNA, 526 bp, Zea mays
  Clone ID: MRT4577_105200C.1
atggtaaaaaaatttttaaaaaaaaaaatttaaaaattgttcttagaaagtttgtggtgaaaagaaaaaaagaaaaaaaaaacgggggggggggacaaagagctgaaaaaaaaaaacaaaccgaggcccaaaaattccaaagccaacaatccttaggtctgggccaaaaaagtgggggaaacatgttcaaaaaaaagaaacggggggggggaaaaaccactgggtcacaaaaaaaaaaacggaagggtcaaagcttgaacgaaaaaaaacctttgcttgtgggtgcggtgcccgcaacaaacttggggaaaaaaattaaaaggggagcacccgccagaacaagctcacccgacccaacccgagggggagcattgtttggggttgtagaaaacacaccccggttcgggaaaaggggacccacatttgagtttcttgcttttttgggaggagtcgcgtttaaaaaaccaagaactaaaagatccttggccaaacctttaagaggggccgagggttaaaaacgcaaacc

SEQ ID NO: 5712 - DNA, 287 bp, Zea mays
  Clone ID: MRT4577_105201C.1
ctcgagtggggtgggacctaatgtgccacaattaataactagtaacgatttgatgcatttgcatattccatctcctcgtcaataactcctaatttttagttttcaatccaattgaatataaacaactatacactccatagaagggctggaaacttagaaatagaaattaagatagaattagacaaatacccgtcagatgggagctgccctgctcgactgcttttactcaagagtcgggcgtctatgcagccgtgccgccgtgcctgggcaagcaggtggcggacagc

SEQ ID NO: 5713 - DNA, 831 bp, Zea mays
  Clone ID: MRT4577_105202C.1
cctcgaggccggccgggcctcgaggccggccgggccgggaaccatcacatcacaggcgcttattagcagtcgggttattaatataagctaaggccgcccagccagcctaatcactccgcttaattcgtgcttgtgatcgagcagctgtcgctgtgtgtgtataatggcactggcaggcaaggcctcggtcgcgctgttcctcgccgtgaacctggcggtgttcgccatggccagcgcctgcggtggcaactgccccacgccgaccccgtccaccccgtcgacgccgaccccgacgccggcctcgttcggcaagtgcccacgcgacgcgctcaagctgggcgtgtgcgccaacgtgctgggcctgatcaaggccaaggtgggcgtaccgcccacggaaccgtgctgcccgctgctggaggggctcgtcgacctcgaggccgctgtgtgcctctgcaccgccatcaagggcgaggtcctcggaatcaagctcaacctgcccgtcgacctcagcctcatcctcaaccactgcggcaagaccgtgcccaccggattcaaatgcctctaagtctaagcacgcattcagccgcgcgctcgtcgctgaagagtgtagctggatcgtttggattcagatttatttggtttgtatcgtttgtactggtctgtacacgtagctcttgtctgatcagatttggcttcccttgcttgcattgattttcgatctgtttgttttaatcgttttgtattattcgatctctgtatgaataaatacttttatctgttcgaaaaaaaaaaaaaaaaaaggcccctagggccaaaaaaagcccctagggc

SEQ ID NO: 5714 - DNA, 411 bp, Zea mays
  Clone ID: MRT4577_105203C.1
ggggaaaaacattactttttttttggggggcaacaaaaaaaaacattgggggaacggggctaacaaggggaaagcccataggaaaaattttaaaaacccaaaagggtcttccctcccaagactgggaaaagtttatgcccggagcaaaccctggaaaaaaaatttgcttttcaaatttttttaagggggacaacactggggcaaggggccaaccattaaaaaacttggtagttaggggggaaaaaaaaaaccccgggggaaaacttggggggggggccttcctttaaaggaagggttccaggaaccttaaaaacactgaaaggccccggggcaaaaaatccaacagagggggggaaaaatgaggacgggtcaggggggggaaaaaaaaattccatggaacccccgggattc

SEQ ID NO: 5715 - DNA, 494 bp, Zea mays
  unsure (1)..(494): unsure at all n locations
  Clone ID: MRT4577_105204C.1
cgggctcttctgattctattctatgatatccgaccaactcccgaagcgactcaaaagacgacgcttctatgaacaaccccgtacagagactccaaggattagccttctaaagcgattcctgcctgcgactgacagccgatgatcgaggggctgntgagggcgcctggtgaaacaggtcttgtgcgacgagatcaggtggatgatgctgaacaatgatgagaggaaatcgggcgccggtgtaccatccacaccaccgatcaacagcggtggtggcacccttgatgcctactaaaacgactaccagggcgaggctatcaaagacccacgccgtgatttctcggctcaatggcatgcgcatgattaaagagcatggcggcggggaccatcgatacggtctcggcatgaagtcgagcaacgacggctgagaacaacgtggcttatctcacgacctcgtgcggtggcaccttgtcacggctcgcgtcctcatcatgata

SEQ ID NO: 5716 - DNA, 502 bp, Zea mays
  Clone ID: MRT4577_105205C.1
aattcggcacgaggcccctttttttttttttttttttttttttttttttttttttttttttttctttttgttttttaaaaccttgttttatctttgtttccctggttttttttaaataaaaaaacatattcggtgaaaaaaacgccggaaacccaccagggccccgaccaaatttgcgtaagcggacgcatccgcccaaaaataccgacagaagccccccacagaatccccacaggaatatcccactatcccagcagagaacctaaaacccacccggaggattccaaccaaaaacccgggaacccccttccccacccaaaaccaacccgaaaagggcgggcaaagaccggcgcgggcaaggagaccaggctctaactccaaaaccgaagacaataggggggcccgaaaccaggatcctaaaaaaaaaaaagccttaccaaacccaacgggggacctccagcggggggggggaactaaccgggcaaggaaccttccaaaccaa

SEQ ID NO: 5717 - DNA, 703 bp, Zea mays
  Clone ID: MRT4577_105206C.1
attgcgattgggtacctcgagggcgagcggcaccttcctctgcaactctacgctttgtcttctgcgcctccatttcagcctctgtacattgcaagctcaatgtcactctcctgacatggataaagagaagtcccacatcaatcattgggggtattgcctactgacctgctctggtaacgcgcatgacaacagcgagcattatctaccaatttgaaggccttgcatgagagagtaatggagaggctcgagaaggaggttgctgaaatgaacaaggcgcttgttctgagactcctgaaggactcctgacatagtctccagggctgaacgagctgagaggcatttgatattgatatcgtacatgtgctacagactgagatcgccaagttctattgagacgtcaattggtggccaatgtccaagcgtgaattaatagagaacatgattatgtgagcacgtcacagggtgaatgtagtgcctctatttttgactattgaagcatgaagagatataaggctgcaatcagctcagcatgattgagcactacgggtggatgctcttgttgctcgaagctactgcaattgtgtgacatgaggtgtcgtatgattatgactcgagtgacaatccattccaagaacacgcatagacctatgatagatagaagtgactgaaggacttcaaggcacacgctaaagaaattatacct

SEQ ID NO: 5718 - DNA, 582 bp, Zea mays
  Clone ID: MRT4577_105207C.1
gggcgctggggcagcgaacaccaaagctggccgccgcgggctgcggttccgtcgtgtggtgcgcggcgagcagcatgtcgtgtccgggatgaactaccgcctctacgttgacgccgcctaccccgccgtgcgctaccgtgccctacgtaggcgatgcttacgatcaggtatggagccggcacccgccaatttgcctccttcaacccggtgctccaccgcccacttgaaaccatactccctctgctgggccatgatcgatttttcccaggaattacgatgtaacagtctaatgttattatagcttctattgttataatgatgcctctgattctatctattgtcctatatggtctattacacatgatgtgaggaagctagtatacatactgttatggtctcaggcggtctatgactgacctatgataaacaatatttatgtagattgggatgcatattggacttgtctctaccttagtactatatatatatatcagctcgattcatgttcgtagggagcgtcatgagcctgtctctatatatgctgtgaagtaacatgaggacaagcactacaagagaatgttg

SEQ ID NO: 5719 - DNA, 133 bp, Zea mays
  Clone ID: MRT4577_105208C.1
accagtcgttcgatggttactcacgattctcgggcatactggcgcatcaagggggcgatgctggcttgaatcaatatattatccactacgacgagcaaccttaagacgctcatgggctccctgtagagctatt

SEQ ID NO: 5720 - DNA, 461 bp, Zea mays
  Clone ID: MRT4577_105209C.1
ctaaaagggatttagggcgctgccccttcataacaaaaaataaagcgagcgtaggtagcgagggacaatttctggggacaccaaaacctcgggaagtcaggaaggaacgcaggaggaccggggacgaacgcgaaagaggcgctacatggccgggtcttatttaccaaaggggggtcatggcaacagccggacggacagggcccccaaaatcatgacgagcatgcttcattaaccacggaacggggcggcggccgctaggcggagaaggtcagtacgccacggagcgtcgccaacgaggctgggagatgcatctccactcgtgctccagctgctggggttgccctcaccgggaggcgaggccatcgcctcgtgaggaacaggaacgcgatatggcgcgtactgccgggtggcctccgcggaccggtgacccgtgccgttctccaacgggctgagcgatcagg

SEQ ID NO: 5721 - DNA, 345 bp, Zea mays
  Clone ID: MRT4577_10520C.1
ccggccgggtcgccaccagaaggcctgaacgaccatgtgcaggtcgatcgtgcccggttcttccggacatttggctgcatgtaactaaattcttcgttttctggaattggagtgttcaaccgggggtgaacaagctgtttgcagaggtagctttccgtagtcagctgtattcttactgaagtctgaggggtgtactgcgacctgccaaattgctcaataaggtcatgcttcgttaagagctgtcaattactgaaaaaaaaaaaaaaaaaaaaaaaaaaaaaaaaaaaaaaaaaaaaaaaaaaaaaaaaaaaaaaaaaaattaaaaaaaaaaaaaaaaagggggcc

SEQ ID NO: 5722 - DNA, 1695 bp, Zea mays
  Clone ID: MRT4577_105210C.1
gggaaacctttttttgtacacttccgaaaccaccttcaccaaccttgaacattggattgaagtcttgtgttgcttgttgcagctcaataagagagaacttggtgtttagggcttcagatggtgcaaaaactcccagccgattcttttcatgcagttcagtagcttcccttatggcagcatctctttcttgttgtatcctgtcacaatctgcttggagcgcttccagttggtgtttgtttcttgctagctcatcttccttatctttaacatatagctcaatctcacttattcgttgttctagtgtgaccttctgctcatttgcattgtatagcgcagcatatgcttcttcttgctgtcttctcatcacatcaatctcctgcctctgtttttcaagcatttccttgagtgccttctgctgccttaattcgttcatatacgatttttctaattctttgctctgcaagaatacatgtgatttcattaataaacaaacattcaatctggattctggactagcatagcgaatgagcaaatcctgtaccttttgaagagctgattgcagttctctttcagcattttgctgcttattgcattcttcttgcacttccacttggtaacttacagtcacacgatggcaaaacagcatcatctgcatccatgcatgggtcgttcgtcgtcgtcactgcctctcctgctggttccactcgagtattgccgaacgaagggccctgttcggcacgagaaggctgcgctcgaggtcgagattcgtcatgggtgatgtgctatgcccgctgtcaagccagcccctaatagcttcaccctcataagtgaatccatccgctgcaacagatactggctgccccatcatttggtggacaactggaatcagagttctgcgtctgcgatctgcctgagtcaacagtgaagtcctctaaactccgtagtctccttggcttgcctttgaaagtggactcaacatcttcaaatgattgaagcagtgtatcaccagcattttcatatagagagcaaggaacgtggacatgagcaatggcaatccgggagctggaggcgtccctggccaagttgtgcagcgcccacagcaagttgctcttgccgtgcttgagttcttcggggacagcaacgaaaatcttgtcgtcgacagccaaaggcgggctctccgcggcctccctggtgttgctcaccgccgttcttaaggtgtgctggaaagaacgaaagattgcagtcacgcggcgcgcagcatggattgtaatgctgccctccaggacccggaattaaaatgcgaaagacccgaacgttacaaacgaaggcgaggttgtagcatcatttaaaaaaacccgctgtcggaagaaatcactttggtatcttcgtgaatcgggaccggatattcatggcatttggtagacttttctggctgcgaggtgaaattactggagacctgcatagacgaagtaccgtctgttgctcgttactgctctgccagtcgtcgtctaacacgattgtttcgatgcatcgatacgaaaatgctcagctaacagcatattctgaggctgcatttgctcgctgccgcttcctctgcagaaaccttttgacttcttaacaatcacgagattcttcgccgtgtgtgtcttttgttatcacggtctgcctgaaattcatcaaaaaacaagtggcatc

SEQ ID NO: 5723 - DNA, 230 bp, Zea mays
  Clone ID: MRT4577_105211C.1
gcacgagattggatggtttcctggagcaggggtggaatccttaggcagacgttggggccagtttctctttctttgttgcttagagtggcaacgatcttgcagagacttttttaggtgcatgttcttgcgctgttgtaatcggtatttctgttcagtttgttgtcatgctttcatttcaccgtcaaatatgtaagggcccatccctatgtttatttgagatagcataaacc

SEQ ID NO: 5724 - DNA, 442 bp, Zea mays
  Clone ID: MRT4577_105212C.1
ccggccgggcaaaaaaaataccgatcgatgcccatgccggtgcgcggcggcaccatgacactccgacggaccaccgacgatcacttgcgcgcgcggcgccatgacgtaccgagcgacgtcgacgtcgacggcgcgcggcgtggtgtggtgtggtgctccggccccgcctcacctgcatgcagccggagtagagccaattaattgttaactagaaaagacagcgccctatcgggcgctatatcaaacatatatatacacatgaccatttcgtgttgctggtggctgccaaaactaaagtatgttacagatataacaatttgtttgtttgcttgttctactgcagtgaagtgattgagatggcaagctgtgcaccccttttgtaaattacaataagctcaggtaaggacacaacaccaaaaaaaaaaaaaaaaaatttgcggcc

SEQ ID NO: 5725 - DNA, 619 bp, Zea mays
  unsure (1)..(619): unsure at all n locations
  Clone ID: MRT4577_105213C.1
tacgcctgcaggagaaaggagcaggcgtcggcaacatccgttcgccgccnccgcttccgtctctagcgatctcgagacctccctcgccgccgccgacgtcgagctccacatcgacgggcttccccattccgagcacagctgatttgctccccaggtcctctttctcaccaccaccgccgttcccaggtcctccgcaagtgagttgaaccggcgtcggtgccggtgcctgggtccctcgcttcagcttccgcttccggctccggcctcaccgctgttcctccctgcagtccgcggagtcgagcaggttccgcgacctctccgggtcccaccgccccggcggcggcgagtcgggtggcgtcgccgtggcgggggcggctgccatctcaagggctctagccttatgtagagcgacgtgtagccctgctcaaggagctctccgacgacaggttcctggaggattctacgacaaaatggcaagttctgatattcctcctcagaaatcccaagccccagttgatgacagtcaaaacagtcaaattttaacatctaagagttgttgtacaaaataattgtccatgcacatgaaaattcaatcaaccaaggataagttgtaaaatca

SEQ ID NO: 5726 - DNA, 244 bp, Zea mays
  Clone ID: MRT4577_105214C.1
ctcaaacactatatctttcatgcttgtaaatatcaatccatccttttcattcatcgagtgggcctcccacactatccgcagggagtcaattacttaaactatccaacatttcctttcttgccttaattatatctcataacgagcactatcctaactttttacttacattcccattcttaccactatttcctctactcctaaccacattccataaacctgcttatattcagtaacttcctaaaaa

SEQ ID NO: 5727 - DNA, 2407 bp, Zea mays
  Clone ID: MRT4577_105215C.1
gagacagggcattccttatggctggagtggacattactcctagccggccgggtccgggtgtgtgacagcattcccaattcctcaccctcaccgccgccgccgcgccgccgccctcgcagccaccaactccaccgaatctgaagccatagctgccgactgcggccgcctcgaggagcggtgcccctatgcgccgaactccagcggtttctttagcctgttcgcgcgggccccgcgccggggcctgccatggtggggcggagctaggaaggcgtgagcttcgcgaccgcgccggcggaggaagaggcgtgagagcgcgctacaattaaggcgggcgtctcgcccgccggatggccgccgatgacgcggcgcggagcagcagacggatggatctgaacctctacctcggtctcccccgggccccgcgcgccccacgccccgatctcggctccgacctcgcgctcggcaccccgatgctgtcttcgtcgtctccctcgtcctcggccgcctccgcggacgcgccgccgctggagacggatccgctccacccgccctactcgccgtcccgtgccgacctgatgcgcccgccgaccccggcgcacgagccctacaacccgttcgcgcccgaggcgcacccgccctacgtgcctccgccaccactgccggttgcaggggctttacctgtgctcgctgatgagcttgagtttggtttttctgacgcgcaccttggtctggtcgagcgtttagaccggccttcgtcatcgacggcatcctcttctttccgcccggatcttgccgagcgctaccgccacttgatgtccttgggcgggtcacggttcttccggccaagacggttccggtccgaccttccacctctcagctcagagctccctagcctggagaatgaggctgcagcacaaccgcctgaaccggaagaacctgtccgtgatactgtgaggagaacaaggtggctgctgagggtgcagttgtgggtgtctcagaggatgatggaacagagcatggtaagagtaccgcaatgttcgagtgtaatatctgttttgaaatggctgatgaaccagtggttacctcctgtggccatctcttctgctggccttgtttatatcagtgacgcggggtccactccagccacaaggagtgccctgtccgcaaaggagaggttactgaagggaacattactcctatctatgggagagggaattcaggttcggaaatggagaaaaaggttgcagaggatggaaaggcatctggccccaagattccaccaaggccacatgggaatcggctagggagcttcaggcagcagttccaccatttgcgacccatatctagaaggcttggtgaggcacatggttttttgtctacgtggaggcgcattcttgatcggcatttagcgaatagcatgagtagatttgaagggcctcctgaaccatctgtttcagaaactgctcggcatgcaagcagtcttggtcgaatgactactaggttgagagcaaggaggtggcaaagggaagcagaaaaccctacatccattgattcatctacaccagatagtgggcagcctgtaaacaatacattcgatctgccaaggcgctcttcaaacccatttccctcagaagggatggatttattgcgacacattgccttcgctggtcttgaagactcagagaggtttgcgactgctgtcagtgaacttaggcgtattgctaggccaagcccttacggggcatcaacttcatcaaacccaccaaatcctgagcctattgatggaactcatattgccatggcactggctgcagatcaagcttctaattcgagcaccatggctgtcattcaggaagatgcagcttttgctgaaagtgctggagaacctagtaatgccgggtcttcaagatccctgagaagaagaagaggaagtggtgccttaggttctttggatgtggatggtggggacctacatcagaataagagaaggcgtctgaactaagctgaagacagctaaaatcaagccagcaggttgcagcgatattctaatttgctcggtgtgctcttctcagttaagcaatgttctaatgaagctagtaggtaatatctgctgtgtggtatgaagttgtttctctggtactagtttactaggcagctcctggttcgttgccttaattccttccggcctgttcaatttatgcgatcactcaagacatgtatactgcggaaacctggtggttgtcatcagatgtattttccttgatagtaaattgtatgtgcagatctgtaattttcttcatagtaaattgtatgtgcaaatctgtactcagtgaatttggtctctagctgggaaataacacatgagcggacaccagggcttatttgtggatagcttctgattccaccg

SEQ ID NO: 5728 - DNA, 595 bp, Zea mays
  Clone ID: MRT4577_105216C.1
gccggccgggcttcggagccaagctaataagacgacttgtttcattgattcttcgaagagatcgagcttcttttgcaccacaaggtcgaggatgtcttgtcggctgcgtaatcaagctgcggactgcgtgtcaagctgcaagtgcggcaagaatcaccctgcacctgcaggagacgagcaccgccgcgcaggccaccgtcgtcctcggagtggccccggagaagaaagacgcgcccgagttccgcgaggacgcggcgccaccacggtgaggacgcccacggctgcagctgcggtggcaactgcaagtgcgacccctgaaactgctgatcacatcgatcgacaaccatggatatgattattatctatctaccttgtggcggcgtgtgaccaataataagcgaggtcgagctgcgtgccatacatactgattgtgtgatgtatgtgtgtgtgttgagtgagatgagacagaaacatagtacttgagtatggtatgtgtctctctttctctctcggaatgattgcgaccataatctcgtgctcatgaacaagagttctgcgtgatacgattgcatctgctgaaaccggatcctaagtg

SEQ ID NO: 5729 - DNA, 836 bp, Zea mays
  Clone ID: MRT4577_105217C.1
cattccggccgggaaaaaaaaaaacccttctcctcgcctctctctctccaccggtccacccgcaccgttcccaattccccactctcgccgccgccgccgccgcccccgcagccagccaggcagccaccaacttcacggcataacgaagtcatagccaccgacagcggccaccgcgaggaccggtgcccccctatgtgccgaacttcagctgcttccctcacctgccgcctgctccccgcgccgggccctggcatggtggggtggagctaggaaggcgtgagcttcgcaccgcgccggcgaaggaagaggtgtgggagcgctcgaaaactaaggtgggcgcctcgcccgccggatggccgctgatgacgcggcgcggagcagcagacggatggatctgaacctctacctcggcctcccccgcgccccgcgcgcccgccgccccgatctcggcttcgacctcgcgctcggcaccccgatgctctcttcatcgtctccctcgtcctcggctgcctccgcggacgcgccgccgctggagacggatccgctccacccgccctactcgccgtcccgtgccgacctgatgcgcccgccgaccccggcgcacgagccctacaacccgttcgcgcccgaggcgcacccgccctacgtgcctccgccaccactgccggttgcaggggctttacctgtgctcgctgatgagcttgagtttggtttttctgacgcgcaccttggtctggtcgagcgtttagaccggccttcgtcatcgacggcatcctcttctttccgcccggatcttgccgagcgctaccgccacttgatgtccctggggcgggtca

SEQ ID NO: 5730 - DNA, 1073 bp, Zea mays
  Clone ID: MRT4577_105218C.1
gacactatagaagagctatgacgtcgcatgcacgcgtacgtaagctcggaattcggctcgaggtggaggcgcattcttgatcggcatttagcgaatagcatgagtagatttgaagggcctcctgaaccatctgtttcagaaactgctcagcatgcaagcagtcttggtcgaatgactactaggttgagagcaaggaggtggcaaagggaagcagaaaaccctacatccattgattcatctgcaccagatagcgggcagcctgtaaacaatacgttcgatctgccaaggcgctcttcaaatccatttccctcagaagggatggatttattgcgacacattgccttcactggtcttgaagactcagaaaggtttgcgactgctgtcagtgaacttaggcgtattgctagggcaagcccttatggggcatcaacttcatccaacccaccaaatcctgagccatttggtgaaactcaaattgccacggcactggctgcagatcaagcttctaattcgagcaccatggccgtgattcaggaagatgcagcttttactggaagtgctggagaacctagtaatgcagggtcttcaagacccctgagaagaagaggaagtgatgccttaggttctttggatgtggatggtggggacctacatcagaataagagaaggcggctgaactaagctgaagacaactaaaatgaagctagcaggttgcaccaatattctaatttgattggtgtgctctcctcagtttaacctttttacctctttggtaggtaatatctgttgtatgtggtatgaagaagttcctctcgtactagtttactagctagagcttagtcggttgccttaattctttcctacctgttcaatttatgtgatcgttatactgaggaaacctggcggtggtcatcatgaattttccttgatagtagattgtatgtccagatctgtattttccttcatagtaaattgtatgtgcagatctgtatttttcttcatagtaaattgtatgtgcaaatctgtactcggtgaaattggtctctggctgagaaataacaaatgtacttggt

SEQ ID NO: 5731 - DNA, 579 bp, Zea mays
  Clone ID: MRT4577_105219C.1
ggccgcttttttttttttttttttcttttttttttttttttttttttttttttttttttttttcttttaatggaaaaaattctaattgaactattgctttttttaaagaaaccaaagcccgccatgggggccccctttttcggtacaacgctattggaattgaaaaagagggcccctccaccggggggtggtggcccaaccagaacagggttacaaaaaaaaacccggtgtactggaagaactgtttcttctgtgggaaggccaagacccaagggttacccacacgctttgggattaaagaaccggtgaccctttgggtggtccccaaagaaggtcagcacaatcctgccggttgatgggaagcagtttttccatgtgggcaggcggtttgcccccactctgatgggcaaagcttggtccactctgtgcgaccattggtgattgcaggtagttgggtgaatggcccaaactggggggcctaaaaaaaaccagtattgtttgttaacgcaagccgaagggttcaccaaggcctgatgacttgggccctgcaaaaacctgtggaaactgttgttggggggg

SEQ ID NO: 5732 - DNA, 217 bp, Zea mays
  Clone ID: MRT4577_10521C.1
cggacgcgtgggcggacgcgtggggttttttattagaagtggcgagccccgagagcgggtgtagttagtggctacgggcgggcgggcgcggcgtctgcggcggtcatgagcagtgggagcgagagcactaccgccagcaggtggcccgagctggtcacgctgcgcgcgctgtcttccgactctcgtgagcatcttctgctgccgtgggccggcactg

SEQ ID NO: 5733 - DNA, 606 bp, Zea mays
  Clone ID: MRT4577_105220C.1
tccggggaaatcggagcttccggcgtccgttccgcttcagcaacactatctctctcaagttactagagactagacgctctgaaggtcccgtggccgtggatgcgaatcgatggccggggttgaggaagaaggcgaggtggcggccctgcgggaggccctgaggcagcaggtgcaggccgtggaggagctgcgggcggagctggaggaggagcggcaggcggcggcgtcaggagccgatgaggcactggctatgatcctgcgtctgcaggcggagaaggcggcggagcgtatggaggcggagcagttccaccgggtggccaaggagcggatccagtatgatgaggacacgctggctttcctcagggccgtcgtcttccaccaggagatggagatcagctcgctcaaccgcaggctgctcgccgtccacgccaccggggacgatcccctttcgccggcagtcgatctcccctggctgaggaagctggccaagagcggcgtggcgtccaggaggaacgcgtccctcccggcggcacacctggaggagctctgctcggactcgacgtcgtcgtcgacacggacgccgacaagaagagggtgggcgaccgg

SEQ ID NO: 5734 - DNA, 446 bp, Zea mays
  Clone ID: MRT4577_105221C.1
gacctttgggctgatttatgtgcttggaactgtaccctccgtctcccggctctcttagaactacttcttggttagtggcctccggggcatctgcctgaccgtcctattacctcccttcgtcttcgtctcccggtaccccccctatcttctttactgaaccgctaacttaggaactcctttgagacctgtccgtttatttcccctcccctaagcggactcgaatccgggagggaattttgacgtagttgtggcatggagaagtatgatagttgtcgttggggtggcatgtgtcgcattatcctggtattagtggtgttgttgctgttgttgttattgttgcgatttacttgcctgacgccactaaagctaggtcctaaacgtagtccgtcgggtaaagaagaaatccagccggaacggcatccaaagctatagtattcatagggggg

SEQ ID NO: 5735 - DNA, 323 bp, Zea mays
  Clone ID: MRT4577_105222C.1
gggtggggttttttttttttttttttttttttttttttttaaaaaaagcccatacagttttccgttccaatttttcttttaaaaaaacgggcaaattaaattatttttccaaccaggaaaagataatatgttatctgaaacccaaaaatttctaaagctggtcagccaatcgcttttttgtccgaaaacctggaaagctgatcaagcggtttcacccgtttcaccccgggggggcctgacaaattttggtgggggtctgcttctgcaacaaccaaatcaactgccccgaaaaggactttttttggggcccttggggcgaccgg

SEQ ID NO: 5736 - DNA, 362 bp, Zea mays
  Clone ID: MRT4577_105223C.1
aaggaaacaacatgtgccaacccctctctgaaacctccaacgacaaatccactcctctacatgcaatttgtcgtcaatctttgagtcatcacactaattggattgtgtgttggtgtgtgcatcatgttcatcctcacgaaggtcctattttgtggtagtgtcttcttcttcctctaagaattttcttattttatcaagcaagaggcacttgatccttgctagcatttctcatctggtgttgggtgaacagatcctgccattctctatagacacgtgttctttcttgtgtgaagttatgtgcacctattgtggccagcgcttgtgaatcctattatcaaggtggctctctaactttgccggtt

SEQ ID NO: 5737 - DNA, 391 bp, Zea mays
  Clone ID: MRT4577_105224C.1
tagcaggtttgcctgaacgcagacaccctctactcttcatcgttcctccgctcttcgtccacacgctctgatccgattctgcccatgtctgcgcacccagatccggcgcccgcgcccatggcgacgcgcaggcccgcccgcctcgctcgccttcgcttccaccatcgcctcgctcgccttcatctctgcccaaacaacatcgacgcatccgccccacgcgcgacgcacgcgccccgcctccgatgcccacctccgcaaccgacgctcggacgacgaggacgcggcggcacaggatgacgagttggttgtcgacttagcagatctggcgcctgcgcccatggcgacgcgcaagcgaatgctcctcaaatttgtcatcgtcggcaatagcatg

SEQ ID NO: 5738 - DNA, 456 bp, Zea mays
  unsure (1)..(456): unsure at all n locations
  Clone ID: MRT4577_105225C.1
ccctcccaaaaaaaataaaaaataattttatatacaaatttttttttaccaccataaacaaaaaaaaaattgttaaaaaataaaaataccggctggtacaanctcccccttttaaaaatcccacactttctttccctttttttcaaaataataattttttttttgccccccaaaattttttttatttccccattttataaaacctctaatcttaaaaaacctttcctttacccaatttaattcctttaaaacaatttcctttttccccaatttccttaataaaaaaaaacccctacccattatccttttcaaaaaatttcacaccctaatattcaaattgaaccccccttttaacccccctttaaacccccgtttttttttgttttccccacaatttaccttttatttttccaaccccctaaacccccttcttttaatttttttcctttttttttt

SEQ ID NO: 5739 - DNA, 456 bp, Zea mays
  Clone ID: MRT4577_105226C.1
atgaacaggcttgggccgaaaccagcccaggtcggcccaatagcagcagaatcgcgcccgcgcccgcgcgcgcgatggcggctttacagaaatgccctcgaggttttatctaacaggaagcgggttcggttactatttcctggggtcactgacatttcacaaaaaggtccccgggttcttgtcaattcacaactcgcagtccccgacggcgttcaagcacggccgcgctccggcgagcaactacgccggccgattgaggcagtgaccggtgctaatcttcggctgagactaaatccgagtccccaagaatgttttccccaacttaattgcactattggtggactagggagctccggccacggtggccgtaagcaaagcggcaataaggtcgtgttcccggcgatgggcgccggtctagttcaattaaaggggtcggggagcatcacagaggcatga

SEQ ID NO: 5740 - DNA, 232 bp, Zea mays
  Clone ID: MRT4577_105227C.1
ttcgtccacaccattcgattccaacacaatttggcgaccgcaaaatgatacattagctgcagtagatgagtcatccgtcctcaaatttgcgacatacccaccagggccggactgatgggggcaactccattcaggaccaactgtgctccttccagatgctgcgcatctcagggggcaaagtaatttaattccaactttggcggtgacactttatacccatttgaagcacatg

SEQ ID NO: 5741 - DNA, 455 bp, Zea mays
  unsure (1)..(455): unsure at all n locations
  Clone ID: MRT4577_105228C.1
atgacgtgtcgagttgtgacgacgacattgcagggatcgcgggcgtcgacgaagagagcagcgatggtgactacgatgggattggtctcggtggctgcaacgtggatggagctgctgatccccaggctagcatcggtgaggtgaggaggaaggccccctggaagcggtggaggaagcctgtgaaggcgcggtcgctcaagtctttgatgtgagcacgcaagcgcccgcgttactcttccatctccgtggtgtagatgtagaagataagttaatcggcagcttggcttattcgcttgctaactcctgttccttctgatttgtagctgttgttgattgacggactgtttgacttcttcgngttggttggttgttccatggttgtacaactttggttgccaacttgccattccttttcatgttggagtattgcgtcttggaaagttggaagcaatatc

SEQ ID NO: 5742 - DNA, 179 bp, Zea mays
  Clone ID: MRT4577_105229C.1
ctctgattacattttttttcaaaaaaacgcccccgggcgggttttctggagcaatggggggctaacacccagccgacacaggacccgagcagcaggttctttgaccacctccaaaacgagcggggacccgaccatacaagcacattggcggcaaaaacaacccatgaattaaagaccac

SEQ ID NO: 5743 - DNA, 273 bp, Zea mays
  Clone ID: MRT4577_10522C.1
tactctatcgatctctaaactcgaaatctattagtagagattgttgtaagtgaagtctcggcatacactacagtcgcatctagcgattagacttaaatttgagattgtgacactggctcacacttcaaaggttttgaaagggtatgcaatgcagctttctcctaacctatgctgaagctgaggcttggatgccctggaaggcctgctgatcacaatctcccaagcagtagagctgaaactatggctataagttacattatatataagtctaga

SEQ ID NO: 5744 - DNA, 316 bp, Zea mays
  Clone ID: MRT4577_105230C.1
aaagcagataagaataaatacctcgctaataaaaagggggggcgatctcttcgatcgatcctggcttacgtatgcatgcagcgtagttcgtcgtcgatcgtatgcactaacgtgcatttcattcgccgtcgttcgagatcctacgtcgtgcaagagatatgcagggcgttagctaaatcgatctcctacaaggagatcttcctttagctggctgaagtgctagcggtgacgcacacataggtcttcctaggaattagttagccagactgaatggtgaaaggcacgttgcctgtgtgcattcattatgctgggaggt

SEQ ID NO: 5745 - DNA, 740 bp, Zea mays
  Clone ID: MRT4577_105231C.1
cctcgaggccggccgggccgggacgagcatcagctgagcctcctgagaacacacaaattaaagccttctcctactcctacatacgttcatcaatggctctcctgcgtgtcgtcagcacggccgtactgcctgccgcctgctgcgtcgtcctcctcctcctgtccaccacggctccggtggccatggccggctcgttgcgggatgactgccgcgcgttctgccgcccaaggtgcgagggctacggtgcggatttgtgccatgccctcgtcaacggtttcccgttactgcagaacgtcctcgaggcgacgtgcgcagagcgcttctacgaagtgtgtcaacccatctgcatgaacatctgcacggccaacaccctcactccggcagcggggccgggaactgccccgccgccgccgccgccgccgccaccatgcggcaagcaatactagctggctagctagttgatgcctccgtacgtacgtgttgttttatttgctgttaactcttaagtgtgtatgtttccgtacgttattatttaagttttaatttgtatgctccggtacgcatcgtttcgcaataaatgtgtctggccgtgtatgcaatcaaagcagcgatggttccggctttcgttcccctttggatgtacccaatcaaagtttttctaatcatttatgcatttctggctctattaatttattaaatatttctgaattaaaaaaaaaaaaaaaaggcccctaggggcc

SEQ ID NO: 5746 - DNA, 671 bp, Zea mays
  unsure (1)..(671): unsure at all n locations
  Clone ID: MRT4577_105232C.1
actcacacccccccagcatctcgcgatcccaagtccaaccagcctccgccgcctctcctcgcctcgcctgcgagatcagcgccgccttctcccccgtctgtttcgtcggaggagtatcagcaagatgtcaactgccactgctccaggagtgtcctttgctaaatctgggtctggttcccgggctgttgctccggcgatcaggagcgcttccttcatcggttacgccaagcaaacaccaaacttgtctggcctaaggatgtcaaacaagttcagggtgtctgccgcggccgtgcacaaggtgaagctcataagcccagacggtgaagagcacgagtttgaggcccctgaagacacctacattctcgaggcagctgaaaatgctggagtggagctgccattctcctgccgcgccggatcgtgctccacatgcgcgggcaagatgactnacccggggaggttgnatcagtcggagggctccttcctcgatgaganaccagatgggtgagggataccttctgacctgtatttcataccccaaggcggattgcgtcattcaaacccaccaagaggaggaactctactagttgtctcacatgtgcttgtgtggcacaattgttgaagttccatggcggattcgttgttcagttgccttctgttattatctagagaga

SEQ ID NO: 5747 - DNA, 1540 bp, Zea mays
  Clone ID: MRT4577_105233C.1
ttcgatgtgatcattgggtccctcgaggccggcctgggtccttttcctcgtattgctactccggattgagccaaaccctaggccgtggggggctgacggagggcgcggtgagcggggtctccactatcgatagcatgcgtggcgggtactctggccgctgtggcttcgctggcggccggcatagcagcagccgcagcaacgatggcaggggataccacgggaacccttgcttgacgatgcaccaaccgtgggcgtccctgctggtgcacggcatcaagcgtgtcgagggccgctcatggccatccccaatcacaggccgcctgtggattcacgcagcatccaaggttcctgaccccgacactatcaaagccatggaggatttctacagggagatttatgccgtcgatggcatcactggcatcaagttccctgatcattaccctgtctcacgcctccttggctgtgttgaggtggtaggctgcctcaggtctgaagagcttgtttgctgggaacatgtgcctgagtctgtcaggcttgaagggctgactgacttttgttggctctgtgaaaatccacagaagttggtggttccattcgagatgcgtggttaccagggtgtctacaatttagaaagaaggatctatgatggggctgtgaggggccttttacctgttcaaggtccactgcctgtcaagttccctcttccagatcccagagaccccttctccttgaagccaggatctcttacatttgctgcttccaaacccactctgcaaaaatctgaaagtgttgctgcagcaatagccggggctcgagctgcagccactcaattctcaaagaaggatcgcaaagctgctgctagtagtgaaattggtacagaagagcaatcctggggaagccatggcggtagcagttcagttgattgcaatggtctgtcaattgtccatggcagctatgcgcatctacagaaccagaatcggccttcaattttcccgagcactcaagcgaattcccaaaatccaaattctgagcctcggagaagccctagactagaatttggagcttccaataggcttgttgcagtggcactgagtgaactgaagcagttaagcttgagcaagaaaggaacaggacaagcagttcccagaagctgaccaatgcaagctaacaagtagtaatgcttgtcatagcccatagggcgagagagtgtgtttgtagaaagatgggtgatgtttgcagaattcatggtagcttgtaattaagtatatgctccagtgctggaagtgttgccattgtgtgaattattaatgcttgtcgtcacacgtacgtacgctagcagtgtcatcgctgaggcgggctcttttggcatttggttgtcataggacctacccggctctgacctatatgctcttaggaattttcttaggagtttgtttgtaacgacagaatgggatggaatatgacgattctttaaataaggttgtttgattaagatattggaataagactatcttaaaaaaaaaaaaaaaaaaaaaaaaaa

SEQ ID NO: 5748 - DNA, 290 bp, Zea mays
  Clone ID: MRT4577_105234C.1
gcaacaacaacagcgggcgcatttttatcaatgtgttggtctcttattaacaacataaccaacaattacaaggtcattgtgcttcatcacgaacagagccttgagtaacaccaaggacagagccatgagcatcaatatcaacaacattttcagggtcatgacaagcagcaacaaccacaatagcctcagcattattagcagggccaggaaaaatcacaacagcaacaatgtcattgtcaggagctgcaatagactacatggtgcagctataactactatagcagtagctc

SEQ ID NO: 5749 - DNA, 478 bp, Zea mays
  Clone ID: MRT4577_105236C.1
aagaggccaatcagcacagttaacattcatacataatctcaactgaaatcaatttacagtctatattcattacaacatggctgctactactcttgtatcagcagtagcagcaagcaggagaatcagcagagcagcaagtagcagtgttccaccatgcaagaactgacaacctactcgacaccgttcttggcttcatgctctttctcagggatgctcaagcttgctttgtaagacatccgctgccttcagacatgcggcacaatcggtcaaggcttgtgcattcatgagccacgtcctcgaggagaaccgtacgactccggtggaatctcaccgccgggcagcctgctgcccgacagaaggatcccctgctagccatgacccaagggataatctaggtaggcccttaactaccctggaatttagttaaaaacaaactattcctccgtgtttaggccaaatgaaacaaatctatacaact

SEQ ID NO: 5750 - DNA, 1433 bp, Zea mays
  unsure (1)..(1433): unsure at all n locations
  Clone ID: MRT4577_105237C.1
aggagcccgctagcccactagccgcccgcatcgcgcgccggcccgcacgacagcgccgccgtcacgccctccacgccggcagaggctgccggcgacggtggggggtgacttcctctccccctacccttccgatctctttccctctgcgaattgttctattagttaccatctccagcgaccttcctcgggggtgctagccggatccgcgatcgtcgaaatcccaagctcctccacaggcccgagggtcggtcgtcctcatggcggggatcctggcgtgggcgnactgacgtcgtcggcgcgttcttttgcagcgacgacgaggcggacgacgacgcgcgcgccgcggcaaaggccgccatgaccccggcccagcggctccgcgccgccgacctggacgcgcgggcggcttcgctgcgccgcgccatccaggacctccgcctccgggtgccccctcctcacgtcgcgcagcgcctgccccaggtgggggggggctcactcncgtcgtccgccgcgctcgcgctccagctcaacgcgcactcctccaccaaggagcaggaaatggaagtaacagagcataatttaaagacacagcttgaaaatgctctgaaggagctagaggctgctcaacataaagcatcaacagcaacctctggaacagctgaaaatgctctactggaagctaagtcagtgactgaccttaaatctaaagatttggaggagaagaaaagggagcttgaactattggataacaaggtgcaaacattagagaaagagtggtctgtggttgaagaagaatctttaaagaaacccactcctgcacaaagggagaaggtcctggagaggcaactgcatagcctcatcgagcagttgacagctaagcaagctcaagctgaaattctggccactgatgtgcattccaaagaaaaggagctggaacggctgaaccatctgcatagaaacctctacggcggtgccaacgaaactggcgcaccccggagccgcctcagcagaggcctcttgagcggccctgaagattactattacgaccctaaagcgggccggaaaccgtaccaggctggcgttagaacagaaggccagaaccggctgatgatccttaggtccgcaattgtactgtatgttctgctgctccatgtcatcgttttcataaagatatcagtctgaaagcagttgagctagcgcttcataagttcatatagggaaacagatacttgcttttgtgttccaaaccatgcaaacgtttcttgttgtaaataactttgtatgtgagtatgtatctcgtttgatagatttataggagagttatatgaaatacctgttgtcatattttggtactctttctcctgtgcttttgtaaaaacttcatttgaatgagataagaatccatgagtactgtagcccccttcaaaattgtg

SEQ ID NO: 5751 - DNA, 209 bp, Zea mays
  Clone ID: MRT4577_105238C.1
acgggcataaaatgaataggcaacttttttacaatcaatacgatgtgactgcggggggggaggtaccagtacatcaataaggacagccaaaccaaaataagtctgttatgaatcatattatcgtgctggctgatacacgtggttgtcctgacaaggtgccacattctcacggcatacgttagacccttggggtgttaacggcaggtgct

SEQ ID NO: 5752 - DNA, 1785 bp, Zea mays
  Clone ID: MRT4577_105239C.1
acccaacatagagaataactctgcaagaagttgtgcagcctatgagaaagctgtatcatagtgtaaacagaaaattcagtttaagcagattgaggccactcagctcggccggggagcccggtagcccactagccgcccgcatcgcgcgccagcacgcacgacagcgccgccgtcacgccctccacgccggcagaggctgctggcgacggtgggggtgacttcctcagttcctctccccctacccttccgatctctttccctctgcgaattgttctattaggtttggtacattctgttcccttgctcaaatctctgtctcaaaacgtgaactagaaccaccagccaccatttcatacgatctcatcacacttcttagttaccatctccagcgaccttcctcgggggtactaagccagatccgcgctcgtcgaaatcccgactcccgaggtcctccccaagcccgagggccggtcgtctccatggcggggatcctggcgtgggcggctgacgtggtcggcggggccggcggcagcgacgacgaggcggacgacgacgcgcgcgccgcggcgtcggccgccatgaccccggcccagcggctccgcgccgccgacctggacgcgcgggcggcttcgctgcgccgcgccatccaggacctccgcctccgggtgcccccgccgcacgtcgcgcagcgcctgccccacctccacgccgactcactcgcgtcgtccgccgcgctcgcgctccagctcaacgcgcactcctccaccaaggagcagacccaacaaagagaagtaactctccaagaagaaaatgcagcctatgagaaagctatatcagagtgtaaacagaaaattcaggaaaagcagatggaggccactcagcttctgagtaatctggaggaaatggaagtaacagagcataatttaaagacacagcttgaaaatgctctgaaggagctagaggctgctcaacataaagcatcaacagcaacctctggaacagctgaaaatgctctactggaagctaagtcagtgactgaccttaaatctaaagatttggaggagaagaaaagggagcttgaactattggataacaaggtgcaaacattagagaaagagtggtctgtggttgaagaagaatctttaaagaaacccactcctgcacaaagggagaaggtcctggagaggcaactgcatagcctcatcgagcagttgacagctaagcaagctcaagctgaaattctggccactgatgtgcattccaaagaaaaggagctggaacggctgaaccatctgcatagaaacctctacggcggtgccaacgaaactggcgcaccccggagccgcctcagcagaggcctcttgagcggccctgaagattactattacgaccctaaagcgggccggaaaccgtaccaggctggcgttagaacagaaggccagaaccggctgatgatccttaggtccgcaattgtactgtatgttctgctgctccatgtcatcgttttcataaagatatcagtctgaaagcagttgagctagcgcttcataagttcgtatagggaaacagatacttgcttttgtgttccaaaccatgcaaacgtttcttgttgtaaataactttgtatgtgagtatgtatctcgtttgatggatctataggagagttatatgaaatacctgttgtcatattttggtactctttctcctgtgcttttgtaaaaacttcatttgaatgagataagaatccatgaatactgtagcccccttcggcggccgccgcctatt

SEQ ID NO: 5753 - DNA, 413 bp, Zea mays
  unsure (1)..(413): unsure at all n locations
  Clone ID: MRT4577_10523C.1
aaacccccccgggcggccccgggaaagggcaaaacccaacacacggggggccggaacaaggggaccccagcccggccccaagctgggggaaaacaaggccaaagccggtccccgggggaaaatggtaacccctcacaaacccacaaaaaaaacgagccggaagcaaaaaaggaaaagcccggggggcccaaagggggacccaacccaaaaaaatgggggggccccccccgccccctttccaaaccgaaaacccggggggccaactaaaaaaaaaaaacgcccaacccccggggagaggggggatgggaaatgggcccccttccccttcccccaacaaggacccgctgggccngggggttcggctgggggaggcgggtccaccccccccaagggggggaaaacccgtaccccca

SEQ ID NO: 5754 - DNA, 267 bp, Zea mays
  unsure (1)..(267): unsure at all n locations
  Clone ID: MRT4577_105240C.1
ggctgttggggttttttttttgtatagaaaggtgggggggtttgcagttaattgggcaaggtagnggggtaggggtgcaattttactgtatagttgcggagaatgtttgtttttttgttacatttccaagaatttggagtctaatatttggggggggggggtggtttttgcatttcttaatggttcttttttgactggccggtgatttttagttgtgctcaggtgtttgaggtgattattgttgttttttctgtttccttttgtatt

SEQ ID NO: 5755 - DNA, 272 bp, Zea mays
  Clone ID: MRT4577_105241C.1
cagcgccaacaagtacgagaccttgctggaggtggtttaggtgatgatcgacctgaagttgatcatcaagcgggcctacatttcctccgacgacgagtggttcatgaacggtgagtggcgctgcctccccctgctgtctttaggaagttaagataggttaaaggaagatggaacctttctagggtgatgcaaagcctgacttttacttggattgtgtaatatttctattttctttcctccccctcccccgaacctgatgtgtgatgtgtgtt

SEQ ID NO: 5756 - DNA, 453 bp, Zea mays
  unsure (1)..(453): unsure at all n locations
  Clone ID: MRT4577_105242C.1
gctcgatccctgcatcgcggcctccgacatcggcacgctgcctctcctctctttgcgccccgccgccggagctagaacgccgccatatcatgccccgctaccgatgccgtgacataggtgctggcaggatactacgcgtactacgacttcgaggaaggtgctgatgggcgactcggaggtgaacaagtcccacatcctcgcgcgcttcgcccgcaacgagtgcagtctctactccaaggccaccatcggcggcgagttccggacccgccccctcttcttcgaccaaaggagngncaaggcccagatctgggacaccgccggccaggagaggtacatatttgtttcaccgccccattacacaggcgcccttggagctctgccggcctatgccactaccacacgccagacgcttcagcatgcacctcgctgggctgtaccaaccccgccccacgc

SEQ ID NO: 5757 - DNA, 383 bp, Zea mays
  Clone ID: MRT4577_105243C.1
gctcttatacgactatactataaggaaagctggcacgctctgcaggctccggaccggaatttatgcctgagacctctagctcactgtgcagatgaacctacttagaccaaaccctgcctgatccctgtgcccttcttgacttcgcaggactttacgacggatccaaagcgccaccggctgctgccctcgacatctcacatgcatttatctattccacactgatcaatctgaagtcacccaagccgatttcacactgaacagctctatcacgtgggcacctgatgatatcatcagcctactgtatctgatataaagcactctatgcgccctatagctacttgaagaaacagctaaactcctgttgtggcagactgcactgacgt

SEQ ID NO: 5758 - DNA, 351 bp, Zea mays
  unsure (1)..(351): unsure at all n locations
  Clone ID: MRT4577_105244C.1
cttctcttctttcctttttttctttcgcgaacggcaaaatttttttgatttgcatttatgtgcaggccaatcccaggtcatatccatttaaggcacattatcttaaaggacatttcaggatgtaggggggcggggcgaaatgcgggagtataatggaagcaatcatcgaggaaggatcagtgcagaaagttcagggacaagagggaaacgatggccagccacaagagcgcctttntagagttccgactccacgccgagcaggcatccttactagnttctggcgncggtgtgtagccggtgataacacttttaaatggacgaagcggtgggttcacacagtcggagggttgg

SEQ ID NO: 5759 - DNA, 312 bp, Zea mays
  Clone ID: MRT4577_105245C.1
ataatacctttttgatgtttgattttaatgttttttgtattggtgggggcaaacacacttattttttattgggcataaccccatttcgtggccgccagaaaaaacagcttcaccacacaagccttgggtttaggaatgcccaaagcccccaaaatcatggatggggggcccaaggcttcaagctcccgttttgtgggggtgagtcctctcctgggttttttatttcgaaaaaaatggcatggttttatatttcaccatgccaaaagttctccaatgctttgtaaccggtctgtgggggaactcaaaactgac

SEQ ID NO: 5760 - DNA, 364 bp, Zea mays
  Clone ID: MRT4577_105246C.1
aaaaaggcggaacttttatttccatgataaaaaagggcccggggccggggccctcgaccagggaacattgcctccacaaagccaaagggatgctactttgattaagcaaaggccttccttatggccccataacaagaaacaactggggctttgccaccgattacaagggtccagcccaggcctttactgaaaaaaagttggaaaatatcctggtgccattaccatcctcaccggggttcccaccagcaggatgggctaattcttcctggatttcagttgcccaatccgggcctccggggcctttaaagcatcgccgaatttggttaagatttcttcgccttcattgggagtcctgaccgggggg

SEQ ID NO: 5761 - DNA, 2392 bp, Zea mays
  Clone ID: MRT4577_105247C.1
ccacgcgtccggagagagagaggaggaggagaaggagaggtttttatgtatgtgtggtggacatgcgtcctcctgtcgtctcgagagagagagagagagagcggaggccctaatactccaatcaccacgcaccaaactagctagctagcagtcgtcttgcattgtagctagtccattgctctcatcttctcttcttcttcccccagtcctccccccctttcccctcttcggcctctctcgctcagctcgctcttcattaagcgagctcacgtcgttcctcccttcttcctcttcttcttcttatccgttgttcaattcgttcagctagccggccagagatcgagcatcatctccatcatcgattcatccatctcatctctttctcttcttctattctatgtcgtcgtcgtcccagattagatcgaagctgctagcagtctatccagtctctagctagctagctagatcaagcccgcagactatataatataaataatacaagctagcgctacgtgcttattattgctttattagtctagaagaataatctagatatatacgatcgaacatatatctcgatctccaccgatacacacccggccctatccatgcttgaggtgtcgacgctgcgcggccctactagcagcggcagcaaggcggagcagcactgcggcggcggcggcggcttcgtcgtcggcgaccaccatgtggtgttcccgacgtccggcgactgcttcgccatggtggacgacaacctcctggactacatcgacttcagctgcgacgtgcccttcttcgacgccgacggggacatcctccccgacctggaggtagacaccacggagctcctcgccgagttctcgtccacccctcctccggacgacctgctggcagtggcagtattcggcgccgacgaccagccggcggcggcagtagcacaagagaagccgtcgtcgtcgttggagcaaacatgtggtgacgacaaaggtgtagcagtagccgccgccagaagaaagctgcagacgacgacgacgacgacgacgacggaggaggaggattcttctcctgccgggtccggggccaacaagtcgtcggcgtcggcagagggccacagcagcaagaagaagtcggcgggcaagaactccaacggcggcaagcgcaaggtgaaggtggactggacgccggagctgcaccggcggttcgtgcaggcggtggagcagctgggcatcgacaaggccgtgccgtccaggatcctggagatcatgggcacggactgcctcacaaggcacaacattgccagccacctccagaagtaccggtcgcacagaaagcacctgatggcgcgggaggcggaggccgccacctgggcgcagaagcgccacatgtacgcgccgccagctccaaggacgacgacgacgacggacgccgccaggccgccgtgggtggtgccgacgaccatcgggttcccgccgccgcgcttctgccgcccgctgcacgtgtggggccacccgccgccgcacgccgccgcggctgaagcagcagcggcgactcccatgctgcccgtgtggccgcgtcacctggcgccgccccggcacctggcgccgtgggcgcacccgacgccggtggacccggcgttctggcaccagcagtacagcgctgccaggaaatggggcccacaggcagccgccgtgacgcaagggacgccatgcgtgccgctgccgaggtttccggtgcctcaccccatctacagcagaccggcgatggtacctccgccgccaagcaccaccaagctagctcaactgcatctggagctccaagcgcacccgtccaaggagagcatcgacgcagccatcggagatgttttagtgaagccatggctgccgcttccactggggctcaagccgccgtcgctcgacagcgtcatgtcggagctgcacaagcaaggcgtaccaaaaatcccaccggcggctgccaccaccaccggcgccaccggatgacatactatctcgtcgacaatacatgcatgtacaatagacggatgtctagtagtatagtagattgctgctagctagctagccgctagagtgtagtagcatatgcatgccttttttttcttcttctttttttgcccttattattaagctggctaatagcgattgagatggagcttgacacagatctgctagctagctatttgagggtttctcttgtatgctacctattgctgctgcttgctgctgagacaagtaatgtacgtacgcctgtgcaaacgacacatcggattgtattgtattactagttatatgaacaacaacaataataataggcacatgcatgcctgcctagtatgtgagctgctagctagctacatgcatgttgcgcattcctttcc

SEQ ID NO: 5762 - DNA, 248 bp, Zea mays
  unsure (1)..(248): unsure at all n locations
  Clone ID: MRT4577_105248C.1
cggaaccggaaactcccggtgtcgacgccacgcgtccggtggatccgaaagggtagcgagagtgggggacacatcgtggctcattgtgagatacagggaatttctggatgaagatggttcagtaggtcatgcaggagtacgctggggagatgctttatacatttgangagggactcgtatgtcgtgaaaaattgtgccgtttccttggggcagatgattgagagaaggtattagaactgtggaagaag

SEQ ID NO: 5763 - DNA, 247 bp, Zea mays
  unsure (1)..(247): unsure at all n locations
  Clone ID: MRT4577_105249C.1
cgccgcngccacnccancnncnccggcgccgggcgggaggccgcgggggggnnaagcngcnagcngcnccacgacgacagcaaancagaaggngcnnnnccggggcncaaaacagnnnccacggancacgnanagccgngcgncgncacggnnngcgcggagagaggnaanagcnnnngccgggcaacaaccgngggacancggcagannngacaagacgccgganngcnncaacgggccgccaaac

SEQ ID NO: 5764 - DNA, 374 bp, Zea mays
  Clone ID: MRT4577_10524C.1
ttaccaaagagtattttaccacacgtggcttaagtaccaattgctgttgcattcactctcttattcaccacattacaccaacttcctatccttattccttacccaatcaaaaactgttcataaaaaagcatcaaccgcaacccaccccccaccactacagggaaaagattagtacaagggtaaaagtcatccctttgctacacaaactttcttgttttcttgactcaacataaaatggtaaactagacagcataaaattaagcctttcaaactgctccatcttcttgactcatggatatataacatgacccaactacaaccaggcaactttccgctgcaccgttttgacatcttaaacgtgcctttaatctgca

SEQ ID NO: 5765 - DNA, 396 bp, Zea mays
  Clone ID: MRT4577_105250C.1
gactcaccgcgctgtctctgaccatgaagccaccctgaggtgctgggccctgagcttctaccctgcggagatcacactgacctagcagcgggatggggaggaccagacccaggacacggagctcgtggagaccaggcctgcaggggatggaaccttccagaagtgggcggctgtggtggtgccttctggacaggagcagagatacacctgccatgtgcagcatgagggtctgcccaagcccctcaccctgagatgggagccgtcttcccagcccaccatcgccatcgtgggaatcattgctggaccggatcacttggagctgtgatcactggagctgtggtcgctgcagtgatgtggaggatgaagagctcagataggaaaggatggagttacact

SEQ ID NO: 5766 - DNA, 371 bp, Zea mays
  Clone ID: MRT4577_105251C.1
aaccaacaaagggggttgggttaattcccgatgggcatggccaaacaaataggggtccccattctcccctttttccttttggaaattaaccaaagggggggaaatggcaaaccaaataaaaggaaggggtcaatcgacatgtccaaccccaaattaaaggccctaaatatatttttttatatttttatataaacgggacccaccccaatccaggcaaggggggccaggagcccttccctccgacccccctttaattttcctggaggtggtaggcaaaaaaggagagcccggaggccctcaacacggggcccccgggcgggaacccaaccaagaaggccctggagggcccgggccccagggccccggggggg

SEQ ID NO: 5767 - DNA, 550 bp, Zea mays
  Clone ID: MRT4577_105252C.1
ttgtttttttttttttttttttttttttttttttttttttttttttttttttttttttttttttttttttttttttttttttttttttttttttttttttttggacaaaagctggtttttacaaaaaaacaaattgggaaacaatggggggggggggggcaagggggaccccaatgccccccgctcaggggtacacaaaaaaacacttgttccggggcgggacagggcccttttctactttatacccatttccacaaaaaaagcgggaaaacgtttcaaaaagggggggggtggtttaaaaaaaagaacttttaaacaatcagggggcccgggggaaatatttggaaaagggctagggctgttttttgacccccctcaggggggttttggccaaaacattgaaaatctccctttttttttgggggttttcgcccattttcccaaaggaaacgtgggcctgtttttccaacccttccctcacaaaaaatttcaccccccaaaaagtgggccccctctgggcatccaataaaaaaaccactttttttggttt

SEQ ID NO: 5768 - DNA, 406 bp, Zea mays
  Clone ID: MRT4577_105253C.1
cccacgcgtgcgcccacgcgtccgcccacgcgttcgtccacgcgtccgaataatatataggcctgtaacaacggcagggcagagtggaaggtcgaccccaccaagcggaggccacggtctgaaactcaaactgggtttcaactgacgctagctggcttggaagctcgaggatggatcgaagactatgatctccttcattgtgccctgtcaggctacctacccctgcaccctgttggttattggttaaaatggttattgaccaaaggtgtcctgcatcaaacaaggctcaccttgatgttaatgtgctgagggatctaatgtatcattagcgttatccagctcttgtttacgtgctccatctcaatccatgcacgttaggatggattgtctaatctagttcaaattt

SEQ ID NO: 5769 - DNA, 203 bp, Zea mays
  Clone ID: MRT4577_105254C.1
acgcaaatacgcgggtgtaaaaagtaaatccggcacgaggcggccctcaccggtagcacttgtcagatgtacatcaaccccgggtgtgtccatagagaggtaattactgaggcttttgtcaagaccctttgtacaccccgctataatttcaattcgacacgacgccggcctggttactgttgtgcgccctggccagaccggtt

SEQ ID NO: 5770 - DNA, 360 bp, Zea mays
  Clone ID: MRT4577_105255C.1
cggctcgagcggctcgagggggttccgtaggggcaggcgtcctatcttgccctagtggttaccttccaggggcaccgcgtgctggtggaggtctccaacggtagtgtccgtggaagacagttactcggcgccgtcatggcggcggccggtggcggaagggaagccaccacatccggctgtggtctcaagcgccgctacgcaccacacgaccaggaggaggagacgatgaatcaagatcagccttctaaggaagatcggtgtgggcgaatttggagtgggatcgacttgctcaaggacgtcactgaaaacaagcatgtcctacctactggacttgaaggcattgacagacttcttgggggc

SEQ ID NO: 5771 - DNA, 376 bp, Zea mays
  unsure (1)..(376): unsure at all n locations
  Clone ID: MRT4577_105256C.1
caaagcaacagggggggcctcacttaatggcaattccaaccctgggtttcgtttcccagttttttaacagtaagaaatccaaaacgtggccgggcaaaagcagtccctttttgtttttttttttgggccaggggcgccagagggggcctcatgacacctgtggccgtccgtggggcttcctccggggttcctcccgccaaattaaaggggggggctttggttccaattcacaaaccctgatttccgggcctgacaaacgggtaaaaattctgggcttttggggacttggaaaaaaagaaagaagggataaaaaacaacttttttttcctccgttcctacaacatgcatgcngggggctgctgctccctagcaatct

SEQ ID NO: 5772 - DNA, 306 bp, Zea mays
  Clone ID: MRT4577_105257C.1
tgcaccccggcgtaagctcggaattcggctcgagagctttttgacccccaggtcttcagccctggcgcggaacactgaactgggggggttatgtagaacggctgcgggtgcactcccaatgcgcgtacacatggggtttgaacgactcttctgcacgactgacacgatggcatcatttaggccaacaatgtgcacaaggtctccgtactatgcttctgggacgagccactatgagaggctgatgactagttgattgagacacaggcatgaatcctagctgttgttgaagagtctacttatgttgga

SEQ ID NO: 5773 - DNA, 280 bp, Zea mays
  Clone ID: MRT4577_105258C.1
aacaaacaacaatcataaaaatttttaagtttccctttcccccctaaaaaggggcaaatttgggaaaaaggaagtttgatcgggaaaaattaggacatggcagtttattgcttgggctcccccaaatcggggataacaaaatgcctaaaaatcctgccactgagggacccggcctttttaatagaacgcaaagggttcattccattcaaaaagggggcaaaaccgaaggggggggcgtccaaccacaacccgttgggaaggggataaaaaaattaaaacc

SEQ ID NO: 5774 - DNA, 439 bp, Zea mays
  Clone ID: MRT4577_105259C.1
ccggcccatgcaggtgaggcgacgacgcggcggcgcgcgtttaccggaccggcggcggcctaccggagacgatgaaggggagaccgctgttcaagagccctctcccccgcagctacctctccgaaacctccagcgtcgcgtccgccgccgtcgccacgcaccgcgtctaccaagtctggagaggaaagaatagattcctctgcggcggtcggctcatcttcggcccggacgcaagctccatcgtgctcacggtggcgctcatcatgacgccgctcgcgctcttcgtcgccttcgtctcgttccggctcgccgagctcatcgggaagccgctcggcaccgccgtcccggcgacggccatggccgtcggcatattcgacgtggtggtgctgattctcacgtcggggcgagaccccgggatcatcccccggaacgcgcggcc

SEQ ID NO: 5775 - DNA, 232 bp, Zea mays
  Clone ID: MRT4577_10525C.1
ccctatttgacggttagtcacagccgatgaggggaaacgcacaaggagcgagaacaacactctacactgttgccgagaatcgaaatggttaccttgagcttgatgtcaatgctagcctgcaggcactatcaaatgcccataattctctcaatggttcatagcgactcatacgtggtacttctcatgactgatctacccatactgtgatatatatggtactttactggaatct

SEQ ID NO: 5776 - DNA, 338 bp, Zea mays
  Clone ID: MRT4577_105260C.1
tcgggacgcgtgttcggactttttacctctaccgatacattatgaccagtctgcatgggcgaactttatgcagaattactaatgtgtgcttcacccctgagaatgaacggtgacctgaaattgtctacctctttcgattccttatatgcagtaacaaattggccacggtgattgtggcatattactcatttatatacacttggctgggaacctgtttggtggcttgactgctgactgcccaactaagcttttgggttttggcctgtaagactgttgttccaagttagtcagaccatcagtttaacgaaccggattttctcctgggtctatcactttgg

SEQ ID NO: 5777 - DNA, 360 bp, Zea mays
  Clone ID: MRT4577_105261C.1
attcggctcgaggccagctatgggcttcttttagaccacaccaagtttgaacgcatgtggctgaatgtatcccacacgagtccagaattcctggcaatcacaggggatgctttgccatcgccccatctgggggcgccgtagtcagtgacgagggcaaactgtgagcaccttcatacaacaaggcactgcatcgttccaaatggtacactttcaggccagatacacgtgctacggccagaaaccatgcatagagtcactatacgtgaacacactgaggattctctagccaggtacctatctgtgctggctgctgtacctccatagctgacactcgcacagtggaggatgcaaaaacggact

SEQ ID NO: 5778 - DNA, 254 bp, Zea mays
  Clone ID: MRT4577_105262C.1
acccactcaaccgcactcttatacataatttaatacacacttttgcttaccttaaacattcctccggggggctatataaaaacctatggtcctgcagacgaacgttgccttcaatttttcctatctactttacatactttatatattttacaatcactcctactctcaatcgccagtactctgatcctcttactatatcttataccaactcaataccatcacaccattatccttacatcatcactcccaactat

SEQ ID NO: 5779 - DNA, 382 bp, Zea mays
  Clone ID: MRT4577_105263C.1
ccaaccaattttttgtttttttttgggaaacacatcccggtttgggggcccccttttcgtttccctctcattttttttctaaaagaaggggccccccaacaatgggttgctgcccccccaaggcggggttcatcaaaaaaaactggctgtttggtggcaattgttgcttctttgggaaggcggggcccaatgggttaggccctgctagtggtttaagtaactgttgtcgctgttgtgggtcccccgccgggttccccccattcagttggttgattggaagctgctgttgcaagtgggccgcggggtttgccactgcttgctggttcagagctggtccaatctgttccaccatttgttgttgccggtttgttggtgctttccc

SEQ ID NO: 5780 - DNA, 256 bp, Zea mays
  Clone ID: MRT4577_105264C.1
gctcacttgctcctagttccattatgaataatggatcaggagctgtgacatatcgtaattgctagttaaatggtcagggcctcagaacgtacagcattcatactttatttattctagccatagcgttatcgcattcaacaactaatgcttaaaactataataattattacacatctaacactactaaccatcataacgcatacataacatcagttcttatcatacttgaccaattacaattgttgaactttaccat

SEQ ID NO: 5781 - DNA, 344 bp, Zea mays
  Clone ID: MRT4577_105265C.1
agtaattttttttttttttttttttttacttggttttttttttatgtaaaccctcattttatctgaaaagggtctgaagcctgaacattgtggggagagaccttaaataaaggaacgtcagaccattttcaggggggaataatatccaaagggttaaaggacacgggcttaatttttaaactggtcaaggggctcggcgccacaggaaagaatcacccctgcttttcgtttggggggttcattgacctaaatcacctccatgtctgaactaaaaataaccccaaggtcttaagcggcgactttttaaataacttgggatcttcgccttcattatgggggggcaa

SEQ ID NO: 5782 - DNA, 382 bp, Zea mays
  Clone ID: MRT4577_105266C.1
tgcattgtctattcaaataattgagttttcatttaggtatttgacttcattcttattgagtcgaaattataaattatggtcttcttccatcactccaacatattttgaaaccaaccatgaatcaagaattagtttcttaatccctatatctgattcatttagactgtatcctactgcatatgatatattgttaggttctatctatgatccttcttactactcttcactgttcgatgatgtcctaaacaatgcatgcaatcatcaaggtgataaacaaaattttagtaatgacaattgttcaacatcttcatgccatacaccactacttaaatcttttgctaatgatgtttaaagttgactaaaaataccctttaacttctat

SEQ ID NO: 5783 - DNA, 1678 bp, Zea mays
  Clone ID: MRT4577_105267C.1
gatagtaaaggctctagcacgaggaactagtctcgcgttttttttttttttttttttcatctgagaatcaatctttttttttttttttccgaagaataggaacatcgaatcttactcccatggttatcatgagctcgctcaaatattcttgaaacaacaactatctgcagagtcacatcaacttcgacacaacatagctgtgcagataccggctctctctaacccagagtgctaaaagaacatgagatacaacaaaagctgaatggggctgctcaacatgagtggtagtacaaggctctagcaggaactagtagtaggagaaaaaaagaagaaacaaaaacaaacccctcaacaacctactttggccctcgttttcaaccgaaagggtgccaactgaaatcgcgcatggccgcacattctgttcattgaaggctatcgaagaagccaggcccagccttcgccttcagctcgtggccagcgtctttgcccatctcgaccatgtcgtcgaaagagtacggtccacttcttgccgtctcaaatactttagatccgtctggtgaagacagtaggccccggaatgagcagttcccgtccttgtcacggtaagcataggccgcaattggagttcggcagttgccatcaagaactgccaagaattctctttcgcatgtgacagctagtctggtatcctcgtggttcaacgaggacagatactccatcattttgtcatcgttgcttcggcaagcgattccaatagcaccttgggcaactgccggaagcatttcttccactgatagtacagctgttgcattttctgccatatttagccgccttaatccagccagcgccaacaatgtagcagacacatctccttccttgagtttccttaaccgtgtctgaacatttcctctgaagttaactactttcagtgatggatatctgtagagaatctgagattgtctccgcaaggaagcacttccaacaacactgccagcaggaagctccgcgagcgaatttgcagtcaagcatatgaatgcatctcttacatcttctcgtgggaggttacagggcaatattgtgccttcaggtagatatgttggaacatctttcatagagtgcacagctatatcaatccttccctgcaagagtgcatcatctatctccttggtgaataaacccttgcctccaatatctgcaaggggtttgtccaagatcatgtctcctgtggtctttatgatgacgatctcaatagccccctcctcagctaactcagagtgtgcggctttcagtttttcccgagtttcatgggcttgtgcaagagccagaggactcccacgcgtcccaatccggatgagtgagaccttggcctgagcgccggcctccacggcgacggcagcgcgcacgacggggcacggccgccgccgcgggcgcgcgaggcaggtcggcgagccgaggagggagtggtgcgcggtggtgcatcgcagcgagaccatctccgggcgtttggagaagatggttagaggactgggcgggcgaggaagggaggaaggagaggccgagatgcacaagggaatgctctctgacgaggtctggattctgatctgggtgagctcccggccctctccgcgtggatgagaagataatgtgtcaggattggccaaccacagcgcccggccgg

SEQ ID NO: 5784 - DNA, 811 bp, Zea mays
  Clone ID: MRT4577_105268C.1
tgggtacctcgagccggccgggacttcctaccctccccacctcttccacggttccaccccgtccctctcctctcgagaagcacccgcaccatacatcctccggcgcccgacgcggacggcgagccgctgctgctgctgccgccggaggaggaagggcaccagggccagcgggtgcaggaggaggaggagcagcagcaggccgccggccgcttggggctgtgccacatgccgctctggggggccgccgcgtccgcggcgccggcagccgagggcgacgccgcccgcgcgccgtcgggatccggcggcggcgtcaaggtgatccggtcgctgctccccacccggcgccgcctccgcctagatccgcccgccaagctctacttcccatgaacaattggatctctgttagtttcttgacggatggcccccacgcgtccgggcggctttcaatcgtttccacctggcgcctttggccccggctgcgcgcgtttcccgctggccgctgctatccgatttcttgattcggtcgctctgtctcgtcaaggcgtgcaccgccttccatgttgtttgttcaaaatttctgcttctgcaactctctttgcttgttctgtgaaaacataggttccatttcaacttccgtcggacaggacctgtattcgtcgagaaaaagtccctttttcatagacgaactttgcacgactgtttcttatatagagatttaagtcgatagatggtaaaaggccatgggagacatacagtttactgggaaaaccagtttccattcagctgtttttctctccctaattttgatttg

SEQ ID NO: 5785 - DNA, 312 bp, Zea mays
  Clone ID: MRT4577_105269C.1
cttgttgccctcgcagatcgacgacccctccccctcccccatccccggcgaatggcgtcccgtctggcgtcccgcctcctcctccgccgccccgccgccgtattaagtttgctccagagttctagacatgccagacatttcagcactcagttacttgaaggtgttccgagacttccaaagccaacatgtgaacgctatttccttcgaaatgcttctccttaccaaatttggagtagatcatttgcttcagagaatggtgacttggttgaagctgttgtgcccttcatgggtgaatctgtaactgatggaacc

SEQ ID NO: 5786 - DNA, 273 bp, Zea mays
  Clone ID: MRT4577_10526C.1
gcacgaaattcataggggattgtcattgtcattggcattgttgtttgtatacagtattttagctagggatgacaaattcagagttaccgtgaccccccccccaaaaaaatgggcaaaaaaacccactttttggaaacaataactgtggccgggttttaaaggaccaaagacgaggggttataattaaccaaagaaaaacatgggccccggaccaacaggtttcaaaaggggggggcccaccggctacaaaaaagaaggggaagctacccatcc

SEQ ID NO: 5787 - DNA, 206 bp, Zea mays
  Clone ID: MRT4577_105270C.1
tccgcttttccttccccatcgtttcccaatcgttttcactgaggtactcacgcgtaccgggggggagagtgagcagatcgtgatgactgacctctcatgttcagtacccctgtattcatccagcagcctagccagctccaccatcaacccaattctacaaaaagtcttcatcacctacagtcctgacccaaattacattatcatac

SEQ ID NO: 5788 - DNA, 765 bp, Zea mays
  Clone ID: MRT4577_105271C.1
gtcgagtcctcccccgctccgctcatcttgggaaggaagcaaagcagagccgcgccgccgaggaggatatggccgaggccgacgacgccgccgccgcccgccggcgcaccgtcaccacggagtaccgcaacaagctcctcaactgccgcgagctggagacgagggtccgcacaggtagggaaaacctaaaaaaggcaaagaaagattacgataaaactgaagatgatttgaagtccttgcagagtgtgggccaaatcattggtgaagtacttcgaccattggacagtgaaagatttatcgtcaaagccagtagtggcccacgttatgtggttggctgcagaagcaaagttgacaaagaaaagctgacagctgcaacacgagttgtccttgacatgacaactttaacaataatgcgcactctaccacgtgaggttgatcccgtggtctataatatgctacacgaagaccccggcaatgtcagttactcagctgtaggtggactgtccgatcaaataagggagctgcgggagtccatcgagttacctcttatgaatccagaattgtttcttcgcgttgggattaaaccgccaaagggtgttcttctctatggcccacctggaacgggaaagacattgcttgctagagccatcgctagcaacattgatgctaactttttgaagattgtttcaagtgctatcattgacaaatatattggtgaaagtgcccgtcttataagagaaatgtttaactatgcacgtgagcatc

SEQ ID NO: 5789 - DNA, 191 bp, Zea mays
  Clone ID: MRT4577_105272C.1
ggcaacaaaaggtggcagcctgaggggccgcttttttttttttttttttcctaccaacgagattgcatgcgccgcacttcatcaattgatgagcagtccttgacctaatcgtgttttctaggacccaaacgcaccaagaatccgcccacgcaacttaggtggccccgctataaaggatgaacaagctacca

SEQ ID NO: 5790 - DNA, 399 bp, Zea mays
  Clone ID: MRT4577_105273C.1
ggaaaaaaaattcccggccaagggcttaattaataagggggaccccatccgcagttgccccacatggaacgtgtggtctaaaaaaaaaaaccccgggggggaaaaaaagggggaacctccagggttaatttttccccggggggggcccgacaaaggggtcttttcgcacctttggcaaatgggaaaaaattcaaggggcgccctcttgtttgatcaccagttccccccctgacaattggggtatctcctccaatttttataagggggccctctccccgatccgaccataagatgtttgggcccccaatttcctgttccgggcacttacggcgcctttttgttcccccccccgtcttgggggctccggggggggggcaacctttcccgtcggatgggctg

SEQ ID NO: 5791 - DNA, 2899 bp, Zea mays
  Clone ID: MRT4577_105274C.1
cggttatgaaaaacttgcaggtagagatgtgaggggccttggattctccaacatttcgcagcaggctgttgtgggaactggtcaagttcgctcaaaacctaaagctcaagatggaattggggggccctattatgcctctggtgttgtgtcttctgaagaaaaaattgacagacgcagcaacttttatgcaagcaaggatgttcgaccatcaggatctgtacgtttcgaaagtgcacttcttccaactcgatcaatcaatgccgatagagttggtaagccttcatccaacaaaagctggaaacactctgaggaagaagaatatgtctgggatgatgtacattctaaagcagcagaatatggtggtagccataatgtaataaaaggagaatggatgtctgatgatggcaatgctaagtttgcaaacctccaaagggctaaatgggcagatgcaggacctgtggaacgtatagatcccaacacacataaacttgataacgtgtcaagatttggacttggagcaggtcaagaaagaagaatttcagaatacatggatcaggaagagtaccttcttggcaagcgtgaggtggaagcaagaattgataaggaaattaggtctgatggacaacagttcccagcagctcgaggttctcctctctgggtgtcccaggaaaaaacactcctagacattgggttggagcctaggatatcaaggttttcaactcagccagcagagaggtccaccatttatactggcaccatgtcagcaggtatcacttcatctgtacctgttgggttatcaggaaactatgctggaaggtcaagcctagatactgcaaatggtatgccaataagatcaactgaggcttttgggcagcagaagcatagatattggtcatcttcccctccacaagctcacccatcttcatctactgcaccctttgcacgtcagggttctccaaatcctgccgagtctgatttttatccttccagatcattttctcaattgggccaaaatcctcaagaaaatatagcaaaagagcattgccggtacttgctaaagattctcatgttgtggttcacaatgatggacttactcagggccaacctagtctacaggcaaccctgcagacacaaaagtaccctatcatacagtcgaagtcacatattaagccatctgatcaattgcaggcaagtttttcgcgtgaaaattctccatcattgttcagaccttccatcgaacttggagaagtctctttacccagtgattccacccctataagctcagatctgacaagtgctagtaatttgttggctagtctcgtaaagagtgggttcaaaccaaataaccacagtgatgcacaggctcttggtccaagtggaccacttccagtggcttctttatcacttcaaaatgctgctggtgaaaataccactttgcaggcacatacaccaaacacttctcgtccaccattgccaccacctccatcaacacagagtgcggagaaagctgcgccgctctcaagtcttctcagttccctggttgcaaagggattaatctcttctccagcctatgattcatcgagtgctgtcatttcacagccaaataaagcatcaagcatgaatgttaaagatgccacagcttcagctgtgcctttgctagctctgagaccttcagttggtaaggcgtcatctaattctgattcatctgctccaacaaacgcttcattaaccaaagctatcgaaattaagatgagtgacctcattggcctggagttcaagccagagaaacttcgcaagtaccatgagcacgtgattagcagcctctttgacgacgaccaaagccatcagtgtaaaacatgtggcaataggttcaggcttgaagaactgagcttgcacacatcaagctgtgggcaaaggaagtctgagactatatatactggtatcgcacctaaaagatggtaccctagcaagaacatttacattgatggatcacatgaaattgaggacagcactgaggcttctgatggagatttaggttctgcagaagaagtgtgtgagtttatggtcccttcagacgagaggcaaattatctgtgcactatgtggggaaccatttgatgacatatattcttttgagaagggggactggatgtacaaggatgcagtgtttttggattaccccaagggagaaagcagctgcagaaacagtgttgagggtgaagagcatgtgcccattgtccatgtaagatgtatgccaagaggctcaaacgatggcatggaggttgactagaatgagtattgttcacagcagttatgctcttgaggggccttgaggtggatgagcctaaagctggggtttgcacgaggaactgtgcatcatcaggttgtctgttgcaattggactgatgacatacatgtaggatgattggtggaaggtggcaggcgttatcagaaacaaaactttggcgaagatctggaactgcccgtggatttctcagtgcccattacaaagtgcttacacaaagaataaagctttagaggaacaatttggccatgcaaatcagaattatcaaaatcttcatattttgggtctccatctgagaaggatctttatgttgatggaaagaaagctgtgcaggtgcatgtcaaaagaatgtatgatttctttacgagggaaaaggggtatggtaccccacatgtaactcggatactgctgttttttgacgatacatttctcgtcttttggagtaggaatttttgtgtagttaagaaactgataatagaacattatagaggtaggactaaacaagttagggtgtgtttggcgtttggctttaacttttgcccactaaaagccaaaagaaaaaacaaaggtatgaatttagaaagtagctttttct

SEQ ID NO: 5792 - DNA, 313 bp, Zea mays
  Clone ID: MRT4577_105275C.1
gatctacccacgcgtacgggctgaccagatcgtctcttgtttgaatgagtactttgacggcaaattgagtgcgtggacgatagttgatcctattcctgacgtcaacaatgagcctgttaaggtgcaatggctgctgaccacttccactatttcgtgtctcaaatctggctaagatgtccttactgtactctattacccgttacgcgaacacttcacgaagctcatgccactgttggacgaatcaaccaccactctaccaaacgacctatagactcagccttccttaatggacccaaatgtccatggacattcc

SEQ ID NO: 5793 - DNA, 346 bp, Zea mays
  unsure (1)..(346): unsure at all n locations
  Clone ID: MRT4577_105276C.1
ggcacggagacgggcaccgagccgcaccgcaccccnccgaacccgaacgggcgcagcaagcaggggagcagcagccggcgccaaggggcgggcgaccgcaggaagcnacgacagccgcgaccccgccggcaaggccgccccgccgaggagggccgcgcacgccccgggggacgacaagaacccggaggaccaggcgcgccccgcgancgcgcccgacgaagagaacggcagcgccgggagccccgacaagggcgggagcccccaccccaagaccggggccaaaggcccgacgacggaggaccccaagcaggacgcaggcggagcgccggacgccgacgcggaagca

SEQ ID NO: 5794 - DNA, 1085 bp, Zea mays
  Clone ID: MRT4577_105277C.1
agttccccagagccagagccacaagaagagagaagccaccatcaccagcacggcagcagagagactgtggacggagcgatcgatgatggcggccgcgaaggcgctctcctccctggtcctcgtcctgctgctcgccgtcgcgtctcaggaggcggcggcgaccatcaccaagcgcgacttccccccggggttcatcttcggcaccggctcctccgcctaccagatcgaaggcgcggtcgcggaggacgggagaaaacccagcatctgggacacgttcacacactcaggccattctgtcgatggatcaaatgctgatgtgactgcagatcagtatcataagtacaaggaagatgtaaagcttttgagcgacatgggagtcgatgcctacagattttccattgcctggcctcgccttattcccgatggccgtggagctgtcaatccaaagggactggagtactacaacaatcttatcgatcaactcctggctcatggaatccagcctcacgtcacgatatatcatttcgacttccctcaggctcttcaagacgaatacaacgggatgcttagtcgcaaattcatagatgactacacagcgtatgcagaagtgtgcttcaagaacttcggcgacagggtgaaatactggagcactgtcaatgagccaaacatcgagccgattggcggatatgatcagggtatcctcccaccacggcgatgctcattcccattcggcgccctcagttgcgacaacggcaactctaccacagagccatacatagtagctcaccatcttctgcttgcacatgcctcagcagcgtccctgtataaagagaagtaccaggccaagcaaggaggcaaaattggactcacattgctcggttggtggtacgagcctgcgacacaaacacctgaggatatagcagcagctgaaaggatgaatgacttccatgttggatggtatatgcatccgttggtccacggagattaccccccggtgatgaggaagaatgttgggtccaggctaccatcattcaccggcgaagaactgaagagggtgctcggatctttcgattttgtcggattta

SEQ ID NO: 5795 - DNA, 302 bp, Zea mays
  Clone ID: MRT4577_105278C.1
gaaaagccaaaagctactggcatttctcttggacttgacaaagttaacggaaggtggcagcggcagtacaaacaactgactgctgcaccacagcaccagcatctaaagtggatcattagcccaatactttcgaaggaaaatagcgcgagattacaacatcactgcattagcacaaggcttccaaaaggttaaacatttcaatggcccccgcgggtttttcaacgactttttgccgtcgttgccgccgcgggcactttgaacattgccaccgtcgctaccgtcggggatgctgggctcacttg

SEQ ID NO: 5796 - DNA, 649 bp, Zea mays
  unsure (1)..(649): unsure at all n locations
  Clone ID: MRT4577_105279C.1
ctctatctcggaagtgtcgcactatctcccttggacgtgagcgtagctcgtcgcgaatgcgaagaagggagcggncgatcgcaagggcggcgattcgacgaagaagactctgtcgaggccctccacaggccggcactgcaattccccgtcatgcgcgtcttggaggtacctcaaatagagacggtacacacagagtgtacggacatgagcccccgtctacctcggcgtcgttgtgtagtacctcacgtccgaggtgctcgagctagctggatacgcattgagatacgactgaagacgtttatttctccgagccacacggtcctcgccatgatgaacgatgaaggacgtcgactagctgctaacgtgagcactgatcgctcacagggtgattgtgcctcgacattatcattgagtccctcctcgataaggttgacgatgatatctccaaggatgcccagacccgcgagcatgctctcattacgctcactcttgtatcctgacagaagatttgctgctagccccaaatggatcgcactactccaaatactccaaggcgcgatatgatgagattgtgaaggaagcctcatccttacactacacagctgtgtacgtccctgataaaatttgcctttgtccccatctctggttt

SEQ ID NO: 5797 - DNA, 538 bp, Zea mays
  Clone ID: MRT4577_10527C.1
ggcacggcccaacggcgcgctatcagcccgcgattctttcctacaacggagggagggagaagcgcgaaaaatcccctcgctagatggcctccgtcagcccgcgcttccttcctccgtgactccggctcggcggtgcgacgccctccttcatcctacggctggaggccctcctcacacccccgcctggcggccctacactatcgatggggcgacgcccgggcctaccatgatctcctctgatctcgctggaccgccaacaactgatgtaccgctctgacgaggccgaaggagggaacaaaacgcatgttgaccaccgcgacaggaaaccgtcgtccctaccgacggcagtgtatgaggataccaaggcaaattgagtgaaggtgctaccttttatgggcgatgcatgctagcgcaccgagactgacaactggcgcgaccccccctctggtcctgacagaaataggtgaagcctcgagctaccagatacatggacacagactcacatgtaaacactcaagcctcgagagctgcaagcctg

SEQ ID NO: 5798 - DNA, 342 bp, Zea mays
  unsure (1)..(342): unsure at all n locations
  Clone ID: MRT4577_105280C.1
cgtaagctcggaatttggctcgagactttttatacaacgcgatcggacccctgactatnaaaaaaatatnttgggggtttttgtaacataatccaggggagcctatgcaaactttataagaacgtctcacaggtgcgccaagattgcatacggccataccattttgtcaccccatttcattcacccatcccgatattactaaagctactgtatgcagggcaaaaaaatatgttggcaaagacggtcgagcggaaatgatactgaaaaaaataattggagtaggaaaggggagtgattacatcgatctggcggcgtatcgctccacctctgggtccttgaggt

SEQ ID NO: 5799 - DNA, 819 bp, Zea mays
  Clone ID: MRT4577_105281C.1
cacatgaagagaaatgtttccctattggtattatttctagcaaattaccaagtgggtgttacagtttcacaatcaagaggacacgcagcttggtccaccttattgcattatcagaggataatggagacgccaacaaagtccatttacatataagacattatttaccctggaaccccaaatatacgtcgagtatacatctccttcatcaggagttttatatattaacccaagatagaatctataccgttttagatgccagagtaactacaccagagtccacagtaaaaagatgcaagccatagccatcacgtagtaaccaccagtaacgggagcgagcagcagcgcaggaggcgaggcagctgaggtgttgtaatagggcacgtagccaccggcgccaggaggctcgcggttcggttgctgtggcagctgccccccggcaccgccgcagcagacgacggtcaccggcgggcacgggcgtctgtgaccccggggccgatggcggcgccggcggtgcggaaggcagcgacggtgccgccggtgacgggtacccgtagatcggcagcggctgcgccggtggctcacacccctcgccgttgcataggaccgccggggacgcgtccgtcttgctgccgtcgtatgttgcgttgcccacggcggcgactgcggccggggctgcagccgttgccagcaggaaggcgaggagcgagagaagcgccatggctcgatctgctccgctgctgatgtgtgagagacaaggtgcaatgcatgcaagcacaggcgcagctagcagcggacgcgggatcgcagccggcggattcc

SEQ ID NO: 5800 - DNA, 377 bp, Zea mays
  Clone ID: MRT4577_105282C.1
accaccgatgcccccatctaaattgcttaataaaaagggaagcaacgaaaatggagattctgatgtcaatcctaactcagttgctgctgctgctgctatgaaggaagcaatgcaatttgctgaagccagattaaaagctgcaaaagaattgatggagataaaaggtgtcagctctaaattccgtaagcggccagttcatcacaaaagcacaaaatcaactgaaattaaggaatacaatgcacctgaaaaagcacatctatttggagaaaagctggatatgagaagattggtaaaagaggaaaatcaaagcaatgatatagctttgctggataaaaacacgggcaatgttgcacttgagcacaatgatcatgacaaaa

SEQ ID NO: 5801 - DNA, 595 bp, Zea mays
  Clone ID: MRT4577_105283C.1
gggccagaaaacccccttaaaatacccccaaactggggggaatttgttttgacgggccccccccccataaaaaaccccttccaccccccccccttttttttaccctaaaaaaacctccccggaaaacggggcaaaaagggccaaaattttagggcccccttaaactaagggggaaaggttttccaaaaaaggaaccaaaatgttccccccaaatccttttccttttaaaggggggggccccagggaattttttccggggcccagggaaaaaccaaaccctattttaaggggggggttgtccttgtaaaaccccacctttgggggggggccccccaaaaaaaaggcaggcccctgggcccttaaaaaaaaaaaaataatcctttggaaataaaaagggtaaccttttttccctattcccaaaaggcccaaccattttttgggttaaaaaatttcctccaggggtgaaggccaaataccccttgtgggttaaaaaaatccctggtgggggggggccaacgggcccctttatttcgttggatgcgggggggggggccctcctttgtcctgggggggggccaacccccatttggggccc

SEQ ID NO: 5802 - DNA, 267 bp, Zea mays
  unsure (1)..(267): unsure at all n locations
  Clone ID: MRT4577_105284C.1
cctttttnttttttttttttgatttatagtatcatttgggatttatatatggtaggtactgtttttttttttaatgccccagagaacaaaagggggctcagccaacatatccgatttgggacagttttttttaacacaaaccctttgggggtcaaaacaccccggacaagttttgggggggaataaacggtttccaaaagtgtggccccaggcggggaaacaacattagaggacacggctcgctgttgggggttcttaagcccccag

SEQ ID NO: 5803 - DNA, 539 bp, Zea mays
  unsure (1)..(539): unsure at all n locations
  Clone ID: MRT4577_105285C.1
gccgggcaaatagaagcgagcgagcgagcagcagtaggcagcggcgcgggcgaggagcagaccagcacccagcagccctcgtcggggggcggcagctgtatcttcaccagccgccgcctttccccgttttctctgactttgcctctctcccttacccttttgcatttattctacacaaccctctacaggtttcgcttcctggccatttaattcgttacgggttcgcatgacgttagttggtgctctttacgttgatgtaaacgagttgcagaacaagctggtgaagtacccgaaggtcctaataggtttttgtgcaacgctccagtcatttctgctgagaaggcctaccanctgcagatgttcgtggtcgaaatgaccaacaagggctttcagccatccttcatgatggacatgtgtctcctctagncatggaaagtacatgagcatgctggcttatgttccgtgttgatgtggtttcctaggacgtgaactctgttgtggctccaattaagaccaagcgcaccattcatttagtggac

SEQ ID NO: 5804 - DNA, 581 bp, Zea mays
  Clone ID: MRT4577_105286C.1
ggccgcttttttttttttttttttatttgggaggacgacggcccctgtgatattgatattaaatgcataaatttattcagctgcagatttacacgtgattatcatgttacagggtcattgcatcttccagggctgtaaattgggaaactagatggtcaccgacacacttatcacagttttatatttcattgtgggggtataccctagctcaaacaaaggcagtctaataggtaaagatgtctgacgctacagcaggactaaaatgctcaaatatcactattggactctaaaagagattcatcctcctgagtcagggcaccaattaactgctgctgaaaagcaatactgttctatacatgttgtctgcgcagcttcttctccatattgtcgacaacggtggaatgccttgtcatgagctcactctgcatatgtctatcctttacgatcaatcacctctaccttaggacctatttgctaagactgtggcgatgactgaatagtccccaacagaggtttcaaatatttagatcactgcttaaactgcatttcagacaactttcgagctgccttgcgagattgaa

SEQ ID NO: 5805 - DNA, 236 bp, Zea mays
  Clone ID: MRT4577_105287C.1
gcgggcaggcattcacaacggcggaccgggcctgatttggatcatattcaacaagctaacaaaccaacaacagttcaaatttaagaacctggccatgtgaaggaccgtctaataaacaaccatattaagggcgatgggaaccggattatttcatgggcatatagaaccggcttgccctacgtccgtgccatgatacaatgggggggattacttttacttcatatagtccatgaccg

SEQ ID NO: 5806 - DNA, 494 bp, Zea mays
  unsure (1)..(494): unsure at all n locations
  Clone ID: MRT4577_105288C.1
aaaaaaaaaaaaaaaaaaaaaaaaaaaaaaaaaaaaaaaaaaaaaaataaaaaaaaaaaaaaaaaaaaaaaaaaagtttaaacttaaaaacaaatcttgtccttgggccgcttcccccctttatgcttaattttgccgatttccttccccttgggggtcttttcccctttcttttttatgggggcgtttcttccctttttcgctggccgttccttttcattgggggggtttttaaaaccttgggtttggcaaatccttggggtttcccaccttattcgctttccccggcttccccttttcgccagttgccctaaccgggggccgttcccacccgttcgcctttcccaacggttgggggcccctccttgttangggcctttcccttccccggcttttttggctccgcgcggggggggggttcccctaggggggcccctaccctcggcgccttcttttggccccctttttttggtttcttccttgcctttttttcc

SEQ ID NO: 5807 - DNA, 525 bp, Zea mays
  Clone ID: MRT4577_105289C.1
cttctattcttccctaccaccttgtactccgatgaagcctctgatctattcttcctcgatacgcgcgcagtataagagttgaaaacgactaacaaaaacatattcctatgaagaacactcttatcttgtgtggaggtgaccaaggcgactactggcggcgcgccgggctagccatcctgctgaatcagtagctcctgattgcggagcctgtgggtggagccgacttctacggcgggacggtactgcgtctcgtgctgcctgcaggaggctctgatgcggacaaggatggcaagaggggctttgaggacaccatagagctccagctgtaactgcgctcgtcggctggaggaagctgccgatgacgacgttgtcaatgcggatccggccgacgggaatgtcaagatgaccgtcgatgcacccgccgatgatgccgataattcatgctgacccaatgtacaaactgtgggctggtccacagtccggtcataacgcatgaacgtcatgaccgtccaggctgtgatgagc

SEQ ID NO: 5808 - DNA, 592 bp, Zea mays
  unsure (1)..(592): unsure at all n locations
  Clone ID: MRT4577_10528C.1
cgcggccgcgtcggcccagcctgcacatcgtggagtgggcgaagaagaagatgggcagctacgagccggcggtgaacatcctggacccgaagctgcggggcatgccggaccagctggtgcaggagatgctgcagacgctgggcgtggccatcttctgtgttaacacggcgccctccgagcggccgacgatgaaggaggtggtggcgctgctcaaggaggtgaagagcccgcccgaggagtgggccaagacctcgcagcagccgctaatcaagcccggcagccagcaagggtgaccgttaccgacggcgttggaccggtttatggtttcgcatcgttggcggagcaacaggatcgagcattcgttgtagtgacgcagattgcaacaggtagaagaaaagaagggaagcagagtagttttttttttttgataattcaagggctagcttagctttggttaggcgattcttgtacagtaccggatggtctcgcagcccgttttagcaggggaacttgatgaatgaaaacttttcttgcgacgcggccgccgtgttcgttttgcatcctctggccgatgcnaaatgttgctctgtng

SEQ ID NO: 5809 - DNA, 294 bp, Zea mays
  unsure (1)..(294): unsure at all n locations
  Clone ID: MRT4577_105290C.1
acccacccatccncattaatcacccactctactactccaatttactaccancaactcacttcagcagtanaataaatctatagtatggcntcacccaaaccctcntcaacagcccttctccttcttgcggcggcgaccgttctctcgctggctctctcggaccttacacacgacaacttcttgaacaacaagaaggtcactgtgcacaacctgtccagccactacatcacgctgacactcgagcctncttccaacaacccacctctgttcacacgcacctacacactgcaccct

SEQ ID NO: 5810 - DNA, 299 bp, Zea mays
  Clone ID: MRT4577_105291C.1
cccacgcgttcggcattgggacctacttttgagcacagagtatggggcccatatgaggcaatcgatgtccttgtacttccatggactataacggcaccggcgctggagactgggcgtagagcatctatcaaaggaaccagacagggatcatgagtgtaggaggcatcggagggcaatatcatggactcatttgactcacaaggattctggaagttgaggagagtgcttgacaacttgagatatagaaggcttatcacaatttggctctgctcttttatccttattctattcctgtgaac

SEQ ID NO: 5811 - DNA, 215 bp, Zea mays
  Clone ID: MRT4577_105292C.1
caaactctataaacacaccctattttttattttcactgttcaccctaatataaagggaggtccgtaactttttaggctgggctcccttcacataatgataccattctatgcaatctcatacaccatttaatattggacgacctcatggatggctaccgcgaaaaaatacatcttgatggaactaattattatatataaacactttattgtcatac

SEQ ID NO: 5812 - DNA, 1138 bp, Zea mays
  Clone ID: MRT4577_105293C.1
ggccgctttttttttttttttttggtcaaaattctgctcccactgattcgtcagaatggcattatacgttttacattctctgacaaagcgctccgtgcctctgacaggtaggccagggcagcaggaggctcaactctttacaacgcttctgtttgcctacaacttgtagtgtttctatatacgcttcaaatacaaactaaactctacaagccatttgcatgacagctacttaagtctaatcgatgggctcctccgatgctacacgtacgcacagcaggtatgcatgctggccactgccaaataaataaataaaaaaaacctaatgcgaaactaccaacggtgtgcgcctcctgcctgccctcatctcttctggaagttgaacttcatgatggcgaaactgaacaggaacgcgaagaagacggccagccctacgtgcaccaccgcgacgacccacaggaagtcgtggtggaagccgaagtaatccgtgatgaactgcgccacgctctggcccgtcaccgagtcctccagcggatccgtgatgtcgccgaactgggaggcgaccagcccgtagagcgtccatgcgaccgggcaggcccagctgtaccacctccaccagacaggcattttaggccgggggatcaggtaccctgagaagaggttccacacgttgtagaatgccgacgagatgatggctgctatgctttcgttgggagtcaggccgaccgccatcatcccgtagaaggtgaagtagagcagcgtgaagtacatgaagaagaggtaccagaggaacttggcagcagtccactcgaacccgatcatcgaatacaccagcactccgtatatcagcgtctggacagagatgtagggaaactcaatcgccacctgtccaaatgcgtacgggaaagctgagtacatgcccgccgctcgttctcggtagaagaccgttcgctccaccaccaccacgggctggaccgaaccggagttctgcactccaatgtatataactgcagcgtacatggaccccatggcgttgaacagatcctgctgttttttagtctttcgtccgaggtcccagaacatggtcccaaacatgagcgcgatgacgatggtgaacagcagcctcacggctgtgaggccc

SEQ ID NO: 5813 - DNA, 297 bp, Zea mays
  Clone ID: MRT4577_105294C.1
tccggtagggttggagacgaatgcacaagcttgtggtgcctgtcagcttgttgagaaggaggtcacataagaatttggtagtgaatatatatacccctgcctgcgtgcaggtgctggccatgaaagatagtagctgctcgggacttacatggctatgcctggtattgctaaagcagtggttgatgttggctaggaagttggtgcggatgcaagttgccatggtttgactcggtaaagcagtgatcacgatcgcttttagcttacatttctatgctttataaacttgacttaaagtgg

SEQ ID NO: 5814 - DNA, 277 bp, Zea mays
  Clone ID: MRT4577_105295C.1
gggattttcttgattaacttggccatagcgctggtgactcacatgagagcggggacaagtggtaaacattttctaaaaaccaccgagctttaaagctaaacaggctgagaagttacggacgaggaaaatgccttccaatgatcaggttaagaactatggggcaaatgcgtgcaatccctacacgtctgctgaagatatgcctgcacctactcttgtactggatggagttcaatgaaacaaattgaagctcccaactgttactggcacctatgctggc

SEQ ID NO: 5815 - DNA, 647 bp, Zea mays
  Clone ID: MRT4577_105296C.1
aaaacccatttttttttttttcataggggggccccaagtttaccgccctaaaaattttgcctgaaaaaacggggttttggaaaaaaaaaccacccttccagggttgtcaagggaaggtttttaaaaaccccctcgcaggggccccaatccccttgaaccccaggcttcccaaagagcccgtaaaaaaaatgccccccttcttgaccagtcccccccttggaaaacagcccccccccccaaccctttaagattttaaacttgacacccaacccccccgcaaaagtccacaaaccctccaaccccaaaagattttgggagttgatttaaaactgggatagcccaaagctgtcaagggacccccaccccctgcaacagaaaaacaaaagaggccctggcccctttggccccctaaaaaaaatttttgactgtaggggcaaggcccattttttggttttaggggcaggatccccgtgatggcccccggggctaaaaaaacaaaaaacccccctggggggggttttggaaaaaacaacccctccgttaaaaagccccccctaaaacaactggtccttgaacaatggggaacccccccttattgcccgggttgcgacccaaaaacctgaaaaccgtttggttggcctcctgct

SEQ ID NO: 5816 - DNA, 568 bp, Zea mays
  Clone ID: MRT4577_105297C.1
tgtgactgtgattaccgcacaacgcacgccttcatacacgtgcatgctaacaaacttgcactcgcgccgggcacgcacacgaacgcgacacacgctaaccacggcaacatgcagacacacgcacacacatcgacctgaccagcgcacacacacccggtgtcgagtttattcctaacaatctccccctaaacacggcacggctttctgcactcacaggagcgtcgcctcctcttcggcattggcgaatagtgcctcttccttcttcggcttggggcagtcccgtgcaaagtggccgcggttgccacagttgaagcatttgccgatcgtcgacttcttcttttttcgagctttccactcggcctccgtgaggaggagctgatcgtcgcgccgttcaccaccggcatgagtacgccgccgagaacgctcatcgaacgccttgagacgtccgagcgcctcctcgaacggcatcgtctcgacgtcgcagaactgctcgatgcccgcgacgacggggaagagccgatctggaacggtgtcgaggagcttcttcaccatggcagcgtcgtcgagc

SEQ ID NO: 5817 - DNA, 1562 bp, Zea mays
  Clone ID: MRT4577_105298C.1
attggttattcagacttgctggaagctcgtggtctatcactttcgtcagttctgatgaagcaactcagaccctctgttgagcaagcattagattccaatttgaggagaattgaagagagtactgctgctttagctgcagctgatgactggatactcacctatcctccaactggtatacgtccactggctagatcatctggtaatctggcactccagccgaagctctcaagcagtgctcaccgtttcaattcaatggttcaggatttctttgaggatgttggaccactggttagcttacagctaggtggttccgcgatggatgggcttctgaaaatattcaactcgtatgtaaacttgctgataagtgctctaccagggtcagtggatgatgaagttaacttggaaggtttggggaataagattgttagaatggcagagacagaggaccagcagttagctttgttagctaatgcatctttactagctgaagagttgctaccgagagcagcgatgaagctgtactctatgaacccggtcagcaaagatagcttgcgtagaagaggtcctgaaaaccaaaatcgtgcggcagagcagcgggcatggaaaaggaagctgaaccgcatggtagagaaacttagagatagtttctgcagacagcatgctctagatctcatattcacagaagaaggtgacacccgtctgagcgcagagatgtacatcgatatggataatactgttgaagatcccgaatgggttccatctgcgattttccaggaattgtatgcgaagttgaataagatggcaagcgttgcggcagacatgtttgttggtagggaaaggtttgccacgctgcttatgatgagacttacggaggcagtcatgctttggctctcagacgaccagagcttttgggaagaggttgaagaaggaccaagggctctgggtccggttggacttcagcagttctacctcgatatgcaatttgtgatccttttcgggcaaggtcgtttcttatctcggcatgtgcatcaagtcatattggacatcattgatagagcgatgagagcgttttctgccacggggatggaccctgataggatccttccaagcgacgactggttcatcgacgttgcccaggagagtattagtaggatcggcggcgggagggcacgagtcgccaatggggacagggaggtgaacagccccacagcctccgtgtcagcacagtccgtgtcgtcagttagatctctcggcagctcctagcgtgcaaagtttctgtatcaatattactgtagggatttgtttggatgtgtttgtgctggtacatatgtgtgagtaattaattgtatgcctaggccaagaaaatccttgaagctggtcttgttcacctgttctgagactttgggccggtccacgcatcggcattccctacggtagtggtaggtattgatggaccaaatgtaccggctggtacagccacgggcacaacacgaatcggctatgctattgctagctacgacacggttatagttccgtgacaggtattgtctgctcttataaag

SEQ ID NO: 5818 - DNA, 642 bp, Zea mays
  Clone ID: MRT4577_105299C.1
cggacgcgtgggtcagaaatacagaatggtctgcagatttccctgacatgcttgacgttttgctagctgagcgaagagtggatgaagcactggatgcactggatgaagcagaacgggtttctgttgatgcaaaacgaaaacagactctaactgcagctgaagtttcggctttgaaaagatctatctctgataatcggcagaggctggcagatcagcttgctgaagctgcttgtcagtcttccactcgtggtattgagcttcgagctgcagcttctgccctcaaaagacttggtgatggcccccgagctcacagcctcttactgagtgcacataatcaaaggcttcaatgcaatatgcaaactatacatccatctagcacttcatacggtggggcatacactgcagcacttgcccaacaagttttttcagtcatagctcaggcactaagtgactctgtggatgtttttggtaatgagtcatgttatgcatctgaactggtaacgtgggctaccaagcaggttatgtcctttgcgctcctagtgaagaggcatgtgttgtcctcttgtgcagctgctggaggcttgagggcagctgcagaatgtgttcagatatcacttggccattgttttttgctggaagctc

SEQ ID NO: 5819 - DNA, 285 bp, Zea mays
  Clone ID: MRT4577_10529C.1
aaaaggaaaaaacctccctagccaggttttggggggggcccaaagatttaccatttggttgggggttcaaaggggcttcaaatgaccccctcccccttattttgaaggaaaaaacaaaaaaccgggggaattaaattgccggggggggggccaaccccccaaattttaaatgtgggccataactaaaggttttaaaaggggggggccggccaccaaaaaggagggcccacactttgatgggggcccaccgggcaaagaacaaggacttttttttgcgggcggggg

SEQ ID NO: 5820 - DNA, 127 bp, Zea mays
  Clone ID: MRT4577_1052C.1
acggtggatagcttcgctgaatctccagattttgtttcttggaaagctcgaatccttaccaccggaaaaatcatgtaatatggcggccaactctgaaattaacccctattgcatatatatatgtatg

SEQ ID NO: 5821 - DNA, 338 bp, Zea mays
  Clone ID: MRT4577_105300C.1
ggcacgaggccttatgaacaactttatcttcctccacacgtaattgtaatgatacttaaattctctccacagctagattttcagaaaagctggtcagaaaaaagctgaaccaagcaggcgccttgtcgcttcacagattatccgcattctcattcccctctgttcacctttgaaatttctaaatcctgcgttggactggatattcgatacttacaaagggaacggagagagaagaaaaaaaaacgagttctccagtttttcttcttcttcgtggtgtctccgtccgcgtgtgttttcctaataaattcatttatgcgcaaaaaaaaaaaaaaaaaaaa

SEQ ID NO: 5822 - DNA, 1209 bp, Zea mays
  Clone ID: MRT4577_105301C.1
cacagaataaggtgacacccgtctgagcgcagagatgtacatcgatatggataatactgttgaagatcccgaatgggttccatctgcgattttccaggtgtttccatattttttggcatgctgtgacaagtctgctccctccaaaatttccacacacaaaaaaatatctcctgtcttctgcgtcatctcacctgtagttcattgcaggaattgtatgcgaaattgaataagatggcaagcgttgcggcagacatgtttgttggtagggaaaggtttgccacgctgcttatgatgagacttacggaggcagtcatgctttggctctcagacgaccagagcttttgggaagaggttgaagaaagaccaaaggctctgggtccggttggacttcagcaggtaatctcattttaaaccttttagatcagaggcattcacccggttttattaaagaatgctctccattttaacttgtcgcgcgcgtgtgtgtgcgtgtttgtttccagcatttcagttttcaaaacctcccaggccttcgcctgacagctgacattccctttttactttgccttcctttccagttctacctcgatatgcaatttgtcatcatatttgggcaaggtcgttttctctctagacatgtacatcaagtcattttggacgtcattgatagagcaatggctgcattttctgctactggaatgaaccctgatagtgtccttccgggcgacgattggttcatggaggtctcccaagaagttgtcagcatcatcagtggaaggggtagagttgctaatggtgacagggaagcaaacagcccaacggcctcggtttcagcgcactccatttcttcgttcagatcccatggcagctcctagtttgcaagttggtattttttttttggtagtcagatcactgtataataatcgatagtatattcttccaacctattcctccactcatttgttttttcttttctttttcaaaacttttgtgctagtattagtagagagggataattgtttaacctaggaaaataagtcttgagtcattttgttttagagagctgagtcatgcaagtgttgcatggccatattgcacgagatctgcaccgatctgtatcattctttcatcagtttttacttgccagttggcacgttgcatgtcatgggtacaagattctacgcttgaagttgtttgaaaagttttttt

SEQ ID NO: 5823 - DNA, 3087 bp, Zea mays
  Clone ID: MRT4577_105302C.1
gtgcagctcgccgacaagcttaagattttcaataccgacaacttcgatgcacgagctcggccgcaacccattcgccattgccgaggaggaggaagcccggtcgtctattctggatctcggatggcgtaggccaagtttgttttttgcagtggccttccgggcgacgatttgttcccggtggccgcccaagaagttgtcagcatcatcagtcgacggggtagagttgctcatcgtgccagggcagctagcagcccaacggccccggtttcagcgcaccccgatgcctacgtgcagtccaagtgccagaccatgaacgagaaggaaataagacatttgtgttcttatctccaagacctaaagaaggcttcagctgaagaaatgcgtagaagtgtttacgcaaattatgctgcattcttatcaaaacatttatggtgatattagaacaaaggggaaatggtgtcaattagaaatctgcttaatacacaggcagctttaattcacggtctatctgaaggagttcagatagattcattgacttcaggccctgaaggttctgcagaagacgacatatccaatgttgaagatcaggagccttcagaaattcagaaatggtctgcagatttccctgatatgcttgatgttttgctagctgagcgaagagtggatgaagcactggatgcactggatgaagcagaacgggttgctgttgatgcaaaacgaacagactctaactgcaggcactgaagttttggctttgaaaagatcaatctctgataatcgtctgttgctgacagagctacagttggttttcgcttgcccatgagcccatgagggagtttctcacagatggcagcttctgccctcaaaagacttggtgatggggaaagagctcacagcctcttactgagtgcacataatcaaaggcttcaatgcaatatgcaaactatacatccatctagtacttcatatggtggggcatacactgcggcacttgcccaacaggcttcagcagtcatacctcgatatgcaatttgtgatccttttcgggcaaggtcgtttcttatctcggcatgtgcatcaagtcatattggacatcattgatagagcgatgagagcgttttctgccacggggatggaccctgacttgtgcagctgctggaggcttgagggcagctgcagaatgtgttcagatatcacttggccattgggcggggctggaagctcgtccaatggggacagggaggtgaacagccccacagcctccgtgtcagcgcagtccgtgtcgtcagttagatctctcggcagctcctagcgtgcacagtttctgtatcaatattactgtagggatttgtttggatgtgtttgtgctggtacatatgtgtgaagatcgtctgctgctaatttggcacttcagcccaagctctctagcagcgtacaccgtttcaattcaatggttcaggatttctttgaggactttgcaccactacttagcttgcaattgggccgttcatcaatggatgggatcacacaaattttcaattcatatgtaaacttgcttataagtgctttacctggttctatggatgatgaagctaacttagatggtttaggtaataagattgttagaatggcagagactgaagagcagcagttagctttattagctaatgcatctttactagctgaggagttgctacctagagcagctatgaagttatcgtcaataaaccagtctatggatgatttgcataaaagaggaacagataaacaaaaccgtgtgcctgagcaacgtgagtggaaaagaaaactacaacgaatggtggacaggttgagagataatttttgcaggcagcatgctcttgaacttatatttacagatgaaggtgatactcatctcagtgcagaaatgtatatcagtatggacaatactgttgaagaaccagaatgggttccgtctccaattttccaggaactgtatgtaaagttaaacaggatggcaagcattgccgcagaaatgtttgttggtagagaaagatttgctactttactgatgatgcgcctcactgagacagtcatactgtggctctcagaagaccaggccttttgggaagagattgaacagggagcaaagcctttaggccccctaggtcttcaacagttctacctggacatgcaatttgtcatcatatttgggcaaggtcgttttctctctagacatgtacatcaagtcattttggatgtcattgatagagcaatggctgcattttctgctactggaatgaaccctgatagtgtccttccgggcgacgattggttcatggatgtctcccaagaagttgtcagcatgatcagtggaaggggtagagttgctaatggtgacagggaagtaaacagcccaacggcctcagtttcagcgcactccatttcttcgttcaaatcccatggcagctcctagtttgcaagtcggtattctttgtaggcaggtcattgtataataatcaatagtatattctttcaacctattcctccactcatttgttttttcttttctttttcagaacttttgtgctagtatagtatagatggataattgtttgacctaggaaaataaatcttgagtagtttgttttagagagctgagtcatgcttccgggacgaaatttgggtgaaatttgaaagagaactgcaccgatctgtatcattcttgggtcagcatatttgaggaccctgataggatccttccaagcgacgactggttcatcgacgttgcccaggagagtattagtaggttcggcggcgggagggcacgattccccaatggggacagggaggtgaacagccccacagcctccgtgtcagcgcagtccgtgtcgtcagttagatctctcggcagctcctagggtgcccagtttttgtatcaatattactgtagggatttgtttggatgtgtttgtgctggtacaaatgtgtgagtaattaattgtaagcctaggccaagaaaatcctttaaactggttttgttcaaaaaaaaaaaaaaaacaaaaacgtgtggcgtttatgttaaaaaaaaaaaaaaaaaaaaaagac

SEQ ID NO: 5824 - DNA, 306 bp, Zea mays
  Clone ID: MRT4577_105303C.1
aaccggggaaattcaaaaccttggttggaaaaaaggccccatttttttttttttttaaaaaaaccaaacaggggaaaaaaaaaaagggcaatttgggcacgggtaccggggaccaaaatggggagtttttttttaaaattttgctgcttgcggctaggggaggggcatttggaaaaacatgtctttccaaatgttaaggggccccgggggggaccaagggatgcaacccttgtaaaactgccccttttttttgggccaatgccccaaacggttgggggggcctcgggcccaaaaaaaattgccgcc

SEQ ID NO: 5825 - DNA, 360 bp, Zea mays
  Clone ID: MRT4577_105304C.1
tatactgactcctggaattgtaccacatgcaccacttaggcatcgtacatggggacgaacgaacattcaatggggatctatgcaacagcgtcctagcctggtgcgtccttctaaatcaccaaatggggcgcctccggtattggtaatatagacatcaagaaggctgttcaagatgtatgggcatcggcatgagacggtactggtaagcagacaatcgtcagacttacgggtgacttccttgtctgacaggtcaacttcacaggcccttgcatgggggacgtgacgatccagctggatgtcaaactgctgacgaccacggccgtactccattacaaggaccataggatatggatcaagatt

SEQ ID NO: 5826 - DNA, 478 bp, Zea mays
  Clone ID: MRT4577_105305C.1
ataatcattctgtccaacaccggcaagcgaagagaaccgatgccatagtcggagcgtggatcgacatgcacacaaaggcctggatggaacgagctcaacacaacagaacagccaagcccaacaaaagaacccagacgctaggacaaacactgttgcgagccaaggccagaagacccttgaacacgtttacagattcatacgaaggaaacacagacacctgcccattgaatgaccacgcagcagctgatgtgaacatggaaggtgtcatgtacacggaggacatcatacggactgtcagattcctagcgaaggacaacatcgtgagacatgctgcggacggcaaccgattgcaccgagtctgaggcctcaatgcggaatgcccgtggatcttagggcaagaaagcagggccagggcacatctgactactgttgaaggtggagaaagctgatggtggaaccacactggcaaatgtggcga

SEQ ID NO: 5827 - DNA, 430 bp, Zea mays
  Clone ID: MRT4577_105306C.1
tgctttctttatagttttcgaatacattgattgtgttataaattatttaaaaatttatatttatttaaaatcaagtttttcaaaagaatcaatgcaaaatgctaaaagtaagaatttttagtctatgaataagagacgattgttttattcataacgtcatacgtcaaatttattcatggaaatatgaccgcaacaatgttcaaacaagtatgctttactcagaatagctcttcaaaacatagaattacatggtactaaaataattattttaccactgcgctgcccctaactactacatcgaatgttgaatttttatttgactgatgaaaatgaaattgataacgtgaactgttttatttttagaaacatttattacttaaattatattggcaaaaaatatcttcaattaataaatatatataactaatcg

SEQ ID NO: 5828 - DNA, 404 bp, Zea mays
  Clone ID: MRT4577_105307C.1
ctccatccgtatacagcgggttctgtctcctccgccaggtcttgccagaacagcggtctcaccgacctcgagatttgctatgctcacacgcctggagtgacgaacgcactgttattccactcggatactgactagacctgacgccaccgttaacaggaacatgctaacggaccccgacacccatggaacgctcaaaaaagggataagctgttgtgagcctgtgccattgaacaaaagcatggtcactatcacatgaaacacatggttatggatgaagagcctaaaacacttgaacagcaagtgactgaacatgttgatggcccactagatcctaagactgaaaataaccgctttgagaatggtgccaatgtgtaccctccactttagattgaacatgaactgct

SEQ ID NO: 5829 - DNA, 447 bp, Zea mays
  Clone ID: MRT4577_105308C.1
gcctacatggctcatatgaacaacaagcactggaggcaccagattgatatggtgatatggatggtataaatgctgctgagacaccaaagtaaattgatgcacagtatggtttcactcctgcaggaagcagagaaatatgtttggagcctaagaccccgggcgtgttgcgctgcgcccgaagattgtgactctatcaagcgtggtgatgctcatcggctggcgcggattggctgaccacgctaccggtgacaacctgctgggcggagaacagataggcgtgctaacgtgcttgttcctgcagaccctgaccagggtgatacctttgactgccttctagatcatctatctgtggtggaagaaggagcacagactgatttgctacctgcgcacatttagaccggcgaagagcgcatgctgtcccaaaaatctatcttgaacgctcagaga

SEQ ID NO: 5830 - DNA, 311 bp, Zea mays
  unsure (1)..(311): unsure at all n locations
  Clone ID: MRT4577_105309C.1
gagganactangaaaacccngacaattttccagtttttatancgcagcgaacccaagagcgcgcaccggggaganggaccacgcaagggccccgcaaaaacgagaacaagggccagcaaacagaacaacaacaancaaacgacagacaaacgggagaacaggccaaggaaaggacaacaaagggaggaacccgaaaagcgaaacaaagcgagcacagggaaggaaaccgacganacggaaccggacaacccaccnaccaccgaagaaaaacagaccgaaggagcagcagcaacncacaccaacggaagaag

SEQ ID NO: 5831 - DNA, 222 bp, Zea mays
  Clone ID: MRT4577_10530C.1
tcccactctacccatcttcctagcactcttcactctattcttctgatttacattttactcaatcatatcaactttaagactagcttaactattctcaatttcattataaactacatatcaatacataactacctctcctacctctacaatcataataaaatttccaacatatatacaatcctcaatcttactctctcatacatcctactatattaacattct

SEQ ID NO: 5832 - DNA, 1126 bp, Zea mays
  Clone ID: MRT4577_105310C.1
acgtcaattccccgatgcctgctgtaggtcccagtcagatccctttgaattcaatagttcagccacccggtttctccctcttactatccgttttaggcctcgtttcagtcggtttggcatattccaggtctggttccgggtggaaaaaatgagtcggtttgaaattcgatcgtctctgcatgaatcattcgtttcgatccgaatccaaaacaaaatgcgatccaggttggagtttcggccgggactactgcccagtacgaatcccggtcttctaccctccggatcgaacctcggcgggacggcgcaacattggcgagtggcgaccgaggaggcggagcgaagtgacatcgcagcgcagcctcgacggtgaccctcctcgtcttcttctcactagtaattgccgcatcctaccctcgtgttcttgatgtcgctaagcaccacgacgacggggattaatgtccgatcgccgccgcccagagaaccagacccgcacggggggctctgtccggacgctcgatgcaggaaaaagaaagagcagcaataccaccattcttgcttccattggaaagtgcagcgttcagttactggtaaccccgcaagctgattgaaaatgatggatatacactgcatctgaatagtgtgagaatccactagttgcaagctgattcaaatagtttcagtttgagtttcagtttctgcttgagattgtcaccattcttacaagtgtatccatggtttatataaacaaatacactagttgcacatttggatgtaaatatatgagcagttcatgtttctgcaatagaatacactagttcattgtctgaaaaaatatgaagtgaggcatatttaatagaaggctttgatagcaatgtggttcatgaggtaaatgatgaagttgatgatgtactcactgaaaggaatgaagacgtgcttacaagcgcagattgactgcataaaaaaaaaaaaaaaatgaagttgatgatgtactcactgaaaggaatgaagacttgtgaagacgtgcttacaagctcagattgattcatgaaattgctttgtttctattaaaaaaaaaaaaaaaaaaaaaaaaaaaaaaaaaaaaaaactcgagactagttctttcctc

SEQ ID NO: 5833 - DNA, 440 bp, Zea mays
  Clone ID: MRT4577_105311C.1
attatgatggagtttatttattggaaaatggggaggagggggtaattgagggaggaaaggggggggggggggggacccgggaacaaaaagggggggggggggggggggggggggaaccagggcaaaagggggtgggggcaattggacaacgaactctggaggaaggggaacgaaggggggaaggaaataaaacgccaggggggcggaaactggagggtaagacaatgcaaaaggggggaacaatcgggggatttggaaaaaaaaattggaggggaggacaaggggccgggggacgaaaccaaaggggagggcctggggcatgtccacaggcaaatccaagggagaagacctgagggccaaaaaacctggggggaacatttcggccaggggatggaaagaatgaaccccgggagaaagatttttgggtaaggagacagcaa

SEQ ID NO: 5834 - DNA, 189 bp, Zea mays
  Clone ID: MRT4577_105312C.1
ccgcccttttgggtggtttttggtgacattttgttgctaacaaaagttgaagcccaaaaaagaacgcggggggcgctgaaaacacccggcgaatggaacgcaaacacatccataaagcaaccggtaggcctgctgcgacggaggcataatgctgccaccacgagataccgagagcacacccagactgct

SEQ ID NO: 5835 - DNA, 836 bp, Zea mays
  unsure (1)..(836): unsure at all n locations
  Clone ID: MRT4577_105313C.1
ccggccgggaacctcatcctgagctgctgcagcacctgcaaagctctgcaagcatccagcacaggccacactggccacctctctctcactctcttcactcccacagccgcagtttatataaagcaaaagcggaggagagcaacgcgccgacatagctgcttgccgccgacacccgcagccgcaatggccgtcgcccacgcgccgccgcgccggggcgtgctccccctcctgctcgtcgccgcgctcgtggcggcgttgccggccacctgcgccgcggccaggagcaagaagtcgtacacggccatcttcagcttcggggactcgctctccgacgccggcaacctcatcgtcaacggcacgcccaaggcgctcaccaccgcgcgccctccctacgggatgaccttcttccgcaagcccaccggccgctgctccaacggccgcctcgtcgtcgacttcctggccgagcatttcgggctgccactgccgccaccgtcgcaggccaagggcaaggacttcaagaagggcgccaacttcgccatcaccggcgcgacggccctggagtactccttcttcaaggcgcacggcatcgaccagcgcatctggaacaccggctccatcaacacccagatcggctggctccaggacatgaagccgtccctctgtaaatcggagcaagactgcaaggattacttcagcaaatccctgttcgtcgtcggggagttcggnggcaacgactacnacgcgccgctcttctccggcgtcccattttctgatgtcaagacttacgtgccccttgttgcaaggctatcgncaatgggcgtgagaaactgatcgag

SEQ ID NO: 5836 - DNA, 354 bp, Zea mays
  unsure (1)..(354): unsure at all n locations
  Clone ID: MRT4577_105314C.1
catggncaccgtcttaggcagccccgccgcgccggccttcttcttctcgacggcctccctccgtggcaggcgggcgcccaccggcgtggcgctggctgcggccaaggagggtatcatgggccgtagcgccagcagcaggggcaggctccgcgcgcatgccacctacaacgtggagctgatcaccgcggaaggggaagtggagctgcaggtgcccgaagaagcgtacatctctggagcagggcgaggaggacgccatcaacctggcctactcctggcgcgcggagtcctgctcctcctgcgccgccaaaggcgactccggttccgtgcggcagtccgagcggagctacctcgacg

SEQ ID NO: 5837 - DNA, 936 bp, Zea mays
  Clone ID: MRT4577_105315C.1
agcacatgcaaagctatgaaagaatcaagcacaggcaacactggccacctctctctcactctattcactcccacagccgcagtttatataaagcaaaagcggaggagagcaacgcgccacacaagcaaagaacttggccccgcctcccgtctcttaccgcacatgcgcgtcgggccgcgtcgacatagctgcttgccgccgacacccgcagccgcaatggccgtcgcccacgcgccgccgcgccggggcgtgctccccctcctgctcgtcgccgcgctcgtggcggcgttgccggccacctgcgccgcggccaggagcaagaagtcgtacacggccatcttcagcttcggggactcgctctccgacgccggcaaccttatcgtcaacggcacgcccaaggcgctcaccaccgcgcgccctccctacgggatgaccttcttccgttattttaccggccgctgctccaacggccgcctcgtcgtcgacttcctgggcgagggcgagggcgaggtcaaaaggggttgattttttccgaccttcctttataaaaagatggaaacgagtggtaaaaaactggtggtaaaaagggttgctgctttgccgcgctgtgaatcgttgccgtctccgctctgctgctagagttttagcagagtactgatgcgaattaaagtctcttctttcccttttgtgatgggaacctttggccaattatgcagccgagcatttcgggctgccactgccgccaccgtcgcaggccaagggcaaggacttcaagaagggcgccaacttcgccatcaccggcgcgacggccctggagtactccttcttcaaggcgcacggcatcgaccagcgcatctggaacaccggctccatcaacacccagatcggctggctccaggacatgaagccgtccctctgtaaatcggagcaagactg

SEQ ID NO: 5838 - DNA, 833 bp, Zea mays
  Clone ID: MRT4577_105316C.1
ggccggggggtcggcccacaccaaaacatttgcccagtggctgccacacccacacctcatcctgagctgctgcagcacctgcaaagctctgcatacctcgaggccggccgggactggccacctctctctcactctcttcactcccacagccgcagtttatataaagcaaaagcggaggagagcaacgcgccacacaagcaaagaacttggccccgcctcccgtctcttaccgcacatgcgcgtcgggccgcgtcgacatagctgcttgccgccgacacccgcagccgcaatggccgtcgcccacgcgccgccgcgccggggcgtgctccccctcctgctcgtcgccgcgctcgtggcggcgttgccggccacctgcgccgcggccaggagcaagaagtcgtacacggccatcttcagcttcggggactcgctctccgacgccggcaacctcatcgtcaacggcacgcccaaggcgctcaccaccgcgcgccctccctacgggatgaccttcttccgcaagcccaccggccgctgctccaacggccgcctcgtcgtcgacttcctggccgagcatttcgggctgccactgccgccaccgtcgcaggccaagggcaaggacttcaagaagggcgccaacttcgccatcaccggcgcgacggccctggagtactccttcttcaaggcgcacggcatcgaccagcgcatctggaacaccggctccatcaacacccagatcggctggctccaggacatgaagccgtccctctgtaatcggagcaagactgcaaggattacttcagcaaatccctgttcgtcgtcggggagttcggggg

SEQ ID NO: 5839 - DNA, 487 bp, Zea mays
  Clone ID: MRT4577_105317C.1
ttgttaacgccctccttgccagctggggcgagcgggccgattatgcacttgctggaggcgcaccacgcacctttccttgcttaaccgtgcacttgctgcctctgacactaaggctacaggcacggagactgatgacagccgtgactggaccacctcatatagcgaggagattgttccccaggaggatgctcgcaatggagggacctaaaaacagcatccactgaacactggatgacgactcttgtgactattgccctctgcgactaagaatctgggagcctgctgctgttgcttcctgacagagtgacataaacatgcaaagcaggctgcacatacacataacgtttattgtgcttaatgactatactcaaacactcatgtaacatgctatggctgtaactcggcactcgatgatctcattcaggaagcctgtgactgatggaaatgtagacgcacactatagtcgaccaatgtctcttttcaatct

SEQ ID NO: 5840 - DNA, 232 bp, Zea mays
  unsure (1)..(232): unsure at all n locations
  Clone ID: MRT4577_105318C.1
gtgcatgcgacgcctagctcttcatcgtgcacctaaancactttttttttcgcggttacaacgncctgggtggaaaccctgcgttcccacctaatcccttgcccccttccccttcgccgctggcgtntagcgcgaggccccccgatcgccttcccacagttgnccgcctgctggcaccgggacgcgccctgngcagccccttaccccccgggtgtggggctccccccccgng

SEQ ID NO: 5841 - DNA, 421 bp, Zea mays
  Clone ID: MRT4577_105319C.1
ggagcacaaaacaacaccctatatcagaagggcgatgtgtaattgacttggatgtatggcggtgtctcacaagagtcagtgtaaagaacagaaagctaaaggaccattcttggacgcacagggagcacatgataactgtagaacggaggggtgtacgctcgctatactgccactaggaatgtagctgcaggcctactcaggtgacggatgtatataaatgagatgcatgcttccaaaggggacgccttaattgttgatggctctgtggactggatgggaaggcggtagcacccgctcaagctatgtgggatgacttgcgtggttttacatctatggatgcaggcgtgcgatatgatgggtgatgccgtggaggggaacaccttgatcacgtacgtcttccgtgagatgcctttcccgctgt

SEQ ID NO: 5842 - DNA, 480 bp, Zea mays
  Clone ID: MRT4577_10531C.1
tttatatcgtgacgaggagagccgcgccatatatgacacatgaggattggtaggaggatcagaggacggaggcagagttgtgtatggcacagaagaggtcgagaaggtgcacatgatccaggagtgcagcaggcagcacagaaggggcagattgctgattcctttgacgcaagcgagggacctgaataagatcctaaatatgacgaagtcggtcccacggaggaggaggtcactgaaccacagaacggcatgaacgtcactatgagggctgcagcttatatctgcaaggcacacaaggaggggcatacaggtcaggtgtcaacggctcccatagctacggccgatgaagtggcctcgacaattataaggcggtggaggtcggcaggatccatggtggaggcagcagcacggaagggtcacaaagtatgtgctgccgagccttatgatgcaaacaacattgctacgagtagtgatgaccct

SEQ ID NO: 5843 - DNA, 181 bp, Zea mays
  Clone ID: MRT4577_105320C.1
accacgcgtccggcaaagaatggctaccatccgccaaggccactcatgggagcaggcctccctcaaccgaggaggccgcgtcaagaggtctattccctacggttccgcatacgcatgggaagccgacggccccttggaggtcaccacactcaagacctgcggatgttccaaccagaagatc

SEQ ID NO: 5844 - DNA, 252 bp, Zea mays
  Clone ID: MRT4577_105321C.1
gtagtacatatgttccatatcgagatagttaaatgaccagaatccttcaagattcattagttggcaactgtagaaccactattgtaatttgctgctctccatcatcatacaatgagtctgaaacaaaatctacactcttatttggccaaagggcctaaacaattaagaacacagtttgtgtcaatgtggagctaactgcagaacagtggaaaaagaagtatgacatagaaatagataaacataagatcctgc

SEQ ID NO: 5845 - DNA, 160 bp, Zea mays
  Clone ID: MRT4577_105322C.1
accgcgcggaagttgctggctgactgggcttgcgaggaaaccgcctcggagctgcagccgaaggcaatggaatcactgaagatcggcgagggaggatcatgggtggctttttctcaagtatattttcaagtctgtttggaactcgggaaatgagattttt

SEQ ID NO: 5846 - DNA, 306 bp, Zea mays
  Clone ID: MRT4577_105323C.1
atgcgttctttgtcttttgttgttagtcttcttttttggattttttatctgtttttttgtttttcaacggaaacaacgccttggttgaaagggtgggagttgcatcatcactgacacaaacggaggttttgtaggctaaaacatcatttccagggcatggccaagctcatttacctggaaaggaactactaattgatcagatgggttgtcattgccaagtgaaaaagactggctacacctgggcatagaagggcgtggagcaaacaacaatggatcatgggatagggaaaaaggagtgatctaaca

SEQ ID NO: 5847 - DNA, 286 bp, Zea mays
  Clone ID: MRT4577_105324C.1
atacgcttcctgtcagttgtatattgtgagtcatgcttccagtgggagacacggggaaatgggaagaggttctctaaggagcgaggcgggcccaactgtctgcgatgtgtttgataacatgtcgtcgtgactgtttaccaagaacaccctctagatcatgcccttcaagctcccacccgtctgcccttattatttccgtgtgcgcatgatagcagtgtggatttgctgcagcgatgtgcactacctatatgaaatgctcatctctcactctttcttttttgatccc

SEQ ID NO: 5848 - DNA, 648 bp, Zea mays
  Clone ID: MRT4577_105325C.1
aagaataaacttcattcattccccagaggacctggtatcagttttaggagcatccatatttccagaggaaactcttagttatcgctataatcagagctttatttcattatatgatgtgctatctataacatgtacctccaggcttcaacaagaattccaattcttatgcgtgctgatcaacgccgagagcagtccagctgctgccatcagcgtggagctcccgagcaaacccttgccatcggtgacgtctcccagagccatgacggcatccgccacgtcctgcaccactgacatccgcttcagcagcagtttaccctgcatagtcttcaccgcctcgctctccttatcacagtccttcacgagccgcttctttatcgaagattcgatcttagccacctcctccagcttaattaaaatggaaccgacgtagcccagcagctcagcccaggcgctgagacgctggaggcgcggaagaaggtgcgcaggcaggagcccggccttggcgatccagacgaactgctcgacgaagtagtagacgccctcaccgccgtaggcgagtagcgcgagggacgggggagggtgcgggtgggcgaggagggcgttgagggactgcacgaacttgccgagacggaaagcctgcggtgaggc

SEQ ID NO: 5849 - DNA, 415 bp, Zea mays
  Clone ID: MRT4577_105326C.1
ttttgcatttgtaaagtcttaacatgcaaaaatcccaccacggtttgtactttttccaacaagattggggaaaggtcacacatgaacccctgacttacccattgaatacaaagtaacgcgacctcaatttttttggactgaccctcttcacatctgctcacaatctttagggcacctttgcaaacgggtccattacacttgacaaataacttgcggtctatgtttgatcaccgcaaaccgggcttcgttttaaaatgagaaacgccggtggaacacatataatagtgctccttacttgccgaacctatggtataggagctacgacccccctgctgactgtgaatgtctaccagcttggaccgggggagcgtctgaaatatttccctgaccttatgatccttaggcgctaaaaccc

SEQ ID NO: 5850 - DNA, 334 bp, Zea mays
  Clone ID: MRT4577_105327C.1
cttattgtgggccaaaaatttgggttaataagggatgggacaaattccaaccaactcccctggggatatacaaatttgtccatccatcaatcggaatttactagtattaaggcatgggacacttagctgacaatgatcataaacaccattaggcttttaagttcaatacacaaaccattgcacacaagagggggcaagccctctggttttgggacatcaccattactaggggtacaaaagaagagccttagaccttggataaccgctttgaaatggggtattccaaccattgtcgtatgaaggacgtgggatccatggactcccctgggatgtt

SEQ ID NO: 5851 - DNA, 315 bp, Zea mays
  Clone ID: MRT4577_105328C.1
ttttttttttttttttttttttttttttttttttttttttttttttttttttttttttttttttttttgggacaaaacacaccgatctttagggggataaacattgtttttttaaaaaaaccttttacttgggcggaagatttcatgggaaattcacctccaatagggggggatttttgattgagatttcggcaactactaaaatgtgggtccacaaaatttgctgtggggaatgctgatgttttaacagattacataacaaaatgggggggttatccacaagcggggtgcaatggccaacttgtcctcttactt

SEQ ID NO: 5852 - DNA, 561 bp, Zea mays
  Clone ID: MRT4577_105329C.1
aaaaaaaaaaaaaaaaaaaaaaaaaaaaaaaaaaaaaaaaaaaaaaaaaaaaaaaaaaaaaaaaaaaaaaaaaaaaaaaaaaaaaaaaaaaaaaaaaaaaattcccccttcacacagaattccacacaggcctttggcggtcaccggggcgttggccacaaacccccaaggggtgggcccaaagggtttattcccaggggggggcctattgttggggggggggggggtggggggccccggccgttttgggccgccagggggggggggtccaaaagcacgtggtaaaggaaaatttcgggggggtgaacacggtttaacgcgcggggcccaacccccaccaccccctgggtcaccaggggggccacggtttgggggggcgcgagaccggggtcaaaggggaaataaacccctgccccggggagttccacgggggcagggggggtttcttgcccggggttaattgagccgcccgggggccggaatcccccccggttggggcttgcctggggcccttatgtaatgttgggggttgactggttgggcagggtaattgactttggt

SEQ ID NO: 5853 - DNA, 303 bp, Zea mays
  Clone ID: MRT4577_10532C.1
caaactcagaacaatttaaatccacatctcttgttttaaggattctcagaagcttacaagtagcagaagctcttcggatgcaaatggaggttcagaaacaacttcatgaacaattagaggtaaacacctagctcagtgattttttagtaaaaaaaaacggtggatgaatttgatctgacactgtataatcatctttaaagtctgtataaatttcggatttgcatggctagcaatggcgctaagtttattctccgtcgtcaggtgcaaaagcagctacaagtgcgcataaaaaaacatgcaaag

SEQ ID NO: 5854 - DNA, 133 bp, Zea mays
  Clone ID: MRT4577_105330C.1
gcgcgtcgcgcaccgcgcccgcagtggctctagcgggtcacttaaacttgctatgctgtgaacaaatgctgtggtatgccatgggcatgagcttgtcgatatagagtgctaagttagcgacacggtggatgca

SEQ ID NO: 5855 - DNA, 267 bp, Zea mays
  Clone ID: MRT4577_105331C.1
gatgtcttcaccattaacttgaatctgcacctaaagagactgaactgaacacttctcctgacgttgttggacaaagatggtgggtggtgggataaggacgaggagagggaggaggagtacccgtaggacggtggaggagacacagtaggacaacgacgtccagcagcaggtggagcagcaggccgctgtcgatgcggcgcaataggacgacgatgatgcttagtaggacgcctcaagttctggcgccttaagttcgaggaacgtcta

SEQ ID NO: 5856 - DNA, 660 bp, Zea mays
  Clone ID: MRT4577_105332C.1
gccggccgggccgggaagcgagggaaccctgacactgcgactgaagaggatgcgtgatcgccattcgctagggggtaaacacccttactgctcttcatacggggcctgagccgctcccttcaaaagttagtgcattcgacaaacagacagacccaacccaggcccagtggctgcttcataatgtaacgagtgcactgccgggcgtgaacttcccggaggcaacccacactccggctccagctggacagaaaccacagagacaacatatagcaggcgggagccagtgattgttcccacctccgcgacaattaacgccgcatgtaccgcgaaacgaacgatccccatgtccactcacacgaacggaacatatgtgtaggagatcctgaacgagaccatgaccacacccgaggtgccgaccaccgcagaccatacacagcaggacgaccagcgccacttcaaggacgcgacatcgattccatccatccacagcacccccagatgcgtcccggtgatcgactagaactatcgtgaaagagactctcatggctcccagaccaacatatctacaactgatgacatcgccagctatcagactataccctgattaaaccgcgatggatgcatgctgctctcatgctcatgaagagtaccacagatgac

SEQ ID NO: 5857 - DNA, 153 bp, Zea mays
  Clone ID: MRT4577_105333C.1
gctctcccgtggcctagccttctatcgtggaaagggcgtccgatcttagtggccccatgggaaggatcttcttggagtgtgccgcagggcactattacctgtctcctgatcctgctgatgtcttcgatttcctggtttttgtgtccagggttt

SEQ ID NO: 5858 - DNA, 754 bp, Zea mays
  Clone ID: MRT4577_105334C.1
gaaacaaaataaaataaataataccttcccatttacagctctaagtctcagatccgatacagcgcgatcataaccagaaccagtgcacaactaccttccgcaaatgtacatacattttgagaaactcgagtttctaagctaacgattttagcattttcctcaacaaagaaacagacagtcccactataagttgtcagaacagttgcacgatggatctcctagcaaataaaaaacatctactgtaggtctgtagcaagcacaaacttcactattatcctaattctgtagtatcaagcaagcttttacctctgaggtttgcacctcctcctatgccgggtgaaatctgaaacaaacttaaatattttgctgcacccaggcgtcgtgcatttgtaaggcttggccccagcatggaccttgaaatgctcagcccgatcccatgaccacttgaaagccatattacaaccatcccatgggcacttgtaaggcatatcatcgttgtgtgcactctggtggcgcctcaggtatctgtgggatctgaaatgtctgctgcatgaactgaccgtgcacatgttcttcttgtggacagcaagctcagcttctgtcttgaatgtcatgtggcagtaatcaattttacattcaaatatatttctcttcatctttgtaaccttgcttgcagctgaaatatccataaggtctttcttatgtcggcaatgttacatctatggacccggctgttgacaagacactttacaac

SEQ ID NO: 5859 - DNA, 178 bp, Zea mays
  Clone ID: MRT4577_105335C.1
acgaagatgtccgtgtttttttatctaccatgaccgtcgtggaccttggtgaggcagcccatgaagtcgtagtccgccacctgcacctgggcgcagttgttggggcattcagtccatcgcttgctcaccgtgtcgctggcactggtctcttactttttcaccttctgggccacctgta

SEQ ID NO: 5860 - DNA, 670 bp, Zea mays
  Clone ID: MRT4577_105336C.1
tttttttttttttttttttcgttgatacgtatgtctaaattcattcttatttatttaaatgtggacgaaaaaagatggctataaataactatatttcggcacggagtgagagagagaaaaaaaaacaaaaattcgaggggagtacattgcatttcaccgcatgagtttatgatgagtggggtggggaccttgctgtgtgcaggatttcagctgtgaggggggatcagtacatctcactgcggtgaactgaacaaggctgttgcaatacatatgcctagtcatgtgtgacgtgacgagctgttgctgctggtgccgatggagcaaactggcagcagatagatcatgcatgcatcaattcaaaggtgcctattagcacagtggattacgcagaggcgtgctcttggtacctggcgaccatcagagctgcaatgcaagtgggtactggagagaatctgaaacctcgccaagaatccaaaagagcagcagagagagagtgacacatcctactgatctcgcaatggtagctggtgagcggaaacgcactgacctgctgagtcacatgacctccccaatgggcctgacataaatcccggatcagagcccagctatcctctctgtggatttcagtacggcaacaggaacgcacacggacggttcagtgttgtcgtgg

SEQ ID NO: 5861 - DNA, 249 bp, Zea mays
  Clone ID: MRT4577_105337C.1
tagtagcctttcaaacggtatgcccgctagagagcgctgcgccgcggcgattttatccagacctgtaatatcagtcgaaccagcgcagattatagtcagtggcacgagcccttggcagtaatatccctgtagctcaggcctgcgtgaaactgaatacggtcataacttatgccataacacacttatgatatattaacctgatgtgagccgttcctagactgtgtgctatcaagatagactgggcacttt

SEQ ID NO: 5862 - DNA, 393 bp, Zea mays
  Clone ID: MRT4577_105338C.1
aatccggctggcggaccctccacgcctttgtgtcagtgatcggaacggaacctgcacatgtggaattacgcagcatgcgtggccactaacatgccttcaggcgaggtggaggcccaagcgggcgggtccggcaggtggaggccgaaacagcagcaccaccatgccctcgtgatccgcaaggtgagggcggacaacgtggaccgcgaattcaagctcatccgggccgtcatcgagcggctcccctacttgtccatggacacggagtacccgggcgtgatccaccaccatcccggggccgtccaccactgcacgctcaccgagccgcagcgctacgtcctgctcaagttcatacgggacgcactgcacctcattcaggtcggactggccctggcg

SEQ ID NO: 5863 - DNA, 230 bp, Zea mays
  Clone ID: MRT4577_105339C.1
tatcctaggagccctagtcatttctatccacccagctcccatacagacgccactgttaaatttgatgatatggtaccacagaccggacttgctttagatcgcatgctttatcgcacaacacgcccgggcaagaccttgtagaacgccacggaggcgcaagaatgaggtggtcatgacacacggaagactcggcattgctgcaccttttctggaacggattatctttaagg

SEQ ID NO: 5864 - DNA, 271 bp, Zea mays
  unsure (1)..(271): unsure at all n locations
  Clone ID: MRT4577_10533C.1
tcgcaaccgaggaggatgcctgccatgttcgttgccagccgcgtgtttgttcacccggccagccggccttaccaagtggggtcttcancccgctcgctcgaccgagctcttgcgtaggccgttgactatgtcatgtggcccctgtgcgtcatctccgataagctcttcaagatggcgggcgactactgctcgcaaggggcaccattctcgccgtaccccgacggtcggattaaactatcacgcccatcgcactacgtctattttcctcata

SEQ ID NO: 5865 - DNA, 531 bp, Zea mays
  unsure (1)..(531): unsure at all n locations
  Clone ID: MRT4577_105340C.1
acggcaacactttgcgagctgagccatcaaagcnnnnnnnnnnnnnnnnnnnnnnnnnngatcaagaaggagtgggnnnnnnnnnnnnnnnnnnnnnnnncgtggtgcgtggcgctgtcgctggtggcgatgctggtggcggagggcgagacgctgcacagcatcagcgacaagtgcggcgaccctctcatccatcggtcgtcgtgaaccggacagaatgccgttgctgacttgctgtggtgtcgtcaagnnnnnntcagctgcatgccgcgtacgtactacggtgtgcagactgcactgcagagggatcggagagcgtagcgatgcaagaggacgccatgtactgttaagtatgcgtgaacagcgtgtagcaagaagctctggacgaggcctccagcctcctgtgtgtaaattgtaagggacgccgcgctagtgcttcatcaaccacgtgattggtttcgtgagtgtggagcgtctgcctcgagtcagcctggcttgctaaataaaggttatgcggtacgcgcgggagca

SEQ ID NO: 5866 - DNA, 800 bp, Zea mays
  Clone ID: MRT4577_105341C.1
ttgggtccctcgagtccggccgcgcccgggaaccaactgcccgagacaagaacaactccaactcccatctctcactacggcaacactttgcgagctgagccatcaaagctcggggcggatggcggggcggcggcagatcaagaaggagtgggtgcaggcggcggcggacgcggcgtcgtggtgcgtggcgctgtcgctggtggcgatgctggtggtgctgtgcacgctgggcgccggggaaggcggcggcgccgcgcgccggtggtggtggtgcgcggcgcggcgctgtcggcgcggccgtgcgaggagatctacgtggtggcggagggcgagacgctgcacagcatcagcgacaagtgcggcgaccctctcatcctggagcggaacccgcacgtgcacgaccccgacgacgtcttccccggcctcgtcatccggatcacgccgtccaagcccaggtagatcgatggcgatccatcggtcgtcgtgaaccaaacagaatgccgttgctgacttgctgtggtgtcgtcaagccccctctgcatgcatgccgcgtacgtactacggtgtgcagactgcactgcagagggatcggagagcgtagcgatgcaagaggacgccatgtacttactgttaagtatgcgtgaacagcgtgtagcaagaagctctggacgaggcctccagcctcctgtgtgtaaattgtaagggacgccgcgctagtgcttcatcaaccacgtgattggtttcgtgagtgtggagcgtctgcctcgagtcagcctggcttgctaaataaaggttatgcg

SEQ ID NO: 5867 - DNA, 183 bp, Zea mays
  Clone ID: MRT4577_105342C.1
agagggaacgccaaagcaccttcatacccctccgcaattccccctatgcccatttcttcttatgtctacacctgctctcaatctgtctgttaacataaacctgctgctgcagacatacttcaactattatgaaatttaatttgaatatatttctcgccattttacaatattccgacttgtata

SEQ ID NO: 5868 - DNA, 636 bp, Zea mays
  Clone ID: MRT4577_105343C.1
ccccctcgagtttttttttttttttttttttttttttttttttttttttttttttttttttttttttttttttttttttttttttttttttttttttttttttgggagaaaacaccccaaggaaattttttttttttttttagattttccccaaataaaagttaaaagggttaaagaaaacccttttagtttttaaaccccaaaccttgaaaaaaatttttttgggggcccacccctaaacccggttaaaattaaagggattttttgaaccccaccctccccccccgggggggggggaaaaacttggggggggggggggaaacccccaaccgggcccagggggaaacccaagggggggaaaagggaaaaaaaatcccggccctgggggcccccccccttttgccaggggccaacacggcaaagacccggggggggtgggggttttttttttaaccctttttggccccatcctgggggggaaccctccgggtttttccccaatttaattttccccgggggggggaaaacaccccgggaatagaaaaccccgggcccccttgggggggttttttttccgggccctccttgttaaccgaaaaaaatcctggaaaaggaaaaaaaaaggggggggggggg

SEQ ID NO: 5869 - DNA, 1155 bp, Zea mays
  Clone ID: MRT4577_105344C.1
atggctgaagataagaaaagcgtggaccccacgctcgttggtttctacgaagccatggagaggactaatgttgagaaaatcactgacgagatgatagctgggctgtctgggagttcaagcgacagcgagagttttgatgttgagagtgagaacaaagatgccgaagaacggccatggataccaagtcatgttgttttcgaaaattccactgttaagcatgggaagattgaagtgatgaagggcaaatattttcatgatatatccatagtgagggctggaggagagagtattgttcctctttctaaagcagacaaagtggtgcaatggttttatgtcaagaatgatctgagtaagagggaggatgtgaggggcataatccagtgccctatacgatcactttttggcatcaggaggcctctgatcgcaagtgaaaacaaggagcacattgcttataaagtatggccgcttgttaatgactgggagatgtcgaaggacaccgctgctggctccagcgaaggtggcctagtttatctgagatacacctatcgctacagaagtcagtttggcgagccgaatgatgactggcttgaagccgttgaggtgactagtgatgagttgttgggggcttttatgaaggcagaggacgaagcaatgaacactgccttcagtgctcgaggcaaaaggagactaaacagagtttttgatgtgatcgaatttttttatcatgactactgctttcccgctcggaaacaaggagcaaagaggaaaatcgcaacttcgacctcttccgtcgcgccgaagctaaaaagggttaacattttgactcaccggccgaagctgcactctttagagaaggctggcacgttgcctgttgtagagaagatgaaaattgttgaatatgcagaagctacctcctcggcttcaaagataatagctgttgtgactgccaaagctactgtcactccgttagaaggaacagaagtagggagctcaaagacagaagagcatccgaaactgcagagtcccccaaccatgacggggttgccgaagttaaaaactgctacaacaataactcctaggaaagggaggagaatgactagtgttttaaacgctgttctaaaatcttcgaagctgccaactcctatttctacttaa

SEQ ID NO: 5870 - DNA, 143 bp, Zea mays
  Clone ID: MRT4577_105345C.1
ttgtacatttataaaggggtgggcctcggtgcaaatgtccataacacaaggaatagtagcatggtccctgcgaaattatttttgagcctagagtgtttatcgagaagtagagacggcggtcgtagggctcgagggtgcggttt

SEQ ID NO: 5871 - DNA, 313 bp, Zea mays
  Clone ID: MRT4577_105346C.1
gccttatctgctggatggcctgctagggtggaggggatggaaccagggagttgggaccttaatgtttatgcaacaaatgtacttgacgagaaccataaagcacactaggaccatgcgaaggtttttaacataataatgattagaatgccggactgctacatgaccataagtgtatatgctgacattgatgggcttgtaatcatatcgtcactgaaaggggaaaaggacctaactgtgggctataatccaatgaggggggtgtacctatgcctactctttggctgcgtcatgtatcactggaaggtgacagggt

SEQ ID NO: 5872 - DNA, 857 bp, Zea mays
  unsure (1)..(857): unsure at all n locations
  Clone ID: MRT4577_105347C.1
ccggccggaacaccaccaagtgtcttcctctccaccggccccggaccgcaagttaccagccaggagagtcacaatgtcggcgaagcccacgagcaagaccttcggaaagtcgacccgagaggtccctgcctctacggagaaggctaagaagtggtaccccgctggcgacgatgccgagaacaagaaggttcgcaaggctgtccgatcttggactcctcgctcctccctccagcccggtactgtcctcatcctcctcgctggccgcttccgtggcaagcgtgtcatcctcctgaagtccctcgaccagggcgtcctcttggtcaccggccccttcaagatcaacggtgtccctctgcgacgagtcaactcccgatacgtcatcgccacctcttacaaggtcgacatctccggcctcgacgagagcaagattgaggagatctctcagcccaagtacttcaccgccgagaaggccaaggagaaggctggtgaggaggctttcttcaagcagggagagaagccccagaagaaggaggtcaacagcagccgcgccgccgaccagaaggctatcgacaaggctctgattgccaacatcaagaaggtcgatatgcttgcctcttacctctccagctctttcagcttgaggaagggtgacaagccccacgagatggcctggtaaatgtgcaatcttgtgtgccgggggtgatgggagtacccggggttgcgacacaagggttgtagaacggcagggtctcccgaatgggctgggtttggcatgcnattgaaagtcgacgggcatcggtcacatttttggcgtctgtaatcaggttttacagtcanaaacaacgagcatacaaaat

SEQ ID NO: 5873 - DNA, 424 bp, Zea mays
  Clone ID: MRT4577_105348C.1
aaaaaaaccgggcaacgggggggtggatcccaggggaccggggaaaaagggccactttgccattaaaaaggccccggggggtttaaaggcggcggaaaaggattaaaccccccccccgggggaaagggagctttaagggggcccgccggggggcgtcggccgggggggctgacccaagggcccggccccttggggcgcaaaccccctaacgggggtcggggggggcggggaacaaaggccccggttgctaccttggattttgacttaaaggggttaaatcaaaatccggcacacgggagcttccccccccgggtttttaaaccaagcgcgaaaaccaatgggggaaaaaaacgggtcctttcgaactagggggaaaaactatgggggggggggcataagtagggaaaaacccttgggccaaatt

SEQ ID NO: 5874 - DNA, 405 bp, Zea mays
  Clone ID: MRT4577_105349C.1
ctttctttaggacaatgcatatggactggatcggtgaacagctgccatctaattggcgcaccaaacgtatgcagctcccatgctatcatgtttaacgaacaccagacgcactgagatgcacaaaggagcttctagacaccacgggatgttgtactcacttgatatttcacaagaggccatcatactatcgtctggaaaacgatatggccactgatgctgctgatgctatgattctaaaccccctgtacagacaattgaacaacaaatgcataatgctgctttgaactggtaaccgagctccagataagcaaaatgaaaggggcttacaacgacaccttgtcttgccatccattgacacctcgaaagaaacgctcgtggtgcaccccatcgaatctgcggtggact

SEQ ID NO: 5875 - DNA, 2088 bp, Zea mays
  Clone ID: MRT4577_10534C.1
ggagcagagggttcaagggaggggacaggtcgagcagctcacctttctctgctcgagaacgagaggagctcccgtcttttgcttgctgtgccgggcgctgctgaaggttcagctcagtccgatggcgttgagcggcagagctctgctcttgttcaagctgctgctgctgctgctggcgtgcctgctcttcctcttggagctgtcccgaggcaaggaagaagcattcagcctgaggaacctcccgcccttccacaaggccagcagctaccccgcggggtgcccgacgacgtacgactacatcatcgtcggcggcggcaccgcggggtgcccgctggcggcgacgctgtcgcacaggtacagggtgctgctgctggagcgcggaggctccccgtacggcgaccgcaacgtctcctacatgcagaacttccacatcgggctcatgaacatggcgccggactcgccgtcgcaggccttcatctccaccgacggcgtcatcaatgcccgggcgagggtgttgggcggtgggacctgcatcaatgccggcttctacagccgggccagcccaagctttatccaggaggccggctgggatgaagacctggtgaacaaatcatacccttgggtagaggacaagattgtccagtggcctaagatcgcgccttggcaggcggcgctacgggatgggctgctacaagcaggtgtagcccccttcaatgggtacacctacgatcatgtctctggaacaaaggtgggtggcaccatctttgacgagactgggtaccgccacacagctgccgacttactatcagctggagatgctagcaacctgaaggtgctgctccacgctagtgtgcacaagatagtgtttggctcgcgacaaggacgactgaaggcaagagccatcggagtcgaattcactgatgaggatgggagacaccaccaggcattcttgaacagcaacagagacagtgaagtaattgtatctgctggtgcgattggcaccccccagctgctgctgctcagtgggatcgggcccaagaacgacctcaagaatcataacattccggtggttctccataacagatatgtgggtaaagggatggctgacaaccccatgaactccatattcataccaacaagaagccctcctcggcagtctctcattgaaactgttggaataactgaagaaggcgtgttcattgaggccagcagcgggtttggtcagtcgtcggagagtgtccactgccaccatggaatcatgtctgctgagattggacagctgtctaccattcctccgaagcaaagaaccctggaagcagcccagaaatacgcccataacaaacttaatctgcccaaagaggtattccacggcggttttatacttgaaaagattgatggtccgatgtccacaggccatctggtcctcacagacactgatgtccggaacaatccagcagttaccttcaactacttcagtcatccacaggatctcaatcgctgtatctatggtatcaagaccattgaaaggatactcaagacaaaccgtttctctgaactctctgctgatggtgctgggttatcgatggaaagggtgctcaatatgagcgtgcaggctaatgtgaacctgataccgaagcatacaaatgacacagaatccctggagcagttttgcaaggacactgtgatcaccatctggcattatcatggtgggtgccatgtagggaaggtggttgaccagcattaccgggtgcttggagtttcaggtctccgggtggttgacggctcaatattttctaaatcgccagggaccaaccctcaagctacagttatgatgatgggcagatatatgggagtgaagatcctaagggaaaggctgggacgagcagctggagtgtagtcgattcctggacattagctttttattatgtgtggcctaggaaagaaattactaattttttgtgggatccagaatgaatcgctgaagaaaaacaagccatgtgtttcatctgtacccagtaatcatttgtctaatatgatattgcagactaaatggttgactgagcaaaaaaaaaaaaaaaaaaaaaaaaa

SEQ ID NO: 5876 - DNA, 183 bp, Zea mays
  Clone ID: MRT4577_105350C.1
aaaacacttgaaagagaagctttactgcgtaactgttacaacaatatgtatccggacaggattttgtgccgccgagtctgatgtaccgctagtgagtgaaatttctttctctcttctcagattatgtacggacctcaattcttttttatttaccggcgttttagttcaaggaatgaactagta

SEQ ID NO: 5877 - DNA, 121 bp, Zea mays
  Clone ID: MRT4577_105351C.1
ggcccattatcaggcacataaaacggtacataaacaccaggcaggcacataacaaccaaggaaaggggtatctaggggtggcaataatggcaattctgggtggttttggatggacaaggac

SEQ ID NO: 5878 - DNA, 348 bp, Zea mays
  Clone ID: MRT4577_105352C.1
cacaggagggagaaaggaaaacagcagcggaggacaccgcgaggctgcaagcatacaataacccacgcagggacggacaaaataaggagaccagacaggagcacacagccacagcccagagacaaagggcaaaaaacccccacgaccaggagagaggaaacggaaacaccaagggcagagacagcagggcgcgcgcgagcagacagaggagagagcaccagcgaacggaggacccacccaaggaacgagaagaaacgaccgcaacaccgccacggccggaaaacaaacgggggcgaaggacccgaagagcaagccaccacgagcgaacagaagaaacggcggcaccaa

SEQ ID NO: 5879 - DNA, 1009 bp, Zea mays
  unsure (1)..(1009): unsure at all n locations
  Clone ID: MRT4577_105353C.1
attgggtacctcgaggccggccgggtccccgtttcgccgtcgccctgccgccgctcgtctcccgcctcccctctgcgcctctccaccttctcctcgccgtcgcgtccgttccggtgccgccgtgcacgcggacgcgtcttcgcgcgcctcccggagcccgccgcccgcgaccagaagcaagggcaaatgggcgccacaccggtgcggtggccgcgggtgctgaccccggcgcagctagccggagccatacgccagcagaaggacccgctcgaagccgcccacctgtactgggacgcacctcgccgctacccacactcctaccgccacaacgacgacgtccgctccaccctccttggcaccgccgccggctcccccgtcctcccgtccctcctccgccgggttctcccatcctccccatccgccgactccctccttgccgcttcgatacccaaactctctcctccagacgccgtgtccatcttccgctcgtcgctcccctcctccccgtccccgtcttggtccctctccttcaccgccctcctccggcacctcgtctcccaagcactactccccgaggctgcccgcctcttcgctgacttcacgcgtccgcccacgctttcaatagcatccgcggatctgactcttctcataattggtctctgccgcgtgcgccgccctgaccttgcgctgcaggtgctcgacgaaatgcccaacctatgcctcgctcccggaagggacgcgtaccgcgcgattgtgcctgctctctgtgatgctggcatgcttgatgaggccacacacgtcggctatttcatgatgtggccggtgtcgcagaagggctgtgatgcagatgttatggtgtaccggacattgctggccgcactctgtgcggctggccggngtgaacaggctgagctggttctggataaggtgctcangaagggtctgagatcaccaagtagtcgtcggtctcttcgtgggccaatgctngctgtgcttagtgtcgaagatg

SEQ ID NO: 5880 - DNA, 401 bp, Zea mays
  Clone ID: MRT4577_105354C.1
ccaatcgttgtgagtgtccagggaaagatttttcatgagtgtttgtagttgtgagtgtccaggaaagatttttccatgagggtttgtagccggcttgtgactcgcgctattggatccgaccttgtaattttgtatgtgtgtcgcaatcatgtaattaatggacaaaagggactaaatggtaaaaaaaagtttcgtcagaaaaaaatatttttattgtctttcataaaattaaaatataaaatataataataaaaaataaacaaaatacacatttacatatgaataatttgtaaaattatcaccatttcttacataattcctggggcccccccttttatgtatccatattttacttccgcgtgcttgcataatttttattttttttttagtgctacctaaat

SEQ ID NO: 5881 - DNA, 312 bp, Zea mays
  Clone ID: MRT4577_105355C.1
gtgatttctgacattgatgatgcagttagaaaactgtaaaattcgagccatataaataaaacctgtactgttctagttgttttaatctgtctttttacattggcttttgttttctaaatgttctccaagctattgtatgtttggattgcagaagaatttgtaagatgaatacttttttttaatgtgcattattaaaaatattgagtgaagctaattgtcaactttattaaggattactttgtctgcccaccacctagtgtaaaataaaatcaagtaatacaatcttacaaaaaaaaagaaccacaacaacac

SEQ ID NO: 5882 - DNA, 541 bp, Zea mays
  Clone ID: MRT4577_105356C.1
tttgttactgtcagattcccttgtctccttgtcattggccatggtcgcaagaccacacagacaaataacgccgtgccgagacactgtgcctgctcctccccgtgcaacggcgttaccctgtgccctccgtgattccacaccaacctctacatgcgagactacctgaacaccaccacccaggatctcatcatgcgtggccgaccatcctgaggatgccccgatcctgcatgcaaagaaccccaccagaaatgacaacgccggctactacagccgaacattctgtgaaagcaatcgctgcaactgctgctggaaacttaggagttccatttttgatgccgcccggctgcaactatctgataatgatgagctaatcaattgtactcttatcgatgtgagtgtttcaagccaggcatacttctatatgcgtaccatgattgcaatggtctgagtctgagatgatcagaatgcctgatggctgcgttgtgcattggattactacactgcccacttcttctgatctacatagaaagagctacactcc

SEQ ID NO: 5883 - DNA, 308 bp, Zea mays
  Clone ID: MRT4577_105357C.1
tcccctctgccagaactggaaaactataggaagcgttacatttacatacaaccacggtccctattaaatggagggaaggaacacgacacgatgctccggacctctaaccacactcaattgaacgccatgctgcagatgcagctccctggattcctgtccatcccgctccggggcgttaccaaccgcgggcgtagatcccgccctgtcataatgttcaactcccatcggaagatccccgtcatagacacagatgcggcgcagcagcgggtgcgggctaagatgtctgtgtaccgtgaagcgatcgacga

SEQ ID NO: 5884 - DNA, 243 bp, Zea mays
  Clone ID: MRT4577_105358C.1
gcgcgcgcccaaccaagacccgggcacccagccaacccgcgggcgcacccgcgacgccaccgcagagcccggcggagggcagaagaggacccccgggacgcaagaaggagcccagaaaccgagcccgcggggggagggcggagccaccagacagcagcgacgagcacgccaagggggaaggccccgacaggaggagcaaccagccggaggggcggcaggaggggacgaaggagccggagaacc

SEQ ID NO: 5885 - DNA, 346 bp, Zea mays
  Clone ID: MRT4577_105359C.1
cgcttgttcctgcggcgcctcccgcccacctcctgctggtcctggccctcctcgtgatcctccgccgcggcggcagcaggaggaggaggaggagggataggggtagccggctgtggcggcgcgttgacggagcgcggagacgaggtggaggaggccgacgcggcggacccccgcgggagggccgcggcgtaggaggaggagcagctgctctcgctgaggtggatgagctgctccgccgccgcgagctcccgcgccgtgaaccgcgccgggttcggggcctgcgcctcgtcggccatggccccgcgcggtggactgaggacggatcgatcgacgcaaacgccggcgg

SEQ ID NO: 5886 - DNA, 413 bp, Zea mays
  Clone ID: MRT4577_10535C.1
gtatctccgctgacctgactattgcattctctctcctagctgctttctgcctgatacaagcagccaacgacagcggacgtgaacacttagtgtcatgtgccgatcggcccgtcgtagccgctagcgttccaggcttcttgccagggccgcgagctcatcctgatcacgtgctaccctgcgggtacctcttaggagctgccacgacgccgacaagctcgctctgtttgcgcttgtccaatcttggctgctccggtagcgccagagcaagcaggggactgtcaaaatggttacctactagcacatctacatcactggtcaataactttggaatgagcacactgcacaggtaaagccttgctgcgaccatagactgaaggcatggagacggtacagttacagccggaaggaaccaa

SEQ ID NO: 5887 - DNA, 190 bp, Zea mays
  Clone ID: MRT4577_105360C.1
tcccgggggatcgacttttttgggggtccaagacattgttgcgacggatgattccactgacggtaaatgcctcaaatttgctggaatctggcctcttgcacgccggccctaccccactcatcacacgctatttatcactaatatgtgtgtgttacgccttcaaaattagaggtggggggggggttttttt

SEQ ID NO: 5888 - DNA, 1694 bp, Zea mays
  Clone ID: MRT4577_105361C.1
agaaagccaacgcgatcacacgagtgggactggggagtagtgaggcgagagcttctccccgcgccgccgccaaaaccctcaaaacccgagacgccggcggtgaagaggagagggcggaggcggagatggcgacgcggatgaaggacgtggcgcggaggtcgaccaagaagtacgtggaggaggcgctgtaccggcgtctgttccggaaggggtcgacgccgcaggcggttcgagaggaggtcgatggcttcctcgacagccggaagcgggcgttcaagtgggaggtgggcgtttgcgtccgccggatgcggcggaacgcgctctaccgcccttcgctcaagctttctgaagttatggcgagaagaggcatgaatcctactgttagtgatcaagcaattcgcctggatctcattgccaaatcgagaggtatcgctgctgccgagaagtactttttggacctcccagaaacatccaagactcatcttacatatggcgctcttctcaattcttactgcaaagagttgatgactgagaaggccgagtcccttatggagaaaatgaaggagctcaactttgctttcactgccatgtcctttaacagcttaatgacgatgtacaccaaagtcaaccaagctgagaaggtccccagtatcattcaggacatgaaggcagatgacgtattgccagatgtctttacttataatgtttggatgagggcgcttgcagctctcaaggacataccaggggttgagagggtgattgaagagatgaaacgggatggccgtgttgctcctgattggacaacatacagcaacctggcttccatatatgttgaggctggaatgtttgagaaggcagaggctgctcttaaggagcttgagaagcggaacaccagcaatgacatcgaagcctaccagttccttattacattgtatgggcgtacacagaatttagtggaagttcaccgtgtctggcgatcgctgaagcgggataaccctagaatggcaaacatgagctaccttaacatgattcaggttttggccaacttgaaggacctgtctgcagccgaagcctgttttaaggagtgggaagcccggcacatccatccacccaagaccaacacaaagggctcgggggcagataatacacctggtgcagatccaaaatctccaagtaacccgcctaataatcagtctggcaccaaggaaaccggggacgggacagcagaggacctccagccgaagcatccaaaatatgacatccgggtagcaaacgctatgatcaaggcgtacattaccgagggcatgcttgacaaagctgtcgccatgaagaagcgtgccaagatgcgcggcggaaggctgaacgccaagacatgggagatcttcatggagcattacctcaagacgggggatctcaagatggcccattggtgcgcggaccgcgcgatgaagaaggggcacagcagcggcaggatttgggtgccgccgcccgccgtgacggagaccctgatgagctacttcgaggagaacaaggacgtcgatggggccgagcggtacgtgggggctctgaagaaggtgcagaaggatctgggcgcaccggtgttcgagccgctggtgcggacgtacgctgccgccgggaagaattccccgggatgcggcacggctgaagatcgagaacgtggaggtcggggaggg

SEQ ID NO: 5889 - DNA, 357 bp, Zea mays
  Clone ID: MRT4577_105362C.1
aagcccccgtacgtaagctcggcatcatcctcgtggacttggatgagtggcctgccgggaagatgttcgatgcaaaggccaccttcaagatcctcggcgaggctgacattgctcaccttaactagactctagaaacccactcagctgcttgtgcggtggtggtgctgtgctcgcgcattgtagagtgtttggtgctgctgatagcgatactgctgccctttttggttgttaccacaagctcagatttcataagctaatcgcatgccggtagtgaaactggtaattatgatcctcattgatctgtaaataatcaagttctaacagccatgcgtattgtactggttgaacagatgcacc

SEQ ID NO: 5890 - DNA, 2855 bp, Zea mays
  Clone ID: MRT4577_105363C.1
cgctgccacactctgttttcacataacaatagacacttgaacaaaaaaaacgaaaggaatacatggatagtaggtggcctagttacaaatgccttgttcgctgcggctttaatccgactgcggctgcggcttctacagtattttctctctagggattgcagctgcaacagtgatttgcagctgcaacagtgctccgtgcagggcagccgaacgcgctcaaagttcttaaacgaacatgaatttcagcctccaaacaagtcatacaataggattttgatcagtgaaaacttgggtcagaaggaaagtgcgagtgaaccaagataatgatagcagccggcaggtatcaagagaacaatataggacaaaggtgtaactaagcttcatcagaatgagaacatatggtggatgtcaacaacaacaacaacaaaagatccaagttttcaggtacacttcagatccgcttcatttctttgtagctacaagtcaaaatggtcgatacagacccatacgcaagcctccttttcatttaccccattctactactatatatatatctaaagtagatacaagatacggtcatgctagagcactgtatttaattcacaaaaaataaaagaaatacggaatagtgagcaaggtaaattaaaagactcgacgagcttgcaccagcgaaaaaaaaaaggaaatcaaggtttacttactcctcttatccccccgggctgtgattacgtctaaaacatctccatcagatgtgccagctctgctcaagctcatccaccttcggtaccagtatttaacatctgacatctccggctcctcacatgttaacacttccatttcacatgaggtaaaaggaactgtccaacgacgatactaccttatgccaccgaaccctgcatagaacaatctccataccgtccaaggccaccaactgcttgctaactcaataattaccacgaggctcaggtcttccccggcgggcgggcagtttatatcgtaccataatccagcctctcccacttgaaggatttaccagaattgatccgcagcaacgctcgcatgaatacacagacgcagacgcatactgccgctatagcaagcatcgaatggatatagggccgagcaaggaacccccttgaccgcacgggctgcattagcacaccagactccagaatggcacactgggagcaggatcttatttgcagcgcctgaaccccagattttttgcggtcaccaacatcatttcctaaccgatccgcacgaattccatcgccgttaaccgttattgtgacctggttgttcttcatgtccaccagcttttgtgctacaagctcattataggaattatggttcctcaacttggcatatgtttcgggagattggccatcgtcgtctagaactgtctgccaacaggttacaccagtctgttgagggtcgtctgtcaaggcgtcaactatatcctctgcattctcgatggacgcagcaagatgcagcggagttaaaccaccagggccaggcaagttcggaaggaaggggtaaaccttggaattgtcggggcaaattacaacgaacttcacaagtaggtgcaccatgttcctactctttctttttactgctctgttcaggaggtgaatctcagccagcatctccatagtctcctttgatagttcctcgctggccaggcttctcttggcaagaatgtccagaagtgttttagtaagagagcaccagtcgcgctcactacagaacagtaaaagatatctgaaccgtgcgattgaaaactgagtcaaatccaaatcagacacatcaggtctggtggacaatgtacaggcagaagccctctgaaagagccagccgagttcattaaggaagtgcagaacttgaaccgacgtttttgactgcctacagtcatgaatctgaccatccgaagaaacatcaagaacctgtgaatcctcaagctccacttctagacttctcaactcctggcaaacgcttgaacttgcaacaataacagggaagctgttacccctgaacctgttttccacctcaataaagcagcgcccaagaataaaatctggttgtcctggcaagtcaaaagtctccacacctgaatcatcatatatggtacctggatatgctgagcacagaacttctttggatatgtactttcctgtacttgtacaatggatctgtgtgccaggaatagatagattgcggcctttaagaatgagggagatcttctgtccaccaacaacagcaattggtgacacaaaggtcaattcaggggtattccatgttctccacgatttcgataaacgggtcattcccgctttataagataccaacttggagccggttcgaactaaaaaccttccttttctccagaaatccaaatcagaactttgaactaatgagttgactctctggaggagattttcttcaagctcatcccatgcaatagccggcattgataggtacatggatagtacaaggcaaccggggcggatgtaaccctccatttcagtaggactgtgtttgagccaatttactatatcgtcacgaaggttcccaggtattgtactaggttccttgccaaatagtttgaagataatcctaccagtccggtcctgtccatcggagttcgaggttgaaggtgaatggtcttgaacaagatgttgaaacatagcaggactggtaaccaggatttggtggagatccgttctcgaggggacgctcttaatcattgaagtcatcaaagggtggtgccaaccaggcctgatttgtgctaacttcacccatggtagcatcttccccataatctgtaatatgagacccccgggcgcccgcgtgggtcg

SEQ ID NO: 5891 - DNA, 433 bp, Zea mays
  Clone ID: MRT4577_105364C.1
actataaatacaacgggggtcaaaacagttttaaaacattacaagttaaaaaacgacgggtactccagggacaacagggggcgggacaccatcggcagggaaaggaaggaagaaagcaacggagggcaccggggcgggaggggccggggagggaaaggaggaacggggaaggaaaaagggggccagaagcccaaaacggggggcgggagggcaaaaaaacaaagcgggccgcttccttctggagggacgggaacagcaccaaagaaagggagcgcccgccgaagctggggaacacgagaaaaaaaaactacccgggggaaaggggcctctaagcaagccaaacggccggagctgcagcggcaccaaaaaagattccaaccaacaacccttgggggaaaagaaagagcctgggcagggctaaatcggacgcggg

SEQ ID NO: 5892 - DNA, 501 bp, Zea mays
  Clone ID: MRT4577_105365C.1
aaccaggggcaaaatcaagggcaaaaaaggcccccttaaaccttgttgggttttagcccaacccatatgaatgggggaagttccaacccataaaaaaaaaaaatctttttaaacccaaaaaaaccccccccaatcatccaaacaagccttaaaaaatttaccctacaaagctccctcccccttgggggccttcctaaaaaccggctttccgggggggggggggatatatctacggaaaaccaaaactaaccagcattttcctttgtttttgccacggaaatctggttttggaggggcgggggaacaacctaaaacttggggagctgcatcgggaagaaccccccccccttggtcatcccccggggggggctgccgttttggaacatctcaccagggggcccaaaaaaatcaaccaccttgagccccccaggcttatccccgaagcgggggaccggcccttttttaaagttcaaatccccaaaaacctcccccagatgcttt

SEQ ID NO: 5893 - DNA, 1562 bp, Zea mays
  unsure (1)..(1562): unsure at all n locations
  Clone ID: MRT4577_105366C.1
ccggccggggctttctccccgtttggcttccccccctctctctctctcatctcctgccgataagaagcttcgccgccgtctcctctttctccgtcctagcaaaatcctccccgtattgagagccaaagaagaaaaaaaaaaaaaggcaggaggccggcgaactacgcgaggaaaaattttctttcccgggaggctcgggagtcggacacgccacacgctttggtcaaaatcgtttccggttgttagcgcggctgctgctgccgctgctgtcgggggcgagcaggaaggggagcgaacgagcttgggcagctcaagaagaggggacgggggagggagcctgtggaaggcacctgagtacgcgtgaaggagcccgcgcgagagtaggggggaaaccaaatcgagagacatggactcggagcactggatctcgcgcctggccgccgccaagcgttactacgcggcgcagctcggccgcgtcgacgatgtgcccgggatggggacggaagaggtggagatggaggtggaggacgacggggacatggagatggagttggagatggcgctggagctcggggacgcgacgtggccggaggtcgcctgcccctactgctacgaggaccatgacgtcgcatccctctgcatccacctcgaggaggaccacccctacgagccccacgccgcgccctgccccatttgctcccaaaggattacaagggatatgcttaaccatatcaccatgcaacatggttacttgttcaagaatggtcacagatcccgtagatttattgttccagagagccatgcgatttcattattgagtcgagatctacgtggtactcatttacaggctcttctagggggtggtcatggccacagatcaaataacgcagtgaccacaaacatttccagtgatcctcttctttcatcgtttggcctgagcttctcagcatctgatgcaccagaaccatcaaaatcagcatcttctattccagacggtaccgcaatacgtaaggagacaccagttcagccttgggaatcaagtattgattcatctctcacgagcgaggaaagggagcaaaagcggaaacaggccaccgggagggcaacctttgtgcaaggcctagtgatgtctactctattcggagattgatcgctcaagcagccctaggttcttgcacttgctagatcggctctttctcctgcctggtccgtcgtcagatagtgctccacccggttcggactctgatggcagggaaaattcgccccaggaaacttagccgcgttcacctttttttttttcagaaaagtgcgccgttgattctagcatgatgcagcttgatttaagctagctgttgctgtacctgtacctttgtttttatcaatttatcggccagcaattcttatctgtaactcactggtacatcgtgttcgttaccaacatacatggtagctgtggcatctgcttacacaatgcaagaaaagacttgaaaattgctgctttaaaaaaaaaaaaaaaaaaaaaaaaaaaaaaaaaaaaaaaannnnannnnanaaacctttaa

SEQ ID NO: 5894 - DNA, 293 bp, Zea mays
  Clone ID: MRT4577_105367C.1
cacggacgcgggggtcaacccggaaattcggaaccggttcccggagggggaccatttttcccaaaagggaggccttttaaaaatcgggaaaataagggaaaaagtacacacccggggaaaattagtatccctggaaaaatccccaaaaaaaagagccccgaaagaaaaagggaaacgcccggggggccaaatggggggcgtaaatcccagaacttggggtgcccaccagggcgggattggaaccgaaaaaactcaagggccggaatttttaatgtaagccccaccgaacgggg

SEQ ID NO: 5895 - DNA, 1950 bp, Zea mays
  Clone ID: MRT4577_105368C.1
ggggtcctattgtgttggccttcgggttgggtacctcgaggccggccggggcgcgctctgctctccctgcccgcaccccgcagatcccgaatggccatgcctaccgccgcctgcaggtcggggccggatgcactgcaagctgcggccccgagcaccgggctgaactgaagaggtgtcgaggtcgccattaatcctcaacaaccagctgccaccaacgctatatgctcaccatcgccagcaacttggtggcatctgatggctggggtttataaatggaaactggcatcttataaacagatggaacgtacgaaagttgcatcagagaggttgtcattaagatctaatagcaccaagcatcacgatactgtacatcttggtcttggtcattttgggaaggatggcaatctcatttgtcgttcacttaagtcaatattaaaaccaaaggcaagacagtatgctattgtcaaggtacataataaagatgttgacgagggttgcagctccaaagacaatgagattatttctagtccatctgataggaaagaaggaagtcagctgagggcactggaatcttatttttctaaattcaatccctctcagcagttatactctttgcctcagaagaagcacaaaagtggtccatcatcgtcaaatgaagttgatgcaatcattgctgatgaggatgctaatttgaagaacagggcagactctttgcaggtacagattgacagaggacacacaggtatcaagagtaatcaaaatactcccaacgaggtttacaaggagtacttgatatttgatgaaaaaaagtctcctggacatgcatacagatgatcaagcgtctggtttctgtttgacttctgttatttgaaatagcaagtccagtgaaaaattctgaaaatgaatatttatccctccctttgttgtatggtgccaagataaacaacttaatactttcaggggagtggtggagactactaacaccaatgtgcctgcactctggtttcttacatatagcccttggttgttgggcattgcttatatttggacctcgagtatgcagggcatatggtcaaaggacattttttctgatatacatacttggaggaatctgtggtaatttgagcagttttgttcacactcctgtgataaccgtttgtggcacaggcccagtattttctttaattggagcatggctggtatatcagggtcaaaacaagcaagtcattgacaaggacgtttcagaaagtatgttctggcaggctgtgatagctgcagctttgagcttcttattgagcatttttgggagaattgacaactgggcacatcttggggcgaccatttctggaattttctttggttatctgacatgcccaagtgtagaatttgacaattctgcaaagaacggtcaaaaggaagccgtggctcttattaggcaacaagctcatccatgcaaatccgctgcagtctttttcataaccatacttgcgtttgctgtactcgccttcgcttatgggacacaattcaacaatatggatctggaataggcaaatagctaagtgttgtcatggttcacttcatatatatatatatgcatgcatgtagcccgacagctatatattccggaatgtgaatgagcccgagatgtaagaaaacgttgtacactatagatcagttctatgcgtaaccaggttggaatttttccattccgtatcatgtatacactacaatagtgaatagtctagtacagttggtttttggattggctagagcttatcagtgtctgtaagcaggtgaagccacggacggcataactatttgtacactcggtttgcataagaaccgactgcacatctgcatttgcaccgtcggttgcaagttgtgatagactcggcgggaagttttatgtaatataaaataaagtataggtgaagtacatgtttttagtat

SEQ ID NO: 5896 - DNA, 1680 bp, Zea mays
  Clone ID: MRT4577_105369C.1
gttctcgtttgatgatcaaacaatcaaggggttgaaagggattatgagggtttcaatttcctaccagtctaaatcactatctcaagataaaacggacaaggcctaaatcaattattttatcaatcttttttaactacacctacaaaaaaaaagctttgtgtatcttctacaaaaaaaagtgcttatttgccgttcccgctaactatttcatcaacaccgaaaaagcaaaagcagagtctaactctaattgctaatcgtgactcgcggcagccttggtggtgagcccgaagccgaacgggaacagcgggtcgtaccgcttgtcgccgtagttcatgggcagctggtccacggacttgaaccacgtgcgcggcagcttccccgtgaacccatagtccccgaacagcacgtcggtgatgccctgcgcctccgtgccgggcagccaggccgcgacgagcgcgtccatgtagtccacgtacggctgcagcacgagcgggcggccggacacgacgagcacgacgcacctgacgagcccgcacacgtccttgatcacctcgggccccggcgacgggatggtcaggttcttgttgtcgccggccgtctcggcgtacgggggttcgcccaccgctaccaccgcgtactcgtagccttcggcgctcttggccaggtcgtccttgtccgggcgctccacgtagtccaccgacgtcttcttgtccaaaaccttcttgatggcctccaggatcgtggtgccgacgccggtgaggttgttgcccctctccccctgccacttgatggtccagccgccgcactggctgcccaggtcgtgggcgtggctgccggcgacgaggatcttcttggccgtcttgggcagcggcagcatcggcttcgcctgccccttcttgctgttcttgagcagcacgagcgacttgcggacggcctcccgcgccagcgcccggtgctcctgcgcgccgagctccttggtgaggcgcgggtccgggagcgggtcctcgaagaggcccatggcgaacttgacccggaggatccggctgacggcgtcgtcgatgcgctccagcttgatctgcccctgcttcacctgcttggccaggtcggcgacgaactccgggtagtcgtaggggatcatcaccatgtcgatgccggcgtggatcgtctccttgatggagtggtagtagtgctggtgcggcgggttcgtgatgcggtccacggcctgccagtccgtgatcacgaagcccctgaagttcaacttgttcttgagcgtgtcggtgatgaggaacttgttctcgtgcatcttgaccccgttccagctggagtaggagatcatgacggaggatatgccgttgatgacggcgttgtcgtagggcggcatgtggatccgcatgaggtcgtggaagctcagcaccgtgttgttctcgttgatgcccctggtggtgccgccgtcgccgacgaagtgcttggcgcacccggccaccttcttggccccgccgacgaaggggacgcccttggggtgccccgctgggacgtcgccctgcaggccggccaccatgttggaggtcatgagatgcaccagcctagtgtcctcgctgaagctctcgtagcaccgaccccacctcgggtcacggcacaccgctacgcatggcgcgaaagtgtaggggatgccggtggccc

SEQ ID NO: 5897 - DNA, 336 bp, Zea mays
  Clone ID: MRT4577_10536C.1
atctcgcccagcagggcgaggggcggcaaggggcagagacgagcacaggaccagagcagcccgcagggccaaaacccgggggagagcaaaaaccgcacaccgcgcacggcaagggagccaagagccaacaacgcccaaggaggcaggccatcacagaagggcgaggtcgggcacaccaccagcttggacccgacaggcaaccggacgacggggacaataccggccaagatccgaggcctcacggacctgagcgggctgaacctgactaccaacaaggtctccggagagaccccaaacgcgtgtaacaacaacacgaccaagagcagctcgggcggg

SEQ ID NO: 5898 - DNA, 800 bp, Zea mays
  unsure (1)..(800): unsure at all n locations
  Clone ID: MRT4577_105370C.1
gggtacctcgaggccggccggggtatgttcaaaacgagcggtgccgacgtaccatgtcctgacgagtcgatccgcgcgcggcagccctgaagagtcaccctggtcccaaagaaacaagcgagtacccagagcagccgaccctggctagctctagcttgtgtagttgagttcttgtattggcttgaatctgcaaaaaaaataactagagacaaaaggaggacgggaaacggagagaaggatcatggactacagcatgcagggatccaaggactcgtactcgccgcaagttcacaaccacttgtacccggacgctcagccagggctgtcgtatcctccgccgccgccgccgacggcggcggcgatggcgaacctgccgcaggggggctacggctaccagtaccagggctaccttggcgaagcggcgaacccccctcctccttattactacactggcactggcagctggcccgagcagcccccagctccgtccgacggcgccccctttcgctaccgctaccagcaccaggacgacgccgactgcatcaccttcctcagaggatgtcttgctggtctgtgctgctgctgcttgctggagcgatgctgcatctaaggaggatggcgtgcagtgctgctgcctggagcacgcatgtatcatgtatgcagcagtgtggtggtgagtggtgacataanaataataataataagctgctgcggcagcagagatgacggttcctgcgttgacggcgccatccatgtaaaaccaaggagcagcttgccatcattcatgtctctcgtcgtcc

SEQ ID NO: 5899 - DNA, 426 bp, Zea mays
  Clone ID: MRT4577_105371C.1
gaaaaaaaccaaaataaatcacccaacctttttttgttaatacatcctattacaaaaaccccccctttaaatttgacccttaccttctttaaaaaccaatcaacaaaaaaatttttttaccataatcctacaactgtccctacatatatatttggagcctttcttcctattgtgtaaaataaacttttcacaaccacaaaaaacctcccttaacaaacaaaccaaaattaaccttctttatgaaaccacctttttttttattatccccttttcccatttttcaatttccctaacttaataattcaactgttgggcttgtccctcctctaaaaactcaacattgaatttgtggttctttaaaaaatccttttatctttgccaaacctttttttaaaaaccccaaagacaataatttcatccttttaa

SEQ ID NO: 5900 - DNA, 359 bp, Zea mays
  Clone ID: MRT4577_105372C.1
cccacccatgcgcaagcccaggcccggacgaaggccaggaggaaaacagtatttttaacaatgtgaatggggacgtgaacgattacattgaccaggctgctaggcatgctgagaggtatgaggatatggataaggatattgagactgtggatatgactgagcatactgaagagctgactgaccttgtgcgtgacctatacactaatgcatacaagactgtgattgctgcatggcgcactgtatgttgcattgaacattacgttgaacacaaggaggactaccagcatatcgacctgcttgtggactatatcaaggagtttcatgctaagatcaacgctgtactgaacagcatctgggat

SEQ ID NO: 5901 - DNA, 874 bp, Zea mays
  unsure (1)..(874): unsure at all n locations
  Clone ID: MRT4577_105373C.1
ctcgaggccggggaaacatcagaagctgtagacgtactaccaaagatcgatctcaaaacaaaagggtaataccattaccagctagaagatgtccctgacgacgcctgcagtttgctccgtcaacgatgtgcaggggctgctgcaaatggatgccaccgccttcttccacccaagtctgtggggcgatttcttcgtgaaatacaagcctccaaccgcgcccaagcgtggacacatgacgcaaagagccgagctgttaaaagaagaggttcgcaagacgctcaaggcggctgcaaaccagataacaaatgctttagatcttataatcacactgcagaggcttgggctggaccaccactacgagaatgagatcagcgagctgctgcgctttgtctacagcagttcggattacgacgataaagacctgtatgtagtctcgctgaggttttatcttctgcggaaacatggtcattgtgtttcatcagatgtatttacgagttttaaagacgaggaagggaacttcgtggtggatgatacgaaatgtctcttgagcttatacaatgcagcgtaccttaggactcacggggagaaagtactcgacgaagccattaccttcaccagacgccagcttgaagcttatttattattagatccactggaaccagcattagcagatgaagtatctctcacccttcaaaccccactcttccgaaggcttaggatactggaagcaataaactatatcccaatatatgggaaagaagctggacgaaacgaggccatattagagcttgcaaagtgaaattcaacctgctcagcttattactgtgnagagttgaaagaggtacactgtaagntatccagactctgatgaact

SEQ ID NO: 5902 - DNA, 274 bp, Zea mays
  Clone ID: MRT4577_105374C.1
cagctggacatcgacaacccgcagagcatccgcgcgctgcgtgactttctgcttcaggagtacggaggactgaacgtgctggtcaacaatgcgggcatcgccttcaaagttgttgaccccacccccttccacattcaagcagagctgacaatgaaaaccaacttttttggtacccaagatgtctgcacagagctactccctataataaagtcccaaggtcgagtggtgaatgtatcatgcagcgtgagtctcagggccctgaaaagctgcagcc

SEQ ID NO: 5903 - DNA, 354 bp, Zea mays
  Clone ID: MRT4577_105375C.1
acgcacgtgtcctccatccagtgctccgacgtctgacctgcacaattagtccagcttcgctcgggtacctcgactatgacgatcgcatctgtgaggtcgagcgcccttccgggaagtatggaaggaagaaacgagcggatctgaacacaggaatatcatggagcatatgggctcttgctggttggtatagagtttctacctagggtgacgttgacggagcgcccactgatgcccaacattgatctacaggtgtgcactgtcaaccaggcactacctgcccataggaacaaccaccttgtgaccgacaatgtctctgagctggagacgctgatgacgcacaacataacctactgg

SEQ ID NO: 5904 - DNA, 567 bp, Zea mays
  Clone ID: MRT4577_105376C.1
gccggccgggctgcgatcacttatcatccccatccgcacctctctccatctccctgctcctccgcctccttcttgatccagccaagccagggatcgccatgtcggactcggaggagcaccacttcgaatcgaaggccgacgccggagcgtccaagacctacccgcagcaggctggcaccgtccgtaagaacggcttcatcgtcatcaagaaccgcccctgcaaggtatatgtgtgcgcagttttgggatcggctgtattccattgattagtgttgacccgtgtcgttgtgctgtgaactggtgatatcgagatgcagttgtctttggtcatactgtgatagtactgttaagttttgagggttgatccaatctatggaggtggaatttgtgggacttggatgctagatatacctggtggctagaaggagactttgctattgccagccggagttatattacaagtaggcttttacagaataacagttcatctgatctgactttctggagaccagaaaaaatacatttaaggcctgtttgatttaaaaaaaaaaaaaaaaaaggccccta

SEQ ID NO: 5905 - DNA, 530 bp, Zea mays
  Clone ID: MRT4577_105377C.1
gttgtgggggtttttttttttttttttttttttttttttttttttttttttttttttttttttttttttttttttttttttttaaaaaacaaaaatcattttttcatgataaaacatactggggcccccacaactggtcctgggaaaaggggggggaacccccccaaaaaacccaactggtttaaaacacaaaccacatgggcttaaaactttgaaaaacaccctcctgggggagaccacaggcccaaaaacaacccagggggacacagaaaaaaaaaaactgggcgggttatgaggcggacaggcttgatctcgatctctcaatctccaacaatgggcacaaaaaaagaacgggactttatgaaaaactaaagggggggactccaggggccaaagctgcatagggccctccaaggatccaaagctcaacctccaaaccgaaaccggtttcaggggtgaatgaaccgaaaacaattggttttatgaatatcttccggggcaaattaaattctgggggcatttgggtaacc

SEQ ID NO: 5906 - DNA, 602 bp, Zea mays
  Clone ID: MRT4577_105378C.1
atatcacactccatgcgcatcaatcatactattctgagtagttgtcgatctcaatgagattgagatgcgtgtcagccccatgctacagcttgcagcaaagcacgccaagcaagacgacagtcctctacatcttgctaattctgctggcgcccttgtgggttgaccccatctccttggcaaggttgcggagcacgtacttttggatcttgccggtggaggtctttggcagctcgtcgcgaaacaccaccgttctcggcaccatgtagtgtggcatgcgctggcggcaccacgcgatgacatcggcagccgtcgatccctcctccttgaggctcacgaatgcgcacggcgtctctccccagaaatcgtccggccgtgccaccaccgcggcctcgttcaccgctgggtggctgtacagcacggactccacctccacgctgctgatgttctccccgccgctgatgatcacgtccttggaccggtcgcggatctccatgtacccgtcaggatgcatcacgccgacgtcccccgtgtagaaccacccgttgtcgcgtatcgccgccttggtggccttgtcgtcgtccaggtagccgagcatgacgcag

SEQ ID NO: 5907 - DNA, 333 bp, Zea mays
  Clone ID: MRT4577_105379C.1
ggggcaacgcccctgcaatgtactttaaagcacatgaatgcgaaacggggtttccaccagttccctgcgaaatgttaattggagcacgggtacacaacaaaacaaaaaaatgggcatttgggaaattggcaggcgagactagaaaaccaaaactttggatacaaatgcaagggagcccccacccccaggcacaaaaggaactttttcctttcctgggttttccaattcttctaaaaatttttcttaagagtatgtgcaggagccataacttgggttggactgcacaacaagggcggagtttttgaaataacaatttcaggggggcctgcccct

SEQ ID NO: 5908 - DNA, 324 bp, Zea mays
  Clone ID: MRT4577_10537C.1
gctatgtgtactgctaggagcaggatcattgaaagctccatgaatggtgtcgaattgtgcattgtgaacactgatgttgaggctatgccgatgtgacccatcgaaccagataatctggtacagattggctaagagttgacacgtgttctcggtgctgctgagaacccagacatcggcttgaacagcattcaaagacatccaggagttggtagaacacgactactgatggtgccaatatggtttttgtgacggctggaatggtaggcgggacaggcactggtggaacacctattattggagggattgcatagtccatggtgcata

SEQ ID NO: 5909 - DNA, 712 bp, Zea mays
  unsure (1)..(712): unsure at all n locations
  Clone ID: MRT4577_105380C.1
tggtacgcctgcaggtaccggtccggaattcccgggtcgacccacgcgtccgcccatatgtccgcatgtatttattaccagacaagagacgctcaggaagaaggaaaacacatgtatcaaagaagacattgaaccctgtgtttgatcagagcttcgacttcagtgtttcgctgcctgaggtgcaaaggagaacattggatgtggcggtgaagaacagtggtggcttcctgtccaaagataaagggcttcttggcaaagtgctggttgctctggcatctgaagaactcgccaagggctggacccagtggtatgacctcacagaagatgggacaaggccacaggtgataacgtagctacgctggacgtaggtctatttttcagtgtatcacgtggcacctcaacatggaacacaccttctcgcagatgtaccaatgctatttttataattttaagtattgagttatacataccttaataattttataaaacttggcattgtaggaaaatttggccaatattattgttgaatctccctgttgagcttcctccagtgcttcaccagtggtgtagtgatgtgtttcctgtgctatgtggagctctgtcagccgcacctgctggaaagcagatacctggacttgtttctgccttgtcctgcatcctggaggtgcactacaccattgaaatagatncttttnttatatatctacctgct

SEQ ID NO: 5910 - DNA, 625 bp, Zea mays
  Clone ID: MRT4577_105381C.1
gaaagaatgacgctgttagggcccttgatatatacaaaagggcaactaaccagtctgagagattgtcagaattttatgaagtgtgtaaaacaatacacatagcacgtggtgagaagttcttgaaaattgaacagcctccggcatcattcatgcaaactatggaggaatatgtgagggatgctcccgcgatgaaagataaggccatactggctatagaatacaacaaagagccagaggaggaagtcaagccaacttcaccgcctccggtttcagaacccgaagtggaacaagagccggagcccgaaccagaaccagagccagtaaaagaggaagcacctgctgctgaaccaacagacttgctgggtctgaatgaaacacaccctgctgtggccgagatagacgagaggaacgctctagcgctggcaattgttccaatagatgacgtgcccaaggccgctcctgcttttgaaaatggagtcgcaggctgggaactggcccttgtcactgcacccagttcaaatgaaactgctgtcgcttcaggcaaaaaattggctggtggactggacttgctcacccttgacagcctatacgaagacgcgaaccgacgagcgagccagcccgcaag

SEQ ID NO: 5911 - DNA, 1275 bp, Zea mays
  Clone ID: MRT4577_105382C.1
gttattggtttccttgaggccggccgggaccgcggccgttgccttgtcgcgaggcgtacttgcgtttagcgtctcttccctgctgccatctctgtccggagggcaagccatggcggcgggcggggacggcgtcgctcgccaggcggagctccgccggatcgagggcaacatctgcttcaagaaggcgcgcctcggcgccgccatcgactgctacaccgaggcaattgcgctctgccccgacgtcgccgtctactggatcaatcgggccctgtgccatttcaagcgcaaggagtgggccaaggtcgaagaggacagcaggagggctcttgcgcttgattacactttagtcaaggggcactatctgctggggtgtgcgctactcgagaaggaagaatctgctcttgctatcaaggaattcgaaaaggctctaactctcttaaagtctgtggattcaacgtatgaaatggctgaggacatttggcaggtccttgcaaaggcaaaatacttagattgggagaagcattccactgaacgactatggaggatggaaagtttgaaggaagcttgtgaaactgctctgcaggagcatcactttctaactggtacacttgaggaagactccaacaggtcagacaacgagtattcagagcaaattaaactactatcagaggtcttcagccaagcgacagtcgccgatacaccaacagatgtgcccgattacctttgctgtcagataacattcgagatcttccgagatccagtgatcacaccgagtggtgtaacatatgagagggctgtacttgttgaacatctccacaaggttggcaatttcgacccggtgacgcgagaacctctgaaggagcatcagctggttccgaatctggccatcaaggaagcagtgcaggcctacctgaaagagcacagctgggcccacaagttgaactaattggatgccgtgtgctttgctgactgcagatgctgataaatcggggatggcctgttattagagttagattttatgttgtgttggaatgagattgattggatagctcgattcatcgttcttagtattgattgggtaacttgacctgtaactgcaattctgcaaacactcattggatggatgtaatgaagcaagtgtacatgaaacattggttggttcagctcactgcatgtatatggttgcagcattatatatggttggtcctcagcccagtgaaaaaaaaaaaaaaaaggcctagtaaaaaaaaaaaaaaaaaaaaagggcgaccactc

SEQ ID NO: 5912 - DNA, 154 bp, Zea mays
  Clone ID: MRT4577_105383C.1
cttccggagtgtccggcgattccctggctgccgcaaattgggggggacaaatgttcgtacgtgctccagcgggaaaggagatcatgatgtataattcacagatgcatatggcagtgtttgatttccccacatttgtcaagagcgggttacacgc

SEQ ID NO: 5913 - DNA, 392 bp, Zea mays
  Clone ID: MRT4577_105384C.1
cgtccggaatccagtggcaccattggggcacttttggcggccaaaatatgccccatccttaggcacctggctctttctgaatgtgatgctaacgcgaccatatgtccttaatactaacaagctcctatagctgcccttctgtacgcataccgtccatcaatgaccgcttcagtctgtgaaaacgcagcccgtcaacgctacatgctccaacaagcaatggcaacaagcaactgacctttataacccctgttctttcaacaatcgccagccctatctttggtgcagtcattggtacaaaccatgacggcacagacagctgcagtagactcgtgctaccagtgatcagccaagtagctctggcaaacctttctccctactctcagcaacaacaa

SEQ ID NO: 5914 - DNA, 282 bp, Zea mays
  Clone ID: MRT4577_105385C.1
gaccaatcgaattggttgccgcggcaggagcatccgctgcagacggaggaatgcgaggcttgcacaaattagtggatggatggatcaagatctgtccgtgatggctgcaacgtccacgagggtgatcagactaatagttggaggacggaggacaagaggatgtatgcaagagggaacggcgaatctcctcacatcgacacgggcttggcatcatcggtccatctgagctgttcgtgcataccttaagttattgttctgcgaggacttactctgctgcgctat

SEQ ID NO: 5915 - DNA, 309 bp, Zea mays
  Clone ID: MRT4577_105386C.1
agaaggcccattatggtcccaccattggcggccaaaatttttggcctcctaaggctcctgggcctttttgcaggggctgttccggcgcccattttcccgaatggttggcaggctccattggcttccttttttccccggaccctttaaccagcggggttttgggtttgggaaaccccaatttttaaaccttccaggtcccaccaggcaatcccagttggcatttaacctttatcacccttgttcctccaacattaatcagccctattacaccagttaccttgggggctttaattggcccaaaacattagg

SEQ ID NO: 5916 - DNA, 388 bp, Zea mays
  Clone ID: MRT4577_105387C.1
aactctgaatagtttagtttatattggcagtcgttcatgacaaattaagcacatatatatagataggtagagggtcgcataactgcaacactgattcttctcttgagtagattaattaattatcctctcttctcttgggggatatgatgcagcatgcatcccatggcagatagatcaactccagctgctgtaaggcggcccctcctcgttgtcgtcagggcggtggcgagtttcctggagaagatcagattagagtcgcatgcatgcatgcactgtgactgagatttaatttgtggcatatactggaaggcttgcttggctgttgcagctggcaagaaatgttgtgtacgtaccgctgctggagtgaaggtgagcgcgagcttgacct

SEQ ID NO: 5917 - DNA, 115 bp, Zea mays
  Clone ID: MRT4577_105388C.1
tcgaaagcttgtccttgattccaagttccatctatgagaacttggacataggatattggacgtcattactttgaagaaaaagccaagctctagaagtttgccaaagattcttgcc

SEQ ID NO: 5918 - DNA, 344 bp, Zea mays
  Clone ID: MRT4577_105389C.1
gtgcatctgatgactccggtggcaggccctatagagggagggagaatgggcgtgctcagtgccagcagggagggtgatgtgatggcctgcactgataactcctgggggaggtcgcataagatgcgggagaatgctacactcatatccagctacgatcacgatgtgatgacagcctcaggcatatcctgggcgaacaagaaaacgaaattctcaccgatattttgggacaggactagcccaaaacccccacattctaatgcattcagggacacaaaagctgtggaacctgtgccttctaagctccctacgaccgcgacgctgcctgcacaagaccacatcacact

SEQ ID NO: 5919 - DNA, 453 bp, Zea mays
  Clone ID: MRT4577_10538C.1
aacctcacaagggttcaagccctactggtgcaaaaaagttttggggcccacacaaagggcccaacggggcccttaaaccaacgaagccccaaccccgattcatgacccacaaaccacaggtgtttattaaaccacgaccacccaaatccccaggtacagcagcagcttaaaagaaccatgggttactgacccccacgggggcggagccccagggggagagggccccccttctggagggtggaatctgctagggggcaaccatcccccaactgtttgccaaaaaaaaacaaacccttctggtctggggggaacccctctttgccccggaactttgccctcaccttggcaaggggggcggagccttaaacccccaggggtatgggcttcccagacaagggcttcacaaaaatatgcataccacctcccaagcggaacaccagggggagggggccc

SEQ ID NO: 5920 - DNA, 519 bp, Zea mays
  unsure (1)..(519): unsure at all n locations
  Clone ID: MRT4577_105390C.1
cacgcgtacgnaagcnnggatcctcnagagcggccgcgggcgacggcgggcgcggcggaaggcggcgcgcgcacgcgcgccagcccgcgccaggcccgcgccgccgggncgaaccacncggcgncgcgcccgaacccgccccgccgcgccgngcggnacccgcngacggccaggaaccggncgccggccacgggggccaggccgncgcacccggcgcgcgccaccaacaagnccggcagcgggncccaggcgncggcccccgcgncgnaggccccggccgncnngagcgcgnncnngngccngncgnggccccccgccacgnagancccgccgccggccccggcgcacgcgaagaaggagcgcgccgaccgcangggcgcgccgngccgncacccgcccgncgccgcgnccagcacgngcacgnccgccacgggcccgaagcccagcgggncccagccgcccagcacggccagccggggccccaccgccgggcaacgggcgaacaccggcaccacgggc

SEQ ID NO: 5921 - DNA, 404 bp, Zea mays
  Clone ID: MRT4577_105391C.1
gaagtgcttgcgcctgaatatcgcacatgtttaatccaataacttggctggtgctgggggtactgacaacagcttaagacggatttcacatgacaacttcataggccatcgtggactctgcggatatcggctcggctctacatgcgagtccactgagaatcgctacataccgtccatctaaaacgctgacataattgtcatcactgtgcgtgaaatggtgatgctcctgatgatcttagtctctgtctgcttgtcagacaactcactggttgacaatgacgacagtgtgaacaacccagagatcaacggtccatgcatgatcgtgatccttcatatgaacatggctcttcacgacttcgacgatataatgaggacgactgagaacttcagtgagaaatgcatca

SEQ ID NO: 5922 - DNA, 318 bp, Zea mays
  Clone ID: MRT4577_105392C.1
atcaaggacgcccgtatgttcggaattcaaagctctactacctttactaccgccagccgcatgcctctggaccaaagtctgctgactcctataggaagactctgtctgtcgatagtttgggatacctggtttcacaggaagaagcgcatgtatgccatctataatgactgcttcatgtgccttagacctgtgtggcggggcctggttgctctagatcgggggtggtgatcctgcttagaccatcctccccgttgttattggtgccgctgtgcgaccccttccggctgggtgcggtctccgtgcgccgctgccccttct

SEQ ID NO: 5923 - DNA, 169 bp, Zea mays
  unsure (1)..(169): unsure at all n locations
  Clone ID: MRT4577_105393C.1
tatactcattcccttaatgtgtgttggncacttaatcaccaaaatcttatagaaatggcccaaggccacatttccctttcaatctccccctttttggtgatttatgccaacacaataaaaagcaactaaaagaagtgcaacatcaatgtaaatgagagcacaaatttgt

SEQ ID NO: 5924 - DNA, 639 bp, Zea mays
  unsure (1)..(639): unsure at all n locations
  Clone ID: MRT4577_105394C.1
ggccgcgggttttttttttttttttttccactactaatctagtaatatagtatagaaccaagaccctttctagatgtgtataataaaatatagcaaacaaaaggaggaaaatgctaaatgtttatacgaacaacagggaaacaaataacctctagacaacttcgtctacgtatccttcttctcggccttctccgcagcagccgcagcagcaattctcttcttggccatggtgttgaaaaacgtacccaggcagaaacccaccaaactaaagaacggcgcaaacatctccttgggcacaaacaagtttgcagaggtcagcaatatggggtgcagcgcgcacattccctttgtcatgggaaccagcccagcgcgcactgcaccgcggacttggtcggttgtcttggcgccggcgatgatggccatggaagcgagatagactgtgttttggatagggaagaagaaaatcacggtgatgagctgctggagtagaatcttgcccggcagttgcttctggaccatggtgnngaggaaatgcgttagcggcgcggcgacgcaagccccgtaaaaagccatcttgggaacgcgcgatgtgattgctgggccgtancccgggcgggcctaggcaaagcacgatgctac

SEQ ID NO: 5925 - DNA, 304 bp, Zea mays
  unsure (1)..(304): unsure at all n locations
  Clone ID: MRT4577_105395C.1
aataacatcataattgatataataaatataagtatcattcaatatgtcatgaataagcattgttaaataactcatacattattgcacactaaattcaaactaaaatactaattgaaaaacttggtcaactgtttgcgctaatgttgattgtaagtatatatgaattcaagtttccacacttgtacggccaccaaaaattgagttccattccatcttttcctagaaagtcatggtagatttagttatatgaagcaccttcaacccttcatgaatgaggtgttagacattggntcgatcatgcagg

SEQ ID NO: 5926 - DNA, 291 bp, Zea mays
  Clone ID: MRT4577_105396C.1
aaggaacccgagagggacaggaagaaggtcaagaacatcaagcacagcggcaacattagcctcgacgacgttattggagaacgccaagaccatgccgaacaaggccatgggcaaggggttggccgggaccggcaaggggaacctggggacctgggttagggttgggtgcacccgcgatggggagggccccaaggacttgcagcaggagatcgattattgggagggtgagaacccatcagtttaaaggctttccacctggaaatattcggcccctttaaaaggggggttttg

SEQ ID NO: 5927 - DNA, 455 bp, Zea mays
  unsure (1)..(455): unsure at all n locations
  Clone ID: MRT4577_105397C.1
gcgtccgcggacgcgtgggcggcgcctctgcactagcatgcacagcagcggcgaggcggggcggggggggcttctactctacctggcccggccggccgccgtgcaggcgcaccgatccaatcctcggagctggcggagtctccggccgcccggcgcccgatgctgcccgccacccgaggcagcaagccaccgcagaggtccgccgccagatcctgctccgactccttagtccttatcagaagtcatggacctgtcgtcggacccgaagcgcaagccgcgctgcctcagcaaggtggtcatgctcgcgctcctcatgagctaagttgagtttatactttaggcagttcatgagctaagttgagttttagccttacaatcagtttgcgtcaaacattntgtataacagtaagctagagagtagctgctatagcaagcagctacaactacaaacaaga

SEQ ID NO: 5928 - DNA, 1286 bp, Zea mays
  Clone ID: MRT4577_105398C.1
atgcaacccctgaagagcacggcgctgcccggagcaggatgcgtgtaaggtgtaactaccgcctactgcagctcaggttgtcgctcatagtcttctcttctgccgtccatccggcctgcgcgctcgctctcctgctctcctgcgccaactgggcgaccgccgacgccgacgccaacgccgacgacctacgccaggtgctgggatttttgtcggttccttcggcagctttcgtcgcgtccttcgccggcgacgagcactcaccaggtccgctcctgaagaagactgggatattttgcatacacagaggatcatctgtgtagaggacattcagttttctccagttctccagttcctggatagcaatggcaaatgagtttcctgatgaagttcttaagtctgttttcccattgctggatggtaaagatctagtattctgcatgcttgtatgccgtcaatggcatgaaatcgcaaaggatgattacttctggaaatgcatttgctcacggaagtggccgtccatttgcaaacagcccccttctggcgcaaactacaaaaagctttacttaaccttctctaagccacgggagatgcagaacctccctgtgccaaggcttacattcgaggatattgttttctatattgatatgtggctcgaaggatcgctcatcttttctcaagcagtttcaggccgcactctccgagcaggcctacagggcgctccccctcctggcattccagatatacttgcagcacatttgagttcccaagactgcatcttgatgctggaagtggagcccaagttgggcagttcccatggggccagccatcactgtatctgtccttgccaaccgcaaggattcgaacaagatggcttgcatcataaacaagtcaacgttcgattacatcgacagtaatgcagcgcgggctctggcttatgagtatctcaggttttcgcccagacaccctttcacatccgacatccgggcatggatgtcgttacttttcctgtgcaaaggggcgaacaccattgaggtgtttggtatcgagctagatttctgtgacgccgcgaagtcagagaaagaaatcttgtggctcctagacatgcttgattggaaatagaagttccttatcccctttggggtttgacacatgtaaagcctgttcatggttagtcgttcctttcctgttggaccatgtacgctactactgaactacataatctcctgagaaaatgtaataaatgtcacctgctactccattttgctaacaaggcgaggttattttgt

SEQ ID NO: 5929 - DNA, 287 bp, Zea mays
  Clone ID: MRT4577_105399C.1
taattttttttttaacttatacaaaatacactataggtatgcgatagtacaaagtgtggttttgaaaaccaatgcactcaaacaggcctgaaaatttaagctggaaatacccgtgcgcctacatacctttgtgtgtcccacgtgtaatagcgcatcaatgacggaaaacatgaatgagtcccaaaagaatagcctataaattacatacgaccaatttgaagagagcacagcaaggaatttcagaaaaagactgaatgtcaagagagagaaaatcggggaggacacgg

SEQ ID NO: 5930 - DNA, 546 bp, Zea mays
  Clone ID: MRT4577_10539C.1
taatatataaggaaaaaaatgattggaaactgataaaaaaaaaaaaaaaaaaaaaaaaaaaaaaaaaaaaaaaaaaaaaaaaaaaaaaaaaaaaaaaaaaaaaaaaaaaaaaaaaaaatttaaaaaaaaaaaaaaaaaaaaaaaaaaaatttttttcaacttcccgggggggcttttaaaaagggaaatttttgaaaatttcaaaaaaattggggggggttaaaaatttttttaaaagggccaaattccccttttaagaagttttttaaaaattaattggccggtttttaaaaattttttaattgaaaaaacttttgttttccaaaattaaatactttttaaaaaaatcccttttttcaaatttgggttaaaaaaaaaaaggccccaacaattccccttttaaaaaatttgcaaaccttaaatggaaaaagaaccccccttttagggggcatttaaaccggggggtttgggtgttacccccaaaggaaacctttaatttttcaaagcccttacacccccttcttttattttttttctttttttttt

SEQ ID NO: 5931 - DNA, 1003 bp, Zea mays
  Clone ID: MRT4577_1053C.1
tacccacgcgggacttttttgtcgttgtggactgcaggatctctggggacagattttaaagcacagcttgttgaaggacaagctcaaattaacacccttcagagtgaggacagtggggtctttgttggtattgaggatgccaagagccttcagatgactgaagttttctcctcgaccatttcgaccaatatggcctcgcttatggaggtgtttgcaggaggatccttggaaatgaaggtaatggagaaagttggatgccagaagtactcggctacacagtgggaatcagataaacccaatgagtatcaacgacaaatccattacaagttcagcaagaagctgtctcccgttggcggagaagtgacaggaacccagcagaaatctcttatgcctaataagaaaggatgggttatcgaagaggtgatggagctccaaggagtccttcttggcgacttctttacgctccacatcaagtaccaggtcgatgacctcgctcccaagcaaagagcaagcaatgtgcaggtctccctgggaatcgagtggtcgaagagcaccaggcaccagaagcggatcgagaagaacgtcctttccagttcgtccgcccgcctaaaggagatgttcaaccttgcgtcgagggagctctcgcacgccagataggcggcagagcgtaatgacctttcgacgtctcacccgtccctgtgcataaaaacaacaggaccgatcattgagtgaacatttaacacccactaactgtacatggaaagcttggctgaagactgacagacagcaacaccaagaagaagaggaggaggtactgtaggatagctcgatagacaacgatatagttgtatgttctgcttgcaagttgttctctctgcttgtagcagtatgggttgccctcaggtaggctctgaatgattctttggtcacaacacatgctggaattgtacacagtccacgtccgaggctcaagagatggaacaaagctatgaagtttacagcc

SEQ ID NO: 5932 - DNA, 290 bp, Zea mays
  Clone ID: MRT4577_105400C.1
atacttaatacatttagtgtgtggacacagggtttatttctaactgcctcaaacggtgtgcatacagagacataattgaaactacacggacgaggggaaaggggagctaacaaattcggtgggaacgcaaaacaatttttgacccaaaagggataaggcggattgcccatgtgctaataccaatgatacgagcttcgcgcgtgataacactacacataattgtattacaccccaggcttggcttgaaccaagcctcagaccccccacttttgcacacgggctgaaggatt

SEQ ID NO: 5933 - DNA, 489 bp, Zea mays
  Clone ID: MRT4577_105401C.1
aatcgctaacgactcacacaaatcgaatctggaaattcttcccccaatccgtcccaaactcgcctcctcacggccgccgccgccgccgccgccgccgctgctcggtaatccctcatcctccccacctgtccgctcgtcagcgtcatgtccggcaccaccccgacccctacacctacaccgacgccgctaccgccgccgccgccgccgccgccagccgctcgccccgcacggtacgacttcctcaactccaagccaccgcccaactacgtcgcggggctcggccgtggcgccaccggcttcaccacccgctcggatatcggaccggcccgcgccgcacccgacctacccgaccgctccgcctacgccgccgccggcggtcccgccgtcggccggagccgcgggaagcctcccggcgaggatgacggcgacgacgacggcggtgacgaggagaagggctacgacgaaaaccagaagttcgacgagttcgag

SEQ ID NO: 5934 - DNA, 283 bp, Zea mays
  Clone ID: MRT4577_105402C.1
agtgagtcgtattagcgaccaactactgcgttgtctcgcctcatccaggttctcgaacacaattgcgtggagccggagcgcacaccgcgctcacccacctcacaaggagacgtatctagacattccggcggtcgatccatcttcccgtcgatggagagcaaggaatagtcgatgtacaggggagtgtgacgttaggatgaggaggagatgttgtgtccgtcgagcgcggcgcaggttgcctcgttgcgtcgcaggcggtgcggcgtgacagtggggaggaatg

SEQ ID NO: 5935 - DNA, 729 bp, Zea mays
  Clone ID: MRT4577_105403C.1
ccggaatcgttccagctaatttatgtaagttttgataagttggaatgaattctggtctaatcctggacaaacgaacgggcccttagccgtacaataccagacgtagatagcataacgatagcacaatgcgcgattgtgccgaagtcatcagagaagagagaatcatagctgttagatgatatcaccaagtcttttgcacctacgtcttgtcagcgagaacattttgggtttcgaacaagacagacttcctctgtgtgtaaaaactttgggcatacccccctcttctcatctccattggtgagattggtgtgtacatgctattgtagttcagagttcagacagagtgacacggatatcagagcagatcataagaacgtacttgcagcgatggaactgagattattttctatattctttggccactgaatgtgcttcaaatgacagcagcagcaacattttgtatgtatcaggagaaggacgcactcctggtagctcatgtgtaccattttacaactcagctcaagatgtatgagcctgtttctttgcctgaactaagctgcctacggcctggtaggattgagtagagccggaatattctcaaacaggtttggtgtgaaaaaaattgttgtaatctgcgagttgtgggaaaagctgttgtgggctgtgagctattaaaaaactaaaaattgtttggtcgaaaccactaaaaatcgttaaaagttcttcgat

SEQ ID NO: 5936 - DNA, 772 bp, Zea mays
  Clone ID: MRT4577_105404C.1
ctctaattttcacatgctttttcctaagatctgtatcagggggagctttccttcatctctaaagggggagaaaaactctttctaaaggagaatactcatttagggggagtaatcttttgaggacaagcttttatttacttcctacatgcttttaatgtcttccttttcggtggttgatgccaaagggggagaagtttaggggccaaagcaatgaaaactatatcaaacaccaaacaccaccaatttaaaattttatatctacaaatgacttttcaagtggttttggttatttggtccaaaaataggaagtaagtgaattatggagttagggggaggcttaagtccataatgtcacattgtggggacaatcatgcattctagcaagtagattgcactttttaattcaaatacttgtattatttgcttgctttggttgtgttgtcatcaatcaccaaaaagggggagattgtaaggaaaatggaccccgggccttttggctaattgagttttggtgtttgatgaacaacacaatccgtgaactaataaggtttctagtgtttgtgtttgtagttcacaggatgcgaagaggattggaccaaggcaatgaggatgcaacacctcaaatgaagacataaaaagatgcatagaagtccaagactcaagaacaaaagaagcccatagaaatcagcaaagaaacctgagaagagggctgtcagccagcgcctggtggcgcaccggacagtgcacagtacttggcggcggcccgcttatg

SEQ ID NO: 5937 - DNA, 245 bp, Zea mays
  Clone ID: MRT4577_105405C.1
cggggtatctccctggccgcggtgccctcttccttctccgatggaccgtggtggcggcgctctgccccttacgacggatgccatggccggtgcacgcatcccgacatttcggccaccgaaccctacgtggaccagcgctacacgatgcaggacatgatacgaatctaattgtagtgttttactgggacgggaacgatgatggcggctcagcgtccctctccacatgacgatgttggcgtcgagct

SEQ ID NO: 5938 - DNA, 429 bp, Zea mays
  Clone ID: MRT4577_105406C.1
gagctcctagtcggcggccgccctttttatttttttgtttatttttttgttctttttttttttttatgttgatcatgatggagaccaggaacaaaaaaaagcccgctttgggacgctgcacgacccagagggcccaaaaaaaaagttcccgctttcaaaaaccgggggtttttaaagggccggtttttttaaaaagacccacaccccttgcaaatcgaaactttgtttttttccaaagcccaagctttttttcttttgaatttttttaaaaccgggttttctagccccaaggaatttggataaaaaaaacctccccccacaacccagtgactctgaaaaccctgggtttattccgccgaaccgggttgccccaaaagttcttggggaactttgggggtttacccctggggtcccccatggccgggaaaa

SEQ ID NO: 5939 - DNA, 219 bp, Zea mays
  Clone ID: MRT4577_105407C.1
gtagacaaccgaagaagaagccgaacaggggggcgaattaaagagaggcagccgggaacgcaaaaggacggaagggaacgcagaaggcagagagccggggaacggggcaaccagggggcaaacgcaaaaagcgaggacgagcgccccaaaacagacaagacgagcgggagaggaacacagcaagagcacgcacagaagcgagcgccagaaggagaagag

SEQ ID NO: 5940 - DNA, 214 bp, Zea mays
  Clone ID: MRT4577_105408C.1
ccacatagtacgaccacgccagttttataaacacactatgataggcgctcaagatacaccttcacaacatgggtcccgaatatattaccccccctggccctcttggcccttttagggagcgcaacaattgcgtccattattccacagggctcacttgctctcagggccattattccacagtttccccccaccaagttactttcaatggggcttt

SEQ ID NO: 5941 - DNA, 637 bp, Zea mays
  Clone ID: MRT4577_105409C.1
ttttacctttctatgaagtatatataaacacaaagtattgaatcaaccatatgtaaaagtttgttggtgtcttgtcctcttattgatcctcaatgcttgctttcctcaacagcatctacaagacgctggagcgataccgcagctgcagctttgcatccgaagcatcagctccactagaggctgaattagtaatcttattattaccgatttcttcacactacttttagtgcatgtgtgtatgcattccatgtgtgaacagaagcatgcatttttaaagagtaaacacatcttcaaagaacacattacacatggcttaataattatttctggatatatataagagatatgttacgcacaataaataatataaaatgtagggagatgtttgactaactgtgggtagataatgtcttcattattaacaaaataataaacactatgttttttaaatgaagtcttaaagcttcgtcttcatgattaacaaaataatatatatgttttatgactgagtaataaacacaaaaaatgatattttacacattcagctttgttgtggctatgttgtataggatattctatctaataaataatgaagtaataatgctggcaagaggtactgatggacatataacacttt

SEQ ID NO: 5942 - DNA, 154 bp, Zea mays
  Clone ID: MRT4577_10540C.1
acgacattggccacttggatgcgaatggcctgtacgatggtcacttcaccacgtgaggtggctctgggtttgtccgagctcacggagaagatgacagatcggatgtcagggtttgacaaatgactactgattggatggaggacagaatcttgct

SEQ ID NO: 5943 - DNA, 350 bp, Zea mays
  Clone ID: MRT4577_105410C.1
ctccttaccctagccagcccctccggggtgttcgcctttttttttttttgtccaacactatgcctcgccgcatcttaagaaaaataacccacgcccaaaaacccttgctgctccaaaaaaaaaccctccacacccagcacgccaggcaccaactccagctcctccccgaaatggtggcggcaccatgttaaaaaaaaatgtgcccaccattgctcaaagaatagcgcctcccacaaaaaaaaccatggcacacacccgctggtgatgctggataacccccccccaccattcaccatgagactgatgcctaagaaaaagctgctgctgcccctgcccctccaatgatgaat

SEQ ID NO: 5944 - DNA, 416 bp, Zea mays
  Clone ID: MRT4577_105411C.1
cccacgcgtccgaaacttttaacttaccattactgatgcttggaggaggtggctacacaatccgtaatgttgctcgatgttggacatatgagactgcagttgcccttgattgtgagattcccaatgagttgccatataatgattacttcgagtattctggaccagacttcaaactgcatattagtccctcaaacatgacaaaccagaacactccagaatatatggaaaagataaaacagcgtttgtttgaaaatctgcgaatgttaccacatgcgcctggtgttcaaatgcaagctattccagaagatgctgttcatgaagacagtggtgatgaggatggagaagaccctgacaagagaatttctattcgagcatcagacaagcggatagcttgtgatgaagagttctcagattct

SEQ ID NO: 5945 - DNA, 290 bp, Zea mays
  unsure (1)..(290): unsure at all n locations
  Clone ID: MRT4577_105412C.1
atttattgtctcntccaaggtttgggtgttcattttttgtttcgtctaatgtcacctaaaacaacttttctataccaaacaccaactcaaacactacaaattaaacaaagcctaccacaatacacatatcgttactcattaaaaacagtactccacaaatacacaccgtaccaacaattccatttccttacattctctaaaccttcttaccataaaacaggcacactcctatacctgtcacctcattgcaagcacaaaattctatacaataactgttcataactaaaaac

SEQ ID NO: 5946 - DNA, 132 bp, Zea mays
  Clone ID: MRT4577_105413C.1
gccttttcgcatccgcagcctcttgagctctactccatccccttgaactcgaagcggaacaacagcagtcagggcggcatggaccccagcgcaacaagggcccgcgggaagggcaaaaaaggggccggccgg

SEQ ID NO: 5947 - DNA, 159 bp, Zea mays
  Clone ID: MRT4577_105414C.1
ggaggagctaattggggaggaccaaaacctcctgtttgtggaatacaaaaacgtaattggagccggccgcgcttaatggccaataatttcttcaatcaaccaaaaggaggagggccgaggcaatgaggaccgattaccactaataaaggataatcgggc

SEQ ID NO: 5948 - DNA, 617 bp, Zea mays
  Clone ID: MRT4577_105415C.1
gccggggttcagtcacttcgacgcaagcccgaccacagcaccacgaatgtctactccggccggcgacggcgaggaccccggcgcagggacgccggaagcagcagcgccattctctgccgactggaaggagcggatcttggtccccgtcgtggccgccggtgttgccggagctgggttcgggctggtgtcgcggcacagggcgcgccttggcccgatccgcgctgccgctacctatgcggctaacctctccatcgtggccggatgctacggaggtgcacgtgaacttgcaagagatgctcgagctacaacacctgatgacctcatgaattctgttgttggtgggctagcaagtggagctgttcttggccgaatacaaggtggtcactttggggcggtgaaatatgcagtcaccctagcggttgctggtactgcactggactacgccgcgatgaagctaagccctcaatggcgtgattggaaagagcatttgtccgttgatacgaaagactggtttactgtacccgaatggtcacctatccaagtgctcgatgaggaggccttggcgaagaaacgagagcgagaggagttgctgtttgctcagcaagcacttggtaaag

SEQ ID NO: 5949 - DNA, 282 bp, Zea mays
  Clone ID: MRT4577_105416C.1
gatatcctctcctatttagcttaggcctcgctccctggaaaaaatctcgccgtcgccgccgaagactccgtccatccccagccgcgactctctcttcctcatcttcctccctacgtgcggccggtttccccagcagctgagctgcatgctgatgcagctctgccctcttccagcctgcggtgcgcgatctgcatgtgcggtcgagctccgccttccatgctttccgcgccctctactcctcccagctggccgaggtccttcccatggcgctcgactctcccc

SEQ ID NO: 5950 - DNA, 346 bp, Zea mays
  Clone ID: MRT4577_105417C.1
tgcaaggcaaaatgcagcaccatcaagctaggcgtaaggaggaaaggtctacaaaaacttcatttgcgttctatcaactctaagaagcagaagctgcaacgtaactgggaagtatgacgaacaactcattcgactgaggggttgacatcccaccataaaacataacaacactgagagactgatagcgaacaggggacgacatgatgagatggtgtgtgttggactaggaagggagggaaccataactggagcagcacctgaaccgcgggccataaagaataaattcgccgttgaacattcaacctgcctgactggaatagatccacatataatagaaacgtgcact

SEQ ID NO: 5951 - DNA, 544 bp, Zea mays
  unsure (1)..(544): unsure at all n locations
  Clone ID: MRT4577_105418C.1
tcgccgcagaaaaattccagcgcacacgagatcaggnanaacgaaatcggnagcaggnagggacaaggnnacaagcagnngcagctanngccgcaaagnatgnnccgtgcatcncnnaggcgtccaagcccnncggcggcatttgccgcaccnnagcacggcncgnncgggcgggttctctcgnngcggcnnggcgtnncgggtgccgccggcggggagggtggcggcgcggccccgtcgnncggcgagggcgcgggnnggggatngtcggtngtcggggcgcnnnacgacggcgaaaggtgccggcggtaggggcagcgcggcacccactgaggcactgcggcggctgggtgccccgggcgggtgctgctttcccgcggtggtgnccagcacgtggtctggcgcccgnngcggcggctggtgttgggtccggtggtngggcggcggttttcgactcaagccgctagnngtgtacccaagcggnnttcgtggcgcatgcttgcgtcgcctgcttgnngcgggcgaacggnncggcgtggggcac

SEQ ID NO: 5952 - DNA, 1085 bp, Zea mays
  unsure (1)..(1085): unsure at all n locations
  Clone ID: MRT4577_105419C.1
aaaagtgaaagatccgaatgagatgggagcaaaaaccaaaaatacttagaacaatgttcagtgaatgcatggaataaggctcctagcagaaagcagccactgcagctgcggcgactgcgagcgtcgccagccacgcggcgctcctggtcccgagcgccgccgcggcggcctcttcctgtgcgccggtgtccgcatggctgctggagcccttggaggtagcgttgtgcgggagcgggtggacagtgatggcgaccttcatgccttgcaggcagaagccgttgccgcagacaaagtagtagcggcgggcggcggggagtgggatgaagtccttgccggaggtccagttgccggcgaccccagccatggtgcaattgtcgtaccccgtctcgttcacctcgaacacgttatgcgtccccttctgataccggaacgagatgaggtcgccgacgtagaaggtctggttgccggaccagagggagtagttgatgttggggttccacccatggttggccccaacgatgtggtccgtgccggcggagggaccaagcgcgaagccggcaagcaccgcggcgacaaggagccacgacattgcggctgcggtgcgagcaccacgttggggagacggccgtggttatgtgagcagaagagcgaagaggaggcagagagcaagtgaactgcggcggaagtgctgtcgtacagtcagtgggcggaccggcgtagccgcgtaggaaaggagacaggacacaggagcccggcagcagcaccaattatatcgctagtgtcagccccgagcccgactcgagtatggttttgctgcggagtgtgggtgtggcccgctttttttgttggggcaccacggatttcagcagatttggcgggaattgagccctttatacgcgccatgactggttccctggcgagtggctaggcccctgagagtcagttcgaacgtgacggactgctgcaaacagcaatgcagcaggcatctgccgagcctgagagaagcaacttcccaggtttctccatcccatggcaccctttcatttcatttcccncatgtacaccaatggcgaaatcacaaacgc

SEQ ID NO: 5953 - DNA, 711 bp, Zea mays
  unsure (1)..(711): unsure at all n locations
  Clone ID: MRT4577_10541C.1
tcctccctnacagctggagcggctcctctcttgntctctgcaactcgccggnccccngtttctctcccccnnntttcccnnaanccctcccacaaaaaaaatttaacnctacnatttcnncncccccnntccttggggcggccccctctnnntttttcctccctccccccccctcgctgggggctccccccccccccccccnccccnccccccnnnntntccccccccnnntnnntnnnnnnnnnnttcccctcnnnnnnttcccctccccccccccccccccctttnnnnnttncccccccccccccctcccgcccgcctcgccccccccctctgttgttttgcccccccccccccccgctgccccctcccgccccctccccctctccccctcccctccccccctccccccctttgggcccgccccccccgccgccttctccgcccccgcgcgccctgtgttcccccccgcggcccccgcccccccccccgctcgcccccccccccgcggtgtctctctccctcccgccccaccccccctccgctcttcccccctccgacctccctncccttcttccacctgcctccccctcgcctccccctctcatcccccccccccccccgccctcagcccccgcccgccccgcctcccctcctccctgncccctctacgccttcnttcttctccctccccntcctctctcccccccc

SEQ ID NO: 5954 - DNA, 353 bp, Zea mays
  Clone ID: MRT4577_105420C.1
ggggaacggggggggttatgccttgctgttttaaaaccccccggagggaaccggcaacattaacaggaccccttttcttattaaaggcgtgacctttaacacccctggaacaaaattggatttccctgcccacctcgaaaggcttttccccggatacaaaaaagcccaattcctccccctgaagaacccggtgggggaattttcacgggggccagggggcccccccccccaaaaggggtcctttttttttttgggcccccaaggggccctttcaacttaaaaggcccaaaaaaaatggtgcccctttttaagggggggccaaccctgttgatactctgaacaaaggccttttt

SEQ ID NO: 5955 - DNA, 291 bp, Zea mays
  Clone ID: MRT4577_105421C.1
gccggggacaccgagcagtccaagtccgccgccagccatcaagtatccgtgtccatctaggtctagcggtcgagccctacgccgtccaactgcagtggtccaaggtcgccgaccgacctcgtagcaggcaccagacagcacgcagacctcgccgccggtcgacacgacgacagcgacccaaggaatcgagcaacatgcctgataatgatgatatagtagacatggaattggaaagagaaactatgggtactgctactcaattaccgcgtgtggagaactggagagtagcat

SEQ ID NO: 5956 - DNA, 502 bp, Zea mays
  Clone ID: MRT4577_105422C.1
ccggccgggctacacacatcgaaccccgcgccgacgccgtcgtaatggactaatgaacaggcgtggccttgggtccaggttccttcattcctcctgttcgatgctcttttcttccgacggctatcggagaacaacaggacgaatcccattggacactgctagctctgcgagcgcagttgtgacttttttttatgctcccgttgttttccctagcctgcagggctatcgacaagttgtgtattatctgaatgaaggggcacgcatgggagcacaatcgctggcagcttaagaaagctcgccgcggaggtgaccccgctagagctggtgctctgcaccggcttaatcgagccggccgccaacgctctcggggaagacctgcacgtgatacaaactactgattagctacggtgggtccttgaggatccgttcattgacgccaaagctcagagggccagcgccagcagagaatattgaggcttatactagattgcacatgtgggta

SEQ ID NO: 5957 - DNA, 523 bp, Zea mays
  Clone ID: MRT4577_105423C.1
cctcgaggccggccgggccggccggctctgcaagttctaccacctactacgcgagcacgcgccggcgaatcgagatcggcatgtggccggcggcgacgatgttcgctctgggcttcctgctctgccccttccccgccctgtcgccgtcggcacgtaacctcaccgcgctgctgccggagctccgcgacctcttcggctccctctaccgccactgccggcaggagttcttcctgctggcgtctactcgacggcggcggcgtggttcgtagagggggtggcacaccgacggcgatgaatcatttcgtcgttagcaccgtttgttcaaatcctccgctgtaggacagttctgctctctgctgcagcgcatgtccggccctgtgttacttctttgtgaatgaacatccattcatcataagcaaaagcaacttcgttcaaaaaaaaaaaaaaaaaaagcgcctacagtaatgctgctgatatctgcctgtctagtttggccaaaaaaaaaaaaaaaaaaaggccccta

SEQ ID NO: 5958 - DNA, 430 bp, Zea mays
  Clone ID: MRT4577_105424C.1
ctcgccattctcagtctcaccttcgcttgcgtcgccatcgctcgtccgaattcgtcctcgcttgcacgagcaaagcaagcaacttgttcgatcgttcgcaaaactcgatccatccgctgaccgcgcgccgacatggggcagggcaaggaggtgaagacgcgaccggaccccgacgtggagatccaggagaagggcgagatcttcttcttctaccgacccaaagtgggcaaggacgaggcgcacggccccgacgacgtgcagcgcatgtacatcgtcctgcgccccgagtccggccgcgccgtcgaggagaagcaagcgccggactccggcaaggaaggccgcaagcgccgccggcagggagacggcgggcagggaagaagcgaggagaaaggcgtggaaagcggtcacggcaagcaggaggtgaacatcg

SEQ ID NO: 5959 - DNA, 211 bp, Zea mays
  Clone ID: MRT4577_105425C.1
gtgcaagcgacgtcatatctttcatatagtgtaacctaaatacacttcactgacctggtgaatacaacatcctgtctgagaaaactatgtcatgacgcaccttaattgtctggcaatgcatgatgttcatcgcaggtgcggtagtataaaagagacaagtacctatcgtcgttgcaaacaaatgcacaacctggctggcgattgagacgct

SEQ ID NO: 5960 - DNA, 1253 bp, Zea mays
  Clone ID: MRT4577_105426C.1
gttacattacataccatccaccaaacgatcaaaggaagatgggagcgaacatgatgtcgtggtcgatgcaggtggcgttggtggtggcgctggcgtttctggtgggcggcgcatggtgcggtcctcccaaggttgccccgggcaagaacatcacggccacctacggcagcgactggctggaagcgaaggcaacatggtacggtaagccaacaggcgccggccccgacgacaacggcggcgcatgtggttacaaggatgtgaacaaggcccccttcaacagcatgggcgcgtgcggcaacctccccatcttcaaggacggcctcggctgcggctcctgctttgagatcaagtgtgacaagccggccgagtgctccggcgaggccgtggtggtgcacatcacggacatgaactacgagcaaatcgccgcctaccacttcgacctggccggcacggcgttcggcgccatggccaagaagggcgaggaggagaagctgcgcaaggcgggcatcatcgacatgaagttccgccgggtcaagtgcaagtacggtgaaaaggtcaccttccacgtggagaaggggagcaaccccaactacctggctctgttggtcaagtacgtcgacggcgacggtgacgttgtgggggtggacatcaaggagaagggtggcgacgcgtaccagcccctcaagcactcctggggcgctatctggaggaaggacagcgacaagccaatcaagtttcccgtcaccgtccaaatcaccaccgagggaggcaccaagaccgcctacgaagacgtcatccccgaaggctggaaggccgacaccacctacaccgccaaataaactgtccaacagacctaacgctgctctgggctcggttggattggatcccaacttcccaagcaatgcattacacttacgcatgcatcgatccatgcacaatatctatttttttactgctgctactgctacgacaatgtcctcctttgtcctctccatatatagctagagtcaggctccgctctcttatattattattatataagataagaaataggagagagaggagagagagaccgagtacataataagtgtctaattaaagagagatttgagaggcctttattttgtatataataaagaatccaaggagtgaggcaaacagcaacaaaaatgcgttgtactgtccatggataaccatgtaatctcaattataccatgtctacattttaatagaatacacactttttaatgatt

SEQ ID NO: 5961 - DNA, 424 bp, Zea mays
  Clone ID: MRT4577_105427C.1
tgtttctctaatttttttcttcgaagaaaattagtctgtagtccatcctacactgaacgtgcttcactgcaagaaatcgcatgcgggcttcattcaaaaaaaaaaaacaaaaaaaaaaacaactaaaaaaaaaaaaaaaaaaaaaaaaaaaataaaaaaaaaaacttatctacacaaaagcaagcgctttcaacatcaactctttcttctatctttgcgaaactaattacttctaaaaataaactcacagactacaatcctaaacaccttgcatccacattatcaagcgcctacacctataacatctcacaaatagctttccttgttacatcactttttgccctcctaagagttttataaagtggatcatttatacgtgttcacaaaactcactaaaaaaaatataccttattcaatagatttc

SEQ ID NO: 5962 - DNA, 450 bp, Zea mays
  Clone ID: MRT4577_105428C.1
acgaagacccacaacactaattttaaaaaacaggaccccaattccaaacattgggaaaaaaaacattttgggggggccgggaaaaacaaaagccccaaaaacaacttttacgggggggattatccaaaagaaggggggagaaacaagactcaaaatattggggacacgaaactatataacagcaaaatacttggggggccccaaaggcaggcttaaatagaaccaaaaagctacaggttgggtcccaaacctaactttttgggtttcttgggcaccccaaaaaaaggagcgggggctggaaaaggggctgttggttttttggggcccggggccaacctttcctccctccaagaaaacttcctctaacgggtggccttggtttttgcacgctgggcccaaaacggaaaaaaaaggggtttttttttggccttttaagcctgggactggggg

SEQ ID NO: 5963 - DNA, 464 bp, Zea mays
  Clone ID: MRT4577_105429C.1
aactctgctctggcactcgtctaatcgaccacaggcggcggcggcgccagcgccgcgcagccatgctgctcgaccccaagtccccaacgccacgccacgccaccccattgccgctgcgtagctgccgctccagcacggcgcctccccgtcgcccgttgcccaactcgtcatgtggtagcctggtaggctggtagcccaaggcgcagggccctgtcactcgcgcgcaacttgctcgacggaatgccgcatcgggacgtcatctcggccacggccgccatcggcgcgctaacccgcggcggccgacaccgcgacgccctcgcactgttctcccgagttctcgccgatggcgtcgcgcccaacgagttcactttcggcaccgttctgcgctcggacaccgcgctccgagttcgagccccgcgcgttggcgtgcagctccacgcctgcgctgccaagctcgggctttg

SEQ ID NO: 5964 - DNA, 789 bp, Zea mays
  Clone ID: MRT4577_10542C.1
gtctcccctacggcttcacatccccatcaccgtcatcctctccggggggacggacgccggggcgcctccgccgccccgtcgccatgggcaactgctgcccgggctccggggatgcggagcccgcccccgctgcctccgccgatccctcctcccacctccactccggcagcttgtccctcaaggccggcgcctcggcaggctcggcgcccacgcccacaaagccgcccgcgcctatcggcccggtcctgggacggcctatggaggacgtgcgcagcatctacactgtcggcaaggagctcgggcgtggccagttcggcgtcaccagcctgtgcacgcacaaggctaccggggagcgcttcgcgtgcaagaccattgccaagcggaagctctccaccaaggaggacgtggaggacgtgcggcgcgaggtgcagatcatgtaccacctgtccggccagccgggcgtggtggagctcaagggcgcgtacgaggacaagggctccgtgcacctcgtcatggagctctgcgccggcggcgagctcttcgaccgcatcatcgccaggggccactacaccgagcgcgccgcggcgtcgctgctccgcaccatcgtcgagatcgtgcacacctgccactccatgggcgtcatccaccgcgacctcaagcccgagaacttcctcctcctcagcaaggacgaggacgcgccgctcaaggccaccgactttgggctctccgtcttcttcaaggaaggggaggtgttcagggacatcgtcggcagcgcctactacatcgcgc

SEQ ID NO: 5965 - DNA, 297 bp, Zea mays
  Clone ID: MRT4577_105430C.1
tttttttttggtggtttttttttttggggggtttttttttttttttttttggcccaaaactttcacaattttcattaattaccaaaaacctttcctaaaacacatcttttttttactatcaaccatttcaaaaaattttttttaatccaacatcccccctttttgaatcagtttcttcccctaaaaatcttttttttgccaccaaaccctttccttttaaaccccttttataaacgcatcaaacaccttaacccgttatctatttccctttcccctcttttctgaaaatctcaaccc

SEQ ID NO: 5966 - DNA, 268 bp, Zea mays
  unsure (1)..(268): unsure at all n locations
  Clone ID: MRT4577_105431C.1
cctataccttaggtctgggtccctttttcgtgtgtgggcccggaccacggcaacccatctaactgcaaaaaactcggggtgtcaccagacgcccaaaaactccccctcctgttcctnntttggccgcttcttataaggggccaccagcacaacatgtccactaggaaaagggcaaactcgcccctaagccaattgaggggctaaccccttctgattacgaggcacccaacccctcttggaaagtatccccttaactaaagcccccccc

SEQ ID NO: 5967 - DNA, 896 bp, Zea mays
  Clone ID: MRT4577_105432C.1
ttgggtacctcgaggacggccgggccgaacggttcgcgtagagccagtccgcggatccacacgaaactgcacacgacgcaggcactcggcctgccgtctgtccctttcgaccttcataggcgcacttctccctcccgctctcgcgccgccgccctcgtgcgtttgagcgagatccatacatccccatcccattttgcacccggattggcttcttcttctactactgtacagcacttcttttgtgtggctgcaaagttctgtaattctagaggagcaagatggagattattatcatcatctcacttgtcattcttttggcactaggagctctctttgtgatcccaaagtcacaaaataaaggtaaatcaaagagaaacgacttaggagctggaacgacatctaggagctttacgacagaagagatctctaaacattccacaagggaggactgttggatcattatcaaggacaaggtctatgatgtcactccttatgtagaggaacatccaggcggagatgccattctaaataatgctgggggtgattccacggagggcttttttgggccacagcatggcactagggtcttcgatatcatcgaggatttctgcatcggtcagttgaaggcttcatgatgatgacaggatagtttgtattgaatttgttacgggacataaatttgtgagaagctacattttatctatgtttgagcattgcgaccatgagcatatgaatgccagtataattgttccacaactgttattaggcctgccctgagctgtgatgtaggagctcgtttttttttctctgatggggcaatgtgagcatcagttcgaccactggttgttgtgcttgcacatttctggtggtggacaagactgaaacgtttttttctc

SEQ ID NO: 5968 - DNA, 272 bp, Zea mays
  Clone ID: MRT4577_105433C.1
ttttcccatcgaggcccggccgggccatgctgcatccacacaactgtctcaatcgtgttgcaatggcacatgtgaacccactactgcaaatcgcggtacctctcctcatcaccagttttctgccttccaaggcatccaataatatcccaaggagcccccctggaggtgagaacaacttcatgcctgcgatggtctctttgacttgctctgtcaatcatccattcatcagatggatgtcccaactaataaaagggactcactactaccatatg

SEQ ID NO: 5969 - DNA, 460 bp, Zea mays
  Clone ID: MRT4577_105434C.1
cggaaaacaaacgcgtctctacttgttgctgcctatcgcttttgctttgataaaagccacgcgtcccggccgtccattgctcgccgccgccgccgccgtctccggcgaccgcccgccagcttcgtcgtccatggcctctacaaaccctaaccccgcctctctctccgcgcccttgctctccgactccatctcgcccgcccacgccgccaacgggcacgcaaccaaccatcggcaccaccacgacggcgccgtcgcggcctccgtgtgcggcgacgcgggggacccgttcgtgttcctctcggaggatcggccgccgcgggaccgtgggccgtccccggccgacccgttccgcaacggcacgccggcgtggtgcggcggcgcgtacgcgtgggcgaggacgctgctgctcctgccggtcgcggcggtgcggctggcgctgatcgggctcgccatcgctgtc

SEQ ID NO: 5970 - DNA, 133 bp, Zea mays
  Clone ID: MRT4577_105435C.1
atgggcatttgagtgctctgacactgcttcgctcatgcagtacgatgcgatcgcagcgatgccagtgagcgaagaggcatcaagatgcgtccaatgagcgcaaatcaggcgtctatcccgagagttgggcgat

SEQ ID NO: 5971 - DNA, 400 bp, Zea mays
  Clone ID: MRT4577_105436C.1
ttttgtggcaaccttatctatatatatatatgtgctaatcacacacccacacattgtacaagagtcccagtggaagcagaatagtttctacctggatctgggttgaatgctggaaactatcggtcaaccaatctgggcaatcaatccacctatcaatcccctgaatcttgccttgaacctgcgaatagagctccctgaacctgtccatggtatgctccgtgggatcccaatagcctctgccactggctctcataaagggctgctccaacttcctgaactaattggagttggtgtccataagcctctgactaatcgcctggtgctggataaacgtagagttggcctcctcatatacccagttgtctacctgaacagaaatgagggtgaaaacgacggggtt

SEQ ID NO: 5972 - DNA, 279 bp, Zea mays
  Clone ID: MRT4577_105437C.1
cttaatatctttcgcgcgaccgccctttaccttttttttttataacttaattgaacgcttgttttggaaaccaaaaaaaccggggtcgacactcagtaaaactattaacaaggtcagccactcggtcaaacaaattacacagtatgctgggcactgatccaaaacctttcttacaaatactgccccggcccaaacacttcattttttatattaaatctgctaagcacctatatataaggccccgctccaaacaccgcaataatgctaaaacccaccctc

SEQ ID NO: 5973 - DNA, 1619 bp, Zea mays
  unsure (1)..(1619): unsure at all n locations
  Clone ID: MRT4577_105438C.1
aattcggcaccgaggaggaagggagggtgaaagaagaaatggtcgcaaagaggtggagggaaggaaagggtcaatgctgctcggtgtccctcaacctcaacacgggcgcccctactttacttgcttgttcccggtgtccctatcactctcagaggtggacgatggatcgtccctttcacatttcacacaccctccgttgccatttcaatattatcctagtcgccagcgtaagctcgccgcacgtacctgctctgctactcgaccgctggcactggcgcgtttctttattgcttcgtccccttcatccggcaactccactgtcagcgccctattcggctcaatccatccctctgcttggcgtcctctctgctgcttgatttgctacctgtacctggtgctgggaatggattctgctatcagagggatcctgcaagtgtgaaatctatatattctggacaaatggggcaaaatatgttacagccacaagtgctctgcctgtgctccattatcctcacgttattttttacccttttgcaaccgaccgctgcacagatcactgcaccatgggaagttgatgccctcaaggctattaggggcagcttgatagatccacacggaaatcttagcagctggaaccgaggagatccatgcatgggaaattggtcccatgttatctgttacaatgcaacaggcagtgatggatacttccatgtaaaagaattacagctcctaagtttgaatctatctggaattttggctcctgagcttggtcagctttctcaaatgaaaattatggattttatgtggaattcgattggcgggaccatacctaaggaggtcggaaatatcacttctctggagttaatgctcctgaatggaaaccaattgaatggctctttaccagaggagattggcttccttcctaatctgaatcggattcagattgatcagaaccatatatctggacttatacctaaatcatttgctaacctgaataaaaccaagcactttcacatgaacaacaactcattgagcggtcaaatcccacctgagttatccagattaccttcacttgttcacctattattggataacaataacttgtcaggctacattcctccagaactatcaaagttgccaaatgtgctcatcatacaactggacaataataatttctctggaagtacaattccttcatcttatggcaacatctcaacacttctaaaattgagtttaaggaactgcagcttggaaggacctgttcctgatgtcagtgggataccccaacttggctacttggatgttagctggaatcaattgaggggtccaataccatccattcaattttcgagcaacataactaccaattgatctttcccacaataatcttaatggttccattccaggaattttctctggccttccttatctccaaagactgtcacttgacgacaacaatttgactgggttctgttccatctaatatctggcaagatattgatctaagaggaaataaaagtcttgtactggatttccagaacaatgctctcaacaatctgtcaactcctctttcgcccnctcccatgttaccatcctattacatggaaacccagtatgca

SEQ ID NO: 5974 - DNA, 342 bp, Zea mays
  Clone ID: MRT4577_105439C.1
attcggctcgagcaaggattttcctccctctttttagaggacgctgtgggtttttatacagacgggagatgaaagagaggtatttggtggggactggatcgatatggaggtggtggacagcactactgcagtcggcgactttggagggtgacaatccactgtgacctgacttcttttaccgcatatatcattcaggtctgagggaaaaccatctctctatgattatcacacgccaaagggatgaccttcattttgaacagcaaaggtctcgatcttactctaccaatactgacgatgctgatgacattgccatgggaacaagtcattccttggaatcagatg

SEQ ID NO: 5975 - DNA, 2151 bp, Zea mays
  Clone ID: MRT4577_10543C.1
gtctcccctacggtttcacatccccatcaccgtcatcctctccggggggacggactccggtgcccctacgccgccccgtcgccatgggcaactgctgcccgggctccggggatgcggagcccgccccgctgcctccgccgatgcctgctccacctccactccggcagattgtccctgaaggccggcgcctcgcgaggcccccgcgtctccgtcgcccccctcgccgtcgccgacatgggcaactgctgcccggggtcgtcgtcgtccgcggagcccgcgccgccgcagccgccggacccctccggctcgtcgcgccccgtggcttcgcctgcctcggtgtcgccgaccgcggcgcccgcgcccgccaggcccccggcccccatcggcccggtgctgggccggcccatggaggacgtgagcagcatctacaccgtgggcaaggagctcggacgtggccagttcggcgtcaccagcctgtgcacgcacaaggccaccgggcagaggttcgcgtgcaagaccatcgccaagcggaagctgtccaccaaggaagacgtggaggacgtgcggcgcgaggtgcagatcatgtaccacctgtccggccagccgggcgtggtggagctcaagggcgcgtacgaggacaagggctccgtgcacctcgtcatggagctctgcgccggcggggagctcttcgaccgcatcatcgccaggggccactacaccgagcgcgccgccgcgtcgctgctccgcaccatcgtcgagatcgtgcacacctgccactccatgggcgtcatccaccgcgacctcaagcccgagaacttcctcctcctcagcaaggacgaggacgcgccgctcaaggccaccgactttgggctctccgtcttcattcaaggaaggttgatttgcttgctctcactctcctccatggtttcattgcatcatcacattcatatctgctgcatacgacgtcctcaaccatccgaggatcagggaggacggcgaggcgccggacacgccgctggacaacgcggtcctcggccggctgaagcagttcagggccatgaaccagttcaagaaggcggcgctgcgggtcatcgcggggtgcctgtcggaggaggagatccgtgggctcaaggagatgttcaagagcatggactccgacagcagcggcaccatcaccgtggacgagctgcggagagggctggccaacaagggcaccaagctgagcgaggccgaagtccagcagctcatggaagctgccgacgccgacgggaacgggacgatcgactacgaggagttcatcacggcgacgatgcacatgaaccggatggatcgcgacgagcacctctacaccgcgttccagtacttcgacaaggacaacagcgggtacatcacgatggaagagctggagcaagccctgagggagaagggcctgctggacggccgagacatcaaggagatcgtggcggaagtggacgccgacaacgacgggcggatcaactacaccgagttcgcggcgatgatgaggaaaggagacccggagccgtccaaccccaagaagcggcgcgacatcgtcctgtagaggaggggcgtggagctcgggagcacgtcacgtacgtacggctgctggcaggaatcttcgtcttcgtggtggcggagaaattaagcagacgcgtgcgacttctatctctggacatgtataatgttgcacgagacggaaggagccgagggagatgagggggggatggaccgcgcagacatcaaggagatcgtggcggaagtggacgccgacaacgacgggcggatcaactacaccgagttcgcggcgatgatgaggaaaggagacccggagccgtccaaccccaagaagcggcgcgacatcgtcctgtagaggaggggcgtggagctcgggagcacgtcacgtacgtacggctgctggcaggaatcttcgtcttcgtggtggcggagaaattaagcagacgcgtgcgcgttctatctctggacatgtataatattgcacgcgacaggagcggaggagctgagggggggagtgaccgcgcattattaatatgaaaaaatggcaaccgggtgtcggttattcttgtctgcatgtcgttactcggatgttatagtagaacgaactgttcgtactgc

SEQ ID NO: 5976 - DNA, 293 bp, Zea mays
  Clone ID: MRT4577_105440C.1
attgagaccaactaatctcatataaagcacaatagtgtaccatcaatggcagccaaaatatagtgcctgcttaagctccttggtctttctgcaagagcgtgtaccaggaccatttgtccgcaatgctcgcaagctcctatagcttctgttattaccccgtacctctcaccacccgaggactaggtatgtgaaaacccaataattcaaccgctaccggatccaacaggctgtcacaagtggcaatcttactctttagtaccctcgggccttaaacagacattagccctattaca

SEQ ID NO: 5977 - DNA, 151 bp, Zea mays
  unsure (1)..(151): unsure at all n locations
  Clone ID: MRT4577_105441C.1
ctactttctcctctactttctcnacctcccctacttcttcaantagggagtcatggaatattcttatatgtagctccttcctatcctcctctctancttcattgtatttaaattcatttcgtccttcattcatttcactccatctgttatc

SEQ ID NO: 5978 - DNA, 696 bp, Zea mays
  unsure (1)..(696): unsure at all n locations
  Clone ID: MRT4577_105442C.1
cacgccggctgtgccgtttccggaattcccgggtcgagccaagagtccggagcggacccagacctctcgtgcgtggatggaggaggaggatgcctgaggaaacgccgttcagggagaaattgccggaggaagaggagggcgtcacctttgccttctactcgaaaattgccctgctttcgtccttggctcattacaccttctactcgaacaaagagatctttctgagggagctcatttccaattcctcggacgctctggataaaatccgttacgagagcctgacggaccccagtaaactggactcggggaaggagctgcacatcaatctcattcccagcaaacaggaccgaaccctgaccattgtggataccgggattggaatgaccaaggccgacttgatcaataaccttggcaccattgccaagtcgggcaccaaagccttcatggaggctttgcaggctggtgcagatatctctatgattggccagtttggtggttggtttttactctgcctatttggttgctgagaaagtgactgtcatcacgaagcataacgacgatgagcagtatgcctgggagtcctcagctgggggatccttcacagtgaggactgacacaggtgaaccaatgggtcgtggaacaaaggttatcttgcatctgaaagaagaccanacagagtatttggaggaaaggaga

SEQ ID NO: 5979 - DNA, 149 bp, Zea mays
  Clone ID: MRT4577_105443C.1
acgacaccgcgtccaacgagaagctcagggccatgatctaggagtaccacctgaaccttcacggacgtctcgaccacgaggagttcgcggaagtcatccggagactgagcgccgactcgctctgctcaatcagcgggagctgctgatca

SEQ ID NO: 5980 - DNA, 503 bp, Zea mays
  unsure (1)..(503): unsure at all n locations
  Clone ID: MRT4577_105444C.1
cggacgcgtgcgngggaacctggcgtgggtagggttgcgcgacgggttgattgagcggggaatgctgtgacgactgggctcgcgctttggcccgctgttgggggtccggttgggttcatnggagcaggtgaacgtggtggaccgccgtttggtacacgccttgctcgtcgaggggggggggggggggggctnaccgntcgccgctgctggggttcaccgagaggtgcggggccttcggctctttgagcatacacgggtccagctacggtgcacgctggagtgttttccggcggaagttcggggggggggtggggagcccagcgcgggttgggtagatggtggtgttgcgtgagctggtgcttgtcgacctgatgcggtagctgaagctggttgagggcgtggtcgtctgctgggacgcgttgtacggcgccttgtgcagccttttcatgggcatgggctttggggaggtggtccgggggactgggtcgggggcgggctggggc

SEQ ID NO: 5981 - DNA, 300 bp, Zea mays
  Clone ID: MRT4577_105445C.1
ggacgacacctttgaaagtttcagctacgcgagccaaaaaaaaaaactagtccggacgggaggccacatcttttatttatcgcttggaaagaaggcttcctttgcaaattacagcgttagttgtttcgatgttgaggttgggcttgagaaaacattgggctagaatttcggatcggaggaagcagtttgatctggatccccatcctaggagtcagggacactaccgcaccatccgaatctagtgatgaagttatatcatcatcgtaatcagtagtacgcatgttatttagtagagaacga

SEQ ID NO: 5982 - DNA, 413 bp, Zea mays
  Clone ID: MRT4577_105446C.1
caaagattatgaaatatagaacgtagttcccatttccaagaaacttacttttctcaatggggaggtaagacagaccaacacacacacccatacataataggaccaaaatatattgtaaacagagcccaggcagtgagaaactaggggccatgagtaccacacctgcaggtgagacctttggtgtccgagccactcgcttgggttttggtagagtagggacgtcaagttccgcagaaaagcacaatgactcctgaattttcttctccttaagagggggacgtggagacttatctacttgattaaaagaaattagtaaagaaaatttagaaaggggttcaaaaactgttttaccaggagttggatgcagaagtaatgttatgatttctttgtaatagaaatgcatactatcccta

SEQ ID NO: 5983 - DNA, 361 bp, Zea mays
  Clone ID: MRT4577_105447C.1
gagataactctttttttttttttttcttttttcttttgttttgggcaccatgaaactttcaaccatttataacccggtgatactgcgtcaaacggtaagccctattacacctaaaacactaaaaagcttttatggcggcaaaacctcaggcctgcccgggtacgacgacttgaaggggcaaaccctgctacctactggcagcaactagaggatcctaccttcgacccaatgtctgcatagaactggtgctgtcatttgcctcagcaaaaaccgattacgctgacaactgccgcctaccaccagccggtactttcattcgaccaaccgggggggccgaacgatggagcttatttacaataac

SEQ ID NO: 5984 - DNA, 501 bp, Zea mays
  unsure (1)..(501): unsure at all n locations
  Clone ID: MRT4577_105448C.1
gggggttgggggggggtttaaaaaaaatttttttttttttttttttttttagcccgaaaaccacccctttttctgatcaccaaatctcgatttcatcagagtttatgacccaacaagcattgcaccttcatagatgccaacaagttacaagggcggggggggggttaatcctacaaaggggggggggccccaataacaaaaaattattgccccctgccttgttctttttgttgtcccgggaggtacccgtgcccccggccccttcctttttcccctttttggcccccttttcctccaaagcttttttgtccctttcggggggcttttccggggtgagcccctcctgggagttcttggcgttgggtttccccgcccccgcgcccttacggtnggggtcacccttgtttccccgagttattttgccggtcccccttactcttgttttcccgtcccccccccctttgccggaaaaaactcggggaccaccccccaattcaccca

SEQ ID NO: 5985 - DNA, 268 bp, Zea mays
  Clone ID: MRT4577_105449C.1
gaggctaagtactaacggaagcctttctttctctggtaagcccggatgtgctcctgcggctcgctgtcagcctgttagctaatcaaacgcctcctctcgtgcgaccaggtctccttggcgctcaccaacaccattgactctagtggatcccccatcgccgtccaccaagtaggaaggttctcaatcgccgtaacacttattgcccttccttatcatcgtgctgttctactaccgatgcctctctctttggtagaactgagttgacaac

SEQ ID NO: 5986 - DNA, 1415 bp, Zea mays
  Clone ID: MRT4577_10544C.1
cccacgcgtccggctctgcgccggcggggagctcttcgaccgaatcatcgccaaggggaagtacacggagcgcgccgccgcgtccctgctccgcaccatcgtggagatcgtgcacacctgccactccctgggcgtcatccaccgcgacctcaagcccgagaacttcctcctcctcaacaaggacgagaaagcgccgctcaaggccactgacttcggcctgtccccacgcgtccgcggacgcgtgggttcagggacatcgtcggcagcgcctactacatcgcgccggaggtgctgaagcggagctacgggcccgaggccgacatatggagcatcggcgtcatagtctacatcctgctctccggcgttccgcccttctgggccgaatccgaacacggcatcttcaactccatcctgaggggacaggtcgacttcaccagcgacccatggccgcgcatttcgcagggcgccaaggacctcgtcaggaagatgctcacccctgaccccaagcagaggatttctgcatacgacgtcctcaaccatccttggatcaaggaagacggcgaggcgcctgacacgccactggacaacgctgtcatgaacaggctgaagcagttcacggccatgaaccagttcaagaaggccgcgctgagggtcatcgccgggtgcctgtcggaggaggagatcaggggcctgaaggagatgttcaagagcatggactccgacaacagcggcaccatcaccgtggacgagctgcggcgagggctggccaagaagggcaccaagctcagcgaggccgaagtccagcagctgatggaagctgccgacgccgacgggaacgggacgatcgactacgaggagttcatcacggcgacgatgcacatgaaccggatggatcgcgacgagcacctctacaccgcgttccagtacttcgacaaggacaacagcgggtacatcacgatggaggagctggagcaagccctgagggagaagggcctgctggacggccgagacatcaaggagatcgtggcggaagtggacgccgacaacgacgggcggatcaactacaccgagttcgcggcgatgatgaggaaaggagacccggagccgtccaaccccaagaagcggcgcgacatcgtcctgtagaggaggggcgtggagctcgggagcacgtcacgtacgtacggctgctggcaggaatcttcgtcttcgtggtggcggagaaattaagcagacgcgtgcgttccatctctggacatgtataatgttgcacgcgacgggaggagctgagggagtgaggggggagtgaccgcgcattattaatattatgaaaaatggcaaccgggtgtcggttattcttgtctgcatgtcgttactcggatgttatagtagaacgaactgttcgtactcaataagaa

SEQ ID NO: 5987 - DNA, 566 bp, Zea mays
  unsure (1)..(566): unsure at all n locations
  Clone ID: MRT4577_105450C.1
ggcgccgccctactagtaaacatacgannnggattctttctttgggcntgggcagcgaaatnntacggcaccgaagagtacacgacgacnnacactttcttctacaaacagnnacatagtcgcgcctccccacacagcatcaagtngnntgtgtaccctagtcaatnccagacatagcntnctgggccggacaagcaaaggcaagctcaatcaaatgtcgtgagggaagaagtctaccaaccacnntttcttcaatccaacctacaatgaaaggcactgagcgagtcatgccctgcccggtcgatgtaccgggttaccatccgagtacccgtagtgtggttcaacacgctcaccctggtcgaagggtctgatgtactgaagacggttaccaagtataggatcggataatggcagcaacaaagctacccaagcagcacccctctggctgagggcctggtcgcacaatcgcacgaccggtcgctcttacgcaacttctaacgagaaaagcaccgaaggtcgatagataggactccctgagcaacgcggcaccaggccaacaagatcaa

SEQ ID NO: 5988 - DNA, 617 bp, Zea mays
  Clone ID: MRT4577_105451C.1
gctcgccaccatattcgtgcccgcctgcctcgccctcgccgccgccgtcaccacgctcgtcgcgctggcgctcacgctgcagaatcggggcctcggccccgccgacccctctccctgctaagtcccgccggaacccctgcgccggggcgtcctcgggctcggcggcgcccggcggcgcgtgcggttcgagatcaacgcgggcgacagcctcaacaacaggttcaggcccatccgggcgctcgagtcggacgccgtcttctccgtcgacgacgacctcatcgtcccctgctccgcgctgcgcttcgccttctccgtctggcggaccgcgccctccgtcatggtcggcttcgtgccgcggatgcactggcctaccgacccggtatgatgtgatgagtccatcagtcgctataattcttccaaagcgagtgccgcatattgggatctctgttccaacacgaggatcggaatctggaatggaagtatctgctctgctcgtagttgtagctcttatgttcagatttgaatggttggtttggcacaaattaaactaagaataactttgaagtttgcatgaacatcagaacatgttgaaggatatatgtaaaaaaaacaaatct

SEQ ID NO: 5989 - DNA, 438 bp, Zea mays
  Clone ID: MRT4577_105452C.1
aaaagtctaaggtgaaattattccgtgggacaccttcatcaaaagagagatgctgcagatgtggaactctggccatgcatctttgaggaaagcaatgctgcgttggtctctgtgcgcggaaatgaacactagaacgagtggtcatggagcggcaggcaggcgcctacactggcgaagagaaggcgccggccgaccggcgcgccttttccctttggatgcaaggaagaagtaagcttcacagcgaatctgggcatcttcgtccgaaatttctgtaaaagccttgcattggtatcttctgtttcctgcttttatcttgtcctctcttccctacaattcaactttgcacctcccaaattcgaacaaaagttgaagctgaaagtaagctctgtagctgaattcatcgcaatgcaactgatgatgcgcagagtgtttctcaac

SEQ ID NO: 5990 - DNA, 516 bp, Zea mays
  Clone ID: MRT4577_105453C.1
cgtcctttttttttaggggattttttttgttgaacggagtaaccgagaaccaaagcgggggattacacacttacagaggaagtggcgaaccacactccgaccgattgataagagccgacagaaacataacacgataggagccagtcagggccgatcacaggataagcagaggcgcacaagccggacaacgcaccaccaagagaggggctagtacttgacaccctggtcgtcgtcctcaccctggacaggacaagagaacgacatttatttttcatatacatgaccgggccttgtgctgcctactttcaggctaccatcccagttcctttcaaacaaagacgtacaaaaacttggggggagagcttggcgaagatgaggttgaacctgcggaaaatgggggataagacctccacaatactggtggagttggagatcatgcacacagaacgctgcaccacggacagatcaccgccagggacgacgcagagagggtggcagttcgatcacgccttgaaa

SEQ ID NO: 5991 - DNA, 557 bp, Zea mays
  unsure (1)..(557): unsure at all n locations
  Clone ID: MRT4577_105454C.1
gaattacccgggctcgactccacgcccgtccgaacgcgcgtcgaagccgaagcaaggctaatgggcctgtgagtctggatnncgaaggcnncctcgctcgtatgccgaccagtgtctggcaggaccgtcatcgcgttcttcggtggcccgccctgcggcccgagggcgctccgcgcccctagccccggtcttccgcacgcccgtcccgcggcngatcgtcgccactttcgcccgtcggcttctttcgtcgcgcttccgctcgcccgcgcttcactcttttcgccgcccgtcccgccacttggagccganntggggcctcgtgccctgcaggggctacctagcnagtaccttccccacgcccgccgcccgacgcccgccttagatcgtatttattcggagtggctatccagtacgtactttagtagtagtgagaatttggttcggtgctgtcgtgtcgtcgtcgcatttntgggtcggatcttggtttcctttggtgccagggaggggtttctattacccatgtcgcgggtgtcggtttgtgtgaatctcatcccccc

SEQ ID NO: 5992 - DNA, 213 bp, Zea mays
  Clone ID: MRT4577_105455C.1
attcggctcgagctccgagtgttcctcggaccgtggcggttctagataattcacgcaggagtatttcgcaggctacatggcggtctcgaataaccggtggatctgcgagtggaacgctgaccgcgtatacctcgagtttaaatttcgcaggacccgcagcagcttgaccgatgccggactcttaaatctcggtgaagccatgctcgtctacgt

SEQ ID NO: 5993 - DNA, 492 bp, Zea mays
  Clone ID: MRT4577_105456C.1
aaggcccactgaccggggttaaaaaggttaaaatccaaccaccaccagttaaaggggtttccaaacaaaaccggaccaccctcaaacttcccccggggggggggggggggaatcccaaggttttccccggcagcttttaatttggggggcccccaaattttcccaacaaataataataaaacggttgttaaaagcgtgccccccaaaaaaccaggggccaaataaaattgcttagggtctttaaacagcaccaaacactaggtcctactttttaggccctaaaagccggttttattgcccctccttcaagtcgggcttgggcccctccctgattttttcccaaggggcctccgaaatgtcaaaagtccttagggtcaagttttaacaaaggacctgcataacaaaagggctgcccttgaaggactcctccttcagggggtccagttccaaaatggcctcttaaaaaccctgttttccaaaactgcaggccca

SEQ ID NO: 5994 - DNA, 274 bp, Zea mays
  Clone ID: MRT4577_105457C.1
ggagaactggagatccacccgcacgcggactgcttccttcgctagtcggtaaggaaccctagcccccttggcttgcgtcgacggattcctcgtccgtgcaccccttcgcgggatcttctcttttcgtcactcccaagctatcgcccccagttttgatcctcaatttctataccaaagcagccgatgtttttgtggtccccacagtgtccgagatttgccagctagggtttacgcgcgttcccctcgtttgctaacggcggggatgcattactgt

SEQ ID NO: 5995 - DNA, 576 bp, Zea mays
  Clone ID: MRT4577_105458C.1
aaaaaatcgccacatcgaaaatcggggaagcgcgcttatgcttttatttacatatatagacagggcgacctaccactacagaagtacagatacgacccctgcaagcttacaggaaaactattcggagaggtttttttaaacaaaagctatacaaaaatatgtccaaaaaaaggggtagcatgagattcaaatccactgaactactccacggcgctatcgtctagccgtggtttatgtgcagaacctaattaatttaatcacgaccaaatccacatggcatagtaggcaaggatggcgttttttagccgccacagcattatcaggaagtactgcatctgggcgtagcaaagggccaaattcagagccatgcccaagagatgacccgctgagtggaccttcttcttgccgggaaaggtccaaaacatggaaccccatgaccaactgaggccgcaggagacgacgcaggtgagcaagaacatggcgagcggtgtaccctctcggcattcggcttgcgccgccaaacaccgatgtggaacttcgacgatcaatggaatcgccatctggcaaaataccatt

SEQ ID NO: 5996 - DNA, 380 bp, Zea mays
  unsure (1)..(380): unsure at all n locations
  Clone ID: MRT4577_105459C.1
acgacaagtccggcccatccttcgtccacaggaaaggcttttaattttttgggcccaaaaaatgcaggccgggggggagccgttaccgccgccagcctttcttgccccggttttcgttgccgttttttatttaccgcaaacaaagttttgggccggtttatcggccgccgttttcttcccttattaataaaaactgcattaactgtcgttacctatgcttttaatttggaattttttgaacacattatgttaaggtccattcatttttaatgaaacgcctgataaggttacttcggatggcaattggttatggaggtctaataaatgaataatataatttttttgtcnaaaaaaaaaaaaaagaaaaaaaaaggtccttg

SEQ ID NO: 5997 - DNA, 980 bp, Zea mays
  unsure (1)..(980): unsure at all n locations
  Clone ID: MRT4577_10545C.1
ctgagttggtctgcgcgcacctcantctcgtgcatccagagctgtagaattgtctttggtctgtcggcaaggcagccatgaaaccccctcagctgccggcaggggaagaggcctcctgggctcacgaggtcaagcaggccctgcgggagaaactccggccctcctacggaggcggagctgccttcgccacaccggaggctagaccggccggctaaccaagccctggcgcccagtagcctggtttggcggacgaagaccccataaggagagtcatgttcttggctccctggggtcacacataagaacgggtacctcgaggccggccggcgaacaagccatggcgctgagtgccgcggctcggtggccgaggaccccataaggagagtcatgttcttggctccctggggtcacacataagaacacaaaccggccgaccgagatctgggcatgcaagcgagcatggccatgtcttggtcagtcagatctgcaaacaaccgaactgtaaaaaagaactggagcctgtcttgtaaatcatggagcttgctgctgcttgcacccatgaaaaacatgaacgcatggagagctggttaactagctaggtagatagatatatcatatatgggtatgatggtgtggatgagaataaaaaaacaaggtacgtagtccatgtctctggtcttggggagtggctgtgagcctgtgagatcctgggaagttcatgcatggcatggctcaagagggagatctgaaacttgtgtagccactacgaacttgttttccagaaatcttgtaagtaggggagcctgtgaataatctagaaaacaaatcttcctgctctgcgtgtccacctttgcttccaggttcagaagattcttcttctagtggtgatgctttatctcgaaaaaaaaaagaaacttgcgtgtccccctttgctttccggttcagaagaattttnttttagnggngatgnnttatgtgta

SEQ ID NO: 5998 - DNA, 218 bp, Zea mays
  Clone ID: MRT4577_105460C.1
cacgcatgcgggaggctatacgcccagccacgcctatgatctgcaggacgctcagcgccagctcggtggcaggttgccgggggctgtgcctttctgtccaagatggtcattattgaccatggagacttctagcagcaattggcaccttgcattgttagctatgccttttctgatgctgttgctaacaaggaaggcatcccatcccaattggattgtac

SEQ ID NO: 5999 - DNA, 275 bp, Zea mays
  unsure (1)..(275): unsure at all n locations
  Clone ID: MRT4577_105461C.1
tcgagtttttttttttttttttttttttttttttttttttttttttttttttttttttttttgggaaaggaaagggccaaggcccttgttttttttaaatttttgctacnaattttattgggaaccggtgtttgtgtgttggtcgagacagcgcgcacgagatgcgtttggttttcagatctgggggaatacagtttttccaacacgagcaaatcctcgcaacgtaggagttagagtccggggttttttttgtgggggtttttggcgtctttggg

SEQ ID NO: 6000 - DNA, 251 bp, Zea mays
  Clone ID: MRT4577_105462C.1
acaagctttttttttttttgttctttttttttttttacctaaccaaaccctgtagtatgatccatatcttttcggcctaacaccgaatgatgatgtgtgggaaattaccgctttacatccctttttaactaagagggaaggatggaggaaaaccacaacattatcatgtgggggatgaccaagaatggatgcatcaacacaaaggggtggtttcgggagctgggcagatggaacactaggccaaaaccccc

SEQ ID NO: 6001 - DNA, 717 bp, Zea mays
  Clone ID: MRT4577_105463C.1
gggtacctcgaggccggccgggccgggagcgatttaaaacaataatgctcattgccatagtcaacggacgcctagctgctgcaggcggatgcctacctgcgcgaccacagcctctactaactgacatccatggcgctcatagagggcggtgaagctccacatccacgatcgccatgccagcaacctaagcgacagctgccacattgccgtatctcccgaccgcgctgtcacctgccaacaaagcaagctcccgatcctcggaagcgtgatggggctgctggtctcggggcaaggcttcccggcgtacgactaccaggaggatcgactgaaccacgcatgactgtctgttgggggaaggcacgaagacctaggatcacatctctaccatgaagtatcttcgagatggggatcgactcccgccactacccggaggtcggcatgtacatgaccgactgcatcattaaagcagaggacgaggaccaccagatgatgacggcggtttaggatctgaaccttatgatcctcgaacactacagcagcacactgcatgtatcatacctggagagaatctgggtaacagaggaatccaagtatttcatatctaagcataaaatcttattaagggatcgcggtatggatgtatcctgtttctatgatctctccatagtatgaatgaaaacgggtaatggatgccccagtatgcattgcttttcatga

SEQ ID NO: 6002 - DNA, 391 bp, Zea mays
  Clone ID: MRT4577_105464C.1
tgtatttgtattaatgtgttggaacacgtatatgtagttgcaacttcttttcaaaaaaaaggggggaaaaaaaaaaaaaaaaaaaaaaaaaaaaaaaaaaaaaaaaaaaaaaaaaaaaaaaaaaaaaaaaaaagggagaaaaaaaaaaaaaaaaaaaaaaaaaaaaaaaaaaaaaaacaaaaaaaaaaaaaaataaagggggggggcctttttaaaggaccaaggtttacttccccgtccttccagccttaaaatttttttttggggccccaaaaattaaattagggggccgtgttttaaaacggcgggggcgggaaaaccctgggggttcccaaatttattgctttggaacaaattccctttttggacggggggtgtaaaaccaaaaggg

SEQ ID NO: 6003 - DNA, 118 bp, Zea mays
  Clone ID: MRT4577_105465C.1
aagcaagtatgttatattaggagaaaaatatctggtcctagataaaagatctgttcttagatgatgttttatgccgatgatgccattagagactagcttcgtctgtttgtttgttaca

SEQ ID NO: 6004 - DNA, 367 bp, Zea mays
  Clone ID: MRT4577_105466C.1
ttcccccttccggactggattattggcccaatttacataggcccggctgagggagaggtgtaactactctggctaaccgaacgactaagcggaccagcaaacgctctatgagttcactctgtgcatgcatctatgcacaagccttagttcacgccttagtgaagacaataggggccacatctaaaacccttgcaacttgaaataatcctctcccgggggacaagcaattgttttgttggagacatgatgacgtcttcgttcacaacggatgccacgaaccttaaagcttcttgcagggccagctgcgacggcgtgcaccgggaacttccccctgaggagcttgtaggccatgagcagcttgccatat

SEQ ID NO: 6005 - DNA, 136 bp, Zea mays
  unsure (1)..(136): unsure at all n locations
  Clone ID: MRT4577_105467C.1
gnanaggtagatagacantagncacnacgacaactnaggcanaaccgncatccaactgctacaccanncagacacagnagtaagcaggacgcnttccttacactagccacagagccntaancttgacttacaccac

SEQ ID NO: 6006 - DNA, 2600 bp, Zea mays
  Clone ID: MRT4577_105468C.1
tcaatcccactgtgccaattccgctgcccgttgccgaatttactcctctcagcctctacttctcgggttcgagctcaacccggcgggccactgctgcgacaaaggactagcaaggtttcattgcgctcaattgctatggctaccacacaagcctcagaagcagctgctgacaaaggattgcctctggcagtggacgctaccatggttgatgagtatgcctcccagtcaaagttgctgcaagaatttgttaaaatcccaactattggcaaggcttggatcttcaattccaaggatgagatttggggcccatgtcagttagagaatgagatacatgttgcaggaatcgaaacgaaaacaattatcttcccagaagatatccatggaattgacaagcctcagtctgatttcgaaagcatcgtatgttgccgaggagcctcctcagaagcacatggtgtttaatgattatggattccacaaggcaggtttatcagaaaaggactgcaagagctggaagggacaaggggattgggaggagacctggggagaaacctattccaagaaaaggattcctgcactgttcgtcatcaacatctccagtggtgaagttcgacctgtcaagcaaatacctagatcattaagtgttggccaagtgatttgggctccatcatcttcatatagcttggtttttgttgcatggtcatctgacaatgggttccaagggacaccaaggaagcttggtattaaatactgctacaacagaccatgtgctctgtatgctgctcctgatcctttcggacaagaagctgagaaatcgttaactgagggcaataagggtgaaactacaactatgatcaaattaacagcaaacctgagcagtgcctttttcccacggttcagtccggatgggaagtatcttgtcttcatctcagcgaagagtgctgtagatagtggggcacacaatgccacaaattcattgcatagaatcgaatggtgtacagatggaaaactggatgggagccttggagttgctgacgtggtgcccattgtgctgtgccccaaagataactgttttcctgggctatactgctttggcttgcttagggatccatggcttactgatggacaaactatgattatatcttctgtctggggaagtagggaagtaatactttctgtaaatgttgtgagctgtgaactttcaagagtgagtccccaggactcagattattcatggaatgttcttgcagttgataagaacaacattcttgcagtttccagcagccttattacactccctcagatgtactatgggattaaggtttctcagactgaaagcaattgggagtggcagggagtttcaactcctttcccaaagccatctgataagatcagctccgtactagcagagcataagttcagcatactcaaaatcccaattagcaaccctactgacgaacttgccaatggggctaagcttccttttgaggctatttttgtgtcgcataaggattctgcaagtaatccaacaatcgttgttcttcatggtggaccacactcagtttatccatcaagttattccaaatccttggcttttcttttttcgcagggatataatcttcttgttgtgaactacaggggttcattaggctttggggaagaagcactgcaatcccttcctggcaatattggttctcaggatgtcaatgatgtattgacggcattggaccttgttataaagagaggactaatagatccatccagagttgccgtagttggaggttcacatggaggtttcctgacaacacatttgattggccaggctccagacacatttgttgcagcagctgctcgaaacccagtatgtaacttatcattgatggtgggtacctctgacatccctgattggtgctttgtcgagatttatggaaaagaagggaaaaagtacttctcagagtctccttcagtagacgatctttgtcaattccaccagaagtcaccaatttcacatattgcaaaggtcaagacaccaacactctttcttcttggagcgcaagatctcagagttcctgtttctaatggcctgcagtatgcaagggctttgaaggagaggggaatcgaaacgaaaactattatcttcccagaagatatccatggaattgacaagcctcagtctgatttcgaaagcttcctcaacataggggtttggttcaagaagcacatgggcaaataaacattagtgcttcccattacattcatgatttactttttcattgttactaaatgcctgtaactgggtcaaagtatacgatagcatgatttgcctgtccaatctggtgtttgccaagatggaataattcttgaagacatagaagcccgtgtttgttctagtgtggattctggaataccaactgtagctagtttatgtaataatcttctaataaatgatgtttatgtgttaatgtgaaatggtgggtgcttttgaattgtattcagaacaaaatggcccagctgaccagatcactgctgtttagttccccctaaaaaaaaaaaaaaaaaaaaaaaaaaaaaaaaaaaaaactcgaggaggccccgcgtaccca

SEQ ID NO: 6007 - DNA, 906 bp, Zea mays
  Clone ID: MRT4577_105469C.1
agacggagccgatatccaaccctccatctaaccagtggtaatggtggttttggtcagagtgttggtcgcctgtgccaaattccgctgcccggcggcgaatttactcctctcagcctctacttctcgggttcgagctcaacccggcgggccactgctgcgacaaaggactagcaaggtttcattgcgctcaattgctatggctaccacacaagcctcagaagcagctgctgacaaaggattgcctctggcagtggacgctaccatggttgatgagtatgcctcccagtcaaagttgctgcaagaatttgttaaaatcccaactattggcaaggcttggatcttcaattccaaggatgacgacatgtccaaagcagtggtttcgattggcaaatcagatcttttggccaataagaggagacaattccttttgaatactcacatttcaaagagtccctcaaagtctgtcgattttcagtggtcccccttccctactgaaataagtggagtgtcagcaatagttccatctccatctggagaaaaacttcttctagtacgcaattctgaagatgattcccctacaaaactagagatttggggcccatgtcagttagagaatgagatacatattgcaaaatctgttcatggatcactctatactgatgaatggtttgaagggatatcatggaaccaggaagagactttcatagcttatgttgccgaggagcctcctcaaccaaagccagtgtttaatgattatggattcaagaaggaaggtttatcagaaaaggactgcaagagctggaagggacaaggggatcgggaggagacctggggagaaactattccagaaaaggattcctgcactggtcgtcatcacatcccccagtggtggagttcgacctgtca

SEQ ID NO: 6008 - DNA, 323 bp, Zea mays
  Clone ID: MRT4577_10546C.1
ggaaccacaccacaccaccgcaggggccaggacagcacacccgcacccccgacaggcggcggaggccagaccccaacagaccctacaggaggccgtagggcggaccacgcgccggcaaccagcacgaccaggcagcaatgcggacacccaggcccagaacagagaccgcaccagaaacacaacacgcagcaggagaagggggacaagaccgcgcaaacatcgacgcaggcgccaggaccacgccacaggcacaggcaaatccgaagggcgcccaaggcaagctggggcaccacggcaagacactgagccaacacaatgcaacc

SEQ ID NO: 6009 - DNA, 224 bp, Zea mays
  Clone ID: MRT4577_105470C.1
tgcacgcgcacgtaagctcggatcctgtatatcggccgccctttactcgttcttttttgctctgcctttgttttccttttttggagtaaaaggggcgtgggcaggacagagacctctctgtctatgttggaagtataaaaaagggggcctaactccttgccgtttctccaaaccaccaaatcacatcaggtgttttttaaattactcgccccattaatgcgcag

SEQ ID NO: 6010 - DNA, 377 bp, Zea mays
  Clone ID: MRT4577_105471C.1
aaataaacagaggagaacgtgcttcaaataaaaaaggcacaaataacaacttggtgcagtactgaaccggagcctgacgattgaacaacagcgttatttcgtttattccattcattcaggtcgcgatacaacaatgcatatttacaactcctaacttcgacgcttctctcccgtacgtgaaccttccgccggccttctcactcccgacccatcaccgcgttcttgaaccttctgactagctccttccggagcatctgccggtcgaaggcggaagcggagagcaaacctctgttctcctcggcccgccggatgaggtaggggatgatgtgctccacggggccgtagggcaggtacttgctcacctggaaccccgcgtt

SEQ ID NO: 6011 - DNA, 253 bp, Zea mays
  Clone ID: MRT4577_105472C.1
gcgcagaaactcttcgagcgacgcgcactatcaacaaacgctaacaacaatggctaacaagaggtaattcttcgttgagctgtttgcacggcctgcgagcgctactaatgcgtacattatcccacattgctatacacgctacttactacttaataccacagtatacgccaacagaagaactagtgcattagcaacactaagataagctagcatatgtgttacaacaagctattgcgagaagcgatttacatca

SEQ ID NO: 6012 - DNA, 264 bp, Zea mays
  Clone ID: MRT4577_105473C.1
gtgcagcgactactcaaagctctaatcgggcggatgatcaaaagcctgcctccagatcactggacaaactttgttgaggggctaaggcagttgctgtggcctacctacccaccaaggcggggcttaaatagctcgacgagtactttctcactcgcaaatacatcactggctaacaaacttgcaaagatgactagtatgtctacacttggttttcatatgctaacttatgcaagtgtatcaacatcgcatggtggataaatcaca

SEQ ID NO: 6013 - DNA, 1301 bp, Zea mays
  unsure (1)..(1301): unsure at all n locations
  Clone ID: MRT4577_105474C.1
tttttgggggtaccctncggggctttccggggccgatcccccgcaccacccaaccgcagcggagccgggagccgaaggccgagggtattcttccttcgccgctaagcacgcctcctctccacaggcagccgacccaggggaagcgtcgccgtctgcccccaccccgaatctgatgcttcatcgattgatttggagcggagcaggaggggagccattgccggtgttctgattgctgttggaggtcgagggatggtaggggtgctgtcgaatcgcgtggatcgggacgacctcaaggccggggatcacatctacacttggcgggccgcctacatctacgcccaccacggaatatatgctggagatggcatggttatccattttacaagggcagctggacatgagattggaacaggaacattcttggactggttcctttatagctcctctccggcagcaactgagggtcctccctgccagaaatgtgggcacctagtcaagtccgatggggtcatcacctcttgcctcgattgcttcttagatgggggcagcctgtacctctttgactacgctgtgtcgcctgctttcttcctcgccaaagcacggggaggaacgtgcaccctggctgcctctgaccccagtgacgttgtgatccaccgtgcacggtacctcctggacaatgggtttggcatgtactccctgttcaagaacaactgcgaggacttcgccatatactgcaagactgggctgcttgtggagaccgctttcagtgttggccgtagcgggcaacttgcgtctctgactgctgccttcagcgccgtggcctcgtcccccttgcgtttcctgacaaccagtgctggtggcctggcaattgtgaccagcggcatgtactgtttcgggcggtatgtgtcggatattggtgtccggcgtgatgttgtcaaggtccctgtcgaaaggcttgtggagcagaatgttacttggattcctcagtgtgtggctacagagacagatatcgcggcaggagcaccgcagcagcagttggaggttccttgtgcggttgccgaggaagcatccgttatacagcccgcggcaccgtgatccattgctgaaatgtcatcatgtaccaggtgttggcatgagacaggacaactggaactacgtacttgtgtggaagtacatgtaatgatgtatctggtggtgttatgcaatccattgctgctgctgctgctaatggtgcaagcaatgatgatgatgatggatgtggttccatgaccactattaattattacagaattgagaagacc

SEQ ID NO: 6014 - DNA, 216 bp, Zea mays
  Clone ID: MRT4577_105475C.1
taagaatccgatccgcttctccacgccgaacccggtaatggccgccgacgcttctcgaatggcctcaacctcctgctcctcgcctcagccgccgccgggggcgggggcagtgtcgcccggggcagctgactggcccgaggatcgccgcgcaggcggaggccgcggcggcccgccctcggccccgaccaatggcaaggcggctgcggatgccatggg

SEQ ID NO: 6015 - DNA, 1493 bp, Zea mays
  Clone ID: MRT4577_105476C.1
gaccctccacgcgtccggttatgcttgcttgccttgaggtagaagcgtcgccgtctgcccacacccgcaccgcacccaaccgcagcggagccgggagccgaaggccgagggtattcttccttcgccgctaagcacgcctcctctccacaggcagccgacccaggggaagcgtcgccgtctgcccccaccccgaatctgatgcttcatcgattggttctaatcctcactacctccatattcatgcacgagattgcgcgtgattaggagcagggaccaatcatattgaactcagatttggagcggagcaggaggggagccattgccggtgttctgattgctgctggaggtcgagggatggtaggggtgctgtcgaatcgcgtggatcgggacgacctcaaggccggggatcacatctacacttggcgggccgcctacatctacgcccaccacggaatatatgctggagatggcatggttatccattttacaagggcagctggacatgagattggaacaggaacattcttggactggttcctttatagctcctctccggcagcaactgagggtcctccctgccagaaatgtgggcacctagtcaagtccgatggggtcatcacctcttgcctcgattgcttcttagatgggggcagcctgtacctctttgactacgctgtgtcgcctgctttcttcctcgccaaagcacggggaggaacgtgcaccctggctgcctctgaccccagtgacgttgtgatccaccgtgcacggtacctcctggacaatgggtttggcatgtactccctgttcaagaacaactgcgaggacttcgccatatactgcaagactgggctgcttgtggagaccgctttcagtgttggccgtagcgggcaacttgcgtctctgactgctgccttcagcgccgtggcctcgtcccccttgcgtttcctgacaaccagtgctggtggcctggcaattgtgaccagcggcatgtactgtgtcgggcggtatgtgtcggatattggtgtccggcgtgatgttgtcaaggtccctgtcgaaaggcttgtggagcagaatgttacttggattcctcagtgtgtggctacagagacagatatcgcggcaggagcaccgcagcagcagttggaggttccttgtgcggttgccgaggaagcatccgttatacagcccgcggcaccgtgatccattgctgaaatgtcatcatgtaccaggtgttggcatgagacaggacaactggaactacgtacttgtgtggaagtacatgtaatgatgtatctggtggtgttatgcaatccattgctgctgctgctgctaatggtgcaagcaatgatgatgatgatggatgtggttccatgaccactattaattattacagaattgagaagacctgtatttgcccttgatgattaatgatttctgttataccgttgcttatggatgcatctgaaaaaaaaaaaaaaaagagaaaagcggcc

SEQ ID NO: 6016 - DNA, 534 bp, Zea mays
  Clone ID: MRT4577_105477C.1
ccggccccaaccagaatgctagctgcaacaatgtactatcacaataagacgaagatgccaccaccaccttgctcttgcttctctgctgtctctgttcccttctcctccttcaaaaccataacaatgctcctcctcctcctcctcatccttcagcaactgtctgcggctgcggttgcagggatggccaccaccaagcttgggttgtctgacgtggtaaccgacacctgcgacagatgcagcaagagcaatccacaggtgaactacaccctctgcgtctcgtctctgtcgtcggaccccgagagcaggcaggcggacctccacggtctcgccatcatctcggccaagctgctgaggtcaggcgcggtggccatggaggccaagatggcggacctcagcaggaaggagcgcccatggtccccccggaggtcctgcctggacgcctgcgtcggggtgtaccgcaactccctctacgacctcggcagctccatcgtagccatccaggagaggaggtacgcggacgccaagacgtccatg

SEQ ID NO: 6017 - DNA, 896 bp, Zea mays
  Clone ID: MRT4577_105478C.1
cattgggtacctcgaggccggccgggaaaaggttccctcgcttgcttgccgtgagtccttttcgtttgccgatcccccgcacccgcacccaaccgcagcggagccgggggtattcttccttcgccgctaagcacgcctcctccacaggcagccgacccagggaagcgtcgccgtctgcccccaccccgaatctgatgcttcatcgattggttctaatcctcactacctccatattcatgcacgagattgcgcgtgattaggagcagggaccaatcatattgaactcagatctggagcggagcaggaggggagccattgccggtgttctgattgctgctggaggtcgagggatggtaggggtgctgtcgaatcgcgtggatcgggacgacctcaaggccggggatcacatctacacttggcgggccgcctacatctacgcccaccacggaatatatgctggagatggcatggttatccattttacaagggcagctggacatgagattggaacaggaacattcttggactggttcctttatagctcctctccggcagcaactgagggtcctccctgccagaaatgtgggcacctagtcaagtccgatggggtcatcacctcttgcctcgattgcttcttagatgggggcagcctgtacctctttgactatgctgtgtcgcctgctttcttcctcgccaaagcacggggaggaacgtgcaccctggctgcctctgaccccagtgacgttgtgatccaccgtgcacggtacctcctggacaatgggtttggcatgtactccctgttcaagaacaactgcgaggacttcgccatatactgcaagactgggctgcttgtggagaccgctttcagtgttggccgtagcgggcaacttgcgtct

SEQ ID NO: 6018 - DNA, 608 bp, Zea mays
  Clone ID: MRT4577_105479C.1
ctggatcatggccttctcgtgtttatgctcagactgcaaagtatcccatggcaaacagtgttgctcaggatatgtttggaataattccaggtgatacagattatagaatatttgctgaagacattacaaacattccaggacttgatataatttttgttctcggtggttatttctatcatacttcatatgatacattggagaatctacttcctggaagtattcaagcacgtggtgaaaatttattcaaccttgtgaaggcattcacaaatcctatgttgttaaaagagaacgagatatctaataaagctgctaaggatggaattgaagatgtgggggcggtcttttttgattatttgacttggttcatggtattttattctcgtgatatatctctgattcttcacagtctaccgatatgccattttcttcttgcaccgctgttcctgaagttcccaaacgttaccttgatgtcatggtttgtaactctcctaggtttcatgagaggaatggtactccatacgtttggtgtaatccttgcaatatatattcctgctctggctgcagcattaagattattattcacaaagaatgcattgaatggttttgct

SEQ ID NO: 6019 - DNA, 317 bp, Zea mays
  Clone ID: MRT4577_10547C.1
ggccaaacagggagggcagacattcagaaccacggattgaagaattttagatcaccaaacagacagggggcagtggctagctggagcccccgggaagataccattcagacatggacggtagcgcacatgcatgccttctattagtcgtccattcacgacgggaagacacaggcggagaacagctagagcgggggaggaccaattaggcggtggctgcagaggctaggcaaggggccttgcattaatctagctagctgctggtaaccagggcaggatcttccagcgctggttgtcccccttggcccacttccagagga

SEQ ID NO: 6020 - DNA, 290 bp, Zea mays
  Clone ID: MRT4577_105480C.1
ctgcccttcaactcccatatgaatttgtggagaccatgtgtccgagggagaagtaatgcagaagaaaggccagaaaagagggaccatcagccacaataatttaactccagagccctacaaccaagaaagtacatagactccagtggatcgtcgtgaggttgtagaacctcttctagcaaacgtaggaaaccattcctacaatcactagacgataggtctgccctttgaatgaactctttccatttctagtgaaaccccacggactcacaacagtgttcttgagacacgtg

SEQ ID NO: 6021 - DNA, 634 bp, Zea mays
  Clone ID: MRT4577_105481C.1
ggctacagccgcaaagacctcggcgtcagctacgttaaggagaagcagctgagggtcaacatggggatcagcaagctgagggagaaggtgaaggagcaccaagagaagttccacagcgcggccaagatcgctggaaccaaccccgtggagtggatggagaatgccgaccgttggatcgtcgggttcctcgagaagttcgaggaaggatgccacatgatggaaaccgccattaaaggtcgaattcaggagggtctgaagaggcaaggcaggtcagagtcgaacctttccggggaggactccgactcgtaataatggtctgtagtatccaaatcaaactagacggaagctggactggaggtcatactcgcgcagtctgtgtaacagtgtgagattgattagcatgtttttgtaggagatcaggaatcataccaggagattatgtgatgttaagaacaatcgtatttatgcatgcaattcgttgttgtttcttgttggaatatgctctgaattaggatttattttcgtattaaactacaaatctatctattgtatatacattttgtaagatgcacggaagagacgacttaggtcctctatgtaagcagcccagttcttaaaaaacagtttttatatt

SEQ ID NO: 6022 - DNA, 622 bp, Zea mays
  unsure (1)..(622): unsure at all n locations
  Clone ID: MRT4577_105482C.1
ttttttttttttttttttagaataactgattataggagctatattcttgatcctagaaaagggaaaactgtaattacatcttgtgtgcggtctcctgtgagggcaaatatacataccactcctaaagcacaatgacacttctgtctgtctgacaatactaataatatgctcaagtgctcgacaaaaagaactcatccattactacggtgcaccaaccagctgtggtggtgtatacatggtttgcacacacgagtattcactattcagtagacacacacgacttatcttggaggtgcaaatcggggtgagatcaagagcaccgtcgtcacctgatctcccgggctatgaccggccgacgaggagagggcgtgcggggacgagcagtcggtacgcggagtggccccggacaaggccgcacctcgccacggccgcggcccggccagcgtcctcgatctgctccagcacccgcacgaaggcgntcggcgtcgcacggcagcgcgagcgggccggccgccgcgtacccgaacgccttcttggccttctccagcagcgcccggaacagcgggtggttcacgcactccgtccgcaccacgaagcgctgtcgccccgtgccgacgcacac

SEQ ID NO: 6023 - DNA, 215 bp, Zea mays
  unsure (1)..(215): unsure at all n locations
  Clone ID: MRT4577_105483C.1
gggctaggttcacttgcctctcgagttactcgcagccgcagccgccgcggctctcgcctctccggttcactcgcagtcgccatcgcggaggcgttccagagcggcggccaccatcgccggcacctccacgtggtcgacctcgacgtgtcgtccgacttccngtggccctccttgctctngtccctgtcggtcgtcttcttctgcggggggggggg

SEQ ID NO: 6024 - DNA, 454 bp, Zea mays
  Clone ID: MRT4577_105484C.1
ccccgcgtccgccccgcgtccgcccacgcgtccggccaggtgcaggtcgcaaacacgccccaagtcgacgtagcgggggatggctgcgacggccggcgtcggcggtggtggaggggctaacgcggcggtggcagagcagatagcacaggcagtgcggtccacctccaatctcctccagctcatggagcagtcctcccccgctcagtttgttaaccaagatgatcagcagaggtgtacttgtggtctcaggttcacttggcaaaactacccaagaacctgttggaaaaggcatcctttgcaaagaacacggaccatgtactgcaccagctacctcaagtaatttcatccttggatgcttatatggacaggagtttgcaaagtgcatctcaaattaagactgtcacacagtctcttgtcaaacattgagatgacacatctgaagtccatgtttgcc

SEQ ID NO: 6025 - DNA, 831 bp, Zea mays
  Clone ID: MRT4577_105485C.1
gtgcgcttcgggaacggggatcactccgcagcgacttcaccagctgcggcagagccaccagcgccttctgcccccgagccgccgccatcgcccccatcccacttcgccggccggtcggctcctcggctggggcggtcgttccagaatctagaggggtcggggaattttgcattgaagaccttgtgaattgtaacgggaactcgaaaaggtccccacttgactttcggcccgttgtaaaccgcgcggttggtgggctgggcctttggttatttacacattttcaatttcgtactgggcgactgggcgtagggcgagctgagctcccaagtcgacgtggcggggatggctgcgacggccggcggtggcggtggtggaggggctaaggcggcagtgaccgagcagatagcacaagcagtgcggtccacctccaacctcctccagctcatggagcagtcctcccccgctcagattagagacagtatggttaggattttggatggatttacttttgtcttgaaggttcatttggcaaaactaccgaagaacctgctggaaaaagcatcctttgcaaagaacacagagcatgtgctgcaccagctacctcaagtaatatcatccttggatgcttatatggacaggagtttgcaaagtgcctctcaaattaagactgttacacagctcttgtcaaacatggagaacactcagctgagtgatgaggcggagatttttggatttttggtatgctcaagatttaacttcagaaatttgctatccccgacgcagcgtaattggaaccgtggtattgtaaacagtccatctttagaaaaatag

SEQ ID NO: 6026 - DNA, 292 bp, Zea mays
  Clone ID: MRT4577_105486C.1
aatgccaaatatgctgcagctgcactactggatcatataaaccaaacttagatcggttacatgacaagcacacgcacactgttgtgtgtggacgacgttcacgacaaccgatcacaagaagcaggggtctgatccgttgatggaggaggcaaggatgtagaattgatacgagttgcatgagcaagcgccatgcgaggacttggaccaggttgaagaccaccgggtacccggacttgaacagggccatgaactacttcacgcgcttgatagccgcttggaagcgctttttggc

SEQ ID NO: 6027 - DNA, 332 bp, Zea mays
  Clone ID: MRT4577_105487C.1
tcgttttttttttttttttttttttttttttttgttttttttttttttttttttttttttttttttttttttttttttttttttttttttttttttttttttttttttttttttttttatatttttcttttttttttttgtcgcatttctagaaagagctggttctatatgctgaatgtttatatggattgctaaaactattatctttccactctgcaggaaaaagttcaaatgcctgctgtaccaagtgcatacgctgagatcaattaatgggggggttctcaacaaaatgtgtactgttaaataatctgtttttgaagaaacataaattt

SEQ ID NO: 6028 - DNA, 848 bp, Zea mays
  Clone ID: MRT4577_105488C.1
cccacgcgtccgcccacgcgtccgcccacgcgtccgtttcaactctgtactgggcgtaggccgtatggcgagctcccaggtcgacgtggcggggatggctgcgacggccggcggtggcggtggtggaggggctaaggcggcagtggcggagcagatagcacaagcagtgccgtccacctccaacctcctccagctgatggagcagtcctcccccgctcagcaacttccacaatgctgcgctgaagtctccatggtgcagcatggcggcttagatggatcctctacttcaggttcacttggcaaaactaccgaagaacctgttggaaaaagcatcctttgcaaagaacacagagcatgtgctgcaccagctacctcaagtaatatcatccttggatgcttatatggacaggagtttgcaaagtgcctctcaaattaagactgtcacacagctcttgtcaaacatggagaagacacagctgaagtccatgttgccttcctctcaaaggaaggaagatcagaagagtaccaaacccttaagaactcagggttgattgacgtcaccgagacatagtggaaggataagcttttgccgtcttatgctagagagatctgagtatgatggtttggctgattggctctatgcatctatccggcataaggatccatcgctgcctaccgtttgcgccacattttaaaatttggttggggaatgctgttatggtgtaatggagctgttttttatgagttggaggtgctacaaggaaagcatgtctgtttatttgtcgtccgctaaatcattttaactaaattgcggcaaataaaaaaagaacggatggattaattgccga

SEQ ID NO: 6029 - DNA, 1311 bp, Zea mays
  Clone ID: MRT4577_105489C.1
gcctcctgggcgactgggcggtcgggaagctgtgcataacggaagtccgagcggggcccacttcgcgatcgggcatccggccctgcggttgggcgggccctgcgttggctgtttacacacattttcaactctgtaccgcgcctaggccgtagcccgtagggcgggcgccctgctccacgccgccggcctgcctccgccggccgacgagtccccccgcgctcagggtcatgggggaactctccgggaaaatctcccgggcaatgcgtcccacccacaaccccctccacatgttctgccacacctaccggcggggcgtagggcgagctgagctcccaagtcgacgtggcggggatggctgcgacggccggcgtcggcggtggtggaggggctaacgcggcggtggcagagcagatagcacaggcagtgcggtccacctccaatctcctccagctcatggagcagtcctcccccgctcaggttcacttggcaaaactacccaagaacctgttggaaaaagcatcctttgcaaagaacacggagcatgtactgcaccagctacctcaagtaatttcatccttggatgcttatatggacaggagtttgcaaagtgcatctcaaattaagactgtcacacagctcttgtcaaacatggagaagacacagctgaagtccatgttgccttcctctcaaatgaaggaagatcagaagagtactgaaactcagggttgattgacgtgttcaccgagacataatggaaggatatgcttttgcttgtgctaaagaaatctgagtatgatggtttggctgattggctctatgcatctatccggcataaggatccatcgctgcctaccgtttgtgccacattttaaaattcagttggggaatgctgttatggtgtaatggagctgtttttttatgagttggagatgctctaaggcaagcatgcctacctccattcttgaatataactaaaccaaggggtgattgacgtccccgtctcgtcgtggaacgcgttgctttcgccgtcttgcgctagagagatctgagtatgatggtttggctgattggctctatgcatctatccggcataaggatccatcgctgcctaccgtttgcgccacattttaaaatttggttggggaatgctgttatggtgtaatggagctgttttttatgagttggaggtgctacaaggaaagcatgtctgtttatttgtcgtccgctaaatcattttaactaaattgcggcaaataaaaaagaacggatggattaattgccacgccttgggtctaaaaaaaaaaaaaaaaa

SEQ ID NO: 6030 - DNA, 1155 bp, Zea mays
  Clone ID: MRT4577_10548C.1
aatgaccacgcgtccgtagcactacactaccaccgtttcagtgctataggattttcttttgacaaggcagccagccggccatgaaaccccctcagctgccggccggggagcgttcctgggctcacgaggtcaagcaggccctccgtgagaaactccggcgctcctacggcgccgcctccgccacaccggcggccggtgaaccgagccgtggcgccgactgccgcggctcggccgccgaggaccccataaggagagtcatgttcttggctccctggggccacacataaaacacagacccagatccggccgggccgggaggaatctactcccatttctctgcacgcagctcagtctcgtccatccagtgctgtagaattttctttggtctgttggcaaggcagccatgaaaccccctcagctgccggcaggggagggggcctcctgggctcacgaggtcaagcaggccctccgtgagaaactccggcgctcctacggcgccggagctgcctccgccacaccggaggccaggccggccggcgaaccaagccgtggcgctgagtgccgcggctcggcggccgaggaccccataaggagagtcatgttcttggctccctggggtcacacataagaacacaaaccggccggccgagatctgggcatgcaagcttgcatggccatgtcttggtcagtcagatctgcaaacaaccaaactgtaaaaaagaactggagcctgtcttgtaaatcatggagcttgctgctgcttgcacccatgaaaaacatgaacgcatggagagctggttaactagctaggtagatagatatatcatatatgggtatgatggtgtggatgagaataaaaaacaaggtacgtagtccatgtctctggtcttggggagtggctgtgagcctgtgagatcctgggaagttcatgcatggcatgagtcatgggtgtggtgggctcaagagggagatctgaaacttgtgtagccactacgaacttgttttccagaaatcttgtaagtaggggagcctgtgaataatctagaaaacaaatcttcctgctctgcgtgtaaaacatcgcttccaggtcagaaattctctcctaggggggatgtttatctctatgctctcaaaacttcttaccccccccccccc

SEQ ID NO: 6031 - DNA, 271 bp, Zea mays
  Clone ID: MRT4577_105490C.1
gcgaatgtcttggggtaagaaggaaagcgggacccgacttgggtactcctcgcggccgagccatgggcgagctgccgcacgccacagcggtggcggcagacactcgcgccactggcgttcccttccaagagcgacgccgaggccgcaggctatcccttggtcacctccccccgcggtggtgggggaaaggacggactacgctcacaccagaggtggccgcaggcgcccgccgttcttgcccttctcgcgtaagaggaccggaggtccccca

SEQ ID NO: 6032 - DNA, 702 bp, Zea mays
  unsure (1)..(702): unsure at all n locations
  Clone ID: MRT4577_105491C.1
aatccccaatagtatactcctcttccactacctgttcgtacttattatcctgctcctctccatctcattcgcttaccgcccaccagctttcccctctccctccccatccaaggccgccctggccgagatcaagatgatgaaccgctctacaccctcatggcgacgagcctcgatgagcgccaagacatgacgcacacgtcctactacaacatcaaccacctgatcctcgatcgactcgtcgccgcatcacggtatccctcttcgtagccgcgactccaagattctatcccagagaatcacagcactgcacatcagccacgacatgccgccgccgccggcggcgccgcgctccaaggtcggttccgaccacgtgggtgactgcctccgctaacagcaccgccgcctccgtggacgacctcaagaactgtcatgctcacttcgtcgaggtctaccaggacacgcttttccacctcatcttgactgcagactatctgaacatcaagtgtctgctcgacctgacctgtcagactgttgctgacatgatcaagggcaagacaccagaagagattcgcaagaccttcgacatcaataatgacttctcccctgaggagngaacagtagatcctcagggagaaccaaagctgcttccgagtaatgaagtgctgaatctattgatgcctaaggtttcgtggtgtctactac

SEQ ID NO: 6033 - DNA, 925 bp, Zea mays
  Clone ID: MRT4577_105492C.1
cttctttcttcaaaaccattacggggtgcctagggacctgtatcataaggcaccgggccggttatttgtttacacacattttcaactctgtactgggcgtaggccgtaggccgtagggcgagctcccaggtcgacgtggcgggggatggctgcgacggccggcggtggcggtggtggaggggctaaggcggcagtgaccgagcagatagcacaagcagtgcggtccacctccaacctcctccagctgatggagcagtcctcccccgctcaggttcatttggcaaaactaccgaagaacctgctggaaaaagcatcctttgcaaagaacacagagcatgtgctgcaccagctacctcaagtaatatcatccttggatgcttatatggacaggagtttgcaaagtgcctctcaaattaagactgttacacagctcttgtcaaacatggagaacactcagctgaggtacatgttgccttcctctcaaaagaagaaagatcaaaagagtactgaaccttaagaattcagagtcgactgatgtgttccccgagacataatggaaggatatgtttttgccgttttgtgctaaagaaattcgatttttgtggctctcaagagatggcttggctttatctggtgtaaggatctgtcgttgcctactctctgtcccacatttgctgagttcggttgggggacgctgttgatgtaactattcttctttcttcagttgccatttacgggcctgttagttgtcacacattctggtctatgaacatgttgctttcttgtaattgcattggttgttttagcagtaaattaaggtagaaattagaagtgatcaaagtgtttaacgtggcactgatctttgtacttcaattgcatgcataccctatgcagtgatgaggcggagatttttggattatataaa

SEQ ID NO: 6034 - DNA, 160 bp, Zea mays
  Clone ID: MRT4577_105493C.1
gaattcaaatcacaatcttttaaacaaaacttttgcaaaaaaatacctagggtttaaacataagggcccaaaacttcaaaagcttttcatgattcatttttggacaaggggatatgggttttaaaaacttcgcttttccctttttttcttggaaaaggcc

SEQ ID NO: 6035 - DNA, 875 bp, Zea mays
  Clone ID: MRT4577_105494C.1
ctgaacccttaagaactcagggttgattgacgtcaccgagacatagtggaaggataagcttttgccgtcttatgctagagagatctgagtatgatggtttggctgattggctctatgcatctatccggcataaggatccatcgctgcctaccgtatgtgccacattttattatttggttggggaatgctgttatggtgtaatggagctgttttttatgagttggaggtgctacaaggaaagcggaaaaaaaaaaaaaaaaacaaccattagctgtagatgtttttcgggtttcaatttcgattctttggatatattaaaaaaaatgtgcaagtgcctctcaaattaagactgttacacagctcttgtcaaacatggagtttactcagctgaggtacatgttgccttcctctcaaaagaagaaagatcaaaagagtactgaaccttaagaattcagagtcgactgatgtgttcaccgagacataatggaaggatatgttcttgccgttttgtgctaaagaaatttgagttttgtggctctcaaaagatggcttggctttatctggtgtaaggatccatcgttgtttactgtctgtcccacatttgctgagttcggttgggggacgctgttaatggaaatatttttcttttttcaaaccatttacgggtgcctaggacctgtatcataaggcaagcatgcctgttagttgtcacacattctggtctatgaacacgttgctttcttgtaattgcattggttgttttagcagtaaattatggtagaaattatgaagtgatcaaagtgtttaacgtggccctgatctttgtacttcaattgcatgcataccctatgcagtgatgaggcggagatttttgg

SEQ ID NO: 6036 - DNA, 354 bp, Zea mays
  Clone ID: MRT4577_105495C.1
ccaaaacgttcgcccgcttgagacactcactcgtttcaccacacgtaagccgtcccacatcagccgtgcaccttcacgcctgcgcacgcctcaccctccttatcgaccgccgctccctgtccttctgcccccgtatccggcgggtgcacacacttatacgcagctaggctccctacctgagctctccatttatccccccagcagcgcccccaattccttccacatcaccaagcccgtcgcggaaagctactactaccatttgctctgctgtatcaagaacaccagccagacgctcatcacaatgatctactatgggcttgcaaagaagctccatccagacacaaataaaggtta

SEQ ID NO: 6037 - DNA, 522 bp, Zea mays
  Clone ID: MRT4577_105496C.1
cacaaactacgctagaagcctggctggtatcagcatggttgggaacatgcttgggtaatgagatgggtatgcaaaccaccttatgttcgaccgctatattggaaaatttttacacatcgtcttagacgattgctttgaggcttgaatgaatggtgaaaagatccctgaaaaagtaccattccgtttgactcgaatgcttgctaaaactattgaagatagcgttattgagggtacattccgaactacttgtgaaactgcgatgcaagttcttctcacagacatacacacagtcatggacatgatggaggcatttgtacatgacccggtactcaatcggcgtatgatcaatttcaatgaggatcctcatgagtcgaactatgggaacgtccatgctcacacagatgctaacactgaagaaacaatggctgacgcagagcttatgcaacctcagatacgagcacgtgaaagggcacttgtacaggatgtcaatcaagttggcgatgccaatgatgatgtcaatga

SEQ ID NO: 6038 - DNA, 577 bp, Zea mays
  Clone ID: MRT4577_105497C.1
gcaagaacgacagagtggtcaggctgcacaaacttgcactggaaagatgctccagtgtccatgacgccgaccatcaaatggcttctgggacttggcctaccggtgtggctatacagtggagactttgatgccgtctgcccactcaccgccacaaggtactccatcgctgacctcgagctctcggtcatggagccatggcgcccgtggacagcaaccagagaggttggaggctatgttcagcagtacacgggaggtcttgtgcttatttcagtgaggggagctggtcatcaagttccttatttccggcctgagagagcactggtgctgctcagatccttcttgaaaggaacgctcccaccttatgtagtggactagtaaatttttattatgtaaccccgtaggaagctcctagtgttgatgcttgtttgacattaatttcagaattcagacagtcacaatgttttccggtcgacaagtacggggtcagaaaacatggtagacttaaattatgcagtacttgaatgaggattttacaccagatcgaaaataaactcacgaatctaggtcgaggtccaaa

SEQ ID NO: 6039 - DNA, 361 bp, Zea mays
  unsure (1)..(361): unsure at all n locations
  Clone ID: MRT4577_105498C.1
aaaaggntagtttttttttttttaagttagacccccccccccnnaaaaacccccctcaaaatattgttacaacaaccaatttcttcccaaacccattaaaaaagatctttctccccacatcattactttacaaataccgttaggtaacccataccctattttcaaaaatacacttatcctatcattaaaaccggtttcaacttaaccccccatctcgcatcttttaatacaaagccccaccctacccgatcggtagccctccctttaacttccatttcccaagcccccccaatcaacacacagtccccccaaaacaaatctaaacgattttaaagttctttgcccatttttcctttacctt

SEQ ID NO: 6040 - DNA, 461 bp, Zea mays
  Clone ID: MRT4577_105499C.1
cttctcaaaactccaaaccctgtcttttattatcgcattaccaactgccttcctttttttgctcacacattatatactttgactgacccctgatttcccaaacaatggataaatcacaaacctgtgccaacctcccagctcacacacttgacggactatggtccacagataaacaagctttcacgatcaccccggcacagacttacctaacctacgatatgcacatagtagaaaggatggcgaaaaaataagatccagaacaaaactgtaatcttcaggcaacgcagagcagtcttaacctgaggacgggagcaaacacgaaggagtcagggcccactgctattggttgggtcccctgcaactgaacgaggctccagctgcggtatactgcccttttgcctgggctgccatgagcctgccgttcagcaccacctgctggctatggacgttcccgcccttgg

SEQ ID NO: 6041 - DNA, 1033 bp, Zea mays
  Clone ID: MRT4577_10549C.1
cattgggtcattgggtacctcgaggccggccgagatctgggcatgcaagcttgcatggccatgtcttggtcagtcagatctgcaaacaaccaaactgtaaaaaagaactggagcctgtcttgtaaatcatggagcttgctgctgcttgcacccatgaaaaacatgaacgcatggagagctggttaactagctaggtagatagatatatcatatatgggtatgatggtgtggatgagaataaaaaaacaaggtacgtagtccatgtctctggtcttggggagtggctgtgagcctgtgagatcctgggaagttcatgcatggcatggctcaagagggagatctgaaacttgtgtagccactacgaacttgttttccagaaatcttgtaagtaggggagcctgtgaataatctagaaaacaaatcttcctgcaaaaaaaaaaaaaaaaaaaaaaaaaaaaaaagcatactcctcctcctccctcgagcttcgttcggtcgctcccactgcttgttcgtcgtcgcagcgccctatatcgctccaaatcgtcggctagccggccaacgccaccgagaagctgacccgagtgtccgctcgtccggtgaactagaaatgaaacctactctgcagcttaaaacctcaagatatgttggcaaccattaaagtacaagtttcaaggaaatgggaattctgtggaaacatagacattgggccctattacacatcgatattgttttggctgacaaagaagccaatccttggaggtgacaagattccttacccacgccggtgctgaactggtcgtcccccaactgatactagtatgttctgttgttctttcaaaaaaacaataatttcggttacctttggaaaaaatgtttgtagaaaaatggcaattagaatttggccaaaggcaaaatgatgcctgttacttttcaactatagccacaatgacatatatgcatgtccaattctgctttggtcaaatgctttgtcactttcggacctgacaaaaaaaaaaaaaaaaaagcggcc

SEQ ID NO: 6042 - DNA, 244 bp, Zea mays
  unsure (1)..(244): unsure at all n locations
  Clone ID: MRT4577_1054C.1
cccactcntccnnctctctctctctctctctctcgtatccnaattgccatcacaccattctaggtctcgggaactcggcggcaggggcggtggcctcctccctcacttccctacatgtcggttccccccaccacttctccattcatacccgcgccacagtactgccctttctcttcaaccctaaccccaaccaaccctacccgctctccgtcgggtccaatttcaagccgctgacggtatcctc

SEQ ID NO: 6043 - DNA, 370 bp, Zea mays
  Clone ID: MRT4577_105500C.1
cccaggcgtgcgaatctccctagcaggagaaccgcgggcaacgacaagcgctagccttcctactgtcccgatggcccgcacgaagcagacggcgaggaagaacactggcggtacggcgccaaggaagcaactggccaccaaggcggcgcgcaagtctgccccggcgaccggccgattgaagaaggcggagcggtaccccccgtcccttcacgctacgggagagccgcagtacccgaagagcacggagctgctgatcccctcgctgccgttccagcgcctggtgcgcgagaacgcccaagacttgcagaccgaccttcaggttccagagctccgcccgcgccgagctgaaggaagcgttcgaggcctacct

SEQ ID NO: 6044 - DNA, 267 bp, Zea mays
  Clone ID: MRT4577_105501C.1
ctcctcaaggccggccgggattcctatgttacgataaggcgccggcgcagtaatcaccgtagtccggagaacggacaaggtctataagatggagatctttgggaagacgctgacagggaagaccattaccctcgacggtcggagcagtgacaccatcgacaatggcaagggcaagatccaagaccacgaagggatcccgccggaccagcagcgggtgatctttgtggggaagcacctggaggatgggcgcatccttgcggactataa

SEQ ID NO: 6045 - DNA, 330 bp, Zea mays
  Clone ID: MRT4577_105502C.1
ggtattcataaagtagtgcagaaaggttcgagagatgcactactacctaaaagatcgcttgaaggtagccggaatcggagcaatgctttacgagctcactcccacaagctggtgttaaaggtcaacggatgaagcatctgcccgaccgtgggcggtcgctcgcgaatggaatatatgccacccatgggggacgacgacagtcaacattgtcaagctcgactatgtgctgaacgaagtcgcggagaaacgggcgactcgcgaccaggatggaataagtccatctcgctgcattgacagagtggcaggctttgagaactagatattggggca

SEQ ID NO: 6046 - DNA, 456 bp, Zea mays
  unsure (1)..(456): unsure at all n locations
  Clone ID: MRT4577_105503C.1
cgccgagccttgatcctatagcggccgccctcttttttttnnnnnnnnngccgaaannaaattggggaatctcttcaataccttgtctggaaggtccttcattccgagtacatgggcaggacatgggaggattcctttttcctcatgccaaagcaaagtgctaaatagacaccaccagagacagatttattcaaaacttgttttctgaatccattttataaccaggaaactaacactctatgctaaacattcggattacacaaatctattctagtgttagagccctacacaaacaaatcaggatcagtaatgccatttaaacctaacctgctgttgaacctctgacatctatggttccggtaccatacgcttcggttgaaacccaaagaggatgcccccacgcagaaatacctcacgggggttatgccccccttgtccctggcggggttaattttt

SEQ ID NO: 6047 - DNA, 475 bp, Zea mays
  Clone ID: MRT4577_105504C.1
tgtctattgcaaccgtgagatgcctgcttcccacgtatcacctacctatgcaaatgaacacatagacataatagcttccgccaaggttcagctaggcgctaggcggaatctaggcggtgacccattgcctagcgcctagtcgggagtactcggtcttaggcgcttctaggcgcttttctaggcgttttggcaatatagccataaattatatatatattatgtatataactaattaactactatatatgacaatatgagtcacagtaagtataaaaagaaggccagtagacatatctgattcctagctgagcttactcttgcatgttcctagctcctgcaagacggcgggggagcagggagaccgagcggcagcacaggggaggaaagcagtttcagcaggggaggaaagcaggggaggaaagcaggggagggggatgagcagggaggggctcgagccgaattccgagcttacgta

SEQ ID NO: 6048 - DNA, 541 bp, Zea mays
  Clone ID: MRT4577_105505C.1
gaattcatatcgtcatggaatattacacatcacatatttgttcaacacaaatatttcatcccatagagaatcatataacttcaaaacatatatctgtaaatcctataacttcaactcaaagtattaaacattaagcatatttgaaaataatcctataacttcaaatccaaagctagtataactagatactatagcagccataaggttgtaggtcctatagtggtcaagcagacgtaagacggagacacttggcctcgattgaagcataataattgacgaaggaagtcaagaaagtgttcctgctaaaaattgaaacccagtgttcctttcagatacccttctagaacctgattatcgtcccatgatttttggagctctggttcccattgtacataattcactcttagaccaaatattgctttcgagagttccacaatatgcttgtattttccatactcttgttctgcaccaagaccagatgtagccaggtccagaagcggcacagcgttcaccacgccatgctcgtccttccggaacgcca

SEQ ID NO: 6049 - DNA, 307 bp, Zea mays
  Clone ID: MRT4577_105506C.1
tctctactaggtctcgtgggtcgttgcaaccctctatagtgagtcgtattaaaaaaaaaaaaacaataaaaaaaaaaaaaaaaaaaaaagaaaaaaacaaaaaaaaaaaaaaaaaaacagcaaaaaaagcaaagaaattcatggggggagacagagtgagatgggtgctcagctggccaggctcgcagcagccgcctgcgtcggacgggccgcgttgttcgccttcggcgcctcgctctgccggcgcgcgggccggagcgaccccggggggcaccgatggtcccgcgggtcctgccgcccgttccgt

SEQ ID NO: 6050 - DNA, 583 bp, Zea mays
  Clone ID: MRT4577_105507C.1
ccggccgggatcacaaatccgatgtcgctgcacatctgtgtgtgaatggtgagggttggacaatgatatgccgtcgctccatcgaagattctggtgacccagctcaattttgctggatcctcccgctacggcacgggagggcataccgagagggctctacaaaatagcatcccttttcatgaagaaaactgcacagaagccaaaggccgctgcagtatcggcctctgctccacacatcagcgacgacctcggcaagcgccatggtgctgacatggaggatctaccagccccatgggcttctgcatcggtgcgatgctcccgatgacctcacctgagaggtccactaagactatggctacaaccctgttggcctgcgtaagaagactaggagtactccaagtagcaggactactacctgatccatgccagatgggccatgtctcagcgccgctgacgctgccattccagagggcagcaacaagttccgagctaactcgatgcctgagggtgtctggctcaagaacggcgcgctgctcctggaatgcaacaccctccactacctcggcaacatcatccccatcaa

SEQ ID NO: 6051 - DNA, 175 bp, Zea mays
  Clone ID: MRT4577_105508C.1
gaaatttccgcaagttcagcaccagaagcccaattccaagtggtaaaacctccaactccaagtcgtacccttcctaaaggtccaaccgggaacccatggcccggtcaaaaacttcaggtggaacaatcccaaaattcaacagttcaagggaccagcccgtaaacaagggggttaa

SEQ ID NO: 6052 - DNA, 293 bp, Zea mays
  unsure (1)..(293): unsure at all n locations
  Clone ID: MRT4577_105509C.1
cccacgcgtgcggttgatcctgaggcatgtacgtgcttgcttgacaccaatgcttatggtgagattatgtagtactgtatgtgcacagattgatggagtacacaaactaagctcgtatcgctagagaatcatggtactatgaataggcatttggatcagcgtgtttagttctagtaagataataccacttctcaattaatgcaattccagcctcccaatgttttgtcaaaaaaaaaaaatnnttaatataaaaaattcaaaattaataaaatataaaaatataaaaaataaaa

SEQ ID NO: 6053 - DNA, 1837 bp, Zea mays
  Clone ID: MRT4577_10550C.1
gacgacgcgcgccaggcaagcaacaatggccaagcttctcaagccttggtacgcggccttcgtgaacagattcctcgccatggtcgcggtggcatctatcgtagccgccgcgctccggcgggcgtggccagcattcagcatggacgatgtcgtcggcagccttggcgccgcgcggccggtccacgtgctcatggcggtcatcctggctgccggcgtggcgaagctgaggcgcctgcgccggccgcgggacgtgtacctggtggagtacggctgcttccgaccgcggccgtgcttccgggcgccgttcgccacgtgcctggagcacgtgcacctcctgccgtacctggtggacgacgagagcgtcagcttcgccatccgcctgctcgagcgctcggggctcggcgacgagacgtgcctgccctactcctaccactacatgcctccggaccgcagcctcgaggcggcccgggaggaggccgagctggtcatcttctccgcagtggacgaggtgttcgccagggcgagcgtgaggcccgagggagatcgacgtgctcatcgtcaactgcagcatcttcacgcccacgccggtcttcgccgacatggtcgtcaacaggtacgggtcccgcgccgacgtgcagtgcctgaacctgtccgggatggcctgcggcgcggggctcgtctccatcggcacgagcaagaacctcctccaggtggcgccgccaggcacgcgcgtcctgacggtgtccacggagatcctctcgtcgcagtactacgtcgggagcgagcgcgcgatgctgctgcccaactgcctcttccgcatgggggccgccgccacgatcctctccaacagccccgagcgcgcgcggttccggctcggccgcctcgtccgcaccatgaccgccgcgcgggacgccgactaccgctgcatattccaggaggaagacggcgagggcatcctgggcgttcgcctctccaaggacctcaccacaacggccggccatgcgctcaagcggaacatcgcggcgttcggccccctcgtgctgccggtctcggagcagctcctggtggcgatgtcgctgctcaagcgcaagttcatgagcggccggcgcgccagggtgaggctgtaccgcccggacttccgcaaggcgtttgagcacttctgcatccacgccggcggccgcgcggtgatcgacgaggtgcagcgcgggctcggcctgtccgacgaggacgtggaggcgtcgcggatgacgctgcaccggttcgggaacacgtccagcagcctggtgctgtacgagctggcctacatcgaggccaaggcccggatgagggcgggcgatcgggtgtggatgatctccttcggcgccggattcgagtgcagctgtgtggcattggagtgcgtcaagccgccggccgacgccggcgggccctgggccgactgcatcgaccgctacccggtgcatctccccgaagtcgccaaggacaacatctgatcaaccccttcttctggatctggggcatgctgcatcatgctggacatgaacatgcccaaggcttccttcgtcgtcgatgtcgtcgtcctttgtgccgggctgtcggccgccgcccaacatgtcgtgctctgtctatgatcgatctcttggaaataatgtagccctacccctacggtgtccaaaacgcaagtatggcgcgtttgtgtttgttaccactgcacttgtttaccacgctgcactgcgtttgtgtttgttaccactgcacaaagttaattaagcgccagttacgattaaaataaaaaaaaaaaaaaagggcggcccttaatatttacaatttgttatacatc

SEQ ID NO: 6054 - DNA, 463 bp, Zea mays
  Clone ID: MRT4577_105510C.1
caccgcaccctttcatcagcctgcctgtccactgttggcttggtgacttcctccgctccgctgccctgcggttccgaaccggcgaaccttgcattgcaacaacaactggctccaaggggcgggcgatcgctggaagcttcctcagccgggttcttaaccgcaagggcggcttggccaggaaggccctgcacgccttggcgtaccacaagaacctggaagacacatgcgcccccggtgtcttcccgacaaaatgatactcgaagccccgagagcccacacaagctctggagcccacaccaaaagaccggcgtgttcgcccccgcggcggtggaccccaatctgacacctggtggcgcgccgcacgccggcgcgaatgctccaaaaggcacggtgctggaccacaaggtgtggttccgcccgctcgaggacgtcgagaagccgccccccgccgcgtgagccgcgc

SEQ ID NO: 6055 - DNA, 801 bp, Zea mays
  unsure (1)..(801): unsure at all n locations
  Clone ID: MRT4577_105511C.1
ttccgggttccgccgcgccgcccaggctgcggccgcacctggcgcggctcgcctccttcctgatcgtcttcgccgtgggctactcgctgggcctcctgtcgtcgtccacccggccgccgccaccgagaccgtcccagtcccagtcccagtcccaggcgacgacgatcgcgcggccgcacgccgacgctttattcccggcgtcgtcgaactcgaacgggaccgccgcgtcgagctacccgcggtcgcctccgcacgacctgttccggttcagggagcggtgcggggagccggtgccgagcgacgccgtggtgcggacgctgctcgacaggctcttcggcggcgagagcccctacgcggggttcccgcccgagcgcacggcggcgctgctgcgcccggccgcggcgcgcccgcgcgggtgggggtcgacgggggcggtgttcgcggagctcatggaggcggtgcgcccggcggtggtcgtggagctgggcgcgttcctgggcgcgtcggcgctgcacatggcggccgtggccaggaacctgtccctgtccccggccatcctctgcgtcgacgacttccgcggctggccggcgttccgggaccgcttccgccgcgacgtgccgccgccgcggcacggcgacgcgctgctgctgccgcagttcatggccaacgtcgtggcgggccggagggggcgcgcgtcgtcctgccgctgccctttctcacggngtccgcgctcgccgcgctctgcgactggggcgtctacgccgacctcatcgaggtggacgccggccacgacttccactc

SEQ ID NO: 6056 - DNA, 326 bp, Zea mays
  Clone ID: MRT4577_105512C.1
aatgtattttgtatattataatataygtktattattatatgtwaggtttaattaatatctyaktkttattyttatggttgggagtataatayataatgcttggcgtgggtcgtgatttcgactatatcactatayatataayyatgaatcatatgattatatayaatcttataaatagtaatatctctgttctctaatatttatcgtcggctggttcatttgahgahaaataaaaagaacggaggagtaaattcgtagctagtcaaatatatatgcsatgcacgtgcacgcttgtcttggatgacgtaacagcatcatgcgtactg

SEQ ID NO: 6057 - DNA, 482 bp, Zea mays
  Clone ID: MRT4577_105513C.1
gaggaacagggatcccaggccactactaatattatctatggtgcaccatacactccaggaaacacagggggcaccatgcctgactgtacacacaccttgcaccagcaactgtttcctttcacgccgacgcaacgttttttactggggggacatcatactactgaactagcgacacccatatcactgattgcacccagaccttgacaaggcgggaaaatttaactacttgatgcacgcgagctccgaactgaatcgcctcgctcgtgctaactgcaatcaaacgtctttctttgtggcctggacagaagggaaaaaaagaaagaaatggcttgggaaaacacatacactccgagtgctccctgtagctcatagatcgatcaggtctgtagccaccgacgcacatcacttactggagggctgtacctccaccggcaggggcaccatgctggacatggggcggtacttgagcacgtacggcatct

SEQ ID NO: 6058 - DNA, 259 bp, Zea mays
  unsure (1)..(259): unsure at all n locations
  Clone ID: MRT4577_105514C.1
atcgagccgggtaaaattagtgttgttcatgtgaagtctaagtaaaaatacaaattagtgtgtgaagggcgcaatcgatatacacatttataccaggtttgattattgtggtgaatgtgtttgtagattgtgtacggtaattctaacgcgcgaaataatttgtataaatattagtaagtctatgtgttagttctcacttggtcatttcatttctancaattgttaaagagttagaataattcaatatctagaacgcggc

SEQ ID NO: 6059 - DNA, 465 bp, Zea mays
  Clone ID: MRT4577_105515C.1
gtaataatattttctatattattttttcctgttctcaactatgaaaagggcggggtaacaataaaacagaaggaacaaaaacacaaaaaactgaaaaaacagaaaggggaggggagaaaaaaaaccgaggacaaaaggacaccacccgctgtcaaaaagaagaaaaaaccaccgaggaaaatatgtatagcacaggggtcatgggattaggaataggggaggaccaaaaaaccgttgggaaggcaaacaaaagcggggtcaatttgcctattcccacagcgggaagaaccgaatttgaagcaacaaaaccaattatgaggaggccaacattttcaaggccagggccgcaatgcgggggccggagatcctaaaaacagggccctgcttttttgcggccaacacatattttaacaacctgccaggtaccacaccaggggcatacaggagcttctggacagaaaggtt

SEQ ID NO: 6060 - DNA, 692 bp, Zea mays
  unsure (1)..(692): unsure at all n locations
  Clone ID: MRT4577_105516C.1
anccgatgaggcaaccagccanaacgccggaacgcaggnacatacttgnctattctncaccctagtaggntccnttnccctactcatcgcactaatttacactcannananggnaggctcactaaacattctactactcaccctcactgcccaagaactatcaaactcctgagccaacaacttaatatgactagcttacacaatagcttttatagtaaagatacctctttacggactccacttatgactccctaaagcccatgtcgaagcccccatcgctgggtcaatagtacttgccgcagtactcttaaaactaggcggctatggtataatacgcctcacactcattctcaaccccctgacaaaacacatagcctaccccttccttgtactatccctatgaggcataattataacaagctccatctgcctacgacaaacagacctaaaatcgctcattgcatactcttcaatcagccacatagccctcgtagtaacagccattctcatccaaaccccctgaagnttcaccggcgcagtcattgctcataatcgcccacgggcttacatcctcattactattctgcctagcaaactcanactacgaacnaactcacagtcgcatcataatcctctctcaaggacttcaaactctactcccactaatagctttttgatgacttctagcaagc

SEQ ID NO: 6061 - DNA, 689 bp, Zea mays
  unsure (1)..(689): unsure at all n locations
  Clone ID: MRT4577_105518C.1
tcgggccggccgggattctctcccatggccacccctccctcagccatggcgggtgcagccgccactgcccactgctcactcagccgtccgccctagccgctaggtcagccgtccgcccgtcgcatgtatagcgccgccactcaccgcaggcacatcggcacaacgcctccgaccaaatccagcggcttcacggcgccacggcctccaggctccacgcacgggcacgacctccacgggaccacgcacgggcacggcttccaggcttcaacggaatctcgtccccggtcactgcacggcttcaacggaatccagcccgccactgcgccacgcctccggccaaatccagcggcgcctctgcacggcgccacggcctccaggcttccacgcacgggcagcacggcttccaggcttcgcagctcatttggaaggttctcagagttgctgatcccaccattggcagttcaagtatcaagaggccattggtgacagaagctacaacatccatggttattagataagggggaagttccctaaaggcaggcagttgaagtttacctgtctttntacactcactgnncttaagtctcccgcggcacatgcacggtacgaaggagccccctgagtgggaaagtcaggttcaaaattgcactttggaaatgctgaagggctgctttatctacatgaaggct

SEQ ID NO: 6062 - DNA, 370 bp, Zea mays
  Clone ID: MRT4577_105519C.1
cacgcagtacgccggcgagatgaagaagggaccgagctgtttcatgcactaaattatgaacacgcgcagaatactgtgggtgcaatatgcatgcactctgcaaactgtactgaaaaagccgattgaacttaccactattatgtgcaacaacaacaaatttgcaaaccgataaaatatacaataatgtatcgtacactacgatgactgatggatccaaaatactttgttcaacatcatgatcttctgctatacacacatcctacagttgtattaatacagacagaccgatttctgtaactcaaaaaatggggcatgcgggcaggataacgttggctaggatgatcatactccccgatcttgactactggcg

SEQ ID NO: 6063 - DNA, 1302 bp, Zea mays
  unsure (1)..(1302): unsure at all n locations
  Clone ID: MRT4577_10551C.1
ggtaccctngcggnccgtccgggaaggcagatcaccaaccaacatggtaccagagcacaggtgttaatcgatccatgagcgacttctcatccaccccctcccctctctccaccattacgacagcttctctgctcaacatgtcttccactgcagtccccatccatcatgccgtgaccatccggctcacaaaggccaactaccttctatggcgtgctcagctgttgccgcatctccgcggcaacggtctgatggggtacctcgacggcaccaacgctgccccagatcagcaacttcctgcgtcatcggctgccggcgccacgctcatcgtcaaccccaactacacggcatggtataacaaggaccagcagatcctcagcggtctcctctcctccatgtctgaggagatccttcgcgacgtcatcgacgccaagacatccaaggacgtgtgggattctctccagaagaagttctcctcgtcaactcgagcgcgcactgttcaactgcgcgtcgagctcgccaccgcacagaagaaagatctatcggcggccgactattttggtaagatcaaaaatcttgctaccgagatggctgcggccgatgcagccctacgtgatgatgagatccttgcatatctgctcgctggtctaccttccgagtatgactcgtacgtcacctcgatgacgaccaaggactccatcacgctacggtctcacgatcaagcacagaagctgaatacaaggctattgctgatgctaccgctgaagttatctggattcaggttttgcttcgtgaactagggatttctttgccacggccccccagtctgtggtgtgacaatattggtgctacgtacctcactgctaatccaatttttcatcggcgcatgaagcatgtggaggttgattatcatttcgtccgtgaacgtgttgccatgaaccagcttgatgtacgtcacatatcttctaaagaccagctagcagacatcatgacgaaggctcttccagctccggcattcactcatctgcggcacaatctgaacttacttgatagatgtccagattgagggggggtattagcaatatcatatactttcctacctagttagggaatatccctagattacagggagctgcgtctccctccttgatttgctgtgtctgtttgattctttcctatgtattgttcctttctatctttgtatatctctgattgatatatatacatgacgcctgccaccgtttgtggtcaaggcagatcaccaaccaacacaccgtaccgtcggttgtcggttttatcgatcag

SEQ ID NO: 6064 - DNA, 393 bp, Zea mays
  Clone ID: MRT4577_105520C.1
aacaaagccagcctaacttcaatacatgtagtaacatatgtacaacgggtggcagcagcacatcactgaaaagccaccaaaatatctgcttcattgcgcagcccctgcatcaacctcagcctccggctttaagaaatcaagtcccgtccatcctccggcttaagacgtcaagttcatccatcctctgcactctccacggcttggcaagctcgctttcctgaacacctccatccacatggtcaccattgatatcctgttaacctttgcgtccctcaggcactcaaatacgtccagcacagcatttgccatttgggtgttgctgctgcaatgcactgccattttgcagtcaacattcgtctcattgtcaattccattggttcaatttgggagagc

SEQ ID NO: 6065 - DNA, 606 bp, Zea mays
  unsure (1)..(606): unsure at all n locations
  Clone ID: MRT4577_105521C.1
cggcccgctcgaggccggcggggcngctcacccaaaccgcgcccctcccctctcctctcccgccagcgccgtcgccgtcgcgaccaccccgctcccgatcgccctcctcttcctccacgccgaccatccccggcgacactgtaccatggcagatcgcgcatgacgagaacgccaatctcgacagcgattataccgtcagagacgcggactcctggcccagttgcccggaattccgactgacccggcctgtgcactgatgtgcaggaattaaggcacaggcgcatggggatccagtgacttggaaactaatggacaaagagcacgcccttctactatccaatccaacgaagcgacattgatcggctggttgaatgaagtctaccacaacgataaggatgtcttggaagcgcaatacctataatgaagaaatcctcccagcgccttccaggtattggatggcccatgcgtcctgcagaatacctctgtttggagagaagctgtgcacagcatgaaaaaacactctgagcgcctcttcgaaggttgataaacttccccacatcagtttggcttgccatttctgttgcggctacaccacttactccagca

SEQ ID NO: 6066 - DNA, 249 bp, Zea mays
  Clone ID: MRT4577_105522C.1
catgccaatggcttgctgtcgcactcaactgtcgcccctgaggctcgcattgcgcgcaacaggcttcacaccacagaacacatgttctgtggaagcgaatgacagtacggtgacgcctagtgacgacgttggtaacaagcggcgccgtcttgatagtgccacatcaacatgcgcgatttctacatggttacggctcggacttcctctgccgccatgacctttatgacaaagttgtatttacatctgaac

SEQ ID NO: 6067 - DNA, 322 bp, Zea mays
  Clone ID: MRT4577_105523C.1
attcaaccccgccgcccaatccccaatggctcaaccaaccacgaaaaccgccaagccgccggcatccttccgcttccgatggggaatgccgcctgcggccccccctccggatttcctccggggggccgctgccgccgccggcgcggcctgatggttgttcagcacgtcatcctcgacgtccatggggaattgttctctggcggggtcagcggctgcggcgttccgccggcgtcgaaggccgcgatcgccgcgctgaaggaggtgaaggccggggagggcgacggcgatggcgacgacgcgctgggcgagtgcgccatctgcc

SEQ ID NO: 6068 - DNA, 282 bp, Zea mays
  Clone ID: MRT4577_105524C.1
tggtcagattggcgtttcccgtgttcttcttcctcgcagcggcggagttcgcggcggggacgcggtcgccgtcggctttcgtacaaaacgccatctactccaaccgcatcaccatcttctccaagacttactgcccctactccatgcgtgcaaagcacatatttcgagaccttaaggaagatccatatgttgttgaactagatacccgagatacagtaaatgcgctttcaaatggacagctccagaaacttctcgggaagagtcagtcacaatgatgggtcg

SEQ ID NO: 6069 - DNA, 537 bp, Zea mays
  Clone ID: MRT4577_105525C.1
gcggaaaggaccgaacggctcgggttgatccatcggatccgaaggggcatggctctggtcagattggcgtttcccgtgttcttcttcctcgcagcggcggagttcgcggcggggacgaggtcgccgtcggctttcgtacaaaacgccatctactccaaccgcatcaccatcttctccaagacttactgcccctactccatgcgtgctaagcacatatttcgagaccttaaggaagatccatatgttgttgaactagatacccgagtggatgggcgtgacattcaaagtgttctcctggacctagttgggcgtcgtactgtgccacagatacagtaaatgcgctttcaaatggacagctccagaaacttttcgggaagagtcagtcacaatgatgggtcgctggacaagcttgccctgtcaaaaacacgtgagtatatgtttgggaggggtgtttttttgtgtttagggctcaacagaatctggtgttgtgacaaccatctgtacggctggatttgtgatttgctcaattgccccccc

SEQ ID NO: 6070 - DNA, 951 bp, Zea mays
  Clone ID: MRT4577_105526C.1
attgggtacctcgaggccggccgggtacatgtctctcggcaacggatatctcggctcttgcatcgatgaagaacgtagcgaaatgcgatacttggtgtgaattgcagaatcccgtgaaccatcgagtctttgaacgcaagttgcgcccgaagccattaggccgagggcacgcctgcctgggtgtcacacagtttcccgtgttcttcttcctcgcagcggcggagttcgcggcggggacgcggtcgccgtcggctttcgtacaaaacgccatctactccaaccgcatcaccatcttctccaagacttactgcccctactccatgcgtgctaagcacatatttcgagaccttaaggaagatccatatgttgttgaactagatacccgagtggatgggcgtgacattcaaagtgttctcctggacctagttgggcgtcgtactgtgccacaggtgtttgtcaatggacagcatattggtggctcagacgatacagtaaatgcgctttcaaatggacagctccagaaacttctcgggaagagtcagtcacaatgatgggtcgctggacaagcttgcactgtcaagaacacgtgagtatatgtttgggaggggtgttcttttgtgtttagggctgaacagaatctggtgttgtgacaaccatctgtactgctggatttgtgatctgctcaattgcacccatctatgttttaccttgttcattatggaaattattagtataggtagctcaatgaactagctgcataggctatcctcagaaaaaaaattcctaaacttctgacgactttattggtatcgacatcctccgttacaaagtcattttagattttctaggtacataatttttgctatatatatggacctcagacatagcacatttaggtccttttaaaaaaaagaaaaaaaaaaaaagaaaaaaaaaaaaaaaaaagcggcc

SEQ ID NO: 6071 - DNA, 373 bp, Zea mays
  Clone ID: MRT4577_105527C.1
atctatttttttttgcgcaactccgggggccgcaagagggggcgcttttagagcacattaccgggtggccccggggttgacggggggaaattcaaaaaggaaaatcgagccgccaaagaaggggcatttggcccgttccaagtgcaaaaagggaagcttgactggggccacgggggtagaggcctgctttttcagggccctgaaggggtcctggtctctgcctgggactggctatgggtatacccacccgaccgggcactatgttcccacgacgaagacaacatgggccccacatttcggtgcttggccgccatagattttcccacgtggcaagcaagaggggacttctatcgctaatagtgggagacccaac

SEQ ID NO: 6072 - DNA, 197 bp, Zea mays
  Clone ID: MRT4577_105528C.1
cattcgtcgtggcaaaagataatgatacggctggcgctctagagactcctgccttacatccgcatgcatgcgacgaggtggatgttgtttatggtcactcttgatggagccgactagcccgccgtgtacaaccctgtcactgagaaaacagttgctgctcccagatagatcgccttggacgagatccgagtttctgc

SEQ ID NO: 6073 - DNA, 672 bp, Zea mays
  unsure (1)..(672): unsure at all n locations
  Clone ID: MRT4577_105529C.1
cctagacctgattccagccgagagtgacaatctccaactcaaagctctattgcagaccctgattcttccacaaggggcagttgtcggtgatggaggcgttcggcgggttcttcgtggacgagaaggcagcgcgggtggagaacatcttcctcgagttcctgaagcgattcaaggagtctgatggcgcgggggagccgttctacgaggcggagatggaggtgatgcggtcgcgggagtccactaccatgtacgtagactttgcgcacgtcatgcgcttcaacgacgtcctccagaaggccatctctgaggagtacctcaggtttgaaccgtacttgaggaatgcatgcaagaggtttgcgttggagcaccgggctggcgagaaccgtgccccgctcatctcagatgatagccccaacaaagatatcaacattgctttctataacatcccgatgctgaaaaaactgagagagcttgggacagccgaaattggtaagctcacatcagtaatgggtgttgtgacacggacaagtgaagtgcggcctgaactattgcaaggaaccttcaaatgtctcgactgggggaaattgtgtgaaagaatgtggagccacagtttcaagtacactgagccgatatnatgccgtaatgcaacatgccagacagaacaaatgggcc

SEQ ID NO: 6074 - DNA, 223 bp, Zea mays
  Clone ID: MRT4577_10552C.1
ggggtcgttatattatttgaaaggggaaataagagaaagggttgacgtgatgcgggggttgctaggtaaaaaaaaagatggtcttgggggggggggggaaaaacccggggcaaaagctaagtgcgcgaagtggtggagttccaaaataaaaagacctgcggaagggcttttggcgtgaatcaaaatagaacaggatttgggggttgggtggggaataacgggc

SEQ ID NO: 6075 - DNA, 190 bp, Zea mays
  Clone ID: MRT4577_105530C.1
gtgttatacctaggataaaggcaggaaggggtctaatgaggaacaagaccagaatgaatgtgaaggagatttatatgaagaggaagaagctggacaccgcggaaagcgaatgagaaaataatgggaagatcaagaaggaggaaaagaagaggcaaagggtcaaaacagctaatgacaggggagaaaggaa

SEQ ID NO: 6076 - DNA, 316 bp, Zea mays
  Clone ID: MRT4577_105531C.1
gagctcatagtcggcggccgccctaaaattaaaaaggggggccaaaaaaaggcacacccgcccaagccccgttcgctgctattttgaaaccatacaaggtccaaccacgaacgggaactttgctatcacccggcatgcaatgcccctgcaagaaaatcacagagtggggcaacatgcaagcaaaaatgcaacttttgaataaccccgaaaggaagagggcccaacaacaacacaagcaatccataaatggccaccaaccccatggccaccagtcagccgagaatccaagcaaggagagcccaaaacccaaccggaa

SEQ ID NO: 6077 - DNA, 301 bp, Zea mays
  Clone ID: MRT4577_105532C.1
cggtctcgtgggaaaataaaaatacgaatataaaccacacaagtatacaatacatgagaatgaaaacacattatatatatatacatgcacagtaaggtggtcaccatatagtatcttccgtcttaaacactcatcttcatgatctgctagttgtgtggcctgttgcttgcttcactggatatatcctataacatgaactaaaatccgggtctgggaatcctatggcgtttccttttttcctgctttgatgatgtttgtggaccttataagtgccgctaatatttcaaactttgccgacttt

SEQ ID NO: 6078 - DNA, 327 bp, Zea mays
  unsure (1)..(327): unsure at all n locations
  Clone ID: MRT4577_105533C.1
gaggaatggacncttggggtatcacgcggtcgagatccgcctgtcgatgctcggatgtggtgtaggatgacactggttcttgtgcattgcttagcaatgttcggaagtttagagttgcagccagaaatgcatgaagtggctgactcgatggttgatagacttagaactataggccgaaattcagatgggcaattcatagctgtggacttgagggttgacatgttgaataagaagggctgccaaaatagtgatattgatggggagaaaagctgctacaatgcacaagagattgcaggatgttttgaggcagattggtatgacaaggat

SEQ ID NO: 6079 - DNA, 512 bp, Zea mays
  Clone ID: MRT4577_105534C.1
gcgttcggttgtactacacgagcgcgcgcgctcgtagagacacactctcacacacgcgcgtgcgacacgatatatcttttatatagtgacctatattataaaatacagtgcgcggctttacacagcggcgacagtgaaaaaactgtggcgacccaaatcataatcctcgcgcaacatatcccttttgccagatgtggtgttatagaaaagaggcccacacatagcgcttttcaaaacatgcgcacactcagtgtggaaagtgacacgccctgtgtagcggcatattaagcgcggggtgtggggggtacacgcacagcgacacctgcactcttgacagccctatagcccgcgcctcttgctctctttcctctctctttctccacatgtgccgcgtttccccccgaagatctatatatggggctctctctatagggccgatatatagcgctacacggcctctaccccaaaaaacactatgatagggatagggcacacatagtgccatatccctc

SEQ ID NO: 6080 - DNA, 362 bp, Zea mays
  Clone ID: MRT4577_105535C.1
agcagtggtaacaacgcagagtactttttttttttttttttttttttttttttggcacttcttggttattatcctcttgtctgcttttatccttctacggcggttaccacccgactaggggtgctttctcaaacaacaaccctacttgacggcgcctcctggtgcgacaagaggcggcccgcacggcggtgttatcatcctaggaggccctttttagaaaactagtggccgccccgccgctgatgacgcctcttcagactactattatgggcggcgaggacgcccgactcttaagaaggggtgctgccggctggttcgtcgcctctaggagaatactcctaagaagcttctcctccgccgat

SEQ ID NO: 6081 - DNA, 332 bp, Zea mays
  Clone ID: MRT4577_105536C.1
atattgctgggtcgacgagctttctagacggcggccgcccttttgtgagtgcgcaataaatgttggttcccaccgcagccagccttattatttatattaataccattcaatcacatattgatagactgacgatgaatgttaaaacatgatgtactatactaaactcctgaagccgtagatgtcttgatgaaacctaggactgttaaaccatatttcaaaggctcaaaatcactgatatataggtagtcactggctttgaagcaagtgagctcgcacctacaccgctatagctattgacacgactgaaaatccttctaatagaaccaggatgc

SEQ ID NO: 6082 - DNA, 247 bp, Zea mays
  Clone ID: MRT4577_105537C.1
ggactccctgacccttctcatcggtgacaagccggtcaccgtctttggcatcaggaaccctgacgaaatcccgtggggtgaggctggcgctgagtctgtcgtggagtccaccggcgtcttcactgacgaggacaaggctactcacatctcaagggtagtgccaagaaggttgttatctctaccccaagtaaagatgcacccatcttcgttgttcgtgtcaatgaagaccagtgcacctcgggtgtta

SEQ ID NO: 6083 - DNA, 302 bp, Zea mays
  Clone ID: MRT4577_105538C.1
acgcgtacgcccacgcatccgtccacgcgttttttcatgtgatccccgattcgctacctgagccggtgaccaatgctactgcctcaccaaaacatgagcaagcttcccgcgagagcgctcaaccagccaagcggacgtcagtcagaggtgagcagtataatgtctgtagcgaactttctctccaccgcggcgctcttcgcccgcatcgtcgctgcctgctcttctatttcaaccccgacacggatgcacccccaaattccgactgtactgccttattgacactaatgcctattcccatgaag

SEQ ID NO: 6084 - DNA, 345 bp, Zea mays
  Clone ID: MRT4577_105539C.1
tgatcgagtgagttcgctgcttcttggcacagttttttgattcagaaatcagaacacatgtgatctttctgagttttcttgagcgatgacacggctgctaaacggaacgcagcaaccttcgcctacatacactgtggaacagctatatttacactgacaattatatgatacatctgtcagccgtcgtgcaactcccaagctcccaacatgatggatcgtcgtcgtgcgccatgcactctcgatcactatacttacagcctattaccagtacttgaggcgtagcgccgcatcatcgctgatcaaagcccatacgcagtgctgaaataagtcccggtgacatttctg

SEQ ID NO: 6085 - DNA, 303 bp, Zea mays
  Clone ID: MRT4577_10553C.1
gggacggcgctcgccacagctaagccggatgcgcgaaaaggagcatagcgagcaagcggagagcagatctgcaccgaccgggcgcacgaatggagaaaccggagcggaagaaccagctgcttatagacggactctaatctcctgctgacagggggggcataatctacagcaccttcttctgaactgcacctttcagcaacgacggcagggggacccacacgaaagatcaactgggcaactatatcacgggggaagagaggctagacacacacagtccaaaagaccgcaagcatgagcaagggc

SEQ ID NO: 6086 - DNA, 277 bp, Zea mays
  Clone ID: MRT4577_105540C.1
gcatgcaccacagactccggtgcgggtggagtaaatggctggcgcgtgaggtggacctcgaggctccgcatgcagcgctcctgtgaaagattctccaacagtgcagcgcatgcacatggccggccagagggaaaaaagaaatgaaaagaaaaaaaacgaaaaaggcgaggccggctgggagatctctatcttgtattttcttctcagtttgtcttaccattatctgaaaattcagttgaggttttgatcctagaattccaaacacactgccacacca

SEQ ID NO: 6087 - DNA, 471 bp, Zea mays
  Clone ID: MRT4577_105541C.1
cttctcctacactttttttttttttaaaccccctttggggggggggggggcgtttttcttcccccccccccctttcttttcgggggggggggtttattcctttgggcgccgcaaaccgcgcgcgccccccccctccccctttttttccctttttttcctttttttattatgttcttccgccccccccctccggcctccgccccccccttcccccccctttttccctgtttcccccccttttttgccttttcccccctccctgtccccgtccctccccccccccgcccctctggctttcccccttttttggggctcctccgttgctggtgcctgcggaccgttttattctttcgggtgcgccgtcttggtcttgtccccccctcccgcgggccccagcccccctactcggcctggcgcgtcccgtcttctacttttccgcggtgggcgtgctccgcccgggggtcccgcccc

SEQ ID NO: 6088 - DNA, 1442 bp, Zea mays
  Clone ID: MRT4577_105542C.1
gtggcaccatatacattcccttcatcatgctcttatgatctgttttaattctgacttttctgatttggtcccggcttctcctccttccccctcggatcggcggcagttcccgtgccctcacagtcacaggggacgcggctcgcctttccttccccgccaatccatccgctcttctcagcggcgagaagaagagatggggagcaacgccgccggcaagcctcctcctcctcctgctgctgctgtgtcgtgggagttccacgcgacggggcctcgcaacttgaccagccccggctggagggacctcatccgctccagctggagagatccaagctacagaaggatcgcagtgtcgtgcttcgtgcaggccgcgtatctgctggagctggacaggcaggagggcagagccggtgaagccgcgctcgctcccaactggtggaagcccttcaagtacaagctggtgcgcccgctcatcgactccagagacgggtccatctacggggcgcttctagaatgggaccagctcgccgccctcgctgacctgatagtggccaagcctcagggcgctcccaaggtggtcctcgcgctcaggggcaccgtgctgaggcagctgaccgtggtgagggacctggaagacgaccttcggctgtttgccctggagagcctgagggggtccgtcaggttcacaggcgcgctggaggtgctcaagtcggcgatccacaggcacggcagcgccaacgtgtgcgttgccggccactccctgggcgccggctttgcgctgcaggtcggcagggccttggccaaggatggaaccttcgtggagtgccatctgttcaacccaccgtcggtgtcactcggcacgggcctcaggaaaatccaggagaaggccagcagtgtcctcaagcggtatatcagtagaagcggcggcggtggcagcagctcctcgtcaaatgtttccccaggaccaggagaggagctacaagccgccgccgctcgagatggagttggagaagaagtgatgagcagggaggtcaaaagatgggtgccaaacctgtacgtgaacagctgcgactacatctgctgcttctacgctgaccgtagcggcgtcgctaccgtcaccgaggagaagcgttccggagtgcattccaagctgtacgtgatcgccaaaggaccgagcaagttcctggaggctcacgggctgcagcagtggtggtccgatgattctgagctccacttggccgtgcacgacagcaaactcatgtataggcaccttaagtccctctatgtccaacagtagtagagaaggcattagtacttgtttctcagaatgcctagttcttcttctctagtccagccagacaagaaaacatgtaaaccgtcagctgattaagagctccaactcttgcaactcgtctaagcatatcttcttctcttctccaaaaaaa

SEQ ID NO: 6089 - DNA, 1467 bp, Zea mays
  Clone ID: MRT4577_105543C.1
actggaagtgcaaccccctgttttactgcaagtgcaagtgcaaaggcttcatggcgagactcactctccccagtccccaaagcccagaaccccagagccgcacgcgcgagcgcgaacaccatgctgccggcgctcattgccctgctgctgtccctgctccccgcggtcgccgacgcagcgtcaatggatccaacagagagggagacgctgttccgcgtcatggaggccgtgtcctccgaccgggactggcgcgtcgagagccccgacccctgcggcgggccgtggccggggctggagtgcaagccggccgccgacgcgggcgcggcgcgcatgcacgtcacgcggctggacttcggcgtggagcccaacccgacgtgcaaggactcggcgtccttccctcccgaggtcttcaccctgccgcacgtccagtccctcttcttcgtcgactgcttcaccaacccggccgccaccacggcgctcgccctgccgccgcccgccaacctctcggccaccggcctgcagcagctcagcatccgggccaacccggcgctgtccggcgtgatgccgccggcgctggccagcctccggtcgctccaggtgctcaccatctcccagaacggcctggtccgcggcgagatcccgccgggcatcggggacctcacgtcgctgctgcgcctcgacctcagctacaactcgctctcggggccggtgccaagccagatcggccagctcaagagccttgtcggcctggacctcagctacaactcgctctccggcgccatcccgagccgcctcggcgagctgcgccagctgcagaagctggacctcagctccaacaacctcaccgccggcatcccggacgccgtcgccaacctcacgtcgctcaccttcctggcgctcagcaacaacggcctcaccggccgttttcctccgggcatctccgggctgcggagcctccagtacctcatcatggacagcaaccccatgggcgtcccgctgccttctgagctcggcagcctcgcccgcctgcaggagctccgcctggccggctccggctactcgggcccgataccggacgcgttcggccagctggcgagcctgacgacgctctcgctgcaggacaacaacctgacgggacccatccccgcggcgctcagccggctgggcaggatgtaccacctgaacctcagcaacaacgcgctcggcggggccgtgccgttcgaccgcgcgttcctgcgccggctcggcgggaacctcgacctgagcggcaactccgggctgtgcctggacgaccggagcgccctgcggggcatcggcgcctgccgaggcggcggcgacggtggcactccgatgtcgtcgtcggcgcgcactagctcggggagcagaggtgtgaggggttcgctggtcggcgctgcgtgcgtggccgtgtgctgccttcttgccttgaacgagcacgctctgtattga

SEQ ID NO: 6090 - DNA, 422 bp, Zea mays
  Clone ID: MRT4577_105544C.1
gggcattctgaatgctctgtcggtctcccgccctggctcaccagctatattgcttcagatgacagagcacaggaaacgtacccgtaaacccctattgcgttacttacttgtaaatcctggtaatttacaaacagagggagggctgatacataactacatatacaagcgggggaccaaccgaaacaaacatgatgctgatctgttcgagtttacatgctgcatccttgctgttgataaaaatcgcacctaggacgagccattgatgctggatttagttgcactgcgagatcatcagcggacctggttcggggagcgagtgagcatgggatcgctagtaggctcctggagatctctagaatgttcgattgacggctcaccggaggcattcaggggctttcagcggggactgaggtacctattgc

SEQ ID NO: 6091 - DNA, 472 bp, Zea mays
  Clone ID: MRT4577_105545C.1
acctgattttgtagcttctttcgttgcgctgctaccaggtttcatcgggtgctgccgtgatttaacaggcgcgtacccgaggaggaggtcgacggccccgtccttccctgcaggaggcccacccgacggaatccgccggctcgcacttcatcgaggaagcacccgtcggaggcctcgagatcaaaggaaacttcctcaaggtcgcgaacatcgaagaagacacctgcaggacccggccgcgacagtgctgctcctgatgaggcacgagatgacacacaacaagctcgtctgcaacgccggcttcatcctgaagctccacctgcaccagttcgtggaaggacaccagcaagaccatgatcctcccgctgacggctaactagatagggacaaagtgactcataattgtgcgcttgctgtgccaagcctagcgtagctgtacgcaccagcgctcatttaatcacgcgcagcatac

SEQ ID NO: 6092 - DNA, 368 bp, Zea mays
  Clone ID: MRT4577_105546C.1
ggggcaaaaaaccgaaaccggaaaaaaaaaaaggggatgccaaaaaaaaaaataggttttaggggaccaggcctcaaaaaaactttcgaacaaaaaaatgtttacaaaaaaaaactgaaaacccagctgcgaaaattgggacaagaccaagatgaatcccctccaaacaaaaaattgaaaagccatggagggcgttaaaaaatttgggggtaaaagaaatgtttaatcccctccaaaacgaaacatccaaacattattgcgaaaaggggctgttgaaaaagcggacagcaggagggaaaaaaaaaacgtttacttaatttgggtaggggagcaaaacaggcctgaggggtttgccccaacatgggaag

SEQ ID NO: 6093 - DNA, 281 bp, Zea mays
  Clone ID: MRT4577_105547C.1
gccggccggggctcctgtcctgctcgcgctcgtcgcccccctgccgctcggctccccttggcccctccaatgccgccacccatggcactgctgccgctctcctccgcatccgcgaccgccgcgatgccgcccttccactcctgcccgcccgatgcgatgatacttaaaaaacaacaagaaatactaatagcatcaaaaacacctcagagaaacacctactcacaacaacgctaaaaaggatgaataatagaaaaacacacacacgatcagaaagaacacaa

SEQ ID NO: 6094 - DNA, 1890 bp, Zea mays
  Clone ID: MRT4577_105548C.1
aaccctcgcgaaccgccggcggggttcgaagcggaattcacgactgcaattgcaaaaccctagctaccgcttcgccgaattccctgtcctccgcccgcttcgccgaattccctgtcctccgcccgcttcgccgaatttcctctcctccccgcccgccgcccgtcaccgcggcttcgtctgcgcttgtccctcccgttccaaggagcacgtgcttctcgccgcgccgttcgcccgccgccgccgccaccggttcatcgccagctatgtcttctcaggtcgacagccgcagccagtccgccgggaagcgcgcgcgcaccgacggcagccggcgtgaggacgactgggtttgccccagctgcaagaacgttaacttcgcctttcgcaccacttgcaacatgcgcaactgcaaccagtccaggccagcagatcacacggccatgcagaccccgcctcgctatcccacatcaggaggttacatgagcccagggacgccaccgtcgatgtaccttggtggtggtgctcccccatatggctcttcaatgtttaacgggcctgcaatgacgcgctatggtatcacacagttccctgggggttctgcgtatccatatggatatggtggccgcatatcaatggggagcccctacgggccaatgcaaatggctgggccaaccgcatactctggtggatctatgatgggagcaggtggaatgtatggaatgcccatggacaggtatgggctaatacctgctggttctggtccaatgggcacgagagctggctcatattctgatgaagattctcagaagaagtctgcaggagctggccgtgataatgattgggagtgtccaaattgccacaacatcaactttggcttccgcacagtctgtaatatgagaaagtgcaacacacctagacctgaaaaccagggatctaagcctgatggtttaagagggtcaaaaccaaagacaccagagggcagttggaagtgtgagcagtgcaataacataaactatcctttccgaacgaaatgcaatcgtccccaatgtggagcagaaaagccatcacagacgaacaatgcaaatgaatcagcggaagatcaggacaatcagtgagtcctagaacagtaatgagggtcaagaaggtccagcgtcgtcgtcaaggttcagtctgaatgtggggtacatctgtgtcagtagtcgccgttacaagtttcttccccttgagaacttagttgagtcggggccttggagttggcaatggagtcttgccttccttaatcactgcggataatggtcaagaacatcaatttgttatgtggtttgtcaagaacatccatcttgcctttcctggctgaacttggttacttgtctttgttactggtactctggataaattaccatatgttatatgaatgtcttttatatgtgtcatagaatatcactcatctgttatgaagtatcacaactgtcaccattttgttttaaaggaaaaaaaaaaaaaaaaaagcggcctttttgccatgtaacattacgaagcttttatcaaagctacgacttctgcatgaatttcaagacagcagtgagcagacggatcttccttgggctagtgctggatcaccgacattgcggatgtcagcgctcagtgaattgcagaacagtctttcaaactgatgcgctaccatttcgtattggaaaacaaggacaagcggttcggcccagaagtgttttagtactcgagctgcatgcaggcccatttagcacgatctggctatgacttcctacatggcccagaagccgtcgtctactgatcgctccagcttcttcttccttcgtcgccgctgggctggtaacattcattcgcggaccatcctccctcgatcgaagttagcga

SEQ ID NO: 6095 - DNA, 246 bp, Zea mays
  Clone ID: MRT4577_105549C.1
aagagacgacggactataaaaaaacaaagaaaaagaaaaacaaaataaaacacaggcgcatacttaagcgatggtaggcataatacatgtacactggtctctatatctgtgaacaacgcgggcgcatcggcaagtcacgtggaagtacgagttacaagtgaatatacggtggatggaccctatatgtaggaagactggcttcacatacgcgagactttgttgcaaattcaaggggggatgcaactg

SEQ ID NO: 6096 - DNA, 705 bp, Zea mays
  Clone ID: MRT4577_10554C.1
aattcggcacgaggccaatctccatccttccatcttccgctcccttccctgcttgcgctcggcacgcaggcgacctcggcggcgcttgggctcggcctcttagcgacggcgtcagcagattcccctcctgcctctcgccagtcccctcgcctctggtcctctgcgaaccggccggtgactctgcgtgcgtgcccctctccctctctcctcccgccttcggtggatcgtcaacggcgcccggcctcggcggctacgccgcgcgtggcctgagggcaataggagccaacggccgctgctccaccaaggcggtcgcgccgctttcggagccttatgccccaatgcgaagcgttacccgtcctcttagcgcttccgcttagtgccgccttttggaaccgtggtatagtgtagtattcaggtcaaggttatcagggacttcctccgttctagattataagacattttgacatttctaggtatatagattttgctctgtacttagatagatatacactatgtctagatatagtactaaaagcaatatatctgccaaaacattttataatttggaacggaggaattatgtataagtaatgttcatgttattgtccagtgaatggtgtgtgcaaaccgttccataactcatttaatctttatatgaaggtggcccaccatttagaatgagtgtagtacccgacggccgacatg

SEQ ID NO: 6097 - DNA, 357 bp, Zea mays
  Clone ID: MRT4577_105550C.1
cggtggcacattaaaatctggaaaggtaacttcttatttttggttgcccccatacctcatccaaaaaacctttttttttgaattccaactaataagcaatctaaaagagggcccccccaataatgtgtttttggtaggaggcttttggttttgtcaaaacaagttggacaaagggcaacaattgttgtatttttaaaagggttgcggggttacccccaaactgttggaaaaaaggcaacaactgttgctttttaaaaaaggaagcacggtttgctgcacctacctggctaaatggcactaatatttgctgttgcaaataaacaacggggttcagggcgcccaattggttaaatggaa

SEQ ID NO: 6098 - DNA, 328 bp, Zea mays
  unsure (1)..(328): unsure at all n locations
  Clone ID: MRT4577_105551C.1
cggtccgtatttcctgttcggccgcccttttttttttttttttttttttttttttttttctttttttttttttttttttatnaancnttttttatagccgagccaaaaataaatactggcaggcctaaccatttttttcaccaaataaacatattcacacaaatcacttttttaccccatacccttaaaattcatttttcccaaaacaaaataccatattcttacccaaaacctttgtattccctctccaaccctttattttacttaaaccaccacccttccttattcctttccaaaaaccccctttttaatttttcctcttttaccc

SEQ ID NO: 6099 - DNA, 411 bp, Zea mays
  unsure (1)..(411): unsure at all n locations
  Clone ID: MRT4577_105552C.1
aactcggcacgaggacaactgcaagtctttccaacgacttttacacccttcaacaaaatctaagccctgcaccccttttgcatgtggttccttgtttgaaaggagaagcgtgtcactctgacactgagttgtcaaagtaccgaatgccctaaccataaaaacaatggaacctgtgccagaggtgataattgcaaattcttctcatgtgatgccaaccacagaaggtactcccacaaaagcagcaaagaccttcttgatgctttcacttggcataatgagaaaaacaaacaccagagagcataccaagaagcccagaagaacgccaacagttcacaatgttgctcctaataattctatcctaagaaacctggnttggcgtctccagcaaatcccaaaatgtttctaaccata

SEQ ID NO: 6100 - DNA, 644 bp, Zea mays
  Clone ID: MRT4577_105553C.1
agcgacgatggcatccttgacattatgttcctcctctcgggggcagatgcgcagatgccttaccgcctagatcacatccttgtggcagatggtttgccgccgtggttgtttggggctcgccttcggcaaatactttgccaccaatgcttgtggatgcccgtggctgctccgggttgccggtgtgttccgttttggggtcacttgaaggagttgcataaggcgggcaagctttgtgaaccagcattggttgcaggagacccaattgtaacttcacttggcaatgctcagcaggcatctgtttttagatcaagcaccgatgcctgtgtggccttccttgagaacaaggataaagtatcttatgctagggtatcattcaatggaatgcattatgatctacctccctggtccataagtattctcccagactgcaaaacaacagtctacaacaccgccagcgtgagattgggcacctgattctttttgttcattctacaacttccttttgttcttattttaattgggttgctttcttaaattgtatggcttccctaatattgagttcatacaacatttccttggtgctattgtactgtataattcttggcaaaaaacttttatactgatatgtttatacaggttggaag

SEQ ID NO: 6101 - DNA, 258 bp, Zea mays
  Clone ID: MRT4577_105554C.1
gccgtcggcgacgctcaggatcagcagcagcagcagccgcagcgaggaaacgggaaacggctcggcgggcgcatcccccaacggctgacatgacgtagcagcaccagtaccctacgggtctacggctccgccgcagcggccgtgctggccggccggccggcccaccgtagcgaaaggcgcgctggaatcgaaggcgtttcgactgattttttcccccctccatgtcttttccatcgcaccagctggtgaattgaatga

SEQ ID NO: 6102 - DNA, 971 bp, Zea mays
  Clone ID: MRT4577_105555C.1
cgcgcgctggctgactgggcgtcggcgtcgccaccaaccgccgctataataaacacacgcacggcaggcaggcaggcaggctccatcagtacagatccaccgccaccaccaccaccaagcactccagtcccgcagcagcatggccggcagcgcgtcccgcctcgccatcctcttggtgctcctggcggcgtcaccgctgcttggcgcgacgcagaaggccgcgccagggccggcgtcgtcgtcgggctcgggcgcgggcgcggcggacgcggcgccgccgacggacgtgaacaaggcgctgaaggacgagcagttcagcgagttccggcagctgctgcacgacacgcgcgtggacacgcagatcaacgcgcagctgacggacagctacaacgggctgaccatcatggcgcccaccaacgccgccttcgacaagatgaaggcgggcgtgctgaacgggctgtcgccgcaggagcagatccagatggtgctctactgcgtgctgccccggttctacagcctgtccatgctcggcaccctcagcggcaaggtcaacacgcaggggtccggccacgacgggccctacaggtacgacatcaagcggtcggggaacaacgtcaacgtgtccacgggggtgaactggatgctgctgggcagccccgtcagcaaggacttcccgctcgccatctaccccgtcgacaaggtgccgctcccctacgagctgttcgggcccaagccgcccacgccggcgcccgcgccggcacccgcgcccgggccggccaaggccaagaccaagaagaagaagaagtccgccgccatcgccgagccgcccacggccgacgacgacgacaccggcaagggcggcaaggggctgggcaagggcggcgcgaaacgccaccgtaaggttctccgcgacaacatccagggtatcacgaagccggcaatccggaggctggcgaggaggggcggcgtga

SEQ ID NO: 6103 - DNA, 359 bp, Zea mays
  Clone ID: MRT4577_105556C.1
ggtggaagagctctagaggactggatccccgggaagcaggaattcggcacgaggggaaagttgaggatgttgatcaggatcaagacaatgaagaaaagaattagaagaagattaaggaggtgtcgcacgagtggtctttggtgaacaaacagaatcccatctggatgaagaagcctgaggagattaccagagaagaatatgctgctttttacagaagccttacacatgactgggaagagcatttggccgtcaagcacttctcagttgacgggcaacttgagttcatggctgtcctcgttgtctccaagagggctccttttgatctctttgatacaacgatacaagcccaaacaacaatt

SEQ ID NO: 6104 - DNA, 2795 bp, Zea mays
  unsure (1)..(2795): unsure at all n locations
  Clone ID: MRT4577_105557C.1
ttgggtacctcgaggccggccgggccgggcgttgctccccgcgcaaacacgcacgcacactctggacgcgcgctggctggctgcaactgcaaggcgtcgccaccaaccgcagctataataggtgtattgaacaggcaggcagagcagggcaggcagtgtaggctccatcagatccaacgccaccagctagcagcagcagcagcagcatggccaccaccagcacgcctcgcctcgccaccctcctggtgctcctggcggcggcgtcaccgctgctgagcgcagctcaaaaggccgcccccaaggctccggcggcggcgaaggcggcgccagggccggcggcgtcgtcgtcgtccggcgcgggcgcggcggacgcggcccctcccacagacgtgaacaaggcgctcaaggacgaccagttcagcgagttcaagcagctgctgcacgacacgcgcgtggacacgcagatcaacgcgcagctgacggacagctacaacgggctgaccatcatggcgcccaccaacgccgccttcgacaagatgaaggccggcgtgctcaacgggctgtcgccgcaggaccagatccagctcgtcctctactgcgtgctgccccgcttctacagcctctccatgctcggcaccctcgacggcaaggtcaacacgcagggctccggccacgacgggccctacacgtacgacatcaagcggtcgggcaacaacgtcaacgtgtccacgggcgtcaactggatgctgctgggcagccccgtcagcaaagacttcccgctcgccatctaccccgtcgacaaggtgccgctcccctacgagctgttcgggcccaagccgcccaccccggcgcccgcgccggccccggcacccgccaagtccaagaccaagaagaagaagaaggccgccggcatcgccgagccgcccacggccgacgacgacacctccgcctccgacgaccagaaggcggccgccgcgccgcccggcgccgccggcagctgggccgccgccgcgctctcggcgctcgccgctgctgccctcggcgccggcctcttctgatggggagagggaggatagagtcagtcaccatcgttcagatttgagatcacacggcgcggcgctactgcggtggcgatcgatcgctcctgcgccgcgcgccgtgcattgccatacaatgtcgcacggtcgatacgatcatagagttggtgtgccccatccatccatgtacccatccatgcatttgtggctttattaattctttcttccccttcctttctctccccttttcctttcggcggatttctattggtgatttgtatttgtaacctaatgtgatgtacacaagtagtgcttcctctttcactggatggatctttggcctccgagatctggacctgcttttgtttgtttaatccgagcgtactatacgcttaacatactagctggttgcttgctgtagccgtgtcgcagtcgcttgtgttccaagcattttcttgcagtgaaaagagaacagggaagtgcagacagtgcaagagatcggacagacatgtgtggtagcagtgcgttggacaccacacatcttcccttttgctgcatcatgtcttttgcctgaaacacgcacatagcaatagcagcagttccctcctttgagatggctggctgggtctgtcagccagcgaggtaaaccgtgctcatcagcagagacgcattatattattggtggttgcaacgtgatcctggacccttttgcgggtcacatcgaggacgacagccatgaacgacatcaacgccgccccgccgctgccctcggcgccggcctcttctgatggggagagggaggatagagtcagtcaccatcgttcagatttgagatcacatggcgcggcgctactgcggtggcgatcgattgctcctgcgccgcgcgccgtgcattgccatacaatgtcgcacggtcgatacgatcagagttggtgtgccccatccatccatgtacccatccatgcatttgtggctttattaattcttttttccccttgctttctctctccttttcctttcggcggatttctattggtgatttgcattcgccacntaatgtgaggccaaagatccatccagtgaaagaggaagcactacttgtgtacatcacattaggttacaaatacaaatcaccaatagaaatccgccgaaaggaaaaggagagagaaagcaaggggaagaaagaattaataaagccacaaatgcatggatgggtacatggatggatggggcacaccaactctgatcgtatcgaccgtgcgacattgtatggcaatgcacggcgcgcggcgcaggagcgatcgatcgccaccgcagtagcgccgcgccatgtgatctcaaatctgaacgatggtgactgactctatcctccctctccccatcagaagaggccggcgccgagggcagcggcggcgagcgccgagattaattttttttttttttccagtgaaagaggaagcactacttgtgtacatcacattaggttacaaatacaaatcgccaatagaaatccgccgaaaggaaaaggagagagaaagcaaggggaagaaagaattaataaagccacaaatgcatggatgggtacatggatggatggggcacaccaaccctgatcgtatcgaccgtgcgacattgtatggcaatgcacggcgcgcggcgcaggagcgatcgatcgccaccgcagtagcgccgcgccatgtgatctcaaatctgaacgatggtgactgactctatcctcctctgcccctncagaagagg

SEQ ID NO: 6105 - DNA, 514 bp, Zea mays
  Clone ID: MRT4577_105558C.1
ggactctgcgcacaccgtaccgcactcctgacagcatggcgccacgccgcacactagcgctcccctaccagaagtccctactagcggacgccgaaactgcattgcgccgtgccgttgacatccgcgcggcgatctacaccggatggggtccggacacagcgggacatgaagcacatgaacacgcgaccgagaccgccgcgcggcatatcgtggacaggcgcaggaaccccaccggtgcagagtgacatcaaggctcgggacggacaaggtccaccgctgcgcctggcgaaaagccaacgatcagggggacagcacaaggcgcgaggagaagcaggacggagacaaagacatctactgtatggagggcagtcagaaagctgagagcagcaaaacttaccttggtgagactaacaagatagctgtggacacaaggcaccgactacttgaatgacgcacagatgcaggacacagatggagctgagaagaatgctggccttaatgcgctgctaatcat

SEQ ID NO: 6106 - DNA, 1192 bp, Zea mays
  unsure (1)..(1192): unsure at all n locations
  Clone ID: MRT4577_105559C.1
cattggggggtacctccggcgggggccgggacaaagagcaatggccgggaaggagatgacgccgaactcgaaggcggcggcgccaccggcgacgatacgcctcgtgaacttcatctccgaagaccagcttgacgaggtgaagcggacacgaggggagcgtgtggaggacggcaccgcgcagcgcgacaaacccctcttccagatcctacaggagaacaaggagaagaaggacgccgagttcaatgagcgtttcaagcacagacctccaaaggctttggatgaggatgagacagagtttcttgataaattggctttgtcaagaaaggaatatgaacagcaggtggccaatgaagaagcagaacagctccgcggtttccatgaggctgtagctgcacggtccaccgttgttcatgaactcgagactcctacagtatctagacctgaggagagcagacctaagccacctacaaagaggagccagcctgcgctcctgaagaacataataatttccgtgaagccgcatgccaagaaaccaaaggttgagacggaagctaaacctgctcccgaggagcggcggccttcagataggcacggctcagatcagaagcaaccagacgacacaaaggcaacgcttggctctctagtggcttatgacgacgacgacgacgaaagtggtgaggacgttgactgacagtggcggcgtttgagaattcagctgtggataacccgcaagatgatggataactgcgttcgagtgttcaggtatggatatggataccgcaagaggttactgggagagatgctgcagccttttgggttttcctcgaggagaggcacttctattgcattctaaaaatcggaagcctttacagaaattttcttgtatgtattgtacaatttgaaaacgagccgggaacattactaatggttggtacgtacgttggtaccacgttgtttgacgaaggaactctgtagatagttgttgtagtttatctgatgagcgcattttgctttcacaaggacgtttagaaaactcgaacgcatcattctcgtctcagagtatgtttcgttggacagtctgtttggttgtggtgcgtggctatgtaaaaagctgcttggactgtgagttgtgaaaatactctgcttttagctattannnnnnnnnnnnnnnnnnnnnnnnnnnnnnnnnnnn

SEQ ID NO: 6107 - DNA, 101 bp, Zea mays
  Clone ID: MRT4577_10555C.1
aatgcatgatcagacataatccgttcatatcttttcatgctgaggaaattgcatttattggactttcttgtttacaccaagctactcaacagaactgtatg

SEQ ID NO: 6108 - DNA, 237 bp, Zea mays
  Clone ID: MRT4577_105560C.1
gcacgaggtttgtggagcctgtttcaataacataggacagatagtgagcttgcatggatcatgttattgaactcctcatgcaattagctgctattgaactttgttggtgtcttggtgactcttgtaagattcgccttgcaaggataatgttgggcgtggtaaccctatccttattaagatatgtgttataaactttctcttcctctaaataaaaaagcgtgctcagacaaagttcca

SEQ ID NO: 6109 - DNA, 358 bp, Zea mays
  Clone ID: MRT4577_105561C.1
tcggcaatatttacctgtgatttacctcttgtttcttggccacatctacccagctgctccggattactaatacaactatgcacacatatgcctgcttttatcgctccttattttcctattctggataatctcctctcttgtctacactgtcttcatcactctgcacactgttggaacctaccgatctcatgctctgactgtaaagagttcgcgggaaccgttggatctttccgtcatctggccactgatcgtctgatatgttcgtgatctccccgaccccctgtttctactggtacacggagaaaccgacatatgatatacctgttctctcgcgacactcggaaacacacgtgttatc

SEQ ID NO: 6110 - DNA, 1242 bp, Zea mays
  Clone ID: MRT4577_105562C.1
gggagccgtctcaacaagcaggttctcggcgcgctgccgttgccgctgccgtacaccatcacagccttccagctcgcgttcggctccctgctcatcttcctcatgtgggccaccaggctccacccggcgcccaggctctccgctgcgcagctgggcaagatcgcgccgctggccgtggggcacatgctgggcacggtgttcaccaacatgagcctgggcaaggtcgccgtctccttcacgcacaccatcaaggcctccgagcccttcttcaccgtcgtcctctccgccctcttcctcggcgaggttccttcccttccggtgctgggctcgctcgtgccgatcgttggcggcgtcgccttggcgtcattcaccgaagtttctttcaactggaccgggttttggagcgccatggcgtccaatctgaccaaccaatcgaggaacgtcctcagcaagaaactccttgccggtgacaaggatgttatggatgacataaatctcttctcggtgatcactgtgctgtcgtttctgctgtcctgccctctgatgatctttgccgaaggcatcaagttcaccccaggatacctccagagcacgggcctgaacctccaagagctgtgcgtgagagcagcgctcgcaggtctgtgcttccatggctatcagaagctctcgtacttgatcttgtcgagagtgtcgccagtgacacactccgtcgccaactgcgtaaagcgtgtggttgtgatcgtctcctccgttctgttcttcagcacacctatttcgcctgtcaatgcactaggaactggtgctgcattagcaggtgttttcctttactcgaggttgacaagaaccaagaagccaaaggatgcataagcaaggataaaacagattacaggtttttgaggtatagagattagatcgagagatatcaatgagcataatgaactaaacatagtttccgcctagttgtacacttgtaccacagggcacagccgactgcaagattcatgaatgaatatatattctcgagcctcacgtgagcatctcacttgtaccacagggcacagccgactgcaagattcacgaatgaatatatattctcgagcctcacgtgagcatctccaacatgtcatgcaaagcactttacactgtagattacattttttatagattgcactttttgtaaagtgaagtttaaaataaagagcatagagtcaatctaaacccacgcgtccgcccacgcgtccg

SEQ ID NO: 6111 - DNA, 249 bp, Zea mays
  Clone ID: MRT4577_105563C.1
acccaaacaaaaagcaaagggtttttcccctttaaaaggggctcttaaaaagggggaataacagggaagaaacacgggggacacttcctacgggaaaagccggggaaaaaaaacggaaaaccatagggccaaactccattggaaaaaaaacatttaaggggcgaaaggccgactatgtttcccccatgcacggactagggctacatttaaagaattcttaaagaaaccaggggggggtttaaccttttg

SEQ ID NO: 6112 - DNA, 948 bp, Zea mays
  Clone ID: MRT4577_105564C.1
cattgggtacctcgaagccggccgggattcaccgaagtttctttcaactggtcagtgatgcccgctacggcgctacctatttgcctattggagaatctttggatcctactgaccgggttttggagcgccatggcgtccaatctgaccaaccaatcgaggaacgtcctcagcaagaaactccttgccggtgacaaggatgttatggatgacataaatctcttctcggtgatcactgtgctgtcgtttctgctgtcctgccctctgatgatctttgccgaaggcatcaagttcaccccaggatacctccagagcacgggcctgaacctccaagagctgtgcgtgagagcagcgctcgcaggtttgtgcttccatggctatcagaagctctcgtacttgatcttgtcgagagtgtcgccagtgacacactccgtcgccaactgcgtaaagcgtgtggttgtgatcgtctcctccgttctgttcttcagcacacctatttcgcctgtcaatgcactaggaactggtgctgcattagcaggtgttttcctttactcgaggttgacaagaaccaagaagccaaaggatgcataagcaaggataaaacagattacaggtttttgaggtatagagattagatcgagagatatcaatgagcataatgaactaaacatagtttccgcctagttgtacacttgtaccacagggcacagccgactgcaagattcatgaatgaatatatattctcgagcctcacgtgagcatctcacttgtaccacagggcacagccgactgcaagattcacgaatgaatatatattctcgagcctcacgtgagcaaaaaaaaaaaaaaaaaaaaaaaaaaaaaaaaaaaaaaaaaaaaaaaaaaaaaaaaaaaaaaaaaataaaaaaaaaaaaaaaaaaaggggcgcgccgcattgggggggcgggttta

SEQ ID NO: 6113 - DNA, 1110 bp, Zea mays
  unsure (1)..(1110): unsure at all n locations
  Clone ID: MRT4577_105565C.1
aacccccctttccacaaaccgcaatttataaaaaatgtaatgtacaaaacagtactttgcactgcatgctcacgtggggctcgagaatatatattcattcgtgaatcttgcagtcggctgtgccctgtggtacaagtgagatgctcacgtgaggctcgagaatatatattcattcatgaatcttgcactcggctgtgccctgtggtacaagtgtacaactaggcggaaagccggaaactatgtttagttcattatcctcattgatatctcttgatctaatctctatacctcaaaaacctgtaatctgttttaatccttgcttatgcatcctttggcttcttgggtcttgtcaaccttcagttaaggaaaacacctgctaatgcagcaccagttcctagtgcattgacaggcgaaataggtgtgctgaagaacagaacggaggagacgatcacanaccacacgctttacgcagttggcgacggagtgtgtcaccggcgacactctcgacaagatcaagtacgagagcttctgatagccatggaagcacagacctgcgagcgctgctctcacgcacagctcttggaggttcaggcccgtgctctggaggtatcctggggtgaacttgatgccttcggcaaagagcatcagagggcaggacatcagaaacgacagcacagtgatcaccgagaagagatttatgtcatccataacatcctgcgtcacgagacaattctcattactgttcaccggccgagcggtactactctgatggaaggaagattcaccttgtcaccggcaaggagtttcttgctgaggacgttcctcgattggttggtcagattggacgccatggcgctccaaaacccggtcctgatgatacccagacaaagttacagtgtacaaccgtcaagattcctccaatcatttgagtcccaacagcaaaaaagggaaagaatcgctcggtactacagcaggatccaaagattctccaataggcaaataggtagcgccgtagcgggcatcactgaccagttgaaagaaacttcggtgaatgacgccaaggcgacgccgccaacgatcggcacgagcgagcccagcaccggaagggaa

SEQ ID NO: 6114 - DNA, 674 bp, Zea mays
  Clone ID: MRT4577_105566C.1
gggggaaaaaccccccccaaaaaatgggttatttctagaaaacccacccccgtttgagggcccccttggccgcccccccccatatggaaccaaaaaaagggcccccccaaccaagggttgccccaaggccgggttcagggtaaacagggggttgaagggaaaaaaatgtttttcctctaaaatagggaaaaagggttcccaaacctccctgggtaaacaaaggggacacaagttgcccccggtcccctggccgggacccccctaggggcgaatccccccccaccgggggccgttaactctggggtcccaacctgggccccaaactgggggggaacccggggcccaaaaacgttccccggggggaaaagggttccccgccccaccaatccccccccaccaaacgacccccgggcccttaaaagggaaaaaccccccggggccccccccgggggggggcccccccccccccacaaaaatggcggggcgccccccccccccccccctctttccccccgggaaaacccgcgccgcgccccgcgcgtttattagaagcccgccccccccccccggagagaagggggcttcgtttttgggcgcctcttccccccccccgcccccaagaccccgcgcccccggggctgccggggggcgcggggggggtctcccccccccca

SEQ ID NO: 6115 - DNA, 268 bp, Zea mays
  Clone ID: MRT4577_105567C.1
aatcattcattttctggatttaatttgtagcaagatcatgtggaatgatgcctaattatactttggtacgctgcccgtaacctgtgtttgtatctattagatactgggatttggtctatactaaacttgatctggagtaagtctgaaggggtatgtggcgggtctcctactcggatgatggtctcactgatgctactgacaggcagccatcgtttctaaaagagttccgagtatgtttatagtagtagacagctaggtatgtatgtat

SEQ ID NO: 6116 - DNA, 186 bp, Zea mays
  Clone ID: MRT4577_105568C.1
gaaccttgcaagaccaaaatcagatatcttgaggatcgcatcgctgcttctcggagaagagagcaggatattctgcaacattggatggatagtcacagcacatccgttacttgaattgttgacccaatccagtcacacacagaagacataaaaccatactcatcgacggactgattatacaaacaa

SEQ ID NO: 6117 - DNA, 222 bp, Zea mays
  unsure (1)..(222): unsure at all n locations
  Clone ID: MRT4577_105569C.1
tgctaattacanaaacgcagctcaccacgcgcacggatcctctctcacctgcagtcgcgctgcccaacccgccaacaccgacgctgggatgaangccgtgccagccgacagcgccgcgcacccggtgccgatgccgatgccgatgccggcgtacaagatcagcattcacgtttccgcggtgggcggcacggaggcggcgctcctcgggaaggggcggtacaa

SEQ ID NO: 6118 - DNA, 269 bp, Zea mays
  Clone ID: MRT4577_10556C.1
aattaaacacccaatatgtaaaagaacaaaaggccactaagaactcccttgggagttcggctgcgaactgttctgaatcttcttccctttcttcttctttatccttttcttcttccgtagaagatagaaaagacgactcttcttcccacgtcgctgctgataacggtagtgacaaaataggaagagttgctgatcctcaccgccgcgatccgcatggatctcctgatggtagtgactcggatcagcctcgcaagagtggttctcatgac

SEQ ID NO: 6119 - DNA, 526 bp, Zea mays
  Clone ID: MRT4577_105570C.1
gaaggcaacaggaagcagttctattcaatattcactgaatgtgtttccttcccttcttccctaggcaagatatatgtatcaggttcattacgtacacacaaacgccacaccagttcgcgcacgcaggcgctacgccacacacacgtttaggctcacttcggcctgcacacggacattgggccgacgcattcacttgggactggttggttctctcacattgctgacattcccctcgccttgagaacctgcttgaccccaagcaggcatgaattgaacgaactactgcaacacttcacgatcttcccatgtcgctaattctttgggtagcctagaccattccaccagcacttgctgcacttggcgatgaccttttgttactcctcgggtctgcaacacctgaattggtacgctgaaatcaggtagtgttataggtaagtctgaatgagcagtaccctgaaagccggctgccaacttcaattaggaaagattaaccaccgggtggatacgacttgatgctggcaattgg

SEQ ID NO: 6120 - DNA, 448 bp, Zea mays
  Clone ID: MRT4577_105571C.1
gctaacaaagaagaagaccataaagagtttcatctctgggattagaaacacaggacaccggagtccaagttaacacgataaacaggcacgacttgttcaggacaacagactgtagacatcgaatcacaatgggccccccaccaacagcgagccaacaccaccgcctctgcacaggaacagagggagacataggccccgccaacaatactgaggccctaccatccttgtcttcaaacaagctgttgaaaaagcatcccctcgccgagggcccaggggcccatgatgcctgccgccaaaacaaggattacgaaacctgtcactgcctgggccccaatggtgaatgagacccgccggcagatctaggaaggagtatccggccccggtcacgatgggtgaacatgaaaccccacccgatctgaaacccggcggtggcaattgggctcctgac

SEQ ID NO: 6121 - DNA, 394 bp, Zea mays
  Clone ID: MRT4577_105572C.1
aaaaaaaaaaaaaataaaaaaagggcagggtttttttgtatttgggcccggggttgaacaaacccgtttagaaacaaatgggtttatacgtgaacaacgaggggagtagaggggccaaacacacaaaactgtatccggacccggggcggcagtgcctacaagaaagattcaacacctccttataatacaaaggtggggcaattcagggcaccacgttctacacaatttctcggggaaaatatcccacccgtgtcttgcggttgaacatcccaccccgataaagggtaaatgacccccggcgctggcaaaacacaacgagggactttgccctcttcgggttcgcttcaggacttggcccaaagagacctttggagagccccttctggttctggga

SEQ ID NO: 6122 - DNA, 355 bp, Zea mays
  Clone ID: MRT4577_105573C.1
aaaagccaattcttttttttttctaaaatgccagctgttgtgccaccttgttcaggccggtgggatccataatgggcgtggcaaatgtttttttttatttgttctgaaattcggtgttttatgagacaaaaattccttagtttccgaaaaaacccctcctttaaatcctaagaaagtaaaaagtaaaacaaagcctaaaaaaaaaaagccctcaaaaggctcaaaaagattaaaggcgctggggtcaaaacaaaacaaggcccttggggcccgaaagaaaaaccccctttcggccaagtggagaaaaaaggatacttcttccgggggaccaagaaaatttttttaaatttacccg

SEQ ID NO: 6123 - DNA, 673 bp, Zea mays
  Clone ID: MRT4577_105574C.1
ctcgaggccggccgggccgggatacggattcagatcgcggccgcggcgactccccgagcagaagaacccgatcgaacgcggccgcggcggcgactccccgatctcagatccctgctgcgagcgaagggttccattcgagcagagatggcggcggcatgggaggtgctggctgtgttgctcgtcgcggcgcaggtggcgtcggcggcgcaggtcacggcgccagcgttcctgtgggcgcccaaaaactacgggtgagtaactcgttgcgcttactatttccgtcagatcccgtgtttgttagatacgatgggcgatattgatgatcggggttccgggtgttctgtttcacttaataagttgaatccattgccaattggtgtacaagctttgccacacagattggatttcttagcctttgttcaacgaatagtttctttattatctgctgttcgctcattgttgccttcgttaaataagtactccgtataagatataagattggccaaacaacgaatcaataggataattagctcatgttaaactttctgccggttttggtgctatagctagatagcatgttacaacttacctgcaactgaatttatgcttttaccacattatatcagatggtttttgcatttaatttttttagggcatgtccatccaatatgat

SEQ ID NO: 6124 - DNA, 252 bp, Zea mays
  Clone ID: MRT4577_105575C.1
ggggggggtggggggtttttaaaaaataaaaaatttttggcgggcggtcttttttttcgtgacaacggctaatacgcatattatcccgggcctctcaaaaacttatttagagaggatacaaaaacatggccccagaggaaaacaccccccccggggggggggggggggttttttttttacccaacaagaaggttactccaagacaacctcggtgcaaaaaccaaatcttataaagagcggacttcacaaaaa

SEQ ID NO: 6125 - DNA, 314 bp, Zea mays
  Clone ID: MRT4577_105576C.1
gggtcttaaaacaattaccttaatttactccaaagcgcaaaaaaacccgatcgacaccatgagggtgttgctcgttgccctggttttcctggttttggttggaagcgcaacctcaacccatacaaccgggggttgcggttgcaacccaccgccgccggttaatttaccgccgccggtgcatttgccacctccggttaacctgcaacctccggtgcatttccaaccgccggtcaacttgccgccgccggtccacctgcaaccgccggtcaatgtgccgccgccggttaatttgccgccgccacaatgccattacc

SEQ ID NO: 6126 - DNA, 379 bp, Zea mays
  unsure (1)..(379): unsure at all n locations
  Clone ID: MRT4577_105577C.1
ggcccgargctcgcgtgccacgccccggcgagggggggcggcgtggtcasgtgctcgttgcagggcgcggtcgtmggcggccgggcggagtggcagaacagctgcrccatgctgtcaacaaggtggccgcggtcgggacgcactccatcaacggccacgtcgcgccggcgccggcccggccangcagtgctggatttggtccccgtgagtagtatgaatggcgccggtggctaaraacctgccgcagccggcttcgcatcgsggacytgtcccctgcwgccgattgcacggggtcggagctcgcgcgkgdgctttaccaagggcgktgcccyggcgssgtacagcgaagaagggcggccggggaaaggtgtaccctggg

SEQ ID NO: 6127 - DNA, 646 bp, Zea mays
  Clone ID: MRT4577_105578C.1
cgcatcaatgggttcaacgtgttgtgcggtgttgggattctgaccacatcttatggaatcaaggaagggggatggtcaagcctcctgctgctccccttgttgggtgacagctcttgctacacaggcttgcttatgaagagatgcatagacagttcgcccaacattgggacatacccagacattgggcaagctgctttcggtgttgtttgtcgaatctttgtatcggttgttctttacttggagctttatgcaagctgtgtggagtacatcacgctgcttggagatagcatgtcatcagtgtttcccttagcacattttgacctgaatgcacacactctctttgcgatcacaacggccttggcaattctcccaacactggcggtgtgatggcgacaattgcagtcatcgtcttcctattctgggttggctcctgttctgcttcacggtggtgacggttgcctatgctggaatcgccgtctcagggtttctgatgtttggcgagtccaccatgtcacagttcactctgaacttgccacagcagtacatcccatcgaaaattgccatctggatgacggtattctgcagctgcattcagaatgaagaagatatgctcatttcattacttgattgattactttcagatttt

SEQ ID NO: 6128 - DNA, 587 bp, Zea mays
  Clone ID: MRT4577_105579C.1
cttcgttttcgtgacctcctcttgccctgccctgcccatcggcatggcacggaggaggaggcaaggctcctgcagcttatgaaaaaggaacaattggatctataccattaaaagatccaaactttagatatataccatggacctcacatgtcattgactcatgtggacccacatgtaagtgagataataatggtatggatccaaagtggtaatcttttaatggtatggatccaaatttccctatgaaaaatgtttgttgactgaaatcttaaacactccgggagttcggcttggagatccgtaatatgtcatggaaaaaagaagcatcattattttaaggaacaattggatctataccattaaaagatccaaactttagatatataccatggaccccacatgtcattgactcatgtggacccacatgtaagtgagatagtaatggtatggatcaaagtggtgatcttttaatggtatggatccaaatttcccttattttaaggaagtaccatgtgaaaaaaaacttctatagattctgttcatgtgaaaaaaaaaaaaaaaaaaaaaaaaaggaaaaggaaaaagaa

SEQ ID NO: 6129 - DNA, 174 bp, Zea mays
  Clone ID: MRT4577_10557C.1
tcttactgcaatatcccccgttgctcctcctatcatctttctccgcttcctacttactatcctaggtaggcttcccacaatcaatcggtggcccacatactacacccaatcaaatcatccacctactccatttccatccccttccccacactaactctcgtaacctcctaccca

SEQ ID NO: 6130 - DNA, 271 bp, Zea mays
  Clone ID: MRT4577_105580C.1
aacccccccaaaatagccctgtttatttttttgggggggggaaaccgaaaacagatttttctggggggcccttttttttagaggcccccaacaggggccgggcacccgggccgggaatgggacacaaagcttgactggttttctaggagtaggagcaagcctgcctttttggccggggaaaaaaggtaatggttggtttaacaacctagctgggcgggttttttcccaaaacacccccgtttggtgttggaggggaaaactgccctgcccc

SEQ ID NO: 6131 - DNA, 706 bp, Zea mays
  unsure (1)..(706): unsure at all n locations
  Clone ID: MRT4577_105581C.1
cgcactgccccctccatgcttcctcctcatcaccgtagccgccgcattcctccctcttcctcttcctcatcaccacagccgctctagtcgtggcgaatctgacgcctgcaggcagacgcaacaggagttcgtggagcggcggatgcagacggggtcgttgacggagctgcaggagcaaggagctcgagttggtgcgccatgaggagtggaaggccgagttcgtgcgacgaccagagcaacaggagcaaggagcctcctctctctccctctcagtggttgaggacttcctcaagaagaaagaagaaggccaaatagaagaagaatttggctcaaaggtcttgcggaggtgcctctgaccgtctctactttcatattactttctccaccatgcacactggaattagataatatatgttttttctaaacatggcgtgacagatctgaggtttttatttgcaggttgtgattctatatattatggtgtagtctgatattttaagatattcacaaaaggagtgtttaatatgtccacatttatataactatgtagtcaggcatatttcatctcttttcttgatcgaatgaagcaggtcttgataactttatcagctccttacatttgttcgtgtaactttggctaggcaatggaaaacttaatgtggctggagntctacgcgcattaaatctaattatccttatatttcac

SEQ ID NO: 6132 - DNA, 653 bp, Zea mays
  Clone ID: MRT4577_105582C.1
gggtacctcgaggccggccggggcggtcatacacgacgtccccgcaagactcgcggactagctcaaccgaacccgcgaaactcgcgcagcgggcggctcctccccgtacaaattaagtgcccagccggcaggcgagaccgaagcacccagaaccctagccacccggaggttctctggtcgcaggcaccggccccagtagagagaagcgcagaagagagagatagagtaagggagagtcgccgtcgggaattcacgtcggtggtgattcaagttccatggacgtgagtgatggtgatcgaacgtcgccgctccctcgctaagctcgggcttccacatcaatcggtggctggcgcacgggatctccgacgagcaaaccactgtggattctgaggttcagctggtagagagtgctgagcaggagctcgtggaaggagaagagcaggtggttcaggaggagccacaaggcgaggagtatgatctgatctaggtggcgtttctcagtcgacatttgcgccgacgatccttagttcgttttatgtttattcttttattttgtattaagtcttccgctatgtaataaatactctgatgttttatgacatttatctctatacactctggtattgtacaaaaaaaaaaaaaaaaaagcggcc

SEQ ID NO: 6133 - DNA, 532 bp, Zea mays
  Clone ID: MRT4577_105583C.1
cagcaattccgactttgtattgtgggcataacatttagctccgaactccaattttgatgatcttggactttttggaaagcttataaaattatctacatctaagagttgaaccatgtcagtttgagtagatttaattttgtgaaacacttccaattcagtcagcccttcctctcaactttgtcaacttcacttttgttttgtagctttgtatctcacttctacttcttgatgtgttggactcttagcatgtataaattgtcttcaatatgactttgtaatgtcttctatggttcttataatgtcttctttaaggtgttgcatcctcagactctcagtccaatccacttcacatcttgtgaactacaacacacaaacacttgggaaatacattagtccacatgttatgttgatcatcaaacaccaaaacctattgagctaaatggctcggggtatattttccttacaatctccccctttttggcgattgatgacaacacaaccaaagcaagcaaatataacaaacatttgaatg

SEQ ID NO: 6134 - DNA, 380 bp, Zea mays
  unsure (1)..(380): unsure at all n locations
  Clone ID: MRT4577_105584C.1
cggccgcgtgggcggacgcgtgggcggcggctgagcggcgagnacatcaaagcccaagcgtcgaagctcctcatactcggccttgcgtgcagtcacccggacgccaagctgagacccaaaatccgcgacgtccgcctggtcctgctagacaagaatccggtgccacagcttcctttgtctaaagcaccaattttattatattgtaaacccacatgtacgtaattaatatcggcaaatcacacacacatgtagaagatatatgtatcctttgaattgcataaactggtaaagccgataaaccacgtactccattagatatatctgtgtgatgtgcatgagatctgctacttgaattttgtttgatgctgttggggtgtctt

SEQ ID NO: 6135 - DNA, 492 bp, Zea mays
  Clone ID: MRT4577_105585C.1
tcgctttcctcaactctcttcctattgggcgtcgtattacttactcttcgccgctgacgacggcgctccaccggccacacagatcaaccatgggtgaggaccacgacttgatcacccttgacacgtgcctcaaatgaggcattctgactggactgctttccgtatacggcctcaacgtttaagggtatggacagacactactactatgcaggagatgccacctgagttaaccttactcatgtttggaagaggcccagaggggaagacaatcccccaggacatctacgtgctagactagactaccacgatgacatggatgccaaagttacatgatgacaagaggcacattacctcctacccttatccacactgatgtgacacactacctggcattcaaaggtgctgatgggaactatgtgtttacacccaggaagatttacaacgggcctgacactgatatgacatgctctaaaacacgctttgctgggtcta

SEQ ID NO: 6136 - DNA, 522 bp, Zea mays
  Clone ID: MRT4577_105586C.1
attgctccgatttcaccaacaaaagggggggggtatattcattgcacataattattgctaccgctagagtgaacatggcatgcatcttagaagtggatgagttgcttatggcctactctcatccagcaggagccagccccattgaggggggagccagatgttcctcatagcacccgtggctgtttcgtgtgtctcaaagatgatgtcgatcatgcatacctaaagtttgatagataggctcagttctcctgggtgcagatatatctagattgatacgagcttttgctgggacccctccgcgcgctattcttattatttgcagccccgtggttgacggtcgcatctacccacctactcattcaagggtgtaccccataggctgatcctagctggaaggtcctggactgtgcttctcaccttgtgctctgactgagagtttctcttaggatagctggtgagctatatggatggatagggctaccctatattgcattgttcagatttcctggagcaagctttgcc

SEQ ID NO: 6137 - DNA, 149 bp, Zea mays
  Clone ID: MRT4577_105587C.1
tcctctagagcggtcgccctagagatcttgcccgtgcatggggggaggacccaaccaaaattatttgaccggcacagcgcacacaaaccatgagaggcctgggttcatatttaaaaaactgaccactggactgctcatatcttgcctaa

SEQ ID NO: 6138 - DNA, 1192 bp, Zea mays
  Clone ID: MRT4577_105588C.1
gcacgagtggacttccgggccgcaaacctgaccccggccagccccagcatgtcgccgatgctggccgacatggaatcgcctcagctcaaggcctctcgcgacgtagcgaacgccatggccgccaaggtgaagctgctgcagcgggagctcaagacgttgaaggccgacctggccttctccaaggagcggtgcgcgcagctggaggaggagaaccggctgctccgggatggcaaccacgacgccgacgaggacctgatacggcggcagctggagacgctgctcgcggagaagacgcggttggcgcacgagaacacggtgtacgcccgcgagaaccggttcctgcgggagatcgtcgactactaccagctctacatgcaggacgtcgtcaaccttgacgacgacgacgacgacatcgaggaagaagacgacgattacgacgtcgacgccgacgacgtggagttggaggctgaacagtaccaagatcgccgcaagtgcctgccgtcccggcttgtgctggaggaagaggagcaccaggcggccgatccaggcgccgaaccgcagtcgcccactgagcagacggagtcgccgcgaatgctgaacacgaacagcggcggcggcgtcacccctgaccacgaatcgccgcggatcctgaacacgaacagcggcggcggcggcacccctgaccgcgaatcgccacggatgctgaacacgaacagcggcgtcacctctgaccacgaatcgccgcggatgctgaacacaaacagcggcggcacccctgaccacgaaccgccgcggatgctgaacacaaacagcggcgtcgaaattgctagtgaatcccccaggatgctgagcacaaacaccggcggcaacacaaatgagtcgccccggggctacaaggatgatggttcttcgccagaaacgacgagggacggttgacggttcatctctgatttgccatttggattttgttgaatgtaaaacctgattcacctgatcagcgtgaaaataaagaaccattattgatcaggtatttttctttcagatgttaagattcctgatcaatgaccagatattcttcctttccagatgactgattgctgcgattcagtcccattgtggttttcttgactattgtgctcttcagcacaacatctgattcactggcattttctagagaacaaataggatcggc

SEQ ID NO: 6139 - DNA, 225 bp, Zea mays
  Clone ID: MRT4577_105589C.1
tccggtcgccacgcgtccatctcggctctcgagtccgacagatagagcgattcgaaatatcaaggcgcttaaagagatcacagccacacacctcctcgcatacccgcgtcaaaccacctgccgcgacccgtcagcaccatcaacgaaccagtctggcgcagaaagtcggacaatccaaagaccgcctaacatccaggaccatcccaatcttcagtccaagccccg

SEQ ID NO: 6140 - DNA, 264 bp, Zea mays
  Clone ID: MRT4577_10558C.1
gcaccagctgcaccagccaaagcccaggaccggctgaccgccagtggccgaccgcgtgtaccccgccgcgaaccgagacccgcgtccaggcgctgcgggcaacagcaacggcgcgcaggcgtcgtcgttgcgtgcggcgaagtcgcaggtgtaccagctggcccgtgtagcgtccgcagccccctctaacgcagctcggggcggtcgtggcggtgcaggttgtggtggtggttgtggtgggcgctggtggtggtggtcgtggtg

SEQ ID NO: 6141 - DNA, 431 bp, Zea mays
  Clone ID: MRT4577_105590C.1
gcgcttcctgaccgacatctcgcgccagcgccgcgaccagctggagctggagcgctaccgccatcagctggaggaactcgtcgaggcccgcaccgccgagctggccgaggccaccgaggccgcgcaggccgccagcctggccaagagcgccttcctcgcgaacatgagccacgagatccgcacgccgatgaacgccatcatcggcctgacctatctggcccagagcgacgccgtcgagccggtgcagcagcagcgcctgcagaaggtggccaatgcggccgagcacctgctcagcgtcatcaacaacgtgctcgacttctccaagatcgaggccggcaagctgcagctggagcgcgtcgagttcagcgtcgacgaggtgctggacaacgtcgccaacatgacgctgcagagcgccgcggccaagggcctga

SEQ ID NO: 6142 - DNA, 302 bp, Zea mays
  Clone ID: MRT4577_105591C.1
tttggggggggtgtttaaaagcgcgagggccaaaaaccatgtaacaagatcagccgcataagacctgtgcatatattacaggtatgacctacagctagaacttgccaaggcatatggccaagcgaccagtaaataacagtaataagcaaggctcgtgaatatttatgcctatctgaggacccgcctaacacagccttatgccctctccgaggagcgcatggcaagggcctgcaaaaaactttgatctactttgagatatacccaatgacctagctgaatctggttcaagatgaccataacta

SEQ ID NO: 6143 - DNA, 314 bp, Zea mays
  Clone ID: MRT4577_105592C.1
tttttagcgtgtgcacaatcatccgtctgcgggggccctttttagatgtcggaggcagtgacattctccggcaatggggggcaagacgagggacaaggcgaagcccaactgccgcacgggcctttggtagctggggggggaccagaaggtccgggactacaaggtgcttgacggtcacggatgctggagttctctgtccaacaaagccgagggatgatcttctacctggcacagcagcttccactgtagagggcgtatggaatgtggttatcacaaaagggtgatcttagatggttacagatacactacttttt

SEQ ID NO: 6144 - DNA, 326 bp, Zea mays
  Clone ID: MRT4577_105593C.1
gtgacacgtcttttttcaatttcttagttattttttatcgctgtatgattcacgaacggcatggggcttatgtaagaactctttaacatgtgaaatgcaactgctaacatcaacattgagataagtacttgaatctattgtcgatatgaactaactaatattgtatgacctgaagggacgaaagaccaacgaaattgtgtacatccaacttgaaagacgcagtaattgcagtgctcatagggctgaatatgatatccaataaaccactaactaagtgtttaaacgaactactataatcgactatcaatacacaaacatctacttta

SEQ ID NO: 6145 - DNA, 901 bp, Zea mays
  Clone ID: MRT4577_105594C.1
gtgcaagcctataagggcaagcatgattgcttcatctattcagcaactgctcaaagtagagatgcctgaaagaagagataatcagaatcggccatcatttcttcgcagcctgctggttgggaagaatatattggtagtagatgataataaagtcaatcttagagtcgctgcagctgcactcaaaaagtacggtgctaatgttagctgtgttgagagtggcaaagatgctatcagtctacttcaacccccacattgctttgacgcatgttttatggatgttcagatgccagagatggatgggtttgaggcaacaagacaaataaggcaaacagagatgagagttaacgaggaaaggaagaataagttggtgttgattgaaggctcaacatttgttgagtaccatttgcctgttttggcgatgacagccgatgttatccaggcaacttacgagaagtgtataaaatcgggaatggatggatacgtgtctaaacccttcgacgaggagcagctataccaagcagtctccagattaatagtgggaacgacagattcgactgtttaatatttagatggctatgaatctgatttctcattcatcgaattgaagcacaccaccatgttgcttctgtccaagcttgactctaacccttgacaattgtctgacctggcctctcgcagcactagatgaaaaggatgaaagtgccacgagttggctatgtatcagcaccacagatgaagttgcctcaccccggagtgtaggttggtagatcactctcttctttgatgtttataggttgttgtatatcttctgacaattcattggaaaccacatctcgttgcgacattggaggacatcttcaatgctggtaaatttgttataggaatatcctttaatgctggt

SEQ ID NO: 6146 - DNA, 309 bp, Zea mays
  unsure (1)..(309): unsure at all n locations
  Clone ID: MRT4577_105595C.1
cccacgcgtccggcaacagttgctgctacttggccgtttccaattagctgcaaccctgcatgggcgtgtgtttgctttgttttaacttgtttctcaattgtgtggtgttagatatgtactgtcgaactgctgtagttcaactttgacccatgcaatatccttttggatggaagtgaaaaaaaaaaaaaaaaaaaaaaaaaaaaaaaaaaaaaaaaaaaaaaaaaaaaaaaaaaaaaaaaaaanaaanaaaaaaaaaaaaaaaaaanaaaaaaaaaaaaaaaaaaaaaaaaaaaaaaaaanaaaanaaaa

SEQ ID NO: 6147 - DNA, 2175 bp, Zea mays
  Clone ID: MRT4577_105596C.1
aggccggcccggcccgggctccattcactccacgcgccaaacttagcatccctctcctcccgcctcctctccaccggtatcggtgtcctcctccggtcccccctccctctgggaaggcccttggatctctcgatctccaaggcctgccttccattgccatagccatcgaccgtcgtctcgtctcgtggtggtcttgtgcccctctccggtctcctgagcaacccaccactagtctggtcacgctcccctgctccgcaccggccgggcgggtttcatttggtgcgcgtgcggcgagctcgggcatggcgttccacgaagtggagacgccgcgtcgatgctgagacgccggggcatggtcggcgcgcagtgacggcggccggcggctcggttcgtgcgtgcgtgcccagcattcttgcccctgttgagtcatcggctcgtcgctcgctcgcgcccccgccgctcgccccgcgtccacagggtcgccgccacggggaggcgcagagggaaaaggaagatgagctgctttccgtgcttcggcggcggaaagggcaacaacgacgacgccgacgcggagagcccgggcgacgcggccccggcgtctaacatgacgccgcccgcgatggtgcaggcgcccgccgcgtacttcccagctcccgccgccgctccaacggccgcggcgccgcccaagcccggtggcgggaaccaggcgcacgaggcttccgccgatgactcggcgctgcggctcgccatcacggggcaggcgttcgcgttccgcgagctcgccgccgccacagaccacttcacgccgtacaacctcgtcggtgaaggcggcttcttccgggtctacaagggccggctagagaagagcgggcagaccgtggccatcaagcagctggacaagcatgggttccaggacaacatggcgttcctgagcggggtcgccaagctcagccagctccaccacgagaacctcgtcgacatcattggctactgcgctgacggagaccagcggctgctggtgtacgagtccgtgcccgccggcaccttagaagaccacctgttcgatctgccggcggacaagaagccgatggactggtgcacgaggatgaaggtggcgcacggcgccgcgcaggggctggagtacctgcacgagacagcgaacccgccggtggtgtacggggaattcaaggcctcccacatacttctcgacgagaagctcacgcccaagctctccgacttcgggctcgcgcagctcggccaggccgggggcagcatgccggtggtggcgtcgcccatgatgggctccttcggctgctgcgcgccggagtacgatcgcaccgggcaggccaccatgaagtccgacgcgtacagcttcggggtggtgctggtgcagctcatctccgggaggagggccgtcgataccagcaagccggtggacgagcagaacgttgtcacctgggccatgccgatgttcaaggaccagaagagataccatgagctggttgatccactcataaagaaggaataccctgccaaagcgttgaaccaggtggtcgccatggctgcgatgtgcttgcaggaagaggactccgtgcgaccgctgatggccgacgtcgtcatgacgctaggcttcctcacggcgatgccgcctgacccaccggcccctgccgctccaccacctgccgccgccccggagccgaaggaagacaaagaatcggaccattcagactcctcgtcatcttcttcttcagacgacgacgaagataacgaggaggaggaaaccgaggagcaatgataagggcgggtgtgttcaacttcgaaggcttcaaacgtggaagggacacgcagatgaagtggcttcgtgcacttggcgtgtacacggagctcaatatgtgggaccttggagccacttggacttggtggttgtgggtgtggcagttaaattggggtgttcacaagtgagtaatctttttttttgtgatgacgccaagcatgtaaaaatgtgagctatgacatactgatgggttacacaatttgcactttaatctgcttttcgtatggtcattacaatttatacatggaaaatccacgtggaattacagcggtcaacgggggaaaggccccccccctgaatttttcattaatatgttcttgtcgccccaaaaggctttacat

SEQ ID NO: 6148 - DNA, 889 bp, Zea mays
  Clone ID: MRT4577_105597C.1
cccacgcgtccgatattcagtatgtgcactctcatttttgctcatatggccctgcaggtaaccaatggtgtcggtaaggattttgtcatcaacaatgagtcgtactggaagacgggatctcgctgacggaggtaggagggctgctgcaggagtgggatggcagggaagagccagctggacagcatgccctggaggacagcctcgcatccgaggatctggggagcatgctggagtccatcaaagtggagagggccaaatattcactgatgtgctttcagttccctgttggacgtatccaccgtcagctgaagcaaaggactcaggcaaatggtcgtgttggtgccaccgcagccgtctactcagctgccatcctggagtacttgactgccgaggttctggagctggctgggaatgctagcaaggatctgaaggtgaagcgtatcacccctcgccatttgcagctagctattcatggagacgaggagctggacactctcaccaagggcaccatcgcaggcggaggtgtcataccgcacattcacaagtccctgatcaacaagtcatccagggagtgaagactaggggatgtgcatctttagtttaaactggacttctgtgcgctcctgagcgagtccttgttgtaccgtagttttagttgagctgttaggttggagctcctttgtgtaacgcttgcctgatactgcttcattagttatttggttattgtgtttgtgttgagttgttaacttcaggggtgcaaacctggttgcttattcggtttatttttaattttttttgtagctgcaattatacttataatatgttgttggtagccctgcggggtgttgggggctcagatttatcatctaaagcaaagaattactgaagc

SEQ ID NO: 6149 - DNA, 445 bp, Zea mays
  Clone ID: MRT4577_10559C.1
acgtaagctcggaattcggctcgagggggatcgtcgaatttttttccatcatctaaaaaagcacatgcttgtgggtgacattgctgaatcaagcgggctgtcccatcagtactgttgagatcttatagtgaaccaaacctatagggagtcatcgtcctggatgagctgtgagcctacaattcttgaggtaagggctgcacaatgcatataaatgaactagggttgagagatcatcacagattgttacaattacttaacagacagatcacacagttccttgaaaagatataagaattctacacacaaagacattatacacctttgttatgttggaattgtaatgcattctattaatgctaatttatacattaaataataaacctaatatgtttggatatgtagcttatcagtatattatgctaaaacatatgagagagttatatac

SEQ ID NO: 6150 - DNA, 592 bp, Zea mays
  Clone ID: MRT4577_1055C.1
aggtgacctcgaacaatcattaaggcatacagaaggatttgcagaatcagttcgtcggtgttgtcaaacttcaatggcagagtttgatgctggaatgacagatacagcagttaaacatgtgcagtgggatgcttcaaaagttaggaataaactgcaagagcatatacaagctcatgtagaatgtattaggaacgcaaaattggctgaactgagagctaactttgagaagaagctgtcagactcaatttctgggcctgtacaatccatactggaaactggcgagagagactcctgggcatgcattaggagactatataggcgtgagattgaaaatgctgctctttcattctcagcttccctttctgagtttgacctagaccaaacaatttccaataagatggtctcagatttgagggaatatgcaagaagtgtagtagaaactaaagctagagaagaagctggaaatgttctgatgcgcatgaaagaaaggtttttcactgtgttgagccatgataaggactcgatgccaaggtcatggatgctagatgaggatatccgtacaatcactagagaagcacgcttaggggcttta

SEQ ID NO: 6151 - DNA, 225 bp, Zea mays
  Clone ID: MRT4577_105600C.1
ctccctcctgcagcgcccgtcgcctccctttccccttccctccctccctctccccgcgggccgccagaggcaatttcgccctcgattcgacccgattcgtccgccgcgaccggattcctcgcaacgcggtctaagctggtcgtgtgcgtcgatcgcataaggggaataagggcgcaagcgtgcacttgcggaacaagggcgaaccgcaaggagaaggagcgcaga

SEQ ID NO: 6152 - DNA, 163 bp, Zea mays
  Clone ID: MRT4577_105601C.1
gcacgagacttgcttagccaatgccgactaagaggcaaaatagactcaaatggtgttatataccgcatacttggcagagaggttgaacatgggagtacacttaccaatatctgactgaaattgaacattgtaagaagaactacaaatttagttttggaatgac

SEQ ID NO: 6153 - DNA, 293 bp, Zea mays
  Clone ID: MRT4577_105602C.1
aatctacaaaccaccagggcattctgctccggatatggtgtacttgggagctatgacaaattttgatgtgacttacaattggattcaagataaatgtgttcctcttgtccgagaaataacatttgaaaatggagaggaattgacagaagaaggactgccttttctcatactctttcacatgaaagaagatacagaaagtttagaaatattccagaatgaagtagctcggcaattaataagtgaaaaaggtacaatagactttttacatgccgattgtgacaaatttagacatc

SEQ ID NO: 6154 - DNA, 731 bp, Zea mays
  Clone ID: MRT4577_105603C.1
agcagtggtaacaacgcagagtacttttttttttttttttttttttttttttttttatgacgttttcttttatagtgcaattatttatattttttaatggatgaaatttatagaacgttgctagagaccgtctaaggaatgaaactttcacagtctaagtgtgacaacaataaaattgaacccgataagagaatgaatacatgtttggttgctcacaagtagcctacatcctcgtcgtggtgagtccaaactataatacacaccgctagaacagcaacatatactagcaggtcagcgcggattgatgctgggcataacgccactgagcaggttgctaccggagacctccatggacgaaatgtagtgatcatccatccgagaccccgatgctgtgggtgtgctggtgctgttggagcccatccccatgacgccagactctgacgatgcaatgttctccgtccccggcgtcatgcgccatatcatgtccagctcccgaaccacctccaccatggatggcctcgagtccgtctcgtcctggcaacaccgcagcgccagcgcagcaaacttctccacgcactcagcagggtacgagcccatccggttatccaccaccgagaatatcatccctgactgattggctgccaaaacctctctgacaatattccttccatgagagattggctgcatcccagtcagcagctccaagaacacaacgcccaggctgtacacgt

SEQ ID NO: 6155 - DNA, 658 bp, Zea mays
  Clone ID: MRT4577_105604C.1
cattgggtacctcgaggccggccgggatcactcgtcacccgcggtctcctccgttcactagggcggagtgtatcgaagccaccggtgacgctggcgcatagcaccaccgatccgtaatgtcgacagaagaaggtggtgcgtgtgaactcccactaagcgaagcgccatggtactccccggcggcccactcgtgccacgccatccaagtgctaaatgcgcccgacgagaataaggcgctacggagaacaactacccgcgaggataccaaggagacggcggaccctccgtacactaacaacattgaggaggcgatcgctgcctcgtctacgagagtgatactcgctggcgccgctagccttcgctgatgacctcgatgctaaccatggctgagacgtcgacaccaactgttcgaagcatttcagtgggtggttgatacaagtcacctccgccggtgagtcgagcactgtgaacaactgcttaacgttgctgtgcagctactccaaatccaaggtctccaagacataagggagccaataggctcgaactatcagacgacctcgacgagagagaaggcacgaacattgccacccccaaggcgtcgtcgtgctgatcttagtcttcgccatggtcaagactgtcggtatctgacgtcgttgtc

SEQ ID NO: 6156 - DNA, 560 bp, Zea mays
  unsure (1)..(560): unsure at all n locations
  Clone ID: MRT4577_105605C.1
cgccctgttttgtgttgtttttgntttttttttttttccaggaaaaaagggcctcccaaggcccacttacgtatttatttattcaagggagcacactatccctatccaggaaaacaaaggggagccaccacacccgnacgtgcacacacaaccactcaccacncaccgtgtcccttctcaaccggacgcaacggcaaactacttaacgagtccatcagaactacttaaaagcgaccacccggtatcaatgagtggaacaagcactcttgacaagngtgaggtaaatttaacttctgtgaagccaaagagccagcaacgaaacgcccccgccgctctagacaaaagcagaactcttttttttttctcgctctccggngaaggggaaaaagaagaaagaaaagaaagtggcaagggaaaaaaaacacgaacacttccggaggtgctcccttctcgcttctatcgatcgaatccaggtctggtggcccgccgtcaccgcatcactttgctgggagggctttctcccttcacacggcacagcggccaccggtgtcttcgccatg

SEQ ID NO: 6157 - DNA, 464 bp, Zea mays
  Clone ID: MRT4577_105606C.1
gcctgccaaattgcggggggaaaattaaacacccgtaaattatagcaaaacaccacccaaatgggaaaagcaagcaaggacccataactctacaaaaggcttgctttgctgggcactgccaggcatggggggggggggggcaaaaaaggccccgctgcagttggggcaaagggggagccataacctcgatccaacataagatggaacccggcttggcacaattgggccaccccgaccccatggactttggcttgccttaaggggaggggactgaagctccccaaaagcttgggcaggaactcttccagggaagctatcctcaagggggtcctggaccctttgttgggcctgggagtgatgcaactcgcaacgaccatggagtaaatatccgcttaaccatattgcccaagccgtctaattctatcctaaaaacaagccatttttttgcaacctgactggggaaa

SEQ ID NO: 6158 - DNA, 317 bp, Zea mays
  Clone ID: MRT4577_105607C.1
caaggtcacggcttgcctgcaatgagctctggctgaactacgtctacttgcggatgcttagggtccacagagggttgctcggctacttgtattaacacaatacatacatagtgtagccaaaataaacatcacaccagacagatgaatgaaatatacagtgaacatctacacattaaaatgagagcataggaactggaatcactaaggtgggagttatagttttcaagcaatgaatgtcctaagggctaatgtgattaaatcaggatcaaatgctaaaggaatggtctatcagagttcatgtcataacagtgactgta

SEQ ID NO: 6159 - DNA, 235 bp, Zea mays
  Clone ID: MRT4577_105608C.1
accaccggccgcgtccgcccaggtcacagctccctgccggcatgggcgcctccggggggcctctcgtctccgtgaaagccctggagggcgagatggtcacggacgcccccggaatcggcttaccgcccgtgtttggggcaccgatccgcccggacgtggtccggttgacccacaagctgctgtgctgcaacacgagccagtcttacgcagtgtggcgccgcgctggccaccaaac

SEQ ID NO: 6160 - DNA, 767 bp, Zea mays
  Clone ID: MRT4577_105609C.1
gcagcacgccgccaatccgccgctcgactttcttgtgcgggtgtccggcgactcccaggaaggtgcgacctatgacccctgcaaatcgccttgcgaggcgcgacccttggtgccacgcgcgtccagcaattcccacggcttggtgcgacctctggctcggcgactctcccatcgaagatggtgtttaccgatgacgaagatgattttcttgagcaatggtgggagaaagaagaatcggatgatgatgatttggttgcgctgctgctaattcttgctgaagatgaagaaaggagtcataagaagcgtcgtcctggttcaatgcctggtcgtcaaacggtgccaagagacatgcatgctggtaacttgcacattgttgcagattattttgcggacccaccaatttacaatgataaattctttcggaggagatttagaatgtctaaaccattgtttctgagaattgtccaaggagtcgaggcacatgatcactattttaggcaaaggccaaatgcagtaggtttgcttggagcaactgccctacagaaagtggttggagcttttaggatgttagcttatgatgttcctgcagattccatggatgaggttgtgagaattgcagagagcactatgattgaggccttcaaacactttgttcaagcagtggttgatgttttcggtgagcaatacttgaggccacccatttgtattttccatttattattttaagcatggtgctttattgatatggtttaaataaattattatat

SEQ ID NO: 6161 - DNA, 419 bp, Zea mays
  Clone ID: MRT4577_10560C.1
ggccgcttttttttttttttttttcttttttttttttttttttttttttttttcggttcggcggggcggcggtacaggggatcctgatacctggatacaagactccttgctttgtcgctttttgggcagggggttgcaacgagaagagtggtaacctcaccacacactgtcgattaacgtcaaatcccggggggggggttttcgggatgtgcacaagacaccacacatagccttgcattgcctactgtttactacactggctggacgaatggaacaccttaaactgtacatgcacatatgctgtgcgacatgcctgtcctgcatgaggaacttgcttgaagtgaagcaccaatacgccatcctcctgatgcagctcaagctctcacacttagacactcgagtcggcgcctgcgttttct

SEQ ID NO: 6162 - DNA, 116 bp, Zea mays
  Clone ID: MRT4577_105610C.1
gacctgtagactagcgctggagtggtacaaggccgctactcaccgagctagtgctgtccaagttcagaggtttatagctggtccatctcattagagcataagaacagcctgaggag

SEQ ID NO: 6163 - DNA, 379 bp, Zea mays
  Clone ID: MRT4577_105611C.1
gatcctgctttctttcaagaagggatttagcgatcacactcaccatgggcggctgttgcagaaacgggctggacctcaaaactcatgacaatcacctatataaaacactcgaccaacgtatacctgtacacaagctgcatataatcaataaacagacatctgacatgtaactgggcatatgccttattgactttcaaactcttgcatcacccagaaaaatgacagaagccacatgagcaagggacctccaaatatcagacaagactgatctctgttagaacaatgaagcaaccgctaggaagggtgggcctccatgataaccagaaaattttcccaggcctacaaatgggcacaacacttctaatgcaccgaattacta

SEQ ID NO: 6164 - DNA, 445 bp, Zea mays
  Clone ID: MRT4577_105612C.1
gcgttgccatacaaccaactgggacagctatagatactatgaccgacgaattgtacatacatcgagcgagcgtacgcacctatctcgagcgcagctatgctgatctcgagcctctgattgccatgcttgacactgcagctgccggagacgatctacctatacactgcgtctaacgcatacaccgtcttacaactgtatgacgtggtagcattaaaccaactcgttgcgacacaccactcagcgacctaacatcaacccatgacagcaggtgccatcctgcagagtgctcatcagctatactccgataatgaaccagtgcgtataatgcctgaggcaccacagcaatccggaagtgaatccctacggctcgccacagtgccaggcgctgcagcagcagtgctgccaccagatcaggcaggtggagccgctgcagcggtaccaggcg

SEQ ID NO: 6165 - DNA, 202 bp, Zea mays
  Clone ID: MRT4577_105613C.1
acctctctcaccatcggttccagaaaaatttcagcacataataattatcgagagctgacgctacaacactagttagtcacaacgaaactatggcagttaatggacagaggggggagagataccaggtgaactggggcgcgggcgcagatgagctggcggagagagacctggacgaggtgaagcgcatggtggcgcaagcccg

SEQ ID NO: 6166 - DNA, 469 bp, Zea mays
  unsure (1)..(469): unsure at all n locations
  Clone ID: MRT4577_105614C.1
attgacatttcaaagcctctactacaaaatataaaaaaaaaaaaawtawtwctaagagaacawatgwmaaaaaaaagcctwggmmtcaaamwtgggtakgactacataaagcgatggatgttaggtgctatctagcaccggacagaatcaacaggcagncgngmactggttccttagctggattgmtgccggmgtctccaagttccaacrgggccccgttgagcaacatcgttttgctcwggngatcgccgtccttggcggtcngnwggwactccwcccgcctccwggtgttgcttgctggtttcctccccagmcataagactgctttccwaagcctgtgcgtgaaaaactgcgcwtctcaaggtcaggtcttttrcccaagctggcgttggtgtcgttctggtrgatgacgttgtatcccagtagtgttrctcaggttgatcaacagaatcgtgatgccttgctgttg

SEQ ID NO: 6167 - DNA, 218 bp, Zea mays
  unsure (1)..(218): unsure at all n locations
  Clone ID: MRT4577_105615C.1
aaatatattcttgcccctatcaatctcaagagatattagttactatgacgttttttgtttgatgctactgcttgttaccttaatgttagcatgctcttaaatgtataattagtttgatcttggtggtggggggcggtgggtactatgcanattaaattttgatttttattccttgctatcaaaaaaaaacaaaaaaatctaaaaaatccaaactaaac

SEQ ID NO: 6168 - DNA, 276 bp, Zea mays
  Clone ID: MRT4577_105616C.1
ggcatcttataatattatgttttttaacagaccagaggccaaatttgatatctgaaggcatgatccacaccttcacgcagcaggtgtgcaaatatgcagttcaacgagcagtaaatggtgcacttgcttactagggcctatgttccggtgccaccccgctgagctctagcatcctcaggcatggattctacggtttctatggtatgggtttgcacttccgaactaggtggaatgcgagaactttttggcggacgtcaacagtttattataacttaa

SEQ ID NO: 6169 - DNA, 543 bp, Zea mays
  Clone ID: MRT4577_105617C.1
atgattaacttataacaaatctgacaggaggaccccatggggccaaaaacagtttatgctgaacgatgcatgggccacacggagcggggggggaccacaacaaaaacgggggggaaatataaacctttggttcaaaagcacaaaaaacacaacaaggaacgcggccaaccaaaataaacccactgccctgggaacaacaatgctaaaccgggcccccccaccagtaggtggggggcccatcggaggggcccactagttgcccacttattggcgggggccatccccacctttgcccccacggcatccaggccctccttttcgatggtcttgagggccttgggggaaaggcgcaacttgacaaaacgcttgccggcctcccaccacaattttttgtactgaaggttcacaaactggtgttttttcggtttggggggggaaaacaacacttggtccgcccggtgtgttttttttgtggcgggaacggccacacacccccacgcgaaaaagggggttggaaacttctgccatttttggggggggggg

SEQ ID NO: 6170 - DNA, 233 bp, Zea mays
  Clone ID: MRT4577_105618C.1
aaaccgggccgcccaccttcacctaacagtctccacaccttttttttattctccccattttaaaacggccgccgggtttacttgcattcataatccccccaacacaaccactgtatctctctaatcatcacaacttttctctatttgaattctttaacttttattaacacatcttactttctataatacttaattttcttttatcatttctatcttacctacatcactcttat

SEQ ID NO: 6171 - DNA, 2427 bp, Zea mays
  Clone ID: MRT4577_105619C.1
aattcggcacgagggatgatggtcggactctgagctcctctccgtgccaagtttctctgcacccatcgcttcagctcaccggttctcccccctgcactgcgctggctgtatggctcctcccttcgcgtgcgccatgcacggccgcgccctgctagcagcagcagcagcagcgctgctcgcgtcggccgtcacgctcacgcttctcccctccgccgccgcgcagccgtgggtgggcccgtggccgacgtgcgacgacaccaccggcaactactcggccggcagcgcctacgccaaaaacatcaagcagctcatcctcagcctccaggcaaacgcgtccaacacgcccgccctcttcgcgacgggctccgccggcgcgggcgccgacgccgtgtacgggctcatactctgccgcggcgacctcagccccaccgactgcttcgactgcggcaccaacgccggccaggacgtgtaccgggtctgcaacggcacccgggacgccgcgctcgtctacaaccagtgctacgtccgcctcgcccccacggacttcctcgccaccaccaacaacaccggcatgagagacctcatcaacggcaacagcgtccccgcgggagtcaacgtgacggcctacgacggcgccatcaccaggctgctcaacgccaccgcgcgctacgcggtggacagctccgccccgtccttgtctcccaggaagtacttcgccacgggccagatggcgggggtcgacccgcggttcccgaccggcatctggtccatggcgcagtgcgcgggggacatatcgccggtgcagtgccggagctgcctggacgacttgctggcgcagtggtggcagaagttcgacagcaaggagatcggcgcgaggctcgacggttcgcgatgcaacctcaggttcgaaacggggaacttctacaccggcagcccgatggtgaagctgcagatgaacggcgaggaggccgctccagctccggtgccttccacggatgttctacctggcaccacaggaggtaagaaaaattcagttggcaaacttctcggaattatattgccgatagtatttgttgctgcaatagctgccatagccctctgcatttggattgttcgtaagaagagaacataccaaggaacaaatcttccccaaacagacacaacttatatggccgaggacatcgaaagcatcaagtcgatattgttatcgttgccatcactacaagcagcaacaaataattttgatgaaagcaataaactaggcgaagggggatttggaacagtttacaagggcaatctttctggacaagaagtggctgtgaagaggctaccaaagggtttagatcaggggctagaggaactaaaaaatgagctaggtttgatggcaaaacttcatcacagaaatcttgttcgactggagggtttctgcttagaagagggagagaggttgctcgtctatgagtacatgcccaacaaaagccttgacaatattctttttgatcatgagaagaaaagacaactagattggaggaaacgattcaacataattgaaggagttgcacgtggattgcaatatcttcatgaagactctcaaaataagatagttcaccgtgacctaaaagcaagcaatattctgttggattcaaatatgaaccctaagattggtgactttggcctagccaggctctttttgcaagatcagactcgaggcatcacaaaccacatcgttgggacattcggctacatgtctcccgagtatgtgatgcgtggacaatactccataaaatcagatgtatttagtttcggcatccttgttatagagattgtaacaggacaaaagaacaatgggcattacttcgacgagcaaaacgaggatgttgtgagcattgtatggaagcactggagcgagggaacacttgcagagattatagatgattctttagggagaaactactcagagactgaggtgctaaaatgtgttaacattggcttgtggtgccttcaacagaatccaatggaccgacctacaatgtcagatgtcatggtgatgctcaatgatgatgatactagttctctacctgctgctgcaaaaccaacttttttcttggatgcaagctcaggctactcttacacctcgggcaccatttcacatccttctgcaaggtagtgtaggctaaggcctaatgcacacctttatatgaatatcgacatattgttgcttgtttgtttcttattgtgtattggttgaaataaacatggaattcatcctgaattgtaatagcttgtgctcattattagtttcttaccaaatcctcaaatataaattttctcttcctagatgtcctacaagctttcagaaagtatggaaatgcttccaaaaaaaaaaaaaaaaaactcgagactagttctctctctctctctcctggt

SEQ ID NO: 6172 - DNA, 215 bp, Zea mays
  Clone ID: MRT4577_10561C.1
gcatagaggaccgagcttgggcgcgtcagtggacgtatagctagtctatagtgagcatcgaagtacaattgactgtacgtggttctagagtgaaatgactaggcaaatcacatgtcgacacacaatataatccgtagcataaatgcaaattttgcattgtataaagaataagtaataagatggttttctaatgttgcttacatgaatgaaaatgg

SEQ ID NO: 6173 - DNA, 729 bp, Zea mays
  unsure (1)..(729): unsure at all n locations
  Clone ID: MRT4577_105620C.1
ttttacgatggtacctcnagccggccgggaacttttcagcaaatcagacatctagaacaagatagctagcagaggaggtgaaaagggctccgcttctcgctgctgccatgaaccacgctgcagaccatacagaactcacgagccgcctagccagacccaacaaagggaatttctctcgctaccacctgccgacttcttctccatcatcagctatggcaagggtgtgaccgtagctttactacatgatctgataaagaacacagccaagatgcagtccatatgtagaacccctctgaaatcccactaaagcactggatcccctctaactccaccttagaagcctgctattcaatgtaccaatttgaatgagccttggaaagcctatggaaaaaggcaaacccactgtagaacactatctgccactgtgatcaggaaaggagactggatggcagcaattcatatgttgaagtcgatctcctaccatatagtacaacaatcacgtcagattgctcaagaaaatgttcatgcacgcatataggatctctatctcttgctccagaagactgacgacgggaacctgagaaggagacattaacccggatgcaatcaagtagtaccgaatcctcatcattttggtgctgcaaaaaagggtaaagccgtatgaaactattttacactggggacgcacctcaagcactatacgagaactacgggggatacgtagataag

SEQ ID NO: 6174 - DNA, 233 bp, Zea mays
  Clone ID: MRT4577_105621C.1
gaggaaagaaaatccaactcaaaaagggactgcaacaagggagtttacagaaacaccggatgggtcccattttttattagccccaattcttaataagattatgcctggaacagttttatccacacctttgcaccatttataaaaaacttgtttgcaccatttttaacacaccgaccctttaaagggggggtctaaaaagaagagacgggcccccttcttaaaaagggcccgcc

SEQ ID NO: 6175 - DNA, 186 bp, Zea mays
  Clone ID: MRT4577_105622C.1
caaaaagaagcacataaaagtttcttcaaacatgctatgaaatttggtatcttattgttaaaccttgctttacctgctagtgtttatgcgcaaaattagaacttactgcctaatgtttatgattttaagattataatatttttgtcaatatgtgccaaaataaggtaacgttcatcctgaatcagc

SEQ ID NO: 6176 - DNA, 134 bp, Zea mays
  Clone ID: MRT4577_105623C.1
cacctccagcaagcccaagttcggctcgtactggatcaaggacggcaaggtcttgggcgccttcctggaggcgggtcacggacgagaaaagccattgcaagtgggaaaccagcgcgcgtaactagaccaaagat

SEQ ID NO: 6177 - DNA, 382 bp, Zea mays
  Clone ID: MRT4577_105624C.1
gagctgcctggatgggcacaatactagaagacatgaaacgaggcgcaagcagtttgagctattgaccagctaacccactgatggcaccgagggtagtacgttgcgctgtgtgcattaaggcagacgttccatgcctatgcatgtctgataacacggaagttacgaaggtatgtagcatgaagaaggttgggtacgtggacaactattgagagaagccgctgcatcctggctacagaggcgtgagtatacagttcctcttagtatgaaaaaggagtggttgatacatggggcactctctcactacaactttactttgagatttgtaacatgggagagactattgataataatatgtacggagtgagaataaaaaaaatatgat

SEQ ID NO: 6178 - DNA, 1071 bp, Zea mays
  Clone ID: MRT4577_105625C.1
tcgaggccggccgggccgggactgttggcctttcggaaagtcattcggccccaggaccgcgtcctcttaacctgtagcctcggacggaactctgagccctaaaccctactcgaaccaaaccagagcagcctccaccgccagcgccgacagctcgtgttcgaccttgcgcacttctccgcccatggctgaacccgaggtaggggtggccgcagacacagcgatggaaaccgaagctcctgaagcagccggtcagaagagggaacgggaggaagtagttgatcctgctgctgaaggaggcgaggcggcggtggaggaagcggcggcggctaagaagccgaagttggaggaggagactaaggaggtagaggaggcgtcgtcggaggagaaggcagaggagacggcggaggagaataaagaggagacggcggaggggaagacagaggaggcgaatgagaagacagtggaggcggagcgcaagccagtgaagctggggccaaaagagttctcctcatccgtcgagatgttcgactacttcttcggtctgcttcactactggacgccgcagattgagttcaataagtatgaacaaatggtgctggaggatttgctgaagaaaggccacgcggaacctgctaagaagattggggcaggagtcgaagcattcgagatacgcaaccacccggtgtggcaaagccgctgcttctttatccgcaggatcgacggatcctcggatgacttcagcttccgcaagtgtgtggacaacatactgcctctccctgaggacatgaaggtcggcaacggcaagaagtctggtggccaccacaagggtggcggtggcggcggtgggggtaggggaggaggccgtggccgaggcggctggcgtggtggccggggccggggcaggaggggagggtaggatcttaattctcaacaggcactgcaattttgcccggttaataagacactggtggccgtggacacgaaggcgtttattatgtgactgtcctgaaagaccgatgcccaccttacaactgatccacgccgagtgcttgccgcgtgctgttcttagga

SEQ ID NO: 6179 - DNA, 1479 bp, Zea mays
  Clone ID: MRT4577_105626C.1
atgccgccgaagaaagcttcagccacaggggctgccaccctgcagccgctggatcccaatcaggatgtcctttctcttagggaggcccgaagccagaagaggaaggccgccagtccaacgcctccggaggacgacttggatcaagaaatccaaaacttggagatgctccatcaacagggtcaacgaaagaaagaaaagatggctcgtctagctgacctacagaggcagatagatgaagcttcggaagaagttcgtcatcttgctcaagatgaccagaaccgaaggcctccgcgcagagagcttcatcaggagggcttctacaatgaggacgactggtatgaagattttcatcatggaaattttgcttttgatgatgcttctcctctgtcaacagaactgcaggctacaccatggccccagtcttacaagccaccccagctccccatgtacgacggtcattcagacccgaagcaattcttgatgagctatgaagcaaccatatcttcgtatggtggcaatactgcagtcatggcaaagtctttcgtcatggctgtcaagagtgttgcacaaacctggtactcctctcttcggccaggaacaatcacctcatggcaaaagctaaaggacatgttgataaccagcttccaagggtttcagacgaagccggtcactgctcaagctttattccagtgcacccaggatcacgaagaataccttcaagcgtatgtccgaaggttcctgcgtctgagggcacaggcaccaacagtgcccaatgaaattgtcattgaggccatgattaagggacttcggccgggaccttcagcgcaatactttgccaggaagcctcctcgaactttggagaagctgctccagaagatggacgagtatattcgagctgacaatgattttcaccaaagaagggaggaagcattcaggttctctgaaatgaccaggggcttcggaggaagatttcatccgaggcacgtcaggaagtcaacagcaaagaccacaatattcctcgcaagcttcgggcagcagcaaagctctttccggccgccagcgccaaggggcagaggcgccaggggctttgggggaagatttggggatcaaccaagaaaaaattactacctattctgtggtgaagacaagggccacaccaggatgtgccatgttaccatccagaagcaaaaggagatagcagaagctgcagcgcaacagagtcagtcgaagcaagtcatgcatactgcttcgtaccattcgccttacattccagaatatgtaggcaatcaccctgcagcttctgttgcttcggcaagtcaaccccaagcatcttggcaacagcctccactgccaccaccaacgcaacgaggtcagcagtcagaagggagtcagcacactcaccttcagcgggacttcagagaggagtccgaagctcgcacagtcaatagcactgtgccagagtcgaagcatatttactga

SEQ ID NO: 6180 - DNA, 235 bp, Zea mays
  Clone ID: MRT4577_105627C.1
atctttcggtcaaggcatggggtggcgccaatgggttcttcatgcttcaaatggcaacccttttacccattgattgaacatgaatcacttctgagtgcgaggatgaggaactattatatgccttaagaggaaggtagttgatggaaatggaaatcattagaataggttcaatgacgtgcctgggttcattgattagtcaaatattggtagctgattgaaaagcgtaggggttgga

SEQ ID NO: 6181 - DNA, 296 bp, Zea mays
  Clone ID: MRT4577_105628C.1
aacccctcatcttactactgggtatggccagaatcttcctcaccagggtaccatgcatgatgagctcctgtggttacatatgctgcgggctgacatagttcaggaagagcatgtgattcgtgataaaggcttccactatcgcaagtacagcgctctaggaggacgctcaattggcaatcaagatgaatgacggccaacttactgtccatatgcagagcgcgagtgagtgacctatcaagacgaacacacacagggcggcattcttgcctactgattgctcagcagtgagactattc

SEQ ID NO: 6182 - DNA, 1069 bp, Zea mays
  Clone ID: MRT4577_105629C.1
atggcaaagtctttcgtcatggctgtcaagagcgttgcacaaacctggtactcctctcttcggccagggacaatcacctcatggcagaagctgaaggacatgctgataaccagttttcaaggatttcaaacgaagccggtcactgctcaagctttgttccagtgcacccaggaccacgaagaataccttcaggcatatgtccgaaggttcttgcgtctgagggcacaagcaccaacggtgcctaatgaaatcgtcattgaggccatgattaaggggcttcggccgggaccttcagcccaatattttgccaggaaaccccctcaaactttggagaagctgctgcagaagatggatgagtatattcgagctgacaatgactttcgccaaagaagggaggaagcatacaggttctctgaaatgaccaggggcttcggaggaagaatccacccaaggcacgtcaggttaattcacaactttactcagagtgatgacagaggaagccaacaacagaggccacagtattcctcgcaagcttcggggcagcagcaaagctctttccggccgccagctccaaggggcagaggcgccacgggcttcagaggaaggtttggggatcagcccaggaaaatttattgtctattatgtggtgagcacaagggccacaccaccaggatgtgccatgttaccatccagaagcaaaaggagatagcagaagctgcagcacaacagagtcagccgaagcaagtcatgcatactgcttcgtaccattcgccttacattccagagtatgtaggcaaccaccctgcagcttctgttgcttcggcaagccaacctcaggcatcttggcaacagcctccacctccaccaccaacgcaacaaggccagcagccagaagggagtcagcacactcacctccaacgggacttcagagaagagtccgaagctcgcacagttaatagtactgtgccaaagtcgaagcatatttattgacaaatatcctaccccgacaacaacttttcgcattcagtattattttctttttaataaggaacaattatgggaagcttaa

SEQ ID NO: 6183 - DNA, 439 bp, Zea mays
  Clone ID: MRT4577_10562C.1
tttattcctggtttttcacacccgtgttttatccccccaacattgcccgatgttgggggggaatttgacaacgtctgctgtgactaacaccatacagagcagcactgagctttttcttgaggcacctatggggaaacaacagctgtagcgcaggtgcctcaactaacgcacacgtgtgacaattgcctaatggaagaactgtaatgtagagtgactgacttaccccgccaccaaccagtgcgtcaacccgctgtcagggaagcattgcagaacctgacagggagacattacagtgaggaaactggtgccagactaatccaggaatggctgaacaatgcctgaataagggatgcaaacgttggtaataatgctatcgcaccactgtccatgtaccttctggatccaacagacacaatcttaacagggaagattgcttgct

SEQ ID NO: 6184 - DNA, 114 bp, Zea mays
  Clone ID: MRT4577_105630C.1
tatccgctcactttagggataccacttaatgcaacacgggacctaaacgccaaaaactggcataaaccgataagagacgtattgctccattttcctcataggactgcttccccc

SEQ ID NO: 6185 - DNA, 1821 bp, Zea mays
  Clone ID: MRT4577_105631C.1
ctggattcccttacgtggtcgggccgagtaccttcaggcatatgtccgaaggttcttgcacctaagagcacaagcgcctacggtgcctaatgaaatcgtcattgaggccatgatcaaaggtcttcggccagggcctatggctcaatacttcgccaggaaaccccgccagactctggagaagctgcttcaaaaaatggataagtacattcaggctgacaatgacttctgccaaagaagggaggaagcttacagattttctgagatgactagaggcttcagaggaagaattcaccctaggcatgtcagatcaatccacagctccagtcagaacgatgacaaaggaggctagtttcagaggccacagcacagctcacagtcttcaggatagcagcaaagctccttcaggccaccagctccaaagggccgaggcggcaggggcttcgaaggaagatatggggatccgcccagggaaatctattgcttattctgtggtgaagacaagggccacactacaagaacgtgtcagatcaccattcagaagcaaaaagagattgccgaagcagaagcccggtagaatcaaccaaagcaggtcttacatactgcttcgtgcctctctccttctataccgaggacgactggtatgaagatttccatcatggaaattttgcttttgatgatacttctcctctgtcaacaaaactgcaggctacaccttggccccagtcttacaagccaccccagctccccatgtacgacggtcattcagacccgaagcaattcttgatgagttatgaagcaaccatatcttcgtatggtggcaatactgcagtcatggcaaaatcttttgtcatggctgtgaagagtgttgcacaaacctggtactcctctctttggccaggaacaatcacctcatggcaaaagctgaaggacatgctgataaccagcttccaaggatttcaaacaaaaccggtcactgctcaagctttattccagtgcacccaggaccacgaagaataccttcaggagtatgtccgaaggttcctgcgtctaagggcacaggcaccaacagtgcccaatgaaattgtcattgaggccatgattaaggggcttcggccgggaccttcagctcaatactttgccaggaagcctcctcaaactttggagaagctgctccagaagatggatgagtatattcgagctgacaatgacttccgccaaagaagggaggaagcatacaggttctctgaaatgactaggggcttcggaggaagattccatccgaggcatgtcaggtcaattcacaactctactcagagtgatgatagagggaatcaacagcaaaggccacagtactcctcgcaagcttcggggcagcaacaaagctctttccggccgctagctccacggggcagaggcgccaggggcttcggaggaagatttggggatcaaccaaggaaaatttattgtctattctgtggtgaggacaagggccataccactaggatgtgtcatgttaccatccagaagcaaaaggagatagcagaagctgcagcacaacagagtcagccgaagcaagtcatgcatactgcttcgtaccattcgccttacattccagaatatgtaggcaaccaccctgcagcttctgttgcttcggcaagccaacctcaagcatcttggcaacagcctccacctccaccaccaacgcaacgaggccagcagccagaagggagtcagcacactcaccttcaacgggacttcagagaagagtccgaagctcgcacagtcaatagcactgtgccagagtcaaagcatatttactga

SEQ ID NO: 6186 - DNA, 1606 bp, Zea mays
  Clone ID: MRT4577_105632C.1
atatctccagaattccccttagacaaaaaaaaaacaaaaaaaaaaactttttttttttaaaaaaaaattaaaattaaaaaaaaaaaaaaaaaataaaaaaaaaaatttttttcttttcctataaatactctattgtttattttttggaaattacaatacaacatagtggaggattgtcttatttttccattgtccattataaccatattgtgggtctcttaaatattaataatcacccgatttaaaaatttcacacttcttaataccactctccctacataccaaaatatgtgggtaatcatcctacaacttctgttgcttcggttagccgaagaaggccttcccgacaggggctgccactctgcagccgctggcccccaatcaagaccccctttctcttagggaggctcgaagccagaagaggaaggctaccagtccaacgcctctggaggatgacttggatcaggaaatccaaaacctggagatgctccaacaacaggatgaccagaaccgaaggccttcgcgcaaagagctccatcaggagggtttctacaatgaggatgattggtatgaagatttccatcatggaaattttgcttttgatgatgcttctcctctatcaacagaattgcaggctacaccatggccccagtcttacaagccacctcagctccccatgtatgatggtcattcagacccgaagcaatttctgatgagttacgaggcaaccatatcttcgtatggtggcaatacgacagtcatggcaaaatctttagtcatggccgtcaagagtgttgctcagacttggtactcctctcttcgaccagggacaattacttcatggcaaaagctaaaggatatgttgataaccagctttcaaggatttcagacaaagccagtcaccgctcaggctctattccagtgtacccaggaccacgaagaatatcttcaggcgtatgtcagaaggtttctgcgtctgagagcacaggcgccaacagtgcctaatgaaattgtcattgaggccatgattaagggacttcggtcgggaccttcagcgcaatactttgccaggaagccgccacagactttggagaagctgctccagaagatggacgagtatattcgagctgacaatgactttcgtcaaagaagggaggaagcattcaggttttctgaaatgaccaggggcttcggaggaagatttcacccgaggcacgtcaggtcaattcataattctactcaaaatgatgatagagggagtcagcagcaaaagccacaatattcttcacaagcttcggggcagcagcaaagctcttttcggccgccagtgccaaggggcagaggcgccaggggcttcgggggaagatttggagatcagccaagaaagatttactacctattctgtggtgaagacaagggccacactaccaggatgtgtcatgttaccatccagaagcaaaaggagatagcagaagctgcagcacaacaaagtcagccgaagcaagtcatgcatactgcttcgtatcattcgccttacattccagaatatgtaggcaatcaccctgcagcttctgttgcttcggcaagccaaccccaagcatcttga

SEQ ID NO: 6187 - DNA, 1241 bp, Zea mays
  unsure (1)..(1241): unsure at all n locations
  Clone ID: MRT4577_105633C.1
atgccaccgaagaaaacttcttctgggctaggggctgcactgcagccactggacgtcaaccaggacacactgcgtgaagctcgaactcaaaagaggaaggccacaagtctaacaccccaagaggaggagctggaccaggagataagggatctcgaagctatccatcagcaggtcgaaaggaagagagagaagatgcttcatctttccgatctacagaagaagatcgatgaagctgctgaagaaatacgtcatcttactcaagatgaccaggaccgaagacctccacaaagagaacttcgtcaagacaattcctacaatgatgatgattggtatgacgatttccatcatggaaattttgcttttgatgatgcttctcctctatcagcagaactgcaggctaccccatggcccccatcatacaagccacctcagctccccatgtatgatgggcactcagatccgaagcagttcctgatgagctacgaagcaactatatcttcgtacgggggcaatatcgcagtcatggcgaagtccttcgtcatggcagtccgaacacaagcgcccacggtgcccaatgaaatcgtcattgaggccatgatcaaaggtcttcggccagggcctatggctcaatacttcgccaggaccccccaaactctggagaagctgcttcagaaaatggatgagtatatccgggctgacaatgacttccgccaaagaagggaggaagattatagattttctgagatgactaggggcttcagaggaagaattcaccctaggcatgtcagatcaatccacagctctagtcagaacgatgacaaaggaggccagtttcagaggccacatcacaactcacagtcgtcaggacagcagcaaagctccttcaagccaccaactccaaggggccgaggcggtaggggcttcagaggaagatatggggattagactactgccgctgccgctactgctgccagtgctgacaacgacgacgacgaggcctgatcaatgcaacgacacatcatgatctgctgctgcacttaattactatgttcgtatacaaataaatacacccggcgtacgcggtgttccttatatggtctaaaatgtagccagtaaattttaaactactttatttcttgaggctctataaacaatagatttaaagtgttatgtaaagtttagacaaccttatataaattttagaccacataaataagcttaaataagtttttttaggaggn

SEQ ID NO: 6188 - DNA, 1361 bp, Zea mays
  Clone ID: MRT4577_105634C.1
atgaccagaatcgaaggcctccgcatagagagtttcatcaggagggcttctacaacgaggaagactgaactgcaggctacaccttggccccagtcttacaagccacctcagctccccatgtacgacggtcattcagacccgaagcaattcttgatgagttatgaagcaaccatatcttcgtatggtggcaatactgcagtcatggaaaagtctttcgtcatggctgtcaagagtgttgcgcaaacctggtactcctctcttcggccaggaacaatcacctcatggcaaaagctgaaggacatgctgataaccagattccaagggtttcaaacgaagccggtcactgctcaagctttatttcagtgcacccaggaccacgaagaataccttcaggcgtatgtccgaaggttcctgcgtctgagggcacaggcaccaacagtgcccaatgaaattgtcattgaggccatgattaaggggcttcggccgggaccttcagctcaatactttgccaggaaacctcctcaaactttggagaagctgctccagaagatggacgagtatattagagctgacaatgacatccgccaaagaagggaggaagcatacaggttctctgaaatgactaggggcttcggaggaagattccatccaaggcacgtaaggtcaattcacaactctactcagagtgatgatagagggagtcaacagcaaaggccacaatactcctcgcaagcttcggggcagcagcaaagctctttccggccgccagctccaaggggcagaggcgccaggggcttcggaggaagatttggggattagccaaggaaaatttattgtctattctgtggtgaggacaagggccataccaccaggatgtgctatgttaccatccagaagcaaaaggagatagcagaagctgcagtacaacagagtcagccgaagcaagtcatgcatactgcttcgtaccatccgccttacattccagaatatgtaggcaaccaccctacaacttctgttgcttcggcaagccaaccccaagcatcttggcaacagcctccacctccaccaccaacgcaacgcggtcagcagccagaagggagccagcacactcacctccaacgggacttcagagaagagtccgaagatcgcacagtcaatagcactgtgccagagtcgaagcatatttactgacaaatatcctaccccgacagcagtttttcgcattcagtattattttctttttaacaaggaacacttatgggaggcttaagtgctttttttgttgtttttaatctcttgtaacagtttcgctttttaccataatgaaaaatatcttctctataggcttaaagtgccgaaca

SEQ ID NO: 6189 - DNA, 521 bp, Zea mays
  Clone ID: MRT4577_105635C.1
accaacactctgttaaaaatgctttttcgttaattcaaggaaaccgggctaaaaagcaacaaccaaaaaaaaaaggaaaggggaaccaaaaaaaaacaccgtagggggaggggggaaaaaacagaaaaaaaaaaaaaaaaaaaaaaaaaaaaaaaaaaaaaaaaaaaaaaaaaaaaaaaaaaaaaaaaaaagaaaaaaaaaaaaaaaacccaaagcaaggggaggggagccaaaaacaggccaacaaaaagagaagggaaacacaagaaaccaccggccaaaaacgggggggccgcggcgccacaagaaacaacacagccggggacccgggggacaaggggcacaaccccaacgaagaaaacacccaaacccacgaaaaggagcggccccaaaaggcaccagaaggcccacaagccccgggggaccgccacaaaccggagccccccccacccggacggaaaaaagaacgccggggaccgcaccaccgggcccagaaaggagagccccgcctcggagggggg

SEQ ID NO: 6190 - DNA, 278 bp, Zea mays
  unsure (1)..(278): unsure at all n locations
  Clone ID: MRT4577_105636C.1
atgggacagatgggttttatccatgtcagtggaacccgaataataataataatacaaacatttgaccaaaaaaaaaagtgggctggtcctctgcaaccattttacaagtgttataaaaacaaaacattgggactggtgcttaaatacatagccctcattggtatcaaacaaaggtggacttnttntatttaatacgtattaatataatactactacaccggggtattctcccgcatcagcnnngtacatgcgcataacgatatacttgcacatccatt

SEQ ID NO: 6191 - DNA, 353 bp, Zea mays
  Clone ID: MRT4577_105637C.1
ggatggcgagcccgtcctcgtccccctcgcggaaggctctgagcaagatcgcctgcagccgcctgcagaaggagctcgcggagtggcaggtcaacccgcccgcgggcttcaagcacagggtcaccgacgacctccagaggtgcccctccgccatcgtcgcccttcctatcccctttcctcagcaggaaatccctgctgtgcggggtctcttagattcctttctccgtggctccgtgcttggctaccgttttcttgttcgcgagtctagcacgtccagcgccctggacgcgacgcgacgcgacgcgatacgtcgcgtgcgtttcgggcttgcatacatctgcttcccttattat

SEQ ID NO: 6192 - DNA, 1243 bp, Zea mays
  Clone ID: MRT4577_105639C.1
gccggccgggccggggcacgcgcgcgcacgacgcacagatacctttcctctcttctcccgtcccctcttacgcggcaaccccggcgcggcatggcgagcccgtcctcctcctctttcccgtcccggaaggccctgagcaagatcgcctgcaggcgcctgcagaaggagctaacggagtggcaggtcaacccgcccgccggcttcgagcacagggtcaccgacaacctccagaggtgccgcttccccatcgccgcacttcctatcccctttctcaccaagcagtccctttctccgtggctcggtgcttgcctactgttttcttattctcgagtctaggttggtcactacttggtcctgctgaaactgtggataacgttccgcgtcctgtttgatccgagacgcgacgtgttgcgttcgttttgggcttgtaggtgttggtttctctatttctctcgtcgtcttttccaagggattttcagttgatgtttcctagtgtttttatgatcttggacgaaagaaaaacttaatgaatgcaaaaaataatggtggatgttcacgcctgatgaggtgggtcgtcgatgtagccggggcagcaggcacgctctacaccggcgagacctacaagttgcaggtggatttccccgagcattatccgatggaggcacctcaggttatatttctgcatccagcaccgatgcatccacacatttacagcaatggacacatctgtttagattggtccactggctatgccaagaaattcctagaaatattactaactaaccatgattccatgagatggcaactatcactggccccttaagatatactgtatgactcgtggtccccagcgatgactgtcagttctatctgtatcagcatattatctatgctgtccagctcgccagaaaagcaacgcccagctgataatgatcgctatgtcaagaactgtcgcaatgggaggtctccgaaagagaccaggtggtggttccatgatgacaccgtgtgatcggtgttccgattattgttgtcctgtatgcatttagttgccagactatgggagatggacttatttcgaacgacccatttgaccagggattaacatgctcttgtggtttgtagatgaatgtgcatcagcgtcaggcctgtcctttctgttcttaccccgtggatgatatataggataatgtttgtatcttgtctattttcggaacagacatgaaattcaatgcaggtcactggt

SEQ ID NO: 6193 - DNA, 299 bp, Zea mays
  Clone ID: MRT4577_10563C.1
ggagaagctcccaggaacaatcgatggccttgcagcactcacacaggacccggttcccctaccccctcctctctgccgcaatacaggaacccccaggggaaagatgagcttttctaggctagaactttctcccaggaagctttgatttttaccgtttcttccctgtattttctttctctactttgaggaaaccaaagtaaccttttgcttctgctctcttgtaatgatatagccagaaaaacgtgttgccttgaaccacttccctcatctctcctccaagacactgtggacttggtcac

SEQ ID NO: 6194 - DNA, 783 bp, Zea mays
  unsure (1)..(783): unsure at all n locations
  Clone ID: MRT4577_105640C.1
gggcatcccccgaccgcccacatccgatccagccgcgtgcgaggtcgccgttcgatctgactgatcttgctgtttccacccctttgtctgggttcctttctccgcacacatgggtgcgcgcgtgcaggctctgagcaagatcgcctgcagccgcctgcagaaggagctcgcggagtggcaggtcaacccgcccgcgggcttcaagcacaggatcaccgacgacctccagaggtgcccctccgccatcgtcgcccttcctatcccctctcctcagcaggcaatccctgcggtgcggggtctcttagattcctttctccgtggctccgtgcttggctaccgttttcttgttcgcgagtctaggaggttaaagtcctgctgaaactgcggagcacgtccagcgccctggacgcgacgcgacgcgatgtgatacgtcgcgtgcgttttgggcttgtatacattggtttctttattatttctctcgtcttctcttccaagggggtttcagtagaatctttcgagtgtttttgtgatcctggaagaaagaaaattttaataaatgcaaaaaataatggtggatgaaacaacaaaaaaaggtgggtcatcgatgtaacgggggcagcaggcacgctctacactggcgaaacctacaagttgcaggtggatttccccgagcattatccgatggaggcancctcagttatatttctgcatccagcaccgatgcatccacacatttacagcaatggacacatctgtttagatatactatatgactcgtggtcc

SEQ ID NO: 6195 - DNA, 432 bp, Zea mays
  Clone ID: MRT4577_105641C.1
gtggactccatacgaccatgcctacccccatcctcctccttcgccatcgacgaagctgaagcccaatccatcatgcgaggcgacaaccttggccacttgctgctccactcactcttgcgtcgcgtggacacgatcgagtacacccttccctgccggttccggtcctcacctccggcttgccgaacggtacgcttgaactcacgcgcgcgtcgcatggtaagctaccatgagcaagaggtggacgacgacgaattggagacagaatactcgccctcccctcagttgtcatggccatggcgatcagcgcacacgtgtttggttttgttttattttccttaaatttggtgtggttgccaagagaaaataggagaagataaaaaggtaccaaccattaaagtgcttgaagatagcttctcatctttgacttgcttc

SEQ ID NO: 6196 - DNA, 312 bp, Zea mays
  Clone ID: MRT4577_105642C.1
ggggcagcaacagagagaggcccaacctctccctttttattaaatataaaacgggcttcctatataatccacagtttgaacttgatcctaagagctgggggaaaaaatttataatggggtggggggcctttttccgggctttaacaagaatggttgggagcttacataactttcattgggggggcgggggggattttttgagaggggaccccccatggagaattccagggggggttgccgatcaaactagagcctggagggcttgagctgctgtttgagcaaggggtggaggcactcggggcaccccctggg

SEQ ID NO: 6197 - DNA, 393 bp, Zea mays
  Clone ID: MRT4577_105643C.1
aacaaccccaagaacaaaaacggggagggagaaaattgctattacaccatctgggataaccgtttggataggtccacacatagccccttataaggtagtccatatatgtatagtacaaacattttgtatttttgtaaacactagaaaaggcgcctactggactatcaataattcactacgttttttcaagccatgactgactatgggctttggcatatcaataataccatcgcattacattaccatgcgaggcaaaagttacattacatggggcaagctcacgcatcatcgtctccttgaacattgttgacacgctaacactaatcaatccattcactatatatatcaataggctcactgagggccttaacagttgcgctgtagatttcctga

SEQ ID NO: 6198 - DNA, 528 bp, Zea mays
  Clone ID: MRT4577_105644C.1
ggctggtccaacataatcaattcgcaaagaatgttggggaccataaaaaaatggcccacgtattttgggaccataaaatgatgctacacgtccctagggtagaatgactgaagttatagagaacaactggtggacgctccaaattacaaaaaaaaaatggggatccctccaaaaggccatctcgggatgacaaagattctgcttgaaaaaaaagagctgccatttatactttcatagggaaaaaagtttccactcccattttgggtggggtagctttatgcacaaccacattgggtgatggaattttttgaagaagttttttaaattatcctagaacttgaagatgaaggacccaaaagccttggcttccaacaggaaggaaccgaaggaaaagggttcaagcataaccgttttatggttttaaggagaaagtataatggcttcatcattatgaggggagaggtgcatgtcgaccacataagaagcccaagtggacctctggttgagataaaaatgtaaggattatgg

SEQ ID NO: 6199 - DNA, 365 bp, Zea mays
  Clone ID: MRT4577_105645C.1
ttttgggtcgaccacccgtccggaaaaggggacccccacctctgccgatttccatccgtcggggctttgtctgtgaccgaccagaccatgggcaagagcctggcctactccatcctgagctcgtcgccggcggacatcttcgcggccggcctttccttttttctactcctccgcccggctcttgtggcgggtctctgacgccgggcggcctagtccccatgcttgctgcggtggactctgcgccaactcctaggcaggagaaggcggttcgtcagttgtcccctgcggtacaactccatcgggaggctcggtcgcggttcgcgcccgagttcgacggtctctcactgctatgagttcattgtctt

SEQ ID NO: 6200 - DNA, 422 bp, Zea mays
  unsure (1)..(422): unsure at all n locations
  Clone ID: MRT4577_105646C.1
tcataatttttttaanacacnaanccncngggggggctttttttaattttttttttttttccccccaaaaaaaaaaaacccgggtttccaattttattaaacaaccgggggggcccaaacttttccctatttaatgggggcaaaaaacctccaaaacagggtttggagaccaaacattttaaaattccccttaacttaaaattaaaaggggggggaagggggccaacggccccaagttggagttgggcccaaccttcccaaacttgaaaggggcttgcattatcccaacaggaagccccccccccccattaaaataaaatggggggaccccgcccctccaccttgaattttttgaaccaaaccagggtagaaaacaacaatccaaacattcctgggccctaaagggaatgggggggcccccc

SEQ ID NO: 6201 - DNA, 567 bp, Zea mays
  Clone ID: MRT4577_105647C.1
gtgtttttttttttttttgttttttttttttgggggtttttgttgtttttttttttgtttttttttttttggttttttttttttatggggggagggacacacgggcgggatcgaccaaagcaccaagcaggggccaaggaccaaatgagggagggcaaggcctaaagggaggggaaaggatcggagcaccggctaaaccaagaacaggacacacctatctctgggggggggggggggatcccgggggagggccgggcgaaaaaaaaaaagcgggaggttttgacaaaaattccccccttggccccgggggcccccccgggggaggggtaccccccgagccgccccagggagatggccttgggcccaaaaaaaaaggcgtcccgcccccccttaaccctggccggggggccccccaaaggttggaggaaggggttctgcaacccccccccgtaggaaaaagaccccccccagggggggggcccccgggaaaggggggagagggtgttgggggcccccaccccccactggccggcggagaggaacaaaatcccggccccgggggggggg

SEQ ID NO: 6202 - DNA, 768 bp, Zea mays
  Clone ID: MRT4577_105648C.1
ggccgcaaatttttttttttttttttgttaagctccatgttccaattaaagataatgatgatcttgacatgaacataaataaaataacagaataattgcaacatggacataatgtagtattaatcccaaaaacatatagggcaatagcaaaaactacccaaatgattcaggggtaaacaagataacaagataaacagactagggtgacctattgggtcccatcaaaattaaacctatgcatgaataagtgataataaagaacattattgggtaataaatgtgatcaaagacacaacttgcttgacacttgagatcccaggtactaggatgattcttcagatcctcgcgatctcactggatttggcatgccgggatatgaagtcgacggagggggagcgacaggatggctggtttccaaatccggcgagaaatcgtcgatccatcaaggccacacgcgaactaggaagcctgccaacacgagctccgcacaagggcggatctccaagacccgtcagcgaaggcgtcacgagttcaacggaggcagcggggagcaacagcagcgacccacactgtctctcctatctaactctcgtttgcgctcggcattgattcacctgtatgcggctatgcgtatgcactcgtcggaaagggagggggtgcacaggaggctcgccatggggaatagggaggtctggcagagcagtcctggcaggggccctccgccgtgggatgaacggcgcccgcgcagatgtgggagatcccggccgg

SEQ ID NO: 6203 - DNA, 169 bp, Zea mays
  Clone ID: MRT4577_105649C.1
ctcatgcgttcgccaactcgaggagtcgccgatcatctttatatctagcattagtatcgacaacgacaccagtgatgaggcgacgggctagtcaaggactctacccccgccacagctgccgatgtcgtgtgtgaatgtgctagtgccgtggacagttacgccatcgctc

SEQ ID NO: 6204 - DNA, 153 bp, Zea mays
  unsure (1)..(153): unsure at all n locations
  Clone ID: MRT4577_10564C.1
caacacctaatgcaaagggggaacgggcactaacactgtgacttaatctaactntaacacgggggggggggggggggaaatagcttntccccaaccannatnagcccacacattaatgcctaaaatcggggtggtctccgtcggggtgggcgg

SEQ ID NO: 6205 - DNA, 229 bp, Zea mays
  Clone ID: MRT4577_105650C.1
agagaattgacaaacctagtaattttctgcatgttcttgttcttagctattgactagggctagggacagtcaaagaacttggtaacattatgtgttaatccagatctaactaaatccactcagaacctggtgaacattaaacatgggaattctatacatcagcaaacaaggttaactagtaagtgatagcatgcaaccaaacagttatgctcccaataatacaaatgtt

SEQ ID NO: 6206 - DNA, 282 bp, Zea mays
  Clone ID: MRT4577_105651C.1
agtcggtatctcttgttcttaaaccatttcaatttggggtcccctatacatatccaaaacttgcatcgatcggggtcgctttgaactaacgggtcttgtcctcaagcagcactattgtgctcaatatgaaatagttgagagcatgccccttagaagagatacatctcaaggactcaagtgcagtgtgacgcctacttttggaaatgagcctctcctgggatcaggcctagatggtacttctccagccttccggttcttgttctataaaacacgggagatcac

SEQ ID NO: 6207 - DNA, 495 bp, Zea mays
  unsure (1)..(495): unsure at all n locations
  Clone ID: MRT4577_105652C.1
gggggggggggggttttttttttttttttttttgggttctttttttttttttttntttttttttttttttttgtttttttttttttttttttttttttttttaagcaaggaaaaaatttggggtgggacaatggaaacgggggggaaaacagggggggggggggcccaccaaacacccatttggggggaatcacggggaaacagagggttttatttttaaaaaaaggggggaactactcaaatacccttttccaaaatcgcccggacccggggggggggggcgaacagcctgaagaacccctcggggtaaggttggggggaaaactccccggtctaaaacgaggggatattttccctggacaggggggggggggttttccgggacgcgacgttaacggaacccttggacaggttaaggggcactgaaccaggggggggggggggaaccttctccatgaagggataaaaggacggccggggggggtaaaaccaggg

SEQ ID NO: 6208 - DNA, 379 bp, Zea mays
  Clone ID: MRT4577_105653C.1
gaggagttcacaggactgctatgcgaatttactctattttttttatagtccgcaaaaatccaggttctgttaaattcttttgggggcaaatgtttcataagcgcggtagaaaaccctcgtgacgtttttaaaattccccccaaagccacctctctggccgtattttttttttgttcaaaggggccctaccgcccgggaaccccctctctggcacttataacaccccctaagggctcccttttttgcgcaaacagcgcccgacaaaaggtcccttaactattatttttccaggaggggggggtggccccccacctacttttttgcccccgggggggtggttttcccccgcgtggtggttatcaacacccttttttttcag

SEQ ID NO: 6209 - DNA, 696 bp, Zea mays
  Clone ID: MRT4577_105654C.1
cttgcttgcccccgttgagtgtcttctcgtgcctcacgtctctgcccctctccctctctctctccggtggttctgccgtccggcgtgaggatgggttaggtggttggcctcctgttcatagtagttttaggtttagtagtactgtgagacttgcctccgtggcatttggctttatgccgttttggatctctccatcgacgcgtccgggcagcgtctggtggtctccggctgcctcccaggcttgtcgtccatggtggacggaggcagttgggagtggatctggcacgagctctcttcccctaataagcccgaggtcttcttagatatcgaggattgccctctgcagcagcttgctctttcaggtcacttgggtcgtggatgaggagcaggggtgttgcagatacatgaagcttgcaggtcgtgttcgagcatatcagcagctgattccatggtggagcgtcgacgcccttggttggctgccggtctccgctggctcgctgcttcttctggctgaatggcggccgaatccattcctcccggcgtgtgtgccttatggaaggcagatttagctgcggttcagaggccgtggtgtgcagctgatgcagccatggcgatttcgtcacgccaagtggttcgtccccggcggcggcgaggttcaatccgggccggtggctgctagggacccgatcgcgtttc

SEQ ID NO: 6210 - DNA, 367 bp, Zea mays
  Clone ID: MRT4577_105655C.1
ggaagcaaagcaggccaataagggttcattcattcagggggggaaaggggaggagatcccatccatgggggggtcaggggccagccctaagacatggccagaaattcataaggcagcagcctatgaccaggccctttttttggggcaggcacccccacttcctcgcgcaagcggggtgacaaatgggggaacactagccacacagggggggggtggctaacgcaaaccccactcgagaggcgaaaaaaccgcgatgcatcgcaccctgccttttttatttggggatcgccccaccccgcaaaattattattaggggcccagctaggagtttctttcgttcggccaccaagggaggatcttccagcgc

SEQ ID NO: 6211 - DNA, 438 bp, Zea mays
  unsure (1)..(438): unsure at all n locations
  Clone ID: MRT4577_105656C.1
gctccttctgcctgaccttgtacgacgacgacgatactttgtgcttgcgcaggacgaccgagagctgggccctctaggagtgcagcctggtccagatggcgccctcgtcctatgctcctgggcaccgggaccaccttgtggaagcgcgcccaccggccgccgacagcccggcgctccacggtgaccttcaccctgggcgcgccctgcggctggcgcccggcagtggacttcaacttattgcgaccggcgctgtacactaccttcagaaacataaccgctgcatgcagccgcgcacgcgacgcgctatatggtgcgacgtgcggtctggccgaatgcgcactactgtcttacctgacacgtgcactacgagggtgancagctgctccgtgattgtngactcacactgtggtaccacagcatgtatgcaataggctgcaa

SEQ ID NO: 6212 - DNA, 319 bp, Zea mays
  Clone ID: MRT4577_105657C.1
aaaatagtggataagataggagacgagataggggatctgttggagatgacataatatggttatgcatagaccttcacgtgttaggtgtcttttgtcacttctcatcttattcatatttctcttagagttttggttgactatttagtttgtctattttgcatggacttagctgacaatttatatttcagccaagtgtactttcttaaaaaaagtgggtcgcatgatgatcaattgaaggaactttcttttatgctttgaatttttcttaacatatacattgggtataatcctgcccttctgtttcagtacactcggacat

SEQ ID NO: 6213 - DNA, 348 bp, Zea mays
  unsure (1)..(348): unsure at all n locations
  Clone ID: MRT4577_105658C.1
tcactcttaatacttcccccaccttgaattcattccggctgtctttattcatacgagggtcgcctatatacaaccactttacttcttcncctcatcacataactacttgtttcccaagttcaattcctataccctcacaatcactcttaacatactatccaacctcctaaagccctaagtcatttttgcacattcttagcgcaaacttactattaattgaatccagctaacttcctgcttatcaattttcatatccactcactcaacttcttaaattaatctctcacacttcttagaccctttattatagaaatgcacgaacaacaatttatttttttcactaacaaa

SEQ ID NO: 6214 - DNA, 772 bp, Zea mays
  Clone ID: MRT4577_105659C.1
cgaggccggccgggttcctgtttcatcccgcgcagtcagtagccgcggctgcctctcctctctttgtgccccggagccggagaagatgccgccgacatcccgctaccggagccgtgtcatggcaagaccactatacataggcggactacttcttcaaagtgtcgctgatcggacactcgtaggagtgcaagtcgcttatcttcgcgcgcttgcgccgcaacaagatcggcctctacttctgggacaacgtcacactgcagttccagacccgcaccctcgtcatcgaccacggtactgccgaggaccagatctgtgacacctacgctctgaagaggtacctatgtgagccaagggcttattacacaggtgcacttgaaactttgctgttctatgacattactagaatcctgagcttctatcttatgccccgctggctagatgaactactagaccatgccgacacgaacattgggataatgctgagatggcaacaagagtgatctccatgaacagcgagcgtcgagcactgtagatgccctggagtttgccgagaaggagaacctcttcttcctggagacctcgtgcgctccaggtctcaagagtgaaacagtgcttttcaaagtgtcttgacagacatattcaagatccacatgaagaacaacatgctgactgatccgaatacaatggagctgccccagtcatgccggggacaaagtccttgtcccaggtccggggcaggaaatcccaagagcatgtggtgcagttccatgtg

SEQ ID NO: 6215 - DNA, 396 bp, Zea mays
  Clone ID: MRT4577_10565C.1
agcaagcacagagccgagtcctacagtccaacaagaggaggacagaaggagtcgcgccaccttcttcttggtcttctcaccatagttactctctcctcgtcagctcaccgcccgccccacataactctgccccgggctttgccaccggtgactacataagcagctagccatgacggccacggcgactgaggcgcccttcgatacctacactgtcaagaactccatcttccagtccctcaagggcatatccaaaatcaagatgggcttctactgcaacagctagtactagacctggtccttaaatacatactgaattttcctgtgactcgactgattcaccagtcaccgcaagcctgatgtccacattacctccgccagggaaacgaaccataactc

SEQ ID NO: 6216 - DNA, 349 bp, Zea mays
  Clone ID: MRT4577_105660C.1
aaacttcaccttaatcttttattattattatttcttaatccacatttcaagcagactcgtagtagtagtacatgggaaatccaggaaacccacagcgacaaataactacatattggaagcagaactatatacataccctggtttacacaggtataaaacactgtacgtaacgtaacgtaactaactaattcgcagcatgcattcaccgtccagcgggggggtaaggcaacgcgcgtaccggggctacctacttttgggcggcgtcgtcaatatccacctgcaccacctttttttttctgcagccgccgacgggacgggcgttgtcgtccgcgggggcagcaggcttttt

SEQ ID NO: 6217 - DNA, 238 bp, Zea mays
  unsure (1)..(238): unsure at all n locations
  Clone ID: MRT4577_105661C.1
ctcacaaacaaaanggggctccaaaactttaacgatatctatatcatcaatgctccaatatcctcgttaccaaaactacagtacaacatttttctaaaaaacctctccctatcacactaccattttaacgccgatccttttcctaatacaagtcaagccaaacatggaaaaaaaacaacttcatcacataatgctatgttttataatttataaccggcgctctttactcctgcaacca

SEQ ID NO: 6218 - DNA, 195 bp, Zea mays
  Clone ID: MRT4577_105662C.1
gcttgaatgacatctgctatactatagcgcaagaattgtcaaccttgaggctctcttttgtgaagacactggcgtgctttgcaatgctcgctgactttatgatccagtcttccatgggaaggataccaatgacttgaatgagactagtgatgcacagcaggttcagatctcgaatcagcggcaagacatggacgt

SEQ ID NO: 6219 - DNA, 483 bp, Zea mays
  Clone ID: MRT4577_105663C.1
atatctcggctctcgtcttcgatgaagaacgtagcgaaatgcgatacctggtgtgaattgcagaatcccgcgaaccatcgagtctttgaacgcaagttgcgcccgaggccactcggccgagggcacgcctgcctgggcgtcacgcgaaagaagaagacgggccaggagagaaattaaactactcagtaagcttgagctatgatgatttatctccagagttgaagcaatgctttctctactactcacttctcccaaagggttcaggttttaagaagaacagaattattagcatgtggatctgtgaagggtttgttcagcacgatgggaggtcggagtcagatcaggtcgatctagaacaaataggggatgattatcatcgagagttggcggctaggaatcttttggagcctgatgattcaaataataacatgtgggagtacaccttgcatgatgttgtccgctcgtttgctcaatttatggcta

SEQ ID NO: 6220 - DNA, 1013 bp, Zea mays
  Clone ID: MRT4577_105664C.1
tgtaactggcccaaccgggtttttttagtgtagcatcacaacacgcagtaaaatcacctcgccgcttcagtaggcagcatcacatactgctgtccttctgaagcagattcttgagatggcataatggttctgtaggtttagtttagaaaactagtgcagatggcttttccagtgaatggatcgcatcaagccaagaaccacccattccaactccaccattgcattattatattttgtcgtaactgataggcaaggacgaatcttcctgtttttctttatcatactgtccatatctacacgccttcagaaagctgcgcggaacggatgtattgacgtggcactgtccgtaggaggatcttagggaaactgatgatggggtttagccaggtgaggggataagcaactctgcccaggctgttgctgtgatatatcacagatagcagaatggctgaagaagcagactttaactgccaacaagtacagaacactttgcatcagttcattggggttctccagaatgccttttcttacgtcgttgcttgtgagttgtgatgatggagaatcagaacctgatttcggtcatagacccacgatccatgtacgtggttactactcagaaatttgttggtgcagggagggaagaagttcctgagctacttccagtgctgtatcaaggcctgaagaggagctgccgcaatgctatgtctgtgtgcctgtgctttgtcgcagcagaacactcgtgagcaattaggtcccggctttgttaagtatccaaaaatgtgcaatgtatttgccctgatggtcactcgtttgacctgttagcctgtatgaagaacaagtcaggttatggggccaggccgccaggcagccgtctatctgtacatggcaccatcgatttgtttgcgactggtggtataatgttgccctgtaatcattgtattggatgggaatttgcaccgcctccgtatttttgaacgatcacaaggggcatggttcgtttggattggttttgt

SEQ ID NO: 6221 - DNA, 168 bp, Zea mays
  Clone ID: MRT4577_105665C.1
tgactaacttgacagtgaatataactgccttgctctctgtcatgcttcagccttacatgcccacggttagtgccacagtccatggccagctgcagctcccacctccagcctgcagtatcctgctgacaaacttcctgtgtaccttaccagcagacaccgattggcaca

SEQ ID NO: 6222 - DNA, 397 bp, Zea mays
  Clone ID: MRT4577_105666C.1
cctcctttttttttttggttttttttgtttttttgcctcccaagaaaaaagatgatgactaacccgaaccacagatacatagcttgaaaactcagatcgagatgaaatctgaacttaccggcatgatttgtctatcaccgacccacatcactttgggggactgcaaaatccgcccagggtgggaagaaggacattattttgttccccaacctcctctttcattctattatggtcaccgacaccagtggttcaccgcctctcactggcaacacccggacggacaatacacgccacccactggccaatgtttctgcttgcaggggtagctgaccaaggagcggaaggtcttgcctgggatccaccccaacaacttggccttgtcggcgaccagcaccct

SEQ ID NO: 6223 - DNA, 186 bp, Zea mays
  Clone ID: MRT4577_105667C.1
tttcaccccccctcatcacatagggtgcggttttggctaatgccccagccacatcccacctgctggagccccatgcccacacaatccaagacaaatatcgtcgcgcctattggcactggtgtgactgatgtcagtccacatgctgcaggaacttgagaccccctactggttgacatgctgtgcttc

SEQ ID NO: 6224 - DNA, 404 bp, Zea mays
  Clone ID: MRT4577_105668C.1
agggcgattgggtttctcgaggccggccgggatacctttctccgccttttggctgaaataaaatatactatttgctattatcattttaatatatgatatatggaccatatgttcaaatatttttttataggtatcgaatatgattgtacctaaatataatgatcgagtagtacgcatgatggagtaacgatggtcaatcttttcccgtgactagcagtttggaaccctggtccggactggaattaatattaattgcctctccaaatccaacaaggcatgcaaaaaaaagtgtatcgcatatggaaaaaaggaggttaaaacaaatacgacctcgtcgacgacaggtttagtggctgctgctggtgcgtattattggttccaaaaaaaaaaaaaaaaaagcggcc

SEQ ID NO: 6225 - DNA, 1015 bp, Zea mays
  unsure (1)..(1015): unsure at all n locations
  Clone ID: MRT4577_105669C.1
gggtacctcgccggccgggggactggggctgtgcagctatccactctccagtgctccacgctctccaattctctctcgaccgcggcatggccgccggcctctcattcccccgcgccggggccccgttcatcctcctccgcacctcctgtttctctccgtgggcagctctggtgccccgccgtcgacttctctctgggcctcccactgccggtgatcccccgcccccggcgctcccgccaacttcgaagctcgccgccccgccggttgtgggaacgccggagcccccgctgccgtttagggccgtggaggcggagatccttcgcgatattgaccccgtcgtcctgctcatcaaggatatcctccactccgatagatacggggatggcgaatgtctctgcccaagggatgaaaatgtcgtcgtggagaagctcctctcctaccatccacgcgcgcaggacaaaattgggtgtggacttgacgctataatggttgataggcaccctgagttcagaaagtcaagatgcctcttcgttgttcgaacagacggtgtttggattgatttctcataccagaagtgcctccgtgcatacatccgggaaaagtacccgtctcatgccgacagatttatacgagaacatttcaagcgaacatgaagcaaacccaaaagtaatttgaatacattgtatttttatgagttttggcatagtttatgtacatcattgaccctcaaagcctgttggtctattcatcgctttcctagcacgcgcgtgtatgactggaatctagagcgcacctttgcaaaaaaaagtataaaggaatgcatgcaaggttaacaaaaaaaaaaaaaaaaaacccgcggccaaaaaaaaaaaaaaaaaaaaaaaaaaaaaaaaaaaaaaaaaaaaaaaaaaaaaaaaaaaaaaaaaaaaaaaaaaaaaaaaaaaaaaaaacaaaaaaaaaaaaaaaatnaaaaaaagnaaacaaaaaaaataaaaaagaaaaaaaattggggcgg

SEQ ID NO: 6226 - DNA, 677 bp, Zea mays
  unsure (1)..(677): unsure at all n locations
  Clone ID: MRT4577_10566C.1
ccggccgggggccgctcgccagttcgccgtctcaacctctcggggtctcgccgtatccgcctcctctcgccctctccggtcgtggactcgtggcgacgctggcccgcaggccgcaggctcccgcaggcccgcctcggcgcctccggtcgtggccaggtgcccaggtcctgtcctgctcggtgccaccgagcagcgtacaggaagccgcaggcggctgcctgcctgcctcaccctcaaaggtacctagccgacgagcctagcaggcagcagccccattgtccaagccaccggagacatggagcatcgcggagacgaccaggaagagcgctgcgtcgctgcctgaccaagcacggaagcaccaggattttggatctggcctaccgacagtcgacagactcaagctgttcctgttcgttctataaagatcaatcttttcccttgggtttctcacatctagcctaatgtacggagtgtagaagccagcttcaagtgcgccctcacctacccatgaacggaaatctttcatcggagcctcagaggtggtatcttggtaaagaacacttctgagaacttttctgcaatgctttntctggtagggattgtccttgtcataatggtatctaaagttttcatatgttgcctgcaaaatatgtaagtagtaactggtattaatcaaa

SEQ ID NO: 6227 - DNA, 532 bp, Zea mays
  unsure (1)..(532): unsure at all n locations
  Clone ID: MRT4577_105670C.1
tgttgnagnnagtgacagtaactatttcctcgccgggggaggatgnatgacnnactgcaatggagtgaggcagggnaccccaggttnngtaagttccaagttcacgtaattttgccttctcctgagggaccctcaaaatactaagtcattaatatcttctttttctgaaatccccgnatggtaaataacatcccgagaaaaaaggtgtcctgtggctggtgcgagtagaaagtactcctgtataaaactcaaaanactggatttatttgtcagcttttgagcagcaatgagatatattcaggtgtaccattgttgcaacgacatgagtagtagttggtggttggtcggctgcgatttcttgcatgtctgtcctcaaatgtcttacaaacagggtactcccgctgcttcagcttcctttgttatcttttcaacaaacaaggtatactatgtgggcctcctcatcctttgtttgcttggcggtttagcttcttcagntttaatagcgaagatggtatttttgtgttttgccaag

SEQ ID NO: 6228 - DNA, 451 bp, Zea mays
  Clone ID: MRT4577_105671C.1
aagcgcaacaaatagggttaggaacgggtgctttttttgggagggaaaaaaagcacacagatacaattcccgggcactcctggagggcttgctgttgggggagaggcacacaagctttattaactgggagtattacacactaggtgtagtaatcaacagagaggtaaccccccagggggttatgacagggggaaaaggaaaagcccctacagatagaaaacccactgaatatagtgggggggttactgaagcatcttttctaccagggggacgtggccaaaaaggccgttctgttgatgcgctacaaccatgcctacgtcaagcaaactactgtggtgtagtattttttcctgaaaaacttcgttagcaggttggaaaatggctttcttggttttgagggcttggatcttttgaataattaattggatttttggagagaggatgttggaca

SEQ ID NO: 6229 - DNA, 173 bp, Zea mays
  Clone ID: MRT4577_105672C.1
gccaccgcggtgaacatatatcagagtgcatggccagccactcgcgctgcgggtgctatgtgagttattttactcaggctgcgcgctatgctgcacacgatatgcttactgcgcggatgtggtgcgtgatttatagcggatctcagacacacaggcaacagttatgaccatga

SEQ ID NO: 6230 - DNA, 246 bp, Zea mays
  Clone ID: MRT4577_105673C.1
atgagaaggagtctctttcttcaaagattgcaaaggttgggtgagcattcctcttcactcttagaatcaatacgctcagccacaatggttcccccacccaccaaaaatacactgttgccctacacatgctcacctactgtggtgttctgactccattgatgagtgtatcaaaataggaagaagtttttccttaaagtttctcaaactattctaaggggtgttattttatattttggcaaggagtaa

SEQ ID NO: 6231 - DNA, 1311 bp, Zea mays
  Clone ID: MRT4577_105674C.1
tggtgaccatgtgttggtggtgttgttggcgccggcgcgtgagaccgtgttgacctcctcgaactttttccttgacgacgtgctgctggacgccgcctccgtggcggcggaagccggccggggccaccgacctcacctcctccgagcagtagtccacctcctggtagtaagccattggtgccgacgcttggtgtgtctgtgtgcagcgcccgtgcgacgtcgaagtgcttgtgtggattgctgtgtgatggtggatcccggccggccgagagaagagagagagtacagcctggaaccatcccgagcctgtacattctctctctcctctctcggccttcttcgcgtgtttccctctttttcttaggccgccctctacacttctcgacataaccatcgagagggcggtcgagagaaacgagagcggcagacaccatggggagctcgaggaccatcgttgcgtcccccctgctcctcctcgccctcctcctcctggctttcgcggccaccgccgaggcccgcgttgtccccgagctgtttggcgaggaccaattccagcggacatgcaaccaggtgcacttcaggaagatgtgccagagcttgacgaggctcccgagggtgacaacgccgcgcgagctgctgctagcgtcgatgcgcgtcgcggcggagaaggccagggaggccaagagccgggtggacgagttcgcggcgaggaaccacgagggccggccgatggagtccatcctcggagcctgcagcaacgggtacgacaacgttgtgcagacgctcgaggaggcgcggaagatcgtcgccacgcggccggcggcgggcacccaggcccaggccgacgacatgaacacgaagctgtcggccgccgtcacgagcgccagcgactgcgacaacgccttcgccgacttcccggcgattaggtccccattcttgcccatgcagcggaacgtctaccgcctcgtcgacaacgtcctcaacatcttcgtcgtcgtcaaccagccggagcacgcgcacaagcacgggcactagccgcgtgcgcgctggccggcctgccagttgtaagagccgggatggtgttgtatcgatctcctttctgcacttgaatatatatgtgaacaaggcttgagaaaaatctgtattgctagttgtagtgtaacttgatcaggttactgctaacacggaatttcaggtttagcttcttgttcttggtttcaaaaaaaaatgtgtctcgccaaaagtacgacttcactttttggcagccggatgttagctgttgaaaattaactatttttaattgctggtaac

SEQ ID NO: 6232 - DNA, 534 bp, Zea mays
  Clone ID: MRT4577_105675C.1
ggtaaacgggccccccccgggcccccccccccccccccccacccccccccccccccaccaacaccaccccccgacgggggaacaacaaaaaaaaaaaatgggacaaaatatgttgttaacaaaaactttgtttatttttttttggtttggtttaatagggggagcaaaaaaagggaaaaacaggggtcccaactcttaatccaaaggtaaaacggtctttaacacgggaacaaaagcaaccggaaacacgatattttaattgaataaaatacctgggccgaacccagtatgggtccaaaaattagtccctaaagccgtcacggctgccgcaaaaaccgacacaaacacctttttgccgaccgacaaaccctataccgtctttgaaaccggggtaaccactcttgttacccatcgagattagcgccccctacatagtaatcgcatttacagtgcctgatatcattaacggcttagttgtcacttaagatgttacttactttcttatcgctattttaaaaggatgcgatattttta

SEQ ID NO: 6233 - DNA, 372 bp, Zea mays
  Clone ID: MRT4577_105676C.1
ccacgcaggctccgtgaggggggggcggggagctacgagtgtgcgtctgctgctgcggggtgagttcttggaaggaggccgtcggggaagtccctactgctgctccaggtggcagggagcaggctgcgcagggtcgtgacggtgtgggggcgagcaactgagccatggtcgcgctcgcggggagccgacccgcgtctgggacagcggcggcgcaatgctggcccacgcctaggacgacggcggcggggaagttggccatggggctggtggtgacatcgcagggggtggcgcggtggctgggagcgcggctggtgcaccggcggataggcaggggccggtgtgaggggctgggccgccggtaggggacagggc

SEQ ID NO: 6234 - DNA, 186 bp, Zea mays
  Clone ID: MRT4577_105677C.1
aaacgggcggcctgtgctttttttttttttttttttttttgaataaacgaacgaccccttgaccttatttacagactggccaacatagaacaggacccctagccgtaatgaacgggtcggaggaaaatcttgctaccccccctaagagaggcccaccccttttcctcccaagtggggggatcttta

SEQ ID NO: 6235 - DNA, 250 bp, Zea mays
  unsure (1)..(250): unsure at all n locations
  Clone ID: MRT4577_105678C.1
ccanttcggaaacacttgtaatcactctcttcatctttacaccagcaacgttcaaaaacacgctattcgtgcctattacctaaacaccatttcgggaccattctatgcacaaatggaacatcacgatgcttcaaaatctacaactatgcaggcagaaacacttgtaatcactctcttcatctttacaccagcaacgttcannnnnnnnnnnnnnnnnnnnnnnnnnnnnnnnnnnnnnnnnnnnnnnnnn

SEQ ID NO: 6236 - DNA, 663 bp, Zea mays
  Clone ID: MRT4577_105679C.1
gccggccggttccggaaccccaagatggtctcatctttagtctcctatcctccccccgctctctcggtctctgctactcctcgccttcaccctctcgtcatcctggctccttcgcccgactttggagatggtggggacccctaaccagaccggtcccgcgctccgcaagcacacctacgctgttgtgaagagcgccccgtactggtcgtgcgcaaggctggggatctctattactgcctttgacgggttcattgccattcactcattgctccccggctgatatatgatggtcgttacttcattgcctctgtgtcgctttcacaacaactatccgaccagacccacgtcctgccatgttactctcacctcgtgtgtctcccgaatgtgtatccctgtgtcagggtctccctttctgtctcatcatgcctctgatgtcgatgctgatgtgtagtgagatgggaagcgtccagtggactccctctgacacggtggacaacatcaccatgatcatcattattatgctctcgactgcacatgtacaatgctgcgaaaaggatcgtccatgcctcgagttgcgtgactttaccgtgatttcttccagattgacgctaatgagagcttgaacgagtctcatgcctggcctgctgagcctcaaatgcctat

SEQ ID NO: 6237 - DNA, 1271 bp, Zea mays
  Clone ID: MRT4577_10567C.1
ttttttttttttttgtaggtggaacaattcttatcatataagtcaagtcaaaagacccttggacttccactagggctgtattgccagtcgcgaccattaaacaccatatagtttattcaataaatagctccggccgcttgcccgtgtcgcgtctggccgctcgcctgttcgccgtctcgacctctcggggtctcgccctatccgcctcctctcgccctctccggtcgtggactcgtggcgacgctggcccgcaggccgcaggctcccgcaggcccgcctcggcgcctccggtcgtggccaggtgcccaggtcctgtcctgctcggtgccaccgagcagcgtacaggaagccgcaggcggctgcctgcctgcctcaccctcaaaggtacctagccgacgagcctagcaggcagcagccccaatggccaagccaccggagacatggagcatccgcggagacgaccaggaagagcgctgcgtcgctgcctgaccaagcacggaagcaccaggattttggatctggcctaccgacagtcgacagactcaagctgttcctgttcgttctataaaggtaggaatatgatatatttcactcgagatcggtcattgtaataatacaattcattagcttagtagcccccctcttcaatcaattctggatccgccactgatcaccctcacctggtggttctgcgttagcttctgcagatgctcgggttgcagttgtattcagactgtcaatttcatgtcctcacttgtttcgttgttgaatactgcagtagctcatgcagatgttccagcagcttcatttccttgtgcccgagctataggaaaatgcatttattctatgccagcatttctgttcttgtcatttgaactctcttcaaaggaaccatagtctatgttctgaagtaccgttggaatctgcagaataccaacaagtacttctttttcttccatgtctagatcaatcttttcccttgggtttctcacatctagcctaatgtatggagtgtagaagccagcttcaagtgcgccctcacctacccatgaacggaaatctttcatcggagcctcagaggtggtatcttggtaaagaacacttctgagaacttttctgcaatgcttttctggtagggattgtccttgtcataatggtatctaaagttttcatatgttgcctgcaaaatatgtaagtagtaactggtattaatcaaaaggattggaggttgtaagtactaatacgattacagtagacattgcaacttatgg

SEQ ID NO: 6238 - DNA, 239 bp, Zea mays
  Clone ID: MRT4577_105680C.1
gtacctagctttgcttgtacacgagcaaagtactagtttatttctgtacctgagtcacatcacgtttcctgtgggccactactgtggaatcagtctaagtagtttacactgatgccttcctaccctgcccaccacaaatcgtgtacatagtcagcagatgacaccgctcttctccagctcctacccgagatctggctctaggactgtgatatatgtgctatctagctttgtatatatga

SEQ ID NO: 6239 - DNA, 659 bp, Zea mays
  Clone ID: MRT4577_105681C.1
ctcgaggccggccgggaaccctctgccgccctctaccccttgcctcctcctcacacgaacccactcgcctccagcctatggccgacgagcaagctgcccccgccgcctcctacgctggagacgaccgaggagcctccgccctcgcctcctccttcgtcgccgccgccggaggacttccggcagaaggttctagccgctagagaaggtggagctggtgcggggccacgaccattccgagagcaacatccgtaggccgctggtgtcgccatgctggggagcgacgtcgatccgctgcgcgcgggtgcggcggtgctgccgtcctcggcgactcaccctggaggcctggaccgtcggctgtccagccgagccgcagcggtgcgggtgcaaggcacgacagctgtgaggctgaggcatcgccgacgaggacaacaacgtgtcgagctccgaacggtgcccgtgctgccctcccgcctgtcttctcctgtttacactgcagcagttgaagatacctaatcgacaatgcaaggtcaaggcctctaccggttgtaacggattggtaattagcatgtatctgaaacctcgtttgcaaccaaagttcactgctaaaaaaaaaaaaaaaaaattttagtttgtcagcaatatgggattgttttggatac

SEQ ID NO: 6240 - DNA, 350 bp, Zea mays
  Clone ID: MRT4577_105682C.1
gccactcgttcacaaacccactgacttcattaactcctccaaacactgaaccaactaggcaggcctaattacaaatgctcctaccactaacataaaggcacctacaactcctaaaaaggacgcaaccccaaacaatgctgactctgctaccctcccagacaccaaactctattccaccaacgccaataactactctccctgccttcacactagccaaaaccccccctcaataccacctatacaaacccctattccatccatactgatccaatcacaataccctcagtagctctatattcgcccatagctccatcattaatctcaacgctacctctacacctgcaaaaact

SEQ ID NO: 6241 - DNA, 545 bp, Zea mays
  unsure (1)..(545): unsure at all n locations
  Clone ID: MRT4577_105683C.1
cacaagccactgtgaaacacatacgcatgacccgcgcacatatcgaacacaagattaagtggaggtggtgtgagacgacgctggtgccgcctagcgaggcgatcgccttgcacgctctgtggctgtccaacctggacctggcggtgcccaatacccacaccccgttagtgtactactacccaaggcccgacgacgccaacttttgctggggccgccccggattaatagcaccgcgcccaagctgctgtgagacatccggtcgcgctgcgcgccgggtgcgttcacgtactgcacggcgacagttcacctgtagatgcgccatgatgcgttcccggcgcctcccggaggtcagtgacacgcggttgagcctcccctgcaacgttcggcagctcctgcgcccgccgctcacggagttctacttcggcatcgacatcttgcaggacctgaacaccgagcgattgggctacatactagctcatccgcttgtcttagtggaagaacgtatcaagcacgcgttatnccgcgtcaaccactcccatgtgcgc

SEQ ID NO: 6242 - DNA, 324 bp, Zea mays
  Clone ID: MRT4577_105684C.1
ccggaaggtttatcgttgaaaattaaattaacaacacatgaaatgggctttttctaagttcattgtttctgaccaaaagggggggagaaaaaaggtgagagtgagagaaagaggaaaccctcctaatcaaagtagagttataaagcttccactaatgaacacagttatccaattttctttatttattaaaaaagggaaacaatagaactcctgtaaatctatgtgcttgtaggtttccttgttgtgcatagccatcagtcatgtccaactctttgcaaccctatggaatgtagtaatttttgctattttatttatagtacttta

SEQ ID NO: 6243 - DNA, 334 bp, Zea mays
  Clone ID: MRT4577_105685C.1
gtcgggactacccgctgaacttaagcatatcaataagcggaggagaagaaacttacgaggattcccctagttacggcgagcgaaccgggagcagcccagcttgagaatcgggcggcctggccgaccgtattgtactctggtgaggcgtgctcagcgacggaccgcacccaagttctctggtatgggacgcctggtagggcgagagccccgtccgtgccggaccctgtctgaccacgaggcgccgtaaacgcgtcgggttgttggagaatgcagccacactcggacggttaacttcggccctggctatatacatgcgacagaccgttagcgttct

SEQ ID NO: 6244 - DNA, 721 bp, Zea mays
  Clone ID: MRT4577_105686C.1
tgggtacctcgaggccggcccacctccgtcgagaagttcgaggctggaggaaagacttacgaaggtttccgtcaggcctccaagcaggatcctggtaacaagtcgcctgcttggtggaccaaccagggctggggataccagcccatctacggcagcgagctgaaccagcccgacatcattgcccacaaggatgcctctccttccccatacaccgtcgaagcccccgctggcgagcccgtaaagttcacctggcaccacgagggtacctgcggcgccggcgaggagggctgggactgctctcaccacggctggacagccacctacatggctccttgcaacggcgactgcaagaacgtcgacaagaccgagcttgagttcttcaagatccaccagagcgcgctcatcgactaccgcaagggccgctactcttccggtggcgaccctcaaggtgaggtcggctactggggcaccgacgccatcttctacgacaacggcaacacccagagcgtcaccatccccaaggagatccccagtggcaactacgtcctcaggactgaggttgtttccatccacaacaacggccctgtcagcaaccgccaattctggccccaggccttcaacatcaaggtcactggcggtgacgacagccagaaggtgcccgctggaaagaagggtaccgagctgtaccactcagcgacgagctcctccagtgggacctcta

SEQ ID NO: 6245 - DNA, 557 bp, Zea mays
  Clone ID: MRT4577_105687C.1
tcaccattcttgcttgatatgcacatctgaattatctcatcataagtttatacagatcaaaacattcataacttttctcgttttctcgctgaaacaataatcggatgtgcttaaactaaaagccaggagcacttactttatacataattactactatgacttgagctttgttaaggaataatgcagatgaaatttcctattgacattgattatgatttccactctgattcatactatatatataacctatttattatacatataaaactttttacatttcacttatgctaactttctctaaagattttagacaaaaaaatcgctctactcactttgattacagataggaagaaacgtatttcatatgcgggatatatacttcactatctaatctgtattacaacctacttaaaccatgacgattaatacatattaaaatacgatgactaatatataccttctactgaggagtcatactaacatacatatctatattccagaattatcaatcagaatatcctgtactattatctactctttcttttacaacttctttc

SEQ ID NO: 6246 - DNA, 327 bp, Zea mays
  unsure (1)..(327): unsure at all n locations
  Clone ID: MRT4577_105688C.1
ttntttttttttttttattttttttttttttttttttaggacaacagccgaaattttcaatacattggactagagctcaacgcttttagaaaatgtctaatcaggactgaaaacatggcataacgctctgaacttgagacgactaaccaaaaaaagtgtactcattaggacacacatttcggtgcaagacaatccatgagaatgctctaagcttcagcgcttttgccctttttcctctgtagcttcttcatgtagaacttaagctctttacccttaaggatgtctccataacttcgtcaccctgtccagggggggaagaaatgcatg

SEQ ID NO: 6247 - DNA, 384 bp, Zea mays
  Clone ID: MRT4577_105689C.1
cagcatgatgtcgtggccgctcagctcctaggagtgcaaggccgatgtcttcgcgtttcatcttgctgtcgtcctcgctcagaagcgtgccgcttagctcgcgctgctttgcgacctcggctatcgaagttggcttctttggagagatgctttcttcctcggcaaatgagatgtggcttatagtactgattgcctgataattctttggagccgtccggacggaagttgcagagacattggcggattcatcttcttcaccctccggaggaggcgaggcggcgcaactcggagaacggctcgacctcgcagactccgggcaaaaatgcacacgtaagcaacttcaagttcggcgaggccgacgaggacagcgcggtgaagaccgcg

SEQ ID NO: 6248 - DNA, 493 bp, Zea mays
  unsure (1)..(493): unsure at all n locations
  Clone ID: MRT4577_10568C.1
tggcttggaacctttgggctgatttatgtgcttgtggatgtgcgggtcttcttgtttgcctttattgactctatgtctctctctccttcttgctgtgctggtgctgttactgttggttacgggccgtggcggtcttaaggaggttgcggttattggtaatattagtgttggtagtaaggcttcttggaggaagcttcttcttgctcttattggtgtaagttatattcntattatgctgttgctgcttcttggtgctgctgctaaggatgctgcgaaggacgtggtggtggttggtgaggcgacgatgtttgttgatgttgagaagttcactctcgctgattttaaggtagatgttactgcggcgacggatgttaagaaagaggagggtaataataaggcggttgcggaagaggactcgtccttcgaacttattacggttgatgaggtgtccgtcgcggaggaagggttttaggccgatgaattatctaaaact

SEQ ID NO: 6249 - DNA, 1462 bp, Zea mays
  Clone ID: MRT4577_105690C.1
cccacgcgttttgtttcttacaactatcttaaatacatattggagggtttacactcgtgcgcctccctggaggtgcccagagcgaggctgggctagggcctatgtggaccctctagggtcgttgtggtggcccatattttggtctgcgacaccttcacacactagtttgatgttcttttttttaactcgatagggcgattggccggctcgaggccggccggaccgcagcgtctcgactggtcccctccttcctcttctcttcctcttcctgtcacatcccggacaaatccaatccgaaatcatctccccctcgcctcgcctagaagaggaaggaagaacagagataagcgacaacgcgtccctcctcgccttcctcccgcctcgagctcttcccggagcaaccggagccacagacgtcaggacagcctagcgcgttccacgccggtatgcagaaccagatcatgtgccatgcttgccggacccttctgctctacccgcgtggcgcgtccagcgtctgctgcgcggtttgccaggccatcaccaccgtgccgccaccaggattggagatggctcagcttatatgtggtggctgtcgaactttgctgatgtatactcgcagtgcagacaccgtaaggtgttcatgttgcaacacagtgaaccttgttagaccagtgaataatatagctcatgtgaactgcggccagtgccggacaactttgatgtatccatacggcgcaccttcagtaaaatgtgccgtatgcaattatgtcacagctactggagtaaatactgtggcacccaccccatctgcgaggccaacatcagatgggtcttcatatagtggctcatctacttctgctcctaaatctcaatctcagaatgtaactgttgttgttgagaaccctatgacagttgatgacaagggaaaacttgtcagcagcgttgtagttggagtcacagctgggaaagagtgattttattgacacttcgtacatcattgttgtgttttctatacacgaagttggaaaataccatgtagcatccaatgatgggttgcttggacttccttgaagaacagagatacaccacgaaatatttgtaggaccttcctaatgaaaccatggtcggacgttgtgtattgattcttttgtgtgtataatatgagctccgttagacttgtgtaatcagatatttgggggaaatacagcatagtttcgctgtacgtgcattgttacacaatttgtttgtttgttagtttgtgctgtcttggttgttcatagctcgttactgctttacttgtataccgtattcatgtgaaacgagtaagctgcaatttttgttaacgacttactaggagatgtgatgcgacagacaaaaaaaaaaaaaaaaaaaaaaaaaaaaaaaaaaaaaaaaaaaaaaaaaaaaaaaaaaaaaaaaaaaaaaaggggcgggccgttttaaa

SEQ ID NO: 6250 - DNA, 626 bp, Zea mays
  unsure (1)..(626): unsure at all n locations
  Clone ID: MRT4577_105691C.1
gcgttcgcccnacgcgtccgnaaaaaaaaaaaaaaaaaaaaaaaaaaaaaaaaaaaaaaaaaaaaaaaaaaaaaaaaaaaaaaaaaaaaaaaaaaaaaaaaaaaaaaaaaaaaaaaaaaaaaaaaaaaaaaaaaaaaaaaaaaaaaaaaaaaaaaaaaaaaaaaggggggggcctttttaggggttcaatttttgggggggggggtttccaagttttttttttttttttggggccccttaatttaattttttgggcggtttttttaaaccgtggggttgggaaaacccttgggtttcccaattttattggtttgggagaaattccctttttccccggttgggtttttgcgaaaggggcccgcccctttcccttttccaaccttttcccccccttttttgggatttggaccccccctttttcgggccttttaggcggggggggttgggggtttccccccgggttgccgtttacttttgcagggcctttagccccgttttttttctttttttcccttttttttttcccccgtttggcggtttttcccctcaagtttttaattgggggcctctttcagtggtttcttttgggggttttagggccctttgccccaaaaaatttttttggg

SEQ ID NO: 6251 - DNA, 333 bp, Zea mays
  Clone ID: MRT4577_105692C.1
ggaccgagcccgaggcacggagaccaggaaagggaccccgggacccgcggccaccgggggaagacagaagacgggacgggacagcaagccagcagcggccgaggagaggaaccgaggacgaacagatttttctgatccagcggttcagccaatcgggcgatgatatccggaagtacgcacatttgctccctgtagatcccttttgcacttcacaaacgaacaagacatcctatactgctacgcattggggaaaaaaatttcccttcgaacttggctattcccaaatcccaacactcaagttcaaaacactggctcacccactgtcggcagcaa

SEQ ID NO: 6252 - DNA, 265 bp, Zea mays
  Clone ID: MRT4577_105693C.1
tcggtcgctgatgaacttcgagaactcctgcgggaacagtcaccatagagtggggctggctctctacagagtcatgtgtgttcagccaattctcggctttttcaggccagaaagaggcgtcaaggtgaggagcctatggtacttattacactggctcctcgggatcgcggtctgcgccacggtgatctgcgacgtctacatctggcatcggacctactcacgagaggaccgcccagagcgtgaggctatcgacggcgctcctcac

SEQ ID NO: 6253 - DNA, 417 bp, Zea mays
  unsure (1)..(417): unsure at all n locations
  Clone ID: MRT4577_105694C.1
ccggaccggagggcggggggagacccacgcgnccgcggacgcgggggcaaacccagatccaggagcnccgagagcaaggggaagggagaggccgggacgggcagccggcgcacgcgaccaagcaagacgagcacaccaacgcagggaaangccgatgcngaagcgccnncaaacccaacggataccaggagcggaaacgacatggcggggggaggaagagtaccgccagaacggaacctagcgccgggcgaagacgacgctgatgcagcccatgggcaccggggggcagcagctgcagaagagcccggaggcaccgacacgcggccaccagacgggccgagagccccaggggcggaaccacggccgtccatggagaggaaactctacggtgacatggcagaacacggaacccacgcc

SEQ ID NO: 6254 - DNA, 431 bp, Zea mays
  Clone ID: MRT4577_105695C.1
cggattccgggtcgacccagcgtccgcgccgcgtccgaaacacatggaaaatcgcattcatgtaccaccattgaccgacagtgtagggcaatatcttatgcatcctgatccttctggatgtgctggtacctgaaccatacgccaacattgctcataagctcttataacttcctatatttgcccatacctctcaatacctgtgattaaagactgttaaaacctaataatacaaacctacacgatccaacaggctataacaagcagtatcataactcaattaaccttgatcatccaacaactgtcaacaatattacagcatatacctggggcacatatggtgacacaccatatcaacgcacaacatctacaacatcttgctatcagaaaccatgctagctactctgagcaacattagttcctaccattaaaac

SEQ ID NO: 6255 - DNA, 126 bp, Zea mays
  Clone ID: MRT4577_105696C.1
aggaccactgaacggcgctgaagaggttcaaatgcaagcgacaacagtttaaggggcttcccaatcctaccggactacgctccagcgacccccgcttgatcagtggtgggatcccgaggtcttgcc

SEQ ID NO: 6256 - DNA, 295 bp, Zea mays
  Clone ID: MRT4577_105697C.1
ccgggcggaccacacgggtccgccacacccttccgaacaaaagaaccgttgccaaaggtggtaaaaaaggcgccggcggaggaaccggacgcggcacctcttaggaagggagagccgaggaaactccagccatgggggtccggatccgtttggcccggttcggttgccggaatcggcctttttaccggttgatggccgccgttagccgttcccttggggacggcaggaacttgagggtcttcggttactttaacccgtttccagggaaggttggaggcaaaaggatgggccttaa

SEQ ID NO: 6257 - DNA, 773 bp, Zea mays
  Clone ID: MRT4577_105698C.1
cattgggtacctcgaggccggccgggaagccgaggagcaagaaaacacaagtacagactacagagccatctttgatctttccagtccaagatgagcgtggagatcctcgacgggcggacggtgcagagcttcgtggaggacgagcgcgcgttcaactcgtccgtggacgcccgcttcgtggcgctggacgtggaccgcgacggccgcctctcgtacgccgagatggccggggagctcatggcgctgcgcgtgcgggaggcgcacttcggggccgacgcgccggcgcccgcggccgagctcgccgcgctgtacggggcgctcttcgcgcgcttcgaccgcgacggggacggcgccgtggaccgcgacgagttccgcgccgggatgagggaggtcatgctcgccgtcgccagcggcctcggcgtgctccccgtgcagatggtggtcgaggaaggcagcctcctcaagtgggccgtcgacagggagctggccactaccatgccagcttgaccagctcggctccatcagctagctgcctgacagtgtgcactagcgctagtgtcaccgctagctgaatgggagttttatcacctatgtatgtatgtaaccgtacgccgagggtgtcggtctaatttgggctcgtttaacgttttcgtgtttgtagacctgacatgagtatgtaacgtacgcactgaaccttttttatcagtccgaaaagtagcgttttacacttttagagctcatgctaacaagacatgaatctatccgataattat

SEQ ID NO: 6258 - DNA, 326 bp, Zea mays
  Clone ID: MRT4577_105699C.1
tttgtttttttttttcgcccctttttttttttgtggtttttttttaattttttttttggtttttccgggaaatttaagacttcaaaatctattcaaattttatccgccacaactggagggtatctgaattcaaacagaaaatttgaaacaaattgtggacaagcaaaatccgatcgtatccgacccgattacacccctactccattcatacccacttgggtctcattattcaaataaaagctaaatttaaacctggatacatgaacaatcacaatttgttactaggagggcatgtttgggcattcagtttgaccatcatgggcaaa

SEQ ID NO: 6259 - DNA, 566 bp, Zea mays
  Clone ID: MRT4577_10569C.1
catggaacgcaggaggagccggcacgccttgttgctcctctcagccgtcatggcgtccctcgtcgccggctcgaccgccgggatataccacatcgacggcgccggcaaagggtggcggatgccccccaacaggacgtactacgaggactgggcgcacaccaggcagatcagcataggcgacaagctgatgttcctgtaccggagcggggtgcacaacatcgtggaggtgccgacgcgggagctgttcgacgcgtgcagcatgcgcaacatcaccagccggtaccagagcgggcccaccatcatcgagctcaccgaccccggcgagcgcttctacttctgtggcgtcggcgagcactgcgaggccggccagaagctcgccatcaacgtgctcctcgtcccgccgccgccgccggacacggacgacgactgctccagcgccgcccgtctcccgggccacgcgggcgcggggctcgccgtcgtctgcatgtgcctcgtgtccgcgctgctgacaatggcggtgtgaatcggcacgctgccgccgtagattattggcgattgctggctga

SEQ ID NO: 6260 - DNA, 1415 bp, Zea mays
  Clone ID: MRT4577_1056C.1
ccacgcgtccggattgatgcagttgaaattgatgttgatgcattggctgacacagctgggaatgttgtgattggtggaattatggagcatatcgagcaagctggcatacattcaggcgattcagcatgttctcttcccactagaacagtctcagccaagtgcctagaagtcatccgttcatggaccaccaagctagcaaagtgtctgaatgtgtgcggactaatgaactgtcagtatgctatatccacttctggtgatgtgttcttacttgaggcaaaccctcgtgcatcacgcacagtcccttttgtatccaaggcgatcggccatccgctagccaagtatgcatcactggtgatgtctggtgtgaccctgccagagcttgggttcactgaagaagtgattcctaagcacgtgtctgttaaggaggctgttcttccgttcgagaaatttcaagggtgtgacattctcctcggaccagagatgcgcagcaccggggaggtgatgggcatcgactacgagttctccggtgcctttgcaaaggcgcagattgctgcgggacagaagctccccctaagcggcaccgtgttccttagcctgaatgatctgacaaaacggcaccttgctgagatcgggcgtgggttccgggagcttggcttcagcatcgtcgccacgtctggaacagccacaagtgctccagctcgagggcgtcccggtggagccggtactaaaaatccatgaggggcggccaaatgccagagatatgctgaagaatggccagatacagatcatggtgataacaagctcgggcgacgcgctcgactccaaagacggcctccagcttcgtcggcttgccctcgcttacaaggtgccgatcaccacgaccgtggacggtgcacgggcctccatcgatgccatcaagagcttgaagaacaagtcgatcgagatcctcgccttgcaagattacttccagactgctgatgcttcggaggatttacaggcggtggcacgaaccaccccttagtggtgtctcttcttttcccatatataatgtgagcctagctcaaagccaaaaccacatcccaaatgaaaattttgtttatggttgcacctgcagcatgcatgcgcaaagacaggcatccagattgtatcggtcacaggcatggctggacagaatcggtgttgggcgaacgtagttgtagtttgtcatgttagaagggtgatagcatccatggaaataaggcttcttcccaactgcggttttgatgatgactaccataccatatcatatcccttgtggaggtttatttacattgtatcattgtctcacaaaaacgaaaatgtgcgacgtacatgtattgttatgcttatgcatgttataatcagattctttgatgagtagacaggcattttactgt

SEQ ID NO: 6261 - DNA, 195 bp, Zea mays
  Clone ID: MRT4577_105700C.1
ctgtcgttgtacctggcaacgtgtaaatcaactttctccggtagacactctgtttttatgctcatcttttagaaatcgtgtgtgtattcttatattaattaattttccgagatgttttgccacccatattgtagacttatctccatcatacataaatactaccctattgtaaaatcttggtctttgttggtcatc

SEQ ID NO: 6262 - DNA, 181 bp, Zea mays
  Clone ID: MRT4577_105701C.1
agcctagcggccgcgcatatagaggagcgtccagcagaacatcatgtttatggcgatcgctatccaccagtgcatgggtctgcgacgtggcagcgcgtgcgcgatgcatgtgcccagccccagcacgatggttgacgctttgcacagcgctgggaccggcctgacgaccatgatgaacacc

SEQ ID NO: 6263 - DNA, 255 bp, Zea mays
  Clone ID: MRT4577_105702C.1
cgtgaagcaagatgttgagaacagatctgctgatcaaagtgtggagacagggaagaatgattgtcgccatgccgagtgcaaggcagctgagattgatgattggttgcttcagtttgcagatttgttccggaaccaggttgggattgatgcagatgcacatttagacctgcatgagttgggcatggagctgtgctccgaggctctcgaggtcactgtgacaagcatggaggctcaggtcctttttgagttggctgc

SEQ ID NO: 6264 - DNA, 223 bp, Zea mays
  Clone ID: MRT4577_105703C.1
tccctgttctaccctctcttcctcttactctttttctacccacacatcttcattttcgttcactgactcttatccagtagcatagttagctttaatgggcagactgagaactcctttaccattctattcctaactacttatatctctacataatcaactacaacatactcattctttaaacactttcacaaattatactcaataatattaactacatatacta

SEQ ID NO: 6265 - DNA, 612 bp, Zea mays
  unsure (1)..(612): unsure at all n locations
  Clone ID: MRT4577_105704C.1
cctacgcgtccgaggacggacaatcacagaaaacgaaacgcaggcatccatggaggtggtgggaggggtatcgctgaggccggcgcggctccggcacctgacgcccggggaggccagcgcgggctccttcctgccgcggaggctgcagctggcacggaccgccgcgaggccagcgaggcgcgcgctggtggtggaggcccgcgggggcaggggctggtcggaccggcagtcccagcagcagcggccgcatgccgcagctccccaagatcgaggacgacggcaacccccgcttcgtcatcttcatccgcaccgccaatgtgtacttctggtacccgctcaacatcgtcaccggcggcaccaccgccaagatcatgctcgccgccaaggacaacttcctcggcaagtacatctacaaggacacgctcgcccggaacctcgccaccgtcatttacaaagacgaggacgacataatcgacttggcgaaagagcagttccgcgtgctcaagggcgaaaccgagttccggtacggctacaagatcgtggagaaggggaacctgangtctgcactggcgacaagcaacgtgctcgagctcccaaagaaagaagagctca

SEQ ID NO: 6266 - DNA, 2683 bp, Zea mays
  Clone ID: MRT4577_105705C.1
cattggtactctcgaggccggccgggagggagtgacacgtcccgagcacgagctcgtcaacacccgaccccgtccgcactctagagtcgctacccgtgaatccgtgatttccattctaaaaattatccttcctcccgtgcctacagtcctacacctcgacgatgccaaaaccctagcgcagcagcgcgaactacacctctccccgtcctgttcctcgtggcgcggtagccatggcggagccggccatcctcgacccctcccccttcgatctccgccactatccggcgcacctcttcgacccggacatccccctcgccgccgccgacttcccactcggtgaattcgccggagatgacggctgtgatggcctagacttcgacgtgcccgtagatttctctatcgacgacttcctcctccggtctcctgaccgcgggcacgacggcgacgactccggcgagggctctgctgccggatccggccccaccgcatcttccttggcctccccggccacctccggcactaactccgccgtggccaacgtcggcaaccgcaaggtgaagcacgaggactcggacgagggaaggagcggcgccaccccgaattggagcctcaagcggaagcaggtgagtcccggagaagcaacctccgatggggccaagtgccgccgatccggcgatggggatgtttcgccatctgcatcggcgtcgcgtgcagccacggaggactccgatgagaggggcgtgggcggcgaggaagaggacaagcgccggactgcgcgcctgatgcggaaccgtgagagcgcgcagctctctcggcagaggaagaagcggtacgtggaggagctggaagagaaggtgaaatcgatgcactcggtgataaatgacctcagttgtaagatctccttcatcgctgcggagaacgccacactgaggcagcaactcggtggtgtgggggtgagtggaccaccacctggggtgtatccaccgccaccgccaggcattcatttcccttgggtttctgggtatgcaatgcggcctcatggctcccatgttccacttgttccaatcccgcgattgaagccgcagcatgcagcagctgcagtgaaggtatccaagaaaccagatgtcaagaagtctgtggagagcaagagtaagaccaagaccaagaccaagaccaagaaggtggcaagtattagccttcttggtttgctgtttgttgcatttgtctttggcgcttttgttccggggttcaatcatagtctcggactgagaggaaggagcgacaatgtgatgtttggaaattttggccagtctgatgctagggtgtttagtgtcactaaccatggtaaaggacctaaaggcagtttcaacagtagtgacatgatcagtactgatcatgacatgatgactgggcatgatgatggagcggggcagaaacaccgagctgcaaataactctagtgagatcttgcctgctttgttgtatgtgccgaggaatggaaaacatgttatgatcaatggcaatttgattattcattctgtgatggctagtgagaaagcagtggcacataagggctcaaatagtcagtcagttaaagatcacaaggagaccagtgttgctatagctcgctatctgtcaccacctggaaaggatatgaattcaaaagagatgttcccgccagatgcaccactgccacaatggttccgtgaaggaatggaaggacctgttttgaactcgggaatgtgcagtgaggtatttcagtttgatatttctccagcttcggccaaatctggtggcattatacctgcttcggccaaatctgcctcaagtgtcaatgctacccagaaaattctgaaaccttctcctgcttataggggcaagctgaaaaacaggaggatcatgtataacgaggcaattccacttactggaaaaacagcgaacaacacaaagcctcaggcttttaacagtactgctgaaagcagcaaggtacctgatactgatagcaagcctgcatcatcagttatcgtctctgtgctagctgatcccagggaggctggcaatggggatggtgatccaagagtatcaccaaaacccctctccaggatatttgtcgtcgttctgctcgatggtgtcagatacgtgacttactcgtgcacacttcctttcaagagtgccagcccacaccttgtggaactaaccttggggccggtgcagctttctggtccatgagcggctaaatagttggggttttctgatgcattggaggtagatgaatgaatacagtaatgtggtgttgcttgctaacaatgaaaacagacttcaagactcgcactcggcctgaggtaatttgagtttgtcgaaggtttgtagtgtggactggcgaaatgttgtgcaagttcaaccttaacccatgaggtttgtgcttctatgtagtcgagttattatactcacctctttctctggtactctttattgcggagctggaaaatataacagctgatgagagaagacaatatttggaaaataactttgtactagtatatattatatatatagtgtactatatatagggatgtaatatggttcggaaaatatccgtccggatccggattctaagatggtgaacactggttcagatggaattttcggaaaaaaaaaagaaaaaaaaaaaaaaaaaagcggcc

SEQ ID NO: 6267 - DNA, 869 bp, Zea mays
  Clone ID: MRT4577_105706C.1
cctcgagccggcgggatcctatctcctaccaaagatccgatcccacacatctgctaaaaggatggctgccccaacactaactgcagatggtcctcgcctcggccagcaggagatgaagaagatgtctccctccttccatccaactctgtggggagatttctttctttcttacgaggctccgaccgaggcacaggaagctcaaatgagagaaaaggctgcagtgctaaaggaagaagtgagaaacatgattaaaggttcacatgatgtgccagaaatagtggaccttattatcaccctgcagcgactaaatctggactaccactacgaggatgagataaatgaaaagttgactgttgtttacaaatccaattatgatggtggtaatttggacttagtttcacgtcgattctatcttctgcgtaaatgtggctacgatgtttcatctgatgtattcctaaaattcaaagaccaacttgggaattttgttgaggctgataccaggagcttgttaagcttatacaatgcagcattcctgaggattcatggagagacagtgcttgacgaggcaatttcttttactatgagagttcttcaagatagattacgaaaaggacgctaaacaaaataaatcaatattagagtttgcgaaactaaacttcaaccttttacgacttcgttattcatcagagctaaaagagtgcacaacctggtggaaagaacttcgcgtcgaatcaaacttgagtttcgtcagggataggatagtagaggtgtacttttggatgagtgggggatgctatgatccctcatattctcattctcgaattatacttacaaagatagttgctttcatcacgattctagatgatacc

SEQ ID NO: 6268 - DNA, 245 bp, Zea mays
  Clone ID: MRT4577_105707C.1
tgtgtttctaatatttttgattatctataatgtgcctgtcttcaattcacaagattgggttataacaattatttgccagattagcactaggggattatttgataaccagcttatcttatcagtagttttattgctgatcaggcataaatagttttccaaagttatttttaataaagtatatacaagattcttatatattactagtcatgataaagtaaattaagcagtttttaaaacttagtgtg

SEQ ID NO: 6269 - DNA, 243 bp, Zea mays
  unsure (1)..(243): unsure at all n locations
  Clone ID: MRT4577_105708C.1
gggaaaaaaaaaaaaaaaaaaaaaaaaaaaaatatccctgtttctggggaatcatttcccaaggatttgtataccccctgcgggtcactggnatccagnaaatgggaaagntctcaaaatggcgacagcgnaagtggccgagtgagagaaaggaacctagaggaaggnacaccagtttcaagnaatccctaggncgtggcgacgtggtgggaaggattnnaatnaggggtgaagnntaggtga

SEQ ID NO: 6270 - DNA, 883 bp, Zea mays
  Clone ID: MRT4577_105709C.1
ggctgggagaaaaattctcgtgtgctgtcaaaatggagaagatataagtatttgtgtggccttggcaatattggccttgttattcgatgataacggatgctttgactatggaaattattttgtcaaaagagatgttacaaagttggagatgaggaggaggctggtattcatctgtaaatttgctgtaaacgcacggccatctagaggaaacttgaaacaggtgtatggtttcctcagcagtcaaaaggaactgctgtcatgtttgacatagcttggtcttctgtgatgtagatgaggtatcagttctgatctgctgcttgagtgataggtgtggagtacgagctggggcttctgagtttgtctttcacacagtctgttgatcagatggtgcattacgatcatgcccagaggttttcattggaattgccaccatggcaatgatctcattctgggatcagtatctcaagccaacgtcaatcaacatttatttggagaagaatgaacacaaactttggtagagtgtgattgcaaagacaagctgatggcttggataacctagcgatgattcgagtattatcaatctgtgacaaaatatagaagaaactaagttaaggacatgattcgtctgatggtgcctgccagattggaaagtcattagtgcttaatagaattatgagggaaataatagtgagaagttatcttatttattttgcggtcttttttatctgcaaatcgtgtttagcaaccatttccaatcgctttgttttagaaactggaccaactttcaaattgaagtgcatgacaaaaagcaagtgggcacttgaagaaaatgcatatcgtatgaacttttctatgacaaggaatgggacattttctgttagac

SEQ ID NO: 6271 - DNA, 353 bp, Zea mays
  Clone ID: MRT4577_10570C.1
agatttggaaacccttctgctgaaagagaactattattatgtatttattgtggtggtggaagagaagaagagcatgtgtagtaggagctgatgaagaagtggaattattgttatttgtttgtggttgtattggcataacaacacgttcaggaaaattgagtttggctttgtttcctttgaacctcaatgcagcagcatcataagccatagctgcagcctctgccgtgtcaaaggtgccaagccacactctagctgctttcttagggtctcttatttctgctgcccatttgccccatggtctctgcctaactcctctatagtgctttttcctaatatcatcactcgagccgaat

SEQ ID NO: 6272 - DNA, 679 bp, Zea mays
  Clone ID: MRT4577_105710C.1
tgaaataacaagacaagtccaggcttcatattgaggactctatggatactgataacaccaatgctagcaagtcttctgaagatggccatgtcacagataagatagataaattaaaagagctttcaaagttgcctgacatctatgatagattgactagatcactggctccaaacatatgggaactggatgatgttaagaggggcctgctttgccagctttttggtggcaatgctttgaggcttccttctggagctaacttcagaggtgacatcaatattttgcttgttggtgatcctggaacgagcaaatcccagcttctccagtacatgcataaactgtctcctcgtggtatttacacaagtggaagaggcagttcggcagttggccttactgcttatgttgctaaggaccctgaaactggtgaaactgttcttgagagtggagcacttgttttgagtgacaaaggtgtttgctgtattgatgagtttgataagatgtctgataatgcccgaagcatgctgcatgaggtgatggagcagcagactgtatccattgcaaaggctggaattattgcatctttgaatgctaggacatctgtcctagcctgtgcaaatccatctgaatcacgttacaatccaaggcttttctgtgattgacaatatccaccttcctccaacac

SEQ ID NO: 6273 - DNA, 426 bp, Zea mays
  Clone ID: MRT4577_105711C.1
atgacattcgaggatggaaatcaagctttggtcaaagattctctagattataacttgcttccagtttctcaattatgtaaaatgggctacaactgtctttttactgatattggtgttactgtctttataagaagtgatgattcaatagtttttaagggagtgttagatggtcaggcagggaagcaagtaggagctcatcatccacacaagaacatcatgacgatcgacaggccgctcgaacaactccgcatggatctattcgacccgatcacttacataagcatcggctggagaaaaatctcaaacccaagggaccttgaagagattcttgagacgggctcaaacggattgaaaatcaaaaagattagaagcgacaatggaacagagttcaagaattcttttggatatggcaaggaccatgcttga

SEQ ID NO: 6274 - DNA, 171 bp, Zea mays
  Clone ID: MRT4577_105712C.1
ccggatcgcgttccgcatcccggagccgcgaccgccgcgtccctactcccttggggcgacgcagcgcaccacgaggatgatcgcgctgaggaacctaagataagagtgcggcggcggttgtgggagtgtcgcccgggtgcgagacgttgtcttcggcctggctcggggggg

SEQ ID NO: 6275 - DNA, 484 bp, Zea mays
  Clone ID: MRT4577_105713C.1
attcggctcgagggcgacagagtcttatatggcttgttatcagttgcttaatccttcccgatgatgttggccagtgaatcacacgtgattgagccctgttggaaaccttgctatcattgctggggaggacacaaagcctttacttatggctgctaatcgaaggaagactattcattccacgaaaggtcacttggcttgctcctttgcttgggcttgctgcccaaattgcctgacattcgcctcatgtaactgctacaaagctggaccgacttggaatgcaagctatttcactacgagtgcatatgtatcgagaggctgcactagctcattcacagctattggttctagatccagcaggcacttcttgtctgtgacacacgcaaccgactttgtccacatgtttggcatggcatgtgactactataccacacatgaattgtattcctttggcaaggtatcctgtatgctcttaagatcctgctcg

SEQ ID NO: 6276 - DNA, 375 bp, Zea mays
  Clone ID: MRT4577_105714C.1
ttctctgcctccgcggcggttttgcgaggctgagatatggcaagacatacattctaaacctttgctatgttgaacaaggccttctagtgctgacagctaagggatatagtatcctcaaaaccggtgaatctagatccactagtctacaacatgggagagaacttgttcgtatgtcataagcaacttctgtgcttcagacgattaatactgaaacgcagacatatcctattaatggacgaggcatcgtcattttgtcgattctcaatcatacgctgctatgcaaaagatcatggcggagtagtccactgaacataccgtcatcagcgttgcacatcggatgccgactgtcatgcacagtgacctacttctggtgtt

SEQ ID NO: 6277 - DNA, 245 bp, Zea mays
  Clone ID: MRT4577_105715C.1
ccggccagcctcctaagctgcgactgaacgctgttctcaactcggttacccgacgaggacctttcctcggcaactctctaggtgtggttgctattatctacaactgcaccaactccttgattggcagtcttcgtggaaagcatgatgctggaaacactattctcgctggtgctctgagtggtatgctcttcaaaagtacccgcggtcttcgtcccatggctatctctggtggtattgttgcctct

SEQ ID NO: 6278 - DNA, 222 bp, Zea mays
  Clone ID: MRT4577_105716C.1
gcccacgcgttgcgtaaatatctagagcacgccatcaagtgatgactgtgactttttagaggaataccgctctgctcgcatgagggggtttatctgtcaagccagcctgcggcagcgaaaaacctccagtagagtacagcccccccgagtaatgttaggtagcatacttccatcattactatctggggggggctattcttcgcattatcaataaaagtctga

SEQ ID NO: 6279 - DNA, 646 bp, Zea mays
  Clone ID: MRT4577_105717C.1
ccctcgaggttggccggggaaataggtcctactcacaagggaaatagaggataccatactcttagctttacagaagcctgaagtgtatgatgacattgctcgcgctacatgctgcaaatttgggatagatagacctcaagttgtacctgtgcaaggactacctcaggtttgaaccatacttatggaatgcatgtaagaggtttgtgttggagcaccgggctggcgagaaccgtgctccaatcatttcagatgatagccccaacaaagatatcaacaatgccttctataatatcgtgatgctgaaaaagtcaaaggatgggagaatgttgaatgcttcttcagatactatttcttggtctgtcaaatctgcttaacccaaatgcaagtttgttcaaatgtggcaaaaaataattgtctcaccaattgtcagcatgtttgcttccagcaaagttgtccagagaagaaaagatgaaatggaactcaaattttagtggtcgcacaagtgtggagccagttgatgaccaagtttttcaattagtattttagtttgaatttagagtacacatatgtatgagttatttgacaatgcttgtttatgagagattgaatgatacctatctatattatattaattataatgttatcg

SEQ ID NO: 6280 - DNA, 435 bp, Zea mays
  Clone ID: MRT4577_105718C.1
tatattttttttttttttttttttttttttttttttgtttttttgtttttttgtggtgtttttttttttttttttttttttggaaaccaaacaattttccagggggcaaacaaccggaaggctttttcatggggcgccaaaactgtttcaagcccccgctccaagtttaccccccgtacagtttttgtttttgttttgcccccggggcacaaggaaaagtaccttcccccccatccgggggttttattgcgggagcggtttagtatacaatccaaccaaggccctttattaactggaaatcggtggaccagttttgcttggtgggtaaaaaaatacatccgggggggccccccctgtcctaaaatcccatcccagcccctcctttaattttggctgccgcctgctgggctgcccggggggtttaattttttgccc

SEQ ID NO: 6281 - DNA, 671 bp, Zea mays
  Clone ID: MRT4577_105719C.1
gagataccacattataataatttgaaagagaaatatacatacacacatttatttaataacattataattaatataatatagataggtatcattcaatctctcataaacaagcattgtcaaataactcatacatatgtgtactctaaattcaaactaaaatactaattgaaaaacttggtcatcaactggctccacacttgtgcgaccactaaaatttgagttccatttcatcttttcctgaggtagtccttgcacaggtacaacttgaggtctatctatcccaaatttgcagcacgtatcgcgagcaatgtcatcatacacttcaggcttctgtgaagctaaaagtatggtatcctctatttcccttgtgtagtaggacctatttcgttggccgtacaagcggaatagcaccaataacacataagagcagtcccttccattgcaatatcgtagagaagatattaattggatggcatccagacgtgaagtaggaaaatgtcctgtattttggttccattgttcctgaatgctacacggcgctggtggaggctccacgacgacaaaagcaaagctgcaaccatgacgacgacgtgctccatctcttcttcacctagatttcacggatttcgctcctcaacacacataggcacataaacacaattcatagcaaa

SEQ ID NO: 6282 - DNA, 340 bp, Zea mays
  Clone ID: MRT4577_10571C.1
ggcgacaagatcacaacactatgtaaccaattgttccagctttccaaaacaaattcaagaactaaaagaaataaccaaagggacttgcattcactggacaatcaaactgaaagtgattgcacaactggaatctctccatgtcatagtctcttacaccggtgtcattactcgatgccatgaaatgaacagcgccactaggggagaaaacagaactggcatgaacatacacccaatgaggttgcattattaataaaggggacatgacattacctagaagtattgaatatctcgattgcattagtaagagcattatcatcatgtgatgttcgacaacaaaagc

SEQ ID NO: 6283 - DNA, 1115 bp, Zea mays
  unsure (1)..(1115): unsure at all n locations
  Clone ID: MRT4577_105720C.1
cccacgcgtccgctacatagtacataccgagtaggacatagacaatgtttgaacatagacaagggagaacataagcatagcaaagcactctcatacttttgaaccaaaacataaaaaatgggcaatgcatcatgtagggctccactagacatgtattactcactagacaaatgttatattatggctttatatcgtggagtcctactactctactagacatgtattacttagcagacaaatgattctgtggactctattctgaaatcattgtctttaagcttgaaaagagtttgttcttctaacatagggaaatagaggataccatactcttagcttcacagaagcctgaagtgtatgatgacattgctcgcgatacgtgctgcaaatttgggatagatagacctcaagttgtacctgtgcaaggactacctcaggtgagactagagttccttttacatcttggtttgacctgatagaaactagatctgcaaaagtaaatgggacaagtttggttctattactcgaatttgagattgagattaaattctcatgctttaaatggacaccaagtgggggaaatggggctgggacgatttggttaacctttggggatttctgggttagatttagttcatgaaaatcaacatattttgattggatttgtggagacgggacaaaaaagtagtagcttgttatcagtttctagtaacttgtttatgtgtccttttattataattagatagaaaattagaattttttgctaaactntgaacttgcatttactaccttcagtttgtgccatacttagttcatgcatgtagccggtttgtgttggagcaccgggctggcgagaaccgtgctccaatcatttcagatgatagccccaacaaagatatcaacaatgccttctataatatcgtgatgctgaaaaagaaaagatgaaatggaactcaaattttagtggtcgcacaagtgtggagccagttgatgaccaagtttttcaattagtattttagtttgaatttagagtacacatatgtatgagttatttgacaatgcttgtttatgagagattgaatgatacctatctatattatattaattataatgttatt

SEQ ID NO: 6284 - DNA, 472 bp, Zea mays
  Clone ID: MRT4577_105721C.1
ctccgtccagcgggcgaagcacgccaactcgaaggatttctctctctatagtcgtcgccatccacataacccgctctaccgaacttccgaggagaggagatccacctggtctggtcgatttcttctcatggtcatcgtggagttctaactgcagttgggtttccagtaattttgggggttcaacagttcaacagaaccccaaaccctacgttagatccgcccccctgccgagctccgctacgtttatgatattgtgacggcatcgtatagtccttcgctgcttacttggcgcattgttgaggctgagacttttaatgggccaggtggtttccgatgctgttgtccaagaacaggcagctggcaatggcggaatcattaagaatgggagggaaatcctattgcaggcttttaactgggagtcccataaacacaattggtggagtaatttagagggcagagttgccgacattgc

SEQ ID NO: 6285 - DNA, 268 bp, Zea mays
  Clone ID: MRT4577_105722C.1
ctatttgtatggtagcacctgatagaatctgtaaataatatgttcaaatacattgcatagacccattcaattttgaaagtaattgccagggaagcaagtcaggggctgataagtctgataagaacacatatttagttttttctacaatacattacattgcatagacccattcaattttgaaagtaattaccagcgaaacaagtcaggagcagataagtctgataacagcacacatttagtttgtcctacaagtaggtttttggcttga

SEQ ID NO: 6286 - DNA, 818 bp, Zea mays
  Clone ID: MRT4577_105723C.1
gggtggttcttcaaggactacttgggtcgagtccacgaccatccccaccaacccgcgcacctcgcgccccgtcggctacgcctttgttgccctctccaccccatccgaggctgagcgtgctattgctgagctcaacggcaaggccatcctcgaccgcaaggtctccatccagcttgctcgcactcccgaggcccacgctgagggagctggcagcggagccgaaggcaacactggcgaggctcgccgccgcacctccacccgcggacgtggccgcggacgtggccgtggaggccgtgctggacgtggaggacgtgctaccgacgctgagggcgccgagccagctgaagcctccactgaggcggcccctgccgaagctgctcctacaaatggcgccgaaaaggccgctgctccccgcgagcgcaagcagcgtggtcctcccgaggatggcgttccctccaagaccaaggttatggttgccaacctgccttatgacctgaaggaggataggcttctcgagattttcaaggactactcacctacccaggccaagatcgctctccgccccatcccccgcttcatggttaagaagctccaggctcgcggtgagccccgcaaggggccgtggtttcggtttcgttaccctcggctccgaggagctccaacaaaaggcatgtgccgagatgaatggcaaggagattgagggccgtgagatcgccgtttaaggtcgcgatcgactcacccggcaaggagacgacgcaccagacgcgcccgctgagggcgaggcccctaccactgaggccaccacaccaacgcgaccc

SEQ ID NO: 6287 - DNA, 205 bp, Zea mays
  Clone ID: MRT4577_105724C.1
tcgctccgtctgaccgcgggatgtcggcggaggtgccgcatccgcagtacgtggaggagaggccgtccatagcggagctggagcctcatccacccatgttgtccccgccgtccaaagagatgaggccccccatggacctgttttcttccgcgccggcgttgtcgttaaacccgccgccgccaatgcccattccgatgcctgggaa

SEQ ID NO: 6288 - DNA, 686 bp, Zea mays
  Clone ID: MRT4577_105725C.1
ccggccggggtagcatccaactctcttcctctcgcgcgccattctctgtcatcgcgatctaactctatgatggaccgaggaacttctcgcggtgttcgttttgcttccccaggcgtggaccgtgccctttgtcgcgatggatctcccgaccgctttcacggataataactacgacaaggcagtgtgattccgcctacatcttcaatattatcgtaaacgacgtgaagatcgacataatgttaggagatctacctgtactctctggccatgatatataaccagatcgtcgactacttcctgcccaatgtctacgatgaagccttgataatcaattacctacacaagcagacccgtgtcttccttccaacccgattctaggctcattgacatcattgaagactcccagggccactccaggtctcggtatctggacctcctaggagggtgccaccgctatccgggccgacatcatcatctataagctcactgtgatccccggccgtccggtctactgtcccaccaaccttgatgccgaccactctctggccaccactgagagcgccaagtgaggttcctactcgcatcaattgatccccggctcactggccactgtcctcgctgccatcccgcgctgccagctgtatctccaaatcgcccaacgcgaggacagatacacatcctctatc

SEQ ID NO: 6289 - DNA, 359 bp, Zea mays
  Clone ID: MRT4577_105726C.1
acccttccaaggaagtggtggaacccggtcctttcgaggttaccgggaaaaagaagcatgaggcccaaggggctgttggtcgaactggccgttttcgccgtcctggaagttttgccactggccaaagcccacaagggggaggaggaggaaggcctggaactcaaacccagcaggaggcggtggccgtcctgcaaccagtgcggatttggaacaaggtcgaagccgccgttttgcaagggcagggccacttgaacaaccggttgcaacccggttggaaaggcttgcgccttgtcaatttccaacggccttttgtggggcagggccaagaccgtaaacttttgaaagcgccgttgaacccg

SEQ ID NO: 6290 - DNA, 403 bp, Zea mays
  Clone ID: MRT4577_105727C.1
agcgaaaaaaaaattctactattttcactagacacaatgaagttgcctaagtttaggtgttctaattgaagaactaaacttaaacataaaagattagccatgttgtggctgccttatacagcggggcgcaaccagcccggaaaagtcacagatatgtcagccatatggggttttgatactgtgacgggatgttaaatgcagttgatgctgaaccggcggtgctagcaccaaagcggcataggtggccacacgtggctgcgtctggtgcatggtgctttgggtctgagagacccttgggaatggcggacctagacctttggcggatgaggctatgacagatcttgagcggtctcactgaagctacaaacatgcccatggaacatctgtaacaagcaggcattcc

SEQ ID NO: 6291 - DNA, 531 bp, Zea mays
  Clone ID: MRT4577_105728C.1
tttgtttttttggggtttttttgcgttttttttccattgggtttgttttttttttttttttggggggaaaatttttttttaaaaaaacctgtcaaaaagaaatttttttggacaaaggggcaacccgaaccccttttggggaaataaggttggggggtccctcccggggtttaaaaactttcttttaaacccaccccaaagggggggccaaaactctgtattcccggggagggccacccctttaaaaaatttttccccccaaaaaaacgggcccaaaattcccccccttttttatcctaaaagggcggttcccgctaagggggacccagttccaaacacaattcccttaaaagacacaaattgtttcccccttttttttttccccccccacacttttttgggggggccctttttaaaggggggggaagaaaattttttggggaccttttctggggaaaaatttttaaaaaaggggcctttcccccgggaacacaaaaaaaaacggggggggtttaaaactttctctttttg

SEQ ID NO: 6292 - DNA, 117 bp, Zea mays
  Clone ID: MRT4577_105729C.1
tcgtgaagacgtagccaaaggcttttgcaccctattgctccaccatcttgaggaggctctcgggatcagtttattaattcaccccattgttcatctagccaacatcctatctatctt

SEQ ID NO: 6293 - DNA, 3948 bp, Zea mays
  Clone ID: MRT4577_10572C.1
tcacatctgctgcctgattggaatatgactcagctctaatgttccatcatctaacttctccttgatgaagaaccgatcaatctccacatgttttgttctgtcatgttgaacatgattattagctatacttatagctgatttgttatcgcaccctagcctcaggggacttcttctcaatacattcaattctgatagaagattcttaacccacagcatctcacataacacaagtgacatagctctatattctgcttcagcagtggaacgggatacaactgattgtttcttacttctccataatatcaaatttcccccaacaaacacacaataacctgaagtcgatcttctatcatcaaggcagctggcccagtctgcatcagagtatccttccacctttagatgaccatgactcttaaagaatattccctttccaggacaagactttaaatatcgcagtatacgataaactgcatcaagatgtccactttttgggtcatgcatgtatcggctcaccacactgacagcatatgtgatatcaggccttgtgtgacacaagtagatgagtcgaccaacaagcctttggtagctttccttgttcacaggatcaccagattcagcacataatttgtgattcaagtcaataggtgttgctataggtcgacatccaagcatacatgtttcatcaagtaagtctagaacatacttcctctgagaaagaactattccttgtggggatcggtcaacctcaataccaagaaagtacttaaggtgaccaagatctttaacctcaaactccttactcagattctcttttagatgagcgatctcatgttcgtcgtcaccttttcggctgccccgggctctgacactccaggtgggatctccatatagacctcctaactgactgcttttttttcctttaggcagtttcacaaactcccatgtttgattcttttcaagagccttaagctcctccaacattgcctcacgccagttagaatcatgttgtgcttctttccaatctcttggaattgctatagaatgcaatgacgcaacaaatgccctatatgatggtgacaaagacgcataagaaacataattgccaatgtcatgttcatatccataccttgttggaggcactccagccttagcacgtgctccttttcgtattgcaatgggcaaatcatgagaagatggatcttcaatttctctatgagagatcaatggtgcatctgtagtctctaatgtgtcaggagaaaactgctcagtactagatgatggatttgtttcatgaggctcagaatgcaagtgagactttcttcttgtatatacttcacccttgtattgtaaattatcaccacaagatctattattctcatgactggagtttgactctggttcatttggccctactacttgcattttttgttgggaagcaccgatcaccacttccattttatttgaatggtgctcctttggatcaacctctatattatccccctctcgactagcatcatctatgctattagaggcagattcaagaaagaaatttaaatatgtcttctcaccgtagaaaggcatagtctctctgaatgtaacatccatgcctacaaataggcgtcgttcactaggattccaacacttgtagcctttttgacctgtaggatatccaacaaaaatgcatttcagagcacgaggatccaacttccccacttgaggtctatgatctcttacaaagcatgtacatccaaaaattttaggtggaaccacaaacttattttcaccgagaagaacctcacatggggttttcattgcaagtatttttgaaggagtgcgattgatgagatatgtggcagtcaaaacagcctcactccatagaaacttcagaacattcattgtaaacataagtgaacgagcaacctccaaaatgtgaggattcttcctttcagccaccccattttgtggaggtgtatcaggacatgaggtctgatgtaagataccatttctcgagagaaaggcattaaattccttatttacatactcagttccattatctgttctgatcattttaacttgagtattgaattgattcttgaccaaagcacaaaaattttgaaagcaattcaacacttcatctttatgcttcatcacatagacccatgtcatccgagaaaaacagtcaataaaaataacaaagtacttcattccattaatagaagttgaaagtcgcctagagggggggtgaataggcggaaccggacagtccggtgcgccagaccaggggtgccttcggttgcccctttgctcctttatcttgactcttgtcttgttctttttattgtttttatgttgaatcttaggcacccttttgtaccttctcatagagatgctctcttcattgtgctttgtccttagtcttagttgcttaagacctatactcaatgacaatatatggaaatactttgcacaagagagagttctacaactagtgatctttttcaagttattgttagcatatatcaaatggatcacttacctttctagcacaagttgcaatcttgggttgccttggatgttaccttttgtgaaggcgtggttgaggcttttggaggaggtgttgaatttcatcttttgtttcttcctcttggcaatcctcaaatccttgacattttcttcaagggatgtagtgcatgccacggttgttcccgtctcaagcttcttcaccatgtgatcacggttatcttgagaaggttgagcaatgcatttcccttttagttgtgtcaagctcctctttagcctctcattttcttctttgagcttttgatatgtatcatcatttgttcctgcaaattctagctcaaaggaagatttgcttgttgacaaacaacaagcattagcacatggtaatatagtatcaatttgaatacatgtgcacgagtgaggttgttgggattttaagttttctatcacaacctcatgagcaatgtttaatatgatatgatcatccataagattttcatgagagcatagaagcatatcatatttatcttgaaaagctagattttcaacttttagcttttctacttggtccttgagcaaggtattcctatttactaattgagcgatacaatgtgaagcgttatcttgctcaattgaaatagtttcatacctttggaccaaatcaacatgagagcactttagctcctcatgttctttagtcaactcgtcaaagtgttgcatctttatggagagaacatcttctagcctttgacgagcttcgctttgctctctcgctctttctagaagtttgagcatgaccgccttatcttcttggcttaggcgagcgtagagatgcacaaagcttctttcttcctcctcatcctcatttgtgcttccgctatcattttcattagccacacaacacatgtgggaatcgaaatgggaagacaaaccttttggagaggtgggttcatcgtttggtctccatcgttcattttctccttcttccttgcaagggttagtatcacaaataccaaaggaagtagaggcaccaaatgaactatcatgtttggactcatcaaacttgacttctaattctagtccaaatatcatgcgcatcggggatggattcgtcatagtttgatatgaaggcacgataatcttctttgctaagagaattggttaagatgtcaaaagctaggtagtttaagcgataacatctttgatcctcctcggaattaatttttcccctgtaaaactagagggaaaaatactcttgtctataatttgttctaatcgaggatctatggttctaaaggcatttatcacactagtagaccatgaatcataattagaacaatcatcacataatatctcaagagttacctccttttgagttgcgttcgttggaggagtcttcttgttcttttgggatcttctacgagccat

SEQ ID NO: 6294 - DNA, 133 bp, Zea mays
  Clone ID: MRT4577_105730C.1
tcacaccccccgagctcaacttaccttcacttcaactccaaacacagtcctgaccggagggagagctttcttgaaggcccgtaaaattcccaataatttgatctgccttgggaaccaacaagatgttttccaa

SEQ ID NO: 6295 - DNA, 515 bp, Zea mays
  Clone ID: MRT4577_105731C.1
accttccgcattgcaagccgaccgatgagagtggcatccccctgaaagtccggacgagtccgcccgccactgccatcgtccatggctagccgagcgaagcagctccacgcgcactacctggtggccgggctcggcgaccctgacaagtggacctgcctcgtcaaggagtacgccgccaatgcctccctccgggacgccgccctcgtctacgccaagcacctgccccggcagacgcaccacctgcccctcctccccgccctcctcaaggccgccgcctcccgcgccggccccggcctcggcctcggcaggtccctccacgccgaggccctcaaatccgcgttcgccggcgagctgctcgtgggcaccacgctggtgtccatgtactgcaagtgcggcctcctcgcggacgcgcgccgcgtgttcgacggaatgcccggcaggaacgtcgtcacctgcaacgcgatgctcgccgagtatgccgcggcgggcgacacggggcaggcggaggtgctgtt

SEQ ID NO: 6296 - DNA, 1279 bp, Zea mays
  Clone ID: MRT4577_105732C.1
attgggacgccggcgccggcgggaacctcccctctcgcacgcgaccaccaacttcttcccctgtcgtccacttccgcagtcgcacgcaaaaggcacagcgcggcggcacacgccatgggcaccctcgtcgggcacgtcgcgccgggcgccggcttcctcctcatcggcctgtggcagctgttcagccacacccgcctgttcctgctgcggccgagctcgtactctgccccggtctggttcccggtgccgggcgtgcggcacctggagctcatactcataatcatcggcacggtgctgtccatcctgatggagcttgtcatcggccccgcgaagcaccagccgttcgacgacgacggcaccatcccgtccgaccacctccacaacttcgagcacgcgtccatctcgctggcgctgctcgtcttcgcggcggtgaccatccacctggacagggcgagggcgcccatgcgggacgccgtgtcgcagctcgtggccgccgcggcgttcgcgcagcagctgctcatcttccacctccactcggcggaccacatgggcgtggaggggcagttccactggctgctgcagacggccatcgccgtcacgctcgcgaccacgctgctgggtatcccctacccgcgggagcttcgcggtgagcctggtccggtccgccagcctcgtgttccagggcgtctggttcgtcgtcatgggcgtcatgctgtggacgccggcgctcatacccaagggctgcttcctcaacttcgaggaaggggcacgacgtcgtccggtgccgcactgacgacgcgctcgaccgcgccaagtcgctcgtcaacctccagttcagctggtacctcaccggcacggtggtgttcgtcgtcctgttctacctccagatggcgaagctctaccccgaggagccgcagtacctgccgctggtgaagggaggcggcagcggcagcgatggccggttcagcatcggagatgatgatcacgacgatgaggacgacgtcgaggccgcaaaacgtggcggtttcggacacgtggttagcggcacgaggcctgtcgaaatcgagaggtgagggtcgtgcgtagcaccgtacaaaaggttagcatgttgttgcgtggttatagtgtaatttgacttgaacgtttttgtttattggtgaaattaaaacatgcaaatattctctagggaggttgtaatgtttatagtttgtgacactccgccacttgtggattaaaagaatcctatatttatcctaaaaaaaaaaaaaaaaaagtccac

SEQ ID NO: 6297 - DNA, 653 bp, Zea mays
  Clone ID: MRT4577_105733C.1
ttgggttcctcgaggccggccggggatccaccggtcccgcaggcgacaggcggcaggcacaagtgtcccacgtccctttccccggccgctagccgccgtggcgtttccaggtcgcgcgtgggcgcggatggcggctccacttcatcgtccccacggagacgcagacgcagccgcagccgcgtaggcgccgtgccgaagcctcgccaagctgccggacgccggccttggagtggagcggggactgagccccgcatggcccctccaccccgcggcatgcgtcgacggttgcgatccgcctcgtctcgtcgcctcgccaccgcattattcgttttatccatctaacactggaccacactggcaataataattttgcgccgcctttctcgacccccaatccattgagcgaaccccactcctcctaagcttccagccatggaccatgccacgcaacagtgctctaccctgttgttgcctctgcatcgttcgtcggataggcacgggtccgtgatcgattccagcgaacgcacggcagggcttcgtccatgcttgttatttcctaccggtgcctaaatgcagtgtttattacacaggttgaagcataataagcatcctttttgctacggacttggagggtgacctgtcctcctcaggcg

SEQ ID NO: 6298 - DNA, 540 bp, Zea mays
  Clone ID: MRT4577_105734C.1
gctggagaactacttctacaacatgcgcaacacgatcaaggacgagaagattgcgtccaagctgccggccgatgacaagaagaagatcgaggacgccatcgacgcggccatcagctggctggacgccaaccatgctcgccggaggcaggacggaagttcgcatggacaagcatgaaaggagctgggagagcctaatgcaaccccatcatacgccaatatgtaccagggctgcggctgaagacatgggcggcgctggcggcatggacgaggactcccccgctggcagcggcggccctggccccaagatcgacgaggtggactaagcggattgatgacagtcttagagcgtagctgcaggtgctggctgcaccattcgctgccgcaagttatcgtcatcggtcggtgcggagtgtccgcttaaactttatgtgaggcggactggtactttcgtggtggttattacttctggaccttgtgataggcagtcggctccatgttatcacagatactggcaaaccttaagtgatacagcaatccttc

SEQ ID NO: 6299 - DNA, 539 bp, Zea mays
  Clone ID: MRT4577_105735C.1
cctcgaggccggccgggacacctctacagatatcagacaggtctatcagctagagacgccgactacacagacacacagagagatagatacaggcgtgaactccagaactgctcttagtgatgcagaacccataaggattgatactactgcctcctgaacgagatgagcccattaccaaccatgcatgcacgcataaccaggtggactctgacgactagcacacaccatcacgatctgctaggcctccccaagatcccagcgccggatgataatgaaaacgcatacagaatagccgccaccacttgctccgcagacaactccgccgaccccgtataacgccaaccaatggtctccagattctgatcgtctgaacgacccgcagaaaactcataacgatgaccagtatggagaagatgccctgatggaacgaatgcaaggacgcaacagcagtgacttccatagcccactgcgacattttagatcaacgttttccggatgtcaccacctcctcatgtacatacctcaagaggacgacacga

SEQ ID NO: 6300 - DNA, 279 bp, Zea mays
  Clone ID: MRT4577_105736C.1
gcaaccggtccaacactttcacgctcaggcgctcagctctagcaatggctgcctccaccatggcgatctcctcccggcgatggccggtacccccatcaaggtgggctccttcggcgagggccgcatcaccatgcgcaagaccgtgggcaagcccaaggtggcggcgtccggcagcccctggtacggccccaaccgcatgaagtacctcgaacccttctccggcaagcccccaaactacctcaccggggtagttccccgggaactacgcgtgggacacca

SEQ ID NO: 6301 - DNA, 1679 bp, Zea mays
  Clone ID: MRT4577_105737C.1
atggcgccgcatgtcctcgtcgtgcccttccccggtcagggacacatgaaccccatggtacagttcgccaagaggctggcatccaagggcgtggccaccacgctcgtcaccacccgcttcatccagaggactgccgacgtggacgcgcacccagcgatggtcgaggccatctccgacgggcacgacgagggagggttcgcgtcggccgcgggcgttgccgagtacctggagaagcaggcggccgccgcgtcggcgtcgctggcgtcgctcgtcgaggcacgcgcgtcgtctgcggacgccttcacgtgcgtcgtgtacgactcgtacgaggactgggtgctgcccgtggcgcggcgaatgggcctgcccgccgtccccttctccacgcagtcgtgcgccgtcagcgccgtgtactaccacttcagccaggggaggcttgccgtgcctccgggggcggccgcggacggcagcgacggtggtgctggtgccgccgccctgagcgaggcgttcctggggctgccggagatggagaggtcggagctcccgtcgttcgtgttcgaccatggtccgtacccgaccatcgccatgcaagcgattaaacagttcgctcatgcgggaaaggatgactgggtgctgttcaactcgttcgaagaactggaaaccgaggttttggctggcctgacaaagtacctgaaggcccgagccatcggcccatgcgtgccgctgcccaccgctggaaggaccgccggcgccaatggccggatcacctacggggccaacctggtgaagccggaggatgcgtgcaccaagtggctagacaccaagcccgaccgctccgtggcctacgtctccttcggcagcctcgcgtccctgggcaacgcccagaaggaggagctcgcgcgcggcctcctcgccgccggcaagccgttcctgtgggtggtgagggccagcgacgagcaccaggtcccgcgctatctcctggccgaggcgacggcgacgggcgccgcgatggtcgtgccctggtgcccgcagctggacgtgctggcgcacccggccgtgggctgcttcgtcacccactgcggttggaactccacgctggaggcgctcagcttcggcgtgcctatggtggcgatggcgctgtggacggaccagccgaccaacgctcggaacgtcgagctcgcctggggcgcgggcgtgcgcgcgcgccgcgatgctggcgcgggcgtgttccttcgcggggaagtggagcggtgcgtgcgcgccgtcatggacgggggcgaggcggcgtctgctgcacgcaaggcggcgggggaatggagggacagggctcgcgcggcggtggcacccggtggcagctctgaccgcaacctggacgagttcgtgcagtttgtgcgcgccggcgccacggagaagtgagaggcgctggctgtgaagtgtgaagggaggtgatgttgcagggtcccagatgtgacgacgcgatgcgaaggagaaacgtttcgaaactggaagcaaaaaacggtcgaaagttggtgcctctacttggtttggtttatgctttgggtccaccagccataataatatactttgcttgaggattctaccataacaattattcagccttttattttctaccctatgaaaaaaaaaaaaaaaaaagggcggcgctcgcgatctagaac

SEQ ID NO: 6302 - DNA, 281 bp, Zea mays
  Clone ID: MRT4577_105738C.1
agggattgaaacctaagacttccctgaatttacaccttaacaaaaatcggattgacaatgttatctactctttgtgctactatgcacccaaccacagtttctgggtgatgttacaaaacgaccacggtttccattcgcccaagatgcaccaagaataactgaacaacacgctgatgataaaccagaactggcaagctacatgccacgaacttagctggatggaagtgctaacccacactcccaagattaacataagaactgctggcgaacattaacaggtg

SEQ ID NO: 6303 - DNA, 433 bp, Zea mays
  Clone ID: MRT4577_105739C.1
ccccgttaaccaaaaaccccccaaaccaaaaaaagcgcaaaaaagacaaaagcgaaggaaagggaaaagggggggggaggggaaaaccacaaacccaccccaaaaacaaaagaacccaaaaaaaaaaagaaagcaaaaaaaacctaaacccaaagcaaacaaaccccggccggaaacacaccaggggcgaaacccaccaaagggggaggcgcaacaagcggggcggcgcccgggggggggccgggcgccgccccgggcaggggggaaacccgggcaaaagggatacccgggaaaaactgaaacgccaaacgagcccgcacactaaagggaaaggccgggggcgcccaaaccgggggggaccccaaaaaacgggcgtgccccctacagcccggtttcccccacggaccccgggcaggccgggtgccttgtgggc

SEQ ID NO: 6304 - DNA, 1650 bp, Zea mays
  Clone ID: MRT4577_10573C.1
atggctcgtagaagatcccaaaagaacaagaagacccaggagaacccaactcggaaggaggtaactcttgagattttatttgatgattgttctaactatgattcatggtcatctagtgtgataaatgcttttagaaccatagatcctcgattagaacaaattatagacaagagtatttttccctctaatttcaatggaaaaattaattccgaggaggatcaaagatgttatcgcttaaactatctagcttttgacatcttaactaattctcttagcaaagaagattatcatgccttcatatcaaactatgacgaatccgtccatgatgcgcatgatatttggactagaattagaagcaaatttgatgagtccaaacatgatagttcattttgtgtctctacttcctttggtatttgtgatactaacccttgcaaggaagaagaagagaatgaacgatggagaccaaacgatgaatccacctctccaaaaggtttgtcttcccatttcgattcccacatgtgttgtgtggctaatgaaaatgatagcggaagcacaaatgaggatgaggaggaagaaagaagctttgtgcatctctacgctcgcctaagccaagaagataaggcggtcatgttcaaacttctagaaagagcgagagagcaaagcgaagctcgtcaaaggctagaagatattctctccataaagatgcaacactttgacgagttgactaaagaacatgaggagctaaagtgctctcatgttgatttggtccaaaggtatgaaactatttcaattgagcaagataacgcttcacattgtatcgctcaattagtaaataggaataccttgcttaaggaccaagtggaaaagctaaaaattgaaaatctagcttttcaagaaaaatatgatatgctcctatgctctcatgaaaatcttagagatgatcatatcatattaaacattgctcatgaggttgtgatagaaaatttaaaatcccaacaacctcactcatgcacatgtattcaaattgatactatattaccatgtgctaatgcttgttgtttgtcaacaagcaaattttcctttgagctagaatttgcaggaacaaatgatgattcatatcaaaagctcaaagaagaaaatgagaggctaaggaagagcttgacacaactaaaagggaaatgcattgcccaaccttctcaagataaccgtgatcacatggtgaagaagcttgagacgggaaaaaccgcggcatgcactacatcccttgaagaaaatgtcaagaatttgaggattaccatgaggaggaaacaaaagatgaaattcaacacctcctccaaaagcctcaaccacgcctccacaaaaggtaacatccaagcaagcaacaaacaaggaaagaagaaatcttcaaaacttggaaaacgcctatgctacacatgccgaaagaagggacatcaatgcaaagattgtcccattggtaaaaatcccactcctaacttgtcatttgattcatatataactaggcaacccaaggttgcaacttgtgctagaaaggaattaaagaattatcatgtgcggaatatcaaagcctacaacatggaggaaagtcaagggatgtcacatagaaatagaaagcacttaaggatgttttaa

SEQ ID NO: 6305 - DNA, 236 bp, Zea mays
  unsure (1)..(236): unsure at all n locations
  Clone ID: MRT4577_105740C.1
gcgcaacaaangcgttcattattcttcaatgctcacaatcttctagtggggtgtgtttcatttcctctcaccatctacttcaatgcgctttgatcacctatctgtgctagccaacttgttacaacaagctcttgcgtctatcgttcttacaacaaccaatttcccaattgcatcatcattcctagccacatctaacaatacaatccttttcatctcaacaactacatcagttccta

SEQ ID NO: 6306 - DNA, 990 bp, Zea mays
  Clone ID: MRT4577_105741C.1
cgcagcccccgctgacgcgaatcgcgacctccgcgcgaccctccgccaccgcaccctccgctgacccggtctccctgccgcctggagcgatgaaaccgcaccctccgccaccgcaccctcgcgcccaagcccagactcaaaactcagccaaacccctcgcatcttccctcccaccgatgcgctcgcgccgccgctccccatcccccctcgacgcacctccccatcggccgccccacccccgcccgccgcgtcggcatcctcctcgttcgcggttggctcgagcggcaccgatggagcgacggctccgtttcccagaaggcgaaaggccgatgagaccgacggacgattcgtgccgatcgcacaccggcaggcggtggcgggcgggggccgacggggcggcggattctgcctctccgcggtgcattgcgggcctccagcgtggcctgcgactcccacgtctgcgtatgtcactacgggaagagctacatattcatcgtaaattatgtggaaaggatgtacaagcaagctgcccttgtgcagacagactcagaggtgtagagaagacatggtgtccgctgaggattgcaagatccattgctgcataggctgatgtatgcggcacaccatcaggagcagactgatcccgcacacataagtgcacgctttgcagattttatcctgggaattctgaatttggcttgccctttgcggattttcaagtggtgtgtgctatttgtggataggtttggtgctgcgaacagtgtgttagaaccaaattcttgtcaggctaaaccgatttatatcatagatgcaggtgattttttttcttatgattatgatcttaaatgggatttagttggaccgtgctattctgctataactgtaaagttagggtgccgaatagttgatgcacctgcttcatcatctagaaaaaagaaataaaggagatttttgacgagttccaaaaaaaaaaaaaaaaaatttgcggcc

SEQ ID NO: 6307 - DNA, 581 bp, Zea mays
  Clone ID: MRT4577_105742C.1
cgtcaaaaatctcctttatttcttttttctagatgatgaagcaggtgcatcaactatttggcaccctaactttacagttatagcagaatagcacggtccaactaaatcccatttaagatcataatcataagaaaaaaaaatcacctgcatctatgatataaatcggtttagcctgacaagaatttggttctaacacactgttcgcagcaccaaacctatccacaaatagcacacaccacttgaaaatccgcaaagggcaagctaaattcagaattcccaggataaaatctgcaaagcgtgcactgagaccacatgatatagaacaaattttaataagttcaataatatataaaattttacagaaaaaaatatattatatttgttcgtaatcaaaggaagaagaccaaaagtttaagttttttctgctaatctagagggtacctgaccttatgtgtgcgggatcagtctgctcctgatggtgtgccgcatacatcagcctatgcagcaatggatcttgcaatcctcagcggacaccatgtcttctctacacctctgagtctggctgcacaagggcagcttgc

SEQ ID NO: 6308 - DNA, 673 bp, Zea mays
  Clone ID: MRT4577_105743C.1
ggccggcgcgaggcgggggatcagggccttggatgtgtgcggaaggcggccttcagggcggtcgttcggacaggggcaagcttttttttattttttttttgtgtgtttggagtccttttagtcgccgtgacggctgccaggaccggccgtgactgctgggatcaagtccagagggctcagatgctcagccactgccaggatttccttgacgaggtgtccgataccggcaggtgctacagggatgtaaggggaagcagcggacgaggcggcatgagaggaagctggcacttggagcagtgctgtgatcagctcagcgagatggatcaggaatgcatgtgcgaggggctaaaggagattgtgaaggaacaagtgcggcaaagcccccgatccttcttggtcgtcagggcacacaggaggaggaggttgttgagtgcgccaggaagcttccccagatgtgcagaatgggaaggacctgctaccagatccgcgttccctattgagcattgacgccgccggccatgtctctcttaaataaaaatctctctaaatttgcaactaaatggtggcatatatattgccctccgtttgatttagagagatcttcggtggctcagtttgcagaataaaatggccacattatcgtgtgggtcgagttcgatatcacatgtagctt

SEQ ID NO: 6309 - DNA, 220 bp, Zea mays
  Clone ID: MRT4577_105745C.1
ccaagggtttcgtgtcaggaacaccgagttatctttggccaaagatgggtctatcagagggggcagaaccaaggcatttcttgtgttttgtcttgtccaagtgtggagtcccgatgccatcttctgatatgggttaggttagttaatttggaacgattttgtcaattagagtgactggatttaaggtccaaatctgaatgaacatggggatgttctgatt

SEQ ID NO: 6310 - DNA, 664 bp, Zea mays
  unsure (1)..(664): unsure at all n locations
  Clone ID: MRT4577_105746C.1
ccaaatacaagtgatgtcaaangcttatacctgattcttttacatgcctgagtttcttgagaattcaaattcatatcaccttggcataaagcaggatggtgaaccattaggtgatgttggtctccctccatgggcaaagggttccccagaagaatttattcatatcagtcgagaagcccttgaaagtgaatatgtaagctctaatctacatcattggattgatctcatatttggttacaagcagcgaggcaagcctgcagttgaggcagcaaacatattttattatctgacatatgagggtgccgttgatttggagaacatggatgatatgttacaaaagtccgctattgaggaccaaattgcaaattttggacaaacaccaattcaaatttttcggaagaaacacccaaggagaggtcctcctataccaattgtgcatccactatattttgcgccacaatcgataacagtgacttctgttgtcccgaccatagtcacccctttatctgtattattcattggtttgttggactcaaacgttgtcatgatgaatgaggggctcatactctctgtaaagctttggctaacaacacagttgcagtctggtggaaacttacattttctggatcactggaacctttcttcggaattggttctgatgtta

SEQ ID NO: 6311 - DNA, 214 bp, Zea mays
  unsure (1)..(214): unsure at all n locations
  Clone ID: MRT4577_105747C.1
cagaagacaagaagaangcnagnggccaaannccnggancacccaagccancnccnnncccaaannaaccaganangnccccgaagaaaggggcagcancncanaangnanangngncnccnnngcggcaaaccaagnnggancnacngcngncaccaagnnccaggagnnnnnangcangcannggngaaggcacccangcnnancagagccc

SEQ ID NO: 6312 - DNA, 818 bp, Zea mays
  unsure (1)..(818): unsure at all n locations
  Clone ID: MRT4577_105748C.1
ctcgaggccggccaaggaccccttaccaccacccgacgaattcaagcatgaggccgcagagcgcagagcagggctgccgccgctgccgctgaggagcggctacagagtgctatacctattacacagcggcaacaggcaggcaggtgcgtgcaggcacaccgctcctcgctgttccgcgcccacccgcacaagcaagcgccgccaccaccaccaccaccaccaccgagaaggaaccgcctcgtgcccccagatctcgccgccaggggtcgcgcgagtaggtacatgagggcggcgcccttcagtgccgacgggaacggggcggggaccatagaggcgctgctttggccgcacgggaagggcggcggcggagggcacctgctgttggagccgacgtcggtgctggactgcagacggagcccgagcccgccgtactcgacatcgacgctgtcttcgtccctgggcggcgccgcgggggactccttttccggcgtggcggcggtttcggagaacagcgccgccgccggcggccacgaccatgcgtttccacgacggtgccgacataaagcccccgcttctgggagtcccgtcggcaggtctacttcatcaacaccagacgctgccggcggcctccttcttcatgccgctcccctccttccccgaccatcagcaccagccacatctcccgcccccgccgaagcgccaccactctatgcccgacaacctgttcctcctccaaaccagctccagccgccgncgtcgcagggtctaccattcccgccactgcataccaccacgccctttcagctccagccaccact

SEQ ID NO: 6313 - DNA, 900 bp, Zea mays
  unsure (1)..(900): unsure at all n locations
  Clone ID: MRT4577_105749C.1
atccgaagaaagaaagaaagggaaggcggggggaggccggccaaggcaccaccacaccaccacccgacgaattcaagcatgaggccgcagagcgcagagcagggctgccgccgctgccgctgaggagcggctacagagtgctatacctattacacagcggcaacaggcaggcaggtgcgtgcaggcacaccgctcctcgctgttccgcgcccacccgcacaagcaagcgccgccaccaccaccaccgagaaggaaccgcctcgcgccccagatctcgccgccaggggtcgcgcgagtaggtacatgagggcggcgcccttcagtgccgacgggaacggggcggggaccatagaggcgctgctttggccgcacgggaagggcggcggcggagggcacctgctgttggagccgacgtcggtgctggactgcagacggagcccgagcccgccgtactcgacaccgccgccgccgctcctcggtaatgccgccggcttcgggttcccggcaccggacccgctcgggttctccctgcagcatcaccccggtggccgggcggcgccctcggccgggggcgctggcctccgacctgtcgtccccaggcgcaaggtcgctcagcggcagcagcggtagcggcagcaaggccacttccactttcggcctcctaccaaccgaggcggtgcttcagccgccgccgccgccggccacgaccatgcgtttccacgacggtgccgacataaagcccccgcttctgggagtcccgtcggcaggtctacttcatcaacaccagacgctgccggcggcctccttcttcatgccgctcccctccttccccgaccatcagcaccagccacatctnccggccccggcgaagcgccaacactctatgcccgacaacctgtt

SEQ ID NO: 6314 - DNA, 534 bp, Zea mays
  unsure (1)..(534): unsure at all n locations
  Clone ID: MRT4577_10574C.1
ttatatcacgcaatattgctgaacaggaatatcgggaatctggacttgcaatggcagatacttcaacaaatggtggcagtgaaacaacttctgaaaatacagttggtgttgagaatgaaaatagaacattgacaaccaaagaggaggtgcaatcttcctttccagatataaataaagtatctcgggatgtattgtctcaaacagaaaatatactcggagctctgatgatactttccaaaaatctctcaccacatgatcagtcagtaccgacaactggaacaaatgggaaatatgacatgattagagaagagcaaggtgcttcagctgcagattctgttcaaaaggctgatactgtttcatctgcgttactgtccattgatgcacaggaagcagaggatatgcggcgcttgtttgcaagtgcagagactgccatggaggcatgggctatgcttgccacttcactgngacgtaacagtttcatcaagtcggactttgaaaagatatgttttcttgacaatatttcaacagacacac

SEQ ID NO: 6315 - DNA, 379 bp, Zea mays
  unsure (1)..(379): unsure at all n locations
  Clone ID: MRT4577_105750C.1
gcaatgccaagcctttactatccatgaggagaagagcgtccaatacaagtcgacattattgacaccgcagtgccaagcctctgctatccattaggagaagagcatcaaatacacgtctgatcggatcggcagcagccctgtcgtcgtctccatgacaggagggaggagcagaggagcctcttcctaagaactgtgcagtagcagaagccaacagggcttttagaacatcttaatgaatagcttgtttcattaccttttgtttccttctttctttacttttttttgtgtcagttctcaacttgcttgatcgggttttgttgatttcagtcaccaagataaaatgttaaattttactacttacggtgcaaaaaatnaaaaa

SEQ ID NO: 6316 - DNA, 302 bp, Zea mays
  Clone ID: MRT4577_105751C.1
gttcatacccacccagacccagatcacctcatcagatttgcatcgcaatgatctcctcgtccagtaaatggatggatgagcagtatgcattttgagctgtgaatccctgtgcgcagtgcgtccagctttttgagagcccaggtatcggattgttgacactagatgtcagcttcttgtgcagtaaactgaaaactcaacttctagatgcagtggatgaataactaaattgttagcgtcacagatgctcctagagagaaatagcaagtagagagagcagagagaaagctagtagtaaactggag

SEQ ID NO: 6317 - DNA, 507 bp, Zea mays
  Clone ID: MRT4577_105752C.1
aaaaaaaggggttcccgattttacccaaaaaaacaaaggggggcaaaagttaaaaaaacccacccccaacattaaagggggaaatatttttttacagcttcttccaaaaaaaaaaaacccccgagagccttaaaaaagcctccaacggtatgggctaaaaaccatggccatccaagaaaacccgaggccccccccccctttttatttataaaattaaccccccaggcccggcggggccccacacaaataaatatatgggtgaaaaaataattgtgaggcccgggggcaatttcccggaaaaacttggaagggaacccaaccccaaaattctttaaaaattttgttttccccaaaccctgtttgggaaaaaaaccccccccatttttttaaaatttttggcccccttttgggagggggaataaggccgaggccaaaagggggggggttttccacaaaagccccaaaggggcaaatttaaatacccccgttttaaatttcccccccccc

SEQ ID NO: 6318 - DNA, 316 bp, Zea mays
  Clone ID: MRT4577_105753C.1
ccgcacgcgttcgaaaggagagaagatctccaaccccacacctgtttccttaaggccacatctagccatcctcgggcgcggggtcttaccccaaggacaacgcaacacatcacacaagagaaccaaaggaaacaaacagagcaggagcatgggactcgaagcaagaacgcgcactacgccggccgaacacttcgcacgtactgaggacccacacgcaccgaagcatatatggggctcccgaaccagctgacggacgacacagcggaccgcccgcgcccaaaatccggccaagggaaggtccaaaagtacgcctaca

SEQ ID NO: 6319 - DNA, 1964 bp, Zea mays
  Clone ID: MRT4577_105754C.1
ctggccgggaaacacccccctcacttctcaaaactcccaccgtaccagtccaatcaagaaatgctccactacatctcctcttcccctctccgtccccgattcctcctcctcccgagcccaccctccaatcttcgcttcctcaccatgagcgcctccccctcgagctcctcgtcccgttcggtgcgcggtgcggcggtgtcggtgccttccctcggcgccgacgaggcctgcgcagtggcagatgaagccttccggaggtacacgtcgccgagcttattgaggagaggcggcgtcggggtggccgtcgtgtggttcaggaacgacctccgagttctcgataacgaggcgcttctgcgagcatgggcggcttccgaggcggtcctgccggtgtactgtgtcgatccgcgggtctttgctgggagcacgcattactttgggttccccaagacgggagcattgaggacgcagttcttgatagagtgtttaggagacctgaagcagagcctgaggaaaaagggcctcgatttgctagtccggcatggcaagcctgaagagatccttccttcaattgcaaaggccgtcagtgcacacacaatatacgctcataaggaaacctgtagcgaagaactcctcgtcgaacgcctagtgagcaaaggcttggaacaagtccagattgctcaaggaggagcatctgtcccgaagaggcctctgaaccccaggttgcagctcatctggggagcaacaatgtaccacatcgatgacctcccgttcccagttagcagcttgccagacgtgtgcacacagttcagaaaggcaggtgaatcggggtgctcagttaggaactgcgccaagttgccaacgtcgctcggtccaccccctagttccagcatagatgagattggaggatgggggacagtaccaacactggagtcactaggccccagtgttacgaagtctgagaaaggaatgcatttcataggaggagagagcgcagctcttggtagggtacatgagtacttctggaagaaggatcagctgaaagattacaaggtgaccaggaacggcatgttaggtccagactactccacaaagttctctccttggcttgcttctggcagcctttcgccgcgttatatttgcgaagaggtgaagagatatgagaagcaaagagtggcaaatgattcaacatattgggttttatttgagttgatatggagagactacttcagatttctatcagcaaaatatggaaacgccatatttcacctgggaggcccgaggaaagtagtatcgaagtggagtcaggaccaagcactgtttgaatcatggagagatggtcgaactggataccctcttattgatgccaacatgagggagctttcagccaccggttacatgtccaaccgtggtcgtcagattgtctgctcatttcttgttcgagatatgggtgttgattggcgaatgggagccgaatggttcgagacatgcttattggattatgacccagcttcgaattatggcaattggacatatggagcaggagttggcaatgatccacgagaagatcgatacttcagtatcccaaaacaagccaagtcatatgatcctgaaggggaatacgttgcatactggttaccagaacttcggtcacttgcaaaggaaaggagaaatttcccaggagcctcatacatcaggcaggtagtaccactgaagtttgatggtggaaatcagaggaaggatcagcaattcaaccggcagagaagaccaaacaacgtgtacataagacaagtaaaataggaggctcttgattcacttgaaattgaaccatctatcagtaggagatgaagcaaatttttacacaactgattgtggtgtaaacatacgcgaattactctatggtcttatgcaatgttcattgatgcattcagataaaaaaaaaaaaaaaaaaaaaggggcctcgagct

SEQ ID NO: 6320 - DNA, 731 bp, Zea mays
  unsure (1)..(731): unsure at all n locations
  Clone ID: MRT4577_105755C.1
gcttccagtcaatcgatgtcgccgctgaactagaagttgaaaccagctcgcccggggtccggtcgattccccctcagattttgctgctgctaggaggccacgacgaccatgggcaactgttgtgccacaccctcgacggacgaagcggcaagagctgccagaagcagcagaaggtgaacccctacaacgtcacgtaaaaccgcgtggaggcggccccggcaagccctggcctggtggtgttgctggacccgacgcggagggacctcggcgcacaatacgagctcggcggcgagctgggacgcggcgagttcggcgtcacgtacatgtgttcgccatgagcgcgcggtacccgtacaagtccgtctccaagcgctgtctgtggacgctcgtggacatggaggaccttcgccgggaggtggacatcctgcgccacatgccggtgcaccctaacatcgtcagctaagtgtcgtttatgaggacaccatgcacctgcgccatatgaggacgtcgtgcaacttgccatggagttctgtgagggaggngacctcttcgacaggatcgtcgctcgaggccactacatcgagcgtgcagccatcacgtgcaccattagtcgagggtcgtctaggtcagcatcactctatctctgntcccctctttttcttggctctttgatgctacgaccagcgttagcttctgggcactgtatgnntttatttaatacattatattac

SEQ ID NO: 6321 - DNA, 316 bp, Zea mays
  unsure (1)..(316): unsure at all n locations
  Clone ID: MRT4577_105756C.1
tgatgatagttaanantgttgggatttgagattngttatgngtggttagtgagtntttatgatttaantgggaagtatgtaaaatttttttttaggaaanggngntgnatgaggggagggggggggtntgaanttttggtattnnagtgagnatgggggtgtgaggtgatttttttttntttttttannnttggttntngtagagtttattgtggatnatntaaagtnttaaaagggattttgagtagtggttangtgnttttgtggntaagnanngaagaattagaattttgaannagaagnattgattngtttt

SEQ ID NO: 6322 - DNA, 420 bp, Zea mays
  Clone ID: MRT4577_105757C.1
gatactatagagtcgtctaccttgtcgcccttttttttaaaatttttatttttttttttttttttggttcgaacaacaagtaatttaaataactttcctaaccacagtcaacacaaattaagcaattaatgggttttacttacagcacaactagctgctggtgttcctactgctaactacataaaccagcccccataaaaagacctactgctttctaaagtttacattaaatgccgccctatctgtacaatagaagcccaaatctgaacactggaaacctttgtagcgagccatctccatggttgttcccggagctggagccctcgacaaacttctttaccttttttctcgaaccaaattcaagcggtccaaagcccctaaagctcccaaaaatacatccagtccttctatcccatttat

SEQ ID NO: 6323 - DNA, 735 bp, Zea mays
  Clone ID: MRT4577_105758C.1
ccggccgggttttagggttagtttagaagctacaaaattagagagtattggaggggttagaatcatatttttatttaatttatttaattttgaatgagaagtagattttagctcttcgattctcttcaattttgtggcttctaaacaaacccttatttttttcgcacgttctcgattatctttactctatcttttttagaaagaatagtaaacgcttacgcagttcacaaatacaagggtgggaaaccagctatccaaacacatcgaaacaaaatgggacacaatcacacaacaccaaaccctccacgcatctaacatctaaaaacacgaccacaccagcaacacaaaagggaagctgctaccaaagcaagctctctactctacaaccaagtcctgtgtgtgtttccaaaagttctccagccatgtcttcataatcttcgcatcttcctccttcagtagtaagcgccatatctacaagaacacaaacatttttttttcttttgaaaaacttcgctgtacaactttagaaaaaaaatcgatgcccatcttatttcaaatattccaagtaccccataaaattacagagaaccatgaaaagtttagtactcctatgataatcctttcaaccaagtagaaccactcaatgtttcctcaaggaatttaatcctctcaaatcaccttggatccacttttaatccgataagccctaagtggcatttgccgcatctttttttc

SEQ ID NO: 6324 - DNA, 668 bp, Zea mays
  unsure (1)..(668): unsure at all n locations
  Clone ID: MRT4577_105759C.1
cggacgcgtgggtgcttctgcccatctcatcacagtggaaaaggggaaggcgttaggtagcggcacatttggtcaggtttacgttggattcaacagtgaaagcgggaagttttgtgcaataaaggaggtacaagttattttggatgattcaaagtcaaaagaacgcctcagacaattgaatcaggaagtagatatgcttacgcaactcacacaccaaaacattgtgcaatactatggaagtgaactgactgatgaggcactgtccatctatcttgagtatgtttctggaggttcaatcgataaattgcttaaatactatggtccttttaaggaacctgtgattcgtaattatacgaagcagattctttctggacttgcctacttgcatggtaggaaaactgtgcacagagacgtaaaaggtgcaaacgtacttgttggcccaaatggcgaagtcaaacttgctgattttggcatggctaaacatataacatctttagccgaaatacactcattgagaggaagcccatactggatggctcctgaggttataatgaataaaaatgggtacagttttgaaagtgatatctgnagccttnggtgcacaattatttgaatgggaactgggagacattctgggcatcagtttgaacatgtacacgcaatgttta

SEQ ID NO: 6325 - DNA, 1098 bp, Zea mays
  Clone ID: MRT4577_10575C.1
atggctcatagaagatcccaaaagaacaagaagacccaagagaacacaactcggaaggaggtaactcttgagattttatttgatgattgttctaactatgattcatggtctactagtgtgctaaatgcttttagaaccatagatcctcaattagaacaaatcatagacaagagtatcataccttctaattatgatgcctccgaggaagatcaaagatgtatacgcttaaactatctagctattgacatcttaggtaactctcttagtgaagaagattatcatgccttcattacaaattataatgaatatattcctgatgcgcatgatatttggactagaattaaaaccaaatttaatgagtccaaacatgatagttcatttgatacttctacttcctttagttcttgtgatactaaccctttgaaggaagaagaagaaaataaacgatggagaccaaacgatgaatccacctctccaaaagtaaataggaataccttgcttaaggaccaagtagaaaagctaaaagttgaaaatctagcttttcaagaaaaatatgatatgctcctatgctctcatgaaaatcttatggatgatcatatcatattagatattgctcatgaggttgtgatagaaaacttaaaatctcaacaacctcactcttgcacatgtattcaaattgaaactacattatcatgtgctaatgcttgttgtccgtcgacaagcaaatcttcctttgagctagaatttgcaggaacaaaagatgatacatatcaaaagatcaaagaagaaaatgagaggctaataaggagcttgacacaactaaaagggaaatgcattgctcaaccttctcaagataaccgtgatcacatggtgaagaagcttgagacgggaacaaccgtggcgtgcactaaatcccttgaagaaaatgtcaaggacttgaggattgccaagaggaggaagcaaaagaagaaaatcaataccgcctccaaaagcctcaaccatgcctccataaaaggtaacatccaagagatgggtaccaaaacatgcttgacaagctttgcaggagatggagatggtatgaagctttgggatgcttga

SEQ ID NO: 6326 - DNA, 351 bp, Zea mays
  Clone ID: MRT4577_105760C.1
ggagcgtggcaatcagtgaggaggctgttactgaagataaggaagtggccatcagtgaggaggctgtatctgaagataaggaagtggccatcagtgaggaggctgttactgaagataaggaagtggccatcaatgaggaggctgttactgaagataaggaagtggccatcagtgaggaggcccatcgaggaagatggttttgctaacactgttgagactgatcctaccccaaaggagattcttctgactgctaccattgaggaaggtgaaatcatactcattgaaggcaaagaaggtgctgctaatgagatgccccaggctggtgagaccagtgaagaagatgaggaagat

SEQ ID NO: 6327 - DNA, 391 bp, Zea mays
  unsure (1)..(391): unsure at all n locations
  Clone ID: MRT4577_105761C.1
ttnnnnaanacaanggatatcggaacaacagaatggggttattatttctaaactttctgaaccgaagttttgggaacacgacattattgcaggaacgcttattgaagatctaacaaccaccacaaccacctgactcgagggacggctggggagcattacacggggaacaaacagtctactaaccatagcatctggaagttaaccactggcacagcatcattatttttaagcacgggaatggtaacacacatgttaagcagcaatggaagcttagtagccataatcggcaatggctccagcctgatttagaaaaggcaccagttttccatcattgttcagagccatagtctgataaccgcctccaatgagcttcccattgacaaagacattt

SEQ ID NO: 6328 - DNA, 158 bp, Zea mays
  unsure (1)..(158): unsure at all n locations
  Clone ID: MRT4577_105762C.1
gccattgctcaccgcacaagtgcacgctcacctggcacctcacacacgcagctaagtatctaactccggatgcagaacaaggaatatctcgacatggccgaggtagagaagcatggcctgcagctgctggacttctgngtgagcccattcgggcagcg

SEQ ID NO: 6329 - DNA, 326 bp, Zea mays
  Clone ID: MRT4577_105763C.1
ctacctgcagtacggtccgaatccgggtcaccacgcgccgggacctggtggcagctcggcgatcgccagcgccatcctgcacctcgcgctcggcgccgtcacgtacgtcaccatcgacatggggttcctcgtcgagtcccagtccgaggaggagctgcccgagaggctgttcggcgccgtgcgcatcgcgcggatggagatgggcgcggccaggtacgtggagctgcctcctaatgaggccatgcctgagacggtctgcagcggcagggccggggccggtttcagggtaagctccgggaaggtggtcaaccatagccgccaacaag

SEQ ID NO: 6330 - DNA, 214 bp, Zea mays
  unsure (1)..(214): unsure at all n locations
  Clone ID: MRT4577_105764C.1
aattcccgggacgacgatgttcatcagtcggcggccgcccncnncccgggcaggggcacatttaancaagccgggggaaacagagaacaaggcaaaacagcnaacgagcanccccgaggaacacgggcaacaacagagagcaaggacaccaggcagagcacgcgcaccacgagcacgccaccacagacagncaacggagcaggcccgccccacc

SEQ ID NO: 6331 - DNA, 282 bp, Zea mays
  Clone ID: MRT4577_105765C.1
tacggaagcatcggcattgtgtcgcgcgcgtatgggatggaccgtccgagctggctgtgtgggcgcaggtcgacggacaatagccccggagagacctacacctctgcgtacgaaaagattactgatgaacatgattctgccaagagctctccaaactcgactcgatcgcctgagatcacgttcaatgaactggaggacgataacgacgtgaaggtgaaggtattgagtgagaggctatcatgcgtacttctggatgatcgtgcgaaggatgatctcgtgaac

SEQ ID NO: 6332 - DNA, 251 bp, Zea mays
  Clone ID: MRT4577_105766C.1
cttgaggccgccggttggctctgaaggtggtggtggtgcaacggtggcgccacgatggaaatagcagccatactcagtttgaccacaacaaggagcaaggcggcggcggcacgggtgccgggcacgacaccccggggttctggagcggcatgatcggcggcagtggcgcttcttggtaatggagaaacatgcacggccgggggcggcgccatgcatgcatggctcatgcaaaggctccctgcctgcgagcg

SEQ ID NO: 6333 - DNA, 230 bp, Zea mays
  Clone ID: MRT4577_105767C.1
tctttgttcgtccagcaccagctttcctccgcaccccgatccggacagactggcgggaaccctaaccctagcgcgccatggcgggatacacccaggccgcatccagggacgtctctgccaagcctggacactctaacgacgtcaactcggccaatgacaagaagggcgcgggcgtcggctccgttgtgcggtagccggatcctggttacctatctgctgtttatgatgta

SEQ ID NO: 6334 - DNA, 444 bp, Zea mays
  Clone ID: MRT4577_105768C.1
ggggggagcccccgggacaaacatatttttttacacaaagggaaagggaaccaagatgtttgggcaaagggacatttttaaaaaaaatactactacctaccaccttttttttttcctttttttttaaaaaaaaaaaaaaaggatgccctttttacccccctggggaggaagctccaaaaaaagaaaaaaaagggacaatttcctaaacaaagtttttaaaaaggggggcgaatttaaaccccctcattaaatttggccccaaggaaaatacttatggttgaaaaaaaaaatttgtgcacctcgaaggggccctccttgcttgcaaagggttttaaaaaataaaaagcttttggaaacaagtttgggttgcaagggcaaccaaagggggggttgggtttacaagggaaagccaccttgggaagtgaaaaccaaaacaccttttct

SEQ ID NO: 6335 - DNA, 501 bp, Zea mays
  Clone ID: MRT4577_105769C.1
ccggccgggctacgttgccttcatacaagcttgacaactggtacggggacacaggcgccacagaccacatcaccaacgaacttgatcgccttgcggtccgagaacgctacaacggcaatgaacaagtccaagtgggcaatggtgcgggaccggcaaacgaggagatgccttctggaagggcaatgtgaaggtggtctctatcccctgacgatctctagcgcacaagacctgacgcatgcattggctgcccgcaaaataaatcgtgatcaatggcatgctcgcttaggtcatccagcttcgcaaacagtccagtccatcttacgtattaataatattatgtgttctagtgagtctttttcatcagtttgtaatgcttgtcagatggctaaaagccaccaacttccatattctaggtctatgaataatgcttcagctcctcttgaattaattcactccgatgtttggggtcctgccgccaaaaaaaaaaaaaaaaaagcggcc

SEQ ID NO: 6336 - DNA, 148 bp, Zea mays
  Clone ID: MRT4577_10576C.1
agcactcagagggcgtagatgcacagcagccacggggtgctcatactctgggggacgagcctgatgacggtgacagctaggacgctaagagcgtgcgcgagctgatgttgtctgagaccagtggtgaaccgcactggcgcaatgacac

SEQ ID NO: 6337 - DNA, 348 bp, Zea mays
  unsure (1)..(348): unsure at all n locations
  Clone ID: MRT4577_105770C.1
aaaagccataacagattcttttgtttccactgacattatcatttctgcaagcatacatataaaaagtatactgcctcttacactatttataatctttcnacactcaatattgaactttcccccaaatgtatacccatttctcatgattgtcaaatatttgttgtctttataatgattcaaacatgatttattattgctcataaactatttcttacattgcattatgaaacaaattgttatcgtattccacatctttttcatatattattgtaatatccttattcctaacaaaaaaaaaaatctcatttaaagcatattcattccaaaaaaaacaaattcctattatta

SEQ ID NO: 6338 - DNA, 501 bp, Zea mays
  Clone ID: MRT4577_105771C.1
gaggtttgcgtggaaagttgcaagttgttattcctgaagggaagataaggcctatggcaccacttggtgctgctaagtttgcaactgaatgcaacatttctgtgaggaaccatgtgccagtgttcaaacattggaaggattacaagaaccattcaggcctattcaatctatttacaggaaaacttagtgcaaagtttgacattaacacaagtgatgcaccagttcaaaaggcttgttcccagatgatgaagagtgcggttcgacaacaacgataccggctcaagaaaaagtactttgatccttttccgctacatctagtggcaaaaaaatctccaatcagatctatgactgatgaagagtagaatgaacttgtggagtattggaagagtccaaaaaagtggagacatctcaaaaaaacaaagagaatcgatccaaagttaaattccatcaaacaactggctctcgtagctacatggttcatgtagaaactttgggagataa

SEQ ID NO: 6339 - DNA, 439 bp, Zea mays
  Clone ID: MRT4577_105772C.1
cccacgcgtccgctcatggcccttcaagcgtcaacttgtagtctcccgctctatcggcggggtggagtactacaccgtgggctatgccatggttgaggcgaggtggctccattatcttcttcaagagcttcacagcatgctgaccaagagtactgtcactgcgataacattagtgttgtctatctctccgtcaacccggtctaacaccagcacacgaagcatgttgagattgatcttcgcttcatctgtgaacgagttgccattgggacattcgtgttttccatgtcttaaccagcttgcagtttgcagacatctttaccaagggttttccatgcttggagtttcagtccagtttcaacgtctgtcatagagtttcaactgtgaggggtgctagacatcccctatggctgtgttatgggcctactatggcccaacccat

SEQ ID NO: 6340 - DNA, 1278 bp, Zea mays
  Clone ID: MRT4577_105773C.1
cacagggtaaacctttttttatccatccttttgcgcggaggctgttggagcgttggatagtgcgcggtgccggcgaggacacctcgcactcgctcgcagtccaagaacgaaggcagcctctgtttccttccgaccggcgatgaggaacccgccgggcaggcacctcctctgtctcagcagccgcgccgtgcgctcttcctcctcctcatcggcgctcggccccggacccggcgctgttacctccgccgcgtccccacgcccgcgcgccatcgcgcccgggcggcccctgcgcgccagttccccatccccgccttacgcagtcgccgccgccgcgtacgtggaggacggggactgggaggaggtcgtcgctggggggcctggtactggggagatggaggaagaacaggactacagggtggtgttctggtccccgccgaccatagacgaggttaccggcgcagtcaccagcatccagcaagtatttgagaatcctcttggactggattcagatacaactgacagacagacaacactactgtctgcatcaggacattcatctggcaattcatcaggatcagatgactggattgaacctgctgcctatgttcttaactcaactgctcttctgtcaagggaacataggaatgttgtggatgctttccgtctgttgcaaaaggatcccaccgttcagaaaatggttatgtctttgtcatgcgataaggctgtttggaatgctgtcatgaataacgaggcagttcaagatttcaggagatctttacacgatggaaaagaaaatgatagaaacgaaaacactggtggtcctgctgaagtgttcaagtggatcctggaaagcgcccaggcaaaaatatttgaattcctagagaatgttcagaagataatcaacatgctgatccacactccagaggatgatgataatccagatggatacagcgatgcagttaaggtgtcgttcatgctcacggtattcgtcttcatcgtggtggccattgctcgtatcaagtgagcacaacaatccgccgactttacatatttctaggttccattgtcccttgattatacacagggcaactctagttagttagtcagattgaggtcatggaaaggttgactggccaataaatttaaattgatattgtgccgtcgtgtggaattatgatatgtcctagggatattaccattattatccttgcattcagcgtgcttatgctttttcaaaaaaaaaaaaaaaaaggcggcccgccttttttttttttttta

SEQ ID NO: 6341 - DNA, 539 bp, Zea mays
  Clone ID: MRT4577_105774C.1
gggagcttggataaaacctttccatcggtttaaccagaacattacatacaagaaacgagtgcggctgataccaaaagcgcgacagcgtgggtcgtgcatatatatattatattccaagggggggggggacctaacaataattgcggggcggctttcctcaaactgtgaggtgcgatcaggtggggggggcatcatcttggggctctccgcagcacaagaattttggggggcgggatcttcactttttcaggggccagcgaaaaaaacacgggctcatcaacatgtgtacggcatcatacaatggatccggggccaaattggttgggagcttccaaaaaacccatccaaaatcatatatataaacctatccgtgaagcttagggctcttggggtcttttccatcctgggcaggggttcctacagggggagggggatcacaggtcttttggggggtcaatgtgtgatcaaagtggtgggacttgggcgcaaaaacatattttggttatgaagtgggggaggatgggggtctttactgggca

SEQ ID NO: 6342 - DNA, 354 bp, Zea mays
  unsure (1)..(354): unsure at all n locations
  Clone ID: MRT4577_105775C.1
ttctctctttttttcctttctcctcantaccttccttaattccctttggagccactcttcccaccattccctntctcctatctcctcccacccttatccaattttccttctcgccagggggtatatccatagaacattatttttcttctctacatcttacattcattcttcccttccttcctcctcacctttcattcttctaattcagttccattctatcattttttaatgggcttcatatcacatccctcctagtctctcttgaattagatcaatcttccaaaatctctttttttcttcacattcaactattccatttcactctgttcttacattaatttaattttaatttta

SEQ ID NO: 6343 - DNA, 471 bp, Zea mays
  Clone ID: MRT4577_105776C.1
tcgagccggccgggacagcagcgggaagcggaagagcgatcaccgggtccgggacctggcatagcgaagccaaaccgaagcccgtgttcatggcgtccaagtcgaactggcaccagattggactccgccagaccttctccttcgtcgtcaggaatgaaaccggcgcgccgttccgcacgggttggctcatgatggagcaccgcctcctcaacgacgacggcgaggagaaacagcaggaggaggagggcttcctcgtatatcgcgtcctgtgcaaggtgtaccgcagcccgcgcaagcccgagccaagcggcaacaaggccgcggcggcggcctcgcccgggcacaagatcgaggccgacgacgacgaatctaacgacgcaacgttggacgaaaacgacgacgacgaatctaacgacgcaacgtgggacgcaaacgacgacggcttacaatgcggcgccaccggcggcatct

SEQ ID NO: 6344 - DNA, 1151 bp, Zea mays
  Clone ID: MRT4577_105777C.1
attggtgcccgcagccggccgggccgggaacggagaagagaacaagagatagtacttgacactcctgtcctgctcctccactcccacgctcccagccgagctcgagcgcacgcacacgcgcacaagcaggagctcctgtcccgctagatcccaaacagtctcctgcccgcgcgcgtttgggggggggcgcgaaggaatcaccggatggcgatgttcgcgcggccgctgctggccaccctgctgctgctgccggcgttcctgctctctgccgcctcggccgccgacagcaagagcaaccctgctgatgagctcgtggcactgatcaacagcaaccgcactgctggcaaggcatcttctgtttcggacaaccaaggtttgggatgcatcgctctgcagtacatcaaagcatacgaaggccattgtgaccaggtggacgacaagaagccgatggagtcaagcttcaccgacacgttcgccccgacctgtggcgtccaggccacaaccctctccaagatcaccggaaggctggtggcttgccagtcccagtacttggctccagctgaggcctttggcgtcttgttggtgaacgacgcgaagggcctccagatactgcgcagcaagaaccacacggaggtcggggcggctgtgagcggcaccgatggcggtggaccgtacttctggtgcgtcctgttcagtgacggcaagccgactaccagcttcaaggtggatggcgaagtgccgaaggcagccatccacccgggatgcttcagtggcaacaatgacgactgctcgggccccacaaatggcgccgttttgaccagtgctggtgcgctgaggctggtgacggccattctttttgctgtagctgctttgtgagcgtgtaagtaggtgtaatgttttctgccattattttgctttgtcaccatctcctgtctgtctgcagtggcacgctatatattctttgagcatatgaactatgtatgcaaggatttgtaggtcgttgttcagcattttgagactatctgttacctgttcggaatgttcatcatagtagttttgtgcgctcttttcggaagtatttgagcaaattaaaaaaaaaaaaaaaaaaactcgagagtgtaaaaaaaaaaaaaccacgcgtccgggggttc

SEQ ID NO: 6345 - DNA, 375 bp, Zea mays
  Clone ID: MRT4577_105778C.1
gccttgaatggtttttttttttgtgcatacatttgcatacgtttctagttaaggggggggggggggggaacaggacgggggccctggggtaataaaaaaactccctgcgccgaaagaacagcccctggagggaaaactgtagggattaaaaacgacaacccatctgggaaaaaccgggggtcacggcgcacctttgtctacgagaacctaaccctgccaaattcccacctggttaaaaaaacatgaggttgttccaaaagcggggtttttaaaaagcccaccggagtgaattctcctccggaaaccccaccacctttttaaaaaaacccccccccgggaaactgcccccgggaaaacccagaaaaagggtccccc

SEQ ID NO: 6346 - DNA, 267 bp, Zea mays
  Clone ID: MRT4577_105779C.1
gggggtaaatccccatttggttcctgcaaaccggacaatctgattcaggtcttacttatattttggatctggtctgaacttttggtttcaaaacaatacaagcaaagccctcaagtttttaggcattttcaaaacccaggaattttatttgccccacttggagcaagattctgagttgttgccatgggattaaaccctttcgccgttgcccccaaatttttaacattctgtttttttttaaaggggcgagcttttttgccctggccc

SEQ ID NO: 6347 - DNA, 468 bp, Zea mays
  Clone ID: MRT4577_10577C.1
gtgtgtatcacttttggatgtaccggttgagcagcctttcttgcccagtctactagttccgacgtgccaatggcatgaactgggccaccttaagaggcaccgggcgaacagcaagttactgaccccaaaaaggaggacaccccgctatgcggagacattcccgaacgcgagcgcaaaaaacttgcgcagtaaaatgacagcccaccccgggagccggtctgtttaaccccaagcacagagaagacccaaaacagggcgcaaagctcattctcggggggagcgaggggaaaaaaaacatgcaccggtttaaaggaaaaaaaaggagcttaccaaatttaagcgccaaaaaacgccacctttaaaaacgggggcgcgggggggaacatcaaaggcgcgggggccacggacaccacaaacacccccccagaggggcgcccgccaaataaaacgggtactaccccccccacc

SEQ ID NO: 6348 - DNA, 107 bp, Zea mays
  Clone ID: MRT4577_105780C.1
ttcaataccggggggcgggccacgtacgaacatacaatcctagtagcgtgttactgatggtgagcaacatttgtgactcaaagattgagtttctcactgcatgacaa

SEQ ID NO: 6349 - DNA, 593 bp, Zea mays
  Clone ID: MRT4577_105781C.1
ggcggccatgagcgcgtcggacgcgatgacgttggcgtcgacgttggacgaggacggcgtcggcagctcccagctggcgctctgctggtccccgggcgccggcttctgctggtgatccccggcgccggcgacctccgccttgacgtgcagctcctccagccccggcacgagggagctggacagcagcggcgcgtagaagctgtccatgatcccgcccgcgccagcggcctcctgcatccacggcttgaggtggatctgcgcgccggcgccggtggcgcctccgtagccgaggcctagcaggtggtccacctgcgactgctgctgctgcatctcgtaggcggtcgcctccgaggagaccaccgactgcatggcggcctggaagagaccgaggtggtcaccgccagagccggcggtcccgaggaggagcgacgcgagcgatgcgcccccgggcaggcccagcgccgaggtcagcgacggcagggaccccgtcggcggcgggagggacagcgtcgacgccgccgaggacgacgtgacggctgccgcggcagcggaggcggatgaggaggacccgttcctcccgccggctccgccgc

SEQ ID NO: 6350 - DNA, 725 bp, Zea mays
  unsure (1)..(725): unsure at all n locations
  Clone ID: MRT4577_105782C.1
aattcggcacgagggccgaggctcggcagagcttgtggaagcgcctgtggcttaccaagagaatgtagatatattagataaggatgaagacccacctatagtatttgctttggctgctggctctccacgatgtgttcgtgcacttgtaggcaggtctgctagtatcaattctaggcttagagaaggcctgggtcctactcttgcccatgtctgtgctcatcatggtcaaccagagtgcatgcaagagctgctgatggctggagctgatcccaacgcagtagatggtgaaggtgaatctgtcctgcatattgccgtggccaggagatatactgattgtgctattgctatacttgaaaatggaggctgcagatcgatgggcatatcaaattctcaacataaaacgccattgcatttatgtgttgagacatggaacacagctgtggtaagaagatgggttgaagttgcatctctagaggatatagcagaagcaattgatgtacccagccctgttggtacagctttatgcatggcagcagctcttaaaaaggagcacgagaaagagggtcgagaggtagtaagaatattgcttgctgctggtgctgatcctacagcacaagatgatccacactgtagaactgcattacatactgcagncatgatcaatgacgtggagcttgntaagattatactggaaagcagagtcgatgttaatataagaaatgctc

SEQ ID NO: 6351 - DNA, 258 bp, Zea mays
  Clone ID: MRT4577_105783C.1
acgcttcggtcctcacttttttatggcaacctaggtgccatcccgatcctttccatacaacttttagcactcaaagccttttagaagccctctattattaaaccggtgttggtagtgcccaaatccgaccttttgaacaacctttttacactcctcagggtccaagaccaagaattcattgaaaccccttgttcttgcgcctatttgtttattaatgggcagttcattgtctagattttctttttctcacactttatc

SEQ ID NO: 6352 - DNA, 877 bp, Zea mays
  Clone ID: MRT4577_105784C.1
aattcggcacgaggcatggggaaaacccaggagccaattttcaggctatgaattcttcccacaatagtgttaataatagtggtggcattgttttacatggaagcccagcaccttcaaacattcagcagcaaaattactctcttctacatcaaatgcatgccttgaggcatacggatattgatccaggcagtttagctggaaagacgacaagacctgatgttggttctgatgcttcacagattgactggaaatctggccagaggtttgctcatgtagccaataaccaaaccaaatcagctgcagataacgttggaagccctggtgtcccagggtcattcacttcagacatgaaaatactgagttttgcttcaaggagtgaggagagaaatgtcaatataccttctcagcttccatctggagagcgcccgtttcctggtatggttactgcacaaaatgataatcagaatcaaattcagcctatgggcacaagtgcaacatcaaattctgttgaaagaagtgagaggccgaggataaaccctcaaaaacgcaccttcgtggtttggacattacggaaactatagaaatcttctagagacgacatctgtgcttaatgctcagaagccaagcgctttcatatataattttccgaaaggaacttgtctcgaaaaaaataataactctgctgaatgtagacgcgcttctggaaaatgtagggcacagtgcatcatctcccatcaacgacttccaaccaatccagctcgtagacgggcggaaaacggatgtgccaactagaagagtggtctctctcggcgcttgcttgacaaacgtgtgttattacccgttgtatataatgacattaattaatgttcattaaccc

SEQ ID NO: 6353 - DNA, 1303 bp, Zea mays
  Clone ID: MRT4577_105785C.1
cgaggccggccgggatcagtcgcagtctcccaggcccagccgcccagcccccggccatcatctgctctgcctcgtgcctccataaatacgcgccccccgcccttggcctctcgcctcccaccgtccctgctccgacgccgcccgcccgcctccgtgcgctgcactgaatctgacagcgcccgtcctgcagcggccggcgaggaagagctctcggcgagagggcgagcgatggcggcggcaatgccggcgctgctgctgctgctggtggccacggcgatgatgttctcccccgccgccgcccgcattcccggcgtgtacggcggcggaggctggcagagcgcgcacgccacgttctacggcggcagcgacgcctcgggcaccatgggcggcgcctgcgggtacggcaacctgtacagccaggggtacggcgtgaacaacgcggcgctgagcacggcgctgttcaaccaggggctgagctgcggcgcgtgcttcgagatcaagtgcgaggaccagcccgggtggcggtggtgccgcccggggagcccctccatcctggtgacggccaccaacttctgcccgcccaactacgcgctgccctccgacgacggcggctggtgcaacccgccccgcccccacttcgacctcgccatgcccatgttcctccacatcgccgagtaccgcgccggcatcgtccccgtcacctacccgcgggtgccgggccgcaagtccggcggggtggcgttcaccttcaacggcttccggtacttcaacctggtgctgatcacgaacgtggccggcgcgggggacgtggtgcgcgcgagcgtgaaggcgtcgggcaccggggagtggctgcccatgtcgcggaactggggccagaactggcagtccagcgccatcctcgtcggccaggcgctctccttccgcgtcaccggcagcgaccgccgcacctccacctcctggaacgccgccccgcgggactggcgcttcggccagaccttcgagggcaagaacttcagggtctgactgtgagctcaggccgcgagtggcgcggcgagaagaagccagagctctcaaggccttgttccgccgtactattataccgtgattactgctactagtcgtcgttataaagcgcgtgttaggggtggtgggaatgtacgtgaatgccccgtttagggtcacgccgtctcgccctggttcatccaggttcaagtactctctgcaaaaaaaagggagcctttttcttcttctgaacatgtccggccaaaagggaaccaggattggcgttgggtgcctaaccaaa

SEQ ID NO: 6354 - DNA, 234 bp, Zea mays
  Clone ID: MRT4577_105786C.1
gtcacttacatccaccgtctcgttttcctatccaagcgcaccatccaccgcagcgcataggtgtctctatctcagccatggcccacccagaacaccaacaggacactccgaatctcttcaaccgatggaccttctatcatctcctcacgaacgacatctcccttaacgactacctagctgtgaacgctacgaagcacgcgatgtacctgccgcacacacctgtaccttactcca

SEQ ID NO: 6355 - DNA, 1240 bp, Zea mays
  Clone ID: MRT4577_105787C.1
ttggggtaccctcgcccttggcctctcgcctcccaccgtccctgcaccgacgccgcccgcccgcctccgtgcgctgcactgaatctgacagcgcccgtcctgcagcggccggcgaggaagagctctcggcgagagggcgagcgatggcggcggcaatgccggcgctgctgctgctggtggccacggccacggcgatgatgttctcccccgccgccgcccgcattcccggcgtgtacggcggcggaggctggcagagcgcgcacgccacgttctacggcggcagcgacgcctcgggcaccatgggcggcgcctgcggctacggcaacctgtacagccaggggtacggcgtgaacaacgcggcgctgagcacggcgctgttcaaccaggggctgagctgcggcgcgtgcttcgagatcaagtgcgaggaccagcccgggtggcggtggtgccgcccggggagcccctccatcctggtgacggccaccaacttctgcccgcccaactacgcgctgccctccgacgacggcggctggtgcaacccgccccgcccccacttcgacctcgccatgcccatgttcctccacatcgccgagtaccgcgccggcatcgtccccgtcacctaccgccgggtgccgtgccgcaagtccggcggcgtgcggttcaccatcaacggcttccggtacttcaacctggtgctgatcacgaacgtggccggcgcgggggacgtggtgcgcgcgagcgtgaaggcgtcgggcacgggggagtggatgcccatgtcgcggaactggggccagaactggcagtccagcgccatcctcgtcggccaggcgctctccttccgcgtcaccggcagcgaccgccgcacctccacctcctggaacgccgccccgcgggactggcgcttcggacagaccttcgagggcaagaacttcagggtctgagctcaggccgcgagtggcggcgagaagaagccagcgctcaaggccttcttccgccgtactattatatataccgtgattactgctactagtagtcggtataaagcgcgtgttagggtggtgggaatgtacgtgaatgcccgtttagggtcacgccgtctcgccctggttcctccaggttcaagtactctctgaaaaaaagggagcctttttcttctgaacatatgcgggcaaaagggagataagtatggtgattggatgcttaaaaaaaaaaaaaaaaaaaaaaaaaaaaaaaaaaaaaa

SEQ ID NO: 6356 - DNA, 596 bp, Zea mays
  Clone ID: MRT4577_105788C.1
ggctcggcggcgtcgtcagcattggcaacgccgccatacatccccggtaagtgcggtgtctccgtcaggagtgcacacatcagcacgcacacgcgtgagagtgcaccaagatcaactgatcgatggaaccatagcggaggtagctagctcgttaggatggcagcgtacgtggacatcagcagcatgcaatcatgagccgaaacgagacatgtccatagcatacgtgtgttggatgcatcacactgtgcacataataaagaagtggatgatgcacccaataccgatcactacttttagtgacattaagatgaatgtcccgcgcacactgttgtgtaccttacggtgacttgctgcttctcgtacgctagcaaagaagctgctgactgtccttggctccgctactctgggtttgtgattataccgtgggttgctattaatctgggatacgcttctcagttctatgaactggatcttgcatgggcgcgagagcaccgacgtgtgggtcatcgggcacgagtgcggctatcacgccttctcggactactggattctggacgacggggtgggactggtgctttactcgccgctcatggggc

SEQ ID NO: 6357 - DNA, 498 bp, Zea mays
  Clone ID: MRT4577_105789C.1
ctcctatagggcgattgtttccctcgaggccggccgggaacccggttcccgagaccgcatctcaccgcggatgatagcgaacacaaaaactcgccgcaactgttccccctagctagatacctcgcgcgaggaagccaaccaggaacagcccggactaggtgaggttgcccctgtcggacctgctcatgagatacccccgcactagcctcttcatggtcaacatcaccacgcccgtcgtcaacatcgtcaactactcgatcaggggccaccgacagcttctatgcctccgccgccgacaacagcacctgctccaacacagaaaggccaccgcagtcacccgctatttttttttctcgccaccacacctctgtcgctggttccggaacggtggccggaatcgacaaccagctgatcctgcggtaggggcacctacgtgtgcccccgaaataatgctgactgtaaatctaacactgcggccaatgctaccctctccaacaa

SEQ ID NO: 6358 - DNA, 1668 bp, Zea mays
  Clone ID: MRT4577_10578C.1
atggctcgtaaaagatcccaaaagaacaagaagacccaggagaccaaggaggtaactcttgagatattactttccaattgttctaattatgattcatggtctactagagtaataaatgcttttagagcggtagatcctcaattagaacaaattttagtcaagagtattattcctcctaactatgctagggaaaatgcctccgaagaagatttaagatgtatacggttaaattatctagcttatgacatcttaagtaaatcccttagcaaagaagattatcatgccttcataataaaatatgacaaacccatttgtgatgtgcacgatatttggactagaattaaaagcaaatttaataagtccaaacatggtagttcattttgtgcttctacttcctttggtctttgtaatactaacccttgcaaggaagaagaagaaaatgatcgatggagaccaaacgatgaatccacctctccaaaaggtttgtcttcccatttcaattcccacatgtgttgtgtggctaatacaaatgatagaggaagcacaaatgaggatgaggaggaagaaagaagctttgtgcaactctacgctcgcctaagccaagaagataaggcggtcatgctcaaacttgtagaaagagcgagagagcaaggcgaagctcgtcaaaggctagaaagtattctctccatgaagatgcaacactttgacgagttgactaaagaacatgaggagctaaagtgctctcatgttgatttggtccaaaggtatgaaactatttcaattgagcaagataacgctttacattgtatcgctcaattagtaaataggaataccttgcttaaggaccaagtagaaaagctaaaaattgaaaatctagcttttcaagataaatatgatatgctcctatgctctcatgaaaatcttagagatgatcatatcatattaaacattgctcacgaggttgtgatagaaaacttaaaatcccaacaacctcactcgtgcacatgtattcaaattgatactatattaccatgtgctaatgcttgttgtttgtcgacaagcaaatcttcctttgagctagaatttgcaggaacaaatgatgattcatatcaaaagctcaaagaagaaaatgagaggctaaagaagagcttgacacaactaaaagggaaatgcattgcccaaccttctcaagataaccgtgatcacatggtgaagaagcttgagacaggaacaaccgtggcatgcactacatcccttgaagaaaatgtcaaggatttgaggattgccaagaggaagaaacaaaagatgaaattcaacacctcctccaaaagcctcaaccacgcctccacaaaaggtaacatccaagcaagcaacaaacaaggaaagaagaaaacttcaaaacttgaaaaacgcctatgctacacatgccaaaagaagggacatcaatgcaaggattgtcccattggtaacaattccactcctaacttgtcaattgattttcatgtaactaggcaacccaaaattgcaacttgtgctagaaaggaaataaagaattatcctatgccgaaaagtcaaagcctacaatatggaggaatgccaaaggatggtaacatctatgcttttaagtgcaagtatcttaacttatcatttctcatgtgccttgtgtag

SEQ ID NO: 6359 - DNA, 224 bp, Zea mays
  Clone ID: MRT4577_105791C.1
cgggtcgatacaagcctctaaattaagtcataataattgggccgtcgggagaacatctgcacgcgggaccgggcaacatttcccgctgctgccaacaagcaaaaggggcgacgatatataaccaactgcagccgttactggattcggcaacctcctcgattgggaagtcagaccatagatggggttccacctgctggcgttcgtggctgccacgggcctcatgc

SEQ ID NO: 6360 - DNA, 176 bp, Zea mays
  Clone ID: MRT4577_105792C.1
catgtagcactgcgaggtggcaggagtgggaggtggtagtggtagggtatacaggagtagctctgtccatggagaaggcgaagcatacaaacgccatgttatcggtggctgtggaaagaaagcgcccagcgctgactgtgattaagcataactcgtggtcgccggacatattatcg

SEQ ID NO: 6361 - DNA, 273 bp, Zea mays
  Clone ID: MRT4577_105793C.1
cccacgcgtccgaggaccgtgggtcgacacacgcgtccgctttccctcgcgccgccgccaacgcaacgcttgcagcagcaaacgctatcagcaaccatggctggcgcgcaggagtcccgctctctggtgggcacgatgcgcggccacaacggcgaggtgacggcgatcgtgacaccgatcggaagctcgggggtcattctggtagaataaggagttctagccgtggctgctctcagagctgagaggacgctaccataggaatgggagcaggaa

SEQ ID NO: 6362 - DNA, 460 bp, Zea mays
  Clone ID: MRT4577_105794C.1
cacagaaaaacgctgataccccctctgggataagcgctaggataggcacacacatagccgcttataagggtggccatatatgcatagaacaaactttttgtagatctcgaagtactatataaggagcctactgccatatgagacaatcactacgttattccaagccatgggtgcctatgggcctatgccattcgagagtacacagccattacatctcgatggcgggctaaagcttgataaaatgaggcacgctcacgcattattgcttctttaaccagggctgacacgctcaaacttatgaaaacattcactatatataacaataagctaagtgagagcattaacaggcgcgctgaaggtttactgagagattctacaagatgctgcgccaataagattcttcatgactgttggagactggacactattccacgggttgctgaatggtcaggaaaagaca

SEQ ID NO: 6363 - DNA, 297 bp, Zea mays
  unsure (1)..(297): unsure at all n locations
  Clone ID: MRT4577_105795C.1
cgtgcgaatgtgctacttcgagttcctgcccttgtttcagcccgtgtccgacgacgccgatcccgggcatcncgggctcgtggacctggtccacgtcaaactcgggcacgagtacaagctcgtcgtcaccacctactcaggtgcggagcgggtgatgaaaatggaacagctgctagctgatgagtcagtgacactagcttgctagctaacgaacgtacacgcacgctcgccgtgcaactgtaggtctgtaccggtaccgtgtgggcgacatgctgcgcgtggccgggttcaagaacc

SEQ ID NO: 6364 - DNA, 429 bp, Zea mays
  Clone ID: MRT4577_105796C.1
aacaatttcaacaagcaactcaatcagtccctctctggaaatcgatagtcaccaggggcggggtggaactaaagaggatatgcatgggccaaatttcatctaaaggaagcaataagcaccgcgcgcaaatagaacataatcatgaagtcaaggggatacagataatggtagaaattagaaagagataggatccacctgcataaggttgttgagagcatggaggagacagaattgcagcctctgcctctcatgatacaccttgccgctgccgctttcccccgcgccagatcctgcctcaccttgctttgctttcgatttggctcccggttccatgcctcgatgctcgatggggctgggtcgctgccacgcaaggacaaaacctgaaaccccacaggtatcttcggaattggatttacgagtatataagat

SEQ ID NO: 6365 - DNA, 322 bp, Zea mays
  unsure (1)..(322): unsure at all n locations
  Clone ID: MRT4577_105797C.1
aataaaaaaaaaatgaaaaaactctcgtagaaataatatacccactataactatgtggtgggggctactccatccgggggctgtgaactgatacaaaaaaggaactgatggataggcatatatagattctacggtcacaacacagttccatgaggggcgcagttaatatgctgttgcagccgcaaaggaagctnnattcagcaaagcttgctcatggatcgggtgtggtcttaatatgtaccaccattattaatctcattacgaccaccacttccatttaggctgaatcttgcaaaatagttgatcgtctggtggtaacatg

SEQ ID NO: 6366 - DNA, 604 bp, Zea mays
  Clone ID: MRT4577_105798C.1
cccctctcgagtttttttttttttttttttttttttttttttttttttttttttttttttttttttttttttttttttttttttggcaaacgggggccaagcccccaatttccagttccccctttaatatttaaattaccgcacccttttttacaaaaaaacggggggaagggaccctgttgagggaatgggccctaatttttggcggggttaaggaagggcaaccccccttttcttaaaaagcggggggtttcttacccccgggttcccccttacaaaaaactagggcccagggaaaagcccctaaagttaaaaaaaatctgaaagggggtagttccaatttggggggcaatttggagctgtttttttaaaaacattttttcatagggaaaaaaaaccccaaagccaatgatgtttttgggcccaagacaaggggccttgccttttgacttgaaaggcctgaacaattttggattcaacccacaaaccggggggagggcattaacaaccttcctttgcaagctttggacccgccaaaatgtcaattcatcaacgggggcaaggcttccgattccccctccaacgttccaaaaacaaaagcaaa

SEQ ID NO: 6367 - DNA, 1137 bp, Zea mays
  unsure (1)..(1137): unsure at all n locations
  Clone ID: MRT4577_105799C.1
aggccggccgggccgggttcgtagccagcngcaacaggggtactcctcgaaccagggaggagaggcacacactcgaagactcgcgggagatcggatacccaggaccaggagaagacgcgcggcccgctccgcatcgctgccccacacccccacctgcccctgctcctcgaactgtccgccgttgcgttcgacatgggcgacccgccggcgctcaagaggcccaaactcgagaagggcgacaatgattccacctactgcccccgctccgcttccaatggcgcgggcgccaacgtcccaccgccgcgtgacgacgtggaggaggatgacatctcggaggaggcggtcatcgccctcatcgcgcaccgcgagcgcgacgtcgagcgctgcaagctcaagctgctccactaccagtccctgctggacgccgcggagatgaagctggaagaggcacactcgcggctcgccaggttccgagatcgcaagccgccgccaacccggtcggagcccaagctaccgacgccgccgatccagagggaacccaagccatccccgccgccaatccggagggatctcaagccatcgccgcagccaccagagaagaaggctccatcgcccgcgccgcagccgtcggcgagcccgcagcttgtcatcccagggaccaacaaccgaccggccccgcgccctcagcccatgcctggcttgaagaaagccgctgccccgtcatcgtcttcatcacgggcgccgctggaacggtcaaggaaagaggagaagccgcccaagagaaagattgaacagaaggaacatcggaacttgattccgagtgtcaggaaatcatctgcgactgtgcttaaatttcaaggtggcaatttggtctcgagccaacacaggaggaagcttaggtgtctcgagctatgccctgctaatgatcagctcgttgttaccagtgcgctggatggattagttactttatggcaagtggagactagagggtacgcataatttactttgaattgttaacatgttttccttgtcatttcctgccttccttttttacttatctttcaaccatatttaagagatatgtcgctagtttctgtaaagttgtagtgaaatatgaactaggtaaactgaatgtcc

SEQ ID NO: 6368 - DNA, 1590 bp, Zea mays
  Clone ID: MRT4577_10579C.1
atggctcgtagaagatcccaaaagaacaagaagacccaggagtccaaggaggtaactcttgagatattactttccgattgttctaattatgattcttggtctactagcgtgataaatgcttttagagcggtagatcctcaattagaacaaattttagacaagagtattattcctcctaactatgctagggaaaatgcctccaaagaagatttaagatgtatacgcttaaactatctagcttatgacatcttaagtaaaacccttagcaaagaagattatcatgccttcataataaaatatgacaaacccatttgtgatatgcatgatatttggactagaattaaagacaaatttaataagtccaaacctgatagttcattttgtgcttctacttcctttggtatttgtgatactaacccttgcaaggaagaagaagaaaatgaacgatggagaccaaacgatgaatccacctctccaaaaggtttgtcttcccatttcgattcccacatatgttgtgtggctaatgaaaatgatagcggaagcacaaatgaggatgaggaggaagaaagaagctttgtgcaactctacgctcgcctaagccaagaagataaggcggtcatgctcaaacttctagaaagagcgagagagcaaggcgaagctcgtcaaaggctagaaagtattctctccatgaagatgcaacactttgacgagttgactaaagaacatgaggagctaaagtgctctcatgttgatttggtccaaaggtatgaaactatttcaattgagcaagataacgctttacattgtatagatcaattggtaaataagaataccttgcttaaggaccaagtagaaaagctaaaaattgaaaatctagcttttcaagaaaaatatgatatgctcctatgctcttatgaaaatcttagagatgatcatatcatattaaacattgctcatgaggttgtgatagaaaacttaaaatcccaacaacctcactcatgcacatgtattcaaattaatactatattaccatgtgctaatgcttgttgtccgtcgacaagcaaatcttcttttgagctagaacttgcagaaacaaatgatgatacatatcaagagctcaaggaagaaaatgagaggctaaaaatgagcttgacacaactaaaagggaagtgcattgctcaaccttctcaagataaccatgatcacatggtgaagaagcttgagacgggaacaaccgtagcatgcactacatcccttgaagaaaatgtcaaggatttgaggattgccaagaggaagaaacaaaagatgaaattcagcacctcctccaaaagcctcaaccatgcctccacaaaaggtaacatccaaggaagtgaagagatatcatgtgcaaaaatcaagacctacaacatggaggaaagccaaaggatgcctacttatgaaaatctcaagagaagtaagtgcaaggtcaaaaccacaagcctcaaggggtactcttcacccaagaggaagaaagaaatagattctttatcgaatttaaattggctaagatatgcattctatctcattcttctcaatgcatttatccattag

SEQ ID NO: 6369 - DNA, 233 bp, Zea mays
  Clone ID: MRT4577_1057C.1
aataggactaggaagtagaacctacaaccatttcgtatgatgcgtagaaaatgcacggccgtgggcaggtgctaacatgactgagacgctgattggaaacaagtgatatctttctcatagacctgctgtcaattatgaggaaggtgaacaacaatgcaaagaccatgatcagctctgtatggccgcatttgctagctctgcacaacacattcaattggcatgtcattaatacc

SEQ ID NO: 6370 - DNA, 1793 bp, Zea mays
  Clone ID: MRT4577_105800C.1
atgcaatcagttagaatttacatccagatttggagaaacaaaagatcatctcacccaccctatgatggtcgcaattaaacacacaaaaaaagcatcccttgcaaaaaaaaaaaaaaaatctgccagtccaccgcactggctcatatgatgagcttccaaaatcacaagtgacatctcccaaaatttttggtggggggaggaagaaatgatatcataccgcctttgaataatgcagtcgacagcaaggctgagtcccctcaagaatcagttttgtttcaagcaactattgggcacaagtttcgtgtcaagcaactattggcacaggtttcctgctattgacccaggacgctgttttcagttggcaattggatgggagtgtccttacatcaaccgcagcactccctgctcctatttgtggccacagcttcacgtgaatccctacagtagcccactcaggaaatgcgtatcaccctgacgacttggagtggccttagcgaaccgacaagataaagtcaaagggcaccatagatctgttgtcctctggcaggaggccaaattgcctctgtacaccacaactcttacgacttccttttacgtgcaactttgcatattttcttcttgaaacaagcggaccaaaggaagcctaagaaaggaagataagctggatggtgcagccttagtttatgtctccgcttttctggtctgattgtggacatctcaaccttaccacttggataaggaaattttagtagttcatgcattttagcaacacttttatccaaagaagcatctgtgttcttagaattctgttctttcagctcatcactttcacagcttgcaccagtgtttcttgtatgaatagttgagctgatctcctgaccatgggacataggttccactgaaatagatgttcttgtttttgtgtcaacagattctgcttcattttccacagtttgtactatgttttcatccctactttgctctacttttccctccactactttgggcagaattgcaacatccgtgcataatttatgactcgagtaaaatgaaagatcagatggtgccttgtcatctaccccacatgggggacactccagtgattctgaagtacctctggaagcctcattatcaacttgcattccagcagacccatctgaatccttgtcctcaggccaaatatcggcaccagaaagaatttcttgaaccaatagggtcttatcgttcacaccgtaggtgcaatcagtgtgatatttcatatcatacttctcattagctaggctttcactagagtgacctggcccctgatcctcaagactagtaccagaaagctctctgccatggagaagagaagaacatgctagcttagtactagtatcagaggtcgaagcaatattgtcacccatgagttttgtcctgcatgattctattgtatctacttccattgtgtcctgcacgaattcaacatgcttgacgataatttctgggtcagcagaacaacctgcaccaggctgcacaaaaggattcacaaaaacttcattgttttcagccttctcaagtatagcattctgataattgaaagatgctgggaagatagatgattgcccagagtctgtcacaactacagttctgtcaacttgtagtgtatcttcttgggtctgggatgggaattgttcttgatgactagggtgttctggcagtttggaaacgacagacagatcaggactatgagaattatcgtgtgaccccccccccacgcgtggggggacccccggagattgcggcgggggggc

SEQ ID NO: 6371 - DNA, 1995 bp, Zea mays
  Clone ID: MRT4577_105801C.1
atgcggcggagtcgggtgttgccgtgggccttgagtagccgcccgtgtctggggcgagccgtgcttggacccatgcatggcacttctgccacacgactaagggatagccgcgtgggttcctcgcctttgtacagtagcagagggtaccctagtttcagggtaccgacagtagccttcgggcccacctcaggggaggatacgagcctgcgggtggggccaaagtctaactggagattggcgcgctgcttccgggcatttgctgacgtagtcgccgccaacctgccttcggtcacgccgtctgccatgcctgtccctacggctgacggacacgtggcccccacgcctggcggtttcgtcgggctacgcgcgaggcgccttgctgccgccgcccaagctgaaaattattcctctgcaacggcctcgagtcgccatggcctcgctggttcatcccgagcatttccagaccgagagggcactcggcgtggtgcgccgcttgcttggatggagtgcgccggcgcacgccaggaggatctgggccggcactactcccctcggcgatctcgccgccggggagtttgtgctctttgtctcctacctttcttgtgggttggcgttgccgatctcgcccttcttcatgctgctgctggaggagctcggtcttcagctccagcacctcacgccccactccatccttcaggcggccatcttcgctcacctgtgcgagatgttcgtgggggtggcgccgtgtacctccctcttccgccattttttgtgctggtgaagtctgggaaggccaaggatcatcttggtgcgtgctacttccagacgagggcggattcggtcggcgcctacatctcctccctcagcgatgcgaggtgggaaaactggcgtgctgactgggtgatcgccagtaccgaggccagcgaccacctcgtactgccgagcgacgggccgagactcgacaagaagcaatggagggccaagccgccgttgacgttggagttcgagcccgtactggacaggatcaagtccctggcaaccggtggtctgacgtcgatgcacatggtcagcgacttcctgaggcgccggatcgcgctgctgcagacgagggcacgcctgagctgctggttcactggcttgaacgacctcggccggatccaccgtgggccaagcaccgacctgtcctgggaggaactggaactcctggtgaaggtggttactggtgagtcctttgtccttgagaccctaatccctcccaagggtgtccctccgctctgcgacgaccaagggttgagggcagcgatcttggcttggctgccgaccctcgacaagagcggcatggtggttcgccagaccggcggtcgggacccccaccgtgggatccagatccccggtgtaccggccgggggttcccaacccaccgatgcgggccttagagttccccccgcggccctcagcccctcggacaagggcaaaggagctgcaagcagttcttctgccccgggtggttccggaagggcctcctccccctctgctcccaaagtcgctcccaacggtgaatccggctcccaacagcaggcgtccgctgggagtggtgccggtgacctgcctccgcctttcactgccgaggcggcgtcgtcgggcccccaggttccgtctgccactgccgaggcagtgccgtcgggcccccggtttcaggcgacgcaggcagcgcaggtagcccaggcggctctgggctcccaggcggtggaggcgatgaagaaggcccttgaagatctctgggcggagcatcgcaccgaggtccagcgtatcgctgcatgggccgacgaggcgagctcggcactggtgccgctgggggtgagccccatcccagtgtcgaagcagtcggtgtccatctctgacgtgctcccggtgctggattctgcctccgacgcctggaccatatccttggcgcccgcctggaggctgagggtagcagactctgtcgggcggtaa

SEQ ID NO: 6372 - DNA, 456 bp, Zea mays
  Clone ID: MRT4577_105802C.1
gggccgaccaggcgtacgaactaaaccaacatcaaatcccttcctccttttttttaataaccaaccaataccctctaggggggggctcattaaaactatggccggccaaaaaaaacaaccccccaacccaaacctctcaaccactataacttacaccccatttaccatatccctctccaaactccaatttttacccattagactaacttccacaactactaccttaacccccctctaaatcacaacctaaaatctaaccgaaactatcaatttctaaaataccaaataaactatatgtcacataatcaaaaaaataaataatctcaatttaatacaacttattaaactaaaaaaccaatcatcaattaacaaaactcttctcaaataacactaattaaaccttctctatatataaacatcaacaccattcttaaccatattatttttactcatctt

SEQ ID NO: 6373 - DNA, 362 bp, Zea mays
  unsure (1)..(362): unsure at all n locations
  Clone ID: MRT4577_105803C.1
cacctctgctaccccaacaaaaccaggactacgcctcgcgcggcgctgtcatgctcccggcgttcggcaacccgctctgggtaccggaggacgtcgacgaccagcagcagcaccacgcgccgccgccgacgcccatggggttggggccggggcaggggcacgatgaacagaacctcctggccctggcctccgccgccgccatgggggccggcggtattttcagctcgccagcggtgctcgacgacgactggtacttcgaccccgtggctgtggccgncgncgccggcgctcaggggcagctgctcctggcaccgncgggcccagcgcccgacgccgggtcgcagatgttctcgctcttcaac

SEQ ID NO: 6374 - DNA, 637 bp, Zea mays
  Clone ID: MRT4577_105804C.1
cggccgcgtgggcggacgcgtgggggcggcgctgctagtgccactccgcgtacagtgcgaagaagcagctagagctgctgctgccagaagctgccatgccggcaccggagcttctgcttctgcaccagccgcagcagcagcgtggaaaaggagctggacggcgcgacggattgcaactgctacgctgacgtttcaggtcggttttccttggctcggcgcggggaaacggaggaccaaccgagtggacatcgccgtgttggctagcttgcaactgaagaaaggcagtagacggtcacatcgtctcacaaaaggctcgctcgtcttccgcacgactcttcgtaataaaaaaagagtggtattatttactatctcgtgctaacactaatatctcgcagaggaaaaagaggttgacgacggcaacaacatgagtgataggctcccccaggagaggagaatggataagtgataatggatggatgatccaaatgatattgtttattagatttgagtaagaaatagttgattatccagtgatctaaactgttgattttgatgatgtgttaagtctaaatatactttatttgatgtatttagtagaggttataagtgtggagtaatttagttgtgtgggttttag

SEQ ID NO: 6375 - DNA, 181 bp, Zea mays
  Clone ID: MRT4577_105805C.1
gcggcaagccctcactgccatgtccggagcggcgcccgacgccgagcccggccgagagggcttcacctgcagcgcgctgctcatgtgcctctacctgccgggcctcctctccaagaagaaaccggaggaggcgatcagcacgagccgccgccgacagcacacgcggcacgggcacggaaca

SEQ ID NO: 6376 - DNA, 341 bp, Zea mays
  unsure (1)..(341): unsure at all n locations
  Clone ID: MRT4577_105806C.1
ggagtgcccatttgatctttgacatatctaatagcttttgcttatgctactgaaatatgtttctccagttcgctggcaatgcattatgattttactcttaacattaatgcagtcgaggcatcaaatcaataatgttgtcagtcaggcctatttctcttaggcactgtttgtttagttggaattgaattccattctaataactataatttgtctataatttagacaaaactagttgagttaatatatttctctatgtaatatactngtatattatcctaaatcatatgagatagataattataaactacatttatattatagagaagcaagtaaagagtttg

SEQ ID NO: 6377 - DNA, 492 bp, Zea mays
  unsure (1)..(492): unsure at all n locations
  Clone ID: MRT4577_105807C.1
ccggcccaaattttacttttttttaaaaccaccctccgtaaatggggcaatggggcaaaacggggttttacacaacctttggcacaattggttaaaggattgaaaccgaaaggggggggaggctttgaaaactcaataaaacgcttgagcaaccacgggcaggtttttaaattccggggattaattccagtccacccggccttaaggccaattgggggnaacccaaagcaagggggaactaattggaacattaccggccttcttgtttaaaaaaaaaatggggggaacgggagatgggcctcattttttgtccggtaaattttaggtttcttctgcgttnggtttttaaaacgggccccttggggggccgccgggnggggcgcggggttgttccggggatttggggcccgggacctgggggcgtcccacgttgcccggtagggggtgtttttttaaccgggggtttgtattgtggaaaggttgcgtccgggg

SEQ ID NO: 6378 - DNA, 352 bp, Zea mays
  unsure (1)..(352): unsure at all n locations
  Clone ID: MRT4577_105808C.1
aatcagcaggaaattttagtctctccatttttctccggttttatgggttccaaactaaaaccagctctaaccggtaatataacccaatcattttatgttaaggaaataccagggtccatactatgtcctgtggggcggggggttgtgatgttgttgatatatttatatacgtagtttatatatataaagaaatatcctctatactgtacattntncaagagaatcagtcnggcagatggattcaggaggtcagtgtaacgtcgctgtgcctggtcccgttctccctccgtntccctgncccgggcgggggtggctcctccgtgccctcctggtttcttgtttcctctgggcc

SEQ ID NO: 6379 - DNA, 128 bp, Zea mays
  Clone ID: MRT4577_105809C.1
atggcgcaccagacaatgaacagtgcctatccggtgcaccaccggactgtccggtggcccaaaagacagaagctccaacggtcggaatccaacggccaggtgacgtggcaggcgcaccggactgtccg

SEQ ID NO: 6380 - DNA, 482 bp, Zea mays
  Clone ID: MRT4577_10580C.1
cacggagctcggaattcgggtggaggtcccagccgcatttctttggccacggcgactgaagggcgctacagtcagcggctataatagctcccctactagccagctatccatccattcggggggaatgcggaggctctcctgcggctggctcgagcaaatccgatgcagcctactgcgtacagctgtgggagaccaactgcgtcgaacctgaggctgcctggtgaagatcggaaggatgcaacccttcaggaagtccaggacaccataatggctggtgtgaccgagtgtgctacagacctggatgacagaggtggactgtcaagcgtgaagagccaaaggctggtcaatgttactgctgatcagaagcatgcaactagggcggatctggtatgcctactacaatctatcgcacagggtcttgatgatcctgtctgcgtaactgtgtgagatctctagaacagttatgatcatatcgatgggcc

SEQ ID NO: 6381 - DNA, 207 bp, Zea mays
  unsure (1)..(207): unsure at all n locations
  Clone ID: MRT4577_105810C.1
agagatagtgccatcatgatttnttagggggggtcaagtgcgttttcgaggctttctnntactgccagtagatcccatacctcctcgatggcatgtaactgtaccgggctggcacatttgtgaccgggaaaccatttctctgcacagcggtcgcacattttaaaaagaaaaaaaaaaaagggggaaaaaaccacctagccagccggg

SEQ ID NO: 6382 - DNA, 559 bp, Zea mays
  Clone ID: MRT4577_105811C.1
aagaaaaacatacctttttatttatgtgcaggggcgaaagctacccttttttactaacgactcggcctttcaatcaataaatcaaggggtgtttttttccgttcatggagggaaatacccgaaaaaaaaattaaaaaagaaagaagccggcaaggaccatgacccaattccaatcactagccgggggagggcctccgatccttggccctggacggttgggtgcccactttgcccccacccacggggtaaggccgaaggaacgggtccacccccccgagctttttggacacgttgtaaatgaaccccccgttgccgcctgccttttttttggggaggggccggccccccaatgggggagcgtctttgggctgcgggggcccccacggttccttaagtttaattttaagccgaaaaagttccattttgagctcctcgttctcccggtgaagttgaaacatttcgtccggcaccctccggccgggccggccttggaggctcggccccggggtcgggaactcccccccaaaaaacaacaacgtagggccctcccccaggcccc

SEQ ID NO: 6383 - DNA, 474 bp, Zea mays
  Clone ID: MRT4577_105812C.1
aaaccctttgggtaaaacccccggaccacagcagaacaaacagggggcttttatgaaagggaaccccggatacaccccccccaaaaaacagggggcccacccaaaaaaaaaaaaaaagtccacccaaaggggacaacccggccaaccaacccaaagaggacggggagaccaaggcccaaaccccaaacgaacgcgccccaacataccccaagccccaaaagcagccggaccaggaaagggccggggacctgagaaaccagggaccaacccgggatgaagcagacccgggaccccccagccacagagcaccgaagagcccaaacacccaccgccaagaaacacaacgcaaaacgcacacgaccagaacacaacggcaaacaagacgcctccccccccaccaaacccaaccccccccaggccacacacccacaagcacaccgacccccacacccccacagaaccccccccaacacc

SEQ ID NO: 6384 - DNA, 408 bp, Zea mays
  unsure (1)..(408): unsure at all n locations
  Clone ID: MRT4577_105813C.1
ttgggtagccaagatattagtccctcctctgcgctgctaggcctttgtgtgagcgcagcaagtgcgttgattacttccacaatgctcactggctcctagtgccattattccacaggggctgccaccagctacttgaatgagctttgaacacctatctgtgcaagccaacatgcaacaacaagcgcttggggcgagtgtcttactagaagctattgtccatttgcagcaacaatgacttgctacatctaacaatacaaggcatcacaaggcatcatgaacaacagtatctaccagcactgagccagctagccatggtgaaccctgaggactacttgcaagagcaggtggttgcatgcaacccacttgctgtggcgaacgtagatagaaaccagnaacaacaacagctac

SEQ ID NO: 6385 - DNA, 304 bp, Zea mays
  unsure (1)..(304): unsure at all n locations
  Clone ID: MRT4577_105814C.1
ggttgagaagtcccccatgctaatgaaagatctgaagatcagggcccacaacatcctctgtgtgacgagggcnatcctcgtgacaccacgaatactataactcctttttacatttggatttctgatctcggctctgcatgatctatctcaaatgtcttacttatgggcgcgttatgttttgtctcacccttggcactttattagatctttcttgtaacttcctctcctctgattagcaaccttgtaataacattggctcttatcataattgacccgtagctgttgtattcgtggctcagactgt

SEQ ID NO: 6386 - DNA, 750 bp, Zea mays
  unsure (1)..(750): unsure at all n locations
  Clone ID: MRT4577_105815C.1
ccggccggggtctcctcttcttcccccgcctcggagcgccagcggcttcatccgatctccttctcacctcctcacctcaggcgcacaccgatcactctcttccctcctccagcagtccagctcacacccaccgccccaccccttccactcaaatccagggacatcgcagatccaccggctctccgatccgctcgcctccgcacccgcccgatcggatcccgcaggttttgtgcccgccacgagttagatggtttacgatggcgccgtgaaggaccaggaccaggagaccgtggcggcgagcactgcatcggcggcatcggtggtggcggtgtcggaggcgtctcccgcgccggtggntggtggtggtcagtgcgaggccctcggcgaggccgccgcacgacaagcgcctcggcgtgcgccaccccttgaagcaccgctggtttcgtgctggtgggaagatgatgatggagcccggaggggtgctgcctgctcacgcgcatgaggaggaggaggagggagccagcgaggtggaagaggaggagttagtggaggcggaggcctcgtccgcggagacggtgacgtggggcgctgaaagtggaggtgtcgtccgcgccggcggcaggggtgcaggagaatgaacgcggaggtggagggtgcgnaaaatggaggtgtcgcctgagcctgcggtccgctgtggggggcaccgagttggagccccagcaggacgaacgagacgaggtctcgtccgtc

SEQ ID NO: 6387 - DNA, 217 bp, Zea mays
  Clone ID: MRT4577_105816C.1
cttgaaatggtcttgaaatattatagctgatcaaatcttatataaactagataaacaattcgactcggaattgttctatgcacccatttaattggaccttgagggagtatgctcttgcagcatttgcaggtaaatcatttttttcgctcattttctagaaacaaatgaaattaaacacacatatccctccaatcgcttcgatacgtaccgtacgcga

SEQ ID NO: 6388 - DNA, 1081 bp, Zea mays
  unsure (1)..(1081): unsure at all n locations
  Clone ID: MRT4577_105817C.1
gtaattattaatggtatcataggcaccattattcctcttcctgtatccttaggatagtataggtgtattgctgtggtaggtcttttctataattcagatgtagttgtcttttgaactgtttgtagaacatcgtgttgcctcctttttgcagctattgcgctctctgaagatcacaagccgaacagaagtgatgagaggaaacgaatcgagagtgctggtggaatagttatgtgggctggtaaggtctacactaaccacaccaagtacactcacatgtttccatgattcaaccaaacgatccttgccatgatcttgtattcttgttggcttgttgctcatagtggccaatgaacttctacaggaacttggagggtaggtggtgtacttgcaatgtctcgggcatttggcaaccgtctcttaaaacaatttgttattgccctcggcgggagaccctgagattcaggaacaagaaataaatgatgagttggagtttctaattatagctagtgatgggctgtgggatgtggttccgaatgaggacgctgtttcacttgtgaagatggaggaggatcctgaggcagcagcccggaagctgacagagactgcgttctcccgtgggagcggcgataacatcacctgcatcgttgtgaagttcgagcatgacaagcctggtggcggcggctactcgcctccaggcgacaagagttgattccatttgctgttggttatacgctttgccggtgtcccttttaccctgggccggattttgctggccccatccatggtgccccccgcggctggtacttgaggaaggagctggttcatgttcgtcgcctgtcttgtctatatttatgccactaattttggtctccggtcagtgggttaccggcgttgttgtagacttgtagttgctgttgcctgttgtatcaatgagagctaattctgtgaggcgcagggnggatgggtgcactttgagatgttcccggaccgatctccttgcaaacacctccgctgcacggnnatgtttctgttatatacagatcattgtccttgcacggccgtcagccaaggacgaatggct

SEQ ID NO: 6389 - DNA, 1474 bp, Zea mays
  Clone ID: MRT4577_105818C.1
ccggccgggctcccggggtctctcttcacttgcctcgcgtgggcaggagcgccagcggcttcgtccgatctctcaccacacttcagccacgcacactccctccttccctccccgatcactactctccctctccagttcacacccaccgccccacctctcccactcaaatccagggccatcgcagatccaccgcctccccgatccggtcgcctacccagccgcccgatcggatcctgcagtgtggatggaacgctgaattgtggatattcaagttttagaggaaaaagggcaagcatggaagatttctatgatataaaatcatctaaaattgatgataaacaaatacatctctttggaatttttgatggtcatggcggttcacgtgctgctgagtatttgaaggagcatttgtttgagaacctcatgaaacatccagagttcatgacaaacacaaaattagcaataaatgaaacatataggaagaccgattcagagttcttggatgctgaaaggaattctcatagagatgatgggtcaacagcatcaacagcagtgctagttggtgaccatctttacgtggcaaatgttggagactcaagggctgttatatcaaaggctggcaaagctattgcgctctctgaagatcacaagccgaacagaagtgatgagaggaaacgaatcgagagtgctggtggaatagttatgtgggctggaacttggagggtaggtggtgtacttgcaatgtctcgggcatttggcaaccgtctcttaaaacaatttgttattgcagaccctgagattcaggaacaagaaataaatgatgagttggagtttctaattatagctagtgatgggctgtgggatgtggttccgaatgaggacgctgtttcacttgtgaagatggaggaggatcctgaggcagcagcccggaagctgacagagactgcgttctcccgtgggagcggcgataacatcacctgcatcgttgtgaagttcgagcatgacaagcctggtggcggcggctactcgcctccaggcgacaagagttgattccatttgctgttggttatacgctttgccggtgtcccttttaccctgggccggattttgctggccccatccatggtgccccccgcggctggtacttgaggaaggagctggttcatgttcgtcgcctgtcttgtctatatttatgccactaattttggtctccggtcagtggggttaccggcgggcagtgcttgcccatttgcatgtttatcgtgggttcatcgtcctatacggcattgttgtagacttgtagttgctgttgcctgttgtatcaatgagagctaattctgtgaggcgcagggggatgggtgcactttgagatgttcccggaccgatctccttgcaaacacctccgctgcactgtatgtttctgttatatacagatcattgtccttgcacggccgtcagccaaggacgaatggcc

SEQ ID NO: 6390 - DNA, 972 bp, Zea mays
  Clone ID: MRT4577_105819C.1
ctcgaggccggccggggccgggcacaaggaagactctcgcatcccggagtgttccgccgcccgcacacgtctctcctcttccgttcctctcctgcctccagctctccacggtctctgacccgcacaactgaacccgcgatggcgcgccgcctcctcgtcgccctcctcgccgcgtcgctcctgctcccgctcgcccgcccggactcctcctcgtccccgcccgacaccaccgcgtacgacgagctccgcctccggggcttcccgcgcggcctgctcccggccaacgtgcgggcctacacgctcgactccggctccggggacttcgccgtcgacctccgctccagctgccggatcgtgctgcccgcggggagctacctcgccgccttcagcgaccgcctcacgggccgcctcgacgaccgccgcatctcgggcctcgacggcatccgcgtcagggccttcttccgctggtggtccatcacggggatccgcgccgatggggaccagctcgtcttcgaggtcggctccgtctccgccaagttccccgcgcgggacttcaacgccagcctcgactgccccgcccaggcggcgtcctaagtcaaggaggtatcctgtcgcatgttccatgacatgtgacattctaaaggggcagttggaagccaagcacatcaatgtttttaatttcatctgtctttattgtaattgtataagtttacaatagatgcatagaacagactggatcgataaaagcgccttcacagaccaaaaacccggtatcacggtagtggttcgtgcatttcgttagaaatgccctacgtcttattttgaaaagttgtgcttgtatatcttacttattgacaatagctgtacttataagactacttgcataaagaagaaaagtgaggtgcaaggccgaaaggcccctatgcgctaaatacaaatgcctttgtgaatagaaaacttttttttgttatc

SEQ ID NO: 6391 - DNA, 1371 bp, Zea mays
  Clone ID: MRT4577_10581C.1
atggctcgaagaagatcccaaaagaacaagaagaccaaggagaacaaggaggaagaagaagaaaatgaacgatggagaccaaacgatgaatccacctctccaaaaggtttgtcttcccatttcgattcccacatatgttctgtggctaatgaaaatgatagcggaagcacaaatgaggatgatgaggatgaaagaagcttcatgcaactctacgctcatctaagcctagaagataaggcagtcatgctcaaacttctaaaaagagcgagagagcaaagcgaagctcgtcaaatgctagaagatgttctctccatgaaaatgctacactttgacgagttgactaaagaacatgaggagctaaagtgctctcatgttgatttggtccaaaggaatgccttgcttaaggaccaagtagaaaaggtaaaagatgataatctagcttttcaagaaaaatatgatatgcttctatattctcatgaaaatcttatggatgatcatatcatattaaacattgctcatgaggttgtaatagaaaacttaaaatcccaacaacctcactcatgcacatgtattcaaattgaaactatattaccatgtgctaatgcttgttgtccgtcgacaagcaaatcttcctttgagctagaatttgcaggaacaaaagatgatacatatcaaaagctcaaagaagaaaatgagaggctaaagataagcttgacacaacttaaagggaagtgcattgctcaaccttctcaagataaccatgatcacatggtgaagaagcttgagacaggaacaaccgcggcatgcactaaatcccttgaagaaaatgtcaaggacttgaggattgtcaagaggaaggaacaaaagaagaaaatcaatgcctctgacaaaagcgtcaaccatgcctccatgcaaggtaatatccaaggtaataatcaagtcacacttcatactaagagaagtaagaagtgtagtgaatgctttgaaaagggacactcgattaggtcatgtccctatattaaaaatgacttgattactaacaaggatgataaactttgttttaaatgctcaaagaagggacacttaattaagtcttgtccctatttgaaacaaaaaggcatagtgttagaaaagaaaatattaactaaccatgtagcaagcaagaaacaagaaaagaagaaatcttcaaaacttgaagagcgcctttgctacatatgccgaaagaagggacatcaatgcaaggattgtcccattggtaactatcccatctctagcctgtcaattatttcacatgtaactaggcaacccaaaattgcaacttgtgctagaaaggtaatgcgtttaccaaatgctaacacaaaggactcttga

SEQ ID NO: 6392 - DNA, 1489 bp, Zea mays
  Clone ID: MRT4577_105820C.1
ccggccggggtctcctcttcttcccccgcctcggagcgccagcggcttcatccgatctccttctcacctcctcacctcaggcgcacaccgatcactctcttccctcctccagcagtccagctcacacccaccgccccaccccttccactcaaatccagggacatcgcagatccaccggctctccgatccgctcgcctccgcacccgcccgatcggatcccgcagtgttgatggaacactgaattgtggatattcaagttttagaggaagaagggcaagcatggaagatttctatgatataaaagcatctaaaattgatgataaacaaataaatctcttcggaatttttgatggtcatggtggttcacgtgctgctgagtatttgaaggagcacttgtttgagaacctcatgaaacatccggagttcatgacaaatacaaaattagcattaagtgaaacatatagaaagaccgattcagagtttttggatgctgaaaggaatactcatagagatgatgggtcaacggcatcgacagcagtgatggttgctgatcatctttacgtggcaaatgttggagactcgagggctgttatatcaaaggctggcaaagctattgcgctctctgaagatcacaagccaaacagaagtgatgagaggaatcgaattgagagtgctggtgggatagttatgtgggcaggaacttggagggtaggtggtgtacttgcgatgtctcgggcatttggcaaccgtctcttaaaacaatttgttattgcagaccctgaaattcaggaacaagaaataaatgaggagttggagtttctaattatagctagtgatgggctgtgggatgtggtttcgaatgaggacgctgttacacttgtgaaaatggaggaggaaccagaggctgcagctcggaagctgacagagaccgcgttctctcgcgggagcggcgataacatcacgtgcatcgtggtgaagttccagcatgacaagccgcgcagtggcggtggcgattccccttcctcgcctcgtctctaggcgacaggagttgattccatttgtttttggttatacgtgttgtcggggtcctttttaccttgagccggattttgctggcccccgaggctgatacttgagaaaaggagtcggttcatgttcattgcctgtcttgtctatatatgcccccctccctaattttgcttctccggtggcagtgctgcccattggcatgcacatcgtcggcattgtcgtagacttgtagtttgctgttgtatcagtgagagagagagttaattctgtgaggtgttcattttgagatgtcactggaccgatcttcagtccagctagatccgtaagatgtgcagtgcataatctcgtagaggtgatgatattcgtcagaagaatcagtgagagattaccgtgtcacattactgtgtttttctaatgtaatgggtgtactgtttctatggaagcaaaaaaaaaaaaaaaa

SEQ ID NO: 6393 - DNA, 1823 bp, Zea mays
  Clone ID: MRT4577_105821C.1
acaccgtccgcgtgggtgcctcgcggccggccggggtgggccctcgaggcgcggcgtcggacttccactggagggccacacttctcttttgaggaccagtccaccgtccactcccagagtccaaaaccctacgatccgcgccaccatgccgcgcctcgccgccgccgccgccgccgtctcacgccgcgccggcgaggccctgcgccgcggcgcgtttgggggactgcggcctctctcctccctgcaaccgttaaacgccgcctccagcgacgaggtgctcgttgaaggaaagacaagtgcgcgcgctgccgtgctcaaccgccctggctacctcaacgccctcaccaccaccatgggagctaggctcaataaattttatcaatcatgggaggacaacccagacattggctttgtcatgatgaagggcagcggccgagcattctgtgctggtggggatgttgttagattacatgaacttatcactgaaggcaagctggaggaatgtaaggattttttcaagactttgtacatgttcatttattttctgggcacgtacttgaaaccacatgttgccattcttgatggcattactatgggtggtggtggaggtgtttccatccctggaacattccgtgttgcaactgataggacagtctttgcaactccagaagttcatattggattccatcctgatgctgcagcctccttttatttgtcgcatctaactggccatgttggggaatatgtggccttgactggtgaaaagcttaatggaacagatatgattgctcttggcctcgctacacactatttcatgagtggccatctggatctgatcgatgaacgacttgcaaagttagtaactgatgatccatcagttattgattcgtcccttgcacaatatggagacatggtttatccggacaaaaatagcattgttcataggctggaggtgattgataaatgcttcagccatgacacagttgaagagattgttgatgccttggaaagtgaagcagccagctcaaatgaagaatggtgtatcttggcgctgaaacgattgaaagaggcctctccgttagctttgaaggtctcactgcgatcgatacgcgagggtagatatcagacacttgatgagtgccttgtccgtgagtaccgcatgtccatgaatggaatctcaaagcaattttctcatgaattctgcgagggagtcagagcacgactagtcgacaaggacttcactcctaagtgggatcctcctgcccttgagtatgttacgaatgacatggttgacgcatacttcgcacctcttggcgattcggagcctgagttgaagctgcctatagaatcgcgagaggcatttgtatgatcacaaatcattccaagaaccggatcattgcaaggaccggactgggacctgataaacgtgttataatctgtgtagccattatttttggcagcacaaccagcccgattggaccaactattcacatgccgtatactatcttcactggcttacccatacatatattcaaactatactttagaaacagtgcaatgtaccatgcaaaacggtgcaacagtgttttggttgaccatatgagtctaacctagggtagttcatctatatggttaccaaaaataccgttttttatgtatattgtactgtgtagagtatagtttgaatatcggtataagtatgagtaagctaccagagatgaggttttacgcggtgtgaaactcagcaaatcatccactgatttgttcacatgaatggaaacgaccagtggagtacgcgaatcaaaaaaaaaaaaaccccccac

SEQ ID NO: 6394 - DNA, 358 bp, Zea mays
  Clone ID: MRT4577_105822C.1
tcgccgcagtaccgtccggatttattcccgggtcgacgagctcactagtcggcggccgcccttttttttttttttttttttttttttttttttttttttttttttttttttttataaacaaaaaaaaacaaaaaattataaaggtgttgtcaacgaacaacttaggggggggggaataaattcaccttatacaggaccaaaaaacggagaaacaagtaaccgccgccccaaaaaaagatatgattggcaacacccccgggaggacaaggaattaggaggggaaaagcaagttaacaaaaggtggttgcaagggcataagtttccggagggggggggttgaaaaggccaaaccgggccc

SEQ ID NO: 6395 - DNA, 141 bp, Zea mays
  Clone ID: MRT4577_105823C.1
cagcacgatatcacaccaagctttcacttacttgaaccatgagaacgccctccgggtgggggttctatacacgtgccgctacctttgccaatcgctggcctttttaatattcacaatgacttagatcgatgggctcctgat

SEQ ID NO: 6396 - DNA, 780 bp, Zea mays
  unsure (1)..(780): unsure at all n locations
  Clone ID: MRT4577_105824C.1
ttttttgtcacgggggggggggggggggggggggggggggggtacagcatataagagtataaagaggcccttcccattctcacgtagtgatcaaaaannatggctctgtagtaatacaaaacaaggcccatttgcatgatatangaaagattacccaaaaccttanngcaacttaagtgcggtaaggggagggnntaatatgggcnnntaaatgaggggccaatttatgcagtannnatcagtacnnccaggtaccccccnnacctagtgnnnggctgagggacgatgnncctgttaacnncgtgggtcnnttcccnnagattcnnccccnacnaanncggtctncnnacccnnnaaccagttttncaacntannagcngttnttagcnntaacnagnntgacnngcatgcccannacagcggttcgcgnnncgtcgagcttgtnntggcccgtataaatgggttggtgnntaaatggcgtaacccaanntgtgaannngaaactaaagttttgtacaatcacacgnnccttgttgtgttaatcatgcccttggtagcctnntgcaatagttngggtnntaaggctcgacggcccctaggaaactgcaggacatattagttcaagccccgtgtgattcccgtagcctttgtatnntaagactattgtgggtagtaagtcaaagannannagcctaccataggcaggacccccagaaaatgcntgccggagccactgcttgaggaagccgggggcgtttggaaaagcgagtttttaccctt

SEQ ID NO: 6397 - DNA, 523 bp, Zea mays
  Clone ID: MRT4577_105825C.1
gccggccggttctcggatcctgcgatccataattgcccccaccgcctcctagagctattgtctggggctgatttctacccacggattgtgctgtctcgtcttatcctgatgcagtggcttgctatgctacggaggtattgggaggtctcgatattgatgtccgtcgacgcgacgagcagaagaatctaccttccgatgggcgagcgcaacagactgctccaaagttggtcccttgtacctggatagtgtatgtatgctgacatctatccacattcaactccagagatatcatatgacttcccgttccatgtctcgccatcaagatctctgagatgtagattgcctcttcacctcgaagagggtcttatggtgaatagcatattagaactcttcttatgcggacacactgtgaaaatccttgatgtagtccgattgatctgctacgtcaagatgcactgtctgcttctccgaggactggacggtcttgatcctggatgaatatcgagagaactagatgctgtac

SEQ ID NO: 6398 - DNA, 267 bp, Zea mays
  Clone ID: MRT4577_105826C.1
cacaggaagcgcatggagaaggacctgaacgagctgcagactctgatcgaggctcacttcgagaacaggaagaaggaggaagaggagctcatttctctcaaagacaggatcgaaaagcgtcgggcagagcgggctgaacagcagcgtattcgcaatgaacgagagaaggaaaggcagaaccgcctggctgaagagagggcccggcgtgaggaggaggagaacaggaggaaggctgaagatgaggcccggaagaagaaagctctgtcc

SEQ ID NO: 6399 - DNA, 474 bp, Zea mays
  Clone ID: MRT4577_105827C.1
cccacccataaacgggggggggtttaaaattttccaaatttaagggaaaggggaaaaaaaaggggggccagccccctatttggtttttggccaccaaagcgaataccttaaaagaaattttttaggggccatccacatcccaaaaaaaacttaccccttaggggccctaaaggtaaaaagggcacccccacaaaaaaaaaaaagaccccctttgggggggggggggaaaaaccataaccttgggggcgaaacccccccccttccgggggggggggaaaaacaaaaggggtttttgtaaaaaccaggttgggaattttggggggttcccgcttggtgccgccccccctggccccctttattattcggggcccttgtgttgggggccacccggcccccctctcccccggggggatggattcctcggggggcctcatttggtgaggggccccttgggagacgtttcccggggggggg

SEQ ID NO: 6400 - DNA, 643 bp, Zea mays
  Clone ID: MRT4577_105828C.1
tgagctcgagcacatgcgttgaaggcggaaagctgcagagtgggaccagcaagccgcgccagtgtacatgtcgagctgtgtcacacgtgcgctcctctcgtccatcctccacacgtgcgctcaaaccgagcttgtccgcggaccgcaccctgtctggctgtctgcacgcatctccaccgtccgatccccagccgatggcggcggagaccgcggcggacgaccacgatctccggccacccctggcggatggcgccgctgctgccggcgtgggcgacgcctccttggcggcggcggcgggcgcggcagaggcgctgatgagcgcgacgtcggagcagctcacgctggtgtatcagggcgacgtctacgtcttcgaccccgtcccgccccaaaaggttcaggctgttcttttggtacttggagggtacgaggttccgcctggtttggtaaacatggctgtttcttcagcaaatgatgagaagaatacaactgtggctgctagaagggttgcttccttaatgagattccgtgagaagagaaaggaaagatgtttcgataaaaggattagatacagtgtgcgcaaggaggttgcccaaaagatgaaacggcgtaaaggccaatttgctgggagatcagattttggcga

SEQ ID NO: 6401 - DNA, 258 bp, Zea mays
  unsure (1)..(258): unsure at all n locations
  Clone ID: MRT4577_105829C.1
gggatgcgatcataccagcactaaagcaccggatcccatcagaactccgaattagggtgcttgggcgagagtagtactaggatgggtgacctcctgngaagtcctcgtgttgcattcctatgccacggccgcccctgccgcacccggccacccccggccccggccgcccttgccgcggacgcccctgtgtgagccgtcgncncgcactgcggcgggggggccctacatgcagtcaccacgggagctcgtattgctcga

SEQ ID NO: 6402 - DNA, 335 bp, Zea mays
  Clone ID: MRT4577_10582C.1
taaggaatctaaatataaagcattatgttttcattgcctatgtcaatgaacgggtggggagctaattgcatactagctgatgcccctaaagctcaagcacatgccagcaatcattagacagaacaacgaaaagtatactaagccacttctagacactgtctcatctcaatcatcagcagcatattgaccacaaatatctgaagagccacgtgcttgccagtctgcataggagaagcatatgtgaaataacgatctgacttatctaatcgactcacagctacagaagcatcatgatccaccatatcaccacatatccttaaagaacgctagatatc

SEQ ID NO: 6403 - DNA, 405 bp, Zea mays
  Clone ID: MRT4577_105830C.1
cccaccattggatttaacgttgaaactaatgttcttgaacttgctaatttacccgcagagcatctaaagatcttcagagtgcgcggaggaccttttaatgctaaaactatattgcactgaccttgctccggggagcatagaatgaataataacaccgtgcactctgtatctgctaaccatgcacagctgtctgagcttttgcggtctgaatcactgggagtcctatctgaagctcaagatctaactaaataactacctacactatggcgtcatctacctttaatacgatcatatgcaattattgcatgttgttccatcgactacaccctcaatcgccatagtcccaccctgttccttttcggaatctaaaagggccctgtccatcttaaggtgcttctcgtactg

SEQ ID NO: 6404 - DNA, 1459 bp, Zea mays
  Clone ID: MRT4577_105831C.1
tagtcgtccgctcctgcgcgccgacagtccggcttctcctggctcctgcgcgccgccagccgtcagtccgtcaccgattggagatccttggaaacctgcgcgccgccagcccgtcaccgcttggagacccgctcatccgcgctttcttttgtccccccctcgggtcgaccccgcgtccgctcctgcgcgccgccagtccggcttctcctggctcctgcgcgccgccagccgtcagcccgtcaccgattggagatccttggaaacctgcgcgccgccagcccgtcaccgcttggagacccgctcagccgcgcttccctgcgaggcaccccccgtcccgattcctcctcctcctcctctcacctgcgtggctgcgccacaattgccaagctcttctactcctgttcctcccatggagctcgcagcgtctgcttccgcctccgtctgctctgaggtcgcgccgtcagccagcccgtctgccgtcgtgaggtactgagcattgtttcaagtggttattaggcttcatggatatgtctcaagagcaagaacaggattttggcgtactgctgaagcaaggtgcagaagggagggtatttgcttcgacatttgtgggacgaaagtgtgtaatcaaagagcgtttttcaaaaaagtaccgacacccattgttggactcgaagttgactctaaagcgcttaaatgctgaagctcggtgcatgacaaaagcaagaaggcttggtgttcctaccccagtactttatgctgtggatccagttctgcatactttgacctttgagcatgtggatggcttgtctgtcaaggatatacttcttaggtttggttcagatggggtcaatgaggaacgcctgaatgatattgccacacaaataggaaatgccattggcaaactacatgatggaggccttgttcatggtgatttgaccacgtcaaacatgataattaagaacagtaacaatcaattggttcttattgattttgggctgagtttcacttcgacaattcccgaggacaaagcggtggacctatatgtgctagagagagctttgatttccatgcattcgtcctgtggggatgtgatggagaaaatcctggctgcgtacagaaaggcttcgaagcaatggtgctccacccagaacaagctggctcaagtgaggcaacggggcaggaagcgcaccatggtcggatgaatggagaagaagaaaaatatgtggcatggaatggatgtatgttattagaaagaccgtcgtctaaaacgagagtgatgtaccaccattgctgtattttttttagcggtgagtggctttggctgctgtaacgtttgtgaaatctggaaatatgttgcctggctgcaccatttggtcagaactcagaagcagagtgtcgtttcatccggaagtgggagaagttttaaaaaaaaaaaaagggcggccgccaccgcggtgga

SEQ ID NO: 6405 - DNA, 358 bp, Zea mays
  Clone ID: MRT4577_105832C.1
atggatttgtgggggcggcggccattgctttgctgctccaatggtcctcagttctgtagctgggcaacaatcagatagacgtacgatcatggatccacggagcgcccctcctacctgggcatgccccagcgtcgccgtggcggccttctacggcaccatgggccggcgtatatggctggggaacgccatgctcctcgcgagcgcggccatgacaggggtcatgggggggggaggcggcagttccttccgtcacagaaaccggcacgcgataagtccgataattgtttgttaaatcaacacactattcttaattagggtaacctacctcatatgtatgctataacacaggcccaaagac

SEQ ID NO: 6406 - DNA, 1418 bp, Zea mays
  Clone ID: MRT4577_105833C.1
cgcgccgtttttccggcttctcctggctcctgcgcgccgccagttttcatcctgcgcgccgccagccgtcagcccggcaccgattggagatccttggaaacctgcgcgccgccagcccgtcaccgcttggagacccgctcagccgcgcttccctgcgcgccgccagccgtcgccgatccgtggccgcgtccgccgccgccagctctgaggtcgcgccgtcagccagcccgtctgccgtcgtgaggtactgagggttttgacagataacggcaatcttcttccaacacactgacatgatcagccaatgatgctacgagagctagatatgtgttcaactcagcgtttagttctgcatgttcgtcctgaatgccagccaactttttctgcaactcctcaatcttgttgaggttcatcgctcaaccctgtcgcaaccgcaacgtccatctccccgtcctcgctgcccggaggcctggcacacctcccagtagcagcggcctcccgaagcattgtttcaagttgttattaggcttcatggatatgtctcaagagcaagaacaggattttggcgtactgctgaagcaaggtgcagaagggagggtatttgcttcgacatttgtgggacgaaagtgtgtaatcaaagagcgtttttcaaaaaagtaccgacacccattgttggactcgaagttgactctaaagcgcttaaatgctgaagctcggtgcatgacaaaagcaagaaggcttggtgttcctaccccagtactttatgctgtggatccagttctgcatactttgacctttgagcatgtggatggcttgtctgtcaaggatatacttcttaggtttggttcagatggggtcaatgaggaacgcctgaatgatattgccacacaaataggaaatgccattggcaaactacatgatggaggccttgttcatggtgatttgaccacgtcaaacatgataattaagaacagtaacaatcaattggttcttattgattttgggctgagtttcacttcgacaattcccgaggacaaagcggtggacctatatgtgctagagagagctttgatttccatgcattcgtcctgtggggatgtgatggagaaaatcctggctgcgtacagaaaggcttcgaagcaatggtgctccacccagaacaagctggctcaagtgaggcaacggggcaggaagcgcaccatggtcggatgaatggagaagaaaaaaaatatgtggcatgcaatggatgtatgttattagaaagaccgtcgtctaaaacgagagtgatgtaccaccattgctgtattttttttagcggtgagtggctttggctgctgtaacgtttgtgaaatctggaactatgttgcatggctgcaccatttggtcagaactcagaagcagagtgccgtttcatccgg

SEQ ID NO: 6407 - DNA, 128 bp, Zea mays
  Clone ID: MRT4577_105834C.1
ctacgtcgtgggccggtactagggactccgaactcgtcactcagccgtcggaccggtcctcaggcatatcttgatagctacgccagataggtatacagtcaccgttccacccagactatgacccgcac

SEQ ID NO: 6408 - DNA, 335 bp, Zea mays
  unsure (1)..(335): unsure at all n locations
  Clone ID: MRT4577_105835C.1
gttcatcgagctggataaactattcatcggcgagatctcgaacaaccatctctcttgcacccttgcacccctctcgaggctcgagaacctggttatgctcaacatgtactacaacacgttgtgtggtgacctgtcacacacgcccttcttccagaagcttactctcagacacatcaggctcaaccacctgctcgtcgtgggcgccggccatgacnaggccttccatcacgcggacgtttcggctctgaggctacccatgaccatccttgtcatggtgagcgctctcctactgctgacggacacctacgtgctcgcgcgctcgcggcgccgcaacg

SEQ ID NO: 6409 - DNA, 691 bp, Zea mays
  unsure (1)..(691): unsure at all n locations
  Clone ID: MRT4577_105836C.1
tgtatgagaccaaactgccgatcttgctaccgattccgttccaaggtttcccgtcatttatctcggtcaggggcactaggtacaaatatattaactcaactgattgactaatcatggaataataagcctgattaacagaggactttgttggctctggtggctttgggggcgcactctaataaagctcggtaggaggttataagctgtatggctgttgacgcttaggagattatacggttgttcattacggatggtaagccctggtcaatattgactgcgctaacttgatacctgataataactctggctcctcactcgtggataataattaaggaattaaggctaataataagttggcctatagtgaattagataaattagtctaatataatactaataatacggttgattactatgcacttaatgacagcgccgcaatttgcgtcttgatggctaatactaccgctggctagttaatttatggctgtgcctaaatcgactgctagattaataataataataaggctaatacgggtgcttactctgtacgtaatgacttagccgcaatttgcttcttgattgataatactaataatgctgggtagtgactttgtgtcngcgcccgaagctattgatagattgctaataataaggctgctaatacaggcgattactgtgcatgtactgactg

SEQ ID NO: 6410 - DNA, 447 bp, Zea mays
  Clone ID: MRT4577_105837C.1
gcgtgtggtttttttttttttttttttttttttttttttttttttttttttttttttttttttttttttttttttttttttttccaccccaaaaaaaggccccggggttggcaaacagtttcgggcccccgttttttttgtcccccggggttttatgggggcccactacccctaattgccccaaccatccggggggcaggaaaaatgggcggccaaacaaaaaggcagggggcataaattgtaacaagccggccaggggccctattccccgggggcaaacttgatccccttgccaagggaaaacttgaccccccccttggggtttcccaccccctttttttcaaactcgtggggctcacccaaaccaagcacttcctccactccatttttgccaacccaaaccttgggggcaaaaaagggcacctctgccccagttgattgcccaaa

SEQ ID NO: 6411 - DNA, 247 bp, Zea mays
  Clone ID: MRT4577_105838C.1
tttcttttcaagcagggccatgaggtatatgcatgagccattggcacacccctagttgcatgctttgcacaagctgcactaagaggcgcattcaaagtagtctggatttacaaacagcctctgacataacgtactgactatgccatgaaggtatggaatccatgtacaaaaaaatgcttcacagtggatggcactgaagggtatgcgttgggaggcataatgaccggtgtagttgagcaacgtccaa

SEQ ID NO: 6412 - DNA, 871 bp, Zea mays
  Clone ID: MRT4577_105839C.1
ctttcctacgcttatgttcatttttttgatgaaatacttacttgactcttcttactccgagatcagatgccttctttgatttgaaagattcaagggcccgcattcaggatgttctattgaaatcaaatgtccttctcgaagtccaaaggtctttacatgagaatgttctgcgtgttgaagatgtccccattgatcctacttctcaatctacatcagctcctgcacagtcttctcaaggcctaaattcccaaccattgtcttctgatgaggcaattggtggaccagctggactttggcattttatatacaaaagtgtctaccttgaccagtatgtatcgtctgagtttgccttgcccataagaaatcccaagcaacagaagagattgtacaaggcttatcaaaaggtttatgcttccatgcatgataaagcaactggtccgcacaaaactcaattcagaagaactgaggattatggtgagttacacaggcgctccacaacttacttccttgtgtttagaattttgattggattgtttctgttagttgattccccgagttatacttcttgttatataatgtgttggtaagcaactatagaaatatgcaaatcgttcccagtgtattttgctgttttgatagccaattagccacatatgctattgggatcatttgtctggaaacaaagggatgtataaactgaatttgcagaataatgaagacagatttgatcaagctccactcatgtccataactctgatatatgctagtgtctgggggtatatttgaactagaaactactccctccgttccacaatgtagtggtgtatagattttttgaaaagtcaagctttataacttttgacaagtttgt

SEQ ID NO: 6413 - DNA, 1503 bp, Zea mays
  Clone ID: MRT4577_10583C.1
atggctcgaagaaaatcccaaaagaacaagaagacaactccgaaggagaacaaggaggtaactcttgagatattactttccaattgttctatttatgattcatggtctactagggtgataaatgcttttagaactgtagatccacaattagaacaaattttagacaagagtatcattccttttagctatgataggaaaaatgcttccgaggaagatcaaagatgtatacgattaaactacctagtttatgacatcttaagtaattctcttagcaacgaagattatcgtgccttcataatgaattataatgaatctattcatgatgcgcatgatatttggactagaattaaaaataaatttgatgagtccaaacatgatggttcattttgtgcttctacttcctttggtccttgtgaaactaaccctttcaaggaagaagaagaaagtgatcgttggagaccaaacgatgaatccacctctccaaaagtaaataggaatgccttgcttaaggaccaagtagaaaagctaaaagatgaaaatctagcttttcaagaaaaatatgatatgcttctatgttctcatgaaaatcttatggatgatcatatcatgttaaatattgctcatgaggttgtgatagaaaacttaaaatcccaacaacctcactcatgcacatgtattcaaattaaaactattttaccatgtgctaatgcttgttgtccgtcgacaagcaaatcctcctttgagctagaatttccaggaacaagagatgataaatgtcaagagctcaaagaacaaaatgagaggctaaagatgagcttgacacagctaaaagggaagtgcactgctcaaccttctcaagataaccgtgttcacatggtgaagaagcttgggacgggaacaaccgtggcatgcactaaatcccttgaagaaaatgtcaaggatttgaggattgccaagaggaaggaacaaaagaagaaaatcaatacctctgccaaaagcctcaatcgtgcctccatgcaaggtaacatccaaggcaacccaacattgcaacttgtgctagaaagggggctgagagccgccgtcgtcacagagcatgcgggacgccatcattgcctatctggcggagctagccagatgggacaccggtcttgttccctgcggcccgagtcagtttggggtagggtgatgatggcgcctcctgttgacgtggcgagcctgtgccctaggttgggtgatgtggaggctcctccgaagccaaggtcgagtctatcttccgaggccgagtccgagcccctgggtcgggcggagcggagttcgtcgtcttctggggctgagcccgagtccgagcccggggtcgggcggagcagagttcgtcgtcttctggggctgagcccgagttcgagccctgggtcgggcggagcggagttcgccgtcttccgggacttagcccgagtccgagccctggttcgggcggagcggagttcgccgtcttccggggcttag

SEQ ID NO: 6414 - DNA, 231 bp, Zea mays
  unsure (1)..(231): unsure at all n locations
  Clone ID: MRT4577_105840C.1
caaccccgacgaaccagagccagcagcgcaggcagacaagcaacgacaccaacgaggagcaccacgacaacgacgcctacaacacgctgaccaaccgcacgccctaccaggccagcgncacgcacgaccacctcaccggctcctacgcctacgaccacttcgacaagaacaccaactccctgctagacccaaccgaccccgagggcagggtgcaaactcttctgggcatca

SEQ ID NO: 6415 - DNA, 334 bp, Zea mays
  Clone ID: MRT4577_105841C.1
agcattcataaacacaccaagcgaatcgcactagcaacaacctaacaacaatggctaccaagatattagccctccttgcgcttcttgcccttttagtgagcgcaacaaatgcgttcattattccacagtgctcacttgctcctagtgccattatttcacagatccttccaccagttacttaaatgggctttgaacattcagccgtgcaagcctacatgctacaactagcgctagctgatagcgtcttacaacaaccaattgcccaattgcaacaacagtactagtcgcatataaacctacagaccatcgcaacgcagcagcaacaacagtttgt

SEQ ID NO: 6416 - DNA, 449 bp, Zea mays
  Clone ID: MRT4577_105842C.1
ccggccgggtactctcacacaagaatatgaatcatgccccaagcctcacccgtcgttctcctcaccgtctagatgctggtggcctgcgtcctcctcccgcatagcgctgctcatacggtacgcgatgcacctcacacggcggtggcgtcaacccgcacctcgccttgatctgctctcgcaccccgttgcccggacgcgcgcacgttccaccacacatgcggaaccagatcaagtacccaggtcatgcgacaaccttgtctcgtgctacaacatgacagagcgcacgagtgtcgccaagcgcaccatgcatgcgcgcaacgcactgtgccgaacgtccagcacaggaccatcgccgtccgacattatatgcaggggctgcacagactgatacgaccgtgtgcttgaacacgcacgactgcatcatgctcgatgcagtgacaccatcactc

SEQ ID NO: 6417 - DNA, 253 bp, Zea mays
  unsure (1)..(253): unsure at all n locations
  Clone ID: MRT4577_105843C.1
gggcccaagccgggttgggttttttgggcggatcaacgggacacccggaaacccttggtttctttttggggacaatggctgcnttttcgggggggggggggtggtgctgnnntttccccccccaaacccaaggtcacgctttattatgtccccccgggctttgacgggccgctgggcttctttttggccgcgggccctttgttcttgccgccttcgttggtggtttggcccctggggggcccggcggggtcct

SEQ ID NO: 6418 - DNA, 851 bp, Zea mays
  Clone ID: MRT4577_105844C.1
cgcgcactcgcgtcggaatgcgtgctgcgtgaagagaggcgagagcgagacgggctgcggggaggaggcggatagcggcggcgtcggcatggaggcgaaccgggggatggtggctggctcccgcggcggggtcgtaacgatccggcacgacggcgacggagccgcggctaagcagttgaagaatgtgaatgaacaaatatgtcaaatctgcggtgacacactcgggctctcagcaacaggcgatatctttgttgcgtgcaacgaatgtgccttcccggtgtgtcgtccgtgctatgagtacgagcgtaaggaggggaatcagtgctgccctcaatgcaagactagatacaagaggcacaaaggaagccctcgggttcggggagatgaggaggaggatggagttgatgatttggacaatgaattcaactatacacaaggcaatgtccaagggcctcagtggcagctgcagggacaaggggaagatgttgacatctcttcgtcttctcgacatgaaccccatcacagaattccacgtctgacaactgggcagcagatgtctggagatatccctgatgcatctcctgatcgcaattctattcgcagcccaacaccaagttatgttgatccaagcattccaggtgtgctatcgtgttatgtatatttgtgttggtaatcagttcccttgcagattcactagaatgcaatcatttgttccatgatatcagtacctgtgaggattgtggacccctcgaaggatttgaattcttatggagttggaagtgttgactggaaagaaagagtcgagagctggaaagttagacaggacaaaaatatgatacaggtgcgccggc

SEQ ID NO: 6419 - DNA, 608 bp, Zea mays
  Clone ID: MRT4577_105845C.1
gcgttcgcggccgcgtgggctcgttgtttggaaaggctatatcagaccttgtcaacgtaaggtattgcaaggttcctaccacactcgtgtgacttactgcattatttggccctaacaactgcctacaaatttggatgttgtggccattattcattgtataaatggttccttttttaccaaatcaaatccatatgttcaatgtcttttcatgtagaagagtctgctagaaagaagattacggtggtctatgaggataatattttgcctttagccgtatcatgcctatactatcaaagaactgtaataggcaccatgcttgcctaacaagaagagcttagttgaggaggctacgtccaaaaaacatatatcacctcttatgtagcttcggttcggtaattttgtgtcctaggaaagccaattgtttttccctcttccatactgatgtccccaccaaaagctttttatcatactagtgtctaacacgtgccctgtggatggtgtttttttcattgttattaaaacgtcgcttaaacgtcgtttaagcgtcgtttaaacgacaaaacgtgcttagagtttagaacgtcccggtcgttttagcaaaaacgcgt

SEQ ID NO: 6420 - DNA, 433 bp, Zea mays
  Clone ID: MRT4577_105846C.1
tttatttattttttattttttttatatattatttattagtatatattgagagaatttaataattttatgacagaaaaatagagccattgcaagcagcaagtacaagggaactttatttgatgtatgtttggggttatacaaaagcattgaaccaaaggggggatttgctaaatatttaaatcgccctaaccttctcaaggtaacaatatgctctgatatttggcttgcaaaatagaagtttcagtcctttttgaagagcttacggacaataataattcttcttacctgactagtaccggcaccaatctaaaacaattttgcattttttaggagaataccagttggggacttatttagggacccattttcaccaaaacactggattgcctgaagtgcaacttgggttgcatttttagcagcaaaaagaattact

SEQ ID NO: 6421 - DNA, 562 bp, Zea mays
  Clone ID: MRT4577_105847C.1
aggctcgattattgtgtcactttcctttctctcttgtttcttccacctaccgtagagcatgcccgaggcctgtccgccggagcgcgcgccctcggcctagcctgtcgcgcccgccggagctccctcccccggccccgggcgccgcgctcgcttgagcgcgcgcccccaaccccggccgccgaggccatggtagctcttgtggctactgccgctcggtgcgctgggagaactacggccgcccgtggcgcgcccgccggctgcgaggggcagccgccccatccgcttcgccgccgagcccgagcacaaggcggccaccgtcaggtttgagaaatatacgattagtaatcatggatgaaaccactaagaggtgacgccagcgcccaaatgtacaatgtaaatgttggcgccggaagctatggaggatatgaagcaaatggccatggagaacgtttgtatacctctgctaccggagaccccagccaattagcaaaacaactttcaggatctcgttacctgcaacccggtggtgccctgctatttctgtgtgccctggcgactagtt

SEQ ID NO: 6422 - DNA, 886 bp, Zea mays
  Clone ID: MRT4577_105848C.1
ccgctccttaagctggtttcctcttctacagccgccgccctttttatatttttttaacaaaaaaaaaatggcgggaagacattccaataaaccaggagtaatgccaagccatttttcaatatcatatttacttttacttttatacttccagattaagttaaactaataaaacaaatggtgcatttttttttaaacaaaaaagtctacgactgatttacaaccaaaagggtacaatagtaagtgcagcgtccatacatgtgctgaaaggttcaaaaatattttcacattttacattcaaattatttgaccttgatctaatttacccatatttatatgatttaaattcccttttttaaaactttaatcccaatacttttaaaatgttttactttttttgaaacgggttgttggtattattttattaaaaataaaatttttttaaatataattccaattttctccttttttttaggcaaagcttttaaaaaacccatattctctaaaaaatattttttttccttgtgtgtccctgaaaaataattatatgccccggttttttaaattttttatttgtgacccttaattctctgttttaattttgcctaattttccttcctatatttaaaaacttattgctttaaatccattttattaaatttggctgttattatacaaattttttttttggattttggaagttaatatttatttttttaaaattcttaaaaaacttttttttattaaatgtccccttcttattataaaacttattctttttatatattgattacacatatttttttttttattatttttatcgttgatataataataagccaaggtatttattttttattataatttctttcttatcatttattttttt

SEQ ID NO: 6423 - DNA, 337 bp, Zea mays
  Clone ID: MRT4577_105849C.1
atcgccccgccggtgccgacgtatggctgggccggtcgtccaaccacgtgcgcgcacctggctggatcgattcggtgaagcacaacgtttgatccaagtcgtggacgagaaggagggatcgccgtgcatcatcggcttgccgcgaggaagccaaattttcacagaggagtgtggcagcacatgttcaccaggtatgcttcacgcgtcccaaccccaatcatggggagacactgtcacttcaagaggaagatgtggagaacattgtgtttttacgagattccaagcttgttgaggacaaggagctgggatcctttactccacctgcatggaatgagca

SEQ ID NO: 6424 - DNA, 342 bp, Zea mays
  Clone ID: MRT4577_10584C.1
atcgccggtggcatcggcgccgccgtgcggcgaagtcgccgacgtggacatcgtccgaatgcaggcagacgggcgcctccctctcacacagcggcgcaactacaagtccgtcgtggaaacatcacgcgaatggcgaacaagaaggcgtcactagcctttggagaggctcatcgcttaccgtgagcgggcgatgctcgtgacggcgtcgcagctcgcgtcgtacgacaagttcaaagcaacgatcttggagaccggcatgatgcgcggcgggctcgggacccatgtcacggcgagcttcgccggcgggttcgtcgcggcagtagcgtcgaaccccgtcgacgt

SEQ ID NO: 6425 - DNA, 2599 bp, Zea mays
  Clone ID: MRT4577_105850C.1
tgaagaggtacaacgtggaatgcacgaggtggaaggctagcacaccgaggtcaaatttatcctccaggttcaaccatggaagtgagtcttctgatgatatttgcctatcattaagaattttatattgactcttttgaaataatttgtgcgatgagcgtccatacttccggggccccgtgaaaccgctgtttggtcatggacttgatgtaactgggctccctggatcttccggtgggcttgtctggatgccggtcgctgccttcgggcggtctcttgtgcagcccaacatgctagttattgatctggaaaagtttgcctctgaatcaacagataactggtttagtgttgatgagaagccacctatcgcatatgctcgagtggagatcctggaaggtgctgatatgaagccatctgatcctaatggactagctgatccatatgtgaaaggacaacttggaccctaccgttttcgcacaaagatccataagaaaactcttgatccaaaatggttcgaggagtttaaaataccattagtctggtttacttctcatttcattatatttttggaccagcttctctctgatgcagagactgtcaggtggcttaattacgctgtggaaaagatttggccagtttgcatggagagggttgcatcccagcagttccttttacccatattcccgtggttcctagagaagttcaaaccatggacagcaaggaaagcagtaatccaaagcctttacttgggtaggaacccaccgatgtttacagatattagggtagttaaccaatcaaccgatgatgaccacttggttctagagatagggatgaattttctttcagctgacgatatggatgcaagaatggctgtgcaactaaggaagagattaggatttggcattacaacaaacatgcatataactgggatgcatgttgaaggaaaggttctggtaggggtgagatttctgcggcagtggccatttattgggcgtgtaagagtatgctttgttgagcctccatacttccaaatgacagtgaaaccgctgtttggtcatggacttgatgtaactgaactcccaggaatttctggatggcttgacaggatgctggatgttgccttcggacagacacttgtggagcccaacatgctagttattgatctggaaaagtttgcctctgaatcaacagataactggtttagtgttgatgagaagccacctatcgcatatgctcgagtggagatcctggaaggtgctgatatgaagccatctgatcctaatggactagctgatccatatgtgaaaggacaacttggaccctaccgttttcgcacaaagatccataagaaaactcttgatccaaaatggctcgaggagtttaaaataccaataacttcatgggaagcactcaatcttcttcatcttcaagtccgagataaggatcccatttttgatgacgctcttggcgattgttccataagcatcaacaagttaagaggtggaataaggcatgatatatggattgcactgaagaacataaagacagggaggattcacgttgctgtaactgtacttgaagaagaaaatgaaaaggtttctaatgatgaagaggaacagtgtggaatacacaaggttgacaaggctagcacaccgaggtcaagtttctcctccaggaccaaccatgaaagtgaatgttctgatgaattccggaagatgtctgatgaatttgagccagttgacatagaaggatcggaaaagcccgatgtttgggtgcatcgccctggcagttacgtcaccagtacatgggaacctcggaaaggccgtgcccggtgccaggattccagaattcaccgggagaatgattcttgtagtgatagtccaaggtcatcagtgtcaggatctcatagaagtgactccagcactgaagaacccacgagcagtaaatcgcatcgccaccttcaaaaggtcaagaagggtttgggcaagctagctggagcagtgctccaccggagcccaaaggagaatgatgacgaagcttccccatgtgtaactcctcaccaaaacattcgaccggtcggggaaagcagggtttcagtaacatatgtggtcgatcaagatccagcaggggttgacggatcggggtcgagacgagatgaccaccagcaaagccctgagagagaggagctggacagcccgagtaaaaggcatctgaggaagaaggcggtgcacatggtgaaacatgctgggaaaaccgctcataacctaaagagcatgttcagcaagaagggccttgacaagagcaaagaagaacaccgcagtgatgaggaatgcgacgaggaaggcgacgttgttgctgctagaagagtgtagaatatgcaaggcttagttctattcctttggggttgtagtatacatatagtatgtactgatgaagtgttgcacaagaggcgcttgggccatgggtctcatcggctaaatagagtattacataccacatttatttgcctatcattaagaattatatattgactcttttgaaataatttgtgcaatattgataatgtttgttcaacatcggttcaatcaatttgggcctacgt

SEQ ID NO: 6426 - DNA, 345 bp, Zea mays
  unsure (1)..(345): unsure at all n locations
  Clone ID: MRT4577_105851C.1
gcgaccacgctcgctgtgcttcttcttttctcttttgtcgtcagtctggagacaagctggatacgaatctagctgcagtcccaagacctaacctctatgctgagagaccgctgaaggaggggtctcattcttgggagaggaaagcacccgtggaccactgaaacacacactgatcaaaccgaaaggatgtcttcggcggggcatttgagagtttggtcacgggggctatcttcagcgtttattttatttttaacgcaagccttcgcactgaaaaaacaagggtgtccaacncttgcactgtatctgtagcagagccctcctgtcggctatatatatatatgataa

SEQ ID NO: 6427 - DNA, 2815 bp, Zea mays
  Clone ID: MRT4577_105852C.1
tctgactttggggttgatcagcagtttataaatcttccctgattgcatcccagcactgtctttaggacttccagggtaagtggcttggatgaaagataagcaaataatcaaaatttgtgcttgatgccttcgcagttctccaatttgttgttggaacctgcagtgcctgtgaccaacaaaaatcatttcatatttctcttgttgatggaaaaactagatggaaagaatgaaatgctggcatgtctttcttgtcattttatacattcagaaagatatttttgttccaaataatcttgaaataacagagttccatacaaatctcacggctttacaaaatgttggtacttacgtgcattcttcacttcagataactgatattattgtcttggcaggctcgtgggtggccgggccggggttcggagcctcctgccgcaattttttttaaggctggtctgtttcgtgacgtcccgcgagaagagaacccccgtggcccctggccgcgacggagcggtcagaagcagcggcggccggcgcggtttccgtttcctggttggcccgagaattccgattcctctcctgatttgtgtacatatagttgcctggaggccccgtcgctgtccccgcgctctctgtctcctcacgcttggctgttcgccgcggcgccaccgtcggaggcagctgctaatcgcgcgtccggtggccgcgttgcagcggcggagcgtctcttgttgtgcagtgctgcagcggattgtcgcggcctgcccgcggtgaggccggcatccctcttcggaaggcgtgctcgggcggggccagcccaaccgccgttcgtgcgctagagttcctcgctcagaaagtggagaaataagatacatagtggaagatgagatcagttgttcggtcacttcgccagctccgccgatttatccagcactatgcagaggggaactcacaagcaaccagattgttcgggctgcagaatgctttaatcatgtgcggatcgacaccccgttcactgagcatgttacgtcgtaatggtgaaattagcagatttgcaagccctggcatggagttgatgaggtccatgttctctaatgtagcggctggttctatcaaagatattggaagaggtggcccgatggtggaatatgagaggagaatagcatcaggagacctagtagatggcgatagctttcaggttgatacaattcaacaattacaagggctctatgaggagttgattgagaatggagaagactgccagctggatagatataagtcatctgagaaatcaggacggagtcgatggctatggtcccgcctcattactcagccttctagctttgctccagttaagggcctttacctctatggtggtgttggtacagggaagacgatgcttatggacttgttctatgaacagctgccatctaattggagaaaaaaacgtattcactttcatgatttcatgttgaacgtacatagtcgtcttcagatgcataaaggtgtttcagatccccttgatgttgtagcagctgagatttcagatgaggccatcatattatgtcttgatgagtttatggtaactgatgttgctgatgctatgattctgaaccggctgttcagacaattgttcagcaaaggcattattcttgtttcaacttctaaccgtgctccagataagctttatgaaggtggcttacaacgggaccttttcttgccatttattgacaccttgaaagaaaggtgcatcgtgcaccccattggatctgcggtggactatcgtcaactgggttctgctgaacaaggtttctattttgtcggaaagcattacagtacgcttctgaaacagaagctccagtctttaattggagatgaggaacccagcccacaaactgttgaagtaattatgggaaggaaattacaggttcccctaggagcaaatggttgtgcatattttccttttgaagacctttgtgataaacctttaggtgcagcagattactttggactctttaaaaaatttcacaccctggcacttgatggtgttccaaagtttgggtctagtaacagaacagcagcttatcggttcgtcacactgattgatgttatgtacgagaacaaagcaaggctgttatgtacagccgaggctggaccagtagaactgtttgagaatatcatgactcttgctgaagcacagaaggtttcaccaagatcttcgcgctcacagaaaagtgacgaccctgacctatgtgtggacaatgagcttggatttgccaaggatcgtacgattagcaggttgacagagatcaacagcagagaatatttggaggacttcgaaatgagattagggcaacagcagctgctgcccttgcaagctctagataatggtggtgatgttgtactagcataataagcaagggcttctgggcctcatttgaaattcttgtattcgcacccacctggcttacataggcaactgagaagctatgcttttccaacagtggtgcatgtaaatgtccaataaagctatgtaagggcatttttgctaacaggtgagtgatctataaaatggcccaacctgggggaggggggataccatatcgttttttttagtgtatcacatatttccaaacctttagagaggcctcctaaggctcaaaaacagcatgagttacactgcataaagccatatataggctgaaagttttcgctgaactttgtgaattgagggaaaaaaagtctaacaattgttcatgtttttctattgtacgagcttttctgacatgcttgacgtagtaaggaagatctggttatt

SEQ ID NO: 6428 - DNA, 483 bp, Zea mays
  Clone ID: MRT4577_105853C.1
atgcttaaaacacaagcgacagcaaccagctacgcttcgtccaaacagaaccggtagggacctttttttttttttttttttgaaagaagaacaaccactgctaatgtatatcacattaagttacaaatacaaatcaccgagagagagagagagagagaaaatcccccaagagaagagagaagaaagaataaagccgatggccaaacgcacacacgccgtgtgatcttggtctgaatgacggtgcattcattctatcctcctccgatccgatcctcttcccatcagaagaggccgccgacgagaacagcggcgccgagcacggagagcgcggcggccgccctgctggcgcgtggcggcgcggcggcagccttctggtcgtcggaggtggagccggtgtcgtcgtcgtcggccgtgggcggctcggcgatggcggcggacttcttcttcttcttggtgttggcggtgggccggccgggcgcggaa

SEQ ID NO: 6429 - DNA, 307 bp, Zea mays
  Clone ID: MRT4577_105854C.1
gaaatgccttgctcaggacgggcacaatacgcacactgctaaggggacacaaacagggctttttcctcatgacccacgaacaaataggaagcggtttgatgcgatatcgcctaacaaatactccatccgattctttatagctgtagctggatagaccatatcctctatctatccagcgacaactaaaacgaaacggacagagtaagagttacaccctagtccaactacggaatatgatcttctactaacccgattacaacagcgcgacagagacgacaaatttggtctatatgattgatgaaagaaa

SEQ ID NO: 6430 - DNA, 629 bp, Zea mays
  Clone ID: MRT4577_105855C.1
aaaagcacaggaatatttctaatgcgatttgacgaattgggcgaaaaccactgacattgcacaatgcgaaaacaaagaaacagctctcgtagaatagattagattagagatacatagacccaacttgaatattgaggatgtggttatacggcgactgacatgcagagatttcttggcagcaccaattaatatttaaataattgacgttcttgctatcccagaatgaagactggagaactgagtttgaatgaggagccggatcagcttttcaggagtaggtatctgattgcagatgaagcaaaaacagccagcgccaatcagtcaagctttcaataccgccttgtggatcatagtctccttgtgtatctggtgacagctcttctcgacaaggtcaagaagctgctcgaggtttgtagcccacgagttaagtgtgccgttgcagtcctgaactacccggaagctcacaactcccatcggcctgtcgatcttcgcagtcagagattttgagttcaccatgtctgaaagatgcttctctgcctcctgcaaactcaggcagagcagatcagcaagcctctttatggtaaccctcgaatagtacttagacacaaccaagatattatgttcaatta

SEQ ID NO: 6431 - DNA, 1857 bp, Zea mays
  Clone ID: MRT4577_105856C.1
gggcgaaaaccactgacattgcacaatgcgaaaacaaagaaacagctctcgtagaatagattagattagagatacatagacccaacttgaatattgaggatgtggttatacggcgactgacatgcagagatttcttggcagcaccaattaatatttaaataattgacgttcttgctatcccagaatgaagactggagaactgagtttgaatgaggagccggatcagcttttcaggagtaggtatctgattgcagatctaagaattcaaataatgtgcagcaagagttcagcaacaaatagcatccccgtccttctgctggtacagtatcttacttacgaagcaaaaacagccagcgccaatcagtcaagctttcaataccgccttgtggatcatagtctccttgtgtatctggtgacagctcttctcgacaaggtcaagaagctgctcgaggtttgtagcccacgagttaagtgtgccgttgcagtcctgaactacccggaagctcacaactcccatcggcctgtcgatcttcgcagtcagagattttgagttcaccatgtctgaaagatgcttctctgcctcctgcaaactcaggcagagcagatcagcaagcctctttatggtaaccctcgaatagtacttagacacaaccaagatattatgttcaattattcttagcttcaaatcttctgcagctttggcacccaaagctcctcctagcagattcttctcgttttcaaattcgtgcttagagaattcccacaatgctgtccactggatgacctccatggtaaccagctgcttcagcaataacctgaaatttgggatttctgaaaggtttttatcctctagtgtagcattgagaaggctcgattgcataggatcatgaggtgctagcaccaagtaccaacagatcttcctaagaatcggtatccacttggttggatcttcctttattgctgggatatcataaatagacttgtaacaacgacagatttccaggtaatcattgttgtgcaagtaatatcgaatcatcagttcatagtagatacgcttcaattctaggagggaaggaatatctgcaggagcatcctgaacaatgttgtcaccctcctttggtttctttttttcctttgatggatctgcgtcaaatactctagtactgattttccttgataaaatttgtgctcgaacataatcttgacgatctaggcatagccggacctgctcaagaatgaaagcaattttctccgtctttgccatggagccaaatgtttcgacagcaacttcttgcatcaaatcagcagcctcgtcaatctttccctgctcctctttgatatttgcaagccttttgatcaatcttgctctctctatctcaacataaattttgccagcagagacgctgctcagtgttttgattagctcgactcgtgtgtcaatgtctggtgtcaaatcaatgtagtccattgctttctgaaccatagcagtaatggcctgcttaagctggcctctcctcttggagaggagaacgatctggtcgtttagcgtcttccacgcgccggccttgtagcagagctcgacgatgtcgatgacggccttccgcgtgccggcgacatcgccggccagcctcatctgcttctccacgttcaggagcgactctatagccgcgtcgaggttggtactgtcgccctccatgatcgggatcgcaggcaacggcggaggagacagcgaggcgacgacgaggagatctgtttggctttgcttgcgaggggggaaaggttgtgcaggttagggctttgttggcgttctccgtagacacggtagctaaaccccggccggcctcgaggtacccaatg

SEQ ID NO: 6432 - DNA, 315 bp, Zea mays
  Clone ID: MRT4577_105857C.1
ggttgttttaaagacgcccatcatccctattcgcacgagcggtttatccgagggcagaaaactaatttttggggtaccaagactgtttctgcaacctactacgctactcggtacactctgtggtgtacgtgccacacccatttacaagaaatgttgtgtctcgtaagcgtacctatggacaagaggggcttacccggttagaggtgagggaaagaaaaccggtggttgttctcaaacaccccgaacggcatgcccgcgcccccgcgctccaaacctgccataaaattgaggacaccttgcccgctgggataggca

SEQ ID NO: 6433 - DNA, 1201 bp, Zea mays
  Clone ID: MRT4577_105858C.1
tgggcaccacgcgcccgccaccagccactactcctcctccaccacgagcgcgcgataaccctagctagcttcaggtagtagcgagagccaatggactccagcagcttcgtccctgccgccggcgcggagaatggctcggcggcgggcggcgccaacaatggccgcgttgctcagcagcaggcgccggcgatccgcgagcaggaccggctgatgccgatcgcgaacgtgatccgcatcatgcggcgcgtgctgccggcgcacgccaagatctcggacgacgccaaggagacgatccaggagtgcgtgtcggagtacatcagcttcatcacgggggaggccaacgagcggtgccagcgggagcagcgcaagaccatcaccgccgaggacgtgctgtgggccatgagccgcctcggcttcgacgactacgtcgagccgctcggcgcctacctccaccgctaccgcgagttcgagggcgacgcgcgcggcgtcgggctcgtcccgggggccgccccatcgcgcggcggcgaccaccacccgcacccccactccatgtcgccagcggcgatgctcaagtcccgcgggcccgtctccggagccgccatgctaccgcaccaccaccaacaccaccacgacatgcagatgcacggcgccatgtacgggggaacggccgtgcccccgccggccgggcctcctcaccacggcgggttcctcatgccacacccacagggtagtagccactacctgccttacgcgtacgagcccacgtacggcggtgagcacgccatggctgcatactatggaggcgccgcgtacgcgcccggcaacggcgggagcggcgacggcagtggcagtggcggcggtggcgggagcgcgtcgcacacaccgcagggcagcggcggcttggagcacccgcacccgttcgcgtacaagtagctagttcgtacgtcgttcgacttgagcaagccatcgatctgctgatctgaacgtacgctgtattgtacacgcatgcacgtacgtatcggcggctagctctcctgtttaagttgtactgtgattctgtcccggccggctagcaacttagtatcttccttcagtctctagtttcttagcagtcgtagaagtgttcaatgcttgccagtgtgttgttttagggccggggtaaaccatccgatgagattatttcaaaaaaaaaaaaaaaaaa

SEQ ID NO: 6434 - DNA, 332 bp, Zea mays
  Clone ID: MRT4577_105859C.1
cgcgcgttgtctttggggtcccaaaccggtattggggggggtgcccaactttgggtgctcccatcaagttaacccgaactaaggttttgggaacattccgttaacccccttcccaacaaaccaaagttgaggcccccggcattttcctttgggccccatggggggttccgggcaagggggggattaccttcaccacttccagggactcttgcttccctccggggaggaaagcgccgcgctctccattaagcctattgagaagggctacccaacgcacacgcgggtgtgccaccccgataagagccccgacgaccccaacaccaccgccgact

SEQ ID NO: 6435 - DNA, 1653 bp, Zea mays
  Clone ID: MRT4577_10585C.1
atggctcgtagaagatcccaaaagaacaagaagacccaggagaacccaactcggaaggaggtaactcttgagattttatttgatgattgttctaactatgattcatggtcatctagtgtgataaatgcttttagaaccatagatcctcgattagaacaaattatagacaagagtatttttccctctaatttcaatggaaaaattaattccgaggaggatcaaagatgttatcgcttaaactatctagcttttgacatcttgactaattctcttagcaaagaagattatcatgcgttcatatcaaactatgatgaatccgtccatgatgcgcatgatatttggactagaattagaagcaaatttgatgagtccaaacatgatagttcattttgtgtctctacttcctttggtatttgtgatactaacccttgcaaggaagaagaagagaatgaacgatggagaccaaacgatgaatccacctctccaaaaggtttgtcttcccatttcgattcccacatgtgttgtgtggctaatgaaaatgatagcggaagcacaaatgaggatgaggaggaagaaagaagctttgtgcatctctacgctcgcctaagccaagaagataaggcggtcatgctcaaacttctagaaagagcgagagaacaaagcgaagctcgtcaaaggctagaagatattctctccataaagatgcaacactttgacgagttgactaaagaacatgaggagctaaagtgctctcatgatgatttggtccaaaggtatgaaactatttcaattgagcaagataacgcttcacattgtatagctcaattagtaaataggaataccttgctcaaggaccaagtagaaaagctaaaagttgaaaatctagcttttcaagataaatatgatatgcttttatgttctcatgaaaatcttatggataatcatatcatattaaacattgctcatgaggttgtgatagagaacttaaaatcccaacaacctcactcgtgcacatgtattcaaattaatactatattaccatgtgctaatgcttgttgtttgtcaacaagcaaatcttcctttgagctagaatttgcaggaacaaatgatgattcatatcaaaaactcaaagaagaaaatgagaggctaaagaagagcttgacacaactaaaagggaaatgcattgcccaaccttctcaagataaccgtgatcacatggtgaagaagcttgagacgggaacaaccgtggcatgcactacatcccttgaagaaaatgtcaaggatttgaggattgccatgaggaggaaacaaaagatgaaattcaacacctcctccaaaagcctcaaccacgcctccacaaaaggtaacatccaagaagggaaagtacacaagcctcatgggttgatcttcacccaaaagaagaaaggaaaaaggagaattcatgattcatttatgcaacttgtgatccatttgatatatgctaacaataacttgaaaaagatcactagttgtagaactctctcttgtgcaaagtatttccatatattgtcattgagtataggtcttaagcaactaagtctatggacaaagcacaatgaagagagcgtctctatgagaaggtacaaaagggtaaaatcacttcctttcatttaa

SEQ ID NO: 6436 - DNA, 705 bp, Zea mays
  unsure (1)..(705): unsure at all n locations
  Clone ID: MRT4577_105860C.1
tgggacctcgagccggcgggacaccctccgtagcctcctatttaacgtatcctcgcacatcacaagaaggacactctccaccagccagccagagccagtagccagtagcccccaccagatcggcctccccgttgctcatcaccagcaagagcaactcagcaacctagctagctataggtttaggtagcaagagccaatggactccagcttcctccctgccggcgcggacaatggctcggcgggcggcgccaacaatggcggcgcggctgctctncaggcgccgccgatccgcgagcaggaccggctgatgccgatcgcgaacgtcatccgcatcatgcggcgcgtgctgccggcgcacgccaagatctcggacgacgccaaggagacgatccaggagtgcgtgtcggagtacatcagcttcatcacgggggaggccaacgagcggtgccagcgggagcagcgcaagaccatcaccgccgaggacgtgctgtggcccatgagccgcctcggcttcgacgattacgtcgagccgctcagcgtctacctccaccgctaccgcgagttccagggcgaggcgcgaggcgtcaggctcgccccggcccctccgtgcagcgaccaccaacaccaccactccgcggcgccaccgaagctcaataagacccgcgagcccgcctccggagccgccatgttaccgcacccccacga

SEQ ID NO: 6437 - DNA, 958 bp, Zea mays
  Clone ID: MRT4577_105861C.1
cattgggtacctcgaggccggccgggggagttcgctcccctacacgccgcgtgcgcgcgccgtgctctctctcgctcgtggggacagctgcgcgaccgccgccgccctacgccaggcgcccaggtcttcggcagtaccttcgccggcgacgaactagcacccacaggaaaatggcaagcagagcaggtggcgatggcaaggaagccataaacgagcaggtaatcgccaacacctacgccaacatgcgcaccgaaatgaaccagctctacacaaagatcacggagctggagatggaggtcagcgagcactccctcgtgatgggcgcgatcgagccgctggacccctcgaggcgatgctacaggatgatcggcggcgtcctagtggagaggaccatcagggaggtcatgcctgccgtgaagcgcaacaaggagggcctggaagaggtgattgcccgcatgcacgaggcgctggagaggaagaagaaggagataaccgagtttgagctcaagtacaagatcaggatccggaaggctgatagcgacgctgaggatgaaggcggcaagaaggaaggcactgcgcagggagtccttgttggtcctgccggacagtaatctaagttgattagagagacctgcgtgctacaagctatttatgcttggaccacagtaaggtggttgttgctcctctctgccaatgtgtgtgtttagggggtgacgacatgcttctgtagaaccagcgattttgtgtttaaactggaatggttttgacaaggtgcgatgtgtttctgcatttgttcttcaggttcaggtgtttcggttaaccaaatgtatttcttgcgtgctgataatgatggaacatctctagtttcgcagggctgcagtctgtgtctggaggccctttttattaatatgcagtgcttggaggttggtgaaaaaaaaaaaaaaaaaaggcccctaac

SEQ ID NO: 6438 - DNA, 270 bp, Zea mays
  Clone ID: MRT4577_105862C.1
attcggctcgagccgatccaaaagttcttgctttactatatccgcagcgtccaacttgatttttcaagggctgaccgggaccgctacgaaaaggtgcccgtgcatactaagccggccactgcatacattactgcaggctcgggagtttcctacttgagaggtgctgatcctaccattgctactgagaatctgacgaggctgctcactgtcaactttgaggataactgaatgtccctagggtctctttgaccacatggccaaactacaact

SEQ ID NO: 6439 - DNA, 170 bp, Zea mays
  unsure (1)..(170): unsure at all n locations
  Clone ID: MRT4577_105863C.1
ccgggcgcaagcaaatcctcctatctcctatcctccaatctagagaccggtgtgggggcaatcagaatgaaacgccgacggcgagccctggcgtgctcccgnngctcccccatnntcgtctcttatcctccgatagtgccgcccgcctcacagcctccccaccgcagcgg

SEQ ID NO: 6440 - DNA, 280 bp, Zea mays
  Clone ID: MRT4577_105864C.1
agcaaactcgcaggatagcgcgcaatctgttacagttaaggcaaaggagcctagctggagcatgggctcttcccttacccttaatggctctacgagatcccgacccaacattcgcattgacgacgactctgatctgattgatgaagacagactcttgactgaggacgacctgatgatacgacaacttccagatgttggggactagtgaagttgggggatcaaagatagcatgcaagcactgtacttatggcagttgtcggttgatgcgagccttccgctg

SEQ ID NO: 6441 - DNA, 347 bp, Zea mays
  unsure (1)..(347): unsure at all n locations
  Clone ID: MRT4577_105865C.1
ttctaggtgatgttcaccaacatacctgaaacttcagggatcatatcacagttattggagcacatcaccanaatattaaaccttacattcaatctccatatacacccttatcatgatcatgagacacatagctatctgcatgctctcctatctagtcttctacaagtcatcatccacaaactcagcatctcatattcaaagattatactttcttataccacttaccaactgactatactttatctacttgtatctgcctggcacacatttactcgtcatgaataaacaattcttccaatacgtgctcttccttatgctaccaatacagattttgtgaactacatacc

SEQ ID NO: 6442 - DNA, 306 bp, Zea mays
  Clone ID: MRT4577_105866C.1
ctgcacgcaccggttcccaattcccaatccgacgcgacgcgtactaaaaaccttcacccctaccctagatccctcaactcctccattcctagccgactgctgcacgcgggagagctcaagagtcagggcgccatggccacagagaccgacaccttttcctttcaggctgagatcaaccaactgctctcactcatcatcaacaccttttattccaacaaggagatcttcctccctgagcacatttccaactcttccgatgcgttggacaaaaccaggttccagagcctcactgacaagagcaagctt

SEQ ID NO: 6443 - DNA, 326 bp, Zea mays
  Clone ID: MRT4577_105867C.1
cccacgcgtgcgtcgactcgcgggtcgagtttcggcacatgctggtgcacctgaggacggggcagatcacgctgaacaacgtgctgaacatgatgctcatcaacctgtacatggaccactccaacgcgctgatccgcgacttgaaccgggactacaagctgcactagcggatcgacacgcacagcgactgcgacctggcgtccatcctcgcgtgcatcaaccactggatcatccacatgtgcatgtacagcttgatcgacgggctgatcgactcgacgaacattaccacgtccaacaccgagttcaacagccactacaacgacgat

SEQ ID NO: 6444 - DNA, 276 bp, Zea mays
  Clone ID: MRT4577_105868C.1
cttactgtttttatttgtaaaggacaaaacaaaacaatggaggattttattggatgaaacaacaggtgcccaccgcacgggaccagttcaaagactaacacaaaagagaggttgatgtccgacactaagaacacgagatcggcatacatctgattaagggcaaagcaacagaagagagcgatgaaggtcacgaaatgacgggtaccatggccccggggcggcaaatctataaagggaaggtgaaaggcgaccatgttaggatacgggagaaaaagt

SEQ ID NO: 6445 - DNA, 342 bp, Zea mays
  Clone ID: MRT4577_105869C.1
ccaggaaatccccggggggaaatagacttacggggcagccgggaatcaaacccataagggggccaagaaagccggggggaaacaaactgggaacgaaaaccaatttttcccaacacagggcgggtccggggggcaagacgagatctttacatttatttcaccccgaaaaaagaaggggaaaggaagggaccagggcaacggcacataatacgggcacatacatgcatacacaagctttaatggaacggggcgcggggggcaaaagcaaacgacgacgggttggaatccattcatccagaggggagacgaggggggggcaaataaattaggcgtagccctggc

SEQ ID NO: 6446 - DNA, 414 bp, Zea mays
  unsure (1)..(414): unsure at all n locations
  Clone ID: MRT4577_10586C.1
nctcncctactcgccccagcgacgcggccgcccggagaccgagcgaggcaggcaacccaccaccgagaggcagggacaggaacaggaagccggaggcgaagatgtcgtcggtgttcatcgtcgatgagacggcccccttcttctacttcatcggatggatgacagctctgtttctgtcgtgggcgcaagactgtatatattgtgtaatgcagaggatcctcagcacacaacaattgtgatgatcccacttgcgtatgtttccactagtccgctcaacctgtatgtttacattgatgaagaacaccctgtcgtgaaggttattcaaggaactcttgcgtgagcttgacaaggaccagagtggcttcatcacgccagccgaggtccgccatgggatgacaaataatggtgagaagc

SEQ ID NO: 6447 - DNA, 138 bp, Zea mays
  Clone ID: MRT4577_105870C.1
tcatccccatccctgcccgtctccccggccggccactcgaccagaagcaccggtagcgagcggagaccgatcggaggccgatgcttatgggcaagttagcgatggtgctggcgatgctgagtgccgacctgatggccc

SEQ ID NO: 6448 - DNA, 160 bp, Zea mays
  unsure (1)..(160): unsure at all n locations
  Clone ID: MRT4577_105871C.1
ccgggaccccccgccccccgaccggaccaatctatctccacacgccgtcctaggtactcgctggcaacactgnacccttctgccatcttcgtcgtccttctcgcctctgcggcgcatatgctgcagtgcatcctngacctcatgaggagcagcggatcca

SEQ ID NO: 6449 - DNA, 727 bp, Zea mays
  Clone ID: MRT4577_105872C.1
ctcatcctccactcactctgccgctccactctcgcccgctccccaacccgccggcggcaatggcgtccctccgcgcctccctcctgctcgtggccgtgctgtgcgcgctcgcggcgtcgtccgcctccgcggcccgcgacctccgcttgcgccctacccagttcgtcgtgcgcggccgcgtctggtgcgacacctgccgcgccggattcgagaccccggcctccaccttcatcgctggagcgaaggttagagttgagtgcaagtcgagatctactggggcccagacatgcagcttcgagggtcacaccgaccacaccggtacctacaacattcctgtggccgacgagcatgagcacgagctctgtgagtctgtcctcatcagcagcccagacacggcgtgtgccaagacagttgctgggcgggagagggcccctgtcttcctcaacaacaacaacggcgtcgcgtccaacgtccggttggcgaatgctctggggttcgagaaggacacccctctggctgcatgcacgcagatcctcaagatgtatgaggaggtcgacgaccgtgtctgagcactccgcgctcgctatcacgaaacaggttaatgtattactaaagctgtcgcgtgaaatgtcgtgaaacatcgatctatatgtgttaccaagaccagaagtatcgccgcttgtgtgcttgacactatggcgtagcgcttgagtgtgtatgttgatcg

SEQ ID NO: 6450 - DNA, 366 bp, Zea mays
  Clone ID: MRT4577_105873C.1
cgaccgcgaaagcagcgctaatcacagcaagcacaaggatggctgaagcttcgtccttcggcaagcgtcgggccgactcctatcagcggccacactcctatcagaggccgtacgtagggccgcagtatcatacgaccaccgctacctgctctcgtacttacgcacggcggtggggtctccgaccatgcgcctcacggagcaacctcgacgaatgtgcggcagcgctggtacccggtcgggccctggctggctgatcgcgtatcgcaacacgctgctgggcgctgcttcgtgggccgttgtccagtcgcgggcgaacatgctcgggtcggctcaccctgaaccctggccgtagacagttcggtgctg

SEQ ID NO: 6451 - DNA, 336 bp, Zea mays
  Clone ID: MRT4577_105874C.1
gtaaaaaaaaggcccccggatccgacatgggggtttggtatatataacacaaccgtagcaaacggggggctgcttgaattgatcatatcccggatgcaaaggctactagagacacccatatgtgtttaatcgccgatgcatgtatgcatggcatggcatggcatgctcataaaccaccgatgtacttgtctatgaggggggggagcgtggacttcgggacggggccgaagaccctttcctttttttcgccgccctttaaaaaaaacacgggggggatgctgcggatgccctaagtaaaccccaccttggggctgtcgtccgggttcaccttgcaac

SEQ ID NO: 6452 - DNA, 855 bp, Zea mays
  Clone ID: MRT4577_105875C.1
gtctgatccgctaaatacgggaaaccacggcccctccagtatgtggtcaacgctgcattccttgcttctgtgttcagtgactatcttgaggctgcggatactcctgggtggtattgtggcccccatttctactctgttgaggttcttcgcagttttgcaaggagtcagatcgattacatcttagaaagaatcctttgaagatgagctacgtggttgggttcggaaagcgttaccccaggcatgttcaccaccggggcgcctcgatccctaagaacggtgttcactatggctgcaaaggagggtggaagtggagggacgccaagaagccaaaccctaataccatagcaggtgccatggttgctggccccgaccgccatgacgggttcaaagatgcccgcaggaactacaactacactgaagcaacgctggcgggcaacgctggtctagtcgccgcattggtagctttgtcgggtgacggccacggcggggtggacaagaacaccatgttctctgcagtaccgcccatgttcccttcgcctccgccgccgccggctccatggaaaccgtgacggcctgtgggggtatggtatggtatggtatctgattcttttgtatactgctttatttatttagatttagattagtgttccctctcgccgtactgctaccatcacaatcatggagatctaacagtatgtagctccggtctttttttttcattgtttttatattttgccgtgcaatgtaaaggactagtactacgttttgcatggatctcggggtcagtaactgatttcctggggatttgtggtaactaaagcccatctctgtgcttccgtgaatgagtggaattcg

SEQ ID NO: 6453 - DNA, 607 bp, Zea mays
  unsure (1)..(607): unsure at all n locations
  Clone ID: MRT4577_105876C.1
gtcgacccagcgtccgcggccgcgtgggcccaatacacgcattcaagttctggttccttgctacaggcttgtaccttctggcaagatttgaaggcctggctgacaggaaagtctacagcgtgaaccggtacttcatcagcggccattccctggagcacctttgctttgccctggtgacggttatgctaactgtgatgctgaccttcagaaacattaagattgccagggactcctgacctgtcgctgattgtaacttgggtgcagaaaattctgtgaaaaaattgcaagtttggaaggcagactccgagacgacacagattcggctagatgatgcctagtagataatcttctaccttaacattgtcccggttgccggggctgattcacccttccccgtgttgtttcagactgacggtggcataggtcatatagagggcgcaatttattggtctgcccgattcataccgtggaaagttgtctgtccgtagttttgtagacagaaaaactggacggcgagattgcattgtatacagacatccaactgtgaaatgacttgttcagttactgtgcctctagactagcgataattaaaaaaaaaaaaaanaaa

SEQ ID NO: 6454 - DNA, 320 bp, Zea mays
  Clone ID: MRT4577_105877C.1
aattaaaaaaaaaaaaatttttttgaaaaaatgatttgggaagggtttgttaaaaaaaaacgcttcaaaatttttgaaaaaaaaaaaaaaaaccccctgggggaactatttaagggaactactatccattttttatttatgggggggccaagaaaaattaaattgggggtttggagatcccaaaatacccaaaggtaccctttgattaccctggaaccatgaggcattaaattggttggtggaaaattccaataataggggtttttggcccaaaaaccttaattggaaccccgagttttgcaccaagcttacccatttta

SEQ ID NO: 6455 - DNA, 365 bp, Zea mays
  Clone ID: MRT4577_105878C.1
tcgcgatctataactagcttctagatcgcgagcggtcgccctttttttttttttttttttttttttttttttttggaaatataaaagccacttataagacagtccaaaaaggggttcaaattactacttttttcaaaattgttcttctgatgtaccctggtgccccagaccatattactactttttacaaaatatatatccggatttacccattttgtggcttttgattcacaaattgaaaatcattgtaagaactttacggaattctttcacacggattatttttttctaccagcaagatccatatataattggccagtctcttattttaataaacaggatcctgttcctaatctctcttgttt

SEQ ID NO: 6456 - DNA, 517 bp, Zea mays
  Clone ID: MRT4577_105879C.1
caagaggatcaggtatggtggtaagtgtcactggtgcaaatgtacattgactgctgtgtctactagtggtactggtcatttgcttaggcatcaacgtgattgcaaagttaagctttctaagcagggcaagcagtcagtccttaagtttaaccctgatggttctgtgcgtaactgggattactgtcctgatcgtgctagaactcagatgtgtaggttgattgctaggcttgatcttccacttaattttgctgagtcacctgcttttgaggagtatattagactatctcataatcctgtctttaagaaagtatctcatcaaactactgctagggactttgtcaagttctttaatgatcgtcgtaagatagttgttgagtgcttgcaatctgtttcttctattgcaattacatctgatatttggagtggtaatgctaaggaagactatcttagtgtggttgctcattatgtttctaaggactgggcattagaaaagaggcgacagcaacggaattcgagc

SEQ ID NO: 6457 - DNA, 1325 bp, Zea mays
  Clone ID: MRT4577_10587C.1
cggtcgcgtggggccgccgtcagccttccaatctaccacccacgcgccgtctctcagcggtgtcattaacagcgctgcagcccgcagctgccgcaagcgccgctacgccgatgcccacgagggcgcctcctcaccttgccgccgccgccgccgcttcctcctcgtccccaactcgttcctggccggccggtccttcgctctccgtactctcgctagcgccccccacaagcgccgccacgacgccgccacctcctcggctcgcccctccagtcgccgcctccgccttctaagccccgtccttttccccgccctccggccgcttagcccccgcgtttcgctagccaccgccccgcgtagccaccgcaagcttcacgtcgacgacgcccgccgcgccgtctctactccctgtcgccgccgcatccgtagcacgctgcttcggggggtcagacacttccgcccattcgcactccgtttcctcctcacgtccagtgcattaagccctcaccgtcgccggaaacccgccgaggtagacatgggcaacatcatctcacagttactgaggaggagcaccagggacggtgtatcagaggcgcacacgaagcggctcgatgggtcgcgggaagtggtggatctcacagcggagccagagcttgaaaatatcgatgccgtggggaggatgtttggagactggagcgtccctgcactggggtcatcaaagtcgccggagaagaaggcaacgttctacgaggagccgcacggtagaagattacaggagtcaggattcaagaagctcaagcttgccgagctgcctgatccgctggacaatacgtctaaggaggatctatctgaactattcacacctctaagtgacaaagacgaaagagaagtcaatgctctgttgtgtagtagtgatgacagtgataaaatcgtagtgatacatacgccttctaacatcgagattactaaagagaaacttcaatgcttgaggcctcgtgggtggttgaatgatgaggtcattaatctgtacattgaactgttaaaggagagggaaaaaagggaacccaacaggtttttgaaatgccatttcttcaatacattcttctacaagaggcttacttgcggaatagctggttatgattaccagtctgttaggagatggacaacattcaagaggctgggttatggacttgtcgagtgtgagaaaaatttatgacacagatctttgttccagtgcatagaaatgcacattggtgtttggcactaataaacatgaaggataaaacattgcagtatcttgaatctcttgttggttggggccgtgatgt

SEQ ID NO: 6458 - DNA, 630 bp, Zea mays
  Clone ID: MRT4577_105880C.1
ttttttttttttttttttttttttttttttttttttttttttttttttttttttttgggaaaaaaccccttcgactaggcatatcgacaagattatgggtttttttgggacaaaaataaaaacaaggggcgaaacaaaaggactttctcccccaagggagggtcttccccccccctatccagtttttttggaaactaactaaaccgcccagttggttttttatccccccaacattagcctaccccccgaacaaaaaaaagggaaaatagacccctggcgaaggagctaacccaagtaaaaaagggtcacgatcttccaaaggttctgggcccccgggcatgtttccatcaacagtttgctgtcatggaacgcaaagcaaaccacctgtgggaccttggagaggaggcccatatggcataaccggaaaatggcaacagtggccactagaataaaagggggttttttagccccattccattttaatccagagataaaaaaaaggggggctcctttttaaatccttgtccttgagccggttaaggccttgttcgggggcttctcaatggggggggatgggggggatccaatcctttttatacacatttggagaaaaaaggatttaaccccctt

SEQ ID NO: 6459 - DNA, 359 bp, Zea mays
  Clone ID: MRT4577_105881C.1
cacgcccacgacgctgctgtggccatcgccggggagagaaggcggcgccgcgcaccggcgcgacgggtacgcgtccgacacgctgggcacggccaccgcggacgacgccaaggagaagggcgtcgccgtggaggaggagggcccccgcgtcccgacccagtgggtggcgttctccgccgaggcctcgccgctggaccgggtcagcgcgtgggtgaacagcctcgggaactgctcgttccacgccgtcgatgaggacggtggcgccacggggcacggcggcgacggcgcctcgcgcccgcgacgctctgagatcgtggagctgccgacgtccgcggccggcggaaggaggcatccgcagc

SEQ ID NO: 6460 - DNA, 290 bp, Zea mays
  Clone ID: MRT4577_105882C.1
attcggctcgagctggttcgaccagcccattttttggccgacgcactatctttgaagaaatgggaatcctctaacaatctaccgggtcgtaatctctctcagaatcaatcggtgggtcatgagaccaaacaactacccttgtaatgaagctcacctggtgtacactctgcacacagatgaaataaatggcccacagtagggaaaaacactgccatcgctattttctataggagggacctcctgtggcgcataacaactcaaacgagtccatagcgcctcgccctgttgcg

SEQ ID NO: 6461 - DNA, 371 bp, Zea mays
  Clone ID: MRT4577_105883C.1
cggcgaccgaacctctctcccaccacacccaagtcgatcatctgcgaaaatggattcctccaaggcccccgtcaagctcgtcaaggtcacccgtgtcctgggcagaaccggttctcgtggtggtgtcacccaggtgcgcgtcgagttcatggacgacaccactcgctccatcatccggaacgtcaagggccctgtccgtgaggaggacatcctggttctcctcgagtccgagcgcgaggcccgccgcctgagataaagaaggggttgttgggggatgttgagtggagggagagaatgatgggaatagcgttcagctaccttgtcggcctgtttggctcgacagccgcaacgacctgcggctagaggagggg

SEQ ID NO: 6462 - DNA, 683 bp, Zea mays
  Clone ID: MRT4577_105884C.1
agagagcgttctggcagccgttgcggagcttgaacctctgcaaccaccaacagctaaactaaaagcagcggcggacggcgggcggtactggacgaccggccgacgatggctacgccggcgcagcagcagggtgaccagcaccagccgaggctgcagaaggtgatggttgctgtagacgagagcgagtgcagccggcacgcgctggagtgggcgctgcggaacctggcgcccacgctggcgccgccgctactggtgctcaccgtgcagccgcacttcccgctcggatacgtctccgccgcgtccttcggcgcacccctgggcaccgtccctccggtggctccggagctcatcaggtcgatgcaggagcagcagagggagctcacgcaggagctcctcgacaaggccagggccatctgcgccgagcacggggtatgtgcagatccggtccccttctttctcccaagtgctagcgtttatctattttacagatcgtcgaagtactttctttttggctaattttcacagagcaggttttagctagaagcctacaactagctgttccttagctagagccatagagggattgaggttaccactcgacccctgtttgaactgcactgcaggttgctgtagaggcaattgtcgagggtcgagatgcaaggaggtgatatgtgaagtggctg

SEQ ID NO: 6463 - DNA, 576 bp, Zea mays
  Clone ID: MRT4577_105885C.1
aattcggcacgagggggaagtttgcagtctagccccagaactctttagtaatttgcgcgcagtttaggaaattggtaaatcacagaaaggaatttagaaattgatttttgggtataaaaataattacagaaactcatttaattcatagaaaattcatattaaatccttttcgatccattccggtggcattaattttgtattaatattgtctatcaattagtaactctgtttagccatgaaacttgtattaaaattattcacttgaattattctatactaggcacataataacttcggaaattcgtaactcgataaccgtaactctgaatttagtgattcttgttcctacgatctcgttacgatgcatagaatattatcatacattatgttctactgtttggtgtgatgttaatttctgctataacctatttgtttgtattgttgcgagtagacgagcaagctattgaggacctaggtgttcggcaggtggagactgctgagcaggagctcgttgaaggcaagttgtgcccttgatcacttctttttacccaataatgttcttattatcataatgat

SEQ ID NO: 6464 - DNA, 2228 bp, Zea mays
  Clone ID: MRT4577_105886C.1
ccacgcgtccgcttggcctgtgcgtgcgtctgccaagttccagaagccacgccaccgatcgtgattattatccatcaatcgatcattccggtagtatccatccaactcttcataacaggcgacctgagagcagagcagacagagagcgttctggcagccgttgcggagcttgaacctctgcaaccaccaacagctaaactaaaagcagcggcggacggcgcgcggtactggacgaccggccgacgatggctacgccggcgcagcagcagggtgaccagcaccagccgaggctgcagaaggtgatggtggctgtagacgagagcgagtgcagccggcacgcgctggagtgggcgctgcggaacctggcgcccacgctggccccaccgctactggtgctcaccgtgcagccgcacttcccgctcggatacgtctccgccgcgtccttcggcgcacccctgggcaccgtccctccggtggctccggagctcatcaggtcgatgcaggagcagcagagggagctcacgcaggagctcctcgacaaggccagggccatctgcgccgagcacggggttgctgtagaggcaattgtcgaggtcggagatgcaaaggaggtgatatgtgaagtggctgagaagaaaaatgtcgatctgctggttcttggaagccacagtcgtgggccaatacagaggttgttccttgggagcgtcagtaactactgtgtacatcattctaagtgtccagttcttgtggtgaagaaccaaggctgatgaaggattcaactcccagctgctagtcctaatcatgttcgggtatttgtcaacgtatttgtaatgtgtagtacttgctttagccaaacgcattggcgaataaagtagcttgctttgcttcttggaagggccgaggctggactggaggagagttctttttctttttctttttttctggtcagtgtgcctttgctccggaatggcagagttgtaaataagaactacgaactttgtgcgtatttatggttgttgtatttatgattgttccctaaaccctaaaccaatcaatcaagcaaatagagttgtaagctatatttagctaggattttaaataagcaatcaaacaaataaggcagccgttgccactatccatttctcatctctcccagatccgatcgcggccactgccatggcagaagcagccggcggcggacccctgctccccgaggaactcgttatctgggagatcctgacgcgtctgccggcgaagcccctcctccggtgccgcgccgtctgcctctcctggcgccgccgactcacctccgacgctaagttcctcctcgcccaccaccgtcgccagccgtcgctcccgctcctcacccaaggggacaggagcaccgaggacaggaggatcgacgccctggactaccgcaccggcgagcggctccccgtcgcgcggacgacgggccggaccgccgccaacgccgacgacctgaacgtgctcgcttcctgcgacggcctcctcgtcctcatcgccaacggcggcctccacatctgcaacccggcgacccgccagcgcgcgccgctcgcccttctccacggcgcctcctgcatctccgcgctttacccttaccgcccgtccgggtcgtaccgggtggcgggtgctctgctgcttcgagagagccgaggacggccacgccgtgtaccacgtgcacaccgtcgggtcgcgcgagctcaggtgcgtcggagaacctcccgcgctgtgggcgtccggagacgtggcgatggcgatgccgatgatgttgtgctttcacccgcacgtcgtggcaggcagcaggatctactggcagccggtaaagctgcccggcggcaacgggaaggtcaacaacatgctcgcgttcgatacagtgaccgagtcctgttgctgtagaggcaattgtcgaggtcggagatgcaaaggaggtgatatgtgaagtggctgagaagaaaaatgtcgatctgctggttcttggaagccacagtcgtgggccaatacagaggtatacatgcatcttggacccatcaagagttaatcctaagcacttggtcactcgttttctcaccactatccttcatcgtcgctgcaggttgttccttgggagcgtcagtaactactgtgtacatcattctaagtgtccagttcttgtggtgaagaacaaagctgatgaaggattcaactcccagctgctagtcctaatcatg

SEQ ID NO: 6465 - DNA, 2219 bp, Zea mays
  Clone ID: MRT4577_105887C.1
gccggccgggatcctccactcttcataacaggcgacctgagagcagagcagacagagagcgttctggcagccgttgcggagcttgaacctctgcaaccaccaacagctaaactaaaagcagcggcggacggcgcgcggtactggacgaccggccgacgatggctacgccggcgcagcagcagggtgaccagcaccagccgaggctgcagaaggtgatggtggctgtagacgagagcgagtgcagccggcacgcgctggagtgggcgctgcggaacctggcgcccacgctggccccaccgctactggtgctcaccgtgcagccgcacttcccgctcggatacgtctccgccgcgtccttcggcgcaccccgtacgtaacgtaccgatcgacgcctcattttccttgctctcactcccgtcttcttcgacatgtatgggctgaattgaacgggatggtccggttggtttgctagtgggcaccgtccctccggtggctccggagctcatcaggtcgatgcaggagcagcagagggagctcactcgggagccgctcaacagggcgggggccactcgtccccgtatccgttcggcttgaaatttccgatttctgccagatccaatcgcggctaccatcatggcagaagcggccggcggcggacccctgctccccgaggaactcattatctgggagatcctaacccgtctgccggcgaagcccctcctccgatgccgcgctgtctgcctctcctggtgccgccgactcacctccgacgccaaattcctcctcgcccaccaccgtcgccagccctcgctcccgctcctcactgaaggggacaggagcaccgaggagaggaggatcgacgccctggactaccgcaccggcgagcggcgccccatcgcgcggacaacaggccggaccgccgccaacggggacgacctgaacgtgctggcttcctgcgaaggcctcctcatcctcctcgccaacggcggcctccagatctgcaacccggcgacccgccagcgcgcgccactcactcttctccacggcgcctattgcatctccgcgctttatcctcacatcccgtccaggtcgtaccgtgtgctctgctgcttcgagagagccgaggacggccacgccgtgtaccacgtgcacaccgtcgggtcgcgcgagctcaggtgcgtcggagaacctcccgcgccgtgggcgtccggggatatggtaatggcgatgccgatgatggtgtaccttcacccgcacgtcgtggcagacagcaggatctactggcagccggtaaagctgcccgtcggcaacggcaaggtcaacaacatgctcgtgttcgacacaatgaccgagtccttccagcaactgctgtcgcccgtggagggcccctttcttgaactgtttcagatgaacagcggcgcccttggattgtaccactgccgcagcggcaaggttgatctttgggtgttacaggatcacgggagctggtcctggtcgatgaaccaccggatcaaattggacgtgatgtttttctccctgctgccggtgctggacccggaaggagatgtgctagtgctttctaaaagaggggaaacaggcatcctgtggcaacatctgcatcacatttctggtgtcaatggcagtttgctggccctgtatcaatggagcgcttatctgaagcttagcaggcataggctcaaagaaagtctagtccaccatgacttcttctcgatggaaggtaatgagggtggtgtggatgaaaaaccattgttcgatggcttgtcaactgtggcattgcttcgtgatgataattctgagccacattgagaaacaaaggtattactcaagctgtttcatctcatcaggatggagtcactcctgcctagtaataacagcactgcagattagtaataacctgaaactatacctcgagtctgatttttcccttttcacatgagtcataaacactgttatgactggtattttattttcccttttcacgtgagtcatgaacactgttattactggtattttattttccattttcacatgagtcatgaacactgttatgagtggtatgtatgtgcgctggaaaacgggctatggcggtgttggtctcaaattagttgccatttggttcacgaaatgtaacgtaaatggtaacgacaatataacaattttaaggaaggcaaacattttgcctagcctcaagcgcttct

SEQ ID NO: 6466 - DNA, 863 bp, Zea mays
  unsure (1)..(863): unsure at all n locations
  Clone ID: MRT4577_105888C.1
gtctttcgagaattgtttgagcgcgaaggctatcaatttgattatgtgtatgactggactttgttgaagtgtaagcaatcccagaaggctaaggttcagcaaggatgctctcatgatgcaggcgtaagcagaggtccagttgcaacaaacgtggacaagcaccaagttggtgttgcacgcccaattaatgcttcaggtctgcttgaagcagaacaacgcccggcaatcagaatgcaattaaacagccgttccaataatctgcatcctgagagattgggagtgtctgctagtcataataatgtactgctgcaatccacgtcacttgaccatgctgatgctccaatggaccacgcgacacattcaaaagcacaggggtccattgatccacacactcgtggaagttatagtccagggccctctaaccgcacttaaccttttgcattgttcgtaaaagcttgcgggtccatgcagtaaacaattgcttccattgtgttgaacacaaaattacaccatgcaaaacatcgcgaagaggtatctgggaagtttatgattggttagcatgcacattcaatgacatatgcatgcatcagttaggacaacgcctcttcgctaaaagtgaatatccgaccagtattgacctgcagtttccagtgtcttgacaccaaatcgccatacaaaaactacagagtggtggtatatgggaagttcatggttggttagcatacaccctctttgctgaaaggctgtcatattctacttggattggccgcagcttgcaatgtatgacaccnaatagcacccatacaagactatgaagaggtctgggaagcttatgattgggtagcatccatgtatctataact

SEQ ID NO: 6467 - DNA, 801 bp, Zea mays
  unsure (1)..(801): unsure at all n locations
  Clone ID: MRT4577_105889C.1
ngtttccagccactttgcccactctcctctttcctctttgctacccatttcgtcgcagtagtcggcagtcgaaaccctagtcccctcgctttccttccactcgccgtcgcggcgccgatagagccagagctgaaaggcgtaggaaaagctggtggaggaggggatggaccggatcgtaggcagcaagtacaagctgggtcgcaagatcggaagcggttccttcggggagatctacctcgcgacgcacgtcgacacctacgagatcgtcgccgtcaagattgaaagcagcaaaaccaatcatccacagttgctatatgaggccaaactgtacaatgctcttcaaggagggactggtatcgcaaacataaaatggtgcggcattgacggcgatgaaaacattcttgttattgatttactcggaccaagccttgaagatctgtttgtttattgtggccggagattctcactgaagacggtcttgatgctagcggaccagatgataacaagaatagaatttatgcattctaaaggctatctgcacagagacatcaagcctgataacttcctcatgggccttggtcgaaaagctaaccaggtttatgtaattgacttcgggcttgcaaagagatatcgtgattcagccaccaaccgccatataccttatagagaaaataaaaacttgactggcacagctcgctatgctagccgtaatactcatcttgggattgagcaaagccgcagagatgatttggaatcgatcggatacgttcttctgtatttccttaggggaagtcttccttg

SEQ ID NO: 6468 - DNA, 420 bp, Zea mays
  Clone ID: MRT4577_10588C.1
atacctttcgctagtatcctctcatcgacagctacacctcagggaatatgccgctgcgacctcctcgatcactttcaactttcgaccatgctgcgcgcacatgatgacgcggaggctcccgtcggagctcccacgaagaggacgttccgcaatacaccgctaccgaaggcctgacatacaggcactctctccacatgagcacggacgagctcgtcccgctcttgccggcgcgcgcgacgacaacgcttaccatgggtatgaagatcaatgccaaggtcctcatcaacaagatgtgcaagatcaacaaagatgcatcgctgacgtggagatagcacaccagacaagagacctcaccgtagcatgttcatatcccccttgcatcattggcagcgctctagccgtctacaatctcaatacctg

SEQ ID NO: 6469 - DNA, 3533 bp, Zea mays
  unsure (1)..(3533): unsure at all n locations
  Clone ID: MRT4577_105890C.1
ctttccccaactccaaccctagcttcctagtctacgcgtccccgagcgagcatggatcggatcgtcggtagcaagtacaagctgggccgcaagatcgggagcggctccttcggggagatatatctcgccacgcacgtcgacacgtacgagattgtagccgtcaagatcgaaaacagcaaaaccaaccatccccaattgttatacgaggctaaactgtataatgctattcagggagggactggtattgcaaacataaaatggtgtggcattgatggcgaagaaaatgttcttgttattgatttgcttgggccaagccttgaggatctgtttgtttattgtggccggagattctcactgaagacagttttgatgttggcagatcagatgataacaagaatagagtttttgcattctaaggggtacttgcacagggacatcaagcccgacaactttcttatgggccttggtcggaaagctaaccaggtctacatcattgacttcggacttgccaagagataccgtgattcagccacgaatcgccatataccctatagagaaaataaaaacttgactggcacagctcgctatgctagccgcaacactcatcttgggattgagcaaagccgcagagatgatttggaatcgatcggatacgttctcctgtatttccttaggggaagtcttccttggcagggcttgaaagcagccacaaagaaacagaagtatgacaaaataagaagagtactcatgactttcgactcctattgaggctctatgtaaatcccatcctgtggaatttgcttcctatttccactactgccattctctgacatttgatcagcgtcccgattatagtttcttgaggcatgtctttcgagaattgtttgagcgcgaaggctatcaatttgattatgtgtatgactggactttgttgaagtgtaagcaatcccagaaggctaaggttcagcaaggatgctctcatgatgcaggcgtaagcagccgtccagttgcaacaaacgtggacaagcaccaagttggtgttgcacgcccaattaatgcttcaggtctgcttgaagcagaacaacgcccggcaatcagaatgcaattaaacagccgttccaataatctgcatcctgagagattgggagtgtctgctagtcataataatgtactgctgcaatccacgtcacttgacaatgctgatgctccaatggaccacgcgacacattcaaaagcacaggggtccattgatccacacactcgtggaagttatagtccagggccctctaaccgcacttaaccttttgcattgttcgtaaaagcttgcgggtccatgcagtaaacaattggatcctttacaaacctaataatggtgacacattctatgcataatgaaaatttggggtttcacctggatagctttcattttaattacgggctgcagcagtgcgacaatgtgcattctacttggattgagttacaactttttaacttgtataagcttccattgtgttgaacacaaaattacaccatgcaaaacatcgcgaagaggtatctgggaagtttatgattggttagcatgcacattcaatgacatatgcatgcatcagttaggacaacgcctcttcgntaaaagtgaatatccgaccagtattgacctgcagtttccagtgtcttgacaccaaatcgccatacaaaacttgactggcacagctcgctatgctagccgtaatactcatcttgggattgagcaaagccgcagagatgatttggaatcgatcggatacgttcttctgtatttccttaggggaagtcttccttggcagggcttgaaagcagccacaaagaaacagaagtatgacaaaataagtgagaagaagctttcgactcctattgaggctctatgtaaatcccatcctgtggaatttgcttcctatttccactactgccattctctgacatttgatcagcgtcccgattatagtttcttgaggcatgtctttcgagaattgtttgagcgcgaaggctatcaatttgattatgtgtatgactggactttgttgaagtgtaagcaatcccagaaggctaaggttcagcaaggatgctctcatgatgcaggcgtaagcagccgtccagttgcaacaaacgtggacaagcaccaagttggtgttgcacgcccaattaatgcttcaggtctgcttgaagcagaacaacgcccggcaatcagaatgcaattaaacagccgttccaataatctgcatcctgagagattgggagtgtctgctagtcataataatgtactgctgcaatccacgtcacttgacaatgctgatgctccaatggaccacgcgacacattcaaaagcacaggggtccattgatccacacactcgtggaagttatagtccagggccctctaaccgcacttaaccttttgcattgttcgtaaaagcttgcgggtccatgcagtaaacaattggatcctttacaaacctaataatggtgacacattctatgcataatgaaaatttggggtttcacctggatagctttcattttaattacgggctgcagcagtgcgacaatgtgcattctacttggattgagttacaactttttaacttgtataagcttccattgtgttgaacacaaaattacaccatgcaaaacatcgcgaagaggtatctgggaagtttatgattggttagcatgcacattcaatgacatatgcatgcatcagttaggacaacgcctcttcgctaaaagtgaatatccgaccagtattgacctgcagtttccagtgtcttgacaccaaatcgccatacaaaaactacagagtggtggtatacgggaagttcatggttggttagcatacaccctctttgctgaaaggctgtcatattctacttggattggccgcagcttgcaatgtatgacaccaaatagcaccatacaaagactatgaagaggtctgggaagcttatgattgggtagcatccatgtatctataactgtgaccgcaactttgaagaaacacatgctgtggctcatggcctcgagataaaaaaaggttaaattgcaatcgacaacaatctggttgggcagaggtaaatatcatgccgtgctcctgtcatagacatggttgcctgtattttatttgaatgagggttgaatagcttataacattgtgaggaagtcctaccacatattgatttttcatgttggtgttttttttgttggcattctctctccagttgtcataaaaacaatgaactgtacataatttcttagaagggctgttcttaagtgttgaggtggaatgagatgatttacttgataaaagtgtacatatttaggtatccctcatttttctgattgcatcaatatctttcaatgatataacgctggttccgaagtgaatgtttttttagttataaaaaggatgaactgtatctaggagtggagccatctttatactttgtcgagtctgaacagcacttcgccagaattcaaaactgcccaatttattcatgc

SEQ ID NO: 6470 - DNA, 216 bp, Zea mays
  Clone ID: MRT4577_105891C.1
gagagcgttcttgaatgctgcgattgttcatctcgcactggtctgatggaatcccacgccaaggaaggagctgttgcaacacaagcaccagcagcgaccccaacgtcggcggctaccgtacgcgctgaacatctgaaagagcacccgtaactgactgtggacccatacatgcaagagatgtcgaaaaccgccgcacggagcgttagttactgcaag

SEQ ID NO: 6471 - DNA, 298 bp, Zea mays
  Clone ID: MRT4577_105892C.1
tcgagcggccgcccgggcaggtactagctactgaaggctatttcagaatcaaaaaaagtaaagtaaaaatcatttagcttattctctcaatttcaattgaccgctactggatttagtatatctaatatgaattggcgatcagaacacatatggatagaacttctaaaaggttctcgaaaaagagataattttttctgggcctgtattctttttctaggttcattaggattcttagcggttggggcttccagttatcttggtaagaatatgatatctgtacctcggccgcgaccacgct

SEQ ID NO: 6472 - DNA, 324 bp, Zea mays
  unsure (1)..(324): unsure at all n locations
  Clone ID: MRT4577_105893C.1
cgaagaaacnaaagaacggacacctcaccacaaacaacattttttttttataaaaccaggacaaaagaacccgcanggggcccattcgaaaacctgactgaccacaatcccaaaccataaaacaacaaacccttggccctactcaaacaacgttcattcaccgcaagtgaaggaggcgccgaccaagacctataagtgtcctaatgcatgagagcacacgctggttttcgcgtcgtaccatgacagaaactatctgttaaaccaaaaaggaataatagagttcaaaaaaaaaaaaaaagggaggacgttttacaggaaccaaac

SEQ ID NO: 6473 - DNA, 892 bp, Zea mays
  Clone ID: MRT4577_105894C.1
ccggccggggcccgcgagcgcgccggccgtgactcctccgtcctccctccgcgtttacacccgccgccactcctgctttggcgccgtagctagcaaaggcgatatccatggcgacccctgcacggatcgagctggacaagctgagcgtggagcagctcaaggggctcaaggagcagacggatctggaggtcaacctcctccaggacagcctcaccaagatccgcaccgccgccacccgactcgagaacgcctccgccgcgctccaggacctatccctccgcccccaagggaagaagatgctcgtgccgctcactgcgtccctctacgttcccggttcactggacgacgcggagaaggtcctcgtcgatgtcggcaccggttacttcatcgagaaaaccatggctcaggggaaagaatactgtgaaaggaaaattaatttattgaagtcaaattttgatgaattggttgaggtggctacgaaaaagaaagccatagcagacgatatgggtttgctactacaagccaagctgaggcaagcgtcaccgggcccaagttcatgagagctggatgcacacctcgtctcttctacctatgttgtatcaaacatcatttagtaattttgaagttgggagtcacgcagcagcgtagattgtattctttggcatcttctgtcgcgcagcacactctttgaatggtttaattttgttcctactgctagcagcccgtggaactttcatgagcttgtatggttgggaccaagcatcgttccgtacttccattgtaggtctggccgatgggggtggtacggcaccaagcattgctctattctattgtaggtgcaggctgttgcatttcgtgcgaaaaaaaaaaaaaaaaaagcggccttgggtgc

SEQ ID NO: 6474 - DNA, 352 bp, Zea mays
  Clone ID: MRT4577_105895C.1
acctttattttttttgggttttatgggtaaatcaaagggctatagggctctcatatttttgcatcaacccaacagtcagagaaggaattgtttcaaatccacacaaactacacgcacagttacctaccaaaagaagcactcaattgtgtgctcaatctccacccatgtatgcatcccccatcttagctatgaactcacaaaacacaatacctactcccatttattcactctgcattcatgctaagactgagccctatatacttgcccttctatattgcctgcgacacccatctttatcgtacaccaacccttactgcaaccccgcaccatgccttttccatgtctgctcccc

SEQ ID NO: 6475 - DNA, 401 bp, Zea mays
  Clone ID: MRT4577_105896C.1
ggggccgcgcgtttttttttttttttttggttttttttttttttttttttttttttttttttttagattttacattataaacctctgagaacaaaaagcggagccataactagatacaaaaaaccttaaagccctctgcactcgaaaaccccacccacaagagcacatacagcgcagccttctcaaccatgaaacatggcaccattgaaaccaaagataacactgctcacgctacaacagagacagtaaaagccacttggcccatatcacccattccttggcttgttaccaaggcgagaaaactagggagcgacaccgatgatgcccataatctgcagctcctgcacgctgtttcgggcaacagaaccacccctcttgcacaagtgtggcgagccgttgcc

SEQ ID NO: 6476 - DNA, 224 bp, Zea mays
  Clone ID: MRT4577_105897C.1
attaataatggagcttggacagtctctttgagctggatggatcacactttacagttcaaaaatttcggtacataaataagtttagtccacctttctacggaaagagcttccttatataaaacggccctttcttccgttgggtgggaccaaaccagggctgaaggaccaacaaaaaccaccggttgaggcttgcttaattccatggggatggtgaaacattcaag

SEQ ID NO: 6477 - DNA, 138 bp, Zea mays
  unsure (1)..(138): unsure at all n locations
  Clone ID: MRT4577_105898C.1
tgcagtccgcggctcgtcgaggcgagcatgtctcccaattcccatcccaatatactatatatacanntctcctcgaaccgccagtgtttcctgtggagccgagctatatctcagtgagccgatcgaatgtgtatccac

SEQ ID NO: 6478 - DNA, 364 bp, Zea mays
  Clone ID: MRT4577_105899C.1
ccacctaattcatgggtatctacatgaaaaaggggcatggactcctccactacattacaattgcaccgacaagggacaagggaaaacggtttttagctacaagcgaagttcacaacagtgagggggatgggatcacacacaacacaacgagcagagtggcaaagcggaggcatacgacggagtttatttgcatctacgggttataagtagtacagcattacacgatttacggtagcactgggccgattttggctattatcagctcggatgagcgtcataaccaatgtttgtgtcccctgtggcggtcgtggccgccctcttggacgactcggccttggccttgcgctgcttcctcctcagtttc

SEQ ID NO: 6479 - DNA, 174 bp, Zea mays
  unsure (1)..(174): unsure at all n locations
  Clone ID: MRT4577_10589C.1
cacgggaccctcccccggcgccgctagatcgacgcggcatgagctggggtccctggtcgcgtgtgaccgcgctcgatgatcgccgagtatcattcgccacgccttgctgttctctgtacaatcacggtggccagccgtgatcngggtacaaagcactcagagcggacccgcgtc

SEQ ID NO: 6480 - DNA, 1568 bp, Zea mays
  Clone ID: MRT4577_1058C.1
cattgggtaccctcgaggccggccgggatgtctaaaagaaaaaaaaaaaccccgcccccggttcgtcacttcgtcgctttctcgtcgagccgcgactgccgactgcgaccgagagaattctctatccggtccccgtccggtttggttagagttcgcactcgtgattgggttggtcgcttggttcttccctgccggaagatacctttcgttcggtgtcgccaactcgccattcttgggaggtcttggtcgggaccggtgctgatggaggagaggtacgaggcgctgaaggagctgggggccggcaacttcggcgtggcgaggctggtcagggacaagcggaccaaggagctggtagccgtcaagtacatcgagaggggcaagaagattgatgagaacgtgcagagggagatcatcaatcaccagtcgctccggcaccctaacatcgtacggttcaaggaggtttgtctaacacccacacatcttgctattgtcatggaatatgctgctggtggagagctatttgagaaaatctgctcagcagggcgattcagtgaagatgagtccaggtatttcttccaacagctgatatcaggggtcagctactgccattctatggaaatttgtcaccgtgatcttaaacttgagaacaccctccttgatgggagtccaacacctcgtgtgaaaatttgcgactttggttactcaaagtctgctttgctgcattccaaaccaaaatcaacagttggaactccagcatacatagcccccgaggttctttccagaaaagagtatgatggaaaggtagcagacgtttggtcctgtggtgtcacgctgtacgtgatgctcgtgggatcatatccatttgaagatcctgaggatccaaggaacttccggaaaacgatcagcagaattcttggcgtgcaatactccatcccggattatgtgagagtgtcttcagactgcagacgccttctgtctcagatattcgttgccgatccttcaaagaggatcacgatcccggagataaagcatcacccgtggttcttgaagaacctcccgagggagatctcggagagggagaaggccaactacaaggacgcggatgccgccgagccggcgcaggccgtggacgagatcatgcggattgttgaggaggccaagacccccggtgacatgtccaaggtggttgacccggcgctgctggccgagatggcagagctggagagcgacgaggaagaggcagacgccgatgacacctactgatcgctcctgcatgcagctcagcagctgctcagtcatggtgtccagtcctttgtgctgcagacatggcgccgccgagcgcccgagcttaacccgtgcgtgtgatgacggatgttgtattgcactctttacgctgtttgtataataaaagtctgtacaacgctgtacaattgcagattgccttgtacagatgaactagcgtgcagtgatatactcagtcccaaattctatgttccaaaaaaaaaaaaaaaaaaaaaaaaaaaaaaaaaaaaaaaaaaaaaactcgaggaagggcgcgtgtacccaca

SEQ ID NO: 6481 - DNA, 639 bp, Zea mays
  Clone ID: MRT4577_105900C.1
ggggcaaaaaaaataccttttcaaatcccaaaaacaaaacgatccatgggggtttttaacccccccccaaaggggggttcccaggaaaaaaaacccggggccctcaaaaaaaaaattttgggggggaaaaaggaaacccggaattttaaaaaaaaaccggaagggaaatttccaacaaagttgttcggccccttgtttgataattaaggggaaatttgtcccccggccagggggacccttctaccaaaggattttatcctttttcccccttttttttaattttccgggggggaaggggggattttttaaagccgggttgttccccccccctaaaccctaaaatctttttggggccttccccaaaaaatttggggcccccaggttgttttaatcttttttttccccctggggggggggggggggctttgccctcttttggcccaagaaaagccccaaaccttggttacggggattttttaaaaccccgggaaaccaaaacatggtttttttaaaccctgaaaaagggggacccccccacccccggttaaaaaaatcccccctttcccattaaaaaaaagggaaggaaaggggcccccggccacatttcttttgggggtttaaagtaccgggaggggggcc

SEQ ID NO: 6482 - DNA, 567 bp, Zea mays
  unsure (1)..(567): unsure at all n locations
  Clone ID: MRT4577_105901C.1
acacgccgncaggaacgcgacccccgcgaccacgacgaagccccgacacggagcccgacgcgcccgaaacggggaaaccccaccaccgcggcgccgaaaaaaaagccccaccgcggcccagagccacacgcacaacagagcccagagcccaccgcgcaagaacggcaacggcggggagggcgacggaggaggacggcggccccggcagcgaaagcagggcagaacgacgcggcagcggagacaagcgcgggcacaggcacaaacgcagacaggaaccgcggcgcgggngcagggaccagcggaagcgggggcggcggcacgaagcggccgcacgagcggcaaaagagcccaggcgaggggcaaggagaaaccggagcacaaccgcgaccagaancaggagaacagccagaaccaggagacgcgcgacgcgaacggacccaaacgcaacgaggcgccaacccggaagcacaacacaaaaagcggccgcgacgcgagacccacacggcgaccaagaaagggaaacgacacccgcgaccgacgcccccaagaaagaggccgaaggcagac

SEQ ID NO: 6483 - DNA, 364 bp, Zea mays
  Clone ID: MRT4577_105902C.1
aatcaaaattttttttttcaaccactgtgcggcaccattattttgggggggtctcaaaaaatcttacctattcaattcaagtggatcaacatgatcttttttagccaagcagcgtgatataaagctctctacaaactacaaaatgtctactgctccaacacatcacatgttcatgaaccacaccaaccatgattgtgcttctcaaactgcggtgtggacctccacccattttagaggagtcacacactttttgtgtgttttaaaaaaagcggatcttttttctcattttacataaaaccgtttagctgatcacatcaacaacctctaaaaaaaaaaaattaattggacccaaactaaaaatttt

SEQ ID NO: 6484 - DNA, 340 bp, Zea mays
  unsure (1)..(340): unsure at all n locations
  Clone ID: MRT4577_105903C.1
tgttttcccgctctcgtccggtccccgtttctggccggtgcggcgcgcgncctgccggcgccttccggccgggtcccgcctgcgcctcctctccggcttggccgcctgttccttcctcttttgcgcgtctttctgcgctcctctacntctcctgtggctgcctgtggtgtgtctcgctggcggccccctgcgtttttgtctctcgctgcttctgttctgcttcctcctctgttgcggttgccccctgctctcctctttgccgcgctcgccccctgcgaacctcctgatatcgaccnccccccccccnnnngcggccttccccctcccccttcccttcccc

SEQ ID NO: 6485 - DNA, 473 bp, Zea mays
  Clone ID: MRT4577_105904C.1
ataaggaaagctgacacgcccgcaggcaccgatcctgtatagcgggcgcgatccacgcgtccggtcagcctaacaaggacccaatcatctacagatcgtatcaatgaacgctttgatggtactgattgatgcccttgctctctcagagtgcgccgcatgcggacggtgcacactagggctcatgacttacagaacaaactagcgatctacgtatatagtcaatgcgtccattacgttatatctacagcacatagcagccctcagtagtcatacactgacgccacttagctagcacgggtaaggacgtgcctgctgtacgtacactgcggacatggcagccagctgatgcgctacctgggccagtatcagaagcaccagatcaacctgtggatgctgctgtagaaatcacagcagtaccacacgctacatccgctgtaacagcagcactgcctccacatgaagcatctggagcc

SEQ ID NO: 6486 - DNA, 439 bp, Zea mays
  Clone ID: MRT4577_105905C.1
atcggaatccctgaaaaatcccccgtaccatgaagctccgggtgggatctatgcaagcgcgcggggggtccggcggcgtggagacccaacgggtggacctggcggccacgggcactttggccgacgtgaagacccttcttgcgtcgaagctctctggggggcaacccgtccccgccgagtccggtcggcttttccttaaccgtaacgaggagctcgtttcgccggaccctgccggtacgctcccgtcccttggcctcgcgttcggggatcttggattcttcaacctatccccccttacgggcctagcgccggccgctcaagcccttgcacggaaccctaacccgagctctggcgctgcagcgtcgttcgccgaggctggcgaccgcgggaggggtcgaaacaatctggtactggaaatttctctttctcgtcactggcg

SEQ ID NO: 6487 - DNA, 505 bp, Zea mays
  Clone ID: MRT4577_105906C.1
gcatccacgagaggagagcgaaggagattcccattcgcccctcaaatctcaccagaagcgaagccggaggcggaggagggaggaaggagatcgcgagcagccggagccggagccggagccggaggccgagaagatgaagacgttcgacccgtggccggtcttcttccgccgggagtggaggcgcaactggcccttcctcacggggttcgccatcaccggattcctcatcaccaagatgacggccaacttcaccgaggaggacctcaagaactccaagttcgtccaggagcacaagaggcactgaccgaccaggtgaaggagttgtccgaatttcctgtggacagccagttatgttatgccgtttgaatgaaaaattagccccctctttttcgttttttaaatctaaaaatgcgtgcactctatgctccatttgtaatgtaataagaggcaactgaattgattcaacagcaatcagcttctgattaagatacataaagtttaatcc

SEQ ID NO: 6488 - DNA, 437 bp, Zea mays
  Clone ID: MRT4577_105907C.1
tttttttttttttttttttttcttttttattttatgttggggttttttttttttatggtttttttccatttatttttattttttttaatattttttttttttttacaacaccgtaggtccccccgaaaattcccacccgtcccctggaaacaaaccaatttacctaaaatagaagtgataaaaaactggcggtaaaaatgaaaaaaaatttctccgggaaaaaatggatttcccccaaaattaccaaaaaaattaccccccggaaaataaaatataaaacccgggggcccctataggagagcctaaaccaatttattggggtgggcaaacatgcccctttttaattggaaaaaatttgggcccatctttaattaattaatccccaaccccccggaagaaggcgtttttttatttacacccacaaggggttttttttt

SEQ ID NO: 6489 - DNA, 211 bp, Zea mays
  Clone ID: MRT4577_105908C.1
gctaattatcccctatatcttctcccccttttctttttttttttttcttaatttctttactcttacagcaagaatgttttataaacgtatgcattccacctccttacaaaactataacaacactgttccctacataaaacattaacaacacccattacctaatctatacaattaaccattctactcttactccatccttcaaacactaact

SEQ ID NO: 6490 - DNA, 312 bp, Zea mays
  Clone ID: MRT4577_105909C.1
ggggaaaaggggggttttttttaccaaaaaaatgggaaattggggggccaacagtttttcattttttaaaggccatggcggacccacccctggcccaaaaaaaggggtttttttttttttttttacaaaaacattttagggggtcaaaggaaaaaagttaattgcaattttaggaacgattcttttcaaaaatttttttaattaaaaccccaaggggctttttttttactgttttttggaaattgggctaaaagatgggcgttagcctttgttttcccaccttccaaaagggtttcattttggtggggtggg

SEQ ID NO: 6491 - DNA, 255 bp, Zea mays
  Clone ID: MRT4577_10590C.1
ggagctccaaaaactggcgcctgtttatcatgtaacaattgcaactactaacctgcgtgaaggactgaatttctaaaacactaaaaaaaatcttacactctgtggactgattacatgggtgaatgtattccctctttaatcgagcaaacgcgatctaaatgaaatatcagaatgtatgcgtagtccctcaacagggtaacatcataaatgaattcctccgtgtggatctttgtatctaccaggacgatggtgaat

SEQ ID NO: 6492 - DNA, 439 bp, Zea mays
  Clone ID: MRT4577_105910C.1
ccttttattgtctctctgtgtgtgtgttctaccgtcgttccgctagctctgtgtttgtttccttgatagcagcttgtatgtcttgtatatatgtgtgatgtcgtgtttaattaatatatatgctgtcatttgtcaaaaaaaaaaaaaaaaaaaaattatatctttccccccccggcccctccgaaaggctaaaaaagcaccacaccccacggccctgactatacgaatccaagccctcctcccccccccccgggctcgagtgaaaagggggtcttccctgctaaagggggatacgtttacaaaaccccacatcacaccaaccttgggcgcaaaatgtataaactgtggtgcctgacgagagagctaacccacacaaaattacattgagctcactgcccgcactccacactggaaacccgggaagccccgccggcctaat

SEQ ID NO: 6493 - DNA, 189 bp, Zea mays
  Clone ID: MRT4577_105911C.1
gggggtgtggtttttttaatttttttttttttctccccgagggattagggtttcctttaaaagcttagcctgaatttacagaagaccatcctcgggtccatacaatatgaacaggtagttacttagccataaccccgcatcatttatctgttttgcgtaggggaattcagccgggcatcatcttttatt

SEQ ID NO: 6494 - DNA, 180 bp, Zea mays
  unsure (1)..(180): unsure at all n locations
  Clone ID: MRT4577_105912C.1
cccgggncgacccagcgnccggggaagcgagggagcggaggaggccggagagcacaccacgacgagaggaaggacccagggcaaccgaacacccgagcgcgggcacaccagccccagaccaggagcagagcagagcaagacagaaggagcgcacgacacccggaacgcaaacgcagaccc

SEQ ID NO: 6495 - DNA, 1468 bp, Zea mays
  Clone ID: MRT4577_105913C.1
ctgacatcaccggtgggggctggggaggagagggagagccttctttaagatcagtagatcaccacaccctcacccctcctcattgccccccctcacacacgcacacacactctctctctccccattgtgtcactgtaactagcaattgagctcttaaaattttggttgaggtgcagtagcaaggcacactactacgatctacaaacaagatgatcagttgatgcccggtgtcttcaggatcttttcaggttcgcgaggtcccattttgcttctccccccgggcttgcagttgcgtttgagtgcacctctgaggctttggttggccctcgcgctgcgtacttaagctctccgccccgtccacggcgttgcatctctcatggcactcggtgtctcctgatagctgctgcttcgatctactccacctaaccgaaagagcgtcgtgtagggtcttggattcttggtccggtgctgttggcgtgtttcttgagatcgaagatccaggagatgatcctgcggcggagatcgaggtcgatgaacagcagcgccggcgcgcagaggagccacgtccccgatcagtccgcgagatcgtcgaccagtccatgcgacggtgacagtggcggggccggcgccgccggcagcaagattgcgaccgcgcgtgccctgttcgcctccccgaggctgctgcactcttcttccctgcccgccggcaccgtcgtcttcgccaagagccccgcgccggacgccgagccccagacggccttctccatgagcccgacgtccgtgctcgacgcggcggcggccttcgtgccgggcacggacggcgccggcaagcgccgcccgccgtggcgggcgcgggacaacaacggcctcgcggacgcgctggactgcagcgaccaccaccaccagcagcagcagcaggagcggatcgtcctcgcggcgacgccgtcgtcgtgctcgctggccagatcgtgctccctggaccgccgcgtcgagttcggcgtcaagaacaggagctcgtggctgcccctccgcggctgcgaagccacggcgccggcgccggccgacccgtgggagatagagccgtcgtcggaggactacacgtgcgtcacccgcgacggagacggagaccggggagagctcgccacggccgatcagtctgccgacgcgaacggatccccgtccacgcacgcgtagcctgatgagtgatgacgccgcctagggtaaagaatccgagtttgctgtgtctaaacaggcgccggaaggtcggacgaactatctttctactcgtgtgagtgctattattgagttcaggcagccttgatgttgctgtattgtattggttgctccgatgcgttccatcgtctggtcagaagatagatagagatgatcattcataggtgttttcttgatcagatgatgaactagacgttttgtccaggttgagctgaagctgtgatataaatttgat

SEQ ID NO: 6496 - DNA, 128 bp, Zea mays
  Clone ID: MRT4577_105914C.1
cccacgcgttcgggtgctcaggatgcaccctgcgggcccgatggtgtcaagggcgcgcctggccatttcacacgtgcacgtcgacgggtacctcatcaccgccgggaccacagagatggagaacatgt

SEQ ID NO: 6497 - DNA, 652 bp, Zea mays
  unsure (1)..(652): unsure at all n locations
  Clone ID: MRT4577_105915C.1
atctctatggcactcggtgtctcctgatagctgctgcttcgatctactccacctaaccgaaaggtagaaccgagatcagtcagggaattcgttaaagatcactaacccgaccacttcaaacgaacatcgcgagttgacgcttcttttgtgctaccttctgtccgcgcagagcgtcgtgtagggtcttggattcttggtccggtgctgttggcgtgtttcttgagatcgaagatccaggagatgatcctgcggcggagatcgaggtcgatgaacagcagcgccggcgcgcagaggagccacgtccccgatcagtccgcgagatcgtcgaccagtccatgcgacggtgacagtggcggggccggcgccgccggcagcaagaatgcgaccgcgcgtgccctgttcgcctccccgaggctgctgcactcttcttccctgcccgccggcaccgtcgccttcgccgagagccccgcgccggacgccgagccccagacgggcttctccatgagcccaacttccgtgctcgacgcggcggcggccttcgcgcccggcacggacggcgccggcaagcgccgcccgncgtggcgggcgcgggacaacaacggtctcgcggacgcgctggactgcagcgaccatcatcaccaccagcagcagc

SEQ ID NO: 6498 - DNA, 290 bp, Zea mays
  Clone ID: MRT4577_105916C.1
caaaccttggtcttgttgacaaccactccaggccatggttccataacgtttccgcaatggagtggctttctttcaggctaaacatgctatccaactttgtctttgccttttctttgactctgctagtgagcctccctgaaggttttataaatccaagtattgctggacttgcagtgacttatgcattgaacctcaactcacagctggcatccataatttggaacatttgcaacacagaaaacaaaatgatatcagttgaaagaataatgcagtactcgaggatccctagt

SEQ ID NO: 6499 - DNA, 311 bp, Zea mays
  Clone ID: MRT4577_105917C.1
gtgattgtggtgttgtttgttcagtcaaaccttataaacggagcacaagtttgttttgaacgacaggaacaagccaatcatcttctccatggctgggggggaacgggggaaaaacctgactgggctggtggagcgggccggccggaaacaagggggggaaggagggggggaaccccgggggcgggcgcagcgaccatggcaacccggccaaggacagggaggagcaggccgagtaaaagaagacgaaagaccccaacaagcggcccacccggaaaggaacatgcaaagggatctccgaaaggagaaaccgg

SEQ ID NO: 6500 - DNA, 289 bp, Zea mays
  Clone ID: MRT4577_105918C.1
tctcccggccacctctaccccgggcgcatgcttgtggacatgtgccaccgcgtccccctcgcggcggcggcgctcgtcgcggtcgcggcgctggccctggcgctcgcccccggcgccgcggtcaagtggcagaggaccaggaacggcaccgaggtcagatacgaccgacgctcgctcatgttcgacggtcaccgggaaaatctacttatccgggaccaatcactacccgtggagcccgtccgacatgaggcacgagctcaaggtcaaggccaaggagggcgggctaaca

SEQ ID NO: 6501 - DNA, 688 bp, Zea mays
  Clone ID: MRT4577_105919C.1
gtgacctccatgtccaaaagccaccaactgagatcgaagctttgtccatggggagacggcctgaggatcgcaggcgtcgtccatggttcagacggtcactacggatcgaggtgcggtaggtcggggcgccgcccacgattgtaggcttggccgggactacttcgtcaccaacgtcctcggttcaatgttaaacattgtcacacgttctcatatatgggtggaagataaagatttgtccagggttgatggcgaggtatttcagatggatggccaaaacggctttagaatgccacagtttacatcttaaccaggcagtagaatcagaacactctgatcagctactggttgctgtcacatgtgctcatacgcttttgccttagtttattacatgtcaagaacatttacatttggaaaacctgccctcgattagcattattcagtagagagagttgtggagaaataaaattaatttgtttgttggcgcaactaattagaccacgttttcattaacaataatactaacatgtttttgttgtaccctagcaaaatagaaggtcatgtgtatgctgcatccgctaattgaactgaatgatggaatcatgtaaataacaagtaaaaatattgtatactgctccagtcaagggttggtgcagtgatagtttaagattttacaaggtcattttttggt

SEQ ID NO: 6502 - DNA, 689 bp, Zea mays
  Clone ID: MRT4577_10591C.1
gtgcggcgctcgaggcggccgggtcacaaaaatgcagaaacaactctcgttctgctgaactacggtacttggaccaccatggtggagtagcagacaaggggtcgcctatgatgataaccctgctccgaagctttgtcgcggattcggaactaccactgttgctgctggtgctgatgctgcatgtgatacttcatccgcgaacttaagcaaatacaatggtggactgagctactcctcgtctgacttcattgctgctcctactttagaacagataaggacacaaaatacccgcttcctactaccactcggtaagtccaaccatcggctcgtggaagaaacctgagccacagcttctcgaccaactggaagaccatcaccttcggcactaaacatgcgctgcaccgtctgaccactgcgaaggcacgatgcactaactgtccgatggcaagatcattgatccaacactcgtggacggcctcgtctttaccgaccatctccatgaaagcgtacaccaaagccatcgagaacagctcctaaaatgagctctcccatcctctgaagccctgacgtcaccgacgggcccgtgcgtggagacatactaacgcgattgtgtgagtctgcagctgaagtctccatcaaagtagactggactatacctgtcaagtttgctgccgatcccacaaactcaa

SEQ ID NO: 6503 - DNA, 640 bp, Zea mays
  Clone ID: MRT4577_105920C.1
ggcgccatggtcgctgcgcatgccgcgggctcccgcgcccactggaccccggtaacaccgcacggcgcctcgctccgcgtgcccgcccgctgccagctccatgccaaccgccgcggctacataggtagctgcgcgctggctgaaggctcctgcagtgcgcgttgaaggctttcgctgcgtgttgtgcgttctgcttgaatttcggtctgagtttggatgggccagatgatttcgggtgataaatccgacgaacagacagcacgcgacgatggaatcatcaagaatggaagggaaatcctatttcagtgcagttatgcagccaagtttgtaaaagaatacattgaggaatcaaaacctctttttgcagttggggaatactgggatagctgtgaatatagcccccctgactaccgactgaactataatcaagatatccataggcagaggattattaattggatagataacactggaggactttgtgccgcatttgatttcacgacaaagggcattcttcaggaagctgtcaaaggagagttgtggcgtttgcgagattcagaaggaaaaccacctggtgtgatgggatggtggccttcaagatcagttacatttattgaaaatcatgacactgggtccactc

SEQ ID NO: 6504 - DNA, 415 bp, Zea mays
  Clone ID: MRT4577_105921C.1
cgaaatttcggttcggggccggctaccaacaaagcttttaacgcgacatggttatcaacatggactgggggccttttatcgagtagggggggtctgaccccggctacttgcgcaccttcctcaacctggacggtatgttgcgtgggatcgatcaggtccgcatgctccatcaacgggtgccggacgatggcctctggattgacatgaacgaggactccaatttctgactggggaagtgcacgactctgaatactcacaagttgggtattcctgacggcaagacagcatgtctttgatgctagcataggaagaacctaataaaacacaaagtgcgatgagccagcgatacaaaaacaacattggcgctcaggactgcccctctgggcttaaacatcatcacaactagtgctacaca

SEQ ID NO: 6505 - DNA, 108 bp, Zea mays
  unsure (1)..(108): unsure at all n locations
  Clone ID: MRT4577_105923C.1
atctcaattancataccatttttctccattttgtgccgatccatacttaccatctacatgttcctgggtctgtcactcaccagtgcacgacacacaccttgttcctta

SEQ ID NO: 6506 - DNA, 257 bp, Zea mays
  Clone ID: MRT4577_105924C.1
agcaccttcatgcccaataatagctgacctggttactgtacgcaatctgtttgacgcacttacaagttcatctggaggccgattgcattttcttgtttatgacaagtatctcaagagtttagacagggaattgaggtctgtgaaaggtatcatgcaattatttattgcctcaagttttcatcttgatgctggagaatgcatattagctattgatggagacaagcccattcaaccggtactgcaacatattggatatc

SEQ ID NO: 6507 - DNA, 310 bp, Zea mays
  Clone ID: MRT4577_105925C.1
agcagtggtaacaacgcagagtactttttttttttttttttttttttttttttttccttttttttttttttttttttttttttttttttttttttttttttttttttttggggggaacaaggagtcgggggggggggggggggtttttgggcttaactttaggcacggggggaggctccacaataggggaaccgggaagggatataaaaaacggaaaatgggggttaaaaagcaccactttacagggatttttacattgggcgaactataccggcgaaaagatgaaaacggagaagctttggtgcttttc

SEQ ID NO: 6508 - DNA, 385 bp, Zea mays
  Clone ID: MRT4577_105926C.1
ccttcttttttcgactgctttaatttttcatacacaataaccaaaattattgggtgaggggcacttcacaaaatggctgttccaatacaatctataattttcatcaaacttggcatggaacaccacaaatccactccctgtagctctatatatagttcctccatgtatccaattgcttccgtattaaagagttttggtcccaatagagaatgtgaaaaacacacatcctaactggagctgcataagaacaaaatccctcaatgcacttctgaattctctttctagaccacttttcatcattatacgcagcgccatcaagaacccaatctgcacaaaagactgtgaagctagagcaacctgcacaggctccttttgtataaacctc

SEQ ID NO: 6509 - DNA, 1001 bp, Zea mays
  Clone ID: MRT4577_105927C.1
ggtacccacatttcctttgaccccccaccgtataatatatcttggaggtaaaagagactgggcttcagatgttccttggtgatctagttgtgcgctttcgatctggtattgctcagatagtcagatgtttctccgctgtaggctggttcaagatcaagccatctaaggaggaggtggcctgttcatattgtgaaacatcatgatgcttattttgggcatcttaagctatcttctctggcacatcaatgatttcatgagcttcaaggcccctttattttaaaagttgattctttgcataatcctctctgtgggtgcctacaaagtttaaatgtggacatggctgtcactactcactagtctcattgaagcatcatggtgcaaatcctgcttcaaggtctgctattgatagcttagagatggctgtgatgtcaacgcctcagcattaatttggacttctaggccttccttgcgtatttatgctttatataagcatatggggtatggtcgatcttgtctattgcccttcggagttcctttcaacttcacttgagcctttgatggcacaattggagtcatgtgcctctgctcagaaaatcagtttttaactgaaacccttcccttttgcttgcttccttgtgtcaatggtgataccagctattttagcatcaatcttggctgtgtgaatcccaagtggctgtggttttaatcttcctggttttttttggcactcatgatattgatatagctatgatgttattgatatagtatactccctattcttttttatttgtcgctgtttagttaaaaaatgaactagcagtcaacaaatattatcattttaggaattcataatctgttgttttgttccttctgataacatctggactggtggtaatagctgttgctcggatgacgttgtaggtcttcattttcccccctattattggttcagttctagttctatttcacaatatgtcaagctgcttttgcttttgctgctt

SEQ ID NO: 6510 - DNA, 1732 bp, Zea mays
  Clone ID: MRT4577_105928C.1
cggggaggaggagggaggccagcttgccgctagggttagggtttcgggcgggagggacagaggcggggctgcagccatggcgctcaagttcctgaacaagaagggatggcacacggggtccctccgcaacatcgagcgggtatggaaggcggagcaggcggaggaggcggagcgccgcaagacggaggagctcaagaagcaggtcgcggccgagagggagaaggccgagttccgggccatgcaggagcgcgccggcctcaggccggcgcaggagaggctcgacttcctctacgagtcggggttggccgtcggcaagagctccgaagggttccaggcgctgcagcaatctgcaccgggggcagctgccgcgtccacttctgcacaggcgagtgcggctgattcttccaaggcagctacaccgggagctttatttgaggataaaccccaatctgcaaatgatacatggagaaaactccactctgatcctctactcctaataaggcagcgggagcaggatgcgatttcaaggattaaaaacaatccaatcaagatggccgagataaagaaatctgttgaagctgagaaaaagcaaaaagaagagaagaaagcgaagaaaaagcacaagaagcatcaccaccataagtcaaagagtaagaggcatcactcagatgagaattctgattcagatgaaataagtgatggcaaagatgagagaaggaagaggtctcattcttctcttcataagaaagaagagaacatgtccaggcataagaagcagcacagagaagattcatcagattcagacgatgaaccgcagagaagaaagcaggatgtatcagaaaatgatgaaccgaggagaagactacatgacgacaatgaaccgaggagaagatggcaggatgacgttgaaccgaggagaagactacatgacgacgatgaacccagaagatggcaggatgacgttgaaccgaggagaagaagacaggatgatggtgaatcaaggagaagatggcaggacgacgatgaactaaggggaagacggcaggttgatgagaaaccaagggaaagaagctacgttaatcgtccaagatatgaccgctctgacgctgatgataggaggagacaccattcacctcgagacactaagcccaaaagagtggatgatggccacaaaactggaaattccacttctgaacaccattcccgctctgaacaaggctctggcgagcagacaaggcaagagagcgaacatgacaggaatagtggtccttcattgaaccgacgacgcggtggtgtccaccatatgtcagaagaggagaggttagctcgtctgcaccagatgcaggctgacgctgaggtccacgaggagcagagatggaagaggctcaagaaagctgcagacgacgatgctaaagaggcaacaactgtgaatgcaaaccagttcaaagggaagaacttcttggaagatgaaaagaagagcatatttggaacagataagggtggcagtgccacgattgaagagagcatcaggcgccgcgctttctactcgcagggtgggcgtgatgccgagggcaatgccttcaggcggtgaatatattgttttgttgtttgctgccttgttggactcatcttgccgtcgtgttcgttttattattgtacgtgaaagttgagaactatgtacaacaatttctcaataacagcaattttatatgcaacttcaaatttttgatac

SEQ ID NO: 6511 - DNA, 299 bp, Zea mays
  Clone ID: MRT4577_105929C.1
attcggctcgaggcaggacggcagcattgtttttacagggcggtttgtgttttagggggcagcgtttctgtccaaaatggtgggcctgtcccaaatgctcccagacagtgtgatcatgaccctggttgcaccgaaccatgctcgtctacagcaggatggacgacaacctgccccgggatggtggagaaaccgggtcaaggacatagattgtatatacaagggtttgaggagagcgtaatagctccggctctgaaaccggacatgaaatggcaccgagacatttcctcactaatgatcaa

SEQ ID NO: 6512 - DNA, 655 bp, Zea mays
  Clone ID: MRT4577_10592C.1
gctttgtgttgctggcgccgccgccaggggccgaagccgtagtcgccgcgaggagccgccagtgcgcgcccgcggaggctagctagggctgcccgtgtggccgccatgatcggttcgcaccggagcatgggtcgcccgcacgcgcctacgcaggctgcgtgaccgacctgcgtcggggctggggcacccgccctcgtggccggggctagcgcgcccgcgaggttgcggcggcggcctggctgtgcgcgtggctcgtccatggacacacagtacaatcatgcagacgccacgtactacagttgtttcttggcgctgctcgatcgatcgcgctggctggatgcggcatgccgccgttgttctcggtggcccatcgccgtccccgggccggggtattggtttcccggcttgcacgcaccacctcaaatcaaaggacggcgcccacacatcgtcgtaccttcaaggtcaggtctggcagccccttcaatttcgctagatctgatgagacctcttttttttgtatcggtacttatattattattgctcctgcttgatccaaaaaccattcaacgctcaaaaatagtcagtcatgtttgctcgtcgcttgacagaggggccaaaacaggtagcagtagtgtgccccagtggcccaggctct

SEQ ID NO: 6513 - DNA, 535 bp, Zea mays
  Clone ID: MRT4577_105930C.1
cctcgagttttttttttttttttttttttttttttttttttttttttttttttttttttttaaaaaggaaatccatttttcggattaaaaacttcggacaacggaatccaagttcaaccgttaaacaggcccaattagtacagtacaactgtttgtaaacatcaaatcacaaggggccgaccaccaacagggagccaccaccaccgcttttttacaggaacggggggaaaatcaccccccggggagggtacttgggcctcccatttttgccgaaaaacagttttttaaaacggttgtgtttgccgagcccccatttggtcatgatgcccccccccacaacaaggaaaacgtaacctgccacggtttggggggcgatgttaaaccccacccactggtaaatttcgggggggtaattggcccaggtcacgatgttaaacaaaaaaccgggggggatctggtaccccccgttgccgtttgggctcctgaggttccccaacaggatggggcaaaaaaagttcgcgcctcgtcccaaatt

SEQ ID NO: 6514 - DNA, 641 bp, Zea mays
  unsure (1)..(641): unsure at all n locations
  Clone ID: MRT4577_105931C.1
gccggggncatccataacaccgcaagcagcccgcatcgtgtctagcaagcctatacacgtgtcaaggcacagcgataccaaatatacaactggagcaaaaaccaaaggtatagtcatggcacatgcatgacacccgacgctctgcaagaccgagctggttgctctggcggcgctcgacgagatggcgcacggccaaccgcaacctgtacagcggcatcaatcgcgcttaccctcccgtgatagacatgctaaacaatgcagatcagtgcgaaatgtgaactatggaacgctcttgcaacagccgacctgctatgattttgtcatgacatgaacaccagcgaagtggggcacaaggcacacaggactgacatgaaccgcgccatgggggttacgctcaaggaccaacttgtcatgtcaggcaacagctaatatgctcactcacactacaactgcatacatgccgtgctgaatgcgactctacacctaatacatgcgctgaaagacggcatgttgctactgctatatatgtacaacttctatgccttatacgaaggcatgcacacagagatacatgcctaatgcacgcacagcaacataccgatgaactatacgtgctgacaggagcttaagcttattaatca

SEQ ID NO: 6515 - DNA, 256 bp, Zea mays
  Clone ID: MRT4577_105932C.1
cgggccaacaaaggggctgacaaaacaaatcggcagctgccacattgttttcaaccccccaggacattttattcaaaagggatcccaatttatcccctgtcaggggaaaaaaggccgcccaaccaaaatgaaacaattctgggggggaaaacaacaaaaaatgttttcgattggggaacaaaactgacccaaaccccagctaaaggggcccccaaccacaaagcaaaaagttttcgtttttgttaccacccggggc

SEQ ID NO: 6516 - DNA, 215 bp, Zea mays
  Clone ID: MRT4577_105933C.1
cacctatcggtcgcgtgtgcttcacgcggcggctcattcctgacaccgcacaccatgcatttgattctgatcgcaccgacgtcggcccaccgttttagttggcagttgcgacttgcgagtggcttcaacaaggcaacacaatgcaccggtaccaaccaaaaacagcggcaccggagacccgtacccactttcccggagagcgatggcgacggagc

SEQ ID NO: 6517 - DNA, 418 bp, Zea mays
  Clone ID: MRT4577_105934C.1
cgctggaccgcacgttcggctgcgggttccattcccggcaccagtacctgttcgggaagatggacatgcagatggggctggtgcgccgcaacttcgccggcaacgtcaccggctactacctgtgcttgcaaggcggggcgcacgacgagatccacttcgaggtcctgggcaacgtgttcggcaagccctacacgctggacaacaacctggtcacccaggggcataggccaccggaggagcaagttcagcttttggttcaacccaacgtcgacttgcacaactacttcatcatctgaaccccagcacgtcatcttcatcgtggacgacatgctcatcaggtacttccgcaacctgtatagcaaggtggtgacgttccccaagagccagccgatgcggctctactccagcctgtggaacg

SEQ ID NO: 6518 - DNA, 428 bp, Zea mays
  Clone ID: MRT4577_105935C.1
agcaggggtaacaacgcagagtactttttttttttttttttttttttttttttttattttttttttttttttttttttttttttttttttttttttttttttttttaagaaggtaattcagtcaaaaatttataaaaaccaaaacgcgtcaccgccggagcgggaacgcagggggggggccctgacattggacaacaccccagcgcaagggggaagccccagctatttacaacgaacgctataccgggatcttgcaggtctgccttacgggaaaaaccccgggaaacaacaaaccacccctctctggtggcatcgggaccatcgggaacaacagaagaaacactgaacaccacccccgggggggattggatgggatacacccccgaaatcgcggggggaacccatgcccccgggccatgtacaccccc

SEQ ID NO: 6519 - DNA, 163 bp, Zea mays
  unsure (1)..(163): unsure at all n locations
  Clone ID: MRT4577_105936C.1
aaatcacttgcaaatccaaggaaacagtggaccctaaaagatccactggggcggtaagcatggcactgatggcagtntactcgatctcaaagtgacaactatttgatcaagctttattagggaaggaaattttttttttttttcaaatantgaaaaaataact

SEQ ID NO: 6520 - DNA, 404 bp, Zea mays
  Clone ID: MRT4577_105937C.1
caccacacggcctccacccagatccagacatacaatcttttttcgctcacatcttcagctcccaggataagtttaaataactcggctagctgccaactgatctggtaccaaacacttgaccaactcctcatcatgttcaaagcattcctcattcactacttcctcaacctcaagaacaaccaccactacccctgatcacaaacctcatcaacctcgacatacacatacactatcgccgctgaaattgccaccctaacctttcagccttactgcaatggcatcaatgaccagatttctgacaccgctctaccatgacaggacccatcaattacaaatgcctcttaccaaggagcctaagttgcactgctcgactaccatgacacccatctcgccaccttctacaa

SEQ ID NO: 6521 - DNA, 345 bp, Zea mays
  Clone ID: MRT4577_105938C.1
gccattgacgtaccaagtgagtttgacggctaatgctaccagatcttgttcttggtgacgccgtgcggtaatgtgacatgctactacagacgcaggacggcggactacatcttctacttgatgaagatgatgctggagaccgtatgcgccggcaccaccaccaccatgcaggcgccaccgctatacaagaaggcagtcgaccacaaccccctcatggacgagctgttatcatccaaggagaggacgggtgtggctgtgtaagcatgggacgaaaacctgtcactaacgtgcctccaacgcctagtttttgcggtaccagacggaaagaaagagagggactgagtt

SEQ ID NO: 6522 - DNA, 130 bp, Zea mays
  Clone ID: MRT4577_105939C.1
gcggcgccgccgttctacgccgggcgcccaagtcctcgacgggaccttctctggcgacgagcgccccaccaggccctaagctcatatgagcacggagcatcaatgcaagctaataaacccgacagcaaca

SEQ ID NO: 6523 - DNA, 262 bp, Zea mays
  unsure (1)..(262): unsure at all n locations
  Clone ID: MRT4577_10593C.1
aacttaactcctataacttttattgattggtgaanctctctacaaatgatccacatacatacaaatacatacatgcatacgttcntacatacattcnaggttaatttaacaacaaaatattttgatacaactcaaaaaatatctcaactgggcaaaccaccaaatatcacacatcattcaatagctcccatcgtgctcttctccaacccacaaagaatttccagacttgattatgcctgtaatggtaaatgagcanacttat

SEQ ID NO: 6524 - DNA, 1024 bp, Zea mays
  Clone ID: MRT4577_105940C.1
ccagaacggaagaggttcaatggctttggctcaagtctacgacatcttaaaccattttgtttgcagtcatgcacggagaagtacagaggaattgcacccaacaagcccttgatatccaaggaccacgagcgtgcctactatgattctacagactgggtcgatctctctatgattaacaaacacaataaaaaaactatatgtactaatcgatttataatgcttgtatatactaatcgattttataatgtagctgctaggaaaaattcaagactgaaagaaaggacacaacaatttttgccacttcagcaacttcatagcatgttttccaacaaggatacaactccaagaagaacgatgttggtctgttatgatcggccgccactataggcgccgggcaacagcataggcatgcagataaggattagaagatgataaggattagaagattaaggagataagatttgttagagagaaaagaggggatttatctcattagataaggactagaagggagtataaataattgtaagcaccactctatagggattaagcagaaacaagattgttccggcttcctagagggagctcggagattactgtgacctagccacccctttcctcgcgtctctcatctcgcgcgcggtgaacacgacgccccgccgttgtgcatcgcgcctccaaccccgaccaccaatcacccaccactacaacctgagatcgatcagggaatccgccccgattcctatcatggtcattatggatgagatggactatttaataacaagagactgtgttgtgctaaaaaaaaaaaaacatgatcttttaatgcttacaatttgttctatctctagatgcatattcataggtgaagtttattttctgtactgtttaatttctgaaaactagatgaactatcttgttcggttaattttatgtactattaaatttctgaaaactggagtttttgcatgtactaatttctatgtgatggtttctacgtgtgctatctgcatgtctctttaat

SEQ ID NO: 6525 - DNA, 425 bp, Zea mays
  Clone ID: MRT4577_105941C.1
cggcgcgggcgggttttttttttttttttttttttttttttttttttttttttttttttttttttttttaagccccaaggggtggccattttgtttcagttgcagttgccccatcattagttgccataattcccaacaaaatacagtagctacccgggcggggggggcaccatttccctgcccccaaccggggggggaaaagagttaccagcgcttctttctctctttttttttctctacctttgggggtgggggcgccgtccgatctattgccaaaaggccccttgacggggcctgcttttacgggaatgccattggccgcctgccgcccctggggggggccgctctccacgggtgggctccaaatcccccagcggggcgggttcatcaccccgcccatcacgttcgcccacccgggctttttt

SEQ ID NO: 6526 - DNA, 1822 bp, Zea mays
  Clone ID: MRT4577_105942C.1
ccggccgggacccacaccatatttgcgcgggccatcctcgtgatctctctgtctcccatcgccagccgccaccgcgccctcctcccaccggattcagaggcgattcatgggagtggtgcgcaggctgctactgcggtatcaatggaggctgactgccatggaggatctgagcatcgaggcgaaggaggtcagcggtacgcataccccatcctccgcgcggcgcctccctccgagcacccacccgccccgccccctttcttctccctccatcgcgtcgtcatcatactacagaaagtacaaggaggacatgtcgatggtctccatgatggaaggaccacgccgcacggagaagcccaccggtgtcatcttccgcaaggtccgctcggtcgtccatgttcgttcgtcctcttcctgggcggttggcgcgtgatctggcgagacctcccaatgggtcaaaatctattttgtgcttggcgatgtattccttgaggactgccatgctcttctccttcggcgcggtcagctgcttcgattgttgatagcaaacgattgggttccctaaaccaggttaaagcgaatgaaatgaaccatcatctgtaacaagagtgctatatcaatgacaagcagcaacaaagcgcctaacacactaaaggcaagtttttttaacaacctttggtctaatatttgccattataatagcatatagttgtacttgtagaatatatatagcagatacaaaacataacaaagcatacctttagccgggcttgaaactatttagcgtataaataaaagtaccaattattcagaacatatatcaaagtttcattccagcatctggcttgaatatgtagacaaaatgatttaaagagactaaccaatgatcaatgttagtggttctacttcagcaattgtaaagggatgcttattttttggtcacgatggggtgcagtgctttcagccatggaattatgtttaatggagtggtcaaaatttatgccgccatgtcagtccactagatcagaagcatctgtgtcatgtggcagcatgatgggctcacctctaaacaaatggataagctttccccaacccagaacggaagattttcaatggttcgacatataacattagaagtcgattgtttttcctttatttttttggagggcagattcatatttgggcgtctggcacaggctttggctcaagtctacgacatcttaaaccattttgtttgcagtcatgcatggagaagtacaaaggaattgcacccaacaagcccttgatatccaaggaccacgagcgtgcctactttgattctacagtctgggtcgatctctctatgattaacaaacacaataaaaaaactatatgtactaatcaatttataatgtttgtatgtactaatcaatttataatgcttgtatatactaatcggttttataatgtagctgctaggaaaaaatcagaactgaaagaaaggacacaacaatttttgccacttcagcaacttcatagcatgttttccaacaaggatacaactccaagaagaacgatgttggtctgttatgaccggccgccactataggcgtcgggcaacagcataggcatgcagataaggattagaagatgataagtattagaagattaaggagataagatttgttagagagaaaagaggggatttatctcattagataaggactagaagggagtataaataattgtaagcaccactctatagggattaggcagaaacaagattgttccggcttccgagagggagccgggagattactgtaaaaaaaaaaaaaaaaaagcggcc

SEQ ID NO: 6527 - DNA, 419 bp, Zea mays
  Clone ID: MRT4577_105943C.1
tactccagaaatactgttaaatcctgtttttaagaactttcggaggccgaaggtccccacacgaaagataggaaaaacttcatctgaaaaatctaagtcttgattcatctcgagattcgctttgactgttacatccttccttgttaatgttgatcttttcctctccggtcttgacctcattgattcgatgttagtgtatatcatcagggttgaggaatatggttaggatagacatagataagatagactacatgatgttggtcaaaagtttggatagtccgattatgtaattcatcatgactatactagttgagttagatctttttgctcatggttgagttggtctaatgtgcgaggttaatttaatacctggctagtagggtctaatcttttctaccattatcgctaatctgtttaag

SEQ ID NO: 6528 - DNA, 284 bp, Zea mays
  unsure (1)..(284): unsure at all n locations
  Clone ID: MRT4577_105944C.1
ggcttcactatnggctccaccctcggcctccccctcctcaccctcgcagatctccccgggaccacctgcggcagccccagcatctcccccacctcccgcacccacaacgtcggtggtctgcgcccctcccttccttccctgccacgcccgacgccagtggtccgcgccctgccctagccacgccaagatcgccgtcgattcgagatgcccgggggcgacgggctgcctgttttttttttcgatnnggcatgncgggagcnccgctcccctacccaacccccgag

SEQ ID NO: 6529 - DNA, 765 bp, Zea mays
  Clone ID: MRT4577_105945C.1
tgaccgcttccatgccgtcccgcttgacctcctcaagttcatcgatcgcaaggttggtgagtccgttgaggagatagaccgccgcgttcctccagtggtgaaggaagccccaacccttgcccgctcggctgcaaaggaggttcgtgaggccggccttgtgggtacggccacaggccttgccaagtcagccattgcccgcgcggagccaaaggccagggagctctacacccgctatgagcccgtggcagagcgccgtgctgcggaagcctgggtggccctgaaccgccttcagccaggtacaattcagcggtgcgtgatggtgccaagcgcgggaacactgtggccacctatctcccgcttgtgcccactgagcggctcgcccgggtgttcccgtaccccatggctgatgttgccccagcaccagagatgcagcctatcccctcccagtagaagatggaatggaatggaatggaaactacataatcaattatatcaagtatgaactcagatgtggtgtagcaagtattactgtgtaatgtctttatgtttcctatggtgaactggagctctcatgcgtggtttagtgtggtggcattgctgcttgttacaacttgcaatgagcctacacaagtttatctttgttctatggataatgatgtgtaaattaatgggtatctattagaattatatatcaatgtttctgtcaaaaaaaaaaaaaaaaaaaaaaaaaaaaaaaaaaaaaaagggcagccgctcgcgatctag

SEQ ID NO: 6530 - DNA, 2080 bp, Zea mays
  Clone ID: MRT4577_105946C.1
gggtacctcgaggccggccgggacctcacccaggacgaggcccagggaggatcctcccgactccgacgctgcgtaggactccccgactccgacggcgtccgcccgcgtcgcgtgccacgcccacgccacgccggccgccgcgaggaaagaacaccgggtacttccccttcccttacgctccagtttcacaagtcgcgagccgtgcgtcgcgtcgacgcgagttccgcgtgagggagcaggcagttgcagttggaggcggtgacgaaaccctaggacttgagctccagcgcacggctcgggtcctcctcaccgttcccggcgatggaccggcggcaggagctctgcaggaacttccagcgcggcagctgcaagtacggatcgcactgcaggtttgtgcacgcctcctctcagcagcagcagcaggcgaagcccaacccgtttgggttcggcttagggagtaggcagcagcaacagcagcagtcttcgtttcgtgcgcagttccagcagcagcagcagcagaagcccaacccgtttggatttggagtgcaaggcagtgcggctgcacagtccagaaacgctcctggccaggcaaagccatttcaaaataaatgggtaagggacccctcagccccaacgaagcaacaggaagcggcacagccaccagcagcagcccacacctcctgtacagatcctgagtcctgcaggcaacagattgccgaggattttaagaatgaaactccactctggaagcttacgtgttatgctcacctcaggagcggtccttgtgacatcacgggagatattagctttgaagagctgagagctaacgcgtatgagcaaggcaggcaagggcatcctctgcagtcaatagtagagggtgaaaaaaaattgaaaaatgcaaagctgacggactttaataatttcctgaacatgccacgtctatcggtatcacaaactccaagctttccaactgtggcttccttccctgaagtgaaaaataactcagcatttggggtttctcaaaataatggaccaccagtgtttagtagtttcagtcaaattggagtaacaactaatatgggacctgggtccagaactacaccaggagtcccaaccaatactctttttggtcaatctacccaaccaagccatccaacatttcctgcacctacttttggtcgttctgatatgaaatttggagtttcaggtccatttggaagccagatatcacaacaatcatctgggagttttcaaggttcaaacatgtccagttttggcaatttctcaaagcctcatgccagctaccagcagtccccttcctcctctagccatcacagagacattgataggcagtcacaagatttacttagtggaattgtggttcctacaagtgccacaaacgaagctcctgttgaggacaataaaaatgaaaatcaggatgatagtatctggttgaaggaaaaatggtcaattggagagattccgctgggtgaaccgccacagaggcacgttagtcatgtgttttagcaacattcttgtatttctgtgtcgtggaaccactgtcaagtcagcttcactgtctccttccatattgtcgggacaccatcttacaatttctcctccaggttcataaccataacacgtcaaattgggggcataaaatgcacctgaaatgctgattgggcagcgtagaaacttcttgtatcctgcatcacatactctgtctctattgttttcttgttagctccatgtacttcgtcacattcagggctcgtaatatcccgatttcttgttttagggtttgttgagtttagctgtgggttttaaaaagccgttgcagctgtttttttttttgcggaaattgtaccatacatggaagcagtagtttttgaagaagcggaatttggttctaaaaaaaaaaaaaaaaaagaaaagggggaggggggcttggcgatttgtttgtttctcttttttgtagaagagacggtttctaaaagttaaactgtacgtccactaggtcaatcttgcagggtttgtgattctagggtcctttgcgcatgcaagacgattttgtttctag

SEQ ID NO: 6531 - DNA, 389 bp, Zea mays
  unsure (1)..(389): unsure at all n locations
  Clone ID: MRT4577_105947C.1
ggtaccggtccgaatgccggggggggcgcacgcgtgcgctaaccccgttgcttccggctcccgcagcgtgnccgaccttcacagcctttgtggggtccggggccaccgtggggggggcacgtnttatngganctnggctcaaggtcaagacccaccggagggaccagaggggggctggcaaaggatacaagaagaggcacttgggcaatgggggggaaaaaccttttggtggatcatctcacgccaagggcatcgttctggagaagattggtattgggggcaatcagccaaattcgggcatccggaaggggggcctggtgcagctggtgaagaatggaaaggagagtggtggctttgggcccaatggtgggtggctaaactacatcgag

SEQ ID NO: 6532 - DNA, 341 bp, Zea mays
  unsure (1)..(341): unsure at all n locations
  Clone ID: MRT4577_105948C.1
accagcgggcaaaagagaggtgaaanggaatcacatgggcgacccggggccccctcccaccacctaggaccctaccccaagaactgccccgagagcggcagcggaagacaggcaaaggcaggagtccaacaaaagtgcttgctcgcctcaaaggctaggtggtcaaaaaaccagtggagcaatggtgtggcctcattgaaaaaggaggcgagcttaaagccgtcggtgaactaacaagatggctaacaacgaaagagctaccgccggccatcgacgggcaatcaaggcaaacgccaagccgaacaaaccggcagaggcgctcccaacaagaatgcctgccg

SEQ ID NO: 6533 - DNA, 1057 bp, Zea mays
  Clone ID: MRT4577_105949C.1
ccgggacagctgccgccaagcgagcccggtccgacttggcctctcccccggccggaacgcctcgacgcgacgacccagcccagccccgcgccgcgatggccatgaccgtgatccgcctcgccgccatccgcccgccgtcggcctcttcctccgccgcgtccccgtcgctgtggccgcccgcgcggatgcgcctccgcgtgaggtgccgcgccggcggggacggagggaagaagaaggaggaaggggaggccgaggcgcccgagtcgctcttcgccagggagctccggcggcgtgggatggcgccgggggccgccgcgcccacgggcgctagcaaggaggccgaggagggggcgccggaggccggggccaagcgcggggtggcggccaccgagttcgagcgcggcgccgcggcggacggccagcgggagcgctccatggcgctcaacagcgagggcctcgagggtcttgttcctcgggcgaagttactgctatcacttggcagcaccttctttctggcgtttgggcccctgattcttgtcaccgtctcccttttcgctgttttatacgtgtactttggaccgagttttgtacacgatgcaagcaagacgccggtgtcgccgccaccgtacattgatccatacgagctactggaggacgagaggctcagccggccctccccagatgtgttctgaacatgaacagtgcaagaaccagtgcataattgattacaagaaatagtcatacatagcccaaaacttatcttttttactagacgtatagttgtaaatgcaactataaccatagactgttataatcacttaatcagaagttttagcacgtagtattccatcaaaaaaaaaaaaaaagcggccctttaaggtgtttagtttctagggctaaattttagtcctacattttattatattttagtctctaaattgtcaaatacggaaattagaactctattttagttttcgtatttagcaatttatggactaaaatagaataacattgagggactaaagaatagtctctagaaactatacacctcctaaga

SEQ ID NO: 6534 - DNA, 514 bp, Zea mays
  unsure (1)..(514): unsure at all n locations
  Clone ID: MRT4577_10594C.1
ccacacaaaangccccaaggccagtttgatttataacttcctatcctcaaacaactactgttcatatttattatcctcacacttttcccttcctaactattgtgaagtcctacatccttaccctcaaaactgtatctttctgacaaccacctgttgatggaacaaaatacatttcatatttacttgcaccggttaacagtgaatattaacttcaccgttcataaaatcctccctcgatgtccatttggtttttattgcattaatcatccttcccccctatgccaacacctattgttggagccggttcctttcctttgctaatatttaccattattgattctccttcttgtattatgcactacacactatctttaatcaccatatcttttctatacccttaacctttttttgataccagtgtacaccagtctcttattcccctttaccacctttttaaccccttctagttttttctgttacaaaatttttatacaattcttatagcttcacccca

SEQ ID NO: 6535 - DNA, 318 bp, Zea mays
  Clone ID: MRT4577_105950C.1
cagacgcgtgggaaaaaagatggtacatagcaaaaggtcgaggtggttgttatatgatcgcgtgtttactgaaccatgaaaaaagagcgtggactcgtattctggacagacgctgctggactaagacgacctggatcgtaaggatccttgcacaggggggggagaacgctgcctaggccgaactaaatcaaatggtaataaagtggccttacttggggaggaatatgataactaagatcaagtgtggatatatactagcgctctgaaccccattgttatagggagtgggccatgcgcaaagaacggagcattaaactg

SEQ ID NO: 6536 - DNA, 140 bp, Zea mays
  unsure (1)..(140): unsure at all n locations
  Clone ID: MRT4577_105951C.1
gccttctcgctctgatctgagcaggaggaggaagaaagccaaaggccttccttgggctttcagggcaaagaagatctgaggccccggcggaacgtgaccaccncgaagtcgttacgatgagccccgaggataccccttaa

SEQ ID NO: 6537 - DNA, 375 bp, Zea mays
  Clone ID: MRT4577_105952C.1
cttcaattcccgccgcctcctcgggcgttctttccacctccacctccgtatccctttattggaccacctccaccccatgattagccgccgcgcggcggccacggcagccctacgcgcctctgtgcggcgtgcctgctcttcctcctcccgcgccgccgaccctgacgaccaactgcttggcctcttagaagcccctgagccgcagcgcgaaccccgcctctcagccaaggacttcgcctttcttcaggtgcccacccctgtcctccgcgccgcggccctcccgccgccggaggctgttcttatatccaaggcgatccgagcctacgcctccgactttgacgggaaagcggagcggttcctgcggcggcaccggga

SEQ ID NO: 6538 - DNA, 429 bp, Zea mays
  unsure (1)..(429): unsure at all n locations
  Clone ID: MRT4577_105953C.1
cgcccacgcgtccgacccgtctgtcatacacagagggtgctggatgccttcgccactgaccaagcgcttcaaacccgttgcgtgagagcagaagacatgcctgccgacggggcgagccgagcaatggcaagcttctgcgttttcagtgtaagcttgcgggctgtctgacgttcgagcacgtgcacaactgttgtcaatgtctgcgcggtgagcactcgcggacgcggaagtatagaccttttcgggggactggcggcttcagatcatttgagatcttgatggattattcctaaggttttttttggtttttttggaacctggnnaaaaanaaaannnnnnnnannnnnnnnnnnnananaaaaaaaaaaaaaaaattttttaaccaagaacttccccttaaccttacccaccaattggaaacccccaacc

SEQ ID NO: 6539 - DNA, 614 bp, Zea mays
  Clone ID: MRT4577_105954C.1
cctcgaggccggccgggattctctttccctcccccgcctcctctgctcctcgctctcccacccagctcgggcatccgccacacggtcacaccaacactgcactccaccgcgagccgtgacagacctcctcctccgcctccgcctttcttcaacggcgccttcgcttccccagcacggtaccctaacatcacagatgctctgctcaatacaaggcaccgcggacatggcgcccgcaccggcagatctctccgcggccaacatcctctcgctgctcgcgcccgctatagctcctccgaaagcgcaggatctgtgcgacatccgtctcaccccggaccgtgatcggtgtgaatgtctgtagcgccgagcacgactgaaacgaggttgatggccgtggagccgcgacttatatggaaccgagccaggaccacacaggagaatgcgctcgcgttatagatgactccagcactgatgaatctccacgctcgaatctccgacgctggacagacacaagagcatgctctccttgccgtcactcttggagagacacacatgatttgctgctgcagcaagatggatgaaacgactctcaaatactccaaggtgcaatatgatga

SEQ ID NO: 6540 - DNA, 587 bp, Zea mays
  Clone ID: MRT4577_105955C.1
tcgactcaccagagcacacagaagcgaacaaccgagttcagtttcccgcgggcacaacctccaccgaaagcacaagacagagatgagctcgtcggcggccaagaagggagtgtcgatggtggtggctacgagcatggcggcggtggaggcgctcaaggaccaggcggggctgtgccgctgggactacgcgctccgctcactctaccaccgcgccgtcgtcaccggccgccgcgccgtcccggcgtccctctcctcctcctcctcctcccaggccgccgtaggcagggctgcccggccaaggcggtccgaggaggagaagctgcacaaggcgtaccacatcgtttgctgggggccaaactgattgtctaacagcacattttttttctgcttctccatttttattccttcccatcttggctatccgtgaatgaatggtgtgtaaatcgagatataagtatccacggtttgtaaatcgagatatatgtttcaaggtcagtcatgcactcggccctctgatctgaggcgagctgccaagtgattgatgaggcaaatataagaaaatggcattgttcttgttctgcacaagg

SEQ ID NO: 6541 - DNA, 604 bp, Zea mays
  Clone ID: MRT4577_105956C.1
ttttgttcgatatcatacaagaggctgctggggcggggtcaaaaactacctctggtggctcccatgaacaaatcaagaacttgttgtctgaaggctgcatcgcgcccttcacccaccttctggcactccctgatcccagaattggaacagtaagtctccagggtcctaataatgttcgggggggaggggagcacgacaagaccatccgcgcaccaggtcacattaatgttactcgctcatatgattgaccacacgtaaggcctaaaaaaaatcacagaacctacagatccatgataataatgaaatacataaaaaggctgtgatattacttaagacttactgaatggaagatgaagatgatgcaatggctactgcttatgaagctgctactactgtttttaactttaaccaatgtggcaacccttctggaggtagttcgaacctaaactgaatacagcatttgaccaaaaggatgttaatagcataataacaacctactatcctcgattacatgtcggataatggcttgccaatcgcccagtaaattcttatatttaaggaaaatgggttaccattattcccaagctgtcatggatatgaaatc

SEQ ID NO: 6542 - DNA, 1218 bp, Zea mays
  Clone ID: MRT4577_105957C.1
cggccgctcaggcggcgggcgggaatccgagacggtggacacgacccggcggtcgacacacgacctgcgaccgcgtccgcatgcagctgcagctgcagcccgtcaccaccgccaatccacgtcaccgtggaccttggcatacaggcaatcccatgccacgcgtactcggtcggcactgaataacatttctgcgctccatttttcttttctgttgttgccgggaaatctttctgtacactacacgtagttcccgccagcattacacaaaactaactcaataagcgcattaaattaaattattgtccaacaatctctcgtgttacaccagcccagcgcaagcataaattcctgctcctgctcctgctgctgctgactccttcccccccttcctcctcctcgacaagactacaaccattaggccgttgctagatggaggtggagactgtgatgcctcctccggcggccgggctggaccgcgtggactctgccgcgcgggagccgactcacacggagtcctccttgccgtcgccggcggctggaggcggcgcgaatggcgcggcgaccaaggtgcagaaggtctaccggagctaccggaccaggcacaagctcgccgactccgccgtcgtcgtcgaggagctctggtgggaagcgctggacttcgcgcggctaaaccacagcaccgtctccttctacgacgacccggagccggagaccgccgcctcgcgctggaaccgcgtcagcctcaatgcatccaaggtgggtcagggtttatccaaggatgccaaggctcttaagctggctttccagcactggatcgaggctattgatccaagacataggtacgggcacaacctgcatttctactatgatgcctggtgccaaacccaggctggccagcccttcttctactggctcgatattggtgagggaaaagatatagagcttccagaatgttcaagggctctgctgaaaaagcaatgcataagatatcttggtccacaagagcgtgagtactatgaatacatcattaaagagggaaagagtgtccacaagatatctggagaaccacttgatacaagccagggcctctaaagggacaaatgggatttttgttatgagcacagcaaagaaactttatgctgggcagaaagagagaggtgtattcccgcactccagcttttagcaggaggtgcgaccataactgcttgaaagtttact

SEQ ID NO: 6543 - DNA, 766 bp, Zea mays
  Clone ID: MRT4577_105958C.1
aattcggcacgagggagacttttgctcaatttggtgtagtgtttcttctttttgctcttggtctcgagttttcactgactaagttgaaagtcgttggtcctgttgctgtacttggaggtctgcttcagattgttctgttcatgttcttgtgtggcctcactgcagcgttgtgtggtgctaaatcatctgaaggagtgtttgttggtgccttcttgtctatgtcatctactgcagtggtttcgaactttttagtggaaaaaggtagtacaaacacgctccatggtcaagttacaattgggacgctaatacttcaggattgtgcagttggcctgctgtttgcactccttcctgttcttggaggtgctagtggcatttttggaggagtgatgtcaatggcgaaactgttgctagtgctatccatatttgtagctgttacatatatgatgacatggtcaattgttcctcgattcttaaaactgatgattcagttatcttcacagacaaatgaactctaccaattggcctccgttgcatattgcttgcttctagcctggtgcagtgaatatttaggattgagtcttgagttggggtcatttcttgctggtgttatgatatcaaccacagattttgctcatcatactatggagcaggttgaagccattcgcaatctatttgcagcactcttccttgcaagcattggaatgctcatacatgttaagtcctggtggaatcatgttgacatattacttgcagctgttatactcgt

SEQ ID NO: 6544 - DNA, 250 bp, Zea mays
  Clone ID: MRT4577_105959C.1
gcaacatagaaagcacaatagtgtaccaacaatggcagccaaaatattttgcctccttatgctccttggtctttctgcaagtgctgctacggcgaccattttcccgcaatgctcgcaagctcctatagcttcccttctcccctagttcttatcaccgtgtcttccgtatgtatgagcccattcttttaccccaccagataccatcagacagtcaatcgcagctttcatcttatcttcaccattttgtccc

SEQ ID NO: 6545 - DNA, 403 bp, Zea mays
  Clone ID: MRT4577_10595C.1
ggacggaggaacgcgagatagatcgagcgccggcgatgccgccaccgcacccgacggacgcggaggcggggcccgagcaggtggcgccgacggaggcggtgcccttggcggctgcggcgccggcgccggtcaagaagaagcggaacctccccgggacgccagatccggacgccgaggtgatcgcgctctcgccggggacgctgctggccacgaaccgcttcgtgtgcgaggtgtgcggcaagggcttccagcgggaccagaacctgcagctgcaccgccgcggccacaacctgccctggcgcctgcggcagcgcgggcccggcgcggccccaccgcgccgtcgggtgtacgtgtgccccgagcccggctgcgtgcaccactccccgacccgagccctcgggga

SEQ ID NO: 6546 - DNA, 628 bp, Zea mays
  Clone ID: MRT4577_105960C.1
acaccccacacattgcccggaggtccccccaatgtcggacggacgacgggttcacccacaccccctgctggcggatcccccccctcgcctgcctgcccgcgcgccaagaactccattcacctccccccacactgccaggagcttcgcccggcccccgggtgccggacggccaccaggttcacccgtgcctgctgccggcggattcccccctcccccggtggctaggagctccatctgtgttgtcgtcgtgttctgctgggcgtctcccccaatggcgttacagcatgggcattagagaactctatgacggatggggagctactctggcgcgcgtcgttcaccccggcggtacctattctgacgcgtatggaaggttgccttcatgttcctcacgcaagggcaggtgccgctcagggggtgcctcactactacatctacgtccacgcgctatcggccaatttcaccttcgaatcaatcttctcccaacgccaaatacctagtaaggcaaggccacatctctatcatatatgaaagttggttctgtctatcatacactttcgttatgaaaatgtgtgtagctttcaaaaaagcccttcacgggcctgataaatcaaggattgattttagt

SEQ ID NO: 6547 - DNA, 1104 bp, Zea mays
  Clone ID: MRT4577_105961C.1
atgtctcaagacaaaaaagctgttgctgagacgaagctgagcgaaaaggagaagactgctggatttattgaatcaatagcaaagacaaatacagaaaagattactaaggagattctagaatgcttatcggaagatactgatgacagcgatagttacgatgcggaaagtgggggcgaaggttccgaagatcggccctggcgaccaagtcatacagttttcgagaaatcgactatcaaacagagtcatcttgataatatgagagggaggtattttcgagatatgtctattttgagggctgacaacggagacaggattgttcctgttcctgaagaaaatgaagtcataatctaccgaagcttcttcaaggctggacttcggttccccctaagcagatttgtggttgaagttctaaagatatatgagattttccttcaccagattactcccgaagcaattatcagaatgggaatctttgtctgggccgtgaggagtcaaggtttggagccaagtgcaaaatgttgcagcatgcacgaactttcgtatgatacgaagccctggggtaaggaacagtatcataacaattttggttgctatagcttcgttgctcgttctagctcaagctgcctagtgccaacttttcggaagagatggcccggagactggatgaaagaatggttctatgtaaagaatgatttaaaggcgagagaagacattacagagatcatcatgcgccccatttggtcccacttcgatcttcggaaaccgaaggtagaaattgatgaagcagccgaaggatgccaaagggccttcggcacagtttgctctttcaacgggacaagggatttagttcaagaacatgtagcctacaggatatggcctctgatagatagctgggaaatgctagaggaaaccatcactaaccctagcgaaggtggtttgattcgattgaaatataccttcaggtttcgagaccaatttgtcgaaccagacgatgactggctgaaatgtgttgaaaatactagtgacgaactacttggagcatactccaaatctgaagataatgcattatttgcggccttcgggagccgaaaaagaaaagactaa

SEQ ID NO: 6548 - DNA, 577 bp, Zea mays
  unsure (1)..(577): unsure at all n locations
  Clone ID: MRT4577_105962C.1
atataatcgataattgatgatgtattgaagaacagagttttgaaccatggagcagtttggaagaattggccgcacatgggaaaaaatgtaaacttgaacgatttgaagtgcctgccgctgtcaagctttgccgtgaagtatggtcgcctgatatgggtttggtcacagccgctttcaaacttcgccgtaaagacattcaaaatcgataccaacacgaaatcaacagaatgtgcgcttcatgatctcgttatttttaaaccgcctcttatcccggacgggcgtcctttgttttatcccgcccttatgccacatcacagaattttaatcacctctttctctcactttggagataactcaaatcttttttatacaaattatatttatatacttataaaaactggcaaatatatgtatataatatgtgtaaagacaatgccatttatgtacagtgtatatcaaaaaaaagtcttagtattgtatatttgnggaataaaacaaagtctgctttgttgacaattatttttcttcgtaaataataaagggttaacggtcaaaattagatcaatttttttaattt

SEQ ID NO: 6549 - DNA, 385 bp, Zea mays
  unsure (1)..(385): unsure at all n locations
  Clone ID: MRT4577_105963C.1
atcgtgaaccactacgagatgcgcgggaacatcctgagctacaacctgggcggcatgggctgcagcgcgggggtcatcgccgtcgacctgccccgcgacatgctgcaggccagcggcgcgggcctagccgtggtggtcagcacggaggccgtctccttcacgtggtaccccggaaggcgccgctccatgctcatcctcaacgccttcttccgggccgggtgcgactgcgcggcggtgctgctgtccaacagccgccgcgacttccaccgcgccaagtaccagctggagcacgtggtgcgacgcacaaggccgncgacgaccgcgccttccgctccgtgtaccaagaggaggacgagcagcggatcaagggcctgtccatcagccg

SEQ ID NO: 6550 - DNA, 243 bp, Zea mays
  unsure (1)..(243): unsure at all n locations
  Clone ID: MRT4577_105964C.1
cggcacggcaagtgaacaagaccgagatccacagcgagtcgtgagcaccctgaatgtcctcgtgaccccgcgagctgttggagacaggtgttgaatgcacggcctccaacgacctgggcaaaaacaccagcatcctcttcctggagctggtcaatttaaccagcctcacaccagactccaacacagtccccagcctcagnacttccactgccagtcctcataccatagccaacagcacctcca

SEQ ID NO: 6551 - DNA, 2393 bp, Zea mays
  Clone ID: MRT4577_105965C.1
gaagtgtatgattttggtgtagtgggctgtcatttcctgtctcagtgcctgggtgggattgggactgtggcaacaatagcagcagccgggcgggagctcccgcttccccccctcccccccatcagatgatcagatcagtccgtccctgcccatctgccctgctctctaatggcattaactgccgcccacccacccgccatctcctcccctacccagctgcacacgctcctcttctcctgctagcagtactgctatatatcaataatactagctggaccctttccactcctctcacctctcactaccaccaccactgccccggatccatacccgcgaccgcgactgccaccaccagcagcagcgcgagctagcttcggtcggtcgatcgatcgctcggccatcatggcgcgggaggagcaggcgctgctgtcgacggagatcgtgaaccgcggcgtggagccgtcgggcccggacgccggctcgccggccttctcggtgcgcgtgcgccgccgcctgccggacttcctgcagtcggtgaacctcaagtacgtgcgcctcgggtaccactacctcatcagccacggcgtgtacctggccaccatccccgtcatcgtgctggtgtgcggcgccgagctgggcagcctcagccgcgacgagctgtggcgcaaggtgtggggggaggccacctacgacctcgccaccgtgctcgccttcctcgccgtcctcgccttcaccatctccgtctacatcatgtccaggcccaggcccgtgtatctcatcgacttcgcatgctacaagccggccgacgagctcaaggtgtccaaggcggagttcatcgacctggcgcgcaagtccggcaagttcgacgaggacagcctgggcgttccagtcgcgtctgctggccaagtccggcatcggcgacgagtcgtacatgccgcgctgcgtgttcgagcccaacgccagctgcgccaccatgaaggagggccgcgccgaggcgtccacggccatgttcgcggcgctggacgagctgttcgacaagtgccgcgtccggcccaaggacgtgggcgtgctggtggtcaactgcagcctcttcaacccgacgccctccctgtccgccatgatcgtcaaccactacaagatgcgcggcaacatcctgagctacaacctgggcggcatgggctgcagcgcgggcgtcatcgccatcgatctggcccgcgacatgctccaggccagcggcgcgggcctggccgtggtggtcagcacggaggccgtctccttcacgtggtaccccgggaagcggcgctccatgctcatcccgaacgccttcttccgggcgggctgcgcggcggtgctgctgtccaaccggcgccgcgacttccaccgcgccaagtaccagctggagcacgtggtgcgcacgcacaagggcgcggacgaccgcgccttccgctccgtgtaccaggaggaggacgagcagcggatcaagggcctgtccatcagccgcgacctgctggaggtgggcggccacgcgctcaagaccaacatcaccacgctggggcccctggtgctgcccttctccgagcagctgctcttcttcgcgggcgtgctgttccgccacctgttcccgtccaaggcctccacgccggcgccgccgaccaccccaggggacgcctcggccgccgcgccctacatcccggacttcaagcgcgcgttcgagcacttctgcatgcacgcggccagccgcgacgtgctggagcacctgcagagcaacctgggcctgcgcgacgccgacctggaggcctcccgcgccgcgctgcaccgcttcggcaacacctcaagcagcagcatctggtacgagctggcgtacctggaggccaagggccgcgtccgccgcggcgaccgcgtctggcagctcgccttcgggtcgggcttcaagtgcaacagcgcggtgtggcgcgccgtccgccgcgtgcgccgccccgcgcgcagcccctggctggactgcgtcgaccagtacccggcgcgcatggacgcctagcacgtcgtacctgcaatgcagtggctgctatctatctatcgctcgcttcgctaccactaccagtgcagtgctgcacttcaccgatggatgatggatcggattcggatatgatatggtataggacgcggtcggtcgatttgcatgcatgcacaagtgttagtataccgttctgaaggtacgtttgaactttgttcgtttgtattgcactattgcttgttgtttaagtagcggttaagggagggatacgtacgctgtactaccataatggaagtactccggtcctgtcctgtcctgtgtgagccttatgtacgtgcaattttaatgtgttttgatattacaagacttgacggttggcaat

SEQ ID NO: 6552 - DNA, 1248 bp, Zea mays
  Clone ID: MRT4577_105966C.1
cccgggccacggcgtgttcttggccaccatccccgtcatcgtgctggtgtgcggcgccgagctgggcagcctcagccgcgtctgctggccaagtccggcatcggcgacgagtcgtacatgccgcgctgcgtgttcgagcccaacgccagctgcgccaccatgaaggagggccgcgccgaggcgtccacggccatgtggggggggctggacgagctgttcgacaagtgccgcgtccggcccaaggacgtgggcgtgctggtggtcaactgcagcctcttcaacccgacgccctccctgtccgccatgatcgtcaaccactacaagatgcgcggcaacatcctgagctacaacctggggggcatgggctgcagcgcgggcgtcatcgccatcgacctggcccgcgacatgctccaggccagcggcgctggcctggccgtggtggtcagcacggaggccgtctccttcacgtggtaccccgggaagcggcgctccatgctcatcccgaacgccttcttccgggcgggctgcgcggcggtgctgctgtccaaccggcgccgcgacttccacgtgccctcgtgccgaattcggcacgaggccaccactgccccggatccataccagctgcagcagcagcgcgagctagcttcggtcggtcgatagatcgatcgatcgctcggccatcatggcgcgggaggagcaggcgctgctctcgacggagatcgtgaaccgcggcgtggagccgtcgggcccggacgccggctcgccggccttctcggtgcgcgtgcgccgccgcctgccggacttcctgcagtcggtgaacctcaagtacgtgcgcctcgggtaccactacctcatcagccacggcgtgtacctggccaccatccccgtcatcgtgctggtgtgcggcgccgagctgggcagcctcagccgcgacgagctgtggcgcaaggtgtggggggaggccacctacgacctcgccaccgtgctcgccttcctcgccgtcctcgccttcaccatctccgtctacatcatgtccaggcccaggcccgtgtacctcatcgacttcgcatgctacaagccggccgacgagctcaaggtgtccaaggcggagttcatcgacctggcgcgcaagtccggcaagttcgacgaggacagcctggcgtttcagtcgcgtctgctggccaagtcccgcatcttgcgaccaattcgtacatgccgcgctgcgtgttcgagcccacgccagctgcg

SEQ ID NO: 6553 - DNA, 887 bp, Zea mays
  Clone ID: MRT4577_105967C.1
actcccctcacctctcactaccaccaccactgccccggatccataccagcagcagcagcgcgagcttgcttcggtcggtcgatagatcgatcgatcgatcgatcgctcggccatcatggcgcgggaggagcaggcgctgctgtcgacggagatcgtgaaccgcggcgtggagccgtcgggcccggacgccggctcgccggccttctcggtgcgcgtgcgccgccgcctgccggacttcctgcagtcggtgaacctcaagtacgtgcgcctcgggtaccactacctcatcagccacggcgtgtacctggccaccatccccgtcatcgtgctggtgtgcggcgccgagctgggcagcctcagccgcgacgagctgtggcgcaaggtgtggggggaggccacctacgacctcgccaccgtgctcgccttcctcgccgtcctcgccttcaccatctccgtctacatcatgtccaggcccaggcccgtgtacctcatcgacttcgcgtgctacaagccggccgacgagctcaaggtgtccaaggcggagttcatcgacctggcgcgcaagtccggcaagttcgacgaggacagcctggcgttccagtcgcgtctgctggccaagtccggcatcggcgacgagtcgtacatgcccgcggctgcgtgttcgagcccaacgccagctgcgccaccatgaaggagggccgcgccgaggcgtccacggccatgttcgcggcgctggacgagctgttcgacaagtgccgcgtccggcccaaggacgtgggcgtgctggtggtcactgcagcctcttcacccgacgccctccctgtccgccatgatcgtcaaccactacaagatgcgcggcaacatcctgagctacaacctggggggca

SEQ ID NO: 6554 - DNA, 228 bp, Zea mays
  Clone ID: MRT4577_105968C.1
gcacgaggcaacacttttcatttgttattcatgtatggtcaatgacaatgttgttttattaagtgaatttggtctgtttttcaaatgtgcataaacaaatagactaaatgttttagctgacctagagtttatctaaaagactctgataggctgtatgtatgggttctttcttgctgtaaatatggattggtaatgaattgagaaattaggtttgctctgtattatttc

SEQ ID NO: 6555 - DNA, 2288 bp, Zea mays
  Clone ID: MRT4577_105969C.1
aaaaaatggcattaactgccgcccacccacccgccatctcctcccctacccagctgcacgctcctcttctcctgctagcagtactgctatatatcaataatactagctggaccctttccactcccctcacctctcactaccaccaccactgccccggatccataccagctgcagcagcagcgcgcgcgagctagcttcggtcggtcgatagatcgatcgatcgctcggccatcatggcgcgggaggagcaggcgctgctgtcgacggagatcgtgaaccgcggcgtggagccgtcgggcccggacgccggctcgccggccttctcggtgcgcgtgcgccgccgcctgccggacttcctgcagtcggtgaacctcaagtacgtgcgcctcgggtaccactacctcatcagccacggcgtgtacctggccaccatccccgtcatcgtgctggtgtgcggcgccgagctgggcagcctcagccgcgacgagctgtggcgcaaggtgtggggggaggccacctacgacctcgccaccgtgctcgccttcctcgccgtcctcgccttcaccatctccgtctacatcatgtccaggcccaggcccgtgtacctcatcgacttcgcatgctacaagccggccgacgagctcaaggtgtccaaggcggagttcatcgacctggcgcgcaagtccggcaagttcgacgaggacagcctggcgttccagtcgcgtctgctggccaagtccggcatcggcgacgagtcgtacatgccgcgctgcgtgttcgagcccaacgccagctgcgccaccatgaaggagggccgcgccgaggcgtccacggccatgttcgcggcgctggacgagctgttcgacaagtgccgcgtccggcccaaggacgtgggcgtgctggtggtcaactgcagcctcttcaacccgacgccctccctgtccgccatgatcgtcaaccactacaagatgcgcggcaacatcctgagctacaacctggggggcatgggctgcagcgcgggcgtcatcgccatcgatctggcccgcgacatgctccaggccagcggcgctggcctgggccgtggtggtcagcacggaggccgtctccttcacgtggtaccccgggaagcggcgctccatgctcatcccgaacgccttcttccgggccggctgcgcggcggtgctgctgtccaaccggcgccgcgacttccaccgcgccaagtaccagctggagcacgtggtgcgcacgcacaagggcgcggacgaccgcgccttccgctccgtgtaccaggaggaggacgagcagcggatcaagggcctgtccatcagccgcgacctgctggaggtgggcggccacgcgctcaagaccaacatcaccacgctggggcccctggtgctgcccttctccgagcagctgctcttcttcgcgggcgtgctgttccgccacctgttcccgtccaaggcctccacgccggcgccgccgaccaccccaggggacgcctcggccgccgcgccctacatcccggacttcaagcgcgcgttcgagcacttctgcatgcacgcggccagccgcgacgtgctggagcacctgcagagcaacctgggcctgcgcgacgccgacctggaggcctcccgcgccgcgctgcaccgcttcggcaacacctcaagcagcagcatctggtacgagctggcgtacctggaggccaagggccgcgtccgccgcggcgaccgcgtctggcagctcgccttcgggtcgggcttcaagtgcaacagcgcggtgtggcgcgccgtccgccgcgtgcgccgccccgcgcgcagcccctggctggactgcatcgaccagtacccggcgcgcatggacgcctagcacgtacctgcaatgcaatggctgctatctatctatcgctcgcttcgctaccactaccagtgcagtgctgcacttcaccgatggatgatgatggatcggatatgatatggtataggacgcggtcggtcgatttgcatgcatgcaccaagtgttactataccgttctgaaggtacgtttgaactttgttcgtttgtattgcactattgcttgttgtttaagtagcggttaagggagggagtcgtacgctgtgctaccataatggaagtactccggtccggtccggtcctgtgtgagccttatgtacgtgcaattttaatgtcttttgatattacaagactcgacggttggcaatagatgttgctgacttgctgttgtgtttcgattgatcggaaaaaaaaaaaaaaaaaaggcccctagggcc

SEQ ID NO: 6556 - DNA, 310 bp, Zea mays
  Clone ID: MRT4577_10596C.1
ggtctgggttttttggcacggggaagtcaatctccataaaaaggttaaaaaaaaacccacaatgcaacacaacaccaacgggacaaacaccaaagagagacgaacaaccacaaccacaaaaacaaaacacggggcaaccaacagacaccaccaagaaacaaaaccacgacaaaacaccaaaggagcccccaccgggagccaaaacccgaccgcccgccaggcaacaaaagacgagccagaacccgcggaaaccagacccgcccacagagagggaaccataacaggccgaaaatacccgaaaaagccaaag

SEQ ID NO: 6557 - DNA, 220 bp, Zea mays
  Clone ID: MRT4577_105970C.1
accgcggtgaacagaagcgattatacttatttcatcaggctgttgttgatttcatgaccgcctgtaccactgtcctgatccaggccattctttcacgagttacttgcagtacaggttgatgactggagcaatacggatctctgtgtttattgtacgactcaggacgtcatactaccgtatactttgattgatttaacgcccccattgatccagaattgct

SEQ ID NO: 6558 - DNA, 246 bp, Zea mays
  Clone ID: MRT4577_105971C.1
cgcgccgcgccgcgctcgttctcctcgccggcgtcgcggacgtcgggggcaaggcgagccccttcggcgtcccctaccgggaagcagcacaacaagttcgggaagaccaagaagaacacggactatatctactacatcagcgaccaattcaagctgctgatccacatcaagtggaaccccagcaaggagcgggagattcccggtcaggtgccccgcatacgaggacaacctatgaacccaacagca

SEQ ID NO: 6559 - DNA, 245 bp, Zea mays
  Clone ID: MRT4577_105972C.1
ggcacaccggggggatttattattgataaaatcaagggaatgcaaacctcgttggatctttacttgggcccaaagttggccttgatggggcccacctcccccctgctgatgcggaaggccttggcgaggatttatgagggcacgggcggcacggcgccgaaaagcgtcatggtaatggcctctgggccctggagatggctggtgaaggcgggaaccacaggggcgggggcccgccccctgttttg

SEQ ID NO: 6560 - DNA, 647 bp, Zea mays
  Clone ID: MRT4577_105973C.1
ttttcacttgaaatgggaagttgcatacatgcttttctgatctattttcacaataatctggtttgtttatagatggatgaatggagagcatctacggtcacttccttctgatttactcatcaaggacttcgaagatcgatggaggagcacaggcattcttctggagtctgaaagtgattttgctaaagaagctgctgagcttttgaaggagggcattgatttgataacagatgcggatgctgccctttccaaattattgtcgtatccccttcatgacactttaagcagtgatgaagctaaatctgtggtggaagacaaactttctgaggttgcgtctggtctcatttctgcttatgatagtggtgagcttggtcaagcactagctgaagggcatgatggctggaagaagtgggtgaaatcttttggcaagactcacaaaaggaagggaaagtcgctatttatgccactccgggtgctgttgaccgggaagcttcacggacctgccatggacagtaccgtaatcctcgtgcacaaagcaggcacctctggtgcggtggcccctcagtctggtttcgtgagtctcgacgaagggttcaagatcctgaaagaggtggactgggagtcactgcagaagcagcaagagtccc

SEQ ID NO: 6561 - DNA, 634 bp, Zea mays
  Clone ID: MRT4577_105974C.1
ctcgaggccggccgggactactctctctcatctcgactccacttcaccacactccaaacactctcaatcacaatggctcctactcacacaaggtcgtctacaagcccgactcgatgtcgactgaagaatacatcgtcatcctccaagatgtcgacgctgccaacaagtggatcgctggtgaccgcacgatccccctcgtcgacattgtcgactctttcgacgtcttcacgacgggtcaaggcgcccaaggtatcctcgaacgcccgtcgaagcaaacgctcgacaccgtcttctcgacgaccaacatcaacgacattgttgaaatctgcctcgagaagggcaggatccttagtggtaccacccctcacaggttcggctccaagaacgaccaacgttcgggcaactaccaagtctcgggtggatccggagcttctggtcacgggggacgataaatcgggacttcagcccctgtcctctcgtggtcccatcatgtacaaagcaaacccccccttgaattctgaatttagtctggcgtgacacaaagtagttgttccccccctcaatctccccctcgcaaagcgcaattttacccgctgtcgattcggcaaccgaaaaaaaaaaaaaaaaagcggac

SEQ ID NO: 6562 - DNA, 1021 bp, Zea mays
  unsure (1)..(1021): unsure at all n locations
  Clone ID: MRT4577_105975C.1
cattgggtacctcgaggccggccggaaagaagatcaaaaaaggctatcgaggcatactttttaccgaatcatataggaggaactacaactgcctcccacctccatgaatacttgatgcttgactattcttggattccaacgagtgtatgacattactgaggaatccgctttaccttgtttgccatatttgtgatttatcttgttggaaaagccctttgggtgcaatcagaaattggcagggaattccaacatggatttcttcctgccatcctttcactgtcgacgaaatttgttcccactgtaatgaacatcctgaagagattagctgacgcgggtcaagaacctgcagcagcccccgagaggcaaagagagatggagctccaaccaaaatccaccaggaacggttccttatacagcaatgtgacatcggcagggtcatctagcgtaaccacttcggagattggacctgaatattcaagcccggttgtgcaatgattttgctgatctttagctttttggctggaaacatactctagcagttgagaaaaacagggtgcctcaagaacgtacgaagattttggtgccttgcagtttttgtaagcttgcccttcccagactgattcaaggtggcactgcccctcgttgttattcaaggaattttggggctggcggggttgtttgtaagagcattgtaaaataacttgtttcattttttggtttctgtaacatgaatacatgacatgtgatagttgtatataagatctgtggactgggggcgtatcagcgcattctacacagctaagggttgcatagttgcgagaactgaagcatgtaaatgtctttaaactgccatctgattgagatgcagtagtactgctgttctggaataagacatgtctgcttttggggaaaaaaaaaaaaaaacccacgcgtttgcggacagcgtgggctgaaaatgaatttggttcccgacccctgttctggttggccgaaattcaaaataataaagcanatggaccca

SEQ ID NO: 6563 - DNA, 2661 bp, Zea mays
  Clone ID: MRT4577_105976C.1
ggaactgttactcactcgggagtcactctcccgtcctgatgccccgtttcaatttttgaactcccgatctggcaatccccacccacgctcccgagcaactttctactcactccggcgtcgcttcgaatcccagcgcggcggcgtgacgcgtgaatgcgtgatcgacgcgcggcgctgctcctccgggaaaccgcatggacgccgccgaccctctctgcgccatcacctcgcctgcgcggctccttccgcggacccttggccccaccccctcgaaggtccgcggtgcgctcctcgaggccatcgcactcgcccggtcgcggaaagggtctgaggagctggttaagcaggctgcaatggtgctgaaggagcacggggacatccagactctctaccatgatgatgcaatgaaagccatgccccccacaaatgtcagcaaagggcaacagggaagaagggcagcactggatcgcaaacgggctcggttcactatgaaggacactggaagcaaagcggtgcctgttgtggatcgatctaagttattgaatatttcggatccagtcgcattcttcatggccttggatcggcttgaagaagctgaggatgagatcaaacggctaaatggagaggcagaaaagcgcatattgatttttgatcctttagacgaacccattagacagcctggtttgcgtgggagaaaatcattccgcagtttcaaagtaactgaggatgctactactcaagatcccattgaggtactggcttcccaaacagcaactatgacaggatctcagttctcacaggatgttatgcatgctgttgctgacaaaaatgaacagtctgttccttcacgatctggtgaagctatttcagatgtttcaggaaaagaagattcattagctgagaaggatggccgtgatgatttggcttatttactgacctcgatccaagatttggatgaatctgaagaggaagcatttatccggaagaccttagggcttaaagaaataaggaagggaagagttagtctctgtaactccattcctggagtcaggtccttaagaagcgatactgaacaaaaaggttcaatgaaggttcgccctccagaaagtcatttgcctcagactcgccaagatcgaatttcagagttggagaaacatttatttcctggaggtgcagcaaatgctaaatgcacagatgatgaatctgaagggtcaccagatattgtgatgggtgaaccatcattagtgcatgattcttccgaggttctgatgaccaatgagaactctactggaagtgaaattgacaggaggaccccaaatctgtgtgccagagcagcagaccacgctcttgatcctgaaccaaacttgcctgatcatgcatacgaaaggcaaaccagaggctcctcacttggtttgtgcaaaaacacagaagttgccaatgaacacgaggaagatgatgtacacatagaatatccaactactggcgggtctacttatcaaacagaagtttcttctcatgatttggagggcagcttgacagaagaattggtcagtgaaccaggtaggcatgcggctccagatgatatctataggacttcacatgcagctgaggatagcattcaacatctagaagtggtcaaacagggtggtgttctacaagacaagtcaagccagtcgttggagatgcctctggaagatattgatccactatatcggcctcagatgcatggtggaagcactaagaaatcgacacctgttctgtgcaatgcactgtccccgatcgaacagaagcaacaagcagctcaagaagggaaaaggaagcaacaggcaaagagggtaaaaaaagtgtctgatgaatctagccatgcactggaaatatcccaagcaaatttcgaaccggagaatgaacctcataatgttgacgtgaacatggagcaaccgacagttatgagtagcgccaaggggcaaaagggagctcaaaggagaaacaagaccaaaaaattgaatcaaagaaaaatccttggagatgttgaccttgcgcggcagtctggagtgagaagaagctcaagaatacgctcgaggcctttggagtattggcttggtgaaagattactatatgggccgatacaggacactttgcctgcagttattggcatcaaagcatactctcctggccaggatggcaagaaaacattgaaagtgaaatctttcgtgtctgaacagtattcagatcttgtcgctcaatttgcgaagtactaaacaagacaccatttttctaagaggatcacgccttgtgacttgttgctttgtcacctgactttatgatgttacatgtgttggtggaaccatagtactgcacaatgaaaaggcacacgtcctaccgaatggttgccagttaggcaggtatcaaatggatgagtatctatctagtttggatgggctactacccattcggctactctatacgtggagtctagggggtcaattgacatttgcatgtatacatagtggtacttgatagtaagacagttttaggttcagactcttgaaaattgattttgtttgtcttctcgttttcagatttaagatgcgataccccagataaaaatcttgggtaattgaaggtaaaaaaaaggatagcccacctaaatatcataatgat

SEQ ID NO: 6564 - DNA, 490 bp, Zea mays
  unsure (1)..(490): unsure at all n locations
  Clone ID: MRT4577_105977C.1
tgtccgggcccgtacggcgggctgtccttcgccgcgccggccctggcgtcgccgctcgccgccgtggacccggaccgccggctgctcgacctcggcggcagcttcacatcgctgatcgcgccaggggcggacgtcggcgtccacttctccgccgagttcctcgtgggcgggctcgcgccggcggccctgcctcgcgcgcccgcctctgtccctgctctggcgcgaccgccaccgcagcagcatcagcagccgacgacggngtcccaggcgttgccggaaggcctgttctggagcatggggtggccggacctgtccatctaagggctccatgcatccgccggtgtcccaggcgcgcgcggtgcatcgtccgtcaccagtgcccggctaatgactgctgcgtgcggctgcatcatcgctaatctaaccttttgctatttctctcttttagctgttagcattaacagtagaatgtacagctgcatccaggatg

SEQ ID NO: 6565 - DNA, 1139 bp, Zea mays
  Clone ID: MRT4577_105978C.1
tcttccgggtatgacattaatttatttttcactgacaaatccaagtacttcaatgtatagcagttcataggaacataaaatctttgcttggtattctggcaatgagtgccaaagtagcatgtttttgttgaggtttgtagcatatatttttctccacagacaagtcaagccagtcgttggagatgcctctggaagatattgatccactatatcggcctcagatgcatggtggaagcactaagaaatcgacacctgttctgtgcaatgcactgtccccgatcgaacagaagcaacaagcagctcaagaagggaaagggaagcaacaggcaaagggggtaaaaaaagtgtctgatgaatctagccatgcactggaaatatcccaagcaaatttcgaaccggagaatgaacctcataatgttgacgtgaacatggagcaaccaacagttatgagtagcgccaaggggcaaaagggagctcaaaggagaaacaagaccaaaaaattgaatcaaagaaaaatccttggagatgctgaccctgcatgccagtctggagtgagaaaaagctcaagaacacgctcgaggcctttggagtattggcttggtgaaagattactatatgggcctatacatgacaatttgcatggagctattggcatcaaagcatactctcctggccaagatggcaagagatcattgaaagtgaaatctttcgtgcctgaacagtattcagatcttgttgctaaatctgcaaggtactgaagccaagattttccaaagaggatcacgccttgtgacctgttgctttgtcacctcactatgggatgttgacatgtattggtagaactgcagtactgcacaacgaaatgcatgttaacttaggcaggtatcaaatggatgagtatctatctagtttggatgcgctactacccattcggctactcgatacgtggagtctagggtgtcaattgacattggtacttgatagtaagacagttttaggttcagactcttgaaaattgattttgtttgtcttctcgttttcagatttaagatgcgataccacagataaaaatcttgggtaattggaggtaaaaaaaaggatagcacacctaaatatcataatgatgttatgattttttt

SEQ ID NO: 6566 - DNA, 469 bp, Zea mays
  Clone ID: MRT4577_105979C.1
aaaatctacattcgtatctaaattcgaattaaaatatgataaataatgttatgtctattggattccatgcctatccgaatcgatccctaatgtgataccgctgcacatacgctacactccaccgatcgaatagccgaaatggcatccaaacaagatagatactggcaaccattcggtaggacgtgtgccttttcattgtgcagtactatggttccaccaacacatgtaacatcataaagtcaggtgacaaagcagcaagtcacaaggcgtgatcctcttagaaaaatggtgtcttgtttagtacttcgcaaattgagcgacaagatctgaatactgttcagacacgaaagatttcactttcaatgttttcttgccatcctggccaggagagtatgctttgatgccaataactgcaggcaaagtgtcctgtatcggcccatatagtaatctttcaccaagccaatactcc

SEQ ID NO: 6567 - DNA, 412 bp, Zea mays
  Clone ID: MRT4577_10597C.1
cagcaaggccgtggtgcatggcatcctgatgggcgtcccagttccctttcccattcctgatcctgatggttgtaagagtgtaattaactgccctatccaaaaagacaagacctatagctacctgaataaactaccagtgcaaagcgaatatccctctataaaattagtggtggagttgcaacttcaggatgacaaaaaccaaagtctcttctgctgggaaatcccagtacagatcgtttctcatctctaagtgcctcattgagttcggtgcatctggccaatgagtctgctgagactcttgacagcacctccagctctgctgcttcaacaacagtgacttgctctccaatggtatccagtgattcgttgaagaggaggtgctctgtagcagaaactgagctccgggtggctg

SEQ ID NO: 6568 - DNA, 744 bp, Zea mays
  Clone ID: MRT4577_105980C.1
atgagtcagcggcgcaagaggagcggcccacggtggactcggtccaccgtggcacaggcgcgggcgcaccacgtggacggccatgtggcggccacggtggacaggcggcaaaggcggccacaggcaggcgggagccggctcgccgaccggccggccgggaagcggcggcgtgcggcccgatggtcaccggcggcttccaccggcacggcggcatgtgcgagagagcggcgggaaaggggagggggagtagcacacggcggaaggaggtggccgtcggcgagatggcaacgggaggcggcgacggcggagctcggggcggacgaagacgacgatgctccggtgacgggcggcgctcgggaagaggcggacgagcagcagctgcatcctaggatgggaggggaggtgttagggaggacggggcggcgacatggcctgccggagcggaaaggaagggaggaagggctcaccggcacacgggaaaacggacgtccagtgagtttccggcgatgggaagaggtggccgaggttctcctcgtccttgtggagcagagggaggtgacggcgtgggtcggcatggaccgaagcggcgttgcgacgcggctggaggtggcaatggcgacggagagaggtggtgcacgtggcggcggcgttccggaggtggaatgggaaaatggagtaggggtcagggtggagatcgacacggcgatgccgatggtggtgtcgacgcggcttggtggtggctag

SEQ ID NO: 6569 - DNA, 286 bp, Zea mays
  Clone ID: MRT4577_105981C.1
gtgacatgcggacctggccacgccggtgatgtgcaccttggaggtcctggggccgatggagatacattctttggcgtgacctgcggtcctggccacgggattagcatgggcaggctagggcggtacaaggactataaagatgttacggacatcaacggaaaggattgcactcttaaaaagacgatgatcggagtgcgcataaaggcgtacaaggactgcgcctccgcgctcaccgactccaagatgcactaccggaatatcaagatggttgactcgaccaacccca

SEQ ID NO: 6570 - DNA, 2600 bp, Zea mays
  Clone ID: MRT4577_105982C.1
cctcgaggccggccgggccgggagcctagtagcctaccgtttaatttttgaactcccggtccggcaaccctccccagccagcgttccactcactccggcatcgcttcgaatctccgcgcggcggcgggaccgcgtgaccgacgcgcggcgctgccccttcagaaagccgcatggacgccgccgaccccctctgcgccatctcctcgactgcgcgactccttccgcggacccttggccccgccatcgggccttccccctcgaacccccgcgacgcgctcctcgaggccatcgcactcgcccggtctctgaaagggtctgaggagctggttaagcaggctacaatggtgccgaaggagcacggggacatccaggctctctaccatgatgatggagtgaaaggctggcctcctgcaaatggcagcaaagagcaacagggaagaaggccagcactggatcgtaaacgggctcggtttgctatgaaggacactggaagcaaaccggtgcctgttgtggaccaatctaagttatcaaatatttcagatccaatcacattcttcatgaccttggatcggcttgaagaagccgaggaggagatcaaacggctaaatggagaggcagaaaaacgcacattgaattttgatcctgtagatgaacccattagacagcctggtttacgtgggagaaaatcagtccgcagtttcaaggtaattgaggatgttggtactcaagatcccaatgaggcaccggcttcccaaacagcaactatgacaggatctcagttgtcacaggatgttatgcatgctgttgcgggcaaaaatggacgatctgtttcctcaagatctagtgaagctatttcagagaaagaagtttcattagctgagaaggatggccgtgacgatttgacttatatactgacctcaatccaagatttagatgaatctgaagaggaagagtttatccggaagaccttagggattaaagaaacaaggaaagaaagagttagtcttcgtaactccattcttggagttaggtccctaagaagcaatactgaacaaaaaggttcaatgaaggtccaccctccagaaagtcatttgcctcagactcgccaagatcgaatttcagagttagagaaacatttgtttcctggaggtgcagcaaatgctaaatgcacagatgatgaatctgaagggtcaccagatattgtgatgggtgaaccatcattggtgcattattcttctgatgttctgatgactgatgagaactttactgcaagtgacgttgacagggagaccccaaatctgggtgccagagcagcagaccctgttcttgatcctgaaccaaacttgcctgatcatgcatatgaaaggcaacctggaggttcctcacttggtttgtacagagacacagaagttggagttgccaaagaaaatgagacatgtaacaggagcaatatatctgtggaggaagatgatgtgccaatagactatataactattggcaggtctactaatgaaacagaagtttcttcttctcatcctttggagggcagctcgacagaagaattggtcactaaaccaggtagacatgcggctccagatggtatctgtaggacttcacatgcagctgaggatagcattcaacatctagaagcggtcaaagagggtggtgtcctacaagataagtcaagccagttgttggagatgcctcaggaagatattaatccactgaatcaggctcagatgcatggtggaagcactaagaaatcggcacctgatctatccccgaccaaacagaagaagcaacaggcagttcaagaaaggaaaaggaagcaacagtcaaagaggggcaagaaagtggctggtgaatccctggaaataccccaaacaaattttgaatcggagaatcaacctcataatgacgatgtcaacattgagaaacagacaattacgagtagcacactctcaccaaatggtgccaaggggcaaaagggagctcaaaggagaaaccagaccaaaaaaaggaatcaaagaaaaatccttggagatgctgaccttgcatgccagcctggagtgagaaaaagctcaagaacacgctcaaggcctttggagtattggcttggtgaaagattactatatgggcctatacatgacaatttgcatggagctattggcatcaaagcatactctcctggccaagatggcaagagatcattgaaagtgaaatctttcgtgcctgaacagtattcagatcttgttgctaaatctgcaaggtactgaagccaagattttccaaagaggatcacgccttgtgacctgttgctttgtcacctcactatgggatgttgacatgtattggtagaactgcagtactgcacaacgaaatgcatgttaacttaggcaggtatcaaatggatgagtatctatctagtttggatgcgctactacccattcggctactcgatacgtggagtctagggtgtcaattgacatttgcatgtatacatagtggtacttgatagtaagacagttttaggttcagactcttgaaaattgattttgtttgtcttctcgttttcagatttaagatgcgataccacagat

SEQ ID NO: 6571 - DNA, 430 bp, Zea mays
  Clone ID: MRT4577_105983C.1
aacctttgggctgatttatgtgcttgtttatgtgcttgtttatgtgcttgggtcgccggtagcctcggactaaacggcaatggttgggaataaattggcaaactcgaaagttagcgaccttattactgagagcctgagatatgaacccagcacataggcccgcccctcggagaccgaagaggggacagcgtatacagaaaaatcgcctatcgcggcccactgagaccccagccgacatcgttgaagcacaaccgcgtagactgtaagaccggccgctcgtcacgtccaccgtccacggtacgaccctctgctaagccgcatccgagctagcaccctcgtatggtcaccaactctcatacggcatctcgcctaaaaaaaaaaaaaaaagggtggttgtctcagaggacttaagtccatgcatgtgcgtacg

SEQ ID NO: 6572 - DNA, 369 bp, Zea mays
  Clone ID: MRT4577_105984C.1
cgccttctacttcggggacgtgcagtttggtgactactagttctggcacatgctggtgaacatcctgtaacagacatcgtgaactctgaggggtggctgttcgacaagcacgcgcggactgcgctggccttggagacgctcaaccacgacaggtagcgcttagttcatgttctacaggaacccgaacacggacatgctgctgacggaggccgaactagacctgggcctggtgcggctcgccagtgttttccactaccgactacatactcactcatatacgagccgtgccgatcggatcacatggacggcatgcgcgcaaacaaggccgcgggggtgatcttatactacaaccccaacaagctgctacca

SEQ ID NO: 6573 - DNA, 2103 bp, Zea mays
  Clone ID: MRT4577_105985C.1
atggctagtgagaagaagaccgtcgacccgacgctgtccgagttttacgaagctatggagaggaccaatgcagaaaagattgcacatgagacattagctgggatatctgaggattccagtgacagtgaagacttcgatgcagaaactgacgaggtagttgtccatagaagtttcatgaaagcagggcttcggtttcctttggatagtatggtagtcgaagtgctgaaaaccttcaaagtctaccttcatcagcttacccccgaagccatcatcaagataggggtttatatttgggccatgaggagccaaggacaagaaccaaatgtgaaaagcttctgtaacatgcatgaattgtcttatgagacaaaagccaccgaaaaagaacaatatcacaacaactttagttgctatggcttcgtaacccgctctgaggtaagcaacccagttccaacattccgcaagagatggtcgagagcctggatgcaagaatggttttatgtgaagaacgatctggttgagagggaagacatcaaggggattatccaacgtcctatatggtctcacttcggcattaggagaccatcccttgcgcttgggaacgacatacaagcgtgccaagctgcttataacacattatgcacttacataggcaccagggacttagtccaggagcacattgccttcgaggtgtggccactcgggagtgggtgggagatgccgaaggaggctgctactggctctagccaaggtggcttggtttacttgaagtatacattcaaatacatgagccaatttgatgagccaaacgatgactggctagatgccattgacgcaaccaacgatgagttgcttggcgtctactcaagggctgaagatgatgccatgacagcgcaaggaaagaaaagaagagttgttgcttcggcgatttctactacgccgaagccgaaaaaggttaaagttttgacacatcatcctaagcgcattgaaacagcggaagagccaaggcctgctgaagggtcctctgctgttgagtcaagtcacctcgctactgccaaagctagggtggaatcaaccgaagagccaaaactgaagatagcagcggaacaatcgaaagccttgagttcattgcaagaaacagaactgccgaaggtacaaaagattgcttcagtgtcaactcctgcctcagtgcctgctgtagaggggaagattgtaaagggatctttcaatgttggcacagcgcaggctgcggttgaggctgggtcctcaacccccgccgaagcaagaccttcaggggccgctaaggagggtgctgaagcaaggcctttagaggctgctgagggaccatcattgttaagaaaagaggttgctactgaagaatctgagttccctgcccccagaacatctaccgaggaattagagtttatagagatggcagacaatataagatatccgaagcttgagttaggtttgtctgcaatgacgaaggaccaactcgcagatagccttgcctataacagtctgaagaaacttaaagatagctttgcaaaggtgggtgcatactcatcggagcaaagatttatccgaggcgatcccgaaggagttattcaatggattggcgaagaggtcgaagcttttgaagaaatactcagtgatcatggagatttttgtgccttcgccggtgcccgaggggttgcagcagttttggagaaaactggttgtgaacatgttaatgctgcagcccaggcagaagccatcttctctgcagacgatacgaaggaaccttcaaccgaagctactttggtgggcgggaagttctatgtcgatatctggatgaagggcgaccgtgagatggccgatgaagctataaaaaagagtgaaaaagaatctcacgatgcacgagtggaggcaaaggaggctgaagaagctgctgaacgcgcgttgattatagccgacctttcgccaccaccggagccatacaatcctgaggcagatccaataatgaaagaggctttagatgtaatgaagattgctaacgaagttgttgacgaagtcatcgacaaacttttacatgaagtcaccgagaggatactgaaggaagactaa

SEQ ID NO: 6574 - DNA, 460 bp, Zea mays
  unsure (1)..(460): unsure at all n locations
  Clone ID: MRT4577_105986C.1
cccctggggaattcctttccacattttcaagaataagggggggggggggtggatatgtgaattggaattatttggtttcttattaggcctatcctgcngcctgggaaatgagatcggaattcctcggggaattccaattccacattttnccgagttctggaggcttttttgttcatatgtgaattgggattaggggggggtcttattatgcctatcctgctgcctggggcctgagatcggagttcctcggggattgccggttccacattttcgcgattttgggaggccggggggcccatatgtgaattgggattatgtgttttcttgtttggcctatcctgtatcctggggggggggggcgggatatctgggtgttttttcgtttcccattctccgtagtggggaggccgggatgctcatatgtgaattggggttttgtgtttttttgtttgccctttcc

SEQ ID NO: 6575 - DNA, 354 bp, Zea mays
  Clone ID: MRT4577_105987C.1
gtatctggtcttctagggaccttttctctatctgcttaatatataatgggggcgcagttctcctgcgcgctcgagaaaaaaaaaggatttccaaagcacagcagcccctcctaatataaggcactttactccacttggacttcgcttttctaatttaatctaactttcctaattaccttcttaccaaatcctttttcctaattaactaaaaacatcttgtttccttaactcccagggtgagtacaatccccagacaagtataagacctcctggttgcttgcctcttgcaccagagacagcagttagtaataatttgcgaggttggatatgcagagaataacccggacgcgtggg

SEQ ID NO: 6576 - DNA, 206 bp, Zea mays
  Clone ID: MRT4577_105988C.1
tacctcacctacgatcactttttcgttttaattacattaccattactacggggacttctgcggagagtcttttaattaagcatggctcctctctttctactgaactactctttttttcttttccgttcttaacaacatcttttttatagagctcaccctatttaaatcaattgtcccccgtttttcataaaagctacaatcccatc

SEQ ID NO: 6577 - DNA, 197 bp, Zea mays
  Clone ID: MRT4577_105989C.1
gtgtgcaacattgaaacattacactcctgatttcttttgtaaacactaggacgcaatttatctgaacttgaagatgcacaccaacggagcatgcaaaaacaaaagatgactgtgttcataaggtgcactagatcctgcatcatccgcatattcattgtcacgcgctacaactaagaatagccttgctagccccatca

SEQ ID NO: 6578 - DNA, 291 bp, Zea mays
  unsure (1)..(291): unsure at all n locations
  Clone ID: MRT4577_10598C.1
ggcggtggtgttcgtcttctctctcctcgattgttgcgcgctcatcttcctctcggtctacttcataattacattgtctgatttagaatgtgattacattaatgctagatcatgttgctcaaaattaaacaagtgggtaattccagaattgattggccataccattgtcactgtattactgctcatgtcattacaaaggntcatcttccttctcaacttacctgttgccacttggaatatatatcgatacattatggtgccgagtggtaacatgggagtgtttgatccaac

SEQ ID NO: 6579 - DNA, 120 bp, Zea mays
  unsure (1)..(120): unsure at all n locations
  Clone ID: MRT4577_105990C.1
gaatgaangggccgaccgacgcatgcgtacgccattcactgttaaataggagaccatcaaattgctctcattattcctcattactccgggcggggatcgtcatcgctcggaattgactga

SEQ ID NO: 6580 - DNA, 632 bp, Zea mays
  Clone ID: MRT4577_105991C.1
cataaccaccaccgaacgcggccatgctcgcccgccgctgcggccactactgatgcaggtgagttttcccctcccccgccgccgccgttatggatccggcatccgaggagctcgagcgccgcagccactacctcagctcgctcatccgccgcaccaagctcaatgccccgcccgccccgccacctcctacttctcacccggagccggagacgaagctggagctggagcgggagcgctcgcccatccgccgcaccaagctcaagctcaacgccgctcccgccctccctccttctaccactcacccggagaccgggaaactggagcgggagccgggccctaagagccagaacctcgtggaggccaaggtggtggtggaggacagggaagtgaaagagggcgacggaaaggggaaggaggagaggaaggtctcggtgcgggtccgggcggccgacatgccggtggtgctgcagcggcgcgcgatccggctcgcctacgatgctgtctctgcaacaccgcgggccgacggcaagcgtctagccctcgcgctcaagaaggaatttgacacgtcatacggccctgcttggcactgtattgttggggcaagctttggctcctatgttactcacacattg

SEQ ID NO: 6581 - DNA, 244 bp, Zea mays
  Clone ID: MRT4577_105992C.1
gaaaaaaaaaccgcctcggcatccactcaactcacaatccacggggtttgggcccatactttgggagccctgggcccccccgggttgaaaggctacatttgttttttgatttaccaccccactttaggaggccgggccctgatcttttttagggcttcctcgggggaataaacaccctttgaaacagcttggcgctcttccggaagcccgcttgctgaacccccaagtctcctctgggtcctgg

SEQ ID NO: 6582 - DNA, 566 bp, Zea mays
  Clone ID: MRT4577_105993C.1
acaatataatattatatacagtactagaaggctatatatatgtcgagctcatctttatttagcagatatataatatcccaaagaccagagtctcatctgctggcgtacaggtacaaaagatagctagaccgaggtactccgccgtgagaagcttgaagatgccgtcggactccagcgccgccgccagctgcggccatatgtaggcggtgacgagccaggagccgtcgcctcccggccgcgctccgaccgaaaggaaagccgagcaaagcctgccatagtcagagaccgtggttgccagagtagcctggccgaagccgaagtcggtgtcgagcgggaacgtggtcatcaccgactggttcagcgtgggcgcgccgactccgatgacggccgcctccatcaggccttccgtcttgtgcacctccacccagtccaccatctcctggaggtactcgtcgtagtccaccgacgtgatggcgtcccgcaccatggccgccacctccgccagaggcttccgcacgatctcctccgccggcgcgtcgcccagggcgtaggtcgtcacgttcccc

SEQ ID NO: 6583 - DNA, 1012 bp, Zea mays
  Clone ID: MRT4577_105994C.1
gatccattcagccgcttcggggccgtttgggttccttggatctgcaactgtagcgtccgccttcacgcgcggcgctgatgctgccgtgcctccgcctccacgcccggttctgttgctgccgtgacgccgccgggctcgggggaagcgcgtggcaccactcgtcgcttgcctgcacctgcaggttcaactcgcttggaagcatttgtggcaagtgaggcctccgtcttcatgaatcagccccctccacatatgtctagaccaacaattattatcaagctcattttgtggttgctgtggaccatcacccacttagcaatcagcattttaaatttatggtctcatctgatttatagtctagactgctatcttatttcatctggattgttgcggaagtatcagaatcttcatctgggtagactgaagtacttggctattgtggtagatagcaaagaagctaaaagtactgtgaaggtcaagcgactggtatgctggctctcatctatgggtgtgaagtatgtatgtctctacgacattgagggagttctgaagaaatcttttgaacctgctgtgaatgtttcaagagataggactgcaggagaacattttggcattggagcaaacatcaaagatctacactgtagccaaagagagatgatgatagattgtctttctggctctgatggcaaggagggtattgctaaagcagccagtttactttgctcaacttacctcaatggtgatactcatggagatgacaaaaggaaaccagcatttacagaagctgacatggctggtgcactgaaggctgtaggttgtggtggaccagaacctgatctccttctcatgtatggtcctgctagatgccatttaggatttcctacatggagattacggtatactgaaattatgtatatggggccactgaaatcaatgaaatatggtgcaattgtgaaagccttatataacttctcaaagaaacaccaaaattatgggaaatgatagctgatactag

SEQ ID NO: 6584 - DNA, 1718 bp, Zea mays
  Clone ID: MRT4577_105995C.1
cccccgggctgaggaattcggcacgaggcgcaattcaccagtagtagtagttgtagcggcataactagctatggctaccaccatggcggctaacgacccgacgagcatccgcgtggttagccgccggctggtgaaggcctccgacgcttccatccagcctcatgtcatgtccctctccaacctcgacctctacgtctgcgactcacagctcggcacgctgtgcgtctaccccaacgccggcggcggcttcagcgcgcgcatccccagcctgttcgagtccctcttgccgtccttgctcaactacctctacccattcgccggccgcctcgtcaccaacccaagctccggcctccccgaactccactgccacaaccaaggcgcagagctcgtggtcggcgaggtcggcgtcgccctggggagcctcaactacggcgcgaccaaggattccttcaagaagatggtgctcccgttccccagggacgtccttctgtcggtgcagctgctctccttcgcgtgcgggggcttctccgtcatgtggtggatcaaccacctcgtcggcgacggccacgtgggcgccacgatcgtcaggacgtggtcccagctcgcgcggaccggggacatcggcggtgcgcccccgctcaactacgaccgctccgtgttccgcccgcgcagcccgccgtcgtacagcgactccgtcgcggccaccttcacaacgttcgacgagaagcgcctgcccaacgccctcacggcggaggccagcttcgtggaccgcgtctactacgtggaggcgagcgacatcgccgcgctgcgcgacacggcggcggcggccaccacggcccagcgcccgacccgcgtcgaggcgctgtccgcctacctgtggaaggcgctcgccgacgtcgtggccgcgtgcccccggagcaacaaggagcgctgccgcatgggttggtgggtcagcgcgcggcgccgtgtcacggcgcctaagctcgtcgctttgatgcccggctacctggggaacgtgacgacctacgccctgggcgacgcgccggcggaggagatcgtgcggaagcctctggcggaggtggcggccatggtgcgggacgccatcacgtcggtggactacgacgagtacctccaggagatggtggactgggtggaggtgcacaagacggaaggcctgatggaggcggccgtcatcggagtcggcgcgcccacgctgaaccagtcggtgatgaccacgttcccgctcgacaccgacttcggcttcggccaggctactctggcaaccacggtctctgactatggcaggctttgctcggctttcctttcggtcggagcgcggccgggaggcgacggctcctggctcgtcaccgcctacatatggccgcagctggcggcggcgctggagtccgacggcatcttcaagcttctcacggcggagtacctcggtctagctatgtgagcaactgaacggaacacagttagctcgacggatcgatcatatatgtgttttctttcttttgattcgaatcgatgcatgatgtgcttcctttgtttttctgtcagcttttgtacctgtacgccagcagatgagactctggtctttgggatattatatatctgctaaataaagatgagctcgacatataaaaaaaaaaaaaaaactgtatataatattatattgtaaaaaaaaaaaaaaaaagggcgcccactctagagga

SEQ ID NO: 6585 - DNA, 357 bp, Zea mays
  Clone ID: MRT4577_105996C.1
caacaagcaacatagaaagcggaatacagtgtcaacaatagagcaacaatggagaccacgatatataccatgattatgctccttgctatgcctacatgtgttgctaacgcgacagttaacgctaaatgctcacatgctcgtatagctgctcttattgctccataccttccatcaattatagcttcagtatgagaaaacccatctgttcaaccatatatgctacaacaagcgatcgcagcaggcaacataccttgatcgaccttgttgtggcaacagtcgccagccctatctttggtgcaatcattggtgcaaaccatgagggcacaacagctggcgcaactggtgctacctgtgatc

SEQ ID NO: 6586 - DNA, 122 bp, Zea mays
  Clone ID: MRT4577_105997C.1
gtatgggcttgtacgttactacaatctagtagcatcgttggacatgccggatcgatatacgctggctatgcgcagtagtggacgatgggtattaagattcctgctggtgcacagttgtgtat

SEQ ID NO: 6587 - DNA, 306 bp, Zea mays
  unsure (1)..(306): unsure at all n locations
  Clone ID: MRT4577_105998C.1
atcctgataccgacagcgcgcccctttttttttttttttagattctgggaaatgcgatgaagacccatcttacacaggatctatcgnttcagcattagctgcatccaacggagccttcacgtaccctctccctcgcttgttatgcgacatgtgtgttcagatattcgaaaggntaagcgtcgccgtccctgcggatgcacgaatgatgtttcgaattcaaacgcggaagctacgcgggtgcacacttgcacttgattgattggatcggaaccacctgtgcgccccgaaaacagacgtttttcactc

SEQ ID NO: 6588 - DNA, 800 bp, Zea mays
  Clone ID: MRT4577_105999C.1
cctcgaggccggccgggacctctcgccccccctctcctccgtccctcggagtctcctcctgtcttgatttcgggtcgctgctgtttcgatcccctttcctccctgacgatttgcttatttttgcgttggatttgtaacctaaacatctcgtttccgcaccgttttggggccgcgtctactggtggttgggtccctttagatcgagtaggcgcgaggatggggacacatccccgattgatctgacgtgatacgcgtacggatccgtcaaagcctctactccagtttaaccagatgattatgtgtcatgcttattaagcggcgtgttttttaccgctggaagttcgtacatagatccggcgtactgcaaattttgaaaactgaactgtaagatggcatcagcagagctttcccgtgaggaaaatgtgtacatggcgaagctcgctgagcaggcggagaggtacgaggagatggttgagttcatggagaaggtagccaagactgttgactcggaggagctcactgtggaggagcgaaacctcttgtctgttgcatacaagaacgtcattggagcccgccgcgcctcatggcgcatcatctcctccatcgagcagaaggaggagggccgaggcaatgaggaccgagtaacactcatcaaggattatcgtggcaagattgagactgagctgaccaagatctgtgatggcatcctcaagctgcttgagacccatcttgtgccgtcttccactgcccccgagtccaaggtcttctatctcaagatgaagggtgattactacagatac

SEQ ID NO: 6589 - DNA, 189 bp, Zea mays
  Clone ID: MRT4577_10599C.1
cggggtcgtattagagcactcgctggggcagtcccacccggtgcacgtggtgccctacagcccggacttcctggacgagtccgtgccgtggatggagatccgcgacatcggcaggggcatcaggtgcgactgcaagctcgagctgttcgtggtcagcgtgcagtcggtgaagctcaacgtcgtcgcccg

SEQ ID NO: 6590 - DNA, 231 bp, Zea mays
  unsure (1)..(231): unsure at all n locations
  Clone ID: MRT4577_1059C.1
cccgggtcgnacccacncgttctttagggatgtcctttttggnacgaagggtgtcatgtctgtggcaagnaaaattgagcannttgggcagcgccagaggcgcattgagaaatgcncnnaaaattttggnnttgcaaacactttgctatggnacacagnactaaagtgtaagaatattactggnnagcacgggnntccgggttggtatttcaatgggtctaaggggttgca

SEQ ID NO: 6591 - DNA, 154 bp, Zea mays
  Clone ID: MRT4577_105C.1
cccacgcggtggcgtgtggtcctcctgacagaagggagccgctacggcttacgcggcttccgcgtctggccgatgtcttactcgatagggacggcgcgacccgactgcactcgatctagggctcagaccctcacgatcccgttcttttccaggt

SEQ ID NO: 6592 - DNA, 504 bp, Zea mays
  Clone ID: MRT4577_106000C.1
caaacacccttggacattcgacattgctgccacccgcgtggtcgtatccgcggtgaatgcctctagtcggtcctaggtgatggagaggtgggtgtcgatgtgctccaggaccgcacgctgcagatctgatcgaagagcttggatctcctcgtcggcgcacttagctcgtagcgacgcgatttcgttggtgttggtcgccactgctttctcgatggagttccagcgcgcgtcctgctcggtgaagcggtcgcagatctgctgtaggagcttctgcgtggagtccaaggccttggcctgcaccttgagggaccgcgcctggtcctcgagcgccgccgcgacactagggtcggttgcccccaccatacgcgcgcgtcacgtgtagtaggcgccgtcgccgcgctccaggcccgacgaatcggaggtctccgataccaattgttagcgacccactcggtgctaacgggaattggggaggaagaaggtgagttcttagcggacgctggg

SEQ ID NO: 6593 - DNA, 1114 bp, Zea mays
  Clone ID: MRT4577_106001C.1
atcgaggccggccgggactgcaagttttgaaaactgaactgtaagatggcatcagcagagctttcccgtgaggaaaatgtgtacatggcgaagctcgccgagcaggcagagaggtacgaggaaatggttgagttcatggagaaggtagcgaaaactgttgactcggagaagcttctcgaatctcaccttgtgccgtcttccaccgctcccgagtccaaggtcttctatctcaagatgaagggtgactactacagataccttgctgagttcaagactggagctgagagaaaggacgctgctgagaacaccatggtggcatacaaggctgcccaggacattgctttggctgagcttgctccaactcaccctattaggcttggactggcactcaacttctcagtgttctactatgagattctcaactcacccgatcgcgcctgcagtcttgcaaagcaggcttttgacgaggccatctcggaactggacaccctgagcgaggagtcctacaaggacagcactttgatcatgcagctccttcgtgataacttgaccctatggacttctgacatctcggaggaccctgcggaagagatcagggaggcgcccaagcacgactcgagcgaggggcagtaaagccggctttacgtgcctagaagctagtacctagtgtttgctgctgtctaatgacactatgcaatgtgatctggaccctggtttcttgggtgcgacgcttgtagcagccgtgttatgattatttgtcgggaaaatttgggggctccccatatgagatgctgccgggcaagacctcggcatcccacctcgtttcaggcgggggacgctggagcgtggtccggttgtgttgggaagccccttaaactgttgtcgcttgcattttaaccttttcatcgccgttcagtggtcctaaatctatggctcgtctcagtggtctagtatatgttttcttggttctctcttgattcctcacacggtgagtgggaccgttcgcatttgtctgtcccatcccatcttaacggtgaatgtgttttgtttggtgtctcgttctgatgtgaatttgcagcatctcgatttcatcttcaataagatagtattgtat

SEQ ID NO: 6594 - DNA, 460 bp, Zea mays
  Clone ID: MRT4577_106004C.1
ggggggatcttttttaaaaaaataacagggggggacagctagtttggttctgtctggcttggcgacaacaaaggggggaaaccactcatgcccaaagggtcttttttttgaggcacgcctcctgcagcgccattgcagggttccccgaaaagccgaagccacccaaaatttgctgctgctgaaaagctgcaccagcgctgcccaacgggttaataataaggccattttgcacaagcaggctgccgaaagcctcgcactccatcgtctgctgctgctggggggggggaaaaaattgttgttgttttgccggggctggcgcggaaaaagctgcagttgactcgtcgggctgcatctggacccaaaggatctcggccttggggagggcgagctgcacctggagctgggaaacctgctgctggaggtaggaaatggcccccacccagccgtacacggggtccct

SEQ ID NO: 6595 - DNA, 307 bp, Zea mays
  Clone ID: MRT4577_106006C.1
ctactcaaaaatcaaacaaaccagaagctcctcctcgcctcccatcacttcctacgccacccgcgaagcgcgcccgaggcggcaccccaccgtcgtagtagaagacacgggacgcacccccgcagcctcgctcgctcgctcccctcacttcctccccgcgcgatccacgggccccgccccccgcgctcctgtctgatctccctctccgcattggttacgccctcgttcgagggtgctgcgtgtctcctcctcgcgcggtacgcctggaacggacgccgccgggaagcgagtttggctttcggttatt

SEQ ID NO: 6596 - DNA, 331 bp, Zea mays
  Clone ID: MRT4577_106007C.1
tcttcacgacgcacgcagagccgcaaagatccgtcacactgcaaggtttgaaaactgaactgtaagatggcatcagcagagctttcccgtgaggaaaatgtgtacattgcgaaacttgccgagcaggcagagaggtaccaggaaatggttgagttcatggagaaagtagcgaaaactggtgactcggaggagctcactgtggaggagcgcaaccttctgtctgttgcattcaagaacctcatttgagcccgccgtgccttatggggcattattttcttcattgagcaaaaagaggagggtcgaggcaattaggaccgtgttacacttatta

SEQ ID NO: 6597 - DNA, 394 bp, Zea mays
  Clone ID: MRT4577_106008C.1
gcgtgactcgagcgaggggcagtaaagccggctttacgtgcctagaaactagtagctagtgtttgctgctgtctaatgacactatgcaatgtgatctggaccctggtttcttgggtgcgacccttgtagccgtgttatgattattgtcgggaaaatttgggggctccccatatgagatgctgccgggcaaggcctcggtgtcccaccttgtttcaggcgggggcactggagccaggcctggttgggttgggaagccctttaaactgttgtcacttgcattttaccttttcatcgctgtttattgtgagtggtcctaaatcaatggctggtctcagtggtctaaaaaaaaaaaaaaaaaaaaaaaaaaaaaaaaaaaaaaaaaaaacccccgcgc

SEQ ID NO: 6598 - DNA, 199 bp, Zea mays
  Clone ID: MRT4577_106009C.1
ggccgctttttttttttttttttttcgaccactgagacgagccatagatttaggaccactgaacggcgatgaaaaggttaaaatgcaagcgacaacagtttaaggggcttcccaacacaaccggaccacgctccagcgtcccccgcctgaaacgaggtgggatgccgaggtcttgccccgcagcatctcatatggggag

SEQ ID NO: 6599 - DNA, 282 bp, Zea mays
  unsure (1)..(282): unsure at all n locations
  Clone ID: MRT4577_10600C.1
accgagtgatgatactccgcaacaccttctactttaccttcatcataaacaacgctttggcgnctattctttttgttggctacnncacacacaagatctatccaataaacaacctctgaaaaaggtacgaagacatatcagagataggacagaatccatcttatgaattataaaataaagccaccaatttactcaggtttgaccgtttcattttatcacaaccataaacgacataaacttacactgctcctgtaaccaccttctcattcaaatactctaaaa

SEQ ID NO: 6600 - DNA, 441 bp, Zea mays
  Clone ID: MRT4577_106011C.1
actcccggcatcctctagcccagaccaggaacggcctccccttcacaccctaagcagagagagagagagaagcacgtggccaagaagacgagcagcatccgcagagcgacggaacagaacacaaaggcatgtaggtccgaggaggacgccgcagctaccatctccatgatgcacgtgctctcccagggtgctgcccatcctccacgttctcaccttcctgatgtcgagcccgatcctgcacggggaaaactgcttggaggcgagggacgactcccccgactgcctccgcttcctgcagcgagacatcatcctcaggaggctctgacgcttgcccatctcccatcaggtgctgtctgccgctacatggtaccggcagacctgaatgatccgcctctacctcttctgcatgttcttattggaccgcacgcttgtcttcttcgt

SEQ ID NO: 6601 - DNA, 371 bp, Zea mays
  Clone ID: MRT4577_106012C.1
tcccacgcgtgcgggcgagaaccgaccggctcgacccttctgccggcgatgcgctcctggccttaactggccgggtcgtgcctccggcgccgttactttgaaatctaattttctagcattttgctgctggctactggcttaggtgttattaaatgtttgattagtggtatggtatatttctttcactaggttctatcttgctgcctcccttctgagaaagagcttctcatgtgatggcatcgttacaagtttatttattaacttgcaaggattatctcaagtcttagcccaactttattcctgtgcttcaggaagattattacgttggtggtctacttcccaccatgttttttgtaccacaatctatgagc

SEQ ID NO: 6602 - DNA, 488 bp, Zea mays
  Clone ID: MRT4577_106013C.1
gcttcaagagtaacaaattgaattacaagcccgattccaacaaccgaggctcaaaaaaatccaacaccgcttcatgagccagggaaacccgccacagccaaagaaaaacaaacaagaggtcccgaaacttcccggacccaaaaaatggggggcacggccaaaaaacgcaaaacccgcaaaaggggaaaacaacgcgaggagcccatcagccaaaccgccaaaaccgaaaagggggcggccccggcgccagagcccgaaaacaacggccagggaaaggacgggcttgcggcgggcgcgcccagggaaagggacgggggcgcggataaccccccccaggaaaaacctgaacaccccgcggggctccccgaaaaagaacccccaaaagcccttgaccccgcccctccttgccagacgccggatagaagacttggcgaacccccggatggtgacccccaaaaacttccggggacgcttcgcgccccccttgc

SEQ ID NO: 6603 - DNA, 420 bp, Zea mays
  Clone ID: MRT4577_106014C.1
gggaaaaaacaggggccgggggattaaagccgcaaaaaacagtcgggggccctgttcacagggggccctttttacagggttgggtggggccccattcaaaccgggggggatcctagccattttcccgggtttttttttttttgggggcaaattctgaatttgacccggggtgggaactttccatttttgcggggaaaggggccaaatcccaacattattttggaaaaaagggggggttccaattaaaccaacagtttccacaaaacttccatagcaaaggggtcaggggggggctgggggggaccccccatttagggggggccagcaccccccaattttggttggcggggggggtcaaacagaacccttttcccctccgggggggggggaaaaaaaaccccgaccaggttgggggggccc

SEQ ID NO: 6604 - DNA, 307 bp, Zea mays
  Clone ID: MRT4577_106015C.1
gggggaaaaaaccgggaggcctaaaataggaaacgggcccataaaaacctttttttttttttgggggtggccctggccttttggaatacaattcctttacgggttttacccagtttaaagggacagtaccttaggggggcatgacccctaacaaattacagggggggtttcaccggggggcgctaaaaaaaaactactactatttacggggggatagccgagggtaaaaaacaacccccttttttttgggaaagaccccttggaaaaaacaacggtttagcgccccaaatgcttacgggggggggga

SEQ ID NO: 6605 - DNA, 588 bp, Zea mays
  Clone ID: MRT4577_106016C.1
tgttcattaaggtcccagaaaatgcaaccattggatcactgaaggtaaacactagatgggcatacagaagttattgctaagcaatcgtgcattcatttggcatcccaatattctttttggtgatgttgttgttaatttactatacagtgtaattgatgaaatctgcaaggttgcaagagcgcacttgagttcatagatttatctttttcattccacagttggtacgctggattcagttgactgtcatgttagatttctgcatttgaggtttattgcaatgtggaataatgagtcttcacaatagttttactggtatacagagcaaataaataatttttttagtaacagtttgtagttcgtctatgcctacagagagctgttatggatgttgtcaatagtataatggaaggcggcctacgcgttggtgttcttcttcaaggaaaagatatccaagacgacaacaagacactttgtcaggctgggatatgccacgataaaaagctaaataacatagacttcacgctggagtgcgagcgtgagcgcgagcctccctctggagtcattgtacaagaacagatggatttcctc

SEQ ID NO: 6606 - DNA, 1225 bp, Zea mays
  Clone ID: MRT4577_106017C.1
gaaacgcagtaccagttctgacggtagacatttatatggtgaccgctctcgagtgtcagagaccagtgatatgtcatgtggatgcaaaggacgattactggatagatcgagtggcatattatatatatatatagatgatgcagcacacgcgtgctgcactgcacgccaatctccatgacgatgccaccactcatcagttcataattccagcagccttggacgagtcgacggtgtccctcagggtttcctccaccgtcctgcacttccaccccagcgcctgcagcctcctggagctgactctctggtggtcttccacctgaacaaacttcctggggtattgcagcagcttcaggtccgggcgcaagctgggcacgaggccgaccgtttcggacaccctcatggggtgcgcgctgcagatgtaccgccggccagacgcctggggggtctcgtacgtcaggacgagagcggccgcgacgtcgcgcacgtccaccatgttcctcgtcttctcctcggtgttttctcctttcaggtacgtcacgaagcgcatgctggtggcgttcaccgtcggctgcagcagcggccccagaacccacggcgggcagacggtgaccacgtccatcgtcccagtcctctcgccgtacgccagcgcctcgcgttcggccaccgtcttggaaacgcagtaccagttcttagtggttctgcagtagtcctcgtccgaccagcagtcttcgtcgacgacggcgccgtcggggatgctggggttcgcgatcaccgcgccgaccgacgacaccaccacgacgcggcggacgctggccgcgtggctagcctcgagcacgttctgcgtgccggtcaccgccggaacgaggacttcgtcggggttcgtgggctcgacggccgggacggggctggcgacgtggaagacgccgtcgcagccagccacggccgcggcgacgctggcagggtccagcaggtccgccttgaacagccgcagccgctcgctggcgccgcccagcgccgccaggtgcgcgttcttggggtcaccggggtcgcgaacagtgccacgcacgaggtagtcgcctctggagaggaggagctgcacgagccacgaggcgacgaagcccccggcgcccgtcacgcacaccgtcttcatcctcgtcttggccgcgtcgccgccgccgtccatggctatgctggctggtcctggcctctctcgatcctcccccgg

SEQ ID NO: 6607 - DNA, 530 bp, Zea mays
  Clone ID: MRT4577_106018C.1
ccggccggatgatagtagcacttcctaagccaaaactaccatgcatagaccctgttcaactcgtgccatcaccaaagcgatgacaaaaagcaggtgaatgcagagcagcaggtcctgattgctaggaaacgggtggctgccatatcgaaatttccactccagagctcatatgtcctctgaagaaagcgccgcctgtgcacataaaggagacatgacactcgtactcacatttttttttttggcacaaagaacagacgtgccaattggaacgtacaaggagttacccatgtcccgcaacaaatcaatttgcttgcattacagaaacaacgccatgtttaaggatggtctgggttgtgggtcctgcttcgagatcaagtgcgataatcctgtggagtgctccggccggcccgcgatgtcgcactttacttaccttaactatgagcctatcgcgccgtagcactactattgagcatacacgttgcccgggggcatgtgcaatacggtcgaggtatgacaaaatgtacaaggcg

SEQ ID NO: 6608 - DNA, 415 bp, Zea mays
  Clone ID: MRT4577_106019C.1
gttatggttggggtaaaagctttaggttcctctccaaaaaaacccaatggggccttgttttggttaaacgcaaagtttacattttgggtactgggtttattcccaaatgtatggaaagccggtcaccaagtttcattatataggaaaacgccaatcctttgagagggcggtttttttttttttccgcccttttttttttcaatttttggaagttaccccgggggggcttttaaaaaaaaacaagcccagggctttttttgcttaaaaacccatggcgccatttttttaaaccccccggtggggcacacccctccctttttttttttttgtgaatattatccccccaagggcgggggagatggggccccccaaaacaagggccgttttttttttccgtgggaaaaaatttttttgg

SEQ ID NO: 6609 - DNA, 258 bp, Zea mays
  Clone ID: MRT4577_10601C.1
atcgttctcgtcgtgtgcctggctctgtcatctgccagcgcctcttcaatgcagatgccctaccccttctcggggcggcattgcttgtacaactctaatgacttttttacatttattattgagattggatcccaattttatatcattttaaaactaattttttattaaaaaaatttttttttattttcttgtaagggtttaaatttgtacccggatttgcccctgttttttataatattctatttttaaaaatacatt

SEQ ID NO: 6610 - DNA, 620 bp, Zea mays
  Clone ID: MRT4577_106020C.1
gccggccgtttcgggattcactaccatatgtcgcagtcaccacctcccgctctattcctccacgtctccacgaccggaacgtcctcgtttctgtccgaggacatcgcctccgcgacttcgagcacggcgaggtgctaccagcaggtcgatccttctacccggcaggcacgtcgcggtccgctctaggcaaacgaggcgaaatacgggccgggcgcggacgacgatgcaagggcacctgccgaacctacatgaacgcggcagatctcgcatccgtgcaaatagtatgacgagagagaacagcttggatcagatatcccaaaaaataggaacggtgtgaccgtaaggaacatcagtacattgattttgatcggcatggcaccggggttgaagctaaatctcgaggactgcttctgttaaaatgactggattaactatgcaggtgggaacgagcgtcctctagaacagcttccgaggtgacatgcgtctcagaccccatgtatccgaagaagagagctgcattgcttgttcaataagcccatatatatgcccagtgtatgctactacaattgaggctgaagaacgccgatatgttgatctgcgaagccaccagatatgatatt

SEQ ID NO: 6611 - DNA, 125 bp, Zea mays
  Clone ID: MRT4577_106021C.1
acgcgatcctcgcgcgtgtttaaaaacttttccgggccagacctccaaagcacctaaagggggagcatcggagggtgatagacaaagcggcggggtttaagaacgccggtgtcatagggagccag

SEQ ID NO: 6612 - DNA, 254 bp, Zea mays
  unsure (1)..(254): unsure at all n locations
  Clone ID: MRT4577_106022C.1
tttttnntttttttttttttttttttttttgttttttttttttttttttttttttttttttttggaaacaaaaaaacgggttattaaatagaaccgccgggcaggtatccattggctgaaaatttccccctttgtggggactaaaacaaacagcggctttggtgcatggaaatgggaaaaaaaaaaaggggtgtggagcgggaggggttttcccctaaaccaccacaatttcccaaaaattattagcttcccgg

SEQ ID NO: 6613 - DNA, 541 bp, Zea mays
  unsure (1)..(541): unsure at all n locations
  Clone ID: MRT4577_106023C.1
ntctctgtaactctcacttcaaaccttcagccttgacagcttcaatggttgcttcttatttccggtgctaatggatggttcattatgttcggatagacttttgctgatctttgttgcttgctttggagaaggattttgatttatcggaggcctatgtgtttggggtttctgaaattcaatcatcgggggtggccccaatggggaaagagtagtcatagattgatgataagaagattgcccaagctttaattcagtgtttgaagcattgctcaaagtgtcctggaatgttttattggagaaatttggtctgcacgccctactatcatggttcataactcctgtaaaacgtggcataggattacaaaatgacgcatcaaagtttttctccaaatggattccatgactatgggccaaatgatttccattgtaatgtcttcccatgcttgcttcaaagtgtgggcttccactaggagtggtgagtgggttcaagtcgaatgcttgaactggatggtttttagcgggccctaaattcaccacagcg

SEQ ID NO: 6614 - DNA, 349 bp, Zea mays
  Clone ID: MRT4577_106024C.1
ctcggcaggcattttgtccacgtacctatctacctacaactatatcaagagaggaggacgcctcacattcagtcgccttgggcaacttctactgtcctgaacacgaggttccggatttaccatccatcatcagtcaaacatattgtcgcattcaatgcaacctgggttagttgtctgtgtttgtactgataagcgctgatatcatgggaaaacatctggtatagatgattccttcactcgtctctaagactctatatgtgagccgtatgatccatcctagcgtagcacctgtacgtctgattgcgttcaattcaactgctatagggtgatttcgacagaatttcgtact

SEQ ID NO: 6615 - DNA, 1467 bp, Zea mays
  Clone ID: MRT4577_106025C.1
tagataatgaccaaaatgttcacagccaagcagaagctgaggtgcaggatattatggttcgtactagctgctcaatatctgaaattttagctcagaaaattaccagcaaagaacagccctcccaaaaaagcatagaagttggggatgagtgctttagaccttctcaagatatggattatgttatgatgtttgactccagcaaagatgagaatggaccaaatccagaaagattgacagctgaaggtgattgtggcgatcctcatgaacgtctggatttagtcacagtaggtgatatcggaaaaatggttgtagacaatgcaatcatcgaagatgtgaagagtaataacacaactgcaaacaatgtcaatcacggtgagctgcatgtttcattgcagttgccagagggaaacactgacaatggtatgactggtgttagcacagcttcctctttagacataaaagagggaaacaatgacaaagtagtggcagatgcctctgcacatgaaggtgatataaatgacaatggtagctctgaattgaaaataggaaatacgaacagtggtattactggtgttatcgcagcttcctcagacttaaaagaggaaaatattgacaaagtagtggcaggtgactgtgcacatgaaagtgatataaatgctaaggattgcactgagttgaacattggaaatactgataatagtattgctggtgatagtacagtttcccctgaggtgagcgcggaaaacactgatcaaatcatagcaggtgattgtggaaatgaaaccgatttaaaagctgatggtgagggtgctgacaaattcttagcaactgacagtgctcttccttgtgaagatgatgcaacttgcatggatggtgcgaatgtgattgtatcactagatgtaccccgtagcacgaagaatgatacattttccaagaacacatcttctgacgctgaaatgcctctgcctgttggaacctgtgagctcgtcgatagaccttcttccgagaatgacatgtctgagcacacatcttttgatggtaaacggcctgcggatgataggactttggaagagaacgaaatggttatgcctggtgatgaaaaaacagaggtgcattacaagcgacggaaggttttggcctcagagaaacaaagcagcttctccggagcaacttctacagattaggtttggctggtgtgagacttagttttagtttctgggatatgtgacctgtctagtccttgacaatatgctgcctgtgatatagtatatatttctgtaatataaggtactgccactaatgactgtagaaataacaaaaagaactggaatcctgaaccctgatgtctgcttgacagcgtggtttgagaattgagatactgtatatggtctgagtattgcacgacctgcactgcacatgcaagttgcacgatataggctgtttccaaacatgtggaaggccttgttt

SEQ ID NO: 6616 - DNA, 325 bp, Zea mays
  Clone ID: MRT4577_106026C.1
ttgctgtaagttttgtaatttctgtttcctgctcggcttcgcagcatgcagttcttgtatatgatggaagaacactctgttactgggcatgttgcgcggtttccacgcgtgtaagtaatgtagaagtcgctatggtaggtatttccataccgtcattagtggatcattgattttttttgtaagaaggttattgcaatgccctttttccgggcatgaataagaaaaaggaaatatgcttatatgcatggtatgaataagtgagcaatagacttgtactgtgttcttgatttatttaaaatcagactaagagaactggtgacatttt

SEQ ID NO: 6617 - DNA, 214 bp, Zea mays
  Clone ID: MRT4577_106027C.1
gtgcactggcttgagttaaaaactggagacttatttgtgaagagcactggttctggcacattggtacgcacaaaaaccaatgccttatttacaaatcaataatgaatcgtcgcaacacacggacaggaaatgctatgacaacttggtttttgttaggacttaaagtaccaagcacaagcaatgttaaaaagacccatgactcagtgaatgcaat

SEQ ID NO: 6618 - DNA, 307 bp, Zea mays
  Clone ID: MRT4577_106028C.1
gccaggtgtacgagggcctgacgctggtgacggtccgaggcgcggggcacgaggtccccctccaccgtccgccgcagggcctcaagctgttcgagcacttcctgcggggcgagcccatgcccaagcctgtcgagagcgtccagtcgttctagatgagcttgctgccgcgcttggctagttggctttgatgaatagtaaggccggacatgtggcaagccatctccactccacatttcttcaccacgttttcaataactggcgctggccgaaataataagagcagaacgaataaaatgccgctcgctag

SEQ ID NO: 6619 - DNA, 200 bp, Zea mays
  unsure (1)..(200): unsure at all n locations
  Clone ID: MRT4577_106029C.1
acgctcannagttttgttctcctcttcctagtctagcctagcacctnngcagatctgctcgttgccgttgggcgtacttgatattatggggaggcggagagcggatggcttcnngcagcggcngcccgnttggtttcccttggcatgccctgctcnnctggtggtngnngcggcgctaaccctgtctcatgnngtgatgg

SEQ ID NO: 6620 - DNA, 321 bp, Zea mays
  Clone ID: MRT4577_10602C.1
ggggcaagaatttcaaatgctccttcaagaaaaaatagacgaaacccgaaagcacaaaccattgaccggcggaagcagccacgggaaaactgtgtgcagacaccatatgcctgcaactgcaaacgaacaaaaacacagcaagggcaagcgcttcccctcaaacaaagaaattctatccaagccaccccacaaaagggtagggcgacaggacccaagcttaccccctccacgggaaaagaggacggcttacaagcacgaaagccaaaccatggaggccatgagagcagagcaattcgggaggccccacggcacagggccggg

SEQ ID NO: 6621 - DNA, 496 bp, Zea mays
  Clone ID: MRT4577_106030C.1
aattcggcacgaggtggagaggcaaacgcgcaaacgcgaccacagacagagcgcgcttcaaggccttttttttttgagataacaaggaggagaggaggagatggcggtcacgatcacctgggtgaaggccaggcagatcttctacagcagcggccaccccaccgtcgacctgagacaggggcctgcttccttgcagctacaagatgggggtcctagctggcgcaacatcccgtcaaaccatatgaagcgacactagcatcaatcataactgcagcccagcactttaagatgcaccatctttgcgctgtatgccaagctatgacatagcaaggccatcatcttgacctaacatgatgacatatccaaatgctgagcacatggcatcagcaacacactttaggctaaaggcccctacctccatctgtgctaagcctaaccgcaagcacctcgcctttctaaaccttgaaccttgcatggcatcacctctctgcactat

SEQ ID NO: 6622 - DNA, 217 bp, Zea mays
  Clone ID: MRT4577_106031C.1
cccacgcgtccgcccacgcgtccgatgccgaatcaactgagagctgtcaaaggctaggacctgctggacttgcattacattatgcaaacattatcattcagatatacagtattgtttctcgatcagggtatgtgccatcaaattcaagagatgcactgtaccagggattgccaccaaggatcaagtcagcactaccaaataaattgagaacgacctc

SEQ ID NO: 6623 - DNA, 270 bp, Zea mays
  unsure (1)..(270): unsure at all n locations
  Clone ID: MRT4577_106032C.1
actaattattccncaccgaggggggttcccaacaatttctcatccttaataacaaattttaccccccctttatcnncncattaaacnncccnnntttnntnnttacccccancntnaccnctacactttccancnccctaacncccnctcctttcnctttcttcccttnctttctcnccacnttcnccnnctttccccctcaacctctaaatccnnnnctccctttaaaattcccatttaatnctttacntcacctcnaccccaaaaact

SEQ ID NO: 6624 - DNA, 285 bp, Zea mays
  Clone ID: MRT4577_106033C.1
ttcccccctccttgccgcgggtgagcgttggcaccctgttccgcggccgcggtcttcttttgctttcccgcctttgttcctcatttgcctggtctggcagggttgccttccccgttgtccgggggggggggggggtccccttcttggctctgcgccgcgcttctttggctctgggctcgtccgctcctttggttccgtggttccagggcctttgattctctcccgttctctcgaggtttggggccccgctcctcgcctgtgccgctgcttggccttcctcggggg

SEQ ID NO: 6625 - DNA, 578 bp, Zea mays
  Clone ID: MRT4577_106034C.1
tttttttttttttttttccgtcactggttagtgataaagaataaattatgaatatagttgaaagaacaataagatggagatcgaagaaaaaggctaaggcctcaacatgaaggggagaattagcctaaacctataatgttcaaggaatcaaggggattcgaaaccacggtatgctctgtaaatgcctagaccattctcctagcattgatgtatgaggcatcaccgcatcagaccagatatttgttgttcaacaacgcaagcttcacattgatcctttcaaggtgctacaatccgctgctacctggtactggtagcccctaggccgtgggattgtgggaagccaaaaccagaagggagctgacctcttgccgcaccaccagcagactggcgacgtggagccacagccagcgggtgtagcagggagaaggaggtaatgagatacacaccccaggccatgccctggcggtcatgggtctggctccgcccctgcaggaggccaagatgctccgagtggtggatgcgttttcgagccaacaggtcgggtcaggcggaggagggctgaggcatcacggcgtcgg

SEQ ID NO: 6626 - DNA, 274 bp, Zea mays
  Clone ID: MRT4577_106035C.1
gcatggtccattcaaataatcgggctttcatctaggtttttgtcttcattcttattcgttcgtattttttacatacatgtgctactcccatcactccaacatattttgaaaccaaccattaatcaagaattattttcttaagccctatatctgattcaattagactgagtcctactgcagatgatatattttgaagcttccatctatgatccttcttactactcatcactgttctaagatgtcctaaacaatgcatgcaatcattatggtgata

SEQ ID NO: 6627 - DNA, 345 bp, Zea mays
  unsure (1)..(345): unsure at all n locations
  Clone ID: MRT4577_106036C.1
ctcngtggtcttgttcactgtcagtgccatgtctccctgccctgcttgcttgtcatcggcaagtgacactacctagcctatagcaaggctacctttctcaggaggtgctgcagtgcaggttaccacaaaactagtgacgacgcggctagtttctacgttgtatatagttcttgctgcagaccgcgtttgtgtttacgaaagatttcacttttaagttttctgtgttaactataattgtatgatttgcgggctctggccggcccggaatactaaatgggcagtgctattcgggccagcccggcacgatctggcctccaccgtgccgtgctcgggttataatctggg

SEQ ID NO: 6628 - DNA, 665 bp, Zea mays
  Clone ID: MRT4577_106037C.1
tcgagccggccgggagaaatcgcacgccggtcgccaagcttcctttctcccccttcccctcacctccgccgttccctctcctggacccccaaacacagcgtcccgaaatctagcctgactcctctctccctgcctgccaagaaagaaaaggcgccacgttgacatcgcggatgccgtagcgggtgggcgggcgcgcgcgcgtgccagccatgcgctcgtgatggcccggccgttccagaagatcggccacggcctcgaaaggttctcgttcaggcgccggaggtcggcgtcgtcgcccccgttgccaccactggcctcggacggcacggacgcctcctcgatggaggcgcaggcgcaggcgcaggtgcaggcgccgcctttcagcaagagggcgctgtcgaggagctgcgggtccaaggggagccgcctgtccgtggacctcccgccgccgctcgccggcggcccttcggacagggggatgcggccgggacctcgtgctcgtcctcgttcgcggtgccgcccaagcctgtccggcacgagggcccgccctcagatgcggacatcgtgagggagaagttctccaagctggtgctcggggaggacatgtccggcaccgggaaaggggtcccatccgcccttgccctgtccaacgccatcactaatct

SEQ ID NO: 6629 - DNA, 573 bp, Zea mays
  unsure (1)..(573): unsure at all n locations
  Clone ID: MRT4577_106038C.1
aacaatcgaagtaagacaactccaactagttttgtaagaaataagtaatttggcctttttttgcggatcaatgcttttttaaaaatatatatatatacangaaaaataatgcattagatgaatcaaagcattaagaaatccatgcagcccccaccggtagtattatttagaggtggattgccgtagtttcacaactctccaatctgacttgttggaactgtatccagatctcgcctcggctgccaagtgatcgcgaagcctgaactcgatggtattcggctggcattacctgtagccacaagaaacttcgcggtagatggctatgtaccgaaaccacactgaagacagttatgtacaccacactgaagacagttatgtacaccacactgaggcagtcatcttggggggcacggattcgtacaagtcaattttgtagtttataacctgtataacctaactacacctttgctacttgtagtcggggtagcttaggactaccttgttgagggagggttcgttcattgatgaacccctccattactcccagataacagtgcttccttcatctgggcg

SEQ ID NO: 6630 - DNA, 556 bp, Zea mays
  Clone ID: MRT4577_106039C.1
tcttcggcacgaggcaaggacgtccctcgggccgcctcgtcggccgagtgagcacttgctctgaacgaggtccctcccagggtccccctccggacatcccacctggcaccggagtggtacccgtctgacgggcaaggacggcgtgagggccagaggggagctgctgcttgcagtccggtacggtacctcaggcagacgaatgcttcccagcgccctcccgcaggaccgccaccggttggcttcccctctttcaccagcttaactccgcgggaaaggtgtaccccgcgccaagaatgtggtatgtgaagagtcaattgtgaattgaagggaccaggaccataataccccaaatggaagaaccgcatcccttgatgtgcctggtaaaaagtgaggctgggccatcacttctgagaacagcaggttcctcgccacaaaacttcagtgaacaagactgatgttcgtgcacagaaccgttgggacacttgccatatcagtatagaccgtgtgcacagcaaaacaagtgattggtgaggctatcataccgctcgcgaagctt

SEQ ID NO: 6631 - DNA, 469 bp, Zea mays
  unsure (1)..(469): unsure at all n locations
  Clone ID: MRT4577_10603C.1
ctttagtagacttggtgatttgtactgtcgacgagaatcacnntggtcgnnggtggcggnacgacgaccactatggggnaagggggtatgtgtgggnntgcatcatnnggtgggcgnnncctcctttttttttttttttgtgctnngctggtcgtagcagctcacggcgcgggngcgggagagacggagnntggtcgaacggngaccgctaagggaggaactctgctgtgtggtgcannnagcaggcgttgccgaagtgggcanngtacggaaaaggnacnnaccccgcggnaagaaggggatatgcgagtagcgagttgccgnngaggcggcacccagcaagctttgacgcgggctgagggaacggcgaacaggggcgttggacgccttacgttttnccgttttccgggagggggcgagtgntccggcgccagtggtctgcgccggtcacgagggtccaggncgtggg

SEQ ID NO: 6632 - DNA, 446 bp, Zea mays
  Clone ID: MRT4577_106040C.1
ataagaaatatcgagtctacaattgcgcttcagtctacatgtgtagcattattaagcactataattatttgaaaaaaatcaagatatgcattgtttatatatatgtaagaaacagattcccactatgacatattagtctgtgtagaactcgccacctcgcttctttcctcttcttagagcgcctttccccctgcacacactttgaatcaagaatctcacagttggctatgcagctgtaatacggcggcaagtgcgacgtccaccagagaacctcaaatttccctttcggtgcaactctcccatacatgacttcatcaacagttattcaccacagctagaagctagctgcagcgtttgggctcatgagcttgccctctggatgccgatccacatcatgaagaattcacactgtgatcaagctgatcttcacggtgactggtcgggag

SEQ ID NO: 6633 - DNA, 342 bp, Zea mays
  Clone ID: MRT4577_106041C.1
ggaggctgctgcgtttcgctgcaggaggccttacgtgaccccgcggcgttcgtttgcttctcaatatgtctgcaagtctactgccagttccactgaccactacaacgctccagctaactcgaagggtgactccaacaatgtagacatctatgctcctagcaaggatgccatcatgtatgtcagcggtgtccacaagcaagagtacaagctctgacatcaacatcgcctccacatgctagctgcacaaccaactgccttgttaatgttgctaacgtcatgaatcacaagttgggcatcattgatggtatgatgaccactgagcatgccatgactactacgcac

SEQ ID NO: 6634 - DNA, 481 bp, Zea mays
  Clone ID: MRT4577_106042C.1
cgcccgctgcctgactgccattattgcctcccggtcttcgctatccatccgaccgtccgtggcttctccctccggtccccgctacccgccccgccccgccgagaagcttcgggctagctagcaagctagctagccacctacccgtgctttggttcggttggttggcgccataaccattgccgaggagcgagggagcagccgggcgggcagtcacgaggcggcgagtaagcatgctgggagcgagccccaagggcaggaaggccgccgcgccgccggtgaagctggggtcggcgaaggaggcgcccgcggccggtggaggagggagcggctgcaaggtgcccgcggaggaggtgtgggaggtgcggcccggcgggatgctggtgcacaagaggggcggcggtggcggcggcgactactagccgctccccaacgtgaagcccgtgcccaccatccgggtcaaggccaagcacgccggcgtcac

SEQ ID NO: 6635 - DNA, 443 bp, Zea mays
  Clone ID: MRT4577_106043C.1
aaaagagagggagagctcccacacacacacagacaccaaggcaccgcgcccaccgccggcagggcgagaggcagccgccggcgcaccagacgccgcctcggccaagtgcgcgaggcgcgacaggaggttcaccacggacggaaccggccgcacgggatacgacgacacgggccagcagggggcgaagccccggctcgaccagcactccggggcagccggcttcaactccaaggagcaggaccttgacggcgagagcagcgccgagacgaagctcaagcgggggaacacggccggcaccgactcgagcccctaccacaccaaccgggcgacgggcgacgggacgcgacgaagacccgacactggacgctcaatgggccaccccgagcgggcagccgggggagcagaacaccaacgggagggccagcggcgacggcaagaaggag

SEQ ID NO: 6636 - DNA, 260 bp, Zea mays
  Clone ID: MRT4577_106044C.1
ggggcgggcaaaattttaccggccaaaacatgactgttttttgctttgtgtgtactaacctacagggcatggggggaacggaggtgggtggggggtgattttattaattgaagggcatagtaacagaactgaaaacgcaatgctatgtagtgtgagagaaagtatgaatgaataagtttatttttgattagatttgttatccagtacattttttgtatgagagattcttgtggctattgcaggtgattaatttaagtatt

SEQ ID NO: 6637 - DNA, 406 bp, Zea mays
  Clone ID: MRT4577_106045C.1
cccacgcgttcgctgtggcggcggcggcggagggagcaaagccaagctcgtaagattttgtccgccttctgattcgagatgtactggatgtctggatcttgagtatgaggcatcaggcctatgtagatttggatttgatttcactatggcgctggggaatatctgcagcgtgattgaattttgattctaagctgatgtgattttagtatttgtgagctggggatcagcaatttttgttaggagaataatgacaaatgttcattgaacacagtatacaatttggtatactccatccactgagtgatactataggtttactagatcataagcgtgagctataggtggatttgaacttgatttcacaccagaactctgaggttatctgtggcattattcggtttaagct

SEQ ID NO: 6638 - DNA, 483 bp, Zea mays
  Clone ID: MRT4577_106046C.1
cacagcgttccggcgatgattttctctctcggaggctactcgatgaacaatttccacgatgtcacgcgatatagtgattcctctgtacacgacggcgcgtcgattcaacggagaagtacagtttctcgtgacgaacaagagtccatcgtggatcaacaaatttaaggaattagtgaggaaactctctaattacgaagtgatttacatcgacgaagaagacgaaacgcattgtttcagcagcgtcaccgtcggtctcactcgccaccgtgagtatttcaaagagttgacgatcgatccttcgaattcggagtattcaatgtccgatttccggagttttctaagagacacctactcgttgagaaacgacgccgtggctacgagacagatccggcggcggaggccacggattctgattttggctagaggcagatcgcgagcgttcgtaaacaccggcgaaatcgcgagagcggcgagacagatcgg

SEQ ID NO: 6639 - DNA, 108 bp, Zea mays
  Clone ID: MRT4577_106047C.1
ttggtctgcggcaaaagcgagcactggatgtcatgtttcggcattatgcagcagatgcacaagcagctacttaatgctgaaacatgacttcagtgtccatttgtgtct

SEQ ID NO: 6640 - DNA, 281 bp, Zea mays
  Clone ID: MRT4577_106048C.1
cataaaaaggaaaagtgacactctttgacccgggaaaggaaacacacctacctccacatacagcatgtttagcaaggtatgcaaagctatgaggacagtggcggcttctaaagccaatgagtgtggaacactattaaccattgacagaaaccatgaaaaccaatgactccaccaaaagaacgcacttgacccagctctgaatccaaacctaaacatgtacacaggtctgtagaggaccaacatcatggcatgaccaacaagacacgaagcacaagaaagtt

SEQ ID NO: 6641 - DNA, 1137 bp, Zea mays
  Clone ID: MRT4577_106049C.1
cctcgaggccggccggggaaaccttcacaagccgagagcccgagccccgccctgacctcatcttctcctcgtcggtttcacccctccaccacctccatggggtcgtcggaggccgacgaggaccagctcctcaagagcttcctcgcggaggtcagcgaggccgagcgggacaacgaagtgctgaggatacttggttgcttcaagttaaaccccttcgagcatcttaagttgtcttttgattcatcaccagatgaggtgaaaaagcaatataggaagttgtcattgctggtccatcctgataaatgcaagcatcctcaggcacaagaagcttttgcagctctggcgaaagcacaacagctcctgcttgatccacaggaaagaggctacattcttgaccaagttactgctgcaaaagaagaattgagggcaaaacggaaaaaggagctgaagaaagacagtgcgtccaagataaaatctcttgtagatgagggaaaatatgaagagcagtttgaacgatcggatggatttcagcagcaattaataattaaaatatcagaggaagaaggaagacttaagaaggatgaggaggaaacaaaagagatgtggaagaggaagagagagcatgaagagaagtgggaggagaccagagacaagcgggtctccagctggagggatttcatgaaaacaggaaagaagggacggaaaggtgaaatcaagcccccaaaactgaagactgaagatctgaacaaatcttatgtgcaaaggccagtaaagcgaaactgagtggaatgtcagcaatcaaagaacatccggtagcggcctttcatctcaccagattagagctgcaacccttcaatgttgtacttgccctgaacgtggtaaggttcaattacgcccgctgggaaacagaacggaacagagcagattttacccgtattgctagctagagtgatttggtttgatgtactcatcatccgtctgaagattttactgggaaaaaaagtacaaacttttccgttggaaaagaacctaatgaagtgaatgttgacaggccgtctctttactgcttcattgcattttagtgtatgtaatggtgatacgtgtgcatcgcctatcatcattgttgcactcttcagt

SEQ ID NO: 6642 - DNA, 411 bp, Zea mays
  unsure (1)..(411): unsure at all n locations
  Clone ID: MRT4577_10604C.1
ttttcgatcccatttgaaatcaacccatcgtcgtttcctccgtctagcatgctctcaccctcatggccaagatcaagatcgggatcaatgggttcggcaggatcggaaggctggtggccagggtggccctgcagagcgacgacgtctagctcttntccgtgaacgaccccttcatcagcaccgattacatgacctacatgttcaagtattacacattgcacggacagtggtagcaccatgaggtcaaggtgatttgactccaataccctttctcttttgtgagaattgagttttttttttttttttttcgtaatcctctaaagagatctctttgggttattatttaattattaatattttattatacttttcttntaatactattctttatatgttaagtttattaattat

SEQ ID NO: 6643 - DNA, 620 bp, Zea mays
  Clone ID: MRT4577_106050C.1
agcagtaaagagacggccacattcaggacaagtacaacattgaagggttgcagctctaatctggtgagatgaaaggccgctaccggatgttctttgattgctgacattccactcagtttcgctttactggcctttgcacataagatttgttcggatcttcagtcttcagttttgggggcttgatttcacctttccgtccctgcagaggaaggagtttcagtttaaaaaaaaatatatcatgcataggaagatactacttgccatatacacattctaaccttcttccctgtcttcatgaaatccctccagctggagacccgcttgtctctggtctcctcccacttctcttcatgctctctcttcctcttccacatctcttttgtttcctcctcatccttcttaagtcttccttcttcctctgatatcctcatttgcatttttctcctacgccattctttgtcggtcaaaatttcacgtactttaattattaattgctgctgaaatcatccgatcgttcaaactgctcttcatattttccctcatctacaagagattttatcttggacgcactgtctttcttcagctcctttttccgctttgccctcaattcttcttttgca

SEQ ID NO: 6644 - DNA, 238 bp, Zea mays
  Clone ID: MRT4577_106051C.1
cacacgaaaaccaaccgggggtttggagggtcatttaaaggggttttaacgcagctttttttccctggataaacattgtctaacacaaaaccgttttcgggaacaaagtgcgcaagggatccaactggtcaaaaaggaagcggccctcccagcttggtagcaatgtgtaggatgtgggccatgtttgggggggggtagttccggaaaaacttgaaaatcgcagggaaaacgccagcca

SEQ ID NO: 6645 - DNA, 1302 bp, Zea mays
  Clone ID: MRT4577_106052C.1
ggtaccctcggacgcgtgggccgactctctatcccgttcccttccgtccctcgtcacgctcacgcagcacgctgtcgtcttgcggctctcgcccgtctccccacggagccccgaaaccaaagccgagccgagagcccgagccccgccccgcccgacctcatcttctcctcgtcggcttcacccctccaccacctccatggggtcgtcggaggccgacgaggaccagctcctcaagagcttcctcgcggaggtcagcgaggccgagcgggacaacgaagtgctcaggatacttggttgcttcaagttaaaccccttcgagcatcttaagttgtcttttgattcatcaccagatgaggtgaaaaagcaatataggaagttgtcattgctggtccatcctgataaatgcaagcatcctcaggcacaagaagcttttgcagctctggcgaaagcacaacagctcctgcttgatccacaggaaagaggctacattcttgaccaagttactgctgcaaaagaagaattgagggcaaagcggaaaaaggagctgaagaaagacagtgcgtccaagataaaatctcttgtagatgagggaaaatatgaagagcagtttgaacgatcggatggatttcagcagcaattaataattaaagtacgtgaaattttgaccgacaaagaatggcgtaggagaaaaatgcaaatgaggatatcagaggaagaaggaagacttaagaaggatgaggaggaaacaaaagagatgtggaagaggaagagagagcatgaagagaagtgggaggagaccagagacaagcgggtctccagctggagggatttcatgaagacaggaaagaagggacggaaaggtgaaatcaaacccccaaaactgaagactgaagatccgaacaaatcttacgtgcaaaggccagtaaagcgaaactgagtggaatgtcagcaatcaaagaacatccggtagcggcctttcatctcaccagattagagctgcaacccttcaatgttgtacttgtcctgaatgtggtaaggttgaattacgcccgctgggaaacagaacggaacagagcagattttacccgtattgctagctagaatgatttggtttgatgtactcatcatcagtctgaagattttactgggaaaaaaaagtacaaacttttccgttggaaaagaacctactgaagtgaatgttgacaggccgtctctttactgcttcaaaaaaaaaaaaaagcggacctaatgaagtgaatgttgacaggccgtctcaaaactgcttcaaaaaaaaaaaaagag

SEQ ID NO: 6646 - DNA, 342 bp, Zea mays
  Clone ID: MRT4577_106053C.1
gaatgcaattttatttactgaatggttataaagtaatattacataaattgttgatagattttttttccttttatattcgacataacacaatgtatatgtacaaataaacatggtacatttataggctcagtcatagatggttaataaatatggctgccaaggtacaggatttataaccacctaaatgcctcggaacggatgtttggcacgaaacaaatgggttcttacggtatatgtacaaaccaacattataaggaatttgtgttgtttgtaggcaataagcaattttttagacaaacacctaacattcattgaaaaagtacatatttaacattgggcatg

SEQ ID NO: 6647 - DNA, 264 bp, Zea mays
  Clone ID: MRT4577_106054C.1
tgtagccccagaacacgagcggggccaggggacacataaaaagggaggcgggggacggcccgcaagacaacaagcaaggcagcagcaagtacaacaaaggggaagagtgagaccccgaccacggggaacacgagggagggcaggagagcacaacaaccgcgaagaagggagcgggggcccgaaaacaacacccgggggaggacgggacacacaacaaaagggagcccgcgcaaagaccgaacacagcgaacagcaaagagaagg

SEQ ID NO: 6648 - DNA, 401 bp, Zea mays
  Clone ID: MRT4577_106055C.1
gtaccgcctgcgggttccgggccgcaacccacgcgtccgcccactgcgctagatgtctcctggccgagataaagaagaatcatccactgagacttctggatttatagaatcctccaataatgttgcagatatgcttcctgatcttaatctgaaccattttacttctacggcttcaactcacttcaaaccattctgttagtattgagtctcttgaggattctgtggctgatgccaaaaccattaaaaatgatctgttaccttctataaaattggttccaaaaatgataaaggatgttgagcttctaaaaaaaaaggctaaagtggccaaacatgaattgtccgttgctgggacaggcattctggcaaaagttgaggagctcagagaaatgataacttatgcg

SEQ ID NO: 6649 - DNA, 220 bp, Zea mays
  Clone ID: MRT4577_106056C.1
tttaaaacgctctttttgctaaaaggcagaatgaacttcaaaacataacctttggcatcaaaaggtccttgccattttacagtcacaccaacttaagttccattttttacaaaaccccctgtcctaaaggcggaactgagctaagaacacaggaaacaaagccctgcttttcttcctactccacagttttagactcaccactctttttgttgccctttct

SEQ ID NO: 6650 - DNA, 248 bp, Zea mays
  Clone ID: MRT4577_106057C.1
ggacagcctggggatagatgaaagagccaactctggctcgaagggggagacggggagaggggcacacaacgcacaggcgctggaaaaacgtgcaactgaaaagaagagcaggcgaaggctcaacccacaagacgagcgaaaaaacgagaaagccgatagtgaagatgagccgaaaccaaacagccgagggttcggggaaagcgggcaaacacgagggacaaagacaaggggacaagggaaacaacacg

SEQ ID NO: 6651 - DNA, 271 bp, Zea mays
  Clone ID: MRT4577_106058C.1
acgagctcttccagtgaggagtacccattggggcgggcttcaccaccgccgggcatggccggggcgccacatctacgggccacgcagccgcccccgcggatcctggccgagccgctgctgggcttggtcgcggcgcctccgcagccgcccccgcggatcctggccaaggcatcgccgccgcggagcttggtcgcggcgccactgcatccgaccccgcgtatcctggtcgaggcgtcgccgccgctgggcttggtcgtggcgcctcgccgcc

SEQ ID NO: 6652 - DNA, 237 bp, Zea mays
  Clone ID: MRT4577_106059C.1
gattgttcatgccctgcaaaaaggaatcgcccaattacatggtacatgaggttgagggatacttgatggagtgagagtagtgtaccggtgtatgtttgttgaacagtgataatagaacatcaaatactagagatggtatatgttggagcttatggtaatgcttgagttaagttttaggaacaataaattcagtctttatcatttaatcaatatgatctctattgttgttacgttctt

SEQ ID NO: 6653 - DNA, 890 bp, Zea mays
  Clone ID: MRT4577_10605C.1
gtttctcccttggtggtttgccacttactccctttaattccaaattataaaacgttttggcttttctaggcacatagtttttgctatgcatttagatatacactatatctaaatacatagtaagggtctgttcgtttggcccggaattcatcccggaattgttccagctaatcaaaacttatataaattaggtaaccaatccggctaggaatagatccgggtggccaatccctaagaaccgaacgggccctaaaggtaatgcatctggaaaagctaaaatgtcttataatttagaatggatggagtaccattttcttttattttttcctctgattttttgttttaggttgtgactttatataggtgtgataaggtaatgaaggtgataatcgcaataatttgtatggttttaattctgtggctaatggtaaattttcttgtatcagtttaccagctccaaatacagcagttactttgcggaaggtagaaggaggcattgctgcagtgaaaaaattcagtggacgaccaaaagaagaaattgtgctccaaaaggagaaggatctgcgctcccagttacttaacgatggattgaagcctcatccaggctgtttgcttgcacgttacaatgatcccaggacaaagagcttcttaatgaggaacgaggtgcttatacggctaattgacttcacactggagttgtaatcgtcaatactggcatcagatcgatgtaacacactgggcttgtagcttccagtgagtcattagaaaggaggctatgacaccggtcctgtccttttttacctgcacataagtcatgtaaagctacttatctttttcttcaaaacaatctttacatgttaaatttagagcactatatctatcattcttgc

SEQ ID NO: 6654 - DNA, 471 bp, Zea mays
  unsure (1)..(471): unsure at all n locations
  Clone ID: MRT4577_106060C.1
nnnnttnnttttaatatatggaaaanaacaaaccggccccacgaagggacgaaggaggaaccatgcacagcacgggaccggcaaacacaaagttcgagcctcggcgaacacaaccgcgcatcactgaccaccaccccagaagagaccaccaacaggaaacgagcgacaaaccacgcaggggcagacacgacgacggcacaggaagacgcccgagcatccgacagcaatggccaggcacggccacggaagaggacgaccggcgcatgaacgggatggctatgacgatcacccggaggtaaatgggagccacaggcagcgccacagaaggggccgccccaacccacccaaggagcgtaccaggcgtgatccctgacgaagacgagggccacaccaaggctccataactgaggcgacgccagagaccacagggtggatgcgtggcgcggtggagccaccaacaccaaaaaccca

SEQ ID NO: 6655 - DNA, 133 bp, Zea mays
  Clone ID: MRT4577_106061C.1
attcggctcgagttgggccgatgatttttttcgccggcgatgctcatgacacatgcgtcgagacgacacctggtcctggtcgatcgatacgatggccgaattcttcgaccttcacaccgactgcaggctcaag

SEQ ID NO: 6656 - DNA, 312 bp, Zea mays
  Clone ID: MRT4577_106062C.1
gtttgaagcacaacaaggctcacctgatggaggtgcaggtcaatggtggtaccatggctgacaaggcggactatgcctacaaattctaagagaaagaggtccctgttgctgctgtcttgcaaaaagatgagatgattgacattattggtgtgaccacagggaaaggctatgacggtgcggtcactctgtggggggtgacccacgcttacccgcacagacccacaggggtctccgcaaagagacttggataggttcatggcattcgactaggcgatcctatacggctgctcggctggtcacaatgggtaccac

SEQ ID NO: 6657 - DNA, 183 bp, Zea mays
  Clone ID: MRT4577_106063C.1
tttttcttttttataagtaccaaacccaacatttacataataatgttaattttgtgtcagcaaaacttacatctcatcatcatactttattatgccacaaaattattcaatgatccatcattgtttttattatatacaacttctcctttccttgaaaaaatcaataactatttttttttttcc

SEQ ID NO: 6658 - DNA, 546 bp, Zea mays
  Clone ID: MRT4577_106064C.1
attgggacctcgagccggccgggctcgcctcacaatagattccgagaccaaatcctcgcctccattcgtcccccgtcgccgccgctcccagtctctacgcgcgaagcaccgcctcaacaccgctccataacaatggcgccgacgccgaagttggcgatgggcatatcgtgtgcgatccgagcgcacgcgtaccaccgccgtgggctctgggccatactaggccaacaacggtggcggcttccccataggcgagtatatactcgccgccgccgcggaacccaatgctctaccctcgacgaacaacaacgagcctctcgctcctcgaggacccgcaagcctattcccaccaaggtcgggtctagtatacacgcctggcacgccgctgatcctcctcgtgatcagcttcatgaagacgagagtgccgtgcctcaagaagctcaacactcggcctgtgtcctcgtcactgttccattcatatcggagcagtaccgatctgtcgtgttgaccagaccgatgtgattgctacatcagccactgctgacatct

SEQ ID NO: 6659 - DNA, 380 bp, Zea mays
  Clone ID: MRT4577_106065C.1
aattgacctcagaacctcttcaatcagcttaatcccattctcggatagctcagggtatgtttttcgttcactgctgcaacagtatggaggcttcacgaagttcccggatgatcggataccagacatctaccattcttactacggcctggcagccctctccttgttggaagaggaagggctggaacccctctgcgtcgaactggggatcctctccgctgctgcattatagaaacttgtgtttctaccgaatccagttactgtacaatgtttgtggggggggggggggggtacagagatttgaagggatgcatcagagtcagagcgcaaccgaagctaacgagtaatttattgataaagtgaggccttgttcggttattccc

SEQ ID NO: 6660 - DNA, 499 bp, Zea mays
  Clone ID: MRT4577_106066C.1
cccacgcgtccgcggacgcgtgggcggacgcgtgggcccgtgcgaagtggccatggttgccgcagttgaaacacttcctgatcgacgactttttcttttgtcgagccttccactcggcctccgtgagaaggagctggttgtcgcgccgttcgccgccagtacgagtgcgccgccgggaacgctcgtcgaacgccttcagtctgccgagcgcctcctcgaacgccatcgtctcgacatcgcagaactgctcgatgcccgcgacggcgggaagagccgatctggaacgatgtcgaggagcttcttcaccatggcagcgtcgtcgagcgtcacgccaagcccggcgtaacgcgccgccataccgctgattttgtcggcgtagtcgtccaatgcctccccgtcctccatttacagcttggagaactcccccttgagcgtggtgaggcgcgtcgtcttgacccgattcgccccgacaaacgagtcttgaggctcgcccacacct

SEQ ID NO: 6661 - DNA, 2696 bp, Zea mays
  Clone ID: MRT4577_106067C.1
cggacgcttgggcaggaagaggacccccatgacaatcgtggtagtggcatcaaaattgatgatcaagatcagaataatgctaagagaacaaagtttgaaggaaacccctggagtgaagggaaaaacaaaggcaagactcaagaagggtataacaataatcagcgcttccccatgtcgcgtcgccacccacctcgcccctcctgcctttcggaccgttgccgtggctcggccgcaggccttgcccttcgtcttgtccgtcgagcagcgcgtggggccctcggcgcgcgcgcgcgcgccgttcgcggccaagcgcggcggcggcggcgaggtatccgcggaagctgcagacggcacgcgcgcgctgctccaggcggcgctctggggcgccgaggctgcctatatactctggctcttccttctgccttacgccccgggcgacccggtctgggcaatctcgcaggctaccatcagcgacctcatcggcctctcactcaacttcttcttcgtcctgccgctgctcaactcagttggcgttcacctgctcgaatcgcctctacttcaccctatggcagaaggattgttcaacttggtgctcgcttggacgctgctttttgcgccactcctcttcacggattgtaggagggaccgctacaagggatcgctcgatgtcctgtggggctttcagatgttcctcacaaacactttcttgataccttacatggcgatccgactgaacggtccggaagcggaccggtctccgccacgaagatcacagctgggttcagtcatggtcaacggcgcgccggctgtgggcgcggtcggcggcctcgtctgcgttctctcgatcgtttgggcgttctctggccgcggagattctggtttcggaggcattgcggaacggtggcagtatctgcagagctacctgttctcggagcggcttgcttacgcgtttctctgggatatgtttctgtactccgtattccagccgtggctgatcggggacaatcttcggaacgtgaaggcggatgctgctgggcttgtgagtgtggtgcggttcgtccccgttgtgggtttagttgcctaccttctttgcttagaggaagaggattagctgttaactgtgtttttttatatattttttgtgatcatttggatcgttgatcagtgtgcagttgagtggattatgtacttggtggcagtgagtttgcaactgaaaacacaaatcttgtagccgaacaagaacaaccgggatggacatacagtattttttcctgggcgggttgtctctctaggaaacaagcgcccatcggaaaagcaactaagtttctctaagccataattctaactgcctgacgaatgccgcccaattcttcagaaagctaggactgacacaaatgccacgaaaccaagagtgacagagaagccgtcagctatcatcttggacccccggctgtatcgcggcggcgtctgactgctcaccgatggtgacggtatcatacgtggtgtcgtcggcgttggcgtcgctggcgtggtgagggtcgctggagcactggagttggcgcttgcgtgtggagtgaccgccggtggcggcggcggcggtggcagcggcggtgatggtccatggggaagaagaccggcaactgcgcaggcgccggtggcgggcgggaggtcgaggcggcagagccgaggcatggccatcacgcgcgtcatgttgacggcgacgggggccgtgctggggttgctgagagcctggcagaggcactgcggctcgtcgtgcaccatgctgcccaggttggcgcaacaggtgtccgccggcacggtggcggtgccctcgatgaagggcaggcaggggaggaggcggaggaggtcagtgctgcaggtggacgacgtgccggcctggggcggcaccgcttggacggcagcggcggaagccagcagcagcagcagcgcgacgcagaacgcaggagccgacgccattgcttctctcgctagctgatcttttctgctctgcatggaaactggagacaactgaacgcgtgggctcaattcttcagaaagctaggactgacaccaatgccacgagaccaagagtgacaaagaagccgtcagctatcatcttggacccccggctgtatcgcggcggcgtctggctgctcaccgacggtgacggtatcatacgtggtgtcgtcggcgttggcgtcgctggcgtggtgagggtcgctggagcactggagttggcgcttgcgtgtggagtgaccgccgccgcgggcggcggcggcggcggtggcagcggcggtgatggtccatggggaagaagaccggcaactgcgcaggcgccggtggcgggcgggaggtcgaggcggcagagccgaggcatggccatcacgcgcgtcatgttgacggcgacgggggccgtgctggggttgctgagagcctggcagaggcactgcggctcgtcgtgcaccatgctgcccaggttggcgcagcaggtgtccgccggcacggtggcggtgccctcgatgaagggcaggcaggggaggaggcggaggaggtcagtgctgcaggtggacgacgtgccggcctggggcggcaccgcttggacggcagcgacggaagccagcagcagcagcagcgcgacgcagaacgcaggagccgacgccattgcttctctcgctagctgatcttttctgctctgc

SEQ ID NO: 6662 - DNA, 618 bp, Zea mays
  Clone ID: MRT4577_106068C.1
acgacgcagacctataatattttgagcattcacatacacaccaagcgaatcacattagcaacaactctaacaacaatggctaccaagatattataccttcttgtacttcttgtgctttttgcgagcgcatcaaatgcgttgattattccacaatgctaacttgctgcaagttccattattacacagctcctcccaccagttactttaatgggcttataacactcagctgtgcaagcctataggctactacaagcaattgcagcgagcgtgttacagcaaccaatttaccagttgcaacaacaattcttggcacatgtaacaatacaaaccatcgcatcgcatcagcaacgacaattcctaccatcactgaaccagctagccatggagaaccctgccgactacttgcaacagcaactgtttgcatcaaacccacttgctctggcaaacgtagttgctaaccagccacaacaacagctgcaacagtttgtggcatagctcaatcaactacacatggtgaaccctgccgactacctacaacagcaacaattgtgtttatctaaccagctacgctgtggtcaatgcacctacatacctgtaacatcaattgttgcaacatat

SEQ ID NO: 6663 - DNA, 335 bp, Zea mays
  Clone ID: MRT4577_106069C.1
gctgtgtattgcgcttaacgccgcagcctaccccggcggggcatttttcgaaggggccgaggagtatgagcaacacaaaccgagggaggcgacagcgtatcctgccgctgatcagacatgggtgatcacgatgctcgcggcaatgactcatagaaagatgcgtgcattgctctctggcactgggtggctcatgtgcgaaagacctgtgacgcctacccaccatgggtcaaggctggaaactcctgtagtctatgcatgaactgtagaagatgcgcatgatttgacaacaagactgctaacagccattctaagggagatcgcaagcttgacgctgt

SEQ ID NO: 6664 - DNA, 739 bp, Zea mays
  Clone ID: MRT4577_10606C.1
gggattagccactggggaaattaattaaaggagtactctattagggcaagaagaagaagagggcaacgatggcggcggcgatgatgatctccggaggacgggcggcggcgctggtgatggccgccgtcgtgctgtgctcggtggcggccatggcggcggcgcagcaggcgtcgaacgtgcgggcgacgtaccactactacaacccgcagcagaacaactggaacctcaacgccgtcagcgcctactgctccacctgggacgccggcaagccgctggcgtggcggcagaagtacggctggacggccttctgcgggcccgcggggcagaaggggcaggccgcctgcggcaagtgcatccgggtgacgaaccgcgcgacgggggcggccatcacggcgaggatcgtggaccagtgcagcaatggcggcctcgacctggactacgagacggtgttcaagaagatcgacaccaacgggcagggataccagatgggacacctcaacgtcaactaccagttcgtcgcctgctgattgatgatcactttcatcacccactccatcatcaagtactacagtacacatgtaataacaagccatgatatatatgatgcatgcatggcgtgatcgatgaataaaaccgatgggatagatagctctgcctgccgcaactgcgcaagcaagcccggatcatcatggtataaaccgcattggaatgcaataaagtggactacttattatatatt

SEQ ID NO: 6665 - DNA, 137 bp, Zea mays
  Clone ID: MRT4577_106070C.1
ggactctgtcagtggcaggtgcatgaagtacgctcagacggtgttcgtctcaggcgccacatggcgggacgttgtccgcatcgccgaaccctgctgcgtctagggtgtgccgggctcgctcgtgtcccggacctagc

SEQ ID NO: 6666 - DNA, 271 bp, Zea mays
  Clone ID: MRT4577_106071C.1
ccggccgggagtatctcccctccactgtcgccgcagtcgtcgccgtatagcacactatcttcgcttctgggatatctatgtgagagagaaacaactcgatcgatcgatcaagaagaccggcgaggctctagctccagaccgacaatgccgtacgcagccacaaggacgtcgccgcagcagcacagccgcgtggccagcaacgggagggccgtggcggcgtgcgcaggccacgcgggcgtgccggacgaggtggcgcggaaccacgagcacg

SEQ ID NO: 6667 - DNA, 653 bp, Zea mays
  Clone ID: MRT4577_106072C.1
ccggtctcctgatcaacgctatcaacagcatacccgctggggagcttgagagcggccgcatagcgttggccatgtggggaagaaaggtatcgtcccggatcagcagcctcgccatcgggctgctcggggtcgcggctctcttcaacgacgtcgccttctactgggtggtgctgatcttcttcctgcagaggggccccattgctcctctctccgaggaaatcacagaccctgagaacagctacatcggcatcggtgctgccattttgctgtttgggcttctggtctgcctgccctacccgttcccctttgacccgtcgcagttaactgatatggatttcaacttctgagaaaaggaaaaaaaaaaagcaattacaactcaccggatgagatgtatttaacctgtcggctctgtattctgttgtgtcatcttttgctcaattgctccttgtagtagccaataaaagcagagctttcttgtgttagcttgcctgttgtattagtaggatgctcgatcagagtagaatatagatgttaataccccgttttaaatagggtgtttggtttgagtaataaactcattcctcactttttgagttggttcgtggaatggaatacacgcgtgggagcgtttggataaaaaaaaaaaaaaaaaa

SEQ ID NO: 6668 - DNA, 659 bp, Zea mays
  unsure (1)..(659): unsure at all n locations
  Clone ID: MRT4577_106073C.1
aggagatgctgattgagcccgaggcgcacgtcagaaagctagccaagttcatgggctgtggattttccgcggaggagnaggagggtcggctggcgtgcgccatcgtggagctgtgtagcttggggaagctgagagacatgtaggtaaatagaaatggaagcactttgttggggatcaagaacgaaagcttcttcaggaagggagttgttggggactggagcaagcatatgacgcaggagatggcgcagaggctagacaaggtcgtagaggatgcattgcaagggactggattcacctttgcgagcacagcatgatgaggcagtgcgctcatagtagttgcgaactacagaataatgccaaggtcaactcgttttattggtgttgctggttggagatcataccagtcatggtgagcattcttctttggtgatgaagggggaaatatggacatcatcttatcatttaacgaaaattgatttgtgtacaattcatttgtataactttgttacaaaccatatgttgtggcaccttggcacgccaaaaccatatgcattactgtgtaagatttgtcataaagccatgtatcatcattgatatattatcgattaatgtttggagaagctacaattgattacaaaaaaaaaaaaaaaaaagcggcc

SEQ ID NO: 6669 - DNA, 351 bp, Zea mays
  Clone ID: MRT4577_106074C.1
ggggttattctttggcttttttttttgttttagatgcacatggagattatgttatacaaagcatgtctgggaatacatttcccaattcatcatcccaacgggctccccctaagaaacacttattgggacatgttggctggtatgcctcatgggcagaaagcctcatttttggggattcattagacctcccggtattgtaactgccgttaacacaggtaccaggcttgtacttaagtgatgctcctattaaggaacggcttccaaaccgaatctagcagctgtgtgttttctgcattgcaacctggggggtaggctctagaagctcccggatcgccattgttgcgtagcctg

SEQ ID NO: 6670 - DNA, 726 bp, Zea mays
  Clone ID: MRT4577_106075C.1
ccggccggggtgctgaactctagggaggctacgccgcgtccaacgccgctggctccaccgcgccgagaaccagttgatccgcgccaaacaccatgccccaagccgatcaatccacacccatcagcagcagttccacgcccctgggatacacaaccactgccactaatgccacgccccaagccgtcgcccacgtctgggctctcgccgtctccttcctcctccgtgctgacacggtctaggctccaatcgaagatcagctcgcgccacgtcaacaaaatttggtgctccaaagcttcaaaaacgttatcctcggtgtcgttgggatccatagtggcctggaatttgatgctagggtttgcaggagagacatgaagaggtgttgcttgattaaattcgacatcaactgccattgctgcaaccaacttgccatatcagtggatgcaataacagttgtatcggagatgccaaactgacgcggacgacaagggagacagactggtggccgagtgagcgcgcttcaatccgttcctgatctaccagagtttgcgctgtcattgagaccggaaggatatgagttgccaagaacttattcaatctgggagaatggtaatggtaatctcatattcagaatgtcaaggagcatccgaacgatgacgaagattaatgtattcaatttagaaatgcacggagcatccaaacgatgacgaagataatgtatgcatgttt

SEQ ID NO: 6671 - DNA, 228 bp, Zea mays
  Clone ID: MRT4577_106076C.1
attcggctcgagaggaccacctgagtggtcatcatccgatctgcatcccatgatagccgctacagatgacctatcctgatacatagtgccgaggacaggctggcgggttcagcctttgctctgacaggacatggaccacgctccagacgtgttcctacataagcgacatgaccacatgcatatggaacaaaggggaaaagatggggaccctaagtcccaagggaccca

SEQ ID NO: 6672 - DNA, 167 bp, Zea mays
  Clone ID: MRT4577_106077C.1
ttggggagatcgaacagacgctgaggcctagcgccgcacccgccgccgcatccgacatcagccatggcgccggccgttcgcctcgtctcgcgctcccgggagctactttcgcctcacgcagctttcgccaatggcggagcccccccattccgttccctcgctcaagg

SEQ ID NO: 6673 - DNA, 435 bp, Zea mays
  Clone ID: MRT4577_106078C.1
ccgttccagtttttttaagggccccccccccccatttaatggcctttgggttgggggggggccaacaaacaaaaacaaaacaggggggccttttttccttttttaaaaacttttttacggaaacctaacccgttttttacatgcccctggaacaagaaaaatgggatttagggcttgcttctgtttttgaaaacgtttgttattatggcccccctcaccccttttcctgaaagaccaggaatggcccaagggtggcaatggcacttcccagggcttttacagggcggacagggggggggaaaataatttttgttaaaaaaatccctgttttccccttttttgttttgccaatgctgaatggcaagggaaaaatttggtcgaaaaaatttgggacccctggttttttaagggggaaaaaacccttttgggagaaat

SEQ ID NO: 6674 - DNA, 259 bp, Zea mays
  Clone ID: MRT4577_106079C.1
gcaatatatagctgctgagcctactgtctttgatcctatatggcatagtatcagctagtatattctgcatacgcttgatattcacaagtattcatacatacagtgttggagcgaatgcgtatatgatccaatggctgtcacaacattcgcgctgtgctaattagtcagaacaatgcttcttctctacagatcgccctatagtgccaaggtttcttactgtgcctttgttggttatcaagtcgatgccattatacatcta

SEQ ID NO: 6675 - DNA, 1235 bp, Zea mays
  Clone ID: MRT4577_10607C.1
tgctgctccggtcgttgcagccgcgactgggggccggaacgagcgcaacaagcgcccacggccacaggaaggcaacagcggctcatgccctttgcaccccacagtcaccacagtgccgcagagtgccgcgagatcatcaagctcgcgaagcgcgtcagcgagcggcgcgagcagacatccaaggatggctccccacctcgtcaccgacctggcaaggagagggtcgacgacggcgatgtgaccgcgggggaacgggacctcgcgtatcagtcccccgagcaggtcctcaaggacatcctcactagagactccgactccggtgatgataccgaccgccgcaagaagttgtacgtgatgtacagcggaagctgggagctcacctcctgtaggaacgtgaagtcactgcgtcgcgaggtcctgtcggcgaccctaggggtcccgaaggcggccccacaccagcggtggcggagcacaaccatctccttcggggcatccgactgccccgagaacatggcaagggtcggcatactgccgctcatcaccgcccctgtcattgccaacatcaagctgcatcatgtgctgatcgacggtggtgctggactgaacgtcatcagccacgctgcgttcaagcagctacaaatcccaccagttggtctaacagactctagagttgctcagttggtctaacaaattattagagcgtgattttcgtctaaaatcttattttgttaacaccggatctagataaataaaatcccaccatccaaactaatagttcacccagtttaacaatagtatacttttatttcaaggtgaacaacctaaacatatcacacaagcaaaacaaggtatatacatgcaaacatggatggaatccaaattgagataaagaaattacagactctagagttgctcagttggtctaacaaattattagagcgtgattttcgtctaaaatcttattttgttaacaccggatctagataaataaaatcccactccaaactaatagttcacccagtttaataatagtatacttttatttcaaggtgaacaacctaaacatatcacacaagcaaaacaaggtatatacatgcaaacatggatggaatccaaattgagataaagaaattacagactctagagttgctcaggtggtctaacaaatggttagagcacaattcttgtctaaagtcttattttgttaacaccaaatccagataaaataaaaaacc

SEQ ID NO: 6676 - DNA, 484 bp, Zea mays
  unsure (1)..(484): unsure at all n locations
  Clone ID: MRT4577_106080C.1
agacttcgacatcatgagcatcgtgggaaagccgcagtacattgagcatcagtaggttccttccgtagtnnnnnnnnnnnnnnnnnnnnnnnttccatctccacggccgagaccagaacagcaacggngccgaagctacacatttgtaaccaaagtatttcatccttcttgcagtagtaatcatgccatgaaaatcctatccttgnttcaacaaccctaccttgctcttcgtgaatgtccaccatacaagggtatagcccgttgataagcagtgntgatacttgataggcacnnnnncacctggtagcagcgacttcggagctgcactacgcaagaatagaacgtgcgagtgcgaccgccttgagatgccagcttccgcttgtgtcctgtgtcatttcctccacttcactgtaccatttcttcccacttccgcttgataaatgcttacccctatttgctcgctctcggacgaatccattcgcct

SEQ ID NO: 6677 - DNA, 455 bp, Zea mays
  unsure (1)..(455): unsure at all n locations
  Clone ID: MRT4577_106081C.1
ggagacgacgcgagcggcgagaacggcgacgctctgccagcggtggcgaagacgccaaagaggaggacgacgctgcagagccagctgagcaagtttgaggacgaggacagcgagaaggcaagagcagccgcggatgcgatgagtcctgtgcaagatggattgttgataagaaaaccgccagacatgaggtttccatcaagaagaaatgtgcctatgtctgctgatccagtgggccatctccacaatggcagcagtttcgatgccgtctcagtgtcgggttcagatggaagttctgggcgatatacccccaaaattagcgcaagcacacacaactcatttcttcaggatagtagcaatgctctctcgccatttgccaacaatcgcaccgtgaggaacccattgaccagttctggtgactggtcangaagctcagctcctgatgctagtacggatgg

SEQ ID NO: 6678 - DNA, 367 bp, Zea mays
  Clone ID: MRT4577_106082C.1
ctaaaacttcaaaatgattattggcacgctaaagcactaagactgggctttattcatgccatggcgggagtctacaccgtggcacgaggagttcatccgtgcaaataggtcaacactccttgatctgtggttaacctcaggtgcacggtcgtaccgatcccggtgccggggattataatggcgagcgatcctatgaacaaggcgtggtactaccggttggaaggtgggcagggctacaccaactattggatatgaaagaaggggagctccatgagcatgatcaagtataagggctaatactaccagctctgggtaataagcacatgctgaaaggtcctcctgcagttgagcgaagagctaattgaca

SEQ ID NO: 6679 - DNA, 1032 bp, Zea mays
  Clone ID: MRT4577_106083C.1
ggggcgctcccgggcggcccgcaacgcccccgccccaccacccaccgccccggtccgccgtcccgcgcccaacgccccccgcgcgccgcctaacgcccaccgccgcccgcccgtggctccggtccagcgcccgtcccctcaccagccccccctcgggacgcccgtcgtaccgtggttgctccgtagtgatgtggtagaccgtacgtgtttggccctttagttcggggtgtactgtcgccttttcgactacatgggtgagttgatctctatccccctgtagccacagtagtcgtgtcacacctttgcctctatagactcgaatgtcgctttcgtctgctgcttcggagcgttggtgtccgcgcatccttccaggcattgtcgagtgtggttgcccggttactccagttaatagttggttactgctagttagttcttccctggttggtgatgctggtcgtagcttccttttaatatttatcggagggagatgtaatccggatcgagagggggggtttgggttgttttgcgaggacgacgatccgctcgctggcgcgcacgacgaacggtgctgttgcggcccacgaaagtgctgtcggaacccatatggcgcatactgggttgaatgaaccaacttgtcactgttggggtccggcggcaacgacgaccggggcagctaatgtcgggacggcggacgtcctggcgacgtccatggctcttcttaccggttggtctccctatcgctctccgggtgggtctggtggcgtcttggattcaatggtagcagtggctgtccctgtccttcaccgtctagcgactaccgcggaaacagggtcggccccggttattattgcaaaccggatcaagggagaggaggggggttcttagatttccggccggaatagggcgaacgagggtaccctaggttctggtcggtgcgtaggttgcgctaggtcccgcggtgtactccccctcccaccttcctccctttccatctccaccgtcatcttcccacccctcggccgccggtacttg

SEQ ID NO: 6680 - DNA, 301 bp, Zea mays
  unsure (1)..(301): unsure at all n locations
  Clone ID: MRT4577_106084C.1
gccacaactgcgcggcagagcgcaatggctctacgtccgccagcgccgcgcagctgccggatccttaccctcccgctggaccacttcgctcctgcgcgtgccaccgcagcctcagcccaccgccgcgccgttcaccttcacgttcgacgcccgcctgtccgactacggggggggggggggtgtttttttttgtaacggngggaccgtgttcaaggggcggttccggcggtccgcgcagccggtcgccctcccactgttcgggggggggggcaccttgggggggcgcggggcccggatactg

SEQ ID NO: 6681 - DNA, 436 bp, Zea mays
  Clone ID: MRT4577_106085C.1
ccacccaaccactgcattttattcctcatcaaaaacatgacatccaaactaaacatatcaaccatcctggacagccgccgggccgatcaaataaaaacccatacaccataaaatactgcactgaactgaatccccccaaacacatccttccccccccaaaccacaacacataaaccactacctaaagctatcccggcaaccaaaactttacggaagcttacttaacaacacccacccccttaaaggcccaaatccccccccccccccagtgtttaaagaaaaaccccccccccgccccctcaagtgtggtttttttttaaaaacccctccccctggccaatccgggcctgtcctcaatccttaatgtcccgggccttgaaccccaccctccccttggcgtgtcccacctgttcgcccccccgcgggtgcttccccc

SEQ ID NO: 6682 - DNA, 464 bp, Zea mays
  Clone ID: MRT4577_106086C.1
attaaatttttttttttttttttttttttttgttgtttttttttttttttttttgtttttttcctttttttctttttttttttcaaagaaaaggggtcccaaggccactcccattattataaagggggcaacaccccatccagaaaacaaagggggccccaaacccgttggaaaaccccccccccccaccaatgttcccttttaaccgtctcaaccaaaactataaacagcccatcaaactactaaaaaagggaccccccaataaaggggggaacaaacccctgccaggggaggaaaaataacaccttgaagaaaaaagcagaaaccacccccccccccctaaaaaaaacacgctttttttctccccccccggaggggaaaaaaaaaaaaaaaacggcacggaaaaaaaaaccccccccccgggggcccctcagcaaaaaaaacaaacaggtttgggcccccct

SEQ ID NO: 6683 - DNA, 487 bp, Zea mays
  Clone ID: MRT4577_106087C.1
gccgtcgtcgtcctcagccacgcgtcggggggtggtggtggccgtggcccccggggcgacggaccacaggacgaaataccgaaccccgaaatggaggcatgcaagcttcacatataccaatttgtagtatagctagaaatattaaagaaaataggtataaactgtataaaagtgtaaaatgttaacaatttcaaacttcaaaaaaacaaacaacataaaacctaaaagcttaaacccctaaggcctaaattaacaaacaataaaagattaaagattaatggcaaattgccaattttcaaatctgaaaacccaaaagcattaatgaataaaaaaataatcaaacagacaagaaaagagtataggcaaatagggtacaaggtgtttttattttttacacagtgaacaggtaaatggtcaataccttttaacccttaaacatttaaaaattacagaaaggctcaaacgttctattatccaaaaatccaaa

SEQ ID NO: 6684 - DNA, 407 bp, Zea mays
  Clone ID: MRT4577_106088C.1
cttggcttggaacctttgggctgatttatgtgcttgagcctttctttccaccataactccttctagtgttgttgtctttagatattgagtgtgatcgtttaattttgacttggtgacttgctcttcctccccttcttccctcgttgcttttgactatctgtaattacggtggtggtagtaggtggaggtgtggcgtgcgtctcgctttagaaggagtaggatacatagacgacgtctgttgttgatgcttattccggtattaagaatcgtgacccttagatggagtgtcacgctcccaagtgttgccttgatggtactcatactactaactccggtaagatacgggacaaatcttagtccgtagtgagggccactgccgttactgagaatttgtaggatactactgc

SEQ ID NO: 6685 - DNA, 329 bp, Zea mays
  Clone ID: MRT4577_106089C.1
aagaaaaaaaacccaggggatttgagttaaaaacccagggggaactggaaggaaaaaaaaacccggaaaaaaggaccctgggggaaaaaaaccggggggccccaaaaaacgaggggaaaaaggggacttatcgccaacggggccattttttggaagcccaaaagaaaaaaggtttgcattaaattccgggagtttttgggggggataaaaaaaaattttgataaggccgaaacccccggttcccattcccacaacaaaatgaaaaaccgttttatgccccgggggaaatttcctttggttcccggattttaaataaaaggaacggggat

SEQ ID NO: 6686 - DNA, 1708 bp, Zea mays
  Clone ID: MRT4577_10608C.1
ggccgcttttttttttttttttttccagataaaataggttattttattaagtaaattttaaaatcctccaaaataaattccaaaataaatggatccagacgccggaaaacaacaaccggaatttaaaactaaaatctgaaggcggccttcatgagcttcgtacattatgaagctctaaggtgctgcgagtcacatttattctgaaggcggacttgatgaccttgatgtcgattatttgtggctcttaaccttggagaggaaatcggagatgttgatatccgaggtgccgccattgttgatggccttctttgccttcttactccaccccaaagctttcagtctgaactccttgcaactttccccttccatcacctcccgaacacacctctccacctccttccttgcgaccactccatcggattccggccgtacccgcacgccgacgcgccacacgtcctggacgtacttggcgttggtcggctgatccgaccagtgcggcatcgccactacgggcacgccggagctgatcgcctccaaggtggagttccatccgccgtgcgtcatgaagcacccaaccgaggggtgcgctaggacgtccagctgcgggcaccacggcacgatgagccccgccgccttcgcctcgagggagaagttcttgggtagcttgtgggtctccgtggcccggacgacccacaaggaatggcataccgctgccgcaaagcccctcggctacttcctccatctgtcgcgcgcccagggaggctatgctgccgaaggagacgtacacgacggagaccggcggctgggcgtccagccaagccttgcattctgccgtcatcggggtgtggaggtggacgccgtaggatactacgtcggcgttgccgtcgtcgtccgagaggtggttgtcgaggcacaccgtcgatggcatgtttgggcctaccgtcttggcaccccaagtggaagccaagtaatctgcttcctgcggctccaagtcgtagaatgagttgacaagcacgtggtccgcggtgcccaaacccaagaactggctcgtcagcaactccagaagtcccgggggacggtccttgtcaacgaagaacgtcggcaggtcgtccagttggagctggacaggcagccctgccagctggtccggcaactcctccaccaccggcggcgacggtatccggccggccagcaggtgcgtgtacagcacgtccacggcgcacgtctgcgtgaggaaggccgcgcacgccgcgccgcgccggcgcgccacgccctgcgcccacggcaggaacgagtcgtacaccaccacgtgcaccggccggcccagctccgactccgaccggaggagctggtccaccgacccgggccccgcggagttgagccgctcgaagtaggggccgcggtgcccacctaccccgtcggggccgccgtcgtcgcagccgtcggagaagacagcgacgtggaccgagccggtggctggcctcgtcgagctggcgacgaaacgggtcaccgcgagagtgcagcggacgccgatgtggtcggcgaggcgcctggcgaactggaagagcgggttgatgtggccctgggacgggtatggcaggaggaggatgtggatgctgtgatcgccggtgtcgtagttcaccatggttgcagttgcagtatcagcgggtgtaaaacaatgctagtagcccgatccgacccggccggc

SEQ ID NO: 6687 - DNA, 283 bp, Zea mays
  Clone ID: MRT4577_106090C.1
gcgcacaaaaattaactaatctagggcgagtagttactcccttgctaatgtcacctagaatttggtcaacgagatgattcctttgaaccgtgactccaacttgaattggaggtgtcggttgtgcttcttcctccatttaatgatcatcttgtgctccctttgatcacacgcctgctcttgatgaacctgttcatcttcttgagttgggggatgcatcgttggtgaggaagaagggtgatcttgcgtcctttgttccagaggactcacatcttcaatcgccatg

SEQ ID NO: 6688 - DNA, 411 bp, Zea mays
  unsure (1)..(411): unsure at all n locations
  Clone ID: MRT4577_106091C.1
gcccccagaaacagagctttcaattattcccctagcaaaggatttcaacaagtccgccctggggggggggtgaacagaccccgggattcaaaggggggggggatgaacacacacgacgaacaccaggacatacgtaacaaacactggggggagaaagacgaccaaaggacgggcccccacacgtacagggaacacaggattccgagacgaccctggtggtactgacagaaacgcacccgggcatccatccatgcatggatgacttggttacgaggaagccctgccgtcggcgacagggccgggacctgtaccttcccaggagccggacttctgggccctgccctggatgggctggcctgcctgcacggtcttgtggcccatttgggccgngggctacgccattctgggggg

SEQ ID NO: 6689 - DNA, 451 bp, Zea mays
  unsure (1)..(451): unsure at all n locations
  Clone ID: MRT4577_106092C.1
taaaaaaaaaaaaaaaaataaaataaaaataaaaataaaaaataaaaaaattaaaaatcttacatttctcaaagaataagacgtcataactcttcaaaaaaagganccnaaaaggggctccctttttaaaaaatccacaacttacttccccttcaaaacccccccattacccaacttaatcccctcacaacacatacccctttccccgcttttctacaactttttaacttgaaaacccctttcatcccccaacttaatcacctccctccccttccccttttcccccccttgcaaaaaaacaaaaaaccccccccctttctcctttccaaacaattcccccccctaaattttaataaacccccccccttaccattccattaaccccccccctttttatggttccccccacctttaccctttcattttccacccccctaacccccccttcttt

SEQ ID NO: 6690 - DNA, 240 bp, Zea mays
  unsure (1)..(240): unsure at all n locations
  Clone ID: MRT4577_106093C.1
ccccccccannnaccaaccaactcaaacccaccacaaaacatactaatacacagctcaccccaacaaactaattcacattaacacaaaaccacaaaagtcctcacacacaaatccatcgcaagaatacttcacaccaccaaaactactagtgacgcagcacaaaaatcctactaactatatcaacctaatcataacacaccccaccgaaaatatcccacaactccacccaacacaaacca

SEQ ID NO: 6691 - DNA, 335 bp, Zea mays
  Clone ID: MRT4577_106094C.1
tcggcaggtaccataaaaaaaccgcagccagccgatcccgatgcggggcccactcgccgagcagggggtgtccaccgagacagcgaccgccccggcgccaccgggcgaccctgctcatcctcctccggctgaggcggtcgccgccacaccaagccgatcgagaccgtctgggttctagcaactagactgacaaggcaaggcttgtttgttggagaggatccagaacctgaaacatgatgtgcagaactggcactccaatggacagacgcatgtctatacatgcccaaatggactacacgatctcaagaaaggacttgactctgaagaggaacagc

SEQ ID NO: 6692 - DNA, 394 bp, Zea mays
  Clone ID: MRT4577_106095C.1
agacatccactacatatggatggtcacttttgcctttctgctgcgagcacgacggaaaagggatgcggggggacattcccatcaggaaagaagcacatacacatcatgaggagtaaaaaaaaaacttactagcgataatgtgagtacagtattgttcgttctatctatatggcgcttgcgactattatcacggagattcacgctaaatcggctcgcatgtcttgtgcccaaacaaggctaaggaccagttcgcgtaaaaaaatgtatgtttggaacttagctaagaattggagcccgaggaaacccctccatcctgagcaaactaatttgtggaaccctgcttctctgttatcgcgactcatgaatgacaatctcatgtccattttctgtgccc

SEQ ID NO: 6693 - DNA, 427 bp, Zea mays
  unsure (1)..(427): unsure at all n locations
  Clone ID: MRT4577_106096C.1
gggggccacgcnnttctcgtattctttaactcctcctttccgtttctacttcaaggcgctcggctttttgcgcatgcagctcccgccggcgcgggacttctccttctcatggttcttcaactactgcttggttatccacctcgtgcatcgcgactacacgcggcgggcccccgacttgaggccggaggaggcggatctggaccccatggacaaccacttttcgttccagtgcgatgacatttgctccatggatcggctgctgctgtagatgctcgtgctgtacatgaagctgaccattaactatgaggaagggtcgcccatctaccagctcttcttcatggaccctgacggtttcatgatcgagatctgtaactgcaagatcctggagctcgttctcttcggcgccttcggtcgacttaggcttgtc

SEQ ID NO: 6694 - DNA, 1165 bp, Zea mays
  Clone ID: MRT4577_106097C.1
cgcaccataaaaggagagaatataagaaaccgtcacgaccgcctccgccgtgctcttccatccgttccatggcgccgccgctcgccctgctccttctcgccgccatcgtgctctcgcgggccgtctcccacgcccacggcggcggcggcggcttctacgacccggcgagcgtcactcagctctcctcgcgccccagggcgttcctgtacagcggcttcctctcggacaccgagtgcgaccacctcgtcagcctggcgaaaggcagcatggagaagtcgatggtggcggataacgactccgggaagagtgtggcgagccaggcgcgcaccagctccggcaccttcttggccaagcgcgaggatgagatcgtgtctgcgattgagaaacgcgtagctgcttggacatttctcccggaagaaaacgccgaatcactccaggtcctgcgctacgaaaccggccagaagtatgacgcccacttcgactatttccacgacagaaacaacctgaagctcggcggccagcgagttgcgaccgtccttatgtacctcacagatgtcaacaagggtggagagactgtatttccaaacgctgaggaacgtattgcatactttcagggaagccatttacagtacaaggacgaaacttggtcggagtgttcaagatctggcctggcagtgaagccaaagaaaggagacgcgctactgttcttcaacctccacgtcaacgccacagccgatacaggcagtctccacgggagctgcccggtgatcgagggcgagaaatggtcggcgacgaaatggatccacgtcaggtcgttcgacaaccccccagacgtgaggacggacgcgccgtgctccgacgacaaggagctctgccctagatgggctgctatcggggagtgccacaggaacccgacgtacatggttgggaccaaagacactctcgggttttgccgcaagagctgcgggatctgtgatgcttgaacgtgcatgttttgggggtagattttgatcccatcatgttttcactctctctgctcataacagatgaatcagtaacctagtgtaatgcgaatttcggtacagtcgcctccattggactgtttcgtccaccaaatgttctaaaactaatgatctaatcaacctttaccaacatgttccccccc

SEQ ID NO: 6695 - DNA, 160 bp, Zea mays
  unsure (1)..(160): unsure at all n locations
  Clone ID: MRT4577_106099C.1
ggaccctcaccccaccgccattgctcagggcagtagtattcnccgcctgacagacaggtgcgtatggggtggttgctgccttgctgatggtagcgctcggcgcaggcagccaagaacagagagagcgagatggatgtgaacgacgtgctgctagtggtgc

SEQ ID NO: 6696 - DNA, 317 bp, Zea mays
  Clone ID: MRT4577_10609C.1
ggaacaaacaaaataaagggtcttattagtatgggaagcaggttttagggccatgatccattaccccccctactcggaggagccgggacccattacatgtaagtggcatgcgggactacctacctactcgaactacaatcacaaacgaagcccattattccggactaaaaatttttgcaacaaaaaaggggaaaaccagcttttcctcagggaaaactcaggtccccaaaccgcctccaaaagggactgacactaacgccgagcgctccgtccagttgaatgccgaagggaaactcaggggattccaccgctgccgg

SEQ ID NO: 6697 - DNA, 947 bp, Zea mays
  Clone ID: MRT4577_1060C.1
agacgtttggtcctgtggtgtcacgctgtacgtgatgctcgtgggatcatatccatttgaagatcctgaggatccaaggaacttccggaaaacgatcagcgtaatcatctccctttcccttctgttggttatcacagcttgcttcagatgcttgtttggtgattctgaaagcaatttcaatgtctcgtgcttggcagagaattcttggcgtgcaatactccatcccggattatgtgagagtgtcttcagactgcagacgccttctgtctcagatattcgttgccgatcctttaaaggtacttcctctctcagttcagtaaatccaaatccaagctggcctaatcatcaaagttcagatgcaaatatttcatatgctgattatactgaggtgtggatcctgcaaccctggacaaacaattttcagcgtgatgactgacagtgaatttcttgttaaacgtcctctacctgaaactgaaagagggccacgatcccggagataaagcatcacccgtggttcctgaagaacctcccgagggagatctcggagagggagaaggccaactacaaggtcgcggatgccgccgagccgacgcaggccgtggacgagatcatgcggatcgttgaggaggccaagacccccggtgacatgtccaaggtggtcgacccggcgctgctggccgagatggcagagctggagagcgacgaggaagaggcagacaccgatgacacctactgatcgctcttgcatgcagctcaacagctgctcagtcatggtgtccagtccttgtgctgcagacatggcgccgccgagcgcccgagcttaacccgtgcgtgtgatgacggatgttgtattgcactttttactctgtttgtataataaaagtctgtatagagctgtacaattgcatattgccttgtacaaataaactagcgtgcaatgataaaaa

SEQ ID NO: 6698 - DNA, 681 bp, Zea mays
  Clone ID: MRT4577_106100C.1
gggcgattgggatcctcgaggccggccgggaccactccccttccatctcgtactcttcggtatctgcttaccagtcatctatgctcaaccgcaactttctcctctgcatgacggaggcgcgagcatgggacatgcacagtcacctaaactacggcgacgtggtggtgacaccgccgcgactacgaatatgcctcgcttactgtccgcatcgacctgcttgactacctcgccgtgcgcctcgggcacgacaagaccaagccgcttcaatggctctccggcaacttcgccaccgtccatcaggaaaccccgccgcgaccaatcctaatcgttagcgtacaccacccggattgcttgaatgaatagttcgaaagctcgccgataattagaaggttgctcctgatgcgctctatcatctggtttgatgtagacgagatgattcatgacgtgcgatattatcgatgtaatagctacctatgtatgaagatatgtgaagaatggccgactccaacgagaggagtattttggtgtaccaaagtcttatgaagattgtatgatcttagcgcattaatgtggattgccgatagcgccaatgtgcgaatgtcaggaggaattcagagtcttgcacatgacctatgagtatgggacagctaatactggactcatatatattcatgaccaact

SEQ ID NO: 6699 - DNA, 462 bp, Zea mays
  Clone ID: MRT4577_106101C.1
gggtgggggggggttttttttttttttttttttttttttttttttttttttttttttttttttaagcaattcaatccggtgggggcctttgttttttccactcaatgcagcaaggcagcgttgccccccagattcacggccccagtctccatggggggggcagtttttgtccattatatgcctgctttgacagggttacaaacaaaattaggcgggggggctaattgggccccttcttgggactttgccgtcaatcatttacactagggtcataccctcctttgggcccgggatttcaagggggtagatcctttcccgtccggaagaggtttcggagcacccaaatcggagtttgcgctgtttggcccttctagagggatcaactgctgctggtaggggtttgtgttgtcacacaccccgagcttgaccaccaatgttgcggggcaaccttttccgggtcct

SEQ ID NO: 6700 - DNA, 400 bp, Zea mays
  Clone ID: MRT4577_106102C.1
atcgtaaatattttttttttctcttcaattttccacccccaattctgactcgccagcggcgccttcatctggtctgtaccctagtcgaggtgagtctcctactcaattcgcttagttttgccctcaattctttttaccgtcgcaccacgcggttccctcgcatggatttgttcggagactcatagcttgtcctcgatcggaaaatccagcgtcctggcttgttcggagcttgattttatcagcagcgccgttgtattgatccgtggtgcgttcttcagagtttgtgtggttacgtgctatattgttgattatggttctttttaggataattgtttattataattttttcatttttggtgagtgctgtttttatagaaccttattttaactaagacccttt

SEQ ID NO: 6701 - DNA, 2138 bp, Zea mays
  Clone ID: MRT4577_106103C.1
ttttgcgtccggtacgctaccaggtggggtggattgtagcttgacatctgaataaattggttcatgtatatctcaggatcactacgtaagacattgctagagtttattaacacatagcatattttaagtttgttcattgttttcattcatttttttgatcatatttagctgatgccagtggcgggctggcttcttactaaaaggctgtggtgtttcttgatcatccaaaggcttgttataaagccgcaggctgtcccgaggccggccggaggccttactgaactcgacccgccaggctattaggaaccatctcatccccacgatctccgttcatctcatctcagatcgtctctcatccaacctgatcccattcacatccccttccgattctccgtcgcctgagcggctgagccaacttgccaagccaagcaagccaagtcgtcgcctccccgacccaacgccgcgacccccttgcccgtccgcgagcgctgcagcacctcggatcccgccccaatggcaacagcgtgtccgccgctctcgctgccgtccacctccctcttccgcggcaggtccgcccgcgccgggcccagacgcaggcagctcacggccgtccgctgcagcgccgtcggagaggcggtagtggaggaggcctcgcccgggacggcggaagagccgctgctggtgagcgcaatcagagggaggaaggtcgagaggccacccgtctggctcatgaggcaggccgggaggtacatgaagagctaccaattgctctgcgagcggtatccttcgttccgtgaaagatcagaaaatgtcgacctagttgttgagatctctttgcaaccatggaaggttttcaagcctgatggagtcatcttgttctcggacatccttactccacttcctgggatgaacataccttttgacattgtgaagggaaaaggtccagtgatctatgatccattgagaacggcagctgctgtgaatgaagtcagagaatttgttcctgaggagtgggtcccttatgtggggcaggctctgaatattttgcgacaagaggttaagaatgaagctgctgtactaggttttgttggagctccgtttaccttggcatcttattgtgtggaaggaggttcatcaaagaactttacattgattaagaaaatggccttctcagaaccagcgattctacacaatttgctacagaagttcacaacatcaatggctaactatattaaataccaagcggacaatggggcgcaggctgtccaaattttcgattcatgggctactgaactcagcccggctgattttgaggagtttagcctgccttatctaaagcagatagtggatagtgttagggaaacacatcctaacttgcctctgatactctacgcaagtggatctgggggcttgctggagaggcttcctttgacaggtgttgatgttgtcagcttggactggacggtcgatatggcagagggcaggaaaagattgggatctaacacagcagtccaagggaacgtggaccctggtgttctttttggatccaaagagtttataagcaggcggatttacgacactgtgcagaaggctggcaatgttggacatgtattgaaccttggccatggcatcaaggttggaactccggaggaaaatgttgctcacttcttcgaggtcgcaaaagggatcagatactaaagaaccttgcatggttctttcctttctccaaatcggcagaagttgtagagtcggcggtcgaggatagatgcagaaagccatgtgcagtatagagtgcctgaaaacatttttgtgactgattctgtctgtcgcatttcaagttccggtttcagtgtaatattgtaagcagatttgagtcgaggcgtaatgaagtgcctacttgtttatagcactatagttctgtacaaccagtagccttgtctatgagactacgaagcagaaatactgatcatgtgttgacatgatagaaatgtttcagtcttaccccatcctctcagaatactagttacagacattaaaaaaaaaaaaaatcgtcacccggagcctctccttcccggtctcctccgcccgttgccttcgtcccctccatctccggctgcgtcgccggcgagcccgacacc

SEQ ID NO: 6702 - DNA, 770 bp, Zea mays
  Clone ID: MRT4577_106104C.1
tttttttttttttttttgcggaagtaaatttattatcaattttatatcagaacctaggttctcttactacattgcttttacttgaccccagctcttcggaattttacttgttcacctcctccaatagcgtcttggctgcaagcttgcccaagttattcgaagccagtggagaatcacccgtcaataacagacgatctcgatggcattcaccagaaatagtcttgttgattggcgtaacaccgagcttcttcagtcgctctccaaccagccactccatcttgccagggatatagccaatgtcgatattagcaccctgatccagcgagtcagggaacacgtcgatgctgtagccatcataaataaacttggaaccctcaggcttgccgacgtctgcggccaggatactagcaggtccgtgacagagggtgatgaagaaccgatcatttgcgtgagcccaacggagaacatcgccaacggtcttgctgaagggtatgccgttcagcacgccgtgaccgccgggaatgaaaactgctagataaggtgtttcttgatcgaaccccttaccgtctttgccattccagacctcagacaggttaagggggctgcgaagcttctgcttatatttgtcgtaaatcgacttcacagcctcatcctcctgagggaaagcccacatctcgagcttgacaggatcacccgagagcgtagcaacgtcgatgtcgaagccagcagcgtcgatgtgatacataggcagaagcatctcaactgggtga

SEQ ID NO: 6703 - DNA, 425 bp, Zea mays
  Clone ID: MRT4577_106105C.1
ggatgtatgctgcatttgattctggtaactatttcgtgattccaggccccccatcagaagcatttcaggttgacagctttattgctaaaagataccacgaagacgggaagatcagcttgtgcttgaatcctaaagattttttaattgctattgttggtaattcattttcatacggcgataatttgatggaagaggcacttgccttgcaagcattgagtcctctggtacagagatatcgctctgagaatagcgcacaatctgaactgaaagtaaagatcttcactgggaacataactgagaagcataggatggcccttgaggtttatttatgtcttcatgccctgtctgaccaagtgaactgttacttacagtctgagtgctttaaattgtatctaaccgtgtattagttttctgatttctgatag

SEQ ID NO: 6704 - DNA, 364 bp, Zea mays
  Clone ID: MRT4577_106106C.1
gttaaagaatgttttttcggtcgggaaaaaaccgaccaagctaacttgaaatttgtgacacgatttatgtttacattggtaacacagggacaacatattacttgagcaagcctgcataacaatattgtgctaccggacactgcatacacccttggatcaagacaagtttatgtgacccaatacacgctgtcgttaaggatacaaggcctacatcgcatctagtattctggggccaactcacctggcgtgcttgagctttcgcttgagctcgccgacaaagtcgtccaaattgcgccgcgactagccaccgggcgccacgagagccttgagggtggcccttagcttcctgacctggtccctgagt

SEQ ID NO: 6705 - DNA, 175 bp, Zea mays
  unsure (1)..(175): unsure at all n locations
  Clone ID: MRT4577_106107C.1
gcgccctgtcccgttggccgcgaatggttctcgcgcgagtcctcccgctgcccgccccgtcgtccgcgccccaccgccgtttactcctgccgactcaggcggngccggccccgccgcgtgtgcttaccgtgcgggccgtcgcctgccgtgcagcgaacgccatggcgggcgttgc

SEQ ID NO: 6706 - DNA, 250 bp, Zea mays
  Clone ID: MRT4577_106108C.1
tccactttcaccagctccttcacctcatagtggccagaacgtagtcgcaccaccgtaaatcgtcggcgtgtttagtttcatcatcgaccggtcaacgtacgactttttttagctggtttatgttcctatcgtgaacttggactgtcattgctctcatattttagagtgattgtttcatgttgtattgtgtgctattgaggagtctacttcagttattttttatcccgtgtttttttcgtatttttttttt

SEQ ID NO: 6707 - DNA, 308 bp, Zea mays
  Clone ID: MRT4577_106109C.1
gccttaccagctggatcgctggttaggtttgaagggatgaaactactgattttggaccttaatggttttgtaacagatgtatcttgacgagtaccataaagcacactaggaacatgcgaaggttttaaacaaaataattattagaagaccggactgctacgtgaccataagattatactctgacattgatgaggtagtaataatgtcgtcaaggaaaaggcaaaaggacctaactttgggctatgatcttatgaggggggttaaccaatgcatactatttggcggggacatgtattactggaatgtta

SEQ ID NO: 6708 - DNA, 236 bp, Zea mays
  Clone ID: MRT4577_10610C.1
gccgcccgcccgcccgtgtgccggttaccggtgcacaacacaacgcggacccctcgcggcgtggagtggattgggccgacccctatcgagaggagaggataggagcgcggtcgggtagggtttgtctgggtgaggatttgagcgacagcgcaggacgagggaaggaagacgaggactgactccttgaggatgaggcccaccggtgcttgtattgtcgacgagcgctaccggatgtt

SEQ ID NO: 6709 - DNA, 183 bp, Zea mays
  unsure (1)..(183): unsure at all n locations
  Clone ID: MRT4577_106110C.1
catttttgttcatttgatcacccgctgagctttactgcatctgacccaagtgcaatcggtgttctaggatacagatagccaccggactcaaaggaggaatattactgcacatacaccgtcaccaactaatggaggcaccaccgcgacttgatcacngctatctgactcctagccaactatctc

SEQ ID NO: 6710 - DNA, 602 bp, Zea mays
  Clone ID: MRT4577_106111C.1
caaagttcatttacatgcaagattacaacaacttttttttacacatgcccatggagggtttgagggggtcaggacgtggccaaggataaacaaccaaaatacatggaagctaagagggggcaacaaaaacaagggaaaaatcagatgctattaacataatatatgcaaaatcagcggatcaaaaaaaaaaaaaaaaaaaagacaagttttgaaaaaaaaaaaacccaaaaaaattgaaccaaaacagggccagaaataacacaaactttatatatatcaccgccacctttgccggcataaattggtgcctaaaccccaggaccaaaaaaggaggcgaatttagcctgtcctttctcaaaaccaaatagcccaaaggcttgggcttgaaatacaattactaaactgaatttcccatcgcaagtaacttcctttcgattctttttttttaaagggacattatgtttagaaatgcccccacccaaaccatatagaaagattttatgaggggcttcatccaagggttgttcatcaccatatttaaaacgtgtaacatcactacagacctgtttaaaaataggggtagcacactttgctcttaaagc

SEQ ID NO: 6711 - DNA, 828 bp, Zea mays
  Clone ID: MRT4577_106112C.1
attgggaccctcgaggccggccgggcacgaacaattgacaccaccatggcgactggcaccgccgccgccagcgcttccggcgtgggagccgactccttggagtcaggtgctatgctgctgcggcgacgccacgccggcggcctcgtgggcgcgggcgacgacgacggggtcggcaatgccgaggaggtggcggcctcagtggagcaggcgttcgcggacgaacccgtgccgtcgtggcgtgagcagctcacggtgcgcgccttcgtggtggggttcatcctcgccgtcttgttcagcgtcatcgtgatgaagctgaatctcaccaccggcgtcatcccctcgctcaacgtctccgccagccttctcggctacttcctcgtccgcctctggacgaaggcgatcgagagcgtgggtttgctgaagcaccccttcacgcgacaggagaacaccgtcatccagacctgcgtcgtctccgcctatggcctcgcctttagtggtgggtttggcagttacctgtttggtatgagtcgaaccattgctatacaagcaacagaggccaatgatgcccagaatatcaaggatccgcaactcggatggatgatagggtttatgttcctcgtcagttttgttggacttttcgttctggttcctctgagaaaggttatgattgtcgactacaaactgacctaccctagtggaactgcaaccgcttatctcatcaatggattccacacaccccaggggtgccgaacgtgcaaagaagcaagttcgaactttgggcaagtacttctcactcagtttcctttgggccttcttccagtggttcta

SEQ ID NO: 6712 - DNA, 540 bp, Zea mays
  Clone ID: MRT4577_106113C.1
ctgggggttttttttttttttttttttttttttttttttttttttttttttttttttttttttttttttttttttttttttttttttttttttaaacctttcaaaaccaacttatgggtaattaatcctggaaggtggggggacaggaaggcttggggggggggggggccaaatggtacccccggttaaggataagggggggggggacaaaaccaagaaacccttgggaggttttagaaaaagccagttaaagccaggggaaggtttggggagaaatctttgggggaaaaattttttttccgattaaaggggaaataaaggggggttccgtttccaaagccaaggaagttattgggggcaaaaatttttaaaggggaaaatttgttcctcccccatgggaaatgggaaaggaaaaaaaagatccttccggttttgaaacctttctttaattggggccaaaagagtttaataaggggggagttaaaaaaatccttaggggggccattggaaggaagagggctaacaaatccatcctaaaaa

SEQ ID NO: 6713 - DNA, 391 bp, Zea mays
  Clone ID: MRT4577_106114C.1
tgccggtcctgtatttattgccggaccgacgagctttttatttggcggccgacctcttgctatgtgatgagcgcgaccacaaatcaacacttaacattctggactgggattacagatatgcacctgcatgatgaatgaggtccaagattgtgaggcgtctggccaataataattacatcggctggttccgtgatgatcccaagaagaacgaaattccaaaccagcgcattatatacccggtggtgacctgagagtacatcataaagagagaggttgccaagagtgattatatgtacaatatatcgcatgtttgtacaattggttgatacgcacgcgaggttctttgccaagcctatggacttgcctacagcttccttgcataccgccattg

SEQ ID NO: 6714 - DNA, 231 bp, Zea mays
  Clone ID: MRT4577_106115C.1
ccaccacagacaggagccgaaccgtacggtctctcagctggatgagcgcagaggcaccacagccggtgaacgcccatggcatccacgaccccggcagtggcgccccgctcgacaaagacagtatctgccacccactgaggcacaagcaccttaaggagctcttgatagcactgtgagggcatgaacacaggacagttcgctctactgcagctggtgagccaccctctccat

SEQ ID NO: 6715 - DNA, 234 bp, Zea mays
  Clone ID: MRT4577_106116C.1
ttgatccgttacacctcgcggtgcttacacctctcacctatctatactttgaccccaaacatggaaagagatcgtggatgttgaccgttttcccggacgacagcacgctgtgcgtcgcgctcgagaggtcgaaggctaatctcaggaggacatgaatgacggggggattacatgtttgcggctgctgattgctgaataatctgtgctgggtttcaactgcgcccggatgcctgt

SEQ ID NO: 6716 - DNA, 602 bp, Zea mays
  Clone ID: MRT4577_106117C.1
atctattgtgattactctaataagatctccatatcccatccatcacagctagctagaagtacagactaataatctcttcttccctacatctaatatacaccagctagcatgctcatatctgctgctgtcctagcaataacggccgctcgctcctcctaccagcaggtggtcgcgatgcccggcctgtcatcggcgctacagctggtggcggatgcagcacttacgaagctccacggagaggatctgcagtaagacgtgcaaaccgacgccatcatgcctcgactacacaatgagaaatcaacagtgcgatcgctccatctctcgatgcaccgtggtgcgatcaatatatccccgcaccacgcccggatattctacgaattccacctgcaaatgcctccacacgatgacattgcgaataacgggtgccttgacgatggccaacctgcaccttatacccaaccaccgtggcaagcttgactcgcatgcatctgctgcacatcgtcgactgcaacatcaacttccgactgacgacaccatacatcatctatttcgctgctgctgctcgagatgatcctattattccacagcagcttccccctcca

SEQ ID NO: 6717 - DNA, 206 bp, Zea mays
  Clone ID: MRT4577_106118C.1
aaaataaaacaaaaactaaaaaaaacaaaactaaaaaaaaaaaaggcgctgacaccggtggaggtccagtctcaaaggcacaagcatacacaccgcctgataataatacaagcccgctctaagtgactgttgttgggcgatccgatcacgctttaaagtaggaatgcatcaagtgagattttgttgataaacaagtgtacaatagc

SEQ ID NO: 6718 - DNA, 399 bp, Zea mays
  Clone ID: MRT4577_106119C.1
gctctagccaccaaaatcaatgcatgccagtggccatacaatacaagctatgcaagtatgttcgcatcaacctacagtttcacgcaaagctactctaatagatagatagatggagatataagatgtcatgtgacacaatatcacaaggaacgatagcatagtgctagctagccaaactgcagaggtcataatttaacttaaaacaagctgaagttggggccatctttggtactcattttttgcatcttgtcttcactggtcttccttggcttctaccaccttgttggctttggaaccaaacgcaaaagcaaaggccataaatgttaatgtcatcttggcagctaactcgaacacaccccgagctctcattgcgtaccgcatccagcgcaaagggtcatc

SEQ ID NO: 6719 - DNA, 271 bp, Zea mays
  Clone ID: MRT4577_10611C.1
tcgcggacgcgtgggcagaagagcacatcggggcttcgaccactgcgtcgtgacgacaagggagaagatcacgacgcgagcgaacttgacgtggagcagcgtacgaaggagaagcgacactcgacacagcttcagacgtcaggcgcacatggctcgaccacgcaacagttagtgatgatgacgaacttggacgatggcaacggcttttcagcgtcgcgaacagagggtgcacatgaacagcgagctcggcgagactttcggcgtcgcgaac

SEQ ID NO: 6720 - DNA, 360 bp, Zea mays
  Clone ID: MRT4577_106120C.1
ctctcctctgcctgcttttcctccactgtcccacgccgcctcccgcttccccctcgcgctcgctggcggcttaagcatctaccggcgcccgcttccccctcgcgctcgctgcggcctgcttgctgcatgtcaccgtgggaggcgagattagccgatctggtgttcttgccactcggagaggtggttctggggaggcgtaggaggtacctcgttgtcgacacaccaccaaggccctcggatctccttcgtccccaccaccgtcaccgacacacgggtccagggtcagggctcctcctaatggatgctttggggcgatttggatggtgacctctgctttattacttgggatgacaaactgat

SEQ ID NO: 6721 - DNA, 201 bp, Zea mays
  Clone ID: MRT4577_106121C.1
cacgcgttcgatggtgcgccctaattcggatgactccaaatactggatgaagcgtctacaatgtcggccaggttgtcatctcatctggtgctaaaggctgttcgtctaatgaacccgaagcgttgtgtgtgcggcatgggtagcctatgatccacttgactttatctgtcataggttgcctgtgctttcagactttgctgc

SEQ ID NO: 6722 - DNA, 281 bp, Zea mays
  Clone ID: MRT4577_106122C.1
gcctggtgcactggacaaccgggttcgtatgatctaccagcacgggctgacaaggaggatcggcgggcaggtgctcctcctcctacacccttacaggacactgctcgaccccgccctttgaacgggctgattgatgttaaccaacctcaccagctggtaggggttggttctaacttacaagaccgcaaactttgtgctcccaaaattccattttgagggcttgacatctttcatgggaaaaagctttgagatattgttcctttattacacaactgtgacat

SEQ ID NO: 6723 - DNA, 360 bp, Zea mays
  Clone ID: MRT4577_106123C.1
cccacgcgtccgcctactcgagcgtacaggagggtcaggctggacattgtacgctcgacaacaagactgcgattgaggaccagttttggattcgatcggctgtgaatacccgtggttaacgaattgtcaacggcataattctagtcaatgccaatgtcaggaccaactactggacaaggctgaacatctaatacgcttcataggacgcatactatggtgagagagctcatttgtaccaaatgccgacaagctaatattgacttagaaaatcaggttatactgaagcagaacactggccaagatgaacatgatgctacatgtccataagttgagccatattgcgttaggatgatatgcatg

SEQ ID NO: 6724 - DNA, 663 bp, Zea mays
  Clone ID: MRT4577_106124C.1
cattgggtacctcgaggccgggcgggatcttttctagaggaggatctaggtttcctttctcccctcgcccgatgttgcgaatataatggtgtaagaccactgccagagcctgtgcaagtaggcccatctgctcctcagggaaagcgaagtcgacaacctctcctcctagcacacttggtcctactactacgaggtaatgtgagaagagaaaagctatggttgttcatcctcgcccctactgtataaacgccagatatgtttcctagaaatcttttacagaggggtctcgggcctatcaggtggcaatgcgatctactgaaaggatcttgcttgtgacatctacgtgtggacgagcacaaggaacctcacgggccctcacattagtgttcctgaggttatgtctcatactcactctagtgtctgttgtggcccagatctaaccgtgtcaagccaagatctcgcctattccactcaagaatcatcgtggaatgcgtctagtcccagaacaggtatgtatgatccacaggttagtttgatgttggtacgaaactgcgcagagggactacaccatggagaacatcctcacccagctcaagagagagatggctgcctcgcagaatcggaagttagtgcagcctcctgaaacggactcctactaacgaa

SEQ ID NO: 6725 - DNA, 472 bp, Zea mays
  Clone ID: MRT4577_106125C.1
cgttaaaaaatttttttttttttaggttcgttctgactctggtgttttattattgggggacaagcgatgggcccaggcccccttcttaaaaaaacccgggacagctccgggggggcataacccaagaccctggggcacggggcccccccccaagaatgcaagggccccagctccccttggcgggggcaaagttggcggcgtggggccaggccttgcgggcggcggggccacccgggggggccggaagggactcaaagggacctttggccgggacggtggcccgcgcgaaaaacccggacctggaaaacagcggggagggggcccttcctgatgcccgaggccgggaaccccggaaaaccccccgggccggccgggaccccccacgggtccaagctggccgcggggccccagggggccgccaccccccccagggggccacccggggtgaccggccccctgacgggccccaagg

SEQ ID NO: 6726 - DNA, 791 bp, Zea mays
  Clone ID: MRT4577_106126C.1
ggccggccgggccggggtcctagcaaaatcctccccgtactgagagccaaagaaacaacaaaggcaggaggccggcgaactacgcgaggaaaatttcgtttcccgggaggaagtcgggagtcgagacacgcgcgggtcaaaatcgcctccgtcgctgctgttgctgtcggaggcgagcaggaaggggaaagaacgagcttggagccttggacagctcaagaagaggggacggggaggcggcagcctgtgagaaggcacgtgacacgtgaaggagcccaagcgagggtagggaggaaccgaatcgagacatggactcggagcactggatctcgcgcctggccgccgccaagcgttactacgcggcgcagctcggccacgtcgacgatgtgcccgggatagggacggaggaggtggagatggagattgaggacgacgggggcttggagatggagatggagatggcgctggggctcggggacgcgacgtggccggatgtcgcctgcccctactgctacgaggaccatgacgtcgcgtccctctgcgtccacctcgaggaggaccacccctatgagccccactccgcgccctgccccatttgctcccaaagggtcacaagagatatgcttaaccatatgaccatgcagcatggttacctgttcaagaacggtcacaggtctcgcagatacattattcccgagagccatgcaatttctgcattgagccgagatctacggggtactcatttacgggctcttctagggggtggtcatggccacagatcaagcaatgca

SEQ ID NO: 6727 - DNA, 391 bp, Zea mays
  unsure (1)..(391): unsure at all n locations
  Clone ID: MRT4577_106127C.1
acataaacgattatcaggtgtttgatatataacaggaggtctggacaaaatagttaatatgttccccnaatggagacaacgatccagtaacccaaagttggctgggagacgacgggctanaccactcatggacttatcacaggatccttcatgtggctcatcctggggtacctggtcttggcatgggagggtgtgagtacaacaagggtgaggtcacatatgttcatcggtcaacaaggtgtggggaataatgtgcatggactcaccaaaggtgggaggtcatgtggaatgtgatggttaccaaagaggataggtaaaggtgagcattggtttttaaaggtggtcaaaattttattaggaggtactaagtataagtaggtaccaacccaat

SEQ ID NO: 6728 - DNA, 871 bp, Zea mays
  Clone ID: MRT4577_106128C.1
cctcgaggccggccggggctctcctcccactccctccacttctctgatatgtgggcaccgacctccccagcgattcccaccgcgcgcccgacggcgcccctcccgaccatggaggacatcatggcgtcgtcgcgcgcgcagagcatgcgcgtgtgccttcgcacggccgggcccttcttccgcgtcacggccacccgcggtgagggtggggaggccgtggagcttggccgcgcccagggcggcatccgcccgtggcctggcggcgccgtgctgcacctcgactccatgcgcatgacgcgcgccacgctgagcgtcccggaccgcccactgttcggcctggggatgttcctcggtgccgtcgccgtgcggcacggcttcgacgccgggtgcaagcgcgccgagctgctcgccatcaacgacacgccgctgtaccacgacaagctcgttagattttacatgaggatgggtttcaaagcagttcatgaggttgatggatcatcaatcagtgatcttggtcacatgttggtgtggggaggtaggggtactagaatggatgctgatattgaagagcttcttattaagtggggaaacagattcagactacaagactaaaaggtggatggtaatactgatatgttttgtcgagacatgcagtttttgcagcatgccgcatacaaatcttgtttggatgcaataagcttatctaggatggatctatttttacccctggtgctttgacaatgtgatcgctgctaggagcatatatggatttgtacttgtatcttagacaaaatgacactctggtccttttttcatttgaagcaataaatctttgtgctggtggtgtcagctgccaacaatgattcttgtc

SEQ ID NO: 6729 - DNA, 328 bp, Zea mays
  unsure (1)..(328): unsure at all n locations
  Clone ID: MRT4577_106129C.1
ctcgaggccggccggggactaacactccttagatcctgtagctctccccaccactccctccacttctctgatatggccgcagcgattcccaccgcgcgcccgacggcgcccctcccgaccatggaggacatcatggcgtcgtcgcgcgcgcagggcatgcgcgtgtgccttcgcacggccgggcccttcttccgcgtcacggccacccgcggtgagggtggggaggccgtggagcttggccgcgcccagggcggcatccgcccgtggnctggcggcgccgtgctgcacctcgactccatgcgcatgacgcgcgccacgctgagcgtcc

SEQ ID NO: 6730 - DNA, 318 bp, Zea mays
  unsure (1)..(318): unsure at all n locations
  Clone ID: MRT4577_10612C.1
gacagcaagcggatgcgtgaggacgcgacaacactgaagatggcatgtctgcggtgcctggctctgcactgcacgcttgaatgcaacctgcccctgccgggctgaggctgacggctgcccgctgacacatatgcccgcgctgtccctccgagcctgagagcgatgacccgtgcgcgcccctataccggtgggcaccacccagtcaacgttcgcacagtgctgcagcagcgatgaggatgatggacgtgcagtccgtggcgcaccagctgcagatgatgatgcagcttgagcgtgccgctgccgncagcagcagcctgt

SEQ ID NO: 6731 - DNA, 1977 bp, Zea mays
  Clone ID: MRT4577_106130C.1
cgccgctgtaccacgacaaggtataaccgcagtctctatccccccctcgacgaataactttcgtgagcgattgttgcttcagagtttgcagtgtagtggtcaagatcaattgttctgccattaaattcattcgctacatcaaccagtattggcagtgcggtgttgcggcccataaatttacattgattttctgtgtcaaatgttttacatggagaagcaaggtgcaaggatgcgtacggtttgaaaatactggtattgagttttgaagtatagctattgacaatatatagttccagtatttgaatagttgcttcacgcgtttttgcttgaaaactaagcatgtgtccctgttcatgtcaattcccataatcattcttggtattaccttccttttcaaaacaaaatgaataatattctttttctgctagttaatgggatgcaatgatctaaaacagcaaactgcaactactagatgtacagatttgtaagatccacaaaattcatgcttgccttttgaatgcatgatacttcccgtggtgaactcgaacaaaacatttgaaacttttttcgttgttgccagctcgttagattttacatgaggatgggtttcaaagcagttcatgaggttgatggatcatcaatcagtgatcttggtcacatgttggtgtggggaggtaggggtactagaatggatgctgatattgaagagcttcttattaagtggggaaacagattcagactacaagactaaaaggtggatggtaatactgatatgttttgtcgagacatgcagtttttgcagcatgccgcatacaaatcttgtttggatgcaataaggtacaagccttgcttcaacctttcttaacatacaattactgtacatcaagatcttgctatgtttcagttcttcagtatatccaattgaatttgttatgaagttatgtgaacacataaggttatttccttatattctaaaatagtggttagctattgcttgattgggaagtgtgattacattttccaacaagggctggccattttatcttgattgaaatggtggagtgaataaatttcctcagggaattttaggattctgaaggaggtcggcccaaaattttcccatttaaatagagctacgaggttatgagaagggtgtattaaatttttaattacccttcatctcttatacaactaatgagttgacatgtcatatttaaagtcaattcatgcacaagggaaatagtgtagtagttcctggttaaacatcctatgacatttatggactaacaattgttaggtgtgtaatggcatgacctagtgaattttttgataatagaacaaaattttagcctctatcatcagggatggtagacaggtgagcgtcaacgacaaagccaagtcataaggctcaattcttacaacctaacagggaatagaaaagcaaaaaagcaacataggttacatagatcggagtgctgtatgtgttccatttagtttctgttgtctcctctgtttctgactgcattcatgagtactcatatgcaatcctttgatggtgacatgaaactgacccaattgtcatattgtccgatggaaatcgcagcctatctaggatggatctatttttacccctggtgctttgacaatgtgatcgctgctaggaggatatatggatttgtacttgtaccttagacaaagtgacactctggtccttttttttcatttgaagcaataaatctttgtgttggtggtgtcagctgccaacaatgattcttgtcatgaaactctgcgatcatagccacttggaagagcagtttatacttaagatttttttttttttttgatattggggatactctccggcctctgcagcaagcactgacacgatgattgtttattttcttatgttggactttgacctctgaacttcattatcatgctactgtaagtgtaaggtaacaatttagtatttttgtt

SEQ ID NO: 6732 - DNA, 405 bp, Zea mays
  Clone ID: MRT4577_106132C.1
gagagaatgtttgttatctggcgaaggtatctattgatcacaagagattgtactatgatgttgccttattggtgttttatggcgtatgcgactgtgacgagcggggatgtgatatggcgggatatttgtgtaaggaaaaagactgtgaagaatgttgtaatttggcttgcattctcactgtcgtgcgatagcaaagaagcggctatgggaccgttgtgattggtttgtgatatgaagtttggaagaaggaaggtaaagttgggagataggagagtcgtgtttctgatgttggactcgtgagctatagaggttattggactagagtggttgtggaaattgtagagaaacataagggtaacatatgtataaacgacaccagcgccatggaggtaatacaaggggttg

SEQ ID NO: 6733 - DNA, 528 bp, Zea mays
  unsure (1)..(528): unsure at all n locations
  Clone ID: MRT4577_106133C.1
cgggtgtttatagactatattcataggcatgacacaagtgaacttatttggttaagccattcaggcacatttcacagaatagaaatgaccaaatgccagaatgaattattctaaggtaaaaaggaaaccatttatctaattctcagaacggtggaaacaaaggcagatgtaaacgacactgcagttccaaagtccctaaattgaggttctacttctatcattgctattggataatgacatgggaaacatggcatactttaaaactggagcggtgaagatataaaattaccaaatgaataatctaaaaatgaggcaatcaaaactcatttgtgttcctaaccaccaaatgaatgagtagcttcctcttatagcagtagttggcctacatatttttatgttctacatattcttatgaatttttaatgaagtattacacttcacanatgatgatcacaccaaagagtgataaaatggtttttgattacctatctttcctagcacatcatcatcatcagtgcaataagaata

SEQ ID NO: 6734 - DNA, 1703 bp, Zea mays
  Clone ID: MRT4577_106134C.1
tcgctttctcgctaccttcctcagctgagccgagagcaaagattagcggagccgcccttttctatttataattccctcctcctcacccctacaagaatcgagagccgggataaagtcaatcatcagctcagcctcatcccgttgcgcgtgcgtgcgtgcgtgttgcctccctcctgtgattgggttttgagagtttcttggctgtgcttgagaatggacggcgctccggtggccgagttccggccgacgatgacgcacggcggccgcttcctcctctacaacatattcggcaaccagttcgagatcacggccaagtaccagccgccgatcatgcccatcggccgcggcgcctacgggatcgtctgctcggtgatgaacttcgagacgagggagatggtggcaatcaagaagatcgcaaacgccttcgacaacaacatggacgccaagcgcacgctccgggagatcaagctcctcaggcacctcgaccacgagaacatagtaggcctccgagatgtgatcccgccggcgatcccgcagtccttcaacgacgtctacatcgccaccgagctcatggacacggacctccaccacatcatccgctccaaccaagaactctcggaagaacactgccagtacttcctgtaccagctgctgcgcggcctcaagtacatccactcggcgaacgtgatccaccgcgacctcaagccgagcaacctgctgctgaacgccaactgcgacctcaagatctgcgacttcgggctggcgcgcccgtcctccgacagcgacatgatgacggagtacgtggtgacgcggtggtaccgcgcgcccgagctgctgctcaactccaccgactactcggcggccatcgacgtctggtccgtcggctgcatcttcatggagctcatcgaccgccgcccgctcttccccggccgcgaccacatgcaccagatgcgcctcataaccgaggtgatcggaacgccgacggacgacgagctcgggttcacccggaacgaggacgcgcggaagtacatgcgccacctcccgcagttcccgcgccggccgttcgcgagcctggttcccccgggtgcagcccctcgtgctggacctcatcgagcgcatgctcaccttcaacccgctgcagaggatcacagatatacagtgactgtaagagttcacgaatggcaccatggcaggtttcgtcctcgcacttctcaccgggatctgttctgccatgcagttgcggaggcgctggcgcacccgtacctggagcggctacacgacgtcgacgacgagcccgtctgcacggagccgttctcgttcgacttcgagcggcaggctctgacagaagaccagatgaagcagctgatattcaacgaggccatcgaactcaaccccagtttccgatattagctagctagttcggacacacaatcttaattatacgtatacgtatggttcctcgtacgtggtttgtaaatagaagatcgagccggccgccggtgttattagactgaacgttgcatttgtttgttcgttgacgttcgcgctcgccatatatatcctgcctgtgaggctgtgtagtgtgctgccgtgctgcaggtttcaggtgttcgtgtaatgagctgtaccaagaataaaaggctttggactcatctggtgggctcacagtttctcggccatacagaatcacagttttgtctgcc

SEQ ID NO: 6735 - DNA, 510 bp, Zea mays
  unsure (1)..(510): unsure at all n locations
  Clone ID: MRT4577_106135C.1
ctgagggcccccactcaaggggtataaaantgggctnnncgtggagggaggggatctggttttccacccgactttcacccgggtgacagcagggtgaaggccatctttcaaccccaagcccggaatggccctgaccaaccactttaataaagctcgtctgggggaccaacaccaaggggggttccagaacccgcgtggtcaacctgatccgccaaatgtcaaaaaccaagaaaaaaaaaatatttttgcctccttatgaagggccgcccccgagggccttgggccgaaaccctttttggttgttggctaatgctgaaattaaagggaaccggggccctggacccttgattccatgctggtttggacaacggtggccttttggggttaaactaatcggtggccgcccggaaccaaatcccttaggtttaagtcctttgggccttggtaaaaatattaaccatgggggttcaattttggtggggccaaaaaaaaaaaaaaaaaaggggcctt

SEQ ID NO: 6736 - DNA, 120 bp, Zea mays
  Clone ID: MRT4577_106136C.1
ctttttaagctcggaaacagagctcaggggacttgaaagaattaatcggcctgagtgcgtcaaaaaaacctaactccagacagaggggggcccgagcatgcccaaaagtacaagacccta

SEQ ID NO: 6737 - DNA, 701 bp, Zea mays
  Clone ID: MRT4577_106137C.1
ggccgcgggttttttttttttttttttggtaaagatgcaattcttattcatgctctaaaatgctagtggtgcaaagaatcttcctgatagcctagcgtctactttccatcgtacaatagcgaaaatctctagtatgtctattcgttgtgtcataattcgttgaaatattaggtatggccttgtaaacattgcgccaattggttgtcatggtgaaccagtacagctctcatcaagcgtccggtattgaaagacaagcgctgggttttaaattcggagcgaggcacggagttcctccttggccttttcaaagtctcgctgacgctgggccttggcctcttcgtcgctgagggtcttctgttgacggcgctggttggcctccatctgtcccttgatcgtccagcggccgggttggcggtcaagcatggcctcaacatcgacgtcctcgttgggcttggggaattcggtgctcagaacggtaggtctgcgtgtgttgttctcaaactcctcggccttgagtccgggagtagagacgggggttgtttgcggtagactgagtcttgtgcacctcgctgaagtagtggttggcattgctgggagcagcagcaacactggtgggagcggtagtcattttgatgttgtttgagaaaggtttgattgagaggtagttgttttgagttgttctctttagtgatagccgatga

SEQ ID NO: 6738 - DNA, 719 bp, Zea mays
  unsure (1)..(719): unsure at all n locations
  Clone ID: MRT4577_106138C.1
cagagtcaaagcacatctactgacaaatatcctaccttaatagcaatctttttcattcaattttattttctgtaataaaggacattgtttaggtttcacgtaaatagtttcgttgattcccacaaggaaaatatacttttcacaggcttaaattgttgaagtttaaagacttgtgataagaaagaggaccttcgaactatcgaaaactcttcgaagcaacaaaaagtcgttctaaggaacgcagagtaagtttgccgaagtcacaaaaaagtcgttccaaagggagcgcagtgtaagttttctgctccaaagtcgttccaaagggaatgcagagcaaacagcgaaaagtcaacgctgataccgcctaagtaaaaggcgaagcgcgaaaagtcaacgcgaataccgctgaaagtaaaaggcgaagaagctcctaagggaggcttacagcgaaaaataaacgctgattccgctgaagtaaaaggcgaagaagctcctaagggaggcttataaaagattgtgttttattgcagggatgcgtatgtatcttcggaataaacatcatctcgcataacataacatcatcgcatcatttcgcatagcataagcatcatacatcattttgcatatggcacaaggggtagacacattatcaatctacagaagaacgctntgaaaaaagggagaaatcagtcacaaaaaagatacatcattgatcttcg

SEQ ID NO: 6739 - DNA, 400 bp, Zea mays
  Clone ID: MRT4577_106139C.1
gtaggtggggttagtgtagctgaggccaagcaagaacagcagctggttcccaaagacgccagtgagcccgagaaggaagaatgagccgacgaggcgccgggtgagaggcggcggacgcgcctgcacggacgagatgcggtgctggaagaaggcgagcggcgcgaggacggagagggcgaggaggtcccggaagacgcagaagacgacgcggttgaccccaacattgagcgcctgcttagcgatgacgtggtacccggcgtagacgagctgcacgccagccatcgtcaagtgcgcccgcctcccttcaccgtcccgttcccgcgccgccatcccccgccgatctcgatctgtctccgcctccggtgggcggtcgccgtcccttgccctttgccgaaccgcc

SEQ ID NO: 6740 - DNA, 437 bp, Zea mays
  Clone ID: MRT4577_10613C.1
ggctgtcgtagttggtgtggtggggggacatcgactcaacaagaagcaagtcaagctgagtgctgaggcacaaacaagtacaacgccattccctctctaccttgttatctttgctcctcgtgcaccagaaacagaagaagcaggcacaaagagagctagctatggccaggcgtccactgaacacaacacaagatggcgacagtggtcatgttgatggactttgagcgcgacatgggctacaggaagaacatgaaggctctttgtatggcccacgacaaggtgagcatgaggacaatctgctacgacgagatgaacaacacggagacggtgaacggaccgttgatctcacaggagggggacgactggctcaccgtcgacaccagctgggtgatgaccgacatacacgtggcatgcggctcatgctatggctcatgaag

SEQ ID NO: 6741 - DNA, 469 bp, Zea mays
  Clone ID: MRT4577_106140C.1
acatccacaccgactctctcttctcgtatggctgctcgcgaccgatctacgaatgacattggcatgcgcgtggtggccttggatagccttgcctgctctccgcatgtgctggccgccgacatataaaatacccaggtccacggggaggggccgggcggtcttctctctcctccttgctcggtactctcctcgccgcatgtccggcgtccacttgcgcgggcgcaggtagatgactacagcttcctgcatggtgatgtgggggtgcacgggcgtacactctactgccgccatcaacaagatgaacacgcgggtggtcctcgactacaacgccgtcgagattgactgcacggatagaactcgcctgactaatgctctacggcgcggactcgacggcatctgaggagcgcaatgatggcgagtgcctccggctgtcctcgggttcatacgcgcgaactggccgacctcgatg

SEQ ID NO: 6742 - DNA, 309 bp, Zea mays
  Clone ID: MRT4577_106141C.1
gccgtgttttacgctttcccaaatcttgtggtcgaagaattcgggggagtttacaggtggattggggagaggagtttaaacaataattttaatgggtttagggtttaagaacctgaggcgtacttgaatgggtggaatggttattcaaaggaatgttgatcaaaaacttttccgttttaatttaaaaaaaaaaaggatcaaaaactgtttcccttttttttttaattttgggaacaagggtttaatattaggcttaaactggccatattgttaattaaaggtttgggaaccaaatgttttattggttgt

SEQ ID NO: 6743 - DNA, 366 bp, Zea mays
  Clone ID: MRT4577_106142C.1
cagacgcttgggttcttatttgttgttgttacagcaattcgaggttttactgcgatttcgtcccaccagaagaaagttcacatactgggactatgctttttacacgtcggaactgtgcattctaaacgtacacagctcactgtcttccacatcatgttaattggcaaaatgttacgccttagaaacgctgactcgtgttcactgatcgtcactcctgtactatcaacgtacaccatttcagttatccaccgtcatgtacattccacaagacggatcaagacgcgtggtagtattcgtgctcaacaccttacatccttacctactgtacatccatgtgcctgtgcaacgtttctactcaactgtgcc

SEQ ID NO: 6744 - DNA, 564 bp, Zea mays
  Clone ID: MRT4577_106143C.1
ggtccggaattcccgggtcgacccacgcgtccggatggcgccgtcccaccgctgttgacagtcagaggatcagagggactgtacatggtgaatggaccaccacacttcacagaaagcacggtgcttcccagagaatctggaagaaattgcaaagtgtacacttttagtaaggatgggacattgtttgcctggagcaatggagaaaaagtaaatataatcaatgtcgctaacaagggactactgcactccttcgacctcccaaaagcagtttgccttgaattctcaccaaataacactgtcctggcaacgtggcagccttacactacttctaaagatggcactgctgggacgcctaacctacaactttatgacatgaaaactggagcatgtttgaaatcgttcatccagaaaaaaatgcaaaattggtgtccttcctggtcagatgatgaaattatttgtgcccggaatgttaacaacgaagttcacttctttgagaacaacaattttaacacaattgcaaataaattacatttgcaaaaagttaatgactttaatttatcacct

SEQ ID NO: 6745 - DNA, 298 bp, Zea mays
  Clone ID: MRT4577_106144C.1
atccggcctttcccggagcttagaacaaacaatggaacgtgcctactaaaagtagaggatgggcatgaactgcatttttttacgaaccaacccctctttttattggatcgggggcaatttcccctcgggacaaaacccattggggggcaaggtttaagacccctttgttcttcccagattgaggaaaaaatgcctaaaaaaccctggccgggtttggggttatctcaactggttaaaaccttgtaaaaggaaatttggtttgtaggggagtccaatgacgataaccggttttttttgc

SEQ ID NO: 6746 - DNA, 439 bp, Zea mays
  Clone ID: MRT4577_106145C.1
cggacgcgtgggtaataagcacgaagaaatcaaatgtactagaaagacagcaggttagcatgcaagatcacggtgtctgacgcatgcgccgcgaagttaaatgtgcaatcaaactctaaggaggtagatgctaagctccgggccgccattgccgccggtgctgctgtcagggttcatcatgtagaatgcctccgagtcgcgggagcccacgacgcgctcaaagcgagcgcgcatgtacatgacgtccccctcgccgccaccgcacgccgccggtatgacgcccgcgcccatagagacgggctccagcgcgcgcagcacgcgcaggtctgcggcaccgcactcgcgccgcaccgcgtacccgcagcccttgccgttgcagtacgcgcgccacgccttctcctcgaccagcttcctgcacccaccggcgccgccattggtt

SEQ ID NO: 6747 - DNA, 2896 bp, Zea mays
  Clone ID: MRT4577_106146C.1
cagacaggcccactaccattgagcgtctcatcgtcttcgccttcgcttaatcggatttattagggatcatcagggatgagagccgggggctgcacggtgcagcaggcgctgtcgccggaggccgcggtggtggtgaagcaggccgtgagcctggcgcggcgccgcgggaacgcgcaggtgacgccgctgcacgtggccagcgccatgctgcagcagcaggcgccgacggggctgctgcgcgccgcgtgcctgcagtcgcactcgcacccgctgcagtgcaaggccctggagctctgcttcaacgtcgcgctcaaccgcctgccggcctcggcctcgccgctcctcggcggccacggccacgtctactacccgccgtcgctctccaacgcgctcgtcgccgcattcaagcgcgcgcaggcgcaccagcgccggggctccgtcgacacgcagcagcagcagcagccgcccgtgctcgccgtcaagatcgagctggagcagctcgtcatctccatcctcgatgaccccagcgtcagccgcgtcatgcgcgaggccggcttctccagcacccatgtcaaggccaacgtcgagcaggcagtctcttccatcgaggcaaacaacaactcggcctccgccgccgcaaccaaaaaccctaaccctagcgcatctccacccgaagagacgaccaagcctggcaagctgctggtgctacccctcgatcaagcgcgcgacgaggacgtcgccgtcgtcctggactgcctggcgtcccgaagcaagaagcgcgtcatggtcgtcgccgagtgcgcggcctcggccgaggcgccggtgcgggcggcggtcgagaggatcaagcgcggcgaggccctgcgcggcgcgcaggtggtcagcgtcagcgtgtccaggttccgcgacctgccgagggacgaggcggagagggtgctcgtggagctccggtgcgcggtgaaggcgggcggcagggcgggcggcgtggtgctggtcgtggaggacctcgggtgggcggccgagttctgggccgggcgcggagagtccgggagggccaggtggccgtctgcctgctgctactactgcgccgtcgagcacgccgtcgccgaggtgcgcgccctggcgtgccgcggcggcgacggcgtctggctcgttggatacgggacgtaccagagctacatgaggtgcagggccgggcagccctcgctggagactctctggggcctccagacgctcgccgtccccgctggcagcctcgccttcagcctcaacttcgtcggcgacagtgcaactgcaatgacaatcaatcaccagtcgatcagctgcaagatggcaaagtgcgacgacgacagaagtgggaacgggtcggcggcgccacgttgcctgtcgcttttggacgccggcggttccggccgcttgacgggcgccgtttcgagcttctgcgccgccgactgctccgcaaccaagtgcgacgcgacggtgaagtcgagtatccccccttggcttcagcattgccgggatcatcaggagccttcccgttgtaagaaaagctcgacatgcggtggctcgccgtctcatcatcaccggacggccctaaacttctccacggtggtgtcgccgtcctcctccacggtctcgtcgtacgagcagcactaccacctgcggcaccagtcgtaccagccatggcttctcgtggctgacggcgcccgcgaggccgagcacccgtgtaacaaggccaggtgctctgccgccgtccagctacacgtcgtggacgacgaggacgggaagcctctaagcgcgataaaggtcaagtcccacgactcgagcgcgtccaatggctccgtggagtgccgctcgcggttcaaggagctgagcgccgagaacctgaaggtcctctgctccgcgctcgagaaagaggtgccgtggcaggcggagatcgtgcctgagatcgcgagcacggtcctgcagtgccgttccggcatggcgaggaggcgcgaagccgctgtttcgagctcgagaccgtcgtcaacacaggcgtgtgccaaggaggacacgtggatgctcttccacggtggcgacgccgagggcaaggcgagggtggccagggagctggcccgcctcgtcttcggctcgcgcaagagcttcgtatccatcggcggcagccgcaccaccgcgtcgtctccggcttgttggtccgacggctcttccgagcagcagcgcaagcggcctcggttgacggaggcgagcaaccacggctgtcgtcacgagagcctctacgaggccgtacgcgacaacccgcaccgcgtcatcctggtacaggacgtcgagcagggtggctgctggcggtgccagagggacattttggaggccatccaaagcggcttggtccggagccgtgccggcgacgacgacgcagcactcggcgacgccatcgtcgttctgagctgccagagccttgacgcgtggtcgacaaccacctcgccactaacgaccaagaaggcgaaggcggagagcaaggaggagccggaagaggaagagagcgcaggtgaccaccgccgcaaagaagccataactgctgccgctgcgtcgccgtcatcttcactttgctttgatctgaacatggacgttgagaaccacgacacggagagttgcttcacagatgctagtctgctcaaggcagtggatcgaacgttcttcttcagacgacctgatgagagtagcgattagcttagtgacaaatgacctatctctcttttgttcttctctgtaacgttggtcagtttcttgtagtttgtttctaagatgtttgtgttggaggaatggagcgtgcatgtggtactcttctggattgaacctgcgtggaaattaattaaaggcaagtttggatgagctaaaa

SEQ ID NO: 6748 - DNA, 803 bp, Zea mays
  Clone ID: MRT4577_106147C.1
gggctcgaatcccgtctcccgtccgcatagtgccggccctaggctacccttgaactccacccaattcgccgaactcgacgtaaccccaatggaggagggcagcaaggcgcaactgccgcccccatttcacactgaagccatggaccagctgcccccagtcctaatggaccaagacgagggtcgggaagctgcggaaaccatggaggaggaagaagccgccgccgcagacatctccgacgccgcggatcccatggacgatggggaggcggcaggagattccgcggcagccgcggaacccatggaggacgacgcgcccacgtcctccccgactccctccgcgccgtcggccaccgcggccgttgacgactccaccatcgctcggaagcgccgccgccgtaagaagcagttcccgggtatgatccccacggccggcgtccgcgtcctgcgcggctcctcctcctcatcctcccacaccgcggctcatctgtccggcgtcccccgccgccggggtcggccccccacctcctcttccctccgcctcgcccgggagctggattctgaggccctcatcgctctcgctgcggggttccccgcggactccctctccgaggacgagatcgtggccgccgtgctcccacgcattggcggcgccgagcagtctaactaccttgtcgttcgcaatcacattgtagcgctctggcgttccaatcccctctcccccgttgccgctaacgccgcgctcgcatctattcgcgccgagcatgctccccttgttgccgcggcgcattccttcttgtctgagc

SEQ ID NO: 6749 - DNA, 199 bp, Zea mays
  unsure (1)..(199): unsure at all n locations
  Clone ID: MRT4577_106148C.1
gggggccgtaaggggccctttttttcaggatcattcgggagtacacaaatagacctggggttgtccaaaaaaaacatgtttttcttgcttacataaagctagtctacttaatacgtgacacccgaatttgnacgaggaccgnaaagaaattnncaaagatacaagntttntgaaaagagtacacgacnaaagaagatta

SEQ ID NO: 6750 - DNA, 691 bp, Zea mays
  Clone ID: MRT4577_106149C.1
ccaacgaaatacatcatttgagttgcagcaggacccctcaaactcgaggaggaaaacataaggagggagtgggttttggatgaacagagctgggagtaggttcagattcagtcggtaaaagcacggaccaagaaccggttgttaatcatagcagggagagtgagaccgggagagggaccaagaaccgatcgctgagagggctgaggcgaggtgccttttcaggaagacagaaaagctcaacgcacgcactagcaatagcataagcgatacagagtgatccagccagagcaagccccaaaccctggacctggagccacgccacggctcaacgtttcagaccagagcagcagaagtatgtcttgtactgcaataatctgatgtatgtatgccaatgtcgtactgaatgcaccgctacctgaagttctgaatgcgtgcacgcatgtcttgtacttctcactcttcactcagtccacagcgatcgaagccaaccgaagcgtgccagttcccgtcggcgaggccccctccccctcagagcttatcggcgatcctgcacacggcgtcggcgaccctgtccatggcgcggaggagcgccgcccgctgctccctgtcggcgtcccaccagctcctgtgcgcctccagctgctgcgccagcgcccggttgcccctctccagggcctcgaccacctgcttc

SEQ ID NO: 6751 - DNA, 580 bp, Zea mays
  Clone ID: MRT4577_10614C.1
cctcggaaaactttttttttttttttttttttttttttttttttttttatttttttttctttttttttttttttttgttttttttttttggcccgcaggggaaaaaccccacccccctttttttttcccgggaaaaccaaaatttttcccaaggggccgcaggaacaccgcaaaaccaagggaaaccaatttggccccagttttaaattaacccccaaaaccaaaaataccccattttttttgggggaaaaaggggaaaccgggtaaaaatgggccgggcccccaaagaaaaggggggggggaccccaacccgggggggccctggaacccaacttcccgtttttatttttgaaggggggggtcccgggcaaacctttgggcagggggaatgggaccaccaaaagggggcccccccccccccaagaatggtcctggccttgggggaaaaccttaacccccccctggttttggttttgggggggaccctggccgggcaaaaaaaccaacttgggaggggggcccccaaaaataaagggccccgggggaaggccaaaaacccggccaaggcccgtttgaaaaa

SEQ ID NO: 6752 - DNA, 167 bp, Zea mays
  Clone ID: MRT4577_106150C.1
gtcctagaaagcgtgctgtccaaagtcttgaagtattttccaagttacgatctaggaaaactagctcatgggatattgtacgtcattacttcgaagagaaatcctagctcaagaagttgttcatagattcttgtctgagagtgtgcctgacaacagatgctcgtact

SEQ ID NO: 6753 - DNA, 136 bp, Zea mays
  Clone ID: MRT4577_106151C.1
gatatggttatgacatcattaacttgttagagacctatagcaactttgggggcgggttgtatcgcaaaacagtggtgcataactggctgggaaggggtgatgcacacaatgtggttggagctgccctgagatgcat

SEQ ID NO: 6754 - DNA, 615 bp, Zea mays
  Clone ID: MRT4577_106152C.1
ggctggggcaaaaatctaacccttggtttatccgggggtttaacaaaggaaggggtctaacctttcccagtaggacctttccaaaattttgtcccttcctggccccggggcccttcattactggggacccaagcgagaagcaggggccttccagtttttcctatacatttcctttccccggcccccaaaggtttggggaaggttgggatctaaccaagctacaggggttttttgaaaattttgaaagcaaggaaaaccatcggggggccttttaaacggttttgaaggaccctatacagttaatttcccagggcagttaacggggccggtttttggatcaggccgtttatccccgaccttgggcatccgtttgggaccttggaatcgatcctcgcagttagggcgacaatcaggggcagccagtttttgttactgaacttcctgatcgggcgggccattttaagcccgtccgtcctttgaagggggaggcccaggaccaccacctgaaaggacggttcgggggcaaaggacctcgtgctttggacaccggaggcaaccgaagggacccggaagccgagcttttccagaagcctgggggtaacggctctgtggggg

SEQ ID NO: 6755 - DNA, 527 bp, Zea mays
  Clone ID: MRT4577_106153C.1
taaaaaaaaaaaaaaaaaaaaaaaaaaaaaaaaaaaaaaaaagaaaaaaaaaaaaaaaaaaaataaaaaaaaaaaaaaaaaaaaaaaagaaaaaaaaaaaaaaaattaggtcagtgttggtttgggggattcttaattgactcgacgttttccttgcgatcgtctcctggttttttttgtgggctttcttaaattcttgtgggggggctggcgttatcccctcttttttcggttggtcgtagttgtggggccttccccgctttgttcgcttttccccactttttccgtttcctgttttgcttttggggcgttccgtcccgcggggctttccgttccgaagttttggtggttctgattggttgtgtggcgctctgttggttcctttttattggccgcttctgttggtttgtttccttcctttctctccttttatcttcgtttttccccttagggcccttcattgggtttttttttttttttttctagctatgggggtagggtttcccggcctcctttaacaggtttgg

SEQ ID NO: 6756 - DNA, 653 bp, Zea mays
  Clone ID: MRT4577_106154C.1
ccggccagccgagtgagcccatcctccatcgccatccaatggccgccaccgccctagagcatgagcatcctccgcgcgccgccgccctgcttctcgtccccactcaggctcagggccccggttgacaagcctgtggcggcccccatgggtcgccaggtgctgggtgcgcaagccacctacaacgcgaaactgatcacaccgcaggaagatgaggagctgcagcggcccgaccacgtctacatcctggacttactcgaggatgaaacatccacctgcccttctcctgccgtgcgatgacctgctcctcactgcgctcggaaaggtcacactctggctccgtagaccattcctaccagagcttcctcaacgacaaccagtctcgtccaccgctgggagctcacctgcgatgcataccacacctcagacgacaccatctacacacacaaggaggatgacctcctataacactagctaactatacaccgtcaggggccgtcgtcttgtgacaacacatgcagaaccgcccgagcaagatatgatacgtgtcatcacaacaattctagctatatatatgtatatgcatgcatgcatgcacttttccctgatccaaactgagtatattctaaattacaagatttaatcacaaggtgtag

SEQ ID NO: 6757 - DNA, 312 bp, Zea mays
  Clone ID: MRT4577_106155C.1
attggaaagggattttaggtttattttttattgtctttttttttcttttttattctgtattgtccagtttaacaaattttgtcacgcccaataatttgtttgttgtcagggacaaggggagaagaatatgaaaaggatgcggtcatttggcagcatgcaaacaccgctgggaaaaaaaaaaaaagatggccgcaaatggccccgtgttttgttgcacatgcccatgacgcaatgcccgccacggggggggctcggaattaaccacgccggagccgtaaatgcccgccatcgtacggctcaacccgcgcccga

SEQ ID NO: 6758 - DNA, 373 bp, Zea mays
  Clone ID: MRT4577_106156C.1
aggggggggccttttttgggtggggactcccccaccgtgggggggggcgctctctatcattagagcgcccccccgctctgcagaatttccgcaggagggttgtactgcggcttaagatgagattttaaggtgatgatgctcctgaaagaaggtccagcgtaacagtcataggcatcgtgaggttgccggcaatgtcaaactctctgtgggcagattctgagtggagatctctaataggctaatgggatgaaccttcatccattcttcttccagatagaatctcaccatgggaagtggagccattgcatgcatctaatccacaatcctctcaacctgcactaagggctgaggcgtccagcgacccccagcttca

SEQ ID NO: 6759 - DNA, 609 bp, Zea mays
  Clone ID: MRT4577_106157C.1
ttttttttttttttttttttttttttttttttttttttttttttttttttttttttttttttttttttttttttttttttttttttttttttttttttttttttttttttttttttttttccaaaaaattttttttctttatttataatcccttccaattaaaagggttaattaaggtatttgctaacactgccccccagggggggggggaaaatttcttttttaatggccgttaaaggaaaaaactaccgggttgggtattttgtcaggggttcctttacttttttcctccagcccattttttcctaaaaaaaaaaaacccccggaattttttttaaaagggaaggaacctgtttttttaattttaaggccaaaaatcccccgaagtttttggtttacctgggccccaataaaccccgaaagttccccttgggtttttttttaaaaaaagaactccaaacccaccccttttttcccttggaaccggggaaggggttccacctgcctaatttgggggaaaaattttttttgaaacccttggaatttgggaaagcctaaggggttcccccccgggtttaattgggccttaaaaaacttaacccattgccc

SEQ ID NO: 6760 - DNA, 773 bp, Zea mays
  Clone ID: MRT4577_106158C.1
gcaccacgccatcctcctgctcacgcttgcggtttgcacgcctgcatgcgcacacctcgctcaacctctccctcgcgctctctctctctctctcagtctctctgacccccaagattcctctgctcctccatctccatggctgtcgccggcttgccgtgcttcccgctctctgccgccgccgccgccccagctgtgcggctggccgcgaggccaaaccggcagcgaccaccccgacgatggacgggtgccgcaccgtcagcagaccgtggggagatgggcaacgacgacggtggtggtgaggcgttgccgccaggtcggtccgtcgtcgtgacgactacaaagcccgccgcagcagaactttctgtgaaggaggatgtcagattgtcagtattctagtttgaggatatgatgatattcccaagtgagcatggtggggtgtttcctcatcaacaagcactccaaggtataattgatgttgctccaataccgggtgtgagagaagccacaactgatgttactacaaccaaagtcatcaatggtatgttgaaggaaaggctatatagatgtacacactagtctatgtggctattttgcatctcatgtatgctatcttcatgaagtaagctagtgttgtagtatttgcacctatcttatggctgctggtggtagtagtcataactcatatctgactctagtagaagccatgtaatgaataacaatttttgccattgatcaggccaaaactaacaaactttgaataaaatgacatttcg

SEQ ID NO: 6761 - DNA, 349 bp, Zea mays
  unsure (1)..(349): unsure at all n locations
  Clone ID: MRT4577_106159C.1
aaaaaatccaaagcgaggatgccaccccaggcccaatctcctcggatgtacaaaaatcactaagggaggaggctgataaggctgtgactgcataccacaacaagcgcacactacctgcccatcaagagacttgtgcacattatcgatttagctcttagtatgtttctttccttttcatcctcaggatccatttttctggtatttgtcccaaaccatttctgttaacatattttcactaactactgtattntttgtttatcttgttttcatactttgctacctgtggtggactggtggtaaagtgaaccangaacaatttgatttaaatataccagtttggttttgattt

SEQ ID NO: 6762 - DNA, 796 bp, Zea mays
  Clone ID: MRT4577_10615C.1
gcagcggaaataaattctttattagggaaatgattacaagctacaataagtttacattatacaattatcggagtcgattacaaagagaaaaattttcaaaagagctacacttacgaattgttaaaatatttgcaagtttgaaatgcatgctattttaagtgacaatcctcaataaagaaactatagatgggatatacttattcatatgataaggccgagtccaccggcacttagggccttccacaacatagccaaattataacctgggataaacactaagtctgggctgttagatgatactcgcttggtgggcacctcccattccagtacgatcagatcattccactttgggttcattcatcaatcccactttgagattattccagttgttgttgtcctccacaatacgtgatcaatgaacgtacctggtgatcgtcgtgatagagctttcctttcccaccaaactctagaatctttcttttcgccacacatgtctaatcacgacgacgacaccggggctgcggacagtggggaaaagcagagggtatggctggtgaggttggtgtgctgcgtcctgtggccagcctccatgccgagccgagcttggggaggagatgggggaagggctaggcgaggtcgaccatggggttgagggcgaccatgggaaggaaacccctgcacacagattagaaaggaggcgtccatgggggaactgcaggcgcagccgacgagcacaggtgagctcaacaggggcgagctccagtggaggtgagggcgccagggaggagcggcggac

SEQ ID NO: 6763 - DNA, 623 bp, Zea mays
  Clone ID: MRT4577_106160C.1
tttaaatattaatagagctcctgcagagatctggggggggggggggggggtcgtccagtccttccctccaaagatccgtccgccgcacgattacagtaccgccgcacaacttccctccacctacccggaaaacgcatcgcaactacactaatgtaccaaaggaacccatgtccagcacttacaaccccaaggagcactccaacccaaagcccgcctcacgtcgtggaaagtagagtcccaaggtatgcatgtcgcacaccctctccaccgacactgacccagctgaagatgaacgaaataacaacttagtttacgagaggaggttcaagaagtaattaggataacgccgtcgagttgaccaaatactacattgtacgtattacgattactccgcggggctttaccctccagggtgtcacgcccttgaaacgcggggaccttgatgtcgtgaaggtacttacaaggaagaacttgaccgtaaccagggacacggtaacagctacgtagactacgccctctcttcgcggcacgaacggtatagcctgaattacggggagtaactttggaggttccaacgggaccctagggactacccgggataccactacgcagttgaaccaaag

SEQ ID NO: 6764 - DNA, 1440 bp, Zea mays
  unsure (1)..(1440): unsure at all n locations
  Clone ID: MRT4577_106161C.1
ctcgaggccggccgggncgggattttcaaatgaggtcccgggtcccgctcatttgctccctgtcctgtccatctgtaccgttccattccaattccatccccggaaagcgcaagccgcgggagagcggccggcgtacgtaccacgaggaccgccagcccagggccatggccgccggtctgtccggcgccgcgatgaccggcttcgtcgccaagaacccgctgctggcggccgcggcgcgccgcagggcgctgcctcccctcgccgggcgcgccctgccgttctcgccgctcaccaccgccagggccccgcgccgccgcgggctcggtaccgtcacgtgcttcgtgccgcaggacacagagcacccggcggcggcaccggccccggtcgctcccgtgccggagacggcgctggacgaggaggccagggccgcggcggcgcggcgcgtcgcggagaggaaggcgcggaagcggtccgagcggcgcacctacctggtggccgccgtgatgtccagcctcggggtcacgtccatggccgtcgccgccgtgtactatcgcttcagctggcaaatggagggcggcgcggtgccggtgagcgagatgttcggcacgtttgcgctctccgtcggcgcggcggtcgggatggagttttgggcgcggtgggcgcaccgggcgctgtggcacgcctccctgtggcacatgcacgagtcgcaccaccggccgcgcgagggcccattcgagctcaacgacgtgttcgccatcgtcaacgccgtgccggccatctccctcctcgcctacggcttcttccaccgcggcctcgtgcccggcctatgcttcggcgcgggcctcgggattacgctgttcggcatggcctacatgttcgtccacgacggcctggtccaccgccgctttccggtcggccccatcgccaacgtgccctacttccgccgagtggctgccgctcacaagatacaccacatggacaagtttgagggcgtcccgtatgggctcttcctgggaccaaaggagctggaggaggtcggtggcctggacgagctggaaaaggagctcgcgcgaatcggccggaccatctgatggattcgtccggattccggcgcggcgatctccgctccgctccgtgattccggcgcagcctcattgtcggtggggagcccacgaccagaacctccagaagaccagaagggatttggtttggatgcgcgagcgtagatcttgacctgcatttcggatggtctgtggagggctggaggcacagctcgtacctggagatgtctggtgccatggaattacttttcttttcttttttttcctgacattttcttatggctaggattctgtatataacttgtagagacatgttatgaaccaccagctcaatgaagctaaaaattcggtggttggaaacagcgctgataagaataaa

SEQ ID NO: 6765 - DNA, 326 bp, Zea mays
  Clone ID: MRT4577_106162C.1
ggggggggggggggggggaatagtaagttagtagtagtggccgtaggaaatggttgtgaggtaataaaaacgcggttacagtaaggagctggcgactacgagatgaatggcatttatacaggaggtaccgcacctaatatagaatagaataacttgtggtgagcgcccggaatggaaaatgcagaattcgagcagtacagagttaattattggcgccaactactaatccacactaacatactattatgcctagcgtatcctttgatggtggcggtcacagcataggtgtcatcgattagggcgaccgggttatcaccttggttggc

SEQ ID NO: 6766 - DNA, 515 bp, Zea mays
  Clone ID: MRT4577_106163C.1
ttgggaccctcgaggccggccgagatacacctcatggacaagtttgagggcgtcccgtatgggctcttcctgggaccaaaggagctggaggaggtcggtggcctggacgagctggaaaaggagctcgcgcgaatcggccggaccatctgatggattcgtccggattccggcgcggcgatctccgctccgctccgtgattccggcgcagccttattgtcggtggggagcccacgaccagaacctccagaagaccagaagggatttatttggtttggatgcgcgagcgtagatcttgacctgcatttcggatggtctgtggagggctggaggcacagctcgtacctggagatgtctggtgccatggaattacttttcttttctttttttcctgacattttcttatggctaggattctgtatataacttgtagagacatgttatgaaccaccagctcaatgaagctaaaaattcggtggttggaaacagcgctcaaaaaaaaaaaaaaaaaagcggcc

SEQ ID NO: 6767 - DNA, 732 bp, Zea mays
  unsure (1)..(732): unsure at all n locations
  Clone ID: MRT4577_106164C.1
taggggccttttttttttttttttttcgaaacatgaaagtgatcacagtacttctcaccaaacaaaataggaactgctcaaattatgtctgtacaggtcctaaaactgacagaatgttctactgcttgctattcactggtagtatgattaatccatcaacgctactcagaaaatctatttgtaaaagctccaagtcaagcagatagtctacactacaccttgctggcatagatttactcctggcaatctggcaggcattaaccgccgcctctcttccatccttcgatcgtccctaacctctgtcctcctccttaagcacccctgcccaaacctccgccattattgctcccgccaatcaatgcttcagcgacgatctgctttgctaaagctgcggttgtttcacctgcaaaaagggagggagggaggtcggattcattcaactcgtgtaacagtactccgatgccctacgctcgtcggcgtggcgaccgatccacgcacccacccgctcgcacccctccttttaagcccgcggggctccgggcgtttcttggtcgcgcacacggaagagcgcgagaggttcggttccatggcggcgccgcgcggccttctcgccttgttcgcggtggctgccgccgctacggcggcgacgggcgtgggcgtggacgcgctcggggtgaactggggcaccatgtccgcgcgccggctcccgnccaaggtgatggcgcgcctgct

SEQ ID NO: 6768 - DNA, 841 bp, Zea mays
  Clone ID: MRT4577_106165C.1
tgtgcacgtgtcgcaccaccggccgcgcgagggccccggcgagctcaacgacgtgttcgccatcgtcaacgccgcgccggccatctccctcctcgcctacggcttcttccaccgcggcatcgtgcccggcctctgcttcggcgcggtaagctagctagctagccacggactgtgcctggttagtttagttagttggttggtcggatgacccacctctttccggtccacatgttcgtccacagggcctggggattacgctgttcggcatggcctacatgttcgtccacgacggcctggtccaccttcgctttccggtcggccccatcgccaacgtgccctacttccgccgagtggctgccgctcacaagatacaccacatggacaagtttgagggcgtcccgtatgggctgttcctgggaccaaaggagctggaggaggtcggtggcctggacgagctggaaaaggagctcgcgcgaatcggccggaccatctgatggattcgtccggattccggcgcggcgatctccgctccgctccgtgattccggcgcagcctcatggttggggagccgacgaccagaacctccagaagggatttggtttggatgcgcgagcctagatcttgacctgcatttcggatggtctgtggaggcacagctcgtacctggagatgtctagtgccatggaattacttttcttttctttttttcctgacattttcacgccggcgtctttatttgtgaagacgtcgcacgttcgggcccctgtattactgttcttatggctaggattctgtatataacttgtagggacatgttatgaaccaccagctcaatgaagct

SEQ ID NO: 6769 - DNA, 1256 bp, Zea mays
  Clone ID: MRT4577_106166C.1
gggtacctcgaggccggccgggggtgcgtcctgttcacccacgacgcctgcgtcggccctgcccgaactggcgtgcagagcagtgctccacgacgccgccaccacctgccccagcagcggcacgctccgacaacggcgaccatggcggtgcgggtgcgggggctggggagtctgttccctgctagatccagtagatagccgactcatcgaggccctccgtgaacatcatctgcgccggtcgtctgctcggctgcagcggattaggtgagcgggattccggtagaggattgtttagtttgggattctaggttcctcgctcccgtgccggagacggcgctggacgatgaggccagggccgcggcggcgcggcgcatcgcggagaggaaggcgcgaaagcggtccgagcggcgcacctacctggtggccgccgtgatgtccagcctcggggtcacgtccatggccgtcgccgccgtgtactatcgcttcagctggcaaatggagggcggcgcggtcccgatgagcgagatgttcggcacgtttgcgctctccgtcggcgcggcggtcgggatggagttctgggcgcgtgggcgcaccaggcgctatgtcacgcctccctgtggcacatgcacgagtcgcaccaccggccgcgcgagggcccattcgagctcaacgacgtgttcgccatcgtcaacgtcgtgccggccatctccctcctcggtgacgtcgcgagcagatacaccacatggacaagtttgagggcgtcccgtatgggctcttcctgggaccaaaggagctgcaggaggtcggtgggttggacgagctggaaaaggagctcgcgcgaatcggccagaccatctgatggattcgtctggattccggcgcggcgatctccgctccgctccgtgattccggcgcagcctcatggttggggagccgacgaccagaacctccagaagggatttggtttggatgcgcgagcgtagatcttgacctgcatttcggatggtctatggaggcacagctcgtacctggagatgtctggtgccatggaattacttttcttttcttcttttcctgacattttcacgccggcgtctttatttgtggagacgtcgcacgttctggcccctgtattactattcttatggctaggattctgtatataacttgtagagacatgttatgaaccaccagctcaatgaagctaaaaattcggtggttggaaacagcgctgaaaaaacagaaggtcctccttt

SEQ ID NO: 6770 - DNA, 160 bp, Zea mays
  Clone ID: MRT4577_106167C.1
agcgcgcgccgtgcatcatcgcctcaccgttcaggacgtcgaactacgaggacgtggcgcggggaccgcgctcagacacgaatgggagggagagctccaaggacggcggatggtctctacacctggacgggcagggtagagtcaacgcatattcaggaat

SEQ ID NO: 6771 - DNA, 593 bp, Zea mays
  unsure (1)..(593): unsure at all n locations
  Clone ID: MRT4577_106168C.1
attggtacctcgaggcggcgggagtgtttctctctcaatctacctcgagctcgattttcgaatcactctgcaactccacttgcatcgaattcccggctttttcgataagggtaccctatctgcaagtagacacacgcctcaacacacgttacacgcacattacagccaaaatgcctgcatcagtcgcatccgcgccggtcaaccgcacatctgcaaagtcggctgcgtcgcgccctaggaaagccgcctcgacggcgggagccaagaacgcagcgaacggtgcctccaacggcgccgtccagcacgcttctccctacaccatcatggcgtcgaggatcgcaaaccgcgtcgccgagatggcggagaacatgactttcgtcgagcgtgaaagggcctcctcgcagcctcaaccccaacagcagcccgtgcagcgcaagccgccgcggaagctcgagatgcgcctccccaacaacggccagtcgcccaccaacatcaccttcagcgcgccgttcctcgacaacacgctctccaagctgctgngcctgcagaaccgcatgttgaccgtgtcccacgacatcgcagcgagcgaggac

SEQ ID NO: 6772 - DNA, 165 bp, Zea mays
  Clone ID: MRT4577_106169C.1
gcccatcaacgtcaagtaaagaacgccaaggagaagaggagggggaccccgagcttaccgtggatgatgccaacaaactcatcggtgcactcctcgacagggtacttgagcctgtcttcaggctgaagcacgcaggcgagctcatatcgcacgaagcggtacaga

SEQ ID NO: 6773 - DNA, 453 bp, Zea mays
  unsure (1)..(453): unsure at all n locations
  Clone ID: MRT4577_10616C.1
gtcaggtcttgctttctggtgatgctgattcttcaaattggttgttggggtgcaaaggttattcggtaaaatccttttacaaaatgttaaaaaattccaggattgtggttcctgtgaattttatgtggaaaaccagacttccacaaaaaattaaagtgttcttatggttggtcagaaataataagattctgactaaagacaatttggttaaaaggcactggcatgggaatacggactgtaacttttgtggattattagaatccatagatcacttattttttcattgccctgtggccagattcatttggagaatcatccaagttgctttcaagttgtcttctacccctaaaaacacggctgacctctttggtccttggattgataagttccataattcttgaaagaaactgattctttttggatgtggngctgctatttggtctatttgcgtac

SEQ ID NO: 6774 - DNA, 1537 bp, Zea mays
  Clone ID: MRT4577_106170C.1
caggtcctggtgctcgcgcctcccgctgccacggcggcccggcgcgccgtgcccgtgcgcgcggcgccggaggacgaggccgtggtcgccggcgacggcggcggaggggacgcggaggccgtggcggcgcgcgcggcgcggaagcagtcggagcggcggacttacctggtggcggcggtcatgtccagcctcgggatcacgtccatggccgccgccgccgtctactaccgcttcgcctggcaaatggaggggggcggcgagatcccggtgacggagatggtcggcaccttcgcgctctcggtgggcgccgcggtggggatggagttctgggcgcggtgggcgcaccgggcgctgtggcacgcgtcgctgtggcacatgcaccagtcccaccaccggccccgcgacgggcccttcgagctcaacgacgtcttcgccatcgtcaacgccgtcccggccatgtccctcctcgcctacggcttcttcaaccggggcctcgtgccgggcctctgcttcggcgcggggctggggatcacgctgttcgggatggcctacatgttcgtgcacgacggcctcgtccaccgccgcttccccgtcgggcccatcgagaacgtgccctacttccgccgcgtcgccgccgcccatcagatacatcacatggacaagttccagggcgtgccctacggcctgttcctggggcccaaggagctgaaggaggtgggaggaactgaggagctggagaaggagatcaagaagaggatcaggaggagggaggccctagacgccatccaataagacctgcttgctattgctatacacacagtgctttggctactgaatcccactgtgttctagcgttccctttttttttatgtagcctagatgtatagtatacgagtgctagcgtgtgcacgtaaaaaaccaggttgcgagggtctcaacaggcgacctgcaggaccagcgtcgtcgtggcgctgtttgtcgtcgccggaacacagtgaccgtgcagctgccgccgccagtcgccggtggaacaagacacggcacagccgaagcgtgaagacacaagacaagcggctgggggaccttccgaatcaggtccgggacacgcatgtgcatgtgacgagggatcgtcctcgcgatattgtttctccttttttcatgacgatgaacatgggatggaatggaatggaacggcactatcaatcttgtaaaattgtcgcacccgctgtaagagtttgcggcggattgtcggtccacctggcgtgctcggcccaggcggcggcggcgacgaaaatctgtccgggaaggcctcctcggaaggagttcagaaccacagccagcaaggggattgaaggcccgggacccaggtgatggtaatatggctcaatggctgtcgtcagcccatgtgcccaacctaagaaaatgtgataatgttagcaattagtaagaggttagaatcatcatgtttttcttatttcattaaattgcatgtaatatcatcatgtttttcttatgtgtcatgtcatttaatgaggat

SEQ ID NO: 6775 - DNA, 462 bp, Zea mays
  Clone ID: MRT4577_106171C.1
tcttctttttttttttttttttttttttttttgggtttttttatttcaatcggggtttaatagatagatagataaataatatattttggggggggggcacctgttaccctacaaacctacaagagatgttttaaggggacacgggccccatccactggtctgtctgcaatgcattttacctcgcctaaagcccatcccaggagtcaagcccgagagctacttctcactcagggcaaactgcaaagctaatgtggggccgaaaagtccttttcctaagcctggaccacagcccgttctttggggggatcggggcgcctgtcaccatctccacttgggggggcgaccctttaagctccacgtgaaacttcccaaaaaacagggccagagccaccgtccactccaggagcgggaactggtcccccacgcacttgcaaggcccccccccaaaggggaggaaagcaa

SEQ ID NO: 6776 - DNA, 360 bp, Zea mays
  Clone ID: MRT4577_106172C.1
tcctgttcccttccgccaatacctcaccccacccaaccgtttcatttttcatgctctcctgcacaaccaagggcaggacctttgttgggtaggccccacctgtgacccccgtatgcacacctaaccttgcgcttgatgccatttcaatctccgttgaagtagcgaccttgaacacgtagctcaaaaggtaccgttgaaggagccaagtagcgcgcgtctctttgatcattaaacggctaatgaggtggtctcttcatacgcatacatcgtcgcgccctaatactaggtggacgaaaccgttcacaaaaccttcatcacatatgagaatccattgacatgcactcaatgccaatgaaaatg

SEQ ID NO: 6777 - DNA, 428 bp, Zea mays
  Clone ID: MRT4577_106173C.1
atgccctgttacagcctacttccctccccattttctccccgcttcggctcggagctccgaatcaactgacctccgcgagtccgcgaggggtgccgtgaggctccttcctagcgcgcgcgggacgccgggttgacttcaacctccaggcgtggatttcctggcgtggagcttcgagttcccgggcgagggacacatctccatagcgctcggatctcctgctccctgacctctgagcacgcgtgagacaagtgaccacagctagaataggagcgaaccgagtgagaatgctgcacgtgatgggtggagtgagccactgaaaccaaaatacatatacactgaattgcggaggagaaaaggcgaatgaataatggggaattatgaatagaatgcttatcggagcgtcgagagaaaaaaaaagaagaggcggg

SEQ ID NO: 6778 - DNA, 249 bp, Zea mays
  Clone ID: MRT4577_106174C.1
ggcaagtggcgccgcaagaccggcgccatgcgatcttccgatcagccctgcagtgcatcctgcatcacctgctctgcactgcggtcagcttgtggggctcgcggcagcgcatatagtgctccactgactgcaatgtgcggtctgcaataatcgactacatgcccctacgctgttgccggagggtcccccactgaacaaactatgtagcgtattatatccgactggcaaatagctagaggagtcatttac

SEQ ID NO: 6779 - DNA, 190 bp, Zea mays
  Clone ID: MRT4577_106175C.1
tcgtccacgcgtccgatccaaccgtacgtgcaacagcatcaaaaccaacaagggcccaaggatcagacttacaagtcaaatcattaggatggaaggaacaggcttttgtagcattgtctactgtctgaagctttacagagctatgtttttaaactgcttcgctgattgcaatttttgttaatctacctgt

SEQ ID NO: 6780 - DNA, 277 bp, Zea mays
  Clone ID: MRT4577_106176C.1
tttccggggtggaccaacccttccgccaagcgttcggccacgcgttctatcagtcgacccttcctacttagacttatgcaacacaagcaggggggggtaaggaacttatacgctctaacaaaatatgccttggaaacatctcgaaagacttattatttttaggcacaaatgtcatcaaaaaccttggcggaggcagaaagattaaacctgctcttggacgagctgtaactgtgggagaacattagatctttcactctatttggggcggtggttttag

SEQ ID NO: 6781 - DNA, 563 bp, Zea mays
  Clone ID: MRT4577_106177C.1
ggtaccggccccccccctcgagttttttttttttttttttttttttttttttttttttttttttttttttttttttttttttttttaaaaagctatggttttacgagctgaacttacagcccaacccagtagttcagtccaaaacataaataatccaaatttaaaacatgggggccgaaaacgtctcaagaggcaaggctgcctgaaagggtccataaaaaagctacggttttaatacttggacaaaagggcctcgatcagcaggctgaaaaacttaactgcttccttgcgggaaaaaggttgacagccttttttttaacaggcttttctttttttgacaaaatcagttaaatggggcagggggaggacatgtagggattgatgcccccgggaccccggaaggggcggcccctctgttttggggcttgattcactgggaggggggaaacataaaggttgtccacatccaagcctttcacataagggttactttaagaatttttcagaaaatccaggatgaacctggttgattaaacgggccaggggccctgccctttgggggg

SEQ ID NO: 6782 - DNA, 189 bp, Zea mays
  Clone ID: MRT4577_106178C.1
ctcttctccctcttgccggtccgctatatagagagcaactgcgcacgatgttgggggaaagcaagatatgagccatctgactgaacctttcttttaacctcggagaccaaaaacgaagggcaccccgacaagctgtgcgaccaggtgtcggacgcctagcttgacgcatgtctcgcgcatgaccccgac

SEQ ID NO: 6783 - DNA, 188 bp, Zea mays
  Clone ID: MRT4577_106179C.1
tggcgtcgacgtaggaagcggcggtgtgctagtggtctcaatctcaaccccaggcgtgctcggctccggtcacccgtcgatacacgcaaccatgtcgttgatgaagaccagggagcacatggaggagatcgttatccttggacccactgtccgtgaaggagtgattgtctatggtgttgctcacttct

SEQ ID NO: 6784 - DNA, 373 bp, Zea mays
  Clone ID: MRT4577_10617C.1
gtgagtcgacgtgccgcaggtaactatcacgaccgagcacatggagaaagtgcctcgctttagctatccagttgaatcaattatgcccatgccagtacccctaaaccaatacggtgatgttcttgattcctgaaccaatattctcaagcttcagacgtgcatcagtgacatcatttactatttgttcagatagagccttctgctgatccaatttatcgtccaacttttcaatgcgcggcgtcgaatgcctttaagcagcatcgagtcaactttgcgcctttctccagacgtttaggcatgcttgaaacaggtttcgccctgttgcgcttggtgtcgttcattaagtctgaaaacgagatccctttccaccgcg

SEQ ID NO: 6785 - DNA, 376 bp, Zea mays
  Clone ID: MRT4577_106180C.1
ctcgagttctcctcaaccaaattcaaagtcacagcggcgaaactctcggcgatgtctggccgcggcaagggcgggaagggtctgggcaagggcggcgccaagcgccaccgcaaggtgctgcgtgacaacatccaaggcattaccaaacccgcgatccccaagttggccaagaagggccgccttaaacgccttttccggcttaattaacaagagaaccccggggggcttaaaaattttcttgaaaaccttattccggaacgccgtaacttaaaccaagcccccccgccgaagaactgtaaccgccttgaactttgtttaccttttaaagcgccagggccgaaccttttacggtttcggcggtaaggtcgcccttttc

SEQ ID NO: 6786 - DNA, 354 bp, Zea mays
  Clone ID: MRT4577_106181C.1
cattgagatctgtgacatggtaacttcatcgttcttcacatatatataaccctaccgcgatgcgactgcttccaaattataaaaataaacacatcacattcattgaactactacaataattaagctaacggaaattttgaatcggcttaccattctaaattcgacgcgctaacaactaacacgacaaggattctggtacagctcttgagtctagcatttgcggaataccacgctgctagctacgtgttcatccgattcttgggattcctcgatgacgcacgaaatgatgaccaccttccatcgaagtcttctactgagcactcgataagcgatgcacatggacctcgcttattt

SEQ ID NO: 6787 - DNA, 227 bp, Zea mays
  Clone ID: MRT4577_106182C.1
ccgacgggcccctgctctacaaccacgtaaggctaatggcgcgagacgcattgagcatgataccgcttgccattaatttgtgtggacacgaacactcccaaggtctcccatggatggactttctacgagaacgggcacgccttttatccaacgaagacttatctccgaaaaacagtatttcaaaagaagaattgactagtcctccgcaaaaaaaaaggctgtaatca

SEQ ID NO: 6788 - DNA, 355 bp, Zea mays
  Clone ID: MRT4577_106183C.1
tgcacattccgacaaaaaccttgcgccttcgctagctccatatgattggcccttccacatggatcacatacgggttgatcggtgttcatgagattcataaatgacttgaaagacttggccattaacagggaaactaccactcatatctgatggagatgaaaccagaggcgtgcctttgacacatctagatggcctctctttctctgaaatagctgcccaaaacgtcgcttgaaggagctatataatgacgctagtcggagctcctaggggaatcgagctcggaaccttggtcgatgttaccatggtcataactggttgctgtaccaaattgttatacgctcaatctccacacaac

SEQ ID NO: 6789 - DNA, 401 bp, Zea mays
  Clone ID: MRT4577_106184C.1
cgcccactcctccggctcttcttctccaccggcaccagtccaccacctcccacctcttgccacggtgcggccccaacaaaccacacggaagggaataatggggggccaccggccccttgggggaaagcaccccgttaaactgggccccggcggcggcgagacttggccggaagccacctgaacaaggtgaaccgtttggtggcccaggcccggcagcccgtggtcaaaatcgagggttccaccctccgcgtcggccaggtggccgccgtcgcttccgccaaggacgcttccggcgtctccgtcaagttcgacaaggaggcccgcccccgcttcaaggccagcagcgagtggatccttgactgcattgcccacggcggctacatttacggtgttaccaccgg

SEQ ID NO: 6790 - DNA, 541 bp, Zea mays
  Clone ID: MRT4577_106185C.1
gtagctggggcagctcctgctgtgggggacggcgccggcacccaagggcgatgctgcggcgcacggatcatgctccactcccgacgcgatgccgatcatggtgcgcgtgctggtaactggcatcttctgcacgctgctctactgcgtatactgctggcagaggctaaagcgcattgtcttcgcgcacattcctgcctgtacagcactgatggaggaaggtccgagctacagaccttgccggtaatggacctcgcctacttcctctttgccaccgacaactagtgcaaggacaacaaactaatcaagggcgcttttgggcctgcttacttaagcgtgctgaacggtggatccggagatcgccgacacacttgtgaaagaacggtcgactctggtctcggcagactaccggcacgagggggatctcatagtcaacctgcagctccgcactctggagcggctagctggactcgcgctccaagctcgagtacaagctggtggtagtgcgagtaccttcccaaccgttcactcgtcgccttacctt

SEQ ID NO: 6791 - DNA, 604 bp, Zea mays
  Clone ID: MRT4577_106186C.1
ctcaaggctagctaatctatatagcgtgtctcctgcccagacgccggtgaaggtgcagaagagtggccccggggcccgggccggccgtgtgcccctgcgctggtcgagaagatgcgtgccggtggcggccccgccagccgggcgctgcggcgccgtcgtccatggcgagagcgtccgccggccagcctgggtgaattgcgttcgtgccggtgtgatcgactgcgtgagtgagactggggttctgtgtgtcagtgtgtgtgtgtgttcaggtctatccgagagcaaggtacgttgaatctgcttttggtcgccgccgcctttccttttggccctgcgttgcgtcgtgtcttcgacattggttggtggccgtcgcgccaccgccacgccgtggagccaccggtgggccggccggaaccggaaggcaggccgccgccgggtgctcggctttgcctagcgccatccatcgagatctccgtgccacctactgcgtgttgcctctttgagagggcgtccccgcggccctagtagctgacctggatgggagatactagtagatagacacgcaacccaacgcttcttgtgtcttgcatatggattctgattc

SEQ ID NO: 6792 - DNA, 338 bp, Zea mays
  Clone ID: MRT4577_106187C.1
aaaaaccgcaagctcaccattacccacaaaattccaccaaaaaaaaaaaggtgggaaaaaaagcgctgttttatgtaacgggattacaaaacttttaactgaccccaaaaaagcgcattttttttttgaaccctttaaacccccccaaaaaacaatcaaaaaaaaaaggggaccccacataaaaaatttaggataaaaacccactaaaaaactttgcctaaaactaactaccaaaaacctttccatgcagctgccttgttacaaccaaacttgatttaaacccccctgcgaaaacaacagccccctggacaaaaaaggacaacagccactcacttgat

SEQ ID NO: 6793 - DNA, 1032 bp, Zea mays
  Clone ID: MRT4577_106188C.1
cggaagacttgttcctaggtgccgaatcattaatcaatcaaccccccgcccctgaaccacagcgaccatgctgatcgcctataaattaccagctccctccatgctgtagccatatcgtcccttgaagaacagctcttggagcttaattacaaaccaagtcgagctagctagccatggctatccgtcgtctattcctgtttatttctatgctgttggctatggcatgctcttgtgccatcgcttcagacccgagccttctccaagacttctgtgttgcagacaagacgtctcaagttcgcgtgaatggatttgcctgcaaagatgcgaaggacgtggtggccgaggacttcttcctctcgggccttcacaaggccggcaacaccagcaaccggcagggctccgccgtgaccgcagccaacgtggcgcagatcccggggctgaacacgatggggatctccatggtccgcatcgactacgctcccaagggactcaacccgcctcacacgcacccccgcgccaccgagatgctggccgtgctcgagggatcgctctacgttggcttcgtcacctccaatccgaacaacacgctcgtctccaaggttctcagcaagggcgatgtgttcgttttccccaagggccttgtccacttccagtacaactatggcacggacagtgctgcggctcttgccgccttgagcagccagaaccctggggtgatcactgttgccaacacagtatttggttccggtccattgatatcagatgatgtccttgccaaggcctttcaggtcgatcagaaggcagttaactggattcaagctcagttctaaaattttttttctctggtcgggtgtgcatgtttgattcgatctcgtcttattatatgaactatttttttcctctacttcccctttgtaatgtatctttaagctgttgtaagttcatttacctgcttgtcagatgtgttgagaaatgtatcccttgtttgcaaaatgaatgtaatttacttcatggtcaaaaaaaaaaaaaaaa

SEQ ID NO: 6794 - DNA, 280 bp, Zea mays
  Clone ID: MRT4577_106189C.1
tctcctcctaggaagatgccgctgcgcaaccccctcctcccactattcctcctgcccatctcggcgctcgttctggcgttgccggcatcgtgcaccgccgaccccgtccccgtgctcttcccggttgccaatgtcccagccacctccctctacaccatccccgtccggtatcgcgccagcacgtgatcgacctcgccggcccgctcctctggtccacgtgcgacgacgaccacctgctggccaacatctcctgctgctacctgctctgctagctcgccaa

SEQ ID NO: 6795 - DNA, 403 bp, Zea mays
  Clone ID: MRT4577_10618C.1
cgaacacttgcggatagagggattttatgtcttgatgatccatcaaatgatgtgggagttctggtggtgacatagcgcgaccaatatcatgtatgaaatcatactagctgtaaatacggaagacacctttgcaagccagtcgacttaacaagcctttactacataaacggtgctgatgaggccaactatattgaatataactggggtccatgactatccatggggtgatctgccaatgctggaggtactggagatcagcctctgcaaagggtttcgtgccacttacagctggtggctggatacacgactttacagatgcaaatggacgatactactgcagtgtggacgtcgcatcaaaatattacacgtaccgggctgacaaaattataaacggacgctatgc

SEQ ID NO: 6796 - DNA, 217 bp, Zea mays
  unsure (1)..(217): unsure at all n locations
  Clone ID: MRT4577_106190C.1
agtaagttctatctagnaaatattatacaggggaaagcggttcaatctacaggtggtcaaacaccccaatctacaggttggtcaatgtacacattatttctttctttcggcggtacagagcagacatgcctaaatgatcactctcgcaatgacaaacagtacagctttgtcaattgtcacagactaacaagaacatgtatgtattggtacagccgcc

SEQ ID NO: 6797 - DNA, 1869 bp, Zea mays
  Clone ID: MRT4577_106191C.1
cactggctctgcccgaggctcctgcgactttagaatatggtgccaaggcaaagtgtattatccgtgctgctcatgccgcaacacctagggacaaaatgagctccgaggagtcatctgcaatgctcaattcaagaattgttgcaatgaaccagttcatccacaagcttcaaaaagagaacaaattgagggagaaagagcgcaatgaggctcgcaatgtgctagagctgagggaagaggagctagcacaattaagagcaaagctcaacttgatagaaaggcagggaaaagctactgagaatgagatcaattcaaaagttatggagaaaacccagacattgaggggtgaactcatgaagatggaagaagcgatgtataagcagcagcaagagctctgtgtgctaaggcagcgactgcaggaggttgagcgtgaaaaggctgatagttgtcagccagggcagcaggatgtaattggaggtagactgctggcacggctatcagagatgcctgcaggccttgatcaatcaatggcaatcgacatgtctatggacttagatatgggagatcagacgtccatgcaagatgtcaaggtaataaaggaggatacttgccagcagggccaaatatggaatcacacaaccacagcagcaagtgcttgcacagggtctttggtgcaagaagatgatgtcaggctgtccgggtatcctgaaaagactgtcctcagcactgtgtttgaggagggagatgaagattatgcagagaagaaatgtggccttcaagaggaggtacgcaaggaggttgtagatgagaactttaaggtggacatagcacaacatacactttctgagccagatgatcctgcgacaaggaagcatcagattgaaaacatgttcaggctctgtggcaaccatcgtgaaatagctaagaaaccaaaggtccagtcaccagcaaaggaaatgttctgcagcgagaacaagtctccagcaaagcaagtgtttggggatcagaacaaatcgtcatcaaaccaaatttttggagatgaaaacaaggagccgtcggcatggggtgctatagagacccccatgtgcgatgttagagtgactgacagcccagtgtcttctcagctttctccaatcgtatgccaagttgtggatgcaccattatcggcgcaactgaatacatgcagtgcagtggaaggaagtgatccgagcaaggagaagaacagtcttgctggacagaaggatggcggcctcttggaagtttacataaaatgggagtctggcaacctgatcaaagggctgaagctactgcacaactcgtgcctttcagatctgaggaagtttatagaggctcacttcgaagaagcaggcagcaaacagaagcatcagttcaccttccttctcctcggggatccgtccggtgctccggtgtcccgggacacggaagcttcggtgcagataagcaggctgcctcactggaacaaccagcgggaaagctacctggcgtgccggcgcgcggccaagaagccgtctgcggaccacgtgcccttcagcccgctggacagcaatctgaacacggttcacctcgccggtgcggtgtcgcccaaggtcaaccagatgagccccagctacatccgggagctgagagcttgagctcccgtggtatctgttgcttgtccctcgtggatcgattatgttttgtgtaagatttgattgctagtctggtttgctaaccggaactactgcaacccgtgaccaagataattgcagcgaggagatgacaaatgccacctctccaaagttgtgtgcgctattttctttaccgaaaattgctggcaggtcgtctgccagacaatattaatagaggagatag

SEQ ID NO: 6798 - DNA, 301 bp, Zea mays
  Clone ID: MRT4577_106192C.1
agccgggccggaattaactgccgggtcgaccagctcactggcggccgccgccctttttttttttttgggggacttattagagacgtgcggcccgggaaaccaacagaacacaacgaattgccgacagcatgcaccaaaaccacccaccacgagaagcctagacggacccacacccagagcgaaaggaggttcccacttgagccacacacggcacacatagcgccgctacccaagataaccagaactacccaccggccacatgagacaaaaagcgagtacacccaccacggagaggtcccac

SEQ ID NO: 6799 - DNA, 354 bp, Zea mays
  Clone ID: MRT4577_106193C.1
gttgatttaacgcttatctccatttctctatgttcaccttctagcttagcacctgttgagttgttacttttcaacttttgatgtctattgcctaccccttatgctcaaaatgtgctcttctgtgctgtggggtgttgcataatgagcagtcaagccatgtttttcacttcttcacaacgttcaagccatctagctaaacagggcttaggcctgattcatgctagttcaagtgattattggataaaaatatgaagtccagctcacaaagtcccattacattgggaactgaaggtatcaccaccagagcattcggtgcaccatgcacatgtgcttcaacagaccacatgctacttg

SEQ ID NO: 6800 - DNA, 372 bp, Zea mays
  Clone ID: MRT4577_106194C.1
caaaagaaagaggaatgggttttcttataccagggggggggcccaaattcctcacctaaaaaacccaacatttttttttttcagaaaaaaaaaaaccctggcccttggttttttaaccggatattttaattaaacgggggggttggccctaaaaaaaacattccttggttgcgcccttttttttcataattccagtgaaaaaattaaacattttgtaaaaccccaaaccgcccgggtgatggggggccttaaaaaaaaaaaacctttggtgggtccccactgggaaccaacccccccccggaaaattcaccaccccttttttttacattggttttttggggacttggggtttaacccaatttccagcccctt

SEQ ID NO: 6801 - DNA, 338 bp, Zea mays
  Clone ID: MRT4577_106195C.1
gaaggaaaaattttgggttgttttttttcaattaggaaagggagcccaatgtttttttaaaaaaaatatatgcggaaatgggaaactaaaattgtaacgccccatccgttccgtttttttaatgaaaaaaaaaaggtttttttttttaaaccaaacaaatttttccctccaccttaaaaccaaatttgttactcaaaaaaccgttgggttgggggccccctaattaaaaaaaaatttggaaacactgacggtttaatcccccccccggggggggggggttattgatttcggccaacctttttgggggaaacgccaataaacccctcaaccaattgggg

SEQ ID NO: 6802 - DNA, 1047 bp, Zea mays
  Clone ID: MRT4577_106196C.1
cggactcggagctggtggagcggctgcaggaggtgctgcggtcgtcggacctcaacaccacgaccaccgctgccctgcgccgccgcctcgaggaggactttggcgccgacctctcccacaaaaaggccctcattcgggagcaggtcgacctcttcctcgccgaggtcgccgccaaggccgagccgcaggagcccaaggaggaggaggaggaatgcgaggatgagaatagcagcggcgcccggaagaagcagcggggtaatgatggcaaaaagaggggtggtggctttacaaaattatgcagtctttcaccggcacttcaagagtttgtcggcgcctctgagttagccaggacagaggttgtcaagaagctttgggcatatattcgagaaaataatcttcaagaccaaaacaataggaggaagattttgccggatgagagattgaagaagatcttcaatgtcaattccattgatatgtttcaaatgaataaagctttgaccaagcatatctggccattgaattctgagggtcctgtctctcctgatagatcaacacccaaagagaagccacaaaagagagacaggagtgaaggaaagaagcaaaagggtggctcttcaggagctggatctggttttctcgtgccccttcaactttcggatgatttagtaaaatttatcggcactggtgagagcatgttatcacgatctgatgtcgtgaagaaaatgtgggattacataaaagggaacaacctgcaggatccttctgaccggaggaaaataatctgcgatgagaagctgaaggacctatttggagtggaaacattcaccggctttactgtttcgaagctgcttgcccctcattttaccaagacgaagtagcaacctgccatccacatcttttaaaaccaaaacggcttggtaattttgtttttgcagaatgtgtaatcatggaacagttaggagctatgtgggtggtgtgatttttttttttaccaatgggagtcgatggcacttttcgaacattaccagtaaagtaggctccttcctc

SEQ ID NO: 6803 - DNA, 2088 bp, Zea mays
  Clone ID: MRT4577_106197C.1
aaccaagccaggcgaaaacccggcaccggtcgccagcccagccacagcgaccgagcagcgatggtgtcggacttggagctggtggagcggctgcaggaggtgctgcggtcgtcggacctcaacaccacgaccaccgctgccttgcgccgccgcctcgaggaggacttcggcgcagacctctcccacaaaaaggccttcattcgggagcaggttgacctcttcctcgccgaggtcgccgccaaggccgagccgcaggagcccaaggaggaggagcccgaggaggcgccggtgcctaaggaggaggagccagaggagctcgagggggtggaggaggagggcgagggggaggacgaagaaagaagaggaggaggaggaggaggaatgcgaggatgagaatagcagcagcgcccggaagaagcagcggggtaatgatggcaagaagaggggtggtggctttacaaaactatgcagtctttccccggcacttcaagagtttgtcggcgcctctgagttagccaggacagaggttgtcaagaagctttgggcatatattcgagaaaataatctgcaagaccaaaacaataggaggaagattttgcctgatgagagattgaagaagatcttcaatgtcaattccattgatatgttccaaatgaataaagctttgaccaagcatatctggccattgaattctgagggtcctgtctctcctgacagatcaacacccaaagagaagccacaaaagagagacaggagtgaaggaaagaagcaaaagggtggctcttcaggagctggatctggtcttctcgtgccccttcaactttcggatgatttagtaaaatttatcggcactggtgagagcatgttatcacgatctgatgtcgtgaagaaaatgtgggattacataaaagagaacaacctgcaggatccttctgaccggaggaaaataatctgcgatgagaagctgaaggacctatttggagtggaaacattcaccggctttactgtttcaaagctgcttgcccctcattttaccaagacgaagtagcaacccgccatccagatcttctaaaaccccaaaaggctgggtgatcatgttttgcagaatgtgtaatcatggaacagttaggagctatgtgagtggtgtgaatttttttttacctgtgggagtcggtggcacttttccgaatattaccagtaaagtaggctccttcctcgatgtctaatgaatctatcaactgtttactaaccgtcacgccctccgaaaactgtttatctgtgtggcttgtagtgcgttctttctgagtttatgggccaccattttcatgctcaaggttgcggatgatgttgtctggtcttcctcaaaagactcttatagtggacaagaagcctgaaaggcaaaggggagcacgcagctgtgctgcatcagatttgcagttctatttccacttagcgaagcctgggcaaaaagtcaattactaaacgtttcaaaccgaacaaatctgggctcactgattgagttgaacaaatctgtccctggagtttacctgtttctctgtttgtttagctcaccatttgttcatgtatttgcacgtgccccagaattatttggagtttatagtcattgagactgatgctgtggaaatagtagtaaggaagactgaactagtccctatcattatattctatgccttgtgcttattccttctagataatatcaatcctgtttttcattgctttcctccttcctttccttggctgtaggatccttctgaccggaggaaaataatctgcgatgagaagctgaaggacctatttggagtggaaacattcacaggctttactgtttcgaagctgcttgcccctcattttaccaagacgaagtagcaacctgccatccacatcttctaaaacaaaaaaggcttggtaattttgtttttgcagaatgtgtaatcatggaacagttaggagctatgtgggtggtgtgactttttttttttacctatgggagtcgatggcacttttcgaacattaccagtaaagtaggctccttcctcaatgtctaatggaagttatcaactggtcact

SEQ ID NO: 6804 - DNA, 348 bp, Zea mays
  Clone ID: MRT4577_106198C.1
ggccagtatctagactgtacatattgacgttggaccaaaacgcacaggtgcaaaagggctaaactatactgaacggtctcattatgtgactgggatgactgaaaacagtcgcgcaagctgtatataatgttcttaaaagaaagcagcatcgctgcatcactctaaaagggcttacaccatgccgacgctcagacttgacgaggggagcccgtgcagttagacatacggaacactgaactgtagcccaggaagtagacacaatgtggaccgtctacacgttgttcaccaaggacccgggcttgcagtgctcctgcaagtgccccacgatgaacgcaatgccggcctcca

SEQ ID NO: 6805 - DNA, 282 bp, Zea mays
  unsure (1)..(282): unsure at all n locations
  Clone ID: MRT4577_106199C.1
gggcgggggcgccagctgcagcgccgcgcccaggagcgccggcctcggctgcggcaccgcggcggccggcgcggaagctgagggagaggaggtnggggacggctgcgtngacgacgncgacgtcgtccttgtcgccgggaagcagctctgggggggggggggggtggccgggttgcccgggtagccgttgttgttggcgctgtgcgcgttcttcggtgcccgcggtttcgtgggctgcttcttcttgtggtgctgcgccgtgcttgtgtgtggcgcctggtc

SEQ ID NO: 6806 - DNA, 321 bp, Zea mays
  Clone ID: MRT4577_10619C.1
aaccacatatacatatatacaatacatatcccttgtgattacaagcaatatgattaatcataacatgtccgcctgcgaaggctgatgaattatcctatctaacctgaccttcatgccagtggcttgattcattatgaaaacaacctctaaccaagggcacaggatgtgatacagcctacactgactgggctgaacattactggacttcagaagccagagacatagattatacagagtctgcgcagctgggaaatcttacacactgtacagctttactgtgaggaacataagagcatggtcaacgacacagtccagcatata

SEQ ID NO: 6807 - DNA, 697 bp, Zea mays
  Clone ID: MRT4577_1061C.1
cattgggtacctcgaggccggccgggtttatacggtttttacaaagcgattcttatagaagcttgctgaaaagctggcgcgtttgacgatctacagtagcttttggtggccagaagctggaaaaagcccaaacaaacagggcttcctccagttaaatgggcaactacacttgactatgtgctgagactgcctgagaattagcagaactcgtctgcgggaattccccggtgtgacacctgccattcgcctggaccaggaatcaaacgtgagtgggcaagcctggccgctaaatcaacttctggcatcagatgaaaacaagttggtgatattccttacgttgcttgctaacttttttctataatccttcacttcaataagttgtttatgctgctcttgttgttttagtctgtctgttaaatttaggaagaacttcatgatcacatgatttttcatcaccaattataccattgttttgttgttcttatacttcagaatttaaggcttaaaattcttactatccacgtcatgacatcgcgatacagcattctagtcattggttctgcaactagatgctgtgtaggttcttgacaactgttcaattgttacgactttagaagtcagaactagtttctgaacagcttttatcaagtatttacagccagatcagctcataaaaaaaaaaaaaaaaaaagcggcc

SEQ ID NO: 6808 - DNA, 522 bp, Zea mays
  Clone ID: MRT4577_106200C.1
gcgttttgtcctgggaaaagtcagtttgcgctacataccagtctccttcatgcaaacatttaaattttcactcctgcaacccagatattctgcagtgactactctggagcaagcattctcaagtggcgcatatagactgggctggaacatatagtgggcggaatactcctgacttcggcgacggagctaagcttgcaacattttaactatgtgtgctgccatggttggaacaactgactacctttacaaagaccatcttggtggatatccctacttcatggatacaagtttgacagaattaacactgtgtactacatgtaaccctttgccaccataatactgcctctaccagaaactgtgctagaaagaggaggtttaatgaactggttctacacacatgattccatcgttactgcactgactatcatcctatgattggcggagcttgcatcccgccttaactattgcatgtattacgtgatccattcaacaacaccagtgacgttcaacgttgcacgcaac

SEQ ID NO: 6809 - DNA, 825 bp, Zea mays
  unsure (1)..(825): unsure at all n locations
  Clone ID: MRT4577_106201C.1
actcttcctctcggtctcgctagggttttggtttagcctcctgcgccgccgccgccgccgcccagcgaattcgacaagcccccgagctcgccggatccgatggccgtcacgttctccgacctccacaccgccgacgggctcaaggccctcgaggcgcacctcgccggcaagacctacatctccggcgatgggatcaccaaggacgacgtcaaggtgttcgcggcggtgcccgtgaagcccagcgccgagttcccgaacgctgcccgctggtacgacaccgtcgccgcggctgttgcttcaaggttccctggccagtcctctggggtgagtgcatcatcggctcctgctgcagctgctcctgccgcttccaaggatgaagatgacgatgatgacatggatctgtttggcgatgagaccgaggaggacaagaaagctgcagctgagcgtgaggctgccaagcctgcaaagaagaaagaaagtggcaaatcctccgtcctcatggacatcaagccatgggacgatgagactgacatgaagaagttggaggaggctgtccgcagtgttcaaatggagggtctcacctggggtgcatctaagcttatgcctgtgggttatggcatcaagaagctccagatcatgctgacgatcatcgacgaccttgtgtctgtcgacactccttattgaggaagtgctctgcgaggcgcccatcaacgagtatgtccagtcgtgtgacatcgttgccttcaacagatctagaatctttgntcgcccacctgttgctgctggattcttggtactgggattggttgatctggaaaaattatg

SEQ ID NO: 6810 - DNA, 277 bp, Zea mays
  unsure (1)..(277): unsure at all n locations
  Clone ID: MRT4577_106202C.1
cgtgctgctggngatncgnancgacgaggccctggcggngctgctgggcggcgcgactgcggctcagcggcggtgtgctcccacagccgaccctgatccgctgcccccgatgaccgcgcacaacgcgtacagcgccttcagcaaggaggccccctttcttctacggggtnctgtcggggggggggggggncctggctccctacttcttccttgngcctccccccttccgcctgcccgctgccttcttcgccttgccccctgctccggcgcccctgca

SEQ ID NO: 6811 - DNA, 431 bp, Zea mays
  Clone ID: MRT4577_106203C.1
aattcatggaggataggcagttcatgcagctttgcaagaggatacggatgcgcggcgaggatggacggcaatctgtacttcattggtggggtcaacgatgctggagaaactctcgggactgtggaggtctacaatgagaggcaaggctggtcgatctctggctgcaaatccgtagggaagagggcctttgcctgcgctatcaccgtttgacatgatcgcggatctcataccgtaccaatttttttgcaaccagcagtcatggttcgcagcctggtcctaccacgttggtccgagtataccttcttcccaaaacagtcactgggttgagagaaattttgctgcctcctcccccactacttatactactccagtccgtgaacaaatcaacttctagagttgacttgagccaaacttttgcaaacgttagaaaa

SEQ ID NO: 6812 - DNA, 375 bp, Zea mays
  Clone ID: MRT4577_106204C.1
attctcagcctctccaagcacaccacgctaagcgcactatcaccaccctggctacaatgactaccacgatattagcgctccttgcgcttctagcgctcgcagcgaacgcaacaaatgcgccaattatctcacagggctcacttgctactattgcacatattctacagccactcacaccagtgacttcaatgcattcagaacatccagcctagcaagtatacatactactagtagcgatcgcggtaagccgtccacaagaaccaatggcccaactgtaacagcaacacttgagccatctaaacctacaaacgatagaaacgcaacagcttctgcactctctgacataactgagccagctagacgctgtgaaccatg

SEQ ID NO: 6813 - DNA, 2690 bp, Zea mays
  unsure (1)..(2690): unsure at all n locations
  Clone ID: MRT4577_106205C.1
ctatctgcatccatctcttggccagcccaggcagcagctaccatccctcactctctctctctacctcacacctcaccacgagcaatatatgggcagaacacaagacacacgcgcgcaactccgcggacacaacgggggtgaggagggttttgtgccacaccgcgtacacggcgggcgccgccggcgacatggaaccggcaacggccctcgccatcgaatcggcaaacggcatgggaattggggatagcggctacgggggcgcgaaaacgctccttccgccgccggcaagaagcctcacccgcacggcgcccacggggaccccgctcgcgccggcggccagcggaggagggcacaggcagcagctaacatccctcactctcggtacctgacctgaccacgagagcaacatgggcggaggacacgacatgcacgggcagcactacggccacaacggcggcgtgaagggcttcgtgtccaacctcgtccacggcggcggcggccatggccatggaagcggctacggccatggccatggaaacggctacggccatgggaatggcggctacggcggcggccacgggtaccctcctcccgccgccgccggcgcgtaccctcatccgcacggcgcgtaccctcacccgcacggcggccacgggtaccctcctcccgccacctaccccgcgcactcggcgcactacgggcacacggggtcgtaccacaccagccacaacagctacggcggcggcggcggccaccacggcatctacggcggcggcaagcacggcgcgttcggcggcggcaaccgcaagagcggcggcggcaagttcaacaagtggaagtgaagcgaccgaaacgaatcaaaacaacaccctcagtctcgcttcgcacacgtgcacccgcacacgaatcctagtgctacataataaagtgcaagcaggcaggaggcgtacgtgtgcgagtgagtgctgctgctgcggcgaccgtgtgaccgtagtcgttatttgtgtgtacggaataaagtggtgagcgctgagacgtgcgtgtcagcctagtaataactaaaataatggccgtgttcacgtaacgtgctcgccgtatgtaccatcgtgtgtaccggccgtacgtatgtacaagccgagtgcaataatacagtactatgtgtattattaaatggcagtctaagtgatcctgctgttgccactggaatatctgatcttatgtatgagtccaaagaagtacataaagagaccaatactgtccagtctggtattgatcccgatctggcaatggcctgggcagcaggtttggaagacgatgtttgggcaaacaacgctccagctgtggataaagtaaaggacttccttgccggtgctggaactgatgctcctgatgtggatgatgaggaatacatgaactcgaggccatcagtcggctatgatgatatgtgggctaagacaattcttgaaacttacgatgcagaggaagatgatggtaggtactctggtggatcctctcctgaatcaactggttctgttgaaacctccatatcgtcccattttggaggcatgaactatccatcactgttcagttcaaaaccgtcaagtcatggggcctcacaacaaacgatacgtgaagaaccaccctcatattcgacgtcagtactacagaggaaggaatcatttgaaaacccccttggagggggtggaggacgaagtttcggatcccacgaggatgaagataagagttctggtaaccctcagtctgggaaagctttgtatgacttcacagcaggcggtgatgatgagctgagtttaaactctggagaagaagtggagattgaatacgaggtcgatggttggtattatgtgaagaaaaggaggcctggaagggatggaaagatggcaggtctggttcctgttctgtatgtgagttcatgataacagccgtgtgtatcgtttcccacacttgtggaagctgtttggagttcatgggcttaacaaaaaggcacactggaatgctcccgagagatcttcgcataaactcgtgcccgtcgtataggcacgtggccttgtggaagcaggtcatatccagtcatcttggggttcgtatgatgctgcagtgctgttcctggaaagatttacgtgttgatttgtctggacccacaccacgagtcattcaattgattgttttttgttgctaaggtggagactcttcagaggttaaaccgttcatctgtgccattttgctgccgtctgtgttcaagaaggcaatttcgtcgtctccagttcgtgttgtgcgatatatattctagtaaaattgtagaggcatcatttccccgggatatattattttggtcgtgtatggtgtgattctggtgataaaatagtgtcattaatcttgtgtatatttgtttccgggtggattatggagtatacaactataaagccgtagttttgttcagaaaaaaaaaaaaaaagcttgctaccgaagtccggcacagcaccaaacacaatttaggcaattaaggctgtttgcttcagattaaagttagccactgatgcagctgttacagctgcaatctatagattcttttgagacaaaagtcggtatggattaatgctaaaacctggctgtntggtatggtcgtcaaaaaaaaaaaaaaaaaatccgagggggggaaccgggtaccc

SEQ ID NO: 6814 - DNA, 862 bp, Zea mays
  unsure (1)..(862): unsure at all n locations
  Clone ID: MRT4577_106206C.1
ggtaccctccnggcgcaatccgcagcagagggcacggcagcagctaccatccctcactctcggtacctgacctgaccacgagagcaacatgggcggaggacacgacatgcacgggcagcactacggccacaacggcggcgtgaagggctttgtgtccaacctcgtccacggcggcggcggccatggccatggaagcggctacggccatggccatggaaacggctacggccatgggaatggcggctacggcggcggccacgggtaccctcctcccgccgccggcgcgtaccctcacccgcacggcggccacgggtaccctcctcccgccacctaccccgcgcactcggcgcactacgggcacacggggtcgtaccacaccagccacaacagctacggcggcggcggcggccaccacggcatctacggcggcggcaagcacggcgcgttcggcggcggcaagcacaagagcggcggcggcaagttcaacaagtggaagtgaagcgaccgaaacgaatcaaaacaacaccctcagtctcgcttcgcacacgtgcaccgcacacgaatcctagtgctacataataacaagcaggcaggaggcgtacgcgtactgcgttccatacgtatgagtgcgagtgagtgctgctgctgcgacgaccgtgtgaccgtagtcgttatttgtgtgtacggaataaagtggtgagcgctgagacgtgcgtgtcagcctagtaatagctaaaataatggccgtgttcacgtaacgtgctcgccgtatgtaccttcgtgtgtaccggccgtacgtatgtacgcgccgagtgtagtaatacagtactatgtgtattaaaaaaaaaaaaaaaaagcggcc

SEQ ID NO: 6815 - DNA, 1159 bp, Zea mays
  Clone ID: MRT4577_106207C.1
cattgggtacctcgaggccggccgggagcagcagcggcggcggccagcggaggagggcacaggcagcagctaacatccctcactctcggtacctgacctgaccacgagagcaacatgggcggaggacacgacatgcacgggcagcactacggccacaacggcggcgtgaagggcttcgtgtccaacctcgtccacggcggcggcggccatggccatggaagcggctacggccatggccatggaaacggctacggccatgggaatggcggctacggcggcggccacgggtaccctcctcccgccgccgccggcgcgtaccctcacccgcacggcgcataccctcacccgcacggcggccacgggtaccctcctcccgccacctaccccgcgcactcggcgcactacgggcacacggggtcgtaccacaccagccacaacagctacggcggcggcggcggccaccacagcatctacggcggcggcaagcacggcgcgttcggcggcggcaagcgcaagagcggcggcggcaagttcagcaagtggaagtgaagcgaccgaaacgaatcaaaacaacacccctcagtctcgcttcgcacacgtgcacccgcagtcccgcacacgaatcctagtgctacataataaagtgcaagcaggcaggaggcgtacgtgtgcgagtgagtgctgctgctgctgcgacgaccgtgtgaccgtagtcgttatttgtgtgtacggaataaagtggtgagcgctgagacgtgcgtgtcagcctagtaataactaaaataatggccgtgttcatgtaacgtgctcgccgtatgtacaagccgagtgtaataatacagtactatgtgtattattaaatctcatgctttgaaaaaaaaaaaaaaaaaaaaaaaaaaaaaaaaaaaaaaaaaaaaaaaaaaaaaaaaaaaaaaaaaaaaaaaaaaaaaaaaaaaaaaaaaaaaaaaaaaaaaaaaaaaaaaaaaaaaaaaaaaaaaaaaaaaaaaaaaaaaaaaaaagggggggcccttctaaaagtttaaatttttatcccccgacataggaaataaaattttttttataagggcccacaaaaataaattaaatgggcctgtttttaaaaacgcgtcatgtggaaaacccgggtgtccccaaattt

SEQ ID NO: 6816 - DNA, 864 bp, Zea mays
  Clone ID: MRT4577_106208C.1
ctagtgctacataataaaaagtgcaacgcaggcaacaaggcgggcctctgtgccggccgggagcagcggcggcggccagcggaggagggcacaggcagcagctaacatccctcactctcggtacctgacctgacctgacgacgagagcaacatgggcggaggacacgacatgcacgggcagcactacggccacaacggcggcgtgaagggcttcgtgtccaacctcgtccacggcggcggcggccatggccatggaagcggctacggccatggccatggaaacggctacggccatgggaatggcggctacggcggcggccacgggtaccctcctcccgccgccggcggcgcgtaccctcacccgcacggcgcctacccgcccgccacctaccccgcgcactcggcgcactacgggcacacggggtcgtaccacaccagccacaacagctacggcggcggcggcggccaccacggcatctacggcggcggcggcaagcacaagcgcggcggcggcatgttcggcggcggcaaccgcaagagcggtggcggcaagttcaacaagtggaagtgaagcgaccgaaacgaatcaagacaacaccctcggtctcgcttcgcacacgtgcaccgcacacgaatcctagtgctacataataaagtgcaagcaggcaggaggcgtacgtgtgcgagtgagtgctgctgctgcggcgaccgtgtgaccgtagtcgttatctgtgtgtatacggaataaagtggtgagcgctgagacgtgcgtgtcagcctagtaattactaaaataatggccgtgttcactaacgtactcgcgtatgaccatctgtgtacagccgagtgtataatacagtctat

SEQ ID NO: 6817 - DNA, 254 bp, Zea mays
  Clone ID: MRT4577_106209C.1
cgggcgggtagcttggtcgcgccgcctggatcgaccgcccagcgagtagtcgaagactcccttttcccccgggacaagagaagcatggggggggcgggaggatacggcggcttcaaggcgaaacttggggggcagggtgcccccgagctgcaagctcaaccgggtgcggatcacactctcattcaaggacgtccaggaattggggaaacgttgtgccggattaggaaagggaccccagggccagcacctgaagg

SEQ ID NO: 6818 - DNA, 901 bp, Zea mays
  Clone ID: MRT4577_10620C.1
gggtttgttttttttttttttatgttttttttcgttttcttccatcggaaatcgctgaaattatataatgaggatagcttgataagcgcacaggcacaggcacgcgtcgtcctcgttcactttcttgtacagtgacctctactatatatgagctaagcaaagaaaaagaaaaagaaaaagaagcaagcgcctcaaagggttcatattatatatatatatatttcttgtacacagtgaggtcgtgctcgcatccaccgtgaagttacaggagaaaaaggtgctctcgtcatttctcgagagcaaaacggcaggtgctttgacttgtcaattttaggcgggccgtgattgagggggtggccggtgtttgagaaagttggggagcccaatctttcttccggtcctcttgacgtcctcctgcaccttcctcctgtactccccgaaggtgaagtctctgtacggtgacggctcgccgcacgtgccgacgagcgagtcgtaggacgggcacaggaagtaggccgccgagaagcgctccgccgtggcgttggccaccaccttgtgctccacgctcttgtacaggttgttgctccaggcctgaaacagatcgccgatgttgacgatgagcgcgtcggggcggggcttgacggccacccagccggcgtccgtcatgagctgcaggcccccgacctggtcctgggacagcaccgtcaggaagtcgctgtccgtgtggggcaccagcccgaaggtgttcgccgcgaacgggcacgccgggtaccgattcagccgcaggtagcaggtggtctcgccgcaccccgccgggaacgccgccgcctcgtcgtggcccagcaggctccccgccagcgccaccgccacggtcttggccgagccgaattccgagcttacg

SEQ ID NO: 6819 - DNA, 386 bp, Zea mays
  Clone ID: MRT4577_106210C.1
ctcgagccggcgggaggtgttccccacatcgacttaagactcgctacgtatccccggattattctcgtggacgcaatggcgagtcaccctatgggcctgctttccacgcgcttccccgttaaggtcgtgcatgtgccggcaccgacggacttccacgacctccgcgagatgatgagcaagaggccattcttcgcggacacactggagctgctggagatgctgtgctacaggcgcgaccgcgtgctggacctggtgccagtggccgtgcaggcgccgaaataactcacggccgatgtcaagcgcgactacgactgtaacaccgagacgctgcccttgctcctccaaaacgctcggccagaagctatacctggaggtgatcccattcc

SEQ ID NO: 6820 - DNA, 448 bp, Zea mays
  Clone ID: MRT4577_106211C.1
ggggaaaaagcgggcgggcccccctttttttttaattttcctttccccaaaacaaaagggcccccggggaaattttcccgcccaacccaccccaggggggggaaaaaagaacttttacaaccaattttacgggccaccccccaaggggggacgaaaaaaacaaaaaaaggtttttgggacaagaacaacaggcgggggacgggaaccctgggggaaacggacaaaccacaccggaggccccccctggggacaaacccggggggcccatttgggcggggcgggcccccccgagccctggggggggagccccttttgggagaaaaaaagcccatccagggggtcgcccaccgggaaaaagcccaccgggttcgtcaaaaaattttggagccacaggggggggggggcaacccgggtcagcccccggaggggggttttaagggaccgaacg

SEQ ID NO: 6821 - DNA, 3882 bp, Zea mays
  unsure (1)..(3882): unsure at all n locations
  Clone ID: MRT4577_106212C.1
gcgggttttccgcggaaacgctactgctgctctctcctctcctctttggcgctcccaacacacaagaagaaactgacggaggagcggagcggagccgagccacggccagtgccaggagcgaaaataaaaaggggtaggagttcctcctccccaacctcacaagtaaagcagcagcagcagaccttcttgacctagcaagcaatggggccgccgttcctcgccgtcgccgtcatcgtcgccttcctggccgccgccgcgcaggccgccgaccccttcgccttcttcgactgggacgtctcctacatcaccgcctcccctctcggcgtcccgcagcaggtcatcgcagtcaacaagcagttcccaggccctatcatgaacgtcactaccaactacaatgtggtcgtcaatgtgctcaacagcttagacgagcccctgctcatcacttgggatgggatccagcagcgcaagaattgctggcaggatggggttctcggcaccacctgccccataccgccaggttggaactggacctacaacttccaggtcaaggaccagattggcagcttcttctacttcccaccccttggtatgcagcgtgccgcgggggggttcggaggtatcactgtcaacaaccgcgcggtcatctcggtcccattcgatacgcccgatggggacatcacgctcttcatcggggactggtacaagatgaaccacacgcacctgaggaagatgctcgacgacggcaaggaactggggatgccagacggtgttttgatgaatggcaaggggccatataggtataatgactcgctagtgccagatggcattgagcacgagactatcaaagttgagccaggaaaaacataccgtttccgtgcccacaatgttggtgtctccacaagcttgaacttacggattcagaatcacaacatggcccttgttgaaacagaaggttcatacacgatgaagcagaatttcactaatctcgacatccacgtgggccagtcttactcatttctggtcactatggatcagaacgcaagcagtgattattacatcgtggccagtgctaggtttgtgaacgaatcgctttggaccagagtcaccggtgttgcaattttgcaatattcaaattcaaagggaaaagcatctggtcctcttcctgatccaccaaatgatgagtatgacaaaactttctcaatgaaccaggcacgttccatcaggatgaacgtgagcactggtgctgctcgtccgaatcctcaaggatcatttcactatgggtctatcaatgtgagccaagtttacaagctgaggaatgaaccacctgttatcatcaatgggaagaaacggactacactgagtggtatctcttattccccacccgacactcctctaaggttggcagatctgtacgacaagaaggatgtctacacacttgacttccctacaatgccaattgatggaccgccagtgatcagaacatctgtcattaactccacatacaagaactttttggaaattgtatttcagaacaatgactcaactgtccagacctaccacattgatggatatgcattctgggttgtaggaatggactatggcgagtggactgagaatagccgtgggacttacaacaagtgggatggtgtttctcgttgcacgactcaggtgtttccgggagcatggactgctgtgatgctgtcacttgacagcccaggattttggaatgtacggacagaaaacctggacacgtggtatctgggtcaggagacttacatcagggtggtggatccaaatggaggctataatgttactgagatggtggctccagacaacatgctctactgtggcctcctcaaggataaacagaaggctcagaagcctcatggttcgaggtcatcagcctctgcagcaaaactgaactatcatgtgctcgcggctttggtctctttggtggtagccttggtgttgggccattgacaagaactgcctccagcttgtggtcagctgctgtttgcaggttgattaggcgtttgacagaaatactgttgagtaggtcagtcgaattcgtaggttccattcatgatttgtctggcaattgagaaaaaaaaatgctgtgccattgcgcatcttcgtccatcggaattgattaacatgctgaagaactgtgcagtagcttgagattgagcacaaatttgaagttgtcggcagctggcacccacaagcaaggcgtgtgctgtgctgcctgagtgtgttttcttgatcagtgaatttgtcgagagttggatattgttggttgtatcccatgcatcccattgcaattagtctctttatattcagtgttgtaggcaagtctttccttcgcaagtacgaaaagattgtttaagctcgtgacctgctcctctaaaaaaaaaaaaaaataaaaactcgaagtagtttcagccaaagcatggacaatcaaaggcactgtacccgttgatgcagtaatagtgtttggatcacaaaggattcctcaggtcattcattcagttatgtggatcatgttcatcctttttagagtcatctggtgcttgcaattttcctgggatcctggtggaagtaattggtggaagtaatgttacacatcggcttgagggcaagccgcattttaagaaagggggaatgttagggactgccggcccaatagcccatggtgcagcccaactatctgatgtcttgtgctacaaaggagcaaggaaacatagcagcagggaattattcagagaacagactcttggttattatgcttcttcttccttagcgtcttcctcttgtacccagatccacatttcctgtgcttctagattcttctagtgtctttctctagtatctgatcacctgcttgctgtctatcctatattctgtctcaaatcatagtttgtgttggagtgaattgagtgtgagttcgtcctcaagattgagtgctgttaacaattggttaaaatgaaaaaaaatccctataaactccattatttcccgttttcataacaaaaatcagaggcgttcgatccctggcgacccccccctccggctgtcctccccgacccccctcccccagcccggcccccacctcggaacaccagcgtcgaccagctgcactgcctctagcatggccttcgcggtgctcggnnnnnnnnnnnnnnnnnnnnnnnnnnnnnnnnnnnnnnnnnnnnnnnnnnnnnnnnnnnnnnnnnnnnnnnnnnnnnnnnnnnnnnnnnnnnnnnnnnnnnnnnnnnnnnnnnnnnnnnnnnnnnnnnnnnnnnnnnnnnnnnnnnnnnnnnnnnnnnnnnnnnnnnnnnnnnnnnnnnnnnnnnnnnnnnnnnnnnnnnnnnnnnnnnnnnnnnnnnnnnnnnnnnnnnnnnnnnnnnnnnnnnnnnnnnnnnnnnnnnnnnnnnnnnnnnnnnnnnnnnnnnnnnnnnnnnnnnnnnnnnnnnnnnnnnnnnnnnnnnnnnnnnnnnnnnnnnnnnnnnnnnnnnnnnnnnnnnnnnnnnnnnnnnnnnnnnnnnnnnnnnnnnnnnnnnnnnnnnnnnnnnnnnnnnnnnnnnnnnnnnnnnnnnnnnnnnnnnnnnnnnnnnnnnnnnnnnnnnnnnnnnnnnnnnnnnnnnnnnnnnnnnnnnnnnnnnnnnnnnnnnnnnnnnnnnnnnnnnnnnnnnnnnnnnnnnnnnnnnnnnnnnnnnnnnnnnnnnnnnnnnnnnnnnnnnnnnnnnnnnnnnnnnnnnnnnnnnnnnnnnnnnnnnnnnnnnnnnnnnnnnnnnnnnnnnnnnnnnnnnnnnnnnnnnnnnnnnnnnnnnnnnnnnnnnnnnnnnnnnnnnnnnnnnnnnnnnnnnnnnnnnnnnnnnnnnn

SEQ ID NO: 6822 - DNA, 142 bp, Zea mays
  Clone ID: MRT4577_106213C.1
ctacgcgtcctgaacatctacatcctacaccataaacacccagcccaccatccaactcggggactggtgccctttctgtgttcaagtgccgcatatactaccacgcgcctacagtggttccgggtgccgaccttaccaaggt

SEQ ID NO: 6823 - DNA, 427 bp, Zea mays
  Clone ID: MRT4577_106214C.1
aaaaaaaaaaaaaaaaaaaaaaaaaaaaaaaaaaaaaaaaaaaaaaaaaaaaaaaaaagaaaacaaggggaagccaaataaacgataccaggttatggggacgtctttagggattttttagggtggcccttaattgaacttccttgggccgttgtcattaccccggggggccccagggaaaaccctgggggtaaccccctttaatcaccttgcaaatccgccccctttcgccaccccctgtttgaccgaacaggcccccttcccccccccttcccaatcgttggtcacccttgttgcgcaccttgacccccccttggaacggcccttaacccggggggttgggggggtttgccgggggggtacccctaagccttaccgctcccttgccccccttccttgccctcttttcctttcttttttccccagg

SEQ ID NO: 6824 - DNA, 450 bp, Zea mays
  unsure (1)..(450): unsure at all n locations
  Clone ID: MRT4577_106215C.1
cccacatcaacatcgttgtcattgggcacgtagattcagggaagtctaccacgactggccatctgatctacaaatgtggcgggatcgacaagagaacaattgaaaagttcgagaaggaggctgccgagatgggaaagggctccttcaaatatgcctgggtcttggacaaacttaaagctgaacgtgagcgtggtatcaccattgatatctccctgtggaaatttgagaccagcaagtactatgttaccatcattgatgccccaagacacagagacttcatcaaaaacatgattacaggcacatcccangctgactgtgctgtcctgatcgttgctgctggtgttggtgaatttgaagccggtatctccaaaaacgggcagacccgtgaacatgcccttttgcttacacccttggtgtgaaacaactaattgttggcgttaacaaaatgga

SEQ ID NO: 6825 - DNA, 912 bp, Zea mays
  Clone ID: MRT4577_106216C.1
gatgctccttaagggagcaagtgctcatggtttgttgtgcagagcccagatcgataagcgaccctagttcacttctgcaaagagttcttaatccaccagatccagatgctattgaagaagcgctagaatcactagttcaaattcatgcattggagaagacagcttctggacgctacgaacccactttttatggctgtttgctcaatagtttgccattgtcatttgattcttctgttcttgcccttaaattttgtgagcttggtgctatccatgaaggaattctaataagcatcatgctggacatccagccgcttcctatcttgcacacttttggctatcgagaactgtgccagaagtacatagacaattatttcaagggaaatggcagtgtacaaatcggcaaaaaggaagctaccaccattggaaatctttgtgcatttcaattttgggagcgcgtttttaaggacaaacaccgtctggaatatctaaaatatgtggcgaagactcaagaaccagaagaatcacataccttccttactaaacctgaagaggaatggtgtgcagttcacaacctcctccctgcagcgtttaagaacatatctgaaatttatgatgttgttgtgatgcaactgcaccggttcaggccaagttttcttgtcaaaatcaatcctccaaagtttcttcagccttctgaattcaaccacacatgtctccatcgtgaaatactggatctagaggaggacgtggattcactctcattagagactgagaatgctcacagcgattcacagaagcgatgtgctgcaactccatatgtttcaccaactgattttgagaccagcaccattgttgaaatgctaaagacacttgtcaagatgaaaacacaacatgctgagaataaaatttcttata

SEQ ID NO: 6826 - DNA, 702 bp, Zea mays
  Clone ID: MRT4577_106217C.1
ctcgaggccggccgggggcaggcgttgatcttactttcgcaatagaaagtaacatgatggcttttgtggatgatttgctgatggaacatttcagtgacttacttcggtttgtgaggagtcatgtctcggaagacctggtatcttacaccgagaacaccaatattgccgacgttgagccagttgtgaagaactttgccatgaagtggagaattgctctagagctcatgcacaacgaagtcataacttcttgtactaaccttttgtctgggatggcaattctaaaagcagctatgactcagttgcttaatgactataacaggctctcagagtgcgtcaaaaaaatcacagggggttcaactttgaacagacatatggtttccatcacatctatttcatatgaaatcaggaaatactcaagaacactctagctgcttataatggtgtcaaagaaattctgataaaaaggttaaacaaaaatatcaccatcgagatttttttgaacattccaaccaggcaaatgctggttgcatttttagtttgatttttgaaattaggtattgtaaatgggacagctcgaacatgttttaatttttggtttgtgactattattgctcatttttatatgctacaaggctttgttgttgttgtcgttgttgttggtcagtcagactatactcgacaacagtaatctgcattattttg

SEQ ID NO: 6827 - DNA, 181 bp, Zea mays
  Clone ID: MRT4577_106218C.1
aaggagcagcacatgctcgccgctaccaccgagccgctcacagcaagggggcaggcctggccgagatctccaggcccaggagcccctcctgcctgcccatgcgccggaatgccacctgcgacgacccgatgggcggcttttattttaggagcgaggccggcggcacgaacaggggggagcg

SEQ ID NO: 6828 - DNA, 139 bp, Zea mays
  unsure (1)..(139): unsure at all n locations
  Clone ID: MRT4577_106219C.1
ctcgtgtggttatgcacnanatacctgnagnaaagtggtgccacagntgtacnagtctgantcagtaggtgtggaaaccctggtggctncntgcaacactgcttcaatcaaccaactgannggnncgaacnctgnncgt

SEQ ID NO: 6829 - DNA, 703 bp, Zea mays
  unsure (1)..(703): unsure at all n locations
  Clone ID: MRT4577_10621C.1
ccggccgggacgtccgcgcgcccgtccttccgctctagattttccttctcgtagattggaatttggatcatgtctgatctgtttgtctcctttgcgccggtgcagatatcgtcgtcgacaactgcgctatctgccgcaaccacatcatggatctatgcatcgagtgccaggcgaaccaagccagcgcgaccagcgaggagtgcactgttgcttggggagtctgtaatcatgcttttcacttccactgcatcagcaggtggcttaagactcgtcaggtgtgcccattagataacagtgagtgggagttccagaaatatggccactagttcctgggcaccctcatgtgatgttggggcttacttctagtgactgctaccactcgagtgtatttttttctgccaaacagctccatcttttactgctttggatgcttgcatgtatcacaggtcaattatcactagtagtacgtccacctgggactgtatttggattgttcgttgagaggatagtagttccattttataaatgttatgtggattttcataaaaaaaaaaaaaaaaaaaaaaaaaaaaaaaaaaaaaaaaaaaaaaaaaaaaaaaaaaaaaaaaaaaaaaaaaaaaaaaaaaaaaaaaaaaaaaaaaaaaaaaaanaaaaaaaaaaaaaaaaaaaaaaaaaaaggggggggccttttaaaagaaccaaa

SEQ ID NO: 6830 - DNA, 266 bp, Zea mays
  Clone ID: MRT4577_106220C.1
cagatgggttattcacccctgcccttctttacgatagggcggtatggttgtctggaaatgctagtgctaggcaagattcagcagtaatgcaaaggactaattcagacaggagttcagaatcgcgctctgatccttcaaccaatggtctgtacaacttgagctctgagaggcaggccagtaatagtgacctactggagcgtagatcagtttttcttgagaggaggcggaggatacggtctcaggtcagagctctgcaaaggttgggc

SEQ ID NO: 6831 - DNA, 121 bp, Zea mays
  Clone ID: MRT4577_106221C.1
cttccgggaacgcctggactatcaatcatcttgttctgaaatctccgttgccttctttgctgtatggccattaatctgaactatccacagctaatgaggtccttcgtaccaacaatagggt

SEQ ID NO: 6832 - DNA, 351 bp, Zea mays
  Clone ID: MRT4577_106222C.1
cggactcgtgggcggactcgttggccataggctcatactagacgacagagatgaaggacggaacgtcgtcgtttggaggggcgttctcttcgtgcagcgatccaaggcagtcgtttactgctaagccatactctccgtctaatctttcgtctctttatctacccatttactattcattctttcttttcgttttcttttgtttttttttcgtttttcattctcttcaattatgttcttttggttttctatttattttattcgtcttttttcttttttatatttttttttttttttttttatctttctttttttttatttttattttctttatattttttgtttgttattttt

SEQ ID NO: 6833 - DNA, 443 bp, Zea mays
  unsure (1)..(443): unsure at all n locations
  Clone ID: MRT4577_106223C.1
ttgaccccagggaggggggaggnggagcagcaacggaacgccgaagggcagcagcgggggagcnncgaagagggccaggggaacgacancncgcggaangacgacggggnggggaacgcgacgaagcacgggagggaccaggcgnagacgggggggggcgacgcgaagaagcggngccgcaagggggagggaangaagggggagcggcgaaaaaaggcgngcaagagggagggggggaacaacggaaagaagggcagggggggccgcggcagcaaggaaagcggggagaggaggcagcggcncaccgaggccaacccgagacaggggggacggcgacgcgaggagcaacagagggccccgggaggaaggcacccgaaggggggccacagacggggagaaaaggcaagccgggggaaacgcaacccggaggaggggaaccaggg

SEQ ID NO: 6834 - DNA, 491 bp, Zea mays
  Clone ID: MRT4577_106224C.1
ggggggtgggacgatttgttttttcgccaaagaccccaaaaaacatttttttgttttacaacaacccccggggggcccaaaaagacaaccccaacgcgacgacagacgcccacaaaaagggggggcacccccccccagggttgggcccgggtgccaaccacacaaacgaccgccggcggaaagccttcagcagggggcgattaaaaaaaacaacaggggacacacttagttggcgaatttgcctacttggacttggggggggcttttgcgatgggcctggagaaagcctttgtttttgggcccaaatgatcttttttcccgtttaaaagactggcgactaacgattagattggttggcgggaactttggggggagtaccggctcctcctccggggtcctggtcccattcctatgggggcggccttttagttttgggggggggggggggttaaactttttgttggaccaaaaaacccccttgggggccttgg

SEQ ID NO: 6835 - DNA, 692 bp, Zea mays
  Clone ID: MRT4577_106225C.1
ccggccgggaggccgagcgccagtaatgaagcactcgcattgcctctttttgcttttcttggtctccatcctcgtggcctcgtcggcggtcaccgtatcgcctaacaaggcggcggcacgggagaaggcctggaaggcgagggcgccggtgcagctggccgacgaggccttcctcgcccgcctctgcgacgaccgcgagcagcagcgccggcgggggcggccaccgcggatcctcccgttgtgcacgcagcttcacgccaggcgccaagcaggcgcccaccagtatcagcacctcccgatgccgccgcccagccgcaacgacgagcagatagacccgcgctacggggtgttcaagcggctcgtgccgagcgggcctaacaggctgcacaactgaaactgatgatcgcgcgacggccgtcaggttttccttgctaccttttcttgtgttagtttagttggagcctagcttgcgtgctgcactgcacgtacgcgtgcgggcaaggcttcccgatcgtggatgtatcttgcatggcatggggggcatacatgcgccatgtcctgcatagtcctccggttcgctgagaagatgaccgcgtgatgagacgaccagacgtttggcagggccgggtgataaggggaggaggatgaacgcattcagctatattgcttgcatcttcatcatgtaccttcta

SEQ ID NO: 6836 - DNA, 250 bp, Zea mays
  Clone ID: MRT4577_106226C.1
cagacaacccatcattggtggtgccctcttttagatttattattgaactatgactcagaagaaagctaaaagagggcgcccccactggtgcgaagcagcgtacgcgtggttcgtacaggaaattccggaccggttccaggaggcgtgccagcaattcctatagtgagacgaataacacacaaaactgcaaaactataaggttgctatctatcctagtatcacactactactactacaaacaatccctcta

SEQ ID NO: 6837 - DNA, 284 bp, Zea mays
  Clone ID: MRT4577_106227C.1
ggaggccattctgggatctaagactgagaccgggcggtctacaggtgagacaaccccaagactgaacacatcagggggacaaacaccaaagtatatatttagcccaaaacactgttttacgcctcgggggatcaatgcaaccggaaagaggaaatgactggactacctagacgtacggaacaagacaaaagccaatagttatacataggaacagactcatgcctatacgacaatgtttataaggcatggccattggacctgcctggcttgcaggaccagccagt

SEQ ID NO: 6838 - DNA, 360 bp, Zea mays
  Clone ID: MRT4577_106228C.1
cccacgcgtccgaaaactctatcattatagtgaactaaaatggtaacttgcttcgagtgtgggcacatgattcagtttaaataatcttcatatcgcgatcgacttataagctggtgatacaagtcaacgttacttggcagttggcatcgagtcatgcaaagcttaggtatgaactttttgtttaatgctagtgaacgtttttcatgagctttacatctgagattgaacggatgatcgcatttatttcttactctttaacttagaagtacttgagaaatcccgtgtacttagaaataaggataaaaaccgcgtctgaacggctttgtgctgattgtcctctcttttaagtgttgaaaaaca

SEQ ID NO: 6839 - DNA, 269 bp, Zea mays
  Clone ID: MRT4577_106229C.1
tcgacgaattcaccaaccaaactccactgtctccaacttttcatcgcgttgctacgcctgctctgcatgacgaccaaggcttccagaagttcttctgggtggcaactggaaatgcacggtctggcgaggacgtgaagaatattgcaccgctcttaacaaaccgggggtcgtctgtagacttcgtgaggtggcgtatgttccactttctgttgtctgcacagtcaaaggactgctgcggttggacttcacctgatgaccgcaaacatgat

SEQ ID NO: 6840 - DNA, 783 bp, Zea mays
  Clone ID: MRT4577_10622C.1
ggccgcttttttttttttttttatcattgaaatgggggattccaagccatcacagggcgaagttgctaaaaccatactgacaaattatcaaggaacacaacttgataatgaaaacaccacatgagcagcgacttcccagggggcgataaagaagaaaaggatgtggcagagatgaaaagaaaactagccatgcaattctgttgcagaaatagacaactttgtgaatacaaaaacttccttggatacaaaaggttttgctgttgcaaatacaaactaggaactctctaaagatgtggagaacgcgacagcttaatcggtttcgtcaacgaccttggtccccagccctttcaagccctcggcagggatctccgcgacggtgacaagggagtagagttcctccttggcatcctcctcatcgttcctcttgcgggcgatcctcacacgaaccctccgcggcacgctcctgatcccgctgctccagatgtgcttgttgagcttcacatcgatcctgacgtccgtggtgcccatggccttctgtgcaaacttcctgatctccttgatggcgttgggtgccttcttcttgaatgtgcagccgtggaggcgcttgtggaggttgatggtgtactccctggtgaccacctcctccttcctcgacgctcctcccttcccctgcgacatatctcctctgctccgggtgcgggtgggcggattccgctgggtagtgtggtgcggtgttgtgttccgcggcggcgcgagagcccggccggcctcgaggtacccaat

SEQ ID NO: 6841 - DNA, 355 bp, Zea mays
  Clone ID: MRT4577_106230C.1
ccggatggaaagggctttattgttggcacgattgcaggcacatgtcgtttctatgatcaatcaggtgaaagcatccagctagagaaagaattgtttgtgcaagggaagaaaaagtcagctgcctgtcggatcaacagcctaaagctatgtgcaattggttccaacagggttataatcacatcaggagattccaaaatccgagttgccaatggtgataccatccaaaagtttgaagggccttggaagtcgaaggctctgtcattaccgtctctaacatcaagacaagagatacctcatattggccggcttagattccaacgtctacatctgggacttggccatctcgagagacgtc

SEQ ID NO: 6842 - DNA, 635 bp, Zea mays
  Clone ID: MRT4577_106231C.1
gggtacctcgagccggccgtgatcctctataccaatccagcaactccagcttactacaagctcaatcctaccatcgaccacccgcttccatccctccacgcactccacctcaaccttccacagcagacttcttccccgcactcatccccttttcccccacttgactttacctacaatgcaagtgtacgctctctttgccgtcctctcgtacctctcgacctcgtacgccgcgcccctcttgatcggcatcccgggcatcgctcagatcgacgtcaagctctccaccttgcccaagggtgtgcagccgcaggacatcacattgccctcgatctcgatccccaacatcgacctcgccgccctgcccaccggtactgctggcgtcgctgccgcacagagcgccatcagcgccgcattggctgacggcaaggctgctgtggcttctcttgcgggtcaactcggtgttgccatcccctcggatgtcgtcagtgtctccatcaacaccgatcttctgacgggtacagcgaccggtgcgctgcctgttcctacaggtctcccggtcgaccccgctgcgctcctgcaaaaggtcggcgagctggttggcggtttgcagcgcccagccaaggcttcagatgccg

SEQ ID NO: 6843 - DNA, 211 bp, Zea mays
  Clone ID: MRT4577_106232C.1
aggcccactcatcatgaatgagctcgagcagctatagaaccagatagaggtatggggggggcatatcaggggagggaggaatcatatgctactctatcagctcttttatctcaaaagcaaggaacaagagttgcatgatctcaacacagacctaagggtaatgctgcatgaaacaagcccgcatattgtgatccacgacgactcctgggag

SEQ ID NO: 6844 - DNA, 365 bp, Zea mays
  unsure (1)..(365): unsure at all n locations
  Clone ID: MRT4577_106233C.1
gcagcacgcgacgaagccggaancggccggaccgaaggaccngaacaggaaaggaanggggggggaagaacanngggaacaacgancnancaaaangnncnnccaagcaaaaaaaaaaaaaaaaaaaaaaaaaaaacaaaaaaaaagaaaaaaaaaaaaaaaggaaaaagcggggggccgccgacaaaggagagcgaaaccggaaacaaacaaaggaccgagccacaggaaagagaggagcacaacagagaggagccangacaaggacggccgaaacaagggccaaagcggggcccggggggaaaaggcaacccccccacaaacccacacaacaaacgacccaaaagcaaaaggagaaaaccccg

SEQ ID NO: 6845 - DNA, 1383 bp, Zea mays
  Clone ID: MRT4577_106234C.1
tcgatctgttgtgtacggactggcgccgccacttagtcaccacccaccaaacttcacggcttcggcctttgcccttcgcattcgtatcgtatataccttgggcacgctgctgcagcggtgggtgctcggctatcttcttcaagagacaagagtggagggcgccgaagagcagcgcaggggggagatgaacagcggcgtggacacgcaggcgcgggcgttcgcggacgaggtgcgcggtagtttggagacgaaggactggatgctggacctcggccacccgctcctgaaccgcgtcgccgagagcttcgccaaggccgcggggatcggcgcagtgcaggcggtcgccagggaatcgtacttcatggcgactgaaggcgagggaggatctgtgtccggcgcgaccggcgcaaggaaacgctcgttcccggagctcaatgggacgaacagtagcagcatcaagtcggcagaggccatggtacgccacctggctacaaaatcagcccaccagatcttgtaattgttgtttgtgatttttgttcttcatcattcccgtcacaggtgaaaagcgtgagcaaagagtcgttacagtggggtaacactttccatacagcatgagtactcgaaccaatgagcatttttactacccgctggcagctggccgctgcttgatctgattctgatctgggcgtcatgcatcgtgcagggctcgcggctggggtgcactccggcctcacctacggcctcgcgggggtgcgcgggacgcacgactggaggaacagcgccgtggctggcgccatcacgggcgccgcggtcgcgctcacgtcggagcacgcgtcgcacgagcaggtcgtgcagtgcgccatcaccggcgccgcgctctccacggccgccaacgtgctctccggcatattctgagccgccggccgtgccgtgccgcttgatttccgaggattggcttatagttctgtcacccaatcattcgggtaccgtcgctcttacgcttcagtacgataacttgggagcgttgcattcatgctttcacttgcattgtcattacaacttgatgccctactttactgttagccgtataacggttttactataatttacacgctgcttagtcatatctcctggtgggccgcgtaatcaccggggcattctattaactttcaacatgatgatggggaaattatctgtgacatacccttataaacttttaacatgatgggcaaattatctgtgacatactgacaaaagagtggctttagctcttgtactatctgcggcatactacgtcgataaattttttttctattttagggaaaaaatctattttaggaggaatattgcggacagccaaattgaaaatttcaaattttaatt

SEQ ID NO: 6846 - DNA, 743 bp, Zea mays
  unsure (1)..(743): unsure at all n locations
  Clone ID: MRT4577_106235C.1
attcccgggcttgcctgccatcagttcaatttgtttttctgctattttattgcatttggtcaaagttgatttcttttacatgcataacctcatgaatgcatgtaccttctctatgtaaatatatgatctaggtatctgataaagtttgaacacctttattttggtttactagttaatagcactatttttactctgggaatgccatggcatggattattgccattcacaaagtggtcatttatgtacatagcttaggtaattttttcatgaactatcttggttttcagaaggcctttgaagcaacaatattagaacaagtcttcatatttaaactgcatgttataggttttcacatttctatagggaaaactggattattatctcctagaggatataaaacaatggcattttctgatgtattagcttcatgagaggacgaattggaaataggacatccgttgggaagataagaaacatcttatttagttcaggtggctctattggcttctgtagctttttgcctatgtagtagagtaatttcaatgctcatatagatacaacttgatgttgcttttgtattcaatccaattatcaaaaattcccctttctataagtattttcctgctaaaaagcaccatcctttatttgcagaactgttttagatgtcagtagatacacaggtgcatctacaaatgtaaagagtcagaatagnttgtgtatgatactagtttacgtctattatt

SEQ ID NO: 6847 - DNA, 1616 bp, Zea mays
  Clone ID: MRT4577_106236C.1
atggctcttgctattgtggcaccaggtaatgaaaacaagatgccaacttctcaagacttatttgcccttgacaagactggatgggaattggcactggttactgcaccaagtaaccacacaaatcaacaagtggacaatcaattggctgggggatttgacaagctattgctagacagtctttacgaagacgaggcaaggaggcagcaaatagccagtgtgacctacactggaagtactgcagcaaacccatttgaccacagtgatccatcttgcaagactcctaggcgattgggccggccgggcccgtctaaacttttggccaccaccgtctccaccctccttccaagggccacgatgagggcgcctctcctctcctcgctcctcgtcctcgccgtcgtcgccaccgtgcctctactagtcccggcggtgtgcatctcgcggcacgacaagtccgagagcaaggctgacgaagaagctgctgctactaccgttgccgccgacgagcatggctctgtcaagaccatgtccctcgacgcatacgggccactggagatggccgccaagaagcccaaggagcaggtcctgaacgcgcaagctacgccggcgacgaccgctggcgctgacacatatgaccagaaacccgttggtgaaaaacaggctgaaacggccacggcctccgctgccgatgaacaacccgacaaatacgtggaagctctagttcctgacgagaaggcggaggaatttcccgataaatatgtggaagctctagttcctgacgacaaggtggaggtgaagaagaagaaggtaaagaaggaaaagaaggacgagtctgatgattctgatgtagctacgtcttataagaagaaggagaagtctgatgattctgaggtgtctacatcttataagaagaagaagaaatctgacgattctgatgaagatgcatctcttgataagaaagaaaagaaggcgaagtttgcagcatctgacaaaaaagaaaagaggacaagtctgacaacacatcttccaagaaagaaaagaaggagagatccgccgattccgatgcatctgcgtatttcgacaaggaagagcagaaatccggcgattctgacgccgccacgtctgttgagaagcaaaagaagcagaagaaggagaaatccggtgattatttcgacaaggaaaaggaggagaaccccgaggaggacgctgcgcccgtcgacgtctccgcggacggcgtgtatgtgcctcccaaggaggagaaatccggcgaagacgccacgccggtcgacgtctccaccaccaccggcaaatacgtatcttcttcttccaaggcaaacggcaagcccacgggaggtcagcccgcagagagctccaccaccgccaccgccaccgcggatgcgtacgcgtctccaaagcagaaagtcgtcagcagccagcccatggccagcgccgctcctgacgagcttccgctggcggccaagagctccaccacctccgacgcgtacgcatctccaaggcagcagcaggtcgccagcagccagcccatgtctggtggcgctcccgacgagcttccaccggtggccaagacctctgccacgcccgaaccgtacgcatctctg

SEQ ID NO: 6848 - DNA, 317 bp, Zea mays
  Clone ID: MRT4577_106237C.1
atgtcgcgtccaccacctcccggcacccagatttgaccggcggctgccctgaccacggctccctatcctggtcaggccccggcctcctcctcctactctccatctccttgcttcgctctgtccggctaccaccacggcgtgtcctcagtttcacggcagaggctgccgaaacccaccgccgactcagggactaagacgcggacctcccccgcgaggacgctacggactggtcgaccgatactgatcccttcgagcaggggagtctcggatccaggccgcgctcgaccctgaccaccaggccgcgcacggacaccgtg

SEQ ID NO: 6849 - DNA, 272 bp, Zea mays
  Clone ID: MRT4577_106238C.1
tctctcttcctctctgcctctctctctcaggggcgactagggacagccgctgcctccctactcctggtgcccaggtatcctttgccggcgacgagcacccggtaggggtatgggaatggaggtcgttggtgctgaatcaacaccagcagaggtaaaaatatccaacggagaattgaatctattgcaagagaaggaaagcacagcaactgctaaagaacgtgaggaggcatctgtatatggttcagaaacaactgcgaatgcaactgatctga

SEQ ID NO: 6850 - DNA, 250 bp, Zea mays
  Clone ID: MRT4577_106239C.1
tcggtatttctcgataattagccgggttggtggttctcgaataaaccaggggtcctcttaacaatgtgttactcgacttggatgccaagggggccatcgcaacaaagactgatgcttacaacgacaaaaagctatgcgccgtggcgagccaaccacttagcgcagttatcccgtcggcgccggccattacgccagcggaacaagaattttcggattccaatctgttttatttaccatcgtattactacgg

SEQ ID NO: 6851 - DNA, 461 bp, Zea mays
  unsure (1)..(461): unsure at all n locations
  Clone ID: MRT4577_10623C.1
cccgcagccgaccgcgcacgccagcccaaggccggcgccnccctagggggacaggcaagccccccccggccggagaccangaagaagcaaggggcaaacacgccnggggggccgcaggcgcgagaagnaccgagcacggaccccgcacaagcacgcaaaaaagccggggggaacgcnacnagcgaagggcgnaagagcccaaaangggcgaaagaaggagcggcgggggaaancagacccagaggagaaacggaaaagggcagagganaaaccnccanccaagaagaccaccgcaaagcgcagcaancgcaanccagagggggacgaagaanggaagnnaggggggaccgagccagaaagccaggcncgcgaagggaagggcnncgacggggaacaggnngggaaacangaaaagaagggaaggaacagggncccgcggaaagaccncccgccagaggaga

SEQ ID NO: 6852 - DNA, 517 bp, Zea mays
  Clone ID: MRT4577_106240C.1
gggccccaggcaaaggcccaaattttacaaaagcaaacggggccggaattaacgggtacaagcagttcaacccggcggggacaacgggggggccaaggaaacaaacgaggcgaggggggccggggcaaggggggcccgaaacagactacaaggcatgcccgggcccaaaaaaaactaaacgggggggagcggggaaagagcgctggatgctaactgggctgggctgcccaccccgggggggggcgggttcggcttttaaaaaacggggggggggagccgcccgggggggggggaaaaaaaaaacaactcgtaaaaaacccccgggaggcccccccccatgagggggcccacccaaaacacccactgggagccccacccccaactgacgaggggggggcccaaggacacgggggggttcatggacccccccccaaaggccccccccaccaagaagttggcccccaccaaaaaacccatggcaatgggggcgaaggggcccaagctgcccttttttggg

SEQ ID NO: 6853 - DNA, 297 bp, Zea mays
  unsure (1)..(297): unsure at all n locations
  Clone ID: MRT4577_106241C.1
accggctccgggaattcctcggggtcgactccacgtcgnntccgtgcatcacggtagggcggatctggcntnctgacaccagtctnntcgtcttcttttacgacgaccgtnncaagagccggcgcggaaggggtggtgtcatcaggtnttctcgcgacccgtcctgggacaactgctgcgactnctcggcttacccacgttatcgacgccntngagtccgtacaagggactcnttgccatggcttgctngctgcaaggaatctcngnntcgctgggtggccccnaacggcaagggac

SEQ ID NO: 6854 - DNA, 425 bp, Zea mays
  Clone ID: MRT4577_106242C.1
ctgatcaagaaatgaatcgtgggttaggacatggtgaagaggagaatatggaagaaggaacagatgtacatctttgtgatattaatggcaaagaagtagatgaaaccttgttagaaaatagtgtgtgtacagatactgaagaaggatgtgctcattgtaaccaggaagaccagaattcatctgacagcaccaacagaggaaaaagtgatgtagataacatgtgttatacatcttgtgacgaggttaggtctgaatcattttcaggcgatgaagttgttatcaaaactacaattgatagcactgccagaacatttgttaatttgaaagatgagcaggttttgtcttcagaaatgtatacccgcatgcagcactcaatgcaaaaagatggtactgctgcttttcagacatctgggggtgttcctggt

SEQ ID NO: 6855 - DNA, 243 bp, Zea mays
  Clone ID: MRT4577_106243C.1
cacaactcgtaagcagcgagcgtctctcctcttcctctcccacgcaccgcgccaaggaaggcagagagagatcgcagctcctcttctctccgtcggtggtgcggttgaccgccctcctcgagcgagatctcgcttgaatccctccgagaatctgttaaaagtctaatcggcaaaatggtgaagatcttgtacaaccgtgccggctaagttcgttggccaaccaatgggggtaattgccttaaa

SEQ ID NO: 6856 - DNA, 466 bp, Zea mays
  Clone ID: MRT4577_106244C.1
tttccaacgttcgctattctacacgggggggctccactttttttttttttttagtcacacattaggccccctgcattgggctgacggggacaggggcctgctacaacatgtggcagcaggctcgataccagcagcaacagccgaaccctctgtcttcacgagaaacggcacacggttcacgacaatatgtatgatgcgggacttacacatcacccccgacagcgtgcttaacgaactccgcgggggtgacgaaactggcatggccaacgcacactatgctcactacctcccccttgttgttcctgttcacgaagccagcaatcctcctggtgttaggcccctttaccttggacgacaccatctgcatgtcactaaatcatgagctttcagatttaggcggtactgatcgtacgcgtaggcagggacacaaccttccttacgcgattattcggctgcggctgctctg

SEQ ID NO: 6857 - DNA, 954 bp, Zea mays
  Clone ID: MRT4577_106245C.1
acgcatgggtcgacgcaacaccctatcggacgcgtgggcggacgcgtgggcggacgcgtgggcggacgcgtgggcggacgcgtgggcggacgcgtgggcggacgcgtgggcacaaacgcgcctccgtaccatccgtcgccgccggcgcaccgcgatggctgcctccgccacggccgcgaggcctctcgccgggaccgccgtcccgctcccgctctcgacgcggacgcggcctgccagggtcgccttgctctccctgattcctcctgctccggcccagcgccttgctctcaggcgtggcgcgtggctctcacccccggagcgcagccggtcggtgcggtgcctggcggctatgagcccggagatgcgggcaacgctggacaaggtcgtaggctctagcaaggtggtgctgttcatgaagggcaccaaggacttcccgcagtggggcttttcccacaccgtcgtgcagatcctgcgctcgctcgacgtgcccttcaaaacgctcgacgtgctcgccaacgaggcgctccggcaggggctcaaggagtactccagctggcccaccttcccgcagctctacatcgacggcgagttcttcggtggatgtgacatcaccgttgaggcatacaagagtggagaactgcaggaaactctagagaaagcaatgtgctcatagagaaaagaaattagaaccaggagtgcacgacatacagttaatcaaaatgttatagtatttgctgtacaattcaggcaatgttaagctggagataccaaagttgtaggcaatccatgtccaaatgctcagtgcacttggtttggaacacatttgttttctgcaatttgtgattaatcatccagctttaacccaaaaaaaaaaaaaaaaaattgcagcagatgcagcaaacagcctagcaccctgctactgctttaacgtcctgcctggagtcattaaatcag

SEQ ID NO: 6858 - DNA, 987 bp, Zea mays
  Clone ID: MRT4577_106246C.1
gggtacctcgaggccggccggactgattcacccgcatcaggttttcacgtccacagccctcagcccaccacaaacgcgcctccgtaccatccgtcgccgccggcgcaccgcgatggctgcctccgccacggccgcgaggcctctcgccgggaccgccgtcccgctcccgctctcgacgcggacgcggcctgccagggtcgccttgctctccctgattcctcctgctccggcccagcgccttgctctcaggcgtggcgcgtggcttccacccccggagcgcagccggtcggtgcggtgcctggcggctatgagcccggagatgcgggcgacgctggacaaggtcgtaggctctagcaaggtggtgctgttcatgaagggcaccaaggacttcccgcagtgcggcttctcccacaccgtcgtgcagatcctgcgctcgctcgacgtgcccttcgagacgctcgacgtgctcgccaacgaggcgctccggcaggggctcaaggagtactccagctggcccaccttcccgcagctctacatcgacggcgagttcttcggtggatgtgacatcaccgttgaggcatacaagagtggagaactgcaggaaactctagagaaagcaatgtgctcatagagaaaagaaattagaaccaggagtgcacgacatacagttaatcaaaatgttatagtatttgctgtacaattcaggcaatgttgagctggagataccgaagttgtaggcaatccatgaccaaatgctcagtgcacttggtttggaatacatttgttttctgcaatttgtgattaatcatccagctttaacccagatggtatgctaccagattgcagcagatgcagcaaacagcctagcaccctgctactgctttaataaatcctgcctggagtcattaaatcagttttgcaaacatacaaatgtacatgaaacttggggtttctgaaaggtttttatcctccagtgtagccattgac

SEQ ID NO: 6859 - DNA, 308 bp, Zea mays
  Clone ID: MRT4577_106247C.1
gatcagactcacaatgcactcgtctatacagccgccagcgggcttttgtaagacacggatcactgggaacacatgtaacacggggctgtatgccccatgagctgggccctcacgaccagcgcagccatggcattccaccttacgaacagctcgaggacagctgcgcttgatctgacccacctgctcatggcgcatcttgcccatgctgagatgacacagctgaaccttgccctacaagagcccattggcgtgctgcatagcccaccatgaggtctgtcaccacacctatcataatgcctgccggggca

SEQ ID NO: 6860 - DNA, 408 bp, Zea mays
  Clone ID: MRT4577_106248C.1
gtgagaagtacactgagggcacggagacacgcacttcaagactctcgtttcagcctagacatgaggccacacgtggcggactcgactatccctgctgacataccatgacagtacgacatgtgctacacattcactcgagagcactacgcgtgctagtgctgagcacatggcagcccttgacttactggcagtgctctacaccgtggttttcctgctatgtagcttggatggcacgacgtcctatgttggcgctaacgctgactattactggtacatatttaacattattggatgggctatatatacaatcatcttcaaggctattgattatgtactcataaaaaaaaaaggctatgatcgaagatgagctactgatctgtgcgcatactatcactgctagatagaaca

SEQ ID NO: 6861 - DNA, 381 bp, Zea mays
  Clone ID: MRT4577_106249C.1
cccaacgagggcacgaaccttaaaaaactataatggacattgtttttgcccaatggagtatgagaagggtacttaaaaaccttttaaaaaaaaaaaagggccccatttcagatttaaaaaaacccccccacagttacatttttaagggctcctcgtctggctgttacaaaaaaagcgacccaacggctttcaaaaatttttttaatggctagccccaggtaaactactttcaggcaggggtgcatgggacacccccttttttgccagcccaattttagaaagaactaaattgccccccattggttttaggtttctgacattatttgcggaaagcttcggaacttccttttctaggtgagaagggttgtttacagggaaccg

SEQ ID NO: 6862 - DNA, 443 bp, Zea mays
  unsure (1)..(443): unsure at all n locations
  Clone ID: MRT4577_10624C.1
gccgcgcccctgtcctgcaaccgtggnaggcgcgccgacctnnccgacggcattccgcgngcctccttccgtgctggtaggacaaagcaggagaagggcccccacctggcgtnngcttggtattccatttaattaatatttccccgncccaatattatttctttggttggngaaaattaaatgcgtactaaaggtggaaaaatggtgggggaaaagatgtgacgctcgagccatggtcggtcgagttgtccgtagtgtgactgtgatgttggcgttggatggatgctacctgtggcgggcggtgctnangcgagaggaagacgacggcgatgtcaggtaaggttagtttgggtgagacgttgtgtggtggatgtgtggggtttgtcgtgtggtgtttgcctccgggctgcgctgtgtnggctgttttttttttttttttttgt

SEQ ID NO: 6863 - DNA, 514 bp, Zea mays
  Clone ID: MRT4577_106250C.1
gcaggcattatttgcaaaggttttcagcaattgagtacgaatattctcttttttttttggaaaaaaaaaaaaaaaaaaaaaaagggcggccccccttttttttttttttttttttttttttgaaactaaaacctttttccttgctcccacaaccccgaacaaaacattgaaaactacaccttcagccaccttaaccgggccccccaaaattaccctggttagactttacaaacaatggcacctacagcccacaagaatccttttttcctcaaaaaaacaagaaaagggcccaccctctcataattcacaggttaagattatgatgtcagcgcaacagggcatccacgtccactttatccttccaatgggggctggtggattttctctcctgcccggactgttgtatggcccatgcttgggacatccagggaacatttcttttcccatggaaaaacttgctgatccgaactcttttgtcaatgcaccccaatgctcaattctggacaaggaaaaa

SEQ ID NO: 6864 - DNA, 2320 bp, Zea mays
  Clone ID: MRT4577_106251C.1
ccacgcgtccgctcggcatgagagcaggcggttaattgtaaggatgaccttgcacagttctacctgatggactgcataatccaagtccttccagatgaataccatttacaaacattggaaacattattgaatgcatttccccagcttcagccaagtcgttattgtcggattgtctaactatgctgcctcaagtcctgaactgttgccagagttcttgcaagttgaagcttttgctaagttcagtaatgctattggaaaggtgatagaagcccaacctgacatgccagttgttggagccataactctatatgtatcacttctgacctttactctccgtgtacatcctgatcggcttgattatgttgaccaagtgctgggtgcatgtgtcaagaaactttcaggcaaggcaaaacttgaagatagcagggcaacaaagcaaattgttgcacttcttagtgctcccctggaaaaatatagcaatattgttactgcattagaactttcaaactatcctcgggttatggattatcttgataatgctacaaccaaagtgatggctgtggtaataattcaaagcataatgaaaaacacaacctgcatatctacttctgacaagattgaggcactattcgatttaattaaggggctgataaaggatatggatggagctcaagatgatgagcttgatgaagaagactttaaggaggaacagaactctgtagcacgtctcattcacatgttgcacaatgatgagcctgaagagatgttgaagatcttatgtactgtacagaagcatatacttcagggaggccccaaacgtttaactttcactgtgccttctttagtattctccgctcttaagctggtcaggcgattacaaggccaagatggagatgtcactggggaggatgttcctgcaactccaaagaaaatattccagatattgcatcagactattgacgcactttcttgtgttccttccccagagttagctctgagactatatttgcattgtgcagaggctgccaatgactgtgatttggaaccagttgcttatgagttctttactcaagcgttcatattatatgaagaagaaatcacggattcaaaggctcaaatcactgcaattcacctgataattgggacccttcagcggatgaatatatttggggtggaaaatagagacaccctcactcacaagacaacagggtactcagcaaaacttctcaagaagcctgatcaatgccgagcagtttatgcgtgttcacatcttttttggactgatgaccaagatggtataatggatggtgaaagggttctcctttgtttgaagcgtgccttgagaatcgcaaatgctgctcaacagatggctagtgctacaagggggagcagtggatctgtaaccctatttattgaaattttgaacaagtacttgtacttctttgagaaaggaattccacaaatcacaaacactgtgattcaagatttgattgaattgattagaacggagaagcaaagtgataactctgtagctgatccatctacagaggcattcttttctagcactttgcggtacattgaatttcagaagcagaaaggtgggagcataggcgaaaaatatgaacagataaagacaagttcatgagtcagaacaaacacggcgccatgactggtttcgattttgttaagagaattgggtcgtttgtttggcatggttcagtgaaatagaaaccataagttttagctcgatccatgtaaaagatgtttatacgagctgttaattctcaaatctcacggtctgagcgggtctgttcgcccattggcaacactttcaggtttagtcaggtggcaataagctgtgtcctttggggagcacaggtctgtacaggattacttgtgttcgtgatcagttctactgctacctgaatttcatcgttgtatatttccgccccttatgcgaagcttatggattttagatttctgtaacatttggagtgcatgcctccatttctgagttctggctggacatttgatgattgtttcatagcatttgaacattttggatgcccgttctttgacattttaatgttacccattactctgctgtgtggcaaaaaaaaaaaaaaaaaaaactcgagactagtctcctcgtgcgaaaaaaaaaaaaaaattaaaaaaaaaaaaaaaaaaaaaataataaaaaaataaaaaaaaaatataaagaatatgctttataataaataattcatactttctaactggtacaatttttatatgtttattttctaatttttctaatataaatgggggggctggtttt

SEQ ID NO: 6865 - DNA, 991 bp, Zea mays
  Clone ID: MRT4577_106252C.1
gcgggcgagaccgatcagatccacctcagccgtctcggatggcgtcagcatcggcggcggtgcggatgctccccgacggcggcgctgacgacgaagagcggtggctcgccgagggcatcgccggcgtccagcaaaacgccttctacatgcaccgcgccctcgattccaacaacctcaaggacgcactcaagtactcggcgcagatgctctccgaactgcgcacctcgcgactatcgccgcacaagtactacgagctgtacatgagggcgtttgatgagatgaagaagctggagatgttcttcagggaggagactcgccggggcagctgctctgtggttgatatgtacgagcttgtgcagcatgctgaaactattaacgacgcagttgaatttgttcttcagaatttcatagaaatgaacaaactctgggttcggatgcaacatctggggcctgcccgagaaaaggaaaagcgtgggaaggaaagaaatgaactgcgtgatctggtaggcaaaaaccttcatgttctaagccagattgagggtgttgaccttgatatgtacaaagaaactgttcttccaaggatattagagcaggtggttaattgtaaggatgaccttgcacagttctacctgatggactgcataatccaagtctttccagatgaataccatttacaaacattggaaacattattgaatgcatttccccagcttcagccaagtgttgatatcaaaacagtactctctcaacttatggacagattgtctaactatgctgcctcaagtcctgaagtgttaccagagttcttgcaagttgaagcttttgctaagttcagtaatgctattggaaaggtgatagaagcccaacctgacatgccagttgttggagccgtaactctatatgtatcgcttctgacttttactctccgtgtacatactgaccggcttgattatgatgaccaagtgctctgtgcatgtgtcaagaaactttc

SEQ ID NO: 6866 - DNA, 231 bp, Zea mays
  Clone ID: MRT4577_106253C.1
caccaatctccgctccggcctgcgccctcgccatgcccccgcacggccccgaagaagacgccgccgacgcgcacctcttcgctggcgtccgcttcgcgctccacggcttcgaccagatctccgcgtcccagtttcggttggagatagagcggtgcggcggcgtccacgcgggaggttgggacgcagactgcacccacgttatagtttccaacaccttatatgatgatccag

SEQ ID NO: 6867 - DNA, 259 bp, Zea mays
  unsure (1)..(259): unsure at all n locations
  Clone ID: MRT4577_106254C.1
ccgggcctcaatcgcgcccagcggctcccatggcgagctcgccggnatgccctgctccagtcgacttacctaataatatgcaggcgaaggtgtgcggtgagtgtcacgtgcacccggcggataggtggggtgacttatcaccatgtgatgactcaggggtggcgctccaggagccacgaacgcggcgaggatgaaaagcgtagacagacccaccaggggcacaagcaggcgagacagcttgcgttgcccctgccggagt

SEQ ID NO: 6868 - DNA, 681 bp, Zea mays
  Clone ID: MRT4577_106255C.1
ctcggccggtaaaaaaaaaaaaaaaaaaaaaaaaaaaaaaaaaaaaaaaaaaaaaaaaaaaaaaaaaaaaaaaaggggttcttgcaagttgaagcttttgctaagttcagtaatgctattggaaaggtgatagaagcccaacctgacatgccagttgttggagccataactctatatgtatcacttctgacctttactctccgtgtacatcctgatcggcttgattatgttgaccaagtgctgggtgcatgtgtcaagaaactttcaggcaaggcaaaacttgaagatagcagggcaacaaagcaaattgttgcacttcttagggctcccctggaaaaatatagcaatattgttactgcattagaactttcaaactatcctcgggttatggattatcttgataatgctacaaccaaagtgatggctgtggtaataattcaaagcataatgaaaaacacaacctgcatatctacttctgacaagattgaggcactattcgatttaattaaggggctgataaaggatatggatggagctcaagatgatgagcttgatgaagaagactttaaggaggaacaaaactctgtagcgcgtctaattcacatgctgcacaatgatgatcctgaagagatgctgaagatcttatgtactgtccaaaagcatatactttagggaggcccc

SEQ ID NO: 6869 - DNA, 1733 bp, Zea mays
  unsure (1)..(1733): unsure at all n locations
  Clone ID: MRT4577_106256C.1
cggccgggccggggaggccgcaaataaaaaaacgcgcgacgaacagagctgaacacaaacacccgcatcgatccaacccgagcctcccctcggggacaggccgacgcgagcgagatccaacccaagtcccgacgccgcgggcgaggccgaccagatccacctcctcagccgtctcggatggcggcagcatcgacgtcggtacgggtgctccccgacggcggtgctgacgacgaggagcgctggctcgccgagggcatcgccggcgtccagcaaaacgctttctacatgcaccgtgccctcgattccaacaacctcaaggacgcactcaagtactcggcgcagatgctatcagagctgcgcacctcgcgactatcgccgcacaagtactacgagctttacatgagggcgtttgatgagatgaagaagctggagatgttcttcagggaggagactcgccgaggcagctgctctgtggttgatctgtacgagcttgtgcagcatgctgggaatgtcttaccgagactctatctcctgtgcacggtggggtctgtgtacatcaaatcgaaagaggctcctgctaaagatgttcttaaagatctcgttgaaatgtgccgaggcattcaacatcctcttcgtggcctttttttgagaagttacctttctcaaataagcagagacaaattgcctgatattggttctgagtacgaaggcgatgtggaaaatattaacgatgcggttgaatttgttcttcagaatttcatagaaatgaacaaactctgggtccggatgcagcatcaggggcctgcccgagaaaaggaaaagcgtgggaaggaaagaaatgaactgcgtgatctggtaggcaaaaaccttcatgttctaagccagattgacggcgttgaccttgatatgtacaaagaaactgttcttccaaggatattagagcaggtggttaattgtaaggatgaccttgcacaattctacctgatggactgcataatccaagtctttccagacgaataccatttacaaacattggaaacgttattgagcgcatttccccagcttcagccaagtgttgatataaaaacgccgaagtactctctcaacttatggacagattgtctaactatgctgcctcaagtcctgaagtgttgccagagttcttgcaagttgaagcttttgctaagttcagtaatgctattggaaaggtgatagaagcccaacctgacatgccagttgttggagccgtaactctatatgtatcgcttctgacttttactctccgtgtacatcctgaccggcttgattatgttgaccaagtgctcggtgcatgtgtcaagaaactttcaggcaaagcaaaacttgaagatagcagggcaacgaagcaaattgttgcacttcttagtgctcccctagaaaaatatagcaatattgttactgcattagaactttcaaactatcctcgggtcatggattatcttgataatgctacaaccaaagtgatggctgtggtaataattcaaagcataatgaaaaacacaacctgcatatctacttctgacaagattgaggcactattcgatttaattaaggggctgataaaggatatggatggngctcaagatgatgaacttgatgaagaagattntaaggaggaacagaactctgtagcacgtctcattcacatgttgcacaatgatgagcctgaagagatgttgaagatcttatgtact

SEQ ID NO: 6870 - DNA, 523 bp, Zea mays
  unsure (1)..(523): unsure at all n locations
  Clone ID: MRT4577_106257C.1
gatacccggcctcggcctgatccaatagcactccanntcgcggggaaagatacaatacaaggcgaccgaaccgagaggcttactagtgcatacaaactgctaacgcaatgaggatgctgttccgttgcctggtggggtggtcggagccggcggcgccggccgagagcggagacgagcagcagcagcagcaggcgaggaggctggggaagaagaaggcggtgcggcggatgcggagcgcgacggcgcggctgcgctcgctgttgctgggcgagctgtcgcggacgctggcctcgtcgggcctgcacgccttcacgcaggcggagctccgggccgccacgcggggcgtctccggcagccagctcatcggggagggcgggttcggccctgtctaccggggcttcctcgacgagcggctccggcccggtgagctggagccgcagcacgtcgccgtcaagttcctcgacgccgacgcccagcagggccaccgcgagtgcctggccgctgtgctgtacctgcagatgct

SEQ ID NO: 6871 - DNA, 342 bp, Zea mays
  Clone ID: MRT4577_106258C.1
cccacgcgtccgcggacgcgtgggtgctgaccctgatcgtgtatagcacggcgctgctgctgatgacgggggtgacgctgacaggcgccggagcggcgctcgtcttcccgggccccatcacgcttctgaccaccaccatatggctgccatatgcaacaccgatctccgccatcagggcctccacgctgttaacatgcgcctcatgcggcagggcaactgcgtgtagccacctgtatagaccgttactttacgggccgtcaccccgtgcgcccggaccggttgagactactcacgcaggcggatctgcggacaccgccagagcactgaaggactacgcgcgcg

SEQ ID NO: 6872 - DNA, 382 bp, Zea mays
  Clone ID: MRT4577_106259C.1
aaaaaaaaaaaaaaaggcccccgcccgggggggttttttccggccaggggccagcaattcttgtccaacccccgtcccgggggaattaaaaaaaggcccaagggggtaagaggaaaaaagcgggggggaccccggttttcccacaggcaaacaaatgttttgcgggggcggaaaaattttggggacgagacaggggcccccaacccaaaaaaaaggggttaaaacccccccccccggggggataggaaacggaaaccccatgggcacgcacaggggggcccccggggccccacaggggaaagggcccccgcgaacggggggtttttcgttgaaacgggggggaaccccgtaaaccccgccccggccaaggaacaaacggggg

SEQ ID NO: 6873 - DNA, 742 bp, Zea mays
  Clone ID: MRT4577_10625C.1
taggggcctttttttttttttttcatccaaggaacacaacttgataacgtaaacaccacacatggagatttccaaacttgtcccatgagcagcgacttcccagggggcgataatgaagaaaaggatgcagcagcaatgaaaagaaaactagccatgcaattctgttgcggaaatagacaactttgtgaatacaaaaggttttgctgttgcaaatacaaactaggaactctctaaagatgtagataacgcgacagcttaatcggtttcgtcaacgaccttggtccccagccccttcaagccctcggcggggatctccgcgacggtgacaagggagtagagctcctccttggcatcctcctcgtcgttcctcttgcgggcgatcctcacacgaaccctccgcggcacgctcctgatcccgctgctccagatgtgcttgttgagcttcacatcgatcctaatgtccgtggtgcccatggccttctgcgcaaacttcctgatctccttgatggcgttgggtgccttcttcttgaatgtgcagccgtggaggcgcttgtggaggttgatggtgtactccctggtgaccacctcctccttcctcgacgctcctcccttcccctgcgacatatctcctctgctccgggtgcgggtgggcggattccgctgggtagtgtggtgcggtgttgtgttccgcggcggcgcgagagcccggccggcctcgaggaacccaatcgcccttaggagt

SEQ ID NO: 6874 - DNA, 423 bp, Zea mays
  Clone ID: MRT4577_106260C.1
gaagaacattgctagtctttgtaggcacaggcacagctgacaataggatccaggaggttccagcactgaaagttactgccctgacgttcacggagacctcccaggccaagattgtcaatgctggtggcgagtgcctcacatttgaccagcttgctcttcatgctccacttgggaagaacaccgacctcttgacgggccccaagaatgcccgtgaggcagcgatgcactttggaaatgctactggagtgccgcacagccacaccaagccgtatgtgcgctccaagggaaggaagttccataaggctcgtgggaggatgaacagcactggattcaacgtttaaaacaaattgagggcctccgtgttgtcatcaggataccgcaaccggtgtgtttgatcagtccacagtaattaaacatcactct

SEQ ID NO: 6875 - DNA, 443 bp, Zea mays
  unsure (1)..(443): unsure at all n locations
  Clone ID: MRT4577_106261C.1
cgggcgcgtgggcggncgcgtgggcgcctcccgctccgcgacgtcctcgacgacgccggggtcgggggcaaggcctcgcgcagcctccgcctcaagcgcccctcgggccgcccccacggccgcctcgacgtccgcgtcgccgtcaaggagccgtccaggtactacgaccccatctttttgccggccccccaggactacaacaacacgggcggaggcacccgtgaccgctcacaagtcgtccggtgctactgccggcccatactacgggtccgcaagcttgttctgttcctgggggggcggctacgttgcatctggtccacgctttctgttggggtccttgccttcgtgtgtgtgtctttttttttttttttttcttgcgcngcccgcttttttttttttgtttttttctttttttcccccccttttgtttttttttttttttt

SEQ ID NO: 6876 - DNA, 250 bp, Zea mays
  Clone ID: MRT4577_106262C.1
ctctcttatctcttcccgtttcgctccttctgcccaacttcaaagcggtgtagcgactggtgtccgtatcatgtataaacaaaacctaagttgtcatgggagttgcataaaaaacaaactaactaaacgggggcaagaaaaaaaaaggggggcccccccaatatgagacctcttcccccgggaaaaaaagccgggccggtactgggggggaaacaagtttcccaaaaggggggcgtaataaaacctgggg

SEQ ID NO: 6877 - DNA, 861 bp, Zea mays
  unsure (1)..(861): unsure at all n locations
  Clone ID: MRT4577_106263C.1
gggtacctcgaggccggccgggatttatagggatagacacttacaagcgacgctgatacccctcactgaccgagaagcggacagcaggacataactctctcgatatcacgcatggtgtgcgaggaggaccaacaagacaggacaaaaggtcttctacagctggaacttcgatgatgtgcacacgaacgacttctcacttaacgactaccttcctgctgatccgactaagcacgcgatgtacctgacgcacaccgcgggacgatactccaagaagcgcgtgcgcaagagcgctgcgcccgatcgtgcagggactcacaaactccgtcatgatgcacgctactaaacaacggcaacaacgtcatggctgtccgcatcatcaagcataccctgacaaatcatccacctgctcacagatgcacaacccattacatgtcggccgcgaccgcgatcatcaacagtgcaccccgtgaggatgccacccgtattgcttccgctggtgttgtgaagaggcacgccgtggatatctcacccctgaggagggtgaaccatgccatctagctcctcaccactggtggcagggagagtgctttccggaacatcaaaaccattgccgagtgccttgcagatgagctgatcaacgctgccaagggctcatccaacagttacgccatcaagaagaaggacgagattgagcgtgttgccaaggccaaccgttgaaagctccatcactgacancatagagcacgctacttctcatcactcgncaacgtgcagagatcagggaagcggcactccatccactgactgaccgctcatggcgaaaggtcacctctacgtcgccgcgnnctgcgccgtcgtcct

SEQ ID NO: 6878 - DNA, 287 bp, Zea mays
  Clone ID: MRT4577_106264C.1
gagctctcttgtcggcggccgcggttgttcatagtactgtgatggcggcaccatccaagaggtgtggacctggtaacagcttgcaggtgcggaaccaggcgttgagcgcgcctcctatggactcgagcacgccgaggccgacgaggagggagccctcgtggaattggcggtccctgaacgaccccttgagcagcgccttccgctcgtcggtgagctcctcgatccgggcctccgccggtgacggcgacttgctggccgcagcgggcggctgggttgatgaggcggtg

SEQ ID NO: 6879 - DNA, 107 bp, Zea mays
  Clone ID: MRT4577_106265C.1
aattcgggacgagggccatctctaactcagtcaattcactgagaccttttgcccaaatctaagaatagattctcgtttaggagaagacatgaaccgcacctgcccat

SEQ ID NO: 6880 - DNA, 339 bp, Zea mays
  Clone ID: MRT4577_106266C.1
ggctgaggagggagctgggactcgagaccctgctccaccctgccggctcgcgctcggccccgtcacctggcaagccccggcatcttcgacccacgtccgtggcgcggcctgggtaggaatgcgcctgaagaccgcgcaggacaccaccaccgggcatcctgggcttgatctactcccctgggcgggtgggtgctctaccctcccgcccactctctgaggacatgaggaccagcgacatccagcaccacggacagctcccggcggttccctgagtgcctagtccgtgtgcatgactggaggagactcgcatagccttgcagagggaaagcagatacaacc

SEQ ID NO: 6881 - DNA, 267 bp, Zea mays
  Clone ID: MRT4577_106267C.1
atcaactaccaactcgcccaagatgcccgcttacattgttacccttcacgacgacgcctcggatgcgcaagttgccgcagccaagaagaaggcgaccgacgctggtggcaagatcacccaggaatacagcttaatcaagggcttcgccgttgaataccccgaaggcactgtctcgactctcgaccaggacccgtcggttaaggccgtcgatgaggactctgtgatgcgaacgcagtagatgcagctttacgactacgctgtttatga

SEQ ID NO: 6882 - DNA, 506 bp, Zea mays
  unsure (1)..(506): unsure at all n locations
  Clone ID: MRT4577_106268C.1
tacagctctttctcttcatcggttacactgttgataccctcgagcgccattgcagcatactgcacatgtctgaggagcgccccatggggcttcctccgaactctctcgcacgcgtcactctcttcttcctctgacaacacacagnctttgctgcttctatcaatggaaagcatcctctcatgtcgcgccacgccgttgagccaatcatccaccttcttcagctgctgcagaaaggacgcgacctgggaatcacacgtcgcgtagtcgccctcgatgtcgtccaggaacttgtcgatgtagttgaggaaccaccggttgccgtcggagcgcatcgcgatagccaggtccattgctgcgcttaggctgccgccttcggtggaagcgtcagcgggtttcttcgagagcctgctgctgcagctgcactttggcttggaacagaacagtgggctcacgggtttcagttcggccgctgatgacgccctcgcggattcagatgcgcctctcgt

SEQ ID NO: 6883 - DNA, 409 bp, Zea mays
  Clone ID: MRT4577_106269C.1
aaaaacgggaaccatttaaaccctggagggagaggcacggactttttttataaaaaaaagataactaggggcgggctaaaggctatttccaaaaattatggggcaaaaaaaaaaccaatttgggaaaaacgtcacaaagggggggggggggaggcaaaaagcctggaaaaggggggcccccaataaacaaataagcaaggccgcctacccaaatccagaaaagccattcgttccttttttttggaaaaacccggacggggaaaagaaatcgtcgatcttaaggaaaaatttcaccaccgggggggaaaaaaaaaactgttggtgtttgccaaacagggtctcgaaaaaagttctgttttttaatggcgggggggccaaagtcgttgaagtctaagccaaaggggggggg

SEQ ID NO: 6884 - DNA, 190 bp, Zea mays
  Clone ID: MRT4577_10626C.1
ctacttttaggggaagccttttttttaatcgtttttttccgatgcttaattttcctaccttttcgtaaaaccatcacatcaagtaagtcctgatcaatattcaggtcagaatcatcatggacactactatccatgtttatgtgatcaacaagggaagggacctccacatttggggtcatactatttttgc

SEQ ID NO: 6885 - DNA, 694 bp, Zea mays
  unsure (1)..(694): unsure at all n locations
  Clone ID: MRT4577_106270C.1
cggaattcccgggtcgacccacgcgtccggtggctgcgagacccgaaataaaggttctcgccagcgctgcggcgggaggagcgcgggggggccggcggcggcgcggcctcggcctgtgtgactggcggcgcccgcgcagcctcgggctgggaagggtgcaagatgaccaacgaagaacctcttcctaaaaaggtccgactgagtgaaacagacttcaaagttatggcacgggatgagttaattctaagatggaaacaatatgaagcatatgttcaagctttggagggaaagtacacagatcttaattcaaacgatgtgactggtttaagggaatctgaagaaaaactaaagcagcaacagcaggagtctgcacgcagggagaacattcttgtcatgcggctagcaaccaaagagcaggagatgcaagagtgcaccactcaaatccagtacctcaagcaagttcagcagccgagtgtggcccaactgagatcaacaatggtagacccagcgatcaacttgtttttcctaaaaatgaaaggtgaactggaacagactaaagacanactggaacaagcccaaaatgaactgagtgcctggaagtttacgcctgataggtaaacaaatcatactccccagtcaagacttccctgacagtcccacctcgagaaagctgtggtgggacagccaagtactc

SEQ ID NO: 6886 - DNA, 331 bp, Zea mays
  Clone ID: MRT4577_106271C.1
gttcgattgtacaccacgctttgaccgctgtcatcaccattccgctctgctactgctgcttagcacgctagttacccggaagagctataggttgacctcggctaggccgtaccccacatcggtcagctggggcgacgcccgtcgcaagcaaaagctggatgatgcggcgcacgcccaacaagagcgacaacatccaagtacatacgcagcatcctcagcgtgcccaagctggcgctccaggacgatttcaagaacgtctacctggaggctggtatgaagaaccacacggacatgggcggggtccccttgaaggtctaggagctcatacaag

SEQ ID NO: 6887 - DNA, 232 bp, Zea mays
  Clone ID: MRT4577_106272C.1
aaaaaaccaacccaatcaccccttatttaaatacggcccctagcccaggaaaaaaaccatggggccggcgggcccccctacaagcgaggggggggggcccccccaaaaaattggattttcaaaaaaacccccgagcggcgccaagaattttcccccctgtttatatccccaaccccatttgggcccaaaatataggatcgggggcggttccaaataaaacatttttttgttg

SEQ ID NO: 6888 - DNA, 358 bp, Zea mays
  Clone ID: MRT4577_106273C.1
gtcagatcagaccagcaacggatcgacctttgcttccgtgcagatggagcagatgctactgcagcaggtgttggaccaatttgttggacaagagatcgttgactggtgtgggagcgctgcaggagaaaacaaaggggggataatgtgtcatccagatggacccaaccaaagaaatagaatggaataaaattaaaggcgttgaacgagaaaaaaatgcatcaaattattgacatcaaaataaataccggttcgtcatggctgacacaactagtgaggaacctgccacaagtgaacagacaaagattgaagggctgatttttttgaaactagtgtgggtgtggaaaaacgttattatttt

SEQ ID NO: 6889 - DNA, 256 bp, Zea mays
  Clone ID: MRT4577_106274C.1
caacaaatagcaatgccatcatggtaattgttgggcctatgggccaccaggggtttttattacatgcacttgtaaccctaaatggcctgagataacaagatctggtggcccataggcacaacacatagcacatgccataatggtaattgtgaatcatacacgcgtctgaaccaacatgcttagatgcttgtaacacctttttgaaaattatactagcgatacctattaccttttcctacagaaatataaaaataca

SEQ ID NO: 6890 - DNA, 290 bp, Zea mays
  Clone ID: MRT4577_106275C.1
cgcctggttcttctgtcttctgatggctccgtcgtccgctccggggtacctggatccgctcatagctcgtgtgctgatgctgtcacaggctctactcgttctcgctagaagcatgccttatagaacagtactaccgagttaaacatttactgtctctcttgcctttaaaatgtgcaggctttgctgtttaaagcgtgtgtgcacatgagtactggtgctgtgcttgacattaggaatttctctaagaaaactagcgccctgcaacttggagctgtggagtatctagcctt

SEQ ID NO: 6891 - DNA, 280 bp, Zea mays
  Clone ID: MRT4577_106276C.1
cacaaacatgcaataatgacaacatttttggtgatctacacactcacatttagaagaacaaatatacagctgctgtcgtagcaaacttataatcagatctttagacaacatttactgtctatgactttggaactccaaagctaataccaattatcaatttagttcttccagaccacactacatgtaatcttgaataccacctcctacatgaatatacttgtagttaatgcaatctattaccttaattccacccctatttttaacctttctgattcctttg

SEQ ID NO: 6892 - DNA, 932 bp, Zea mays
  Clone ID: MRT4577_106277C.1
cattgggtacctcgaggccggccgggtgctcgtctccggcgcccgcgcgagctcttcttcctttccgacgccagcgcggtatcctcgtcgtcgccagtgcgcgagcgtctcctcctcctccttgcggcctcccgcgcctccgccccccccccccccccacacacacacacacacatccgggagaagagtagtggatgcggagcgtctcctgtaagcggtctcccaaacgccacgcttgtactcactttgtttctaatcaaaaattgctgtggtggaggccatatttgattccaagtggtggtttagagaagtcccaaacagaccctttgtttggggagaagaatcgagagggagatagctaaactagggttaagggaattaggggccgagaggagcgcaatgagcatcgtgcccaaggagacgatcgaggtcatcgctcagagcgtcggcatccccagcctcggtgccgatgtcgccgtcgcgctcgcccctgacgtcgaataccgcctccgcgagatcatgcaggaatccattaaatgtatgcggcatgcaaagcggactgttctgacggcggatgatgttgacagtgccctgggcctcaggaatgttgagcccgtatatggatttgcctctggtgatccattgcgttttaagagagctgttggacataaggatctcttctatcttgatgatcgggaggtagacttcaaagagattattgactgtcctctgcctaaagccccactggacacatcagttgtagcccattggctagcgattgagggggtacagcctgcaataccggagaatcctgctattgacgcaattgtaccaccaactgaaaataaaaggctggaacatgggaaagatgatggacttccagctggatgtcagcttccttgttagcatgtattatctaaagaactaccgat

SEQ ID NO: 6893 - DNA, 404 bp, Zea mays
  Clone ID: MRT4577_106278C.1
gtcttgttgccggcggcggcggcggcggcggcgcggagaaattcggcgaacgatggcggactccggaagcctgaggaagcgggaggagaaggaagaggaggacgacattgtctgcctggatccttccttcttcgtggaccgcagctacgagatgacgaccttcaccttcggatcccacgagttgcgcctcctctgcctccgcgccgcttccaattataaagaaaaatatagagttgcagtcatgttctgagaatgcacatgcagtgttgacagccgagaaactagagtggggaaactcagatcatttaagcggtattattgaaaaacatcctggtggatttgatcttgttcttggagctgatatttgcttccagcaatctagcatttcctgcctctttgatact

SEQ ID NO: 6894 - DNA, 541 bp, Zea mays
  Clone ID: MRT4577_106279C.1
ttgggtacctcgaggccggccgggatgatccctgtcactcagatctggatgctgtccccgtcatcggtgcctcccccccgcgcgtgcgagacccggatacgccgcttccgcgtgaagatccccagccctcccctctccctgctcggacgtatggcgtgttgacggcaaatgggatattcatcagtgtcctctcactgcgtccctctggacaccatggagctcgactagaggcttgtctgcatgctcctcgccgaccgagtgatctcagattcgtccatctgtagatacaaacactcgtagacccaggatccgcgcgcctgtcctgatacactcactcgaccgaccagctcttctcggttccgacgagtcacttcgctgtcctacacgccttcagatccataattatattgtatctacaaatgcgctggtggggctcttgtggcctatgccataactaggaaggagactcgctctctacctggcgagctgcctggaggatgctagacagctccttactgctaacatgacaataatgcttgtg

SEQ ID NO: 6895 - DNA, 1240 bp, Zea mays
  unsure (1)..(1240): unsure at all n locations
  Clone ID: MRT4577_106280C.1
gcggctcaatccagcaggtgggttcccaagcgtcctgacaccgcggcacctccactgcagtagtcttgttgccggcggcggcggcggcggcggcggcggagaaattcggcgaacgatggcggactccggaagcctgaggaagcgggaggagaaggaagaggaggacgacattgtctgcctggatccgtccttcttcgtggaccgcagctacgagatgacgaccttcaccttcgggtcccacgagttgcgcctcctctgcctccgcgccgcttccactgattttgatcttactggacagttagtgtggccaggggcagtcattatgaacaactacctatctcaataccctgaaattgtgaatggatattcagtaatcgagctaggatctgggattggcattactggcatattgtgcagccatttttgcaaggaggttgtcttgactgatcacaatgatgaagttctggagattataaataaaaatatagagttgcagtcatgttctgagaatgcacatgcagtgttgacatccgagaaactagagtggggaaactcagatcatttaagcagtattattgaaaagcatcctggtggatttgatcttgttcttggagctgatatttgcttccagcaatctagcatttcctgcctctttgatactgtagagaggattgttcgtattaaagctggtaaatgcagattcatattggcttatgtatcccgaactaaagtcatggatgcactagtactcaaggaagctgaaaagcatggaatgcgtgttgaagaagtgaacggaacaagaacaaccatcgcgaatcttgaaggagtcatatttgacattaccctgaaatgacagtccgtccttcgactctcctttgtcgaagtgcttgagtggttattcgtcatgaagtcctgtgtaacttccttttagcgggaaaatcgaagttccgcatcatgatgagctggagttgtgtcagttgtatctctgtagaggaggaggcaccacagtaagaacattagccgatgatggtctttgattcatgcgcccatttggtgtggctttctactgttcaactgctccatcctttaagctaatatataagatgtaagatgcgtgctacaactttctcggactatctatctatctatctatctatctatctatcnnnnnnnnnnnnnnnnnnnnnnnnnnnnnnnnnnnnnnnnnnnnnnnnnnnnnnnnnnnnnnnnnnnnnnnnnn

SEQ ID NO: 6896 - DNA, 653 bp, Zea mays
  Clone ID: MRT4577_106281C.1
cctccctcgagttttttttttttttttttttttttttttttttttttttttttttttttttttttttttttttttttttttttttgggtttttttttttttttttttttttttggggggccccccattctgggtcaagcaaaaaaaacaattgggaagcaaaacaaacagttttttggggggttatggggctttccaaaagaaccccccccttttttttttgggggggggggtgggaaattttaaaccaagttttccataaacaggtaggggggggaaaagggtcacccaaagaacggccctgggggggttatccccagggacggggggggaaacctcaaagggccattaccccccccccccttttgggggggggaaagcccccttgacccaggggggaacatttcctttagggggggggacaaacgggaaaggacgtttttttcaacccgttttgggggccggggccttttcgaccactcgtttcccagggaaacccgcccattggtggctttttggtggggagggagggccccgaccggggccttgggggggggggaaaaaaaacccccaaaaaggaccccttggggccccataacctttttgaaaacccatccttttttattaggcaaaaaaaatttcggggggggtccg

SEQ ID NO: 6897 - DNA, 261 bp, Zea mays
  Clone ID: MRT4577_106282C.1
cgtacgcgtacgggtggcgcatcgacgtgctcatgaacaacgcggcgaaccactactagcaggagagcgtgctttacatcacgggggcggtgctttatcccttcctccacaccaacatcttcacctacatcctgttgtacaagcacgcggtgccgcacatggagcccggcacctagatcatcaacaccttcatcaacaactcgtacaaggacaacaacacgcttcttaactacacggtcaactacaccgccatcatgggct

SEQ ID NO: 6898 - DNA, 532 bp, Zea mays
  unsure (1)..(532): unsure at all n locations
  Clone ID: MRT4577_106283C.1
attcccgggctcgacccacgcgtccggccttgtaatggtggcatcaacgtccaatgatgtcgtcctctccaatttttgctaatgctccagctgagaaaggtggcaaaaacttcatgattgatttcctcatgggtggagtgtcagccgcagtttcaaagactgctgctgctccgattgagcgtgtgaagctgcttatccagaaccaggatgaaatgatcaaggctggtaggctctcagagccatacaagggtattggggactgcttcggacgcactatcaaggatgagggttttgcttcattgtggagaggaaacactgccaatgtgatccgttacttccccacccaggctttgaactttgctttcaaggattacttcaagaggctgttcaacttcaagaaagacaaggatggttactggaagtggtttggtggcaaccttgcctctggtggtgctgctggngcttcatctctgtttttttgtgtactcccttgactatgctaggacaaggttggccaatgatgcgaaggctg

SEQ ID NO: 6899 - DNA, 325 bp, Zea mays
  unsure (1)..(325): unsure at all n locations
  Clone ID: MRT4577_106284C.1
nnnnttgcggtcgcaccacatctggcccactctgaccgactaggagtggatcaaggtgtaggcgcaggtgacggaccttatcttggctgactacggcaagaaaaacaatgttattgtgatattgttgacacagtcagaaattctgtacattattctggggatggagaccttagcaccatcacatgagtcgcagcagatctgtttagattgagaagctgcaccacggaacattttgtagctgtaggaagcccaaactttgtactgtcaataagcatgggtacaaaataatcacctttaccaccagttacttactagacccaaactt

SEQ ID NO: 6900 - DNA, 357 bp, Zea mays
  Clone ID: MRT4577_106285C.1
gacgatcagccaacaagggatatatcgtacgcacttttagctcccatgtactgcttccagctatctggatacgtcagcattaaaaagcagtacatgcgtacgtctccaccatctcagttgctcagacacatacatatcagtgacaatcaataactcaacaatcatcctatatcattaacttcttatcccataccttccatcaattataacttcattatgtgaaaacccagctcttcaaccatatatgcttcaacaagcaatctcatcaagcaacatacctttatcgcccttgttgtttcaacaatcaccagccctatctttggtgcaatcattgtttcaaaccatcatgtcacaaca

SEQ ID NO: 6901 - DNA, 565 bp, Zea mays
  Clone ID: MRT4577_106287C.1
attgggtacctcgaggccggccgggacaccatgtaccgacacgaaaggcagcagcactcgactatccgtgcataacatgattcagagcgtatgacgtcatggccaccgctagcgtcgccgtggagaccaccatcgttgcccgcgacacgtatcgacagagcctctgaactaaggctgcctgagatgatggtgatgagcgagatggtgcggtggagctacgccaatggatccccataacgccggcccaccacgcaccaaaggagcacgcacgccgctgctcgccgccgcagatgcaggagactcttctaggcggaggccgcgctggtgctcgaggaccagcacatgtccaccgagggcaccgggatgatgctcgggatcaccaacagacctgctggtgcggatcctcctgagcgtcatcaggctcatctgggccctctacaccatccacacctctgacctctactgaggacgaggacgccggtgggctctcgctctagatcacctcctcgtccggcagtgagcttaatgtgaacatggtggcgatcatcggcgtaaatttacacat

SEQ ID NO: 6902 - DNA, 858 bp, Zea mays
  Clone ID: MRT4577_106288C.1
attgggacctcgagccggccggccgggattctcttgtgctgcgtttctcttcccttctctctctgctccgggttcagagcagagctcagcgccctgtctccctccctccctccattcctcctcctccgctctctctctctgcaggcctgcactgtgaggagactgtgacccggggacggagagctcctttcttctctctcatcgatcccggtggtggtgatgtcgtcggagaacgagccccagaggatcagcagatgcctaaccgccggtgccgaggatttcatcctcaagccactcaagaccaaggacgtgcagcgcctgcgcaactgctccagcgccgctagacccagggacgacgcggcccaccagtgcgagagcttgaggaggagcagcagaaagctgcggtcggatcaggtcgccgcgcctggccacagatcgcaaccgacgacgggattaaccatggtactgttattcatcgtttcttgctgttcctccttcagaagatcagccagagcttataatttcaatggatgccccccacccccaggtgctgcatgcctccagcattgagctctcgcactacttccagttcctcctcaagttcgtgctgctcgcgtacgcggtgctgtgcctgaccgagctcctccacagatggtccaatggctccgtcctctccctgtggtctgcatgaggtcgactggaaccgcgatgcggtattattagtgtaaccactaaggctcccaggctttcagttcaattcccccctgtaatccagtcctggcatgaggaggcaccagttcttgctcgccgctccctatatttccattgaggaaaaaaaaaaaaaaaaagggccctagg

SEQ ID NO: 6903 - DNA, 282 bp, Zea mays
  Clone ID: MRT4577_106289C.1
ttgtctgtttttttttttttttctgcccacagcaggccataggccctcagcataggggttaaagggcgcccgggcgccggggggccacggtttataaatcacaaaccttggggggcggaaaaacaacaacaaagggggggggggggccggcccatttctcgcgcgggaaccacgggaggctttcatgtatgtatggggggcaggggggccaaccccactgggggtggggatagcggacaccaactggttgacaaggggaagagggaatacccccctggaaag

SEQ ID NO: 6904 - DNA, 157 bp, Zea mays
  Clone ID: MRT4577_10628C.1
ggtcgacgacgcgtccgatgcctagcggctgacgtgctgtatccacacgggacgcctgtcacggccagtacgaataatctcatcaccgagaacaacataatgccggcaatggacatcgaccaggaactcgcaacgctgtcgacacgacttacgctcg

SEQ ID NO: 6905 - DNA, 663 bp, Zea mays
  unsure (1)..(663): unsure at all n locations
  Clone ID: MRT4577_106291C.1
cggttccgtacacaagttttccttgcagtgaggtaaggggaaggggctggtgactctaattgttttanaaaaaaaaatcaaagccactagaaattgaggttacatgctatatatttgactaatttgaggatcaaagaaaaatcttttgtcttccccgtacccatgtgaggcttttccagtgggggagcacctcattcaagccaagcatgatgctatgctgttgtaatctcttactttcggtcgtcttgacttatttgtactttgctcatacaggtccagttgttgatatacttcatgctgaaatacgcaatggagattttgctttcagagtctagtgttatcactaatcactatttcagttggaacacaagcgcagtggcaatttttctagcaatccttgggttgacggtgcttcctgttaatgctgttgttggaacatacatcagcaatatgtttgaggacaggtttgtggatttttcatgcctcagtacaagcattggtcaagcattaatcactatttccctttttgttttattgggaattattagcattggtcaatggttgatggacaattcgctcagtactggtatatagacgcctagaactctgccctttttttatttttggagtgaaaacctacaggctacttcttttttttttttt

SEQ ID NO: 6906 - DNA, 278 bp, Zea mays
  Clone ID: MRT4577_106292C.1
cgggacaataatactacagctgcactgggtagatgaatgcgtttaagcctcttatgcactaggttgtgagttcgagcccccacaactacatatttaaaaaaaaaaaaaaaaaaaaaaaaaaaaaaaaaaaaaaaaaaaaaaaaaaaaaaaaaaagaaaaaaaaaaaaaaaaccaaagaaaaaaaaaaaaagggggccctggggccccagctttggtcccctgaggggggggaaaatggggccctgggggaaacaagggcaaaagcggctcccggggga

SEQ ID NO: 6907 - DNA, 534 bp, Zea mays
  Clone ID: MRT4577_106293C.1
tcgcgatctagaactagtgtggattatgagtttgctgcaaggacaaggccgtcaggtgagtttgtcagcaaatataagggctactataccttcactggtggcaaggcggttgggtaccggaatctctttgcgatcccgtggccatcattcatggccgatgacagtctcttcttcatcgacggggtattgcatctcagagctgagctgaccataaaacagccctaggcgtggctgtgtactaactgcgtttgtgccgcggtgtccaaatctatgcaatgatgatctgcagtgtagagaatgaaattttctgtgcgtgctgtttttaccttttactgatgcacttaaatagacaatttgaaaacgagaactgaattctctcttgtttaattgtttttgcacctgaggaagatcatgtctctgtactcactaaactgtgaaaagtgattcagctaatcaaattttacgttggaagggcaatcctggctaagtaaaaaaaaaaaaaaaagggcggccctcgcgtctaaactagtccga

SEQ ID NO: 6908 - DNA, 330 bp, Zea mays
  Clone ID: MRT4577_106294C.1
gaaccaacaaccctacgtccgcgttttttttcttcagccgtgccctccatccgatcagcactcattgcctgagctggcgcgggctctcaacctgtacaacgctacagctgcctttctcgccagctgcaaggccaactcttacgcttccctcggcacctacaacgttgatgctgccgcccacacctagagcctccacgtcatggactacaactactgactccctactctatgcgttcccatttcggaactcctgcctacgatctacgatctacgagtgaggcctgctccttatagcttattctccgacatccaaaacacatgcttcatatg

SEQ ID NO: 6909 - DNA, 930 bp, Zea mays
  Clone ID: MRT4577_106295C.1
cattgggtacctcgaggccgagctttattccgttccaacttccaaggtccgagggctccagaaaccggcaagcaaggggatcgaagcggagagcaagggagcggtcgagcgggtgacatcatcgtcatccagggtttctcaatcggcagcgatggcgaccagggcggcggcgaggttcctgcagcgcaggtttctgtcttctggcggtaaggtcctcagcgaggaggagaaggccgccgagaacgtgtacatcaagaaagtggaacaagagaagctggagaagctcgcacgcaagggccccagctcaggagagcaaccctcgtcaaccacaggctctgcagcaagtgatgtgaaggccgatgctgggccaacggagtcagcatctgcaagtgtgtcgacggacaagaacaggaactatgctgttctggcaggcgcagttgctgccctgggtggcttgggttggtatctattgtcaaagcctaagaagtccgaggaggttgtggactgaagagggggttacgaatgcgagctgtggatggttggccttatatttcaccatggtttactttctgcgcacaccttctggaaataattgttgaaacatacgctgcagtctgcattacttgttctgaggcctgttgcaacaccgaacattgaagtctgtactcgagacgttccgtagttctctccctcgcttgacaggttgcaaatgttgagtgatgcttgtcctacgtcgttgctggagaagtggagaggtttttttggtactgatgttttgaatgtaaactcgttgccactggccagcacacatgacgaagagcattctgtgataatgagaatgtgttacacgcgttcccagtcccatatgcctttgccgcagcggttttatgtatgttctctagcatacaatatatgcttgggcgagggctc

SEQ ID NO: 6910 - DNA, 920 bp, Zea mays
  Clone ID: MRT4577_106296C.1
agtctagcgttccacttccaaggtccaagcctccaaggctgctcccagcaactcgtttctttcttcgagagagggcaaaaaccggcaaggggagcgaagcggagagtctcgagagcaagggagcgcggtgacgtcatcgttttccaaggtttctcgatcggctgctatggcgaccagggcggcgtcgagattcctgcagcgcaggctcctgtcttccggcggcaaggtcctcagcgaggaggagaaggccgcggagaaagtgtacatcaagaaaatggaacaagagaagctggagaagctcgcacgcaagggccccagctcaggagagcaaccttcgtcgactacagtctctgcagcaagtgatgtgaagactggggctgggccaacagagtcagcgtctgcaaacgtgtctaccgacaagaacaggaactacgctgtcctggcaggcacaattgctgctctgagtggcctgggttggtatctattgtcaaagcctaagaagtcggaggaggttgtggactgaagagggggttacgaatgcgagctgtggatggttggccttatatttcaccatggtttactttctgcgcacaccttctggaaataattgttgaaacatacgctgcagtctgcattacttgttctgaggcctgttgcaacaccgaacattgaagtctgtactcgagacgttccgtagttctctccctcgcttgacaggttgcaaatgttgagtgatgcttgtcctacgtcgttgctggagaagtggagaggtttttttggtactgatgttttgaatgtaaactcgttgccactggccagcacacatgacgaagagcattctgtgataatgagaatgtgttacacgcgttcctagaaaaaaaaaaaaaaaagcccagtcccaaaaaaaaaaaaaaaaaaaa

SEQ ID NO: 6911 - DNA, 379 bp, Zea mays
  Clone ID: MRT4577_106297C.1
caaaaaaaagggggggccgggggcttttttaatgggttaaaggggttccaccataggcgggaaacccggaaacgggcctaaaaagcccccttttttggggggggccaacaaaaacgatagggggggggcaaataaaaaaaaacccccacctgggggaacccttttaaaagcttgtttaaccccaggggccccccaaaggttttttactaaaaaaaaggcccccttaggcaaaaggtttcccccactgggggggctccccccccccccaggggaaggggggggcgccccttcaaaaggggccgaaggccccctttttgaggaaccccccgttgccgccttttttgaggccaaggttgataattatcatcccaggcctgaa

SEQ ID NO: 6912 - DNA, 228 bp, Zea mays
  Clone ID: MRT4577_106298C.1
acgtccacgcgtccgcggaggaggtggtggtggtggatatgggggatcatcaggataccgcggcgcctatggtggcggcggcagcgacggcggcggctatggcgacggtcatagtacgagttattgggactgaactcaactctgatatgaagtgaaacatgggccaaccttctgggcccaaagaatggaccgctcttaaccgattagcccctaacggatggagcgact

SEQ ID NO: 6913 - DNA, 336 bp, Zea mays
  Clone ID: MRT4577_106299C.1
tttatttttttttttttttttttttttttggttattttataaattatcggggggaactaaccattaagcttccccaccaagcaaaaaagcccacacaaataacaaggcccaagacttgcattgaccaaaaccacattgaccccattttatgcaaaccaaaaccataccaatcaattataaaaccaaacataaccatctaaaaagcaaggtaaacccgtccccccaataccataagacttcagaacacaaatttatgcctaagctctctatggccaaacaaagtcctccaaaaaccctaacttagctaacttatgaactgaaaaaaacaacttgccc

SEQ ID NO: 6914 - DNA, 938 bp, Zea mays
  Clone ID: MRT4577_1062C.1
cattgggaccctcgaggccggccgggcacgtcacccctgtcatcgccgatctcgcgtcgcttggcctccaagtccaggtccatgtccaacagacaaaaaaaaaaccccgcccccggttcgtcacttcgtcgctttctcgtcgagccgcgactgccgactgcgaccgagagaattctctatccggtccccgtccggtttggttagagttcgcactcgtgattgggttggtcgcttggttcttccctgccggaagatacctttcgttcggtgtcgccaactcgccattcttgggaggtcttggtcgggaccggtgctgatggaggagaggtacgaggcgctgaaggagctgggggccggcaacttcggcgtggcgaggctggtcagggacaagcggaccaaggagctggtagccgtcaagtacatcgagaggggcaagaagattgatgagaacgtgcagagggagatcatcaatcaccagtcgctccggcaccctaacatcgtacggttcaaggaggtttgtctaacacccacacatcttgctattgtcatggaatatgctgctggtggagagctatttgagaaaatctgctcagcagggcgattcagtgaagatgaggtttgttttggccttatattcgtcatattgtcagcctattttctcgccccgaaccacgtcaaactaatgttgtgtgctccctatgttgtaaacgcaaacagtccaggtatttcttccaacagctgatatcaggggtcagctactgccattctatggtacggttttgcttccaaaagtcaacaagtccatgaatagtggagtgtaagttttaatgagctaacaaatgaaacacaggaaatttgtcaccgtgatcttaaacttgagaacaccctcctttatgggagtccaacacctcgtgtgaaaatttgcgactttggttact

SEQ ID NO: 6915 - DNA, 362 bp, Zea mays
  Clone ID: MRT4577_106300C.1
tcctgtatagtttacacacgggggtgaggctatctgcttggcagaaagaggatcgttgaacagaacagattgaagatggtcatagtacacgtagagagcatggctatgacagatgagaggcctctgcaatgtaaatgccctgcccctgcgaggagctgcagagctttttcttgcgctggtgcttgactgacgactatgaagggcgccggcagcctgcacccctacacggaatacctgaggcagtcgcaaagcagcccgctggcggcagctccatactacaccggatgtggaaagacgagcggcatggactcagctgtctggcaacagcgctgcctgacacagatgacgatgatggacctgca

SEQ ID NO: 6916 - DNA, 244 bp, Zea mays
  Clone ID: MRT4577_106301C.1
gctacatcatggctgcccctaccatgagatgttttcgaatcgagggcatgaccccatatattaccgacacggctacagacagatgtcccagagatgcttgggcacacatataaaccttactgtgggtggccttgacttatgaaccacagcatgcactctagaaggtatacgtacgctagaactacatagatctaagagctgcagcgctgcatgctgactcgcccctgctccatacatggttgac

SEQ ID NO: 6917 - DNA, 681 bp, Zea mays
  Clone ID: MRT4577_106302C.1
tacctcgaggccggccgggacgggactcaccatatcgaccggcggcacggatactccctcgagatgacggaaccgagcaaaagagcgtcgcggccacaggggcagcgacacgatggtcgtacggcccccgcgctcagactcgttagcaccaactcccgatcacggcgtgtggtactaaagccggcgcggtgcgtcgctgccacctacgaagagagagggacgagccggaccgacttcgacctgttgctccggcagcgatcccagcagcgcgctaccaatggcggacccctacgtgaccaccgtgatctccccatcccccacctgaagggggctgctcccctcacgcggcccgtctcttctacgactgccaatgccaagcagggcgactcatgcccgacctgcggctcgccgctgcaggacacgaaccagacgcgctgcctgggccgccggccagaggaacaggccctgctgcccgatacgctgcaggcacaacgtgaccaacaactgccgggaagccacgtcgacatcggacggctcgccttccagggacacgcgggcgcagggctcaccggagggggagtgggatccggtgactccggaggtgggggcggcaacaagatgctggaacgaggcatcgacacgggcatcgcgctcggggccagaaactacgctctcaccaag

SEQ ID NO: 6918 - DNA, 395 bp, Zea mays
  Clone ID: MRT4577_106303C.1
gattcttgaacagatcgagctttttttgcaccacaaggatagaggttgtgttgcaactagtgagtaagctagggattgcgtctcaagctgcaagtgcggcaagaagtaccctaacctggacgatacgagcacctggcacgcaagccaccggtctcttcggtacatgcccgaagaagaatgccgcgccacgaatcgtaaagtgctcgtctgagtccaggtagtgcacccacagctgcagatgcggtggcaactgcaagtgctacccctgcaactgctgatcacatcgatcgacaaccatggatatgattattatctatctaacttgtgctggtacttaaacaataataagcgaggctcgcctggcttgcatacatagatcatctgtgttgttttta

SEQ ID NO: 6919 - DNA, 607 bp, Zea mays
  Clone ID: MRT4577_106304C.1
ctcgaggccggccgggattttagctctccccactgctataggtagccaacatgcgagcactctcctctgctctaagttggtacagctgagctcgctcccaggccatgcgccggcgccacgaccgcaggtcgatcactccatgagctaggagaagcaccaccgcgagtgaatcctcctgcggtggtggggctccatcgccgcctgcatcctgacgctggccgcctgcgtcgacttgatcgcgctcgtgatcttcctggtgctgcacccctcgaagacggccttctacctgtacgacgtgtggttgcgctccatggacttcatcgacccggcgctctccctcgacctccacgtgaggatcgctgcaagtgactcaaaagaatgactgggcgtgtactacaagacgctggactggttcaccacgtaccgatacgaggcggagacggtccccgtgtcgatggcgcagatctaccagggccacaaggacgtgtcggtgtggacgccggtcatgtcgggcgacgcggcccccgtggcgcatgacgtggcggacgccatgaagcaggacgtcgaggcgggatacgtgctgatccacgtcagggtggacggccgc

SEQ ID NO: 6920 - DNA, 297 bp, Zea mays
  Clone ID: MRT4577_106305C.1
attcggctcgagcaggcccacacgtgttttaggtggccacgccggaagcactgcccaccgtacttggtggcaagtcggagggttgcttgctctgcctctgcggtcgacacggacatggacgacctcttcgacgcccgtaacgctaactgcggacaagtttccgaccagcggcatggggggggcgctcggcttcggccctgcgttcgacctggtcatccagaaccttcagacgcgcgtcctgtggagctctgtctgggtcatcagcgtaacgacctcctagcttaacgggattgacca

SEQ ID NO: 6921 - DNA, 865 bp, Zea mays
  Clone ID: MRT4577_106306C.1
atgaccagggatgaaattgtggcggtcagagacatcctacacgcctttggatgcacctcgggtttggttactaaccttgaaaagagctccatccacccgatccggtgtgaagacatcgaccttgatcatgtgctccagccattccacgggactcgggggattttcccctgtcgttacctaggtctccaactctatacccgaccacttcggaaaatccacatccaaccactcattgacgcgtggggaaaaaattggcaaccgtctggcaggatggaaaggaaatcttctaagccgagctggccgtctcacgctcgtgtcttctgttctgtcctccatgcccacctaccacttatcggtttttcccctcgcggcttgggcacgcaaacgcattgacaggatccggcgctcctttctttggaaagggaaggccgagtcaaatggtggtcactgcctcgtcgcatggccactagtttgcaagcccaaagccctcggtggcttgggggttctcaaccttgacaagttcggacgcgcccttcgccttcgctggctttggaaggaatggacgagagacgatcacccttggaaaggtttcgaagcgccttgtaaccgggttgacagattgctctttagcgcctccactactgtcacaattggggacgaccaggggcggagccagcccttattttggggtcagctgaccccggttattttcagatgtactcactggttaagattctggagactgctacaaaaggagaaatcgcaacaacaattcctcgatgcttcgcaagatttggaagtggtggcgatggaagtcttcgcaaaccatggatgtcgttcaaatgcaagaattgagtatggctag

SEQ ID NO: 6922 - DNA, 1663 bp, Zea mays
  Clone ID: MRT4577_106307C.1
tcgatcgcgagcgccgccctttttttttttttttttaatgcataacatgtcctttcagttaaacatctgtgcaaatacaggttaacaactcatacatgatacataaccgctacagatgtggcagttgcagcagatttccaactcagttcactaatgaaaaaaaaatccactacagttatacagatcctgatgcaaacatgaggcccaaacactgccgaagaagctgtccgcccatcaatggagcagatgtgcttcataattttcatgcattcttcctatgaaatatgaatcattcaagtaaacggtcttcagtcactgcgatttcttcacctgagatctgaactcatgcctgggcttcagtcacggttgattgtcttcttaattgtttatgctgagctgtcgcaaatggaattgcgagggtggggcacttgttaaggtttgaggtctcaaagcggccgttcaggattgtgataagagcattccttctatttattccaagcacaaggtttgaatacagatggagggggctgatgcttaaatcatgttctcattccattcatttgtacagtctgttgaatctatccatgtatcccattgtattgataccctaagcttccatcttcctcctcaccaatccagtgaagaaatcaaagctgttgccatctgggtgcaactcatagcttttgttatcctcaccaatagcatgtaagtacccagttggtgttaacccctggatggtgacgacactgcctgacttgttttcatgtgcatcatgtacgacaactctctggccactatgaagccatgagttatagtattgctcctcaagaacctgaaatccatggttcatgaagatctcgaaaaggttttcaaatttattgaagaagtatgccaatatgtcttctcgtttcaatatgggtgatgtatgatttgcctcttgaagtgcagcattcaagcatgtggtaggcttctcattgtcaacattcaaaccaacaccagtacaaatattgtacactttgggttcataagatgaggtacatagaatgccaccaacttttaatcctttcagatagagatcattaggccattttattctcacatcaagttctggtagtcccttggcacggcacagctccttgatagcttcagttatcgaaaggcagacaacatattgcatgaggggcaacttccgtgcatcctgcaaacgtgatgtgaaagagaacatgagacagcctgctggcgattcccacacattctttgacggcctctccctttgaactgcacgtcggcaacgcatacaacgcccaccggtagctttgcaaagttccgcgcgatgagatcctgcgtggaaccaatcctgggcgtccagagcatccacctcccgaaccggcgcgcccggagcgcgctcatgtacgcggcagcgtcgaagcccgcgctctcgtaggcgagcgcgatggagccaggatcgccctcatcgagggcgacggaaccggccgcggaggccagcagctcctgctcctgcgccgatttgccgtacaccacaagcgtggtggctccggcgtccgcggacatggaaacgcgggcgggtgtgcggtggcgagaagcggacaggtagcggcggagggcgactgcggcgagtacggccccgacggtggcagcggct

SEQ ID NO: 6923 - DNA, 519 bp, Zea mays
  Clone ID: MRT4577_106308C.1
ataagtataatgtcatcatgaccggtgttatcactgtcaaaaaaaatctagctatatattagagctacatattaaagtaaaaccatcttgcctgattctctttgtcatttctgtagtgttaaaataatcataattgatttaatttaagactctacatagcacttatcatcgtaacatttcaaacaaactcttgagcgcattttgtatagctcactcattctattttataacagttgcttcaaactcacaccgataaaggtaaaaaaaggttgtgcctcttcttcagtctcctccaaaaaaagggttaaacaaggatcactgcacatcaacaattctaccaactaaaaggatttatcaatctgactatagcccttcagccataatactacccgctatataacttttgtgcaaatgcttccattaatctcgaaatatgtcctacatatattagcatatgttagtgttttgtaacttgggatagtgcatgaatatatagttagggagtgtttgttcaggtat

SEQ ID NO: 6924 - DNA, 252 bp, Zea mays
  Clone ID: MRT4577_106309C.1
ataatatttttagataagaagaaattggtaaattattggttttatttatctataactaagagttgatcaatgtaaatatccctatttttaaatagacgtaaaaaaaaaaaattatttttactggtgaatctgaaacaactatttaaaattttttaccgttcttatttcagcaaaaaaacttactaaaaatttaagattcctgttatttaaaaactaaaagatggtgatctctttatagaagacaaacaacat

SEQ ID NO: 6925 - DNA, 225 bp, Zea mays
  Clone ID: MRT4577_10630C.1
aaccacttgaattccaaacttcattcacaaagagatgcacttacacgtgtttttgtgctacataaacacaatgaagtttgatcacagaaatacaatgccaaccactgcgggccgtcgagtctttttttttttatactagtattaagctgcttttgcggtgattcccttccatctctgacgcctcaatcaacatgcccattgcttgactatgcatccctagctttg

SEQ ID NO: 6926 - DNA, 817 bp, Zea mays
  Clone ID: MRT4577_106310C.1
ttaatatcgtcaatatctcataaataagcattgtaaataactcatacataagtgtactctaaatctaaactaaaatactaatgaaaaactttggtcatcaactgtttacgctaatgttgagcctaactaaatatatatgaattcaagtctccacacatgcgtggccatcaaaatttgagtttcattccatcttttccttttctagaactttgctggaagcaggcgtgctgacaattaatgtgacaatcattttttgtcacatttgagcaaaacttgcatttgggtcaagtatatttaacagaccaagaaatagtatctgaagaagcattcgacacacttccatcctgaataatccgaaagggaggacgagctcttggtgaccatgattgtataaactaatctgagtaatccgaaagggaggatgagttcttggtgatgaggacatggagctcctcgaaaggggcaagccaacatggttgcgcttgcggcctggaacagctctgcagcattggaagcgataggagagggcatcacagctgggatggccgtaaagggagggcaccaaccgccagagcctcatgcgctgaattagcatgtcgtcgacctccatggcagcaggaactcagatcgtaacccccatagcctcaaccgctgaattagtgtatcctcgacctccatagcaccaggaactcagatccgagatgatgtaaccctaggatttccttttctatctgtgcgggggggagccacgtcgaggcggcggtcgcatcggcgtttggagcggagcgcctggagggccagcccggccggcctcgag

SEQ ID NO: 6927 - DNA, 227 bp, Zea mays
  Clone ID: MRT4577_106311C.1
tggacgcgtgggtccaggcctggctttgctggatcgtggggccataagcggtttccttgcccttgaagtattgaggccttcccccttttttcccttaaatgctacagttattcaggaagcggtgtaacccgagttctgtttaaagtctgagggagatagcaaagaatggtggaaccgttgagctgttgaatgtatgcgagataactgataacccaaggtaccaaaaa

SEQ ID NO: 6928 - DNA, 375 bp, Zea mays
  unsure (1)..(375): unsure at all n locations
  Clone ID: MRT4577_106312C.1
cggacgcctgggccggacgccttgggaaaaaaaaaaaaaaaagatggaaaaattntttggagggggggaaaatttatgagaaaaagaaataataaaaaagggggggaatgtttaggaatttaaattaattagagttgttttgaaagggggggggtttttttagggggcccttaatataaaacaaatgcccccggcggacaacctctttttttggggaaaccctgtagttacccaacctttttttctaaccgcgcatcccccataacccccctggtaaaccaccgaataaccccccaaaaaacgcccttttctaccacttggttttctgtatgggagatgggacaccccccccccccccccataattccccccaat

SEQ ID NO: 6929 - DNA, 510 bp, Zea mays
  Clone ID: MRT4577_106313C.1
ctttgacgggcgcccaaccccaatctttctccccgtcctccattaggagaactaggcgattaccccatgcacgagccgacttgttacattacagcgcaccactgataatatgactttttgcattggccataggtgcaacacatggcgcatcacggactagcttaattcgtcggaccatataatatgctcgcaaacgtcttctataagggactggacaggcgcaggacacagaacagccatggttgatccgagactgaccgatgccagctgccacgctctgtgaggggtgatcaacaacaagttgcgtgccatagacatgcaggtgaggtcgtgccgtcgtgtccactctgcggctcgttctggtgttgggggacgacggtattcgaccaggaacgtgcttgtattggtcgacgcagaactactagtagccgttgactttgtggtgaacaggtatactgtggaaggcctatgttgtactgttacctgggtgtgcgaaaaacatgatgggcg

SEQ ID NO: 6930 - DNA, 157 bp, Zea mays
  Clone ID: MRT4577_106314C.1
tttttattttacgtttgagaatttctctcaacatttccgcggcccgggtcaattataaaggccctatcctgttaactcacactcgtgagaatgcaataaacaagtcctcaccaatcacgggtcactaacagcccataaaaacattcataatgggggg

SEQ ID NO: 6931 - DNA, 430 bp, Zea mays
  unsure (1)..(430): unsure at all n locations
  Clone ID: MRT4577_106315C.1
gggcaaaaccaaaaaaatttcctgtcccctcaaaatcggtttaggcaaacaactttacaaagggggcaaaccccccctcggcaaaatttaaaaagatggaaaaaaaggggtttttttttgttttgggggcccccacaaaaaaaccccctgggtagttttggagcaaacccaaccttactttttttgggaccggccaaactttggaacaaaagggggcagggggcttttttacccccccaaaaaaacacccccacccttttccttttttaaaagggccccacgggggccctgaacttttccccggggaaaaccggggaatcaccgaacttttccttaatcctaaaaagtgggttgtttttggccagccccccaaaccgggaaggggctcccgttttgatttgncccgtcccccgcccccctgaaaggcccc

SEQ ID NO: 6932 - DNA, 207 bp, Zea mays
  unsure (1)..(207): unsure at all n locations
  Clone ID: MRT4577_106316C.1
ttgcacgcgactgctccggaggcggcggcgtgctcacgtccgtggcgcaccgcgcagctcacccgcccgcgacgagtccgccgcgtccaactctccccggcctcgccctcgctcgccgccgcgtccgcgtccacgctctcccctcacgaggtgggcttcgatgtggngttcatagttgacacgtccgtggctgtttaatcttgtcct

SEQ ID NO: 6933 - DNA, 408 bp, Zea mays
  Clone ID: MRT4577_106317C.1
attcgcaattttttttgttattcacgtatattatttgtgaatattccagctgtttttggacaaaccccatagtttttggaccccaattttatttcaaaacactaccgggggaaagtggcgttattaaaaccacgcgggttctacaaccgttaacgggggtctaaccggagatctgaagggacttcaatacagggttttgggggtcctccttctggacaaaaactggaagcaccccgttctctatgggggccgtaaactactccactttggcattttgggggataagaaacctgcggaggaaccccccgttgatcctgtccaaccgaggccgggtgacgagtttaactccctggttcttgtggccggcgaccgtgcatttaaggacgttggcgcccttaacctcaaact

SEQ ID NO: 6934 - DNA, 1033 bp, Zea mays
  Clone ID: MRT4577_106318C.1
cccacgcgtccgcccacgcgtccgcccacgcgtccgcccacgcgtccgcccacgcgtccgcggacgcgtggggcatggaggcaggggcagggaggagagggatcccctcgctgctgaaaccgccggcggcgcgggctgatgaatccggaggagccacttcgccgcagcaggagcacatcgcctccgatattacccagcttgtaggatggacgccactggtagagctgaagagaatagcccagaaggacaacgtcgacgcccgagtcgtcggcaagctggagtgctaccagcccctctgctccgtcaaggaccgcagcgctctgagaatgatcgaggacgcagaggagagagggctgatctcgcctggcgccacgacgctggtcgagccgacgagcggcaacatgggcatagccctggcgtagcaggctcttgaacgagagtacaggcacgtctcggtcatgagagccgagtactcgctcggtcagcaaatttttttgcaccaaataaaaaatatataattgatgtttaatatgacacaagaagcaagatataatttaaacatttaaaatattttaatcttaatatctacaaacatattacgcttaatatagcatagcagttgttattcatccattcatcacaaaccaaatatgaggttactaccaaataaataattaaattaaaacttcaaataaactttgaatcacaaacctctccttggctcacgtgctcacggtcacaggctcacgggctcacggtcaccgcgtggtcggcggctggacaacgaccagtcggcggctggacaacaacgagtcgacggtcggcggctggacaacgacgagtcggcggccggcggctggacaacctgcgagtcggcgagtcggcggctggacttcgggcgccggtggggcgaggggcctgcgacctacggcagtgctccggccgtccggcggtccggcctccgtgctccgggcgagcggcgctgcgagctccagcggtgctccggggtctgggcgtggcctcgtgccgaatt

SEQ ID NO: 6935 - DNA, 467 bp, Zea mays
  Clone ID: MRT4577_106319C.1
atttcttattattcttgcaccgagacttttactaatatgttgccaagtgtctccctatactaagtcgtagattgaaagggaaatggagtcttcggcaaagaacaaggcttccactccaactctgacggtatcaactaccctttgtcgttgttcctccacactctcaattggtataatccctcactcgtatttcctttaccaatgggggagagaatattaaaagggctctcaaagtctctgtttttggcaattaatgccaaagggggagggaatattaagcccaaagcaaaggaccgcaccaccataatttcaaaaaatttggaaataaaagctttaaacgatattttgcaatttttcaattagtattcatgcttcacttgtcttgagaaagcaaaatttcaattgatattcaaaataatgggaatctcttaaatgggtacatcaattggtatctttaaagaacaatt

SEQ ID NO: 6936 - DNA, 132 bp, Zea mays
  Clone ID: MRT4577_10631C.1
agacaaacatccgaacaccgacgccatagcttgtgcgcgcgcattggaactcgtttccaccactccgttctacatgactgtcgctgcggagctctctaggcattggcagcatttgggttcaaccacggggtt

SEQ ID NO: 6937 - DNA, 288 bp, Zea mays
  Clone ID: MRT4577_106320C.1
tgacaattcataatggggatgaaccatatgcatgtaaggactgtggaagggctttattcggggctctgtactgatgcaacatcagaggattcaagctggtgataaagcctataaatgtgaagaatgtgggaatgcctttatccgtggctcacaacttactcagcaccagagaattcacaccaatgaaaagccctatgaatgtaaggaatgtggaaagatgtttagtcatggctcacaacttactcaacatcagagaatacacactggtgagaaaccctatcaatgtaa

SEQ ID NO: 6938 - DNA, 1932 bp, Zea mays
  Clone ID: MRT4577_106321C.1
gtagctgaagaccaaacaaacacgctggagagagcatggaggcaggggcagggaggagagggatcccctcgctgctgaaaccgccggcggcgcgggctgatgaatccggaggagccacttcgccgcagcaggagcacatcgcctccgatattacccagcttgtaggatggacgccactggtagagctgaagagaatagcccagaaggacaacgtcgacgcccgagtcgtcggcaagctggagtgctaccagcccctctgctccgtcaaggaccgcagcgctctgagaatgatcgaggacgcagaggagagagggctgatctcgcctggcgccacgacgctggtcgagccgacgagcggcaacatgggcatagccctggcgtacatcgctctggcccgaggctacaggttcgtcgcggtcatgcccgccgagtactcgctcgacaagcagatcctgctgcggtacctgggggcagatttggtgttaaccgatcctgcgcttggcttccagggacagctcgacaagctggagcagctcaggaaagaaatacccaacgcgcacgttcttgaccagttcgcaaacgcggcgaaccctgaagcgcactttagatggactgggcctgagatctggaaggatacggcagccgatgtcgacatcttcgtggccggctccggcacgggaggcacggtctctggcgtcggcaggctcacgggctcacggtcaccgcgtggtcggcggctggacaacgaccagtcggcggctggacaacaacgagtcgacggtcggcggctggacaacgacgagtcggcggccggcggctggacaacctgcgagtcggcgagtcggcggctggacttcgggcgccggtggggcgaggggcctgcgacctacggcagtgctccggccgtccggcggtccggcctccgtgctccgggcgagcggcgctgcgagctccagcggtgctccggggtctgggcgtgggcggctccacctccacggctggcggcggctggagctggagggtataggatagaggaaggatgttcacggggctgggcgcggctggagtgggctgtcgcgcggcgatggacctattcgttttagtgggccgcgaccgggctgcagcccaggcagccccggtcggagatccgccactgtacttgaagacgaagaacccggcggtgaaggtcgtctgcgttgagcctgctgagagcccacccacgcgtgcgggcaagccttctcggcacaagatccagggcgtcgggccgggattcgtgcccaagaacctggacacctctgtcaccgacgagatcgttacggtgaccgcagaagatgcgatggcgaacgccaggaggttggccagggaagagggtctgctagtgggcatatcgtctggggcgaatctggcagcttgcctcaaggtggcgtcgagacaggagaaccgagggaagatgatcgtcaccgtgtttcctagcggtggcgagaggtacatgagctccgatctcttcgcggatgcaagggaggagtgcgtcgccatgaccttctgatcttctggacgctctgtgcggatctgcagcggcaaactgctatttctcagcgtggaatggatttttagtatcgtcgatccaatccagcagcttgcggaggcagaagatttggaatccttctggcagaaaatttactgcgcatttgcgttccattggcaggaaagactctgtacatgctcttgggctcttggctaaggacctttacagctttccttatttcttcttggcacagaaatttcagcagagaattgtaccacgagctataaactgagagatgccaatcagtatctcgttgagaaataaccacctggcctctgaataaacaaccatttcatttccaaaaaaaaaaaaaaaaaaaaaaaagtcgacgcggccgcgaattcgga

SEQ ID NO: 6939 - DNA, 501 bp, Zea mays
  Clone ID: MRT4577_106322C.1
attaaattaatttattttaatctaaagaaattccatattataatagttcaacgataaatttgggggggtcatttttactcctgtataatcttattaaatatattttttatccgatcaaagtttggattatcaccataactaaaaaagattaacgctgggacttacataacgttaggttaggcatgtatactcttgaacaatgagcttttagaaactgatgatgatcgacgatggtctaatatcatagcatagagcggtggccgatcgagcctcatctgcggcgtggaggatgcagggatgactatggactctcaataatacagcaatggcgggaatgcccaaccatgcatgtataggtcagggtggacaggcctcttttatagtgaattgaaggcctttacttaggccttcttcaccttccctgctgcttgttatgttgtctacagtgtctgttgtttttaaaaggtaaccttccccaactcccatccacatactaatatt

SEQ ID NO: 6940 - DNA, 2326 bp, Zea mays
  Clone ID: MRT4577_106323C.1
ctcggggccggccgggccgggcggtcccgtttgcttccggttcccaccccgtggtgccaagctcgcggagccggcgacgcagcaagggatacggtaccctcccgtccacgcgacgacaggacagacacccaccccatcaccggaagcaccgccaaagcccaaagccggccaattccgacgccatggccgacgtcgacgacgacgctgtcctctccgacgtcgacgaggacccactcccgcccccctccacctcttccgcctcttcccacaaatcccttccacaagctcaaccccaatcacagtccgatgcccaggcgcagcagcagcggctgctggacctggccgcggagctcgaggaggagcgccgcctccgccgcgcagccgaggcctccctcgcagaggccgagccccgcgtcgcccgcttcaaggccttcgcgcaggaagcgctccgcaagcgcgacgacctcaccgcccaagccgcggcctccgcgcggtccctcgccgcgctccaggccgaggccgccaccgcctcctccatgctctcctctggcttcgagaggatctccgccaaggcctccccttcctcgccccccgcaccgctcccgacctcccagaagtactcctccggcctcccggccctcgcgtacggcgttctcaagcgcgccaacgatatcgtcgacgaactcctcgcccagatcgacgccgctaaccgcgaccgcgatcgcgcgcgggagcagatggaacaccgcaactaccagatcgccatcgaggtctctgagcttgaggcatcgctcgcatccaggtctgccgagggcgaatccctctccaagtccctctcccagcgtgaagccgagatctccgagctccgtgataaaatcacctctctcgaggggaagctcgccgcgcagaggcccgtgctcgcggaacagatcgggtgcacctcgaagctgtatcacgagatgcgggaggtggtcaagctggtcgatgccgaagctgtcagtgccctatcggactcggtttttgtctggaaggagactgacgtcgaggagagcctcaaggtgtctctggaagggacgaaattggcctatgagcttgcggcaatagctctggagaaggttggggcttgtatcgatgacaaggagagcaagcttagacgtttggagaacatggtggatggactgattaaagagaaggagcacattagtgtactgctccggaacgcactgcaggccaccacaagtgaggtgttaaaggttgcagaggatggtctgagagaagctggcattgagattggacttaacgagcgaaaggagcacatgctagggagtgtggagaaggacgaggtttataccctggcaggggctcttgagaataccatgaaggagtctcaggtcaaaattattgagctccaacatcttgtcgaagcactaagggcggagtctggtttacttagaacaaggctagaagggcaagagaaggagattggtcagctaagaaagcaaataaaaaatcttgaagagaaggagaaggtggcaaatgaaagcgttgagggtctgatgatggacgtgacagctgctgaagaggagattaaacggtggaagatggcagcagaggaggaagctgaagctggtagatcaattgaacaagagttccaaattcagatatcatcccttcgcaaggagttggacgaagcaaaccgagctatggtggagctagaaaacaagctgaagttcaaggaagagacagctgctgctgcaatggcggcacgcgatgctgcagagaagtctctaaagctagcagatacgcgatcgtccaggctacgtgagaggctggaggagctcaacaagcagctcgaagaatcagatacgagaaccgagtcggtgaatcgcaatggccataggtacatgtgctggccatggcagtggctgggactgaactacgtgcagttacctctagcggagacagaccagacgtccaacgagatggagctatctgagcccctaataatataggtgctccgacctccatacttgtacagattacagatatatacagatcctgctctttcactagataagggggaacagtagttttttttttgggaggggggttgggttgatgggttcttgtgtagatgttttcgcaatttcttgatgcatgctttgcggaaaacgggcgggtgctggaaggcgccgtgtaattgtaaaaggtaccacttagtgaagatgctgagaagttcattctttgacaagattgttcttgaaacaagtctcgcttgatcttcattgtgataacaatgtgctacactgctactctacttagacgg

SEQ ID NO: 6941 - DNA, 296 bp, Zea mays
  Clone ID: MRT4577_106324C.1
tcccactcgtcctcccacgcttccgcccactcttccgattcaccaagcggaacacctcatgtgtctctatttaaaacgaacctctgtatcatcagacctatcattcaatatatctactataactcatatcactttcaatccaattcatatttcataaatcctatccatctctatccatattatacaatccatcatatgctccatgacctattcacctatcctatttatcaagttatagcctttcataccactgatctgtatcatgtccaccatctcaacaccatccttcaattctt

SEQ ID NO: 6942 - DNA, 278 bp, Zea mays
  Clone ID: MRT4577_106325C.1
tggtggacaccccgaccttctctccaaccgggggtcttatttgatccgggggagcttcctttaccaccacaccgacgcgagagggcagggaacacaggcactcgccgacgagaccccggcgcgcgcgagagaaagagaagagaggaggatctttagagcgcgaaaaatattgcaggcggagggaaggtgaacgagggggatcggagaaggacgctcaccgacaggagaacaagggcaagaagatcggtactgagggcccaactggcgggcagagatac

SEQ ID NO: 6943 - DNA, 568 bp, Zea mays
  unsure (1)..(568): unsure at all n locations
  Clone ID: MRT4577_106326C.1
cngacagttagctagggctgtatcgtgtttattgtcggagccatgctcaaagctcaatagtgcgtgtatatgaccatcgtagtgacgtggtgagacatggagtgagggccgtaggggtgagagagaggaaggctaccggtgagtgacacagtaatgaatgccttgttgcgacagttgagaatagcgaaagcaataaaagtgaaaccttttattctcttttacgattgacttgataaaaaattaaattcggaaatgaactttatgctagccgctacactggtgaggtaagcatggacgccagcaaaaattgacaggagatataattggtagagaacagcaccatgtgtgggtctgaaattttcaacagctcagtatatatatctccttcatttccctatgaagtcgtgatttttcagcaccatctgactctgaccaccggatttttatgggcaaataaattgttttcttttggacaaaaggcacagataaattccggaattacctgtgcgttggaataccagtccatcgtggcggcacctaagaaaacgtctgcactcatgccttgtgt

SEQ ID NO: 6944 - DNA, 442 bp, Zea mays
  unsure (1)..(442): unsure at all n locations
  Clone ID: MRT4577_106328C.1
acctcnttatctcaaccttttatctaggattgtgttgtggtctagggattgcctatcaggatattgaggatgggattttcacaaattgctacagtccaattattttcttcccttctaccctgctacacaccagatcatatgttataatggtgtttgctgctggaggcacatcccgattcgtcgatagggccgagtgcatctgcctcattcacaagataaacgacgctcctaccccctcctctgttttctacctgcttgaacatatcaacaatcttgcttgtataacttgcggatggcaggcctggagcgctgtcgaattccttccttagcgcaactgccgttcagcatgacatgtcgagttcagttttttccggttatacatgctacttgtacatgtctcatcgccgctaggagaccctcgtcaactgagttcatcgagtgc

SEQ ID NO: 6945 - DNA, 144 bp, Zea mays
  Clone ID: MRT4577_106329C.1
aatgggtcactgtgccttctctcgttacactaggtttgcacaatatctttagtcgatgcaaacctgggtaaccacggctcttgttaacaattcctttggaaatagcggatatgcccaatttgttctagatgtgcttacagcaaa

SEQ ID NO: 6946 - DNA, 651 bp, Zea mays
  Clone ID: MRT4577_10632C.1
ttcccaagtacccctgcatacacatctgggttctctccaaaattcggtgaaagccgtgatgatagctcctcttatagctttgggaagtttgattccttcagatcccaagacactgggttcttcccgcaggaaagtggtttctccaggtttgactccattagcagctccaaaggcgaggatgtatcaggattcgatacagggaatagctcaagaaattttggtcggtttgactctttcgatgacaccgatccgttcggttcgagcggaccttttaaagcatctggaagccggtctccacccaagttctgatatgttttctgctctgattagggttttgtgtcttgcgtgctgctgatttgtcaatacaaggttcagattctttgagcgaactctggcgtaacatgaatttttttacttgacatttcttccattttccttatgtgcaattttcgagtccatctcacgcacaaagtggacaggtttgggtttatatctttgtttttgtaaacattttttctgtatcttgtaaattacaccaagtctgtctttgtttatatagtttacattgtatgaaacaacttctcgccatataacctattatttccttcactatattaacgttgatatggtatagcaggaaatcctgtcctt

SEQ ID NO: 6947 - DNA, 489 bp, Zea mays
  Clone ID: MRT4577_106330C.1
aactaagggttggccagggcccggaaaaacattaacccccccgcttttggggggggccaaaaaaataccccccaaaaaggtcccacccacccaaaaaaaaagttaagggggcccccccgccccaacggacaaaaactttgggaagaaacggggccagccagaaacgggggcacactaaaaatggacaacaaaccgtttagcccacctcctaaattttggggccagggccccccttgccggaaggggcttccttttccatgccgccagggcccccaattttttaacccgccccctggaacattttggaaaaaatggggttgaaaaggctttccagctccttaattttgccctaaaactcccccccctgggaaagctggtgggcgcccacccagttaagggccgggtaaagggccccctcaattttttttttggaatgggccggaagttggaacccaattttttcgcccttgaaccgggtggcccatgttg

SEQ ID NO: 6948 - DNA, 296 bp, Zea mays
  unsure (1)..(296): unsure at all n locations
  Clone ID: MRT4577_106331C.1
ctcatgtttatggatttcaagactccaggttatttagaatgagcgtgatgtgtaactacattgcatgtgcagagcaaatgaactcgcagtccagtgcattacagttgcttgtacaacaataacaagatagagggaaggggggcaggcatgaagaacttcatttgctctgctcatgtttatggatttcaagactccaggttatttagaatgagcgtgatgtgtaactacattgcatgtgttcccgttgcaagtaaaatcatgatttccaggattgctcangcataaaaaanacnnnn

SEQ ID NO: 6949 - DNA, 345 bp, Zea mays
  Clone ID: MRT4577_106332C.1
ggaattcccgggtcgacccacgcgttcgctcttcggcttctttctggagcaactaggggtccgttcttgatccgatccggccagtggacaacaacttttcccaattcgatcgaattgattggccgccaaggccaaaaggagatgattacccctaaaagcctcgattgccaagaattcgaagtggaaaaagccgtggcgatggaatcgcagaccattcggcacatgatccaagatgactggtccgacaacggtatccctctttctaacgtcaacttcaagatcctatccaaggtaatcgagtacttgaacaagcacgtacatgccgtcgtcggcgtcgtcgtcgtc

SEQ ID NO: 6950 - DNA, 605 bp, Zea mays
  Clone ID: MRT4577_106333C.1
atttctacatacgctattgtctccttcctcatacagagaggcggcactggtacaggtgctaccgggcgaggtggagcctaatcgcatcccatggaggaccaccctccaatggatccaggacgtgaggcaccaaatcaatggagggtcgtttctccgcctagcaaccacagccacgactcccctgacatcattctctccctcctctgttgtcttcgtttcccttctctgctgctgggagagagaggtggcacagccgcgcaggtggtaccagcgaggtggagcccggtcgcatcccatggaggacaaccttccaattgatccagggcgtgaggcaccaattcagtggagagaaaaacaagaatcgtgactgcaatggcaaatggaaggtgaaggcccttttgattgacaacttaggaaaagatggaatggaactcaaattttgatggtcggtcaagtgtgtagacttgaaatcatatatacctagttaggctcaactttagcgcaaactgttggtgaccatgttttttagttagtattttagtttggatttagagtacacttatgtatgagttatttagcaatgcttatttatgagatattgaatg

SEQ ID NO: 6951 - DNA, 256 bp, Zea mays
  Clone ID: MRT4577_106334C.1
cgcaaaaaccacacgcaaggggacctttaaggaacaaacagggccccccccgcccaccagaacaagggggaagccccgagaacccgacagcacaagacggcccccgagccgatgacagccaagaagagcgccaaggccaccaaggcggcagacgccgccgcggcggcgaagccagacacaacggcgaacgagacgaacccggcgggcgacggcgaccacaggaagggcgcggcggggcaggccaagggccacccca

SEQ ID NO: 6952 - DNA, 687 bp, Zea mays
  unsure (1)..(687): unsure at all n locations
  Clone ID: MRT4577_106335C.1
tgtaattcggcacgagggtctccttcctccagacagagaggcggcactggtacaggtgctaccgggcgaggtggagcctaatcgcatcccatggaggaccaccctccaatggatccaggacgtgaggcaccaaatcaatggaggtaagtggcgtcggatctggcagtttccatgtcgtccccccatctcctggctcgccgctgtcgatcccccaaattttccagggtcgtttctccgcctagcaaccacagccacgactcccctgacatcattctctccctcctctgttgtcttcgtttcccttctctgctgctgggagagagaggtggcacagccgcgcaggtggtaccagcgaggtggagcccggtcgcatcccatggaggacaaccttccaattgatccagggcgtgaggcaccaattcagtggagagaaaaacaagaatcgtgactgcaatggcaaatggaaggtgaaggcccttttgattgacaacttangaaaagatggaatggaactcaaattttgatggtcggtcaagtgtgtagacttgaaatcatatatacctagttaggctcaactgtagcgcanactgttggtgaccatgttttttagttagtattttagtttggatttagagtacacttatgtatgagttatttagcaatgcttatttatgagatattgaatga

SEQ ID NO: 6953 - DNA, 334 bp, Zea mays
  Clone ID: MRT4577_106336C.1
tgcctaacaatgtgggggaactgcgcttatgtaccaagctgctcttgtgtgttatcgttgtacatagcgggggtcggcgcgcacatagcggcggtgtctccgccgtgcttgcgctgtcgccaccgcggtctcagccgtcctgactcgtgggtactaccgcctgtgcgcacctgtcggtcttcccgactcggccccactggagacactgcgccactgaccgggctcacaaactcgctgacgcgtctctcgcttgttcacatgttcccagctggaccgtcatctcgacaacggacgcggctccccacggggctcgcagagcctgcctgggagacat

SEQ ID NO: 6954 - DNA, 225 bp, Zea mays
  Clone ID: MRT4577_106337C.1
gaagcctaccacactcatgttgtatattcaattcatggttcccacccaatatacactcgcaaagaacccgcaagcattttctcctgaacagagctagtcgtctagtgtcttcctcagccataataaggctgtgctctccacattcatggtttagggttgcactgcacacaaggcgagcacaggatttctgcgcaacagagcaaacccagcaagaggcagccctgc

SEQ ID NO: 6955 - DNA, 358 bp, Zea mays
  Clone ID: MRT4577_106338C.1
tttttgtttcttcctaatgggaaccgcactaactattatataccatgtgttttataaccacatgctggaggcccttagaatgcctataacgaggttgaaaagaagaaaaacacttgtgaatcagacgaccaccttgggacgtcagtggctattctcaattcccatggtcttgcacatctatgacacactgggggatatttctatacatgagaggtattccgtagtacatgcagtacccacgtatatggactggcatggattacatggctctagcgatgcacacaggtgttctgggacgatacctgtgggctaggcaacctactggggacagccgcaaacagtttgatacacattacac

SEQ ID NO: 6956 - DNA, 666 bp, Zea mays
  Clone ID: MRT4577_106339C.1
aaaaaaaaaaaccgcagccgccacacacgacgaacaccgggacgaagcagatcggcggcgcgtcactccaatcaccggttaggataaatggcgacggtttcggattctctggtctgggagctcgtcaggaagaacaactgcttcctgatcaagcagttcggcaacagcaatgccaaggtccagttcagcaaggagcccaacaacctctacaatgtccactcctacaagtactctggcctggcaaacaagaagactgtgactgtgcagccagctgctgataaggagatgactgtggtcctctccacaacgaagtcaaagaagcagaacaagcctgctgccttcacccacaagactgtcatgcgcaaggagttccgcaagatggccaaggctgtcaagaaccaggtcagtgacaactactacaggcctgacttgaccaagcctgctcttgcaagactgagcgcagtttaccgcagcctccaggttgccaagtccggtgtcaagaagaagaacaggcagtaagcactgaggggccaatgagcttgttttgtggatccgttggtttatgtttccagctttttagatttgttctaagagtatggagattgaatatgatgaatggtgtgctccgcatactggcacaagttttctcagtaggttctatatctg

SEQ ID NO: 6957 - DNA, 2039 bp, Zea mays
  Clone ID: MRT4577_10633C.1
ctgcatacacatctgggttctctccaagacttggcgcgtgccgcggcgatagctcctcttataacttcgggaggtttgattccttcagatcccgagtcgctggattcttcccacaggaaagccgtttctccaggttcgactccattagcagctccaagggcgagaatgtatcaggatttgacacagggaatagctcacgaaattttggccggtttgactcttttgatcacgccgacccattcagttcaagtggacctttgaaagtatcgggaagccggtctccacccaagttgctcatatgatggattttcttgtggtggtttaatgtaaaagtgtttagataagcgctataagctttataggctgtgtgggattacaggcatatcattcctttgttaacgagatgttgcttctgtgtttcagaaagatgaagagaagtaccagccagaagctgagagagcttccaaactagcagttgaagaagctgcatatcgcgatgttcaggagagaaaagttgagctgaatgatgcactgattaaaatggttcaaggtggaagtgttgatggtctgcttcaggttcgagctgatcgaatccaatatcaattagaagagatggaaaaagctcttagtgaacggtgcaaacactttggacttcaattcaaatcatccgcatcagttgaacttccttccggttgggaacctgggccacaagagggactcattgagtgggatgaagactgggataaatttgaagacgaagggtttagtattgttaaggataatggtacaatacaggaaaacccaatttctgctgaaaatggaaaagtgccatctctttgggatgatggtgatgatatgtctcctgttgcatcctctaatggtcatatcaaggaagaaaggcgttacagtgtaggtgatcaagtggctgagagtgaaatagcatatgattttggtgatgaatctgtgaggagtcctggaagtgctggaagaagtgcctcagggagtccatttaaatcttcccgctttgggatgcatgattcatctcccagtaaaagggaaagttacagtgaccatggtggttctgaatctgtttttggtgacaagtttggtgatgaaacttcctggaactttgatgatcaagatactgactctgtttggggttctactgtactgaacactgaggctgaccaacgcggtggcacgcataactctttctttgggtcggaggcaggctcaccaagtggcgctagtgtatttggaaagaagaggaattcattcttcgatgattctgttccaagttctcctgcatacacatctgggttctctccaaaatttggcgaaagccgtgacgatagctcctcttataacttcgggaggtttgattccttcagatcccaagacactggatccttccctcaggaaagccgtttctccaggttcgactccattagcagctccaagggcgagaatgtatcaggatttgacacagggaatagctcacgaaattttggtcggtttgactcttttgatgacgccgacccattcggttcaagcggaccttttaaagcatctggaagccggtctccacccaagttctgatacgttttctgctctgagtagggatttttgtgtcttgcgtcctgctgatttgtcaatacaaggttcagattctttgagcgaactctagcgtaacatgaatatttctcctttgctcgacatttcttccgtttgccttgtgtgcaatttttccaggccatctcacgtacaaagtggacaggtttgggttatatctttgtatttgtataaacatttttctgtatcttgtaaattacaccaagtctgtctttgtttatattagtttatacgtacgaaatcacttctcctcagtggacaggtttgggtttatatctttgtttttgtaaacattttttctgtatcttgtaaattacgtcaagtctgtctttgtttatatagtttacatgtatgaaacaacttctcgccatataacctattatttccttcaaaaaaaaaaaaaaaaa

SEQ ID NO: 6958 - DNA, 174 bp, Zea mays
  Clone ID: MRT4577_106340C.1
gatattgaccggcacgacgcaacgcaaaccagggggggaataaaaaaaagaaggggccggaaaaccaaggccgccggcaaaggaaaaaccgacacgcacgacgagccaacagcgcagcacaccccaaaacgcaccggagctgcaaaagccgaagaacgaacccacagacccacc

SEQ ID NO: 6959 - DNA, 450 bp, Zea mays
  unsure (1)..(450): unsure at all n locations
  Clone ID: MRT4577_106341C.1
cggccgggccggggnttactttcacgggagccaaaaccgaacccattcccagagcagaggtgagctgagagcagggagcaccgctagcgccgacctcgtccacgacccacgaatgaggatctgcagcaagtttgggagcctcgtggtgttgctggtgaagcgctcgtggccgattggggaggggtcagccgctgcggggaccggaattcatcgtcggacgtcgtgttccgtcgagcaccctcggaggatctgggcactctctgaatctcgacgttgtctacccatcggtctttgcgcttgctgtcgtcggttctgctctctgccaggagctgcatgcatggacaaggctagccagggcggcatggacgacctcaaggctaataacttgatttattttgccattgcctgcactgctggatgttccctcaatcggccatgcttaccatggga

SEQ ID NO: 6960 - DNA, 347 bp, Zea mays
  Clone ID: MRT4577_106342C.1
aaacgaggttctttgtgtccccaatgaactacgttactcagtcctaataatggtggactgtaaaccaaaaccgtgtataggcatcaaaaaactttgaacattggtaaaacaagaaccgttactactgacagtaacatgaaagtgtccagctcaaagtgcaccaggatacaagtttcgatgaacgagaaggtcttgaggacacgctcaatgtcggccttgttcttgatggcgtagctggtggatgagcccttggcagcgttgatcaggtcatctgtaaggcacttggtaatggttttgaagttgcggaaagcacttttcttggcaccagaggcgaggaggaagatggt

SEQ ID NO: 6961 - DNA, 1057 bp, Zea mays
  Clone ID: MRT4577_106343C.1
gtgcggcgctcaaggcggccgggtccttgtctcgctctcgcacaaaaaagtctgcaagcagggttaaggcacgcaccaacctttcctcctacctctactcctgttcctcgggttcatcttcacctcgagcgctgctgcggccatggtgaccagaaggctggctctgagctccctcttccacggcaaggcaagggacacttcctccttaccaccgccgcctcctcctcctcccgcaccagcctggccatggccgtccagcaagaacccaagaacgacgcagccgcaggcagcagcagcaggcgcacaggaggaccgtcgcctccatcgtcctcgactccgccgactcgtccttcacggcctcctccgcgctgcaggaggactgctgctgctccgacagcctctccacggcgtccgaggcgtcggcgtcggcggcgtgcgacgacgcggcggcggacgacgccgtcgtcgtgcgcggggtccgctccgaccggctcctcttcgacccaggcgcgtcggccaccaactccatcctcgaggagaagtctgccaccaaacgggagcaggcgttcggcggcgccgtggccgtcgcgttcgagtccgccgacccgtacgtggacttccgggcgtccatggaggagatggtggccgcgcacgggatcggccgccactggggctggctggaggagatgctgggctggtacctgcgagccaacgacggcgacacgcactgcgccatcgtggcggccttcatcgacgtcgtcgtcgtcgccgccgtagccgccgacccggctcgctcttcgcagcaggcctcatctcgcacgtcgtttgcgacgggggagttggaggtggcagacaagggcaaaccagatggagccggagcgctcgccgtgtcatgtttggattaagctgagctaaatcttcacagtttatttgcattaccttattatatatgtagtactactacgtgttaatctcgtcgttctaaaatgtgtagagactagagaagagtactagtgtacggttctcttgacgatcaacctatgtcgttgacccacct

SEQ ID NO: 6962 - DNA, 724 bp, Zea mays
  Clone ID: MRT4577_106344C.1
cgcacgcgtccgcggacgcgtgggattcggagagagggaaggaggaagacgacctggaggcgtaccagattcagctggtgctagagatgagcgcgcgggacaatccggaggagatggagatggaggtcgccaagcagcttagtctgggcttctgccctccacagagatcccctgcggaggtcctcgcggtccgataccggaatttcaatgcccttggctatgacgacaaaatattggatggattttatgatctgttttatgttggaaatgggccagcagcagttactatgccctcttttgctgagctacgagtccagccattttcacataaagtcgattgggaagctgtgttggtccacagaggtgaagaccctgagcttatgaaacttcagcaggaggccttaatcatgaatcatgaacttcattcgagaacttcagaatctgtgggcaatgctttggttaagggacttgcaaatctagttgctagacacatgggtggagtgtttgatcctgagcgcatgtcagcgaaataccagaatatgcttagctacttaagaagtgatattggaagtgtaattgtgccacttggccagctaaaaattggtctagctcgtcatcgtgccctgctgtttaaggttttggctgatggccttgatgtaccttgccgtctcctgaaaggaaagcgatcactggatcagatgatggagctttgaacattgtgaaa

SEQ ID NO: 6963 - DNA, 513 bp, Zea mays
  unsure (1)..(513): unsure at all n locations
  Clone ID: MRT4577_106345C.1
tnntttttttnnntttttnntttttattttttttttgttttgttttttttttttgtttttttttttttgtttttttttttttttttttttttttttttttttttttttgggcattaaacccccccggggggctgggtttttttttggggtaacccgtcccatacccgggtgcaggcgggccggggtaccccaaaagggggaacctccctccgggggggggtttcggtttttggttttcccttataaaccaggggggtttttttggttttttgatcgcgggggcggccaaatccggggactttgcggggcaaaagttcaaggggggggttcaggttcaggttcaggttcagggccctttttttttttgggggggggcttgggggggagccctttggccatgaggggctccaccccggggattccgggccgggtcctgggggggtcccagttttcccttttggggggcgttttaaagcttgggggaatcatgggcatagggggttcctgggggaa

SEQ ID NO: 6964 - DNA, 613 bp, Zea mays
  Clone ID: MRT4577_106346C.1
gccggccgtttccgggctttacacttaaattattaaccatggctgaagaagaacaccaaacctttgaaaccgctgatgccggagcttctcttactttccccatgcaatgttctgccttaagaaagaacggccacgttgtcatcaagggcagaccctgtaagattattgatatgtctacctccaagactggtaagcatggtcacgctaaggttaacttggttgccattgatatcttcactggaaagaaatacgaagatctttccccctctactcacaacatggatgtccccaacatcaatcgtcaagaatatcaactcatcaacattgatgatggttacctcaacttgatgactcaagatggtagcaccaaggatgatgttaagcttcctgaaggtgatctcggtgaaaagatccaagaagaatttgatgagggtaaggacttgttggtaactgttgttactgccatgggtgaagaacatgctttgacctacaaggaagctcccaaataaattgcttccttttcatcttttttgtatcattttattaaaaaatattcattttaaacctgctttaaaagcaaaaaaaacaaaaaaaaaaaaaaaaaaggccccta

SEQ ID NO: 6965 - DNA, 349 bp, Zea mays
  Clone ID: MRT4577_106347C.1
ccctcaatcatcaagtaagtgcctccacctgggggttttatttcacactttatttatagactgaatcaacaaatatacccctaaatccatcacaaatgtcactacattgataaccatgtcactatccctaggaacatggagcctgccactgccattgtgggtcaaacagtgtgagatcttgcctcaattatgcgcacctcccaatttgctaattacataaaggaggatgcctccatagtttaaatactcctgctccacctcagtgtcaaaacgaacaatgcaagttaaagatttcccattgtcagtagtaacattcacatcctgaccagaacaaatctcactcaagttt

SEQ ID NO: 6966 - DNA, 305 bp, Zea mays
  Clone ID: MRT4577_106348C.1
atattgcaacagggcggcacgttaaatatgatcagcgttcagatgttttcagttcatccacgagaggatcactaggccgtggtcaagcatttgatgcgctaaatcaagggcctgatcagggagtcgcctcccccaagatctgtggagaggaaatgcagctcaagggcttcagcgacagcgacatggtaggctgttagagtatatttactgtgttgccactattgtaatgggcttggcccacctaactcagaccatatatatatatatatcacccaaccccctgttagggttagggttttgcattc

SEQ ID NO: 6967 - DNA, 306 bp, Zea mays
  Clone ID: MRT4577_106349C.1
gataaaattcagtttatataatctcattatattgactagggaacggctctgactaccgtaagactggacacatactcaccgagcaacttactgaccgacactgtcatagtaccttcatggagtaagagaacaccggcaccggcggtgcaaaaatcaggacacggacacctgcataggtactatgatattgaaacttgataaactacttggtctgcactgatagcccctgagcatgcataactaacgggggatcgaacgcatccatcactctttagagagctcgagctctaaatatgtccatgctat

SEQ ID NO: 6968 - DNA, 681 bp, Zea mays
  Clone ID: MRT4577_10634C.1
tgtatttggaaagaagaggagttcgttctttgatgattctgtcccaagtacccctgcatacacatctgggttctctccaaaattcggtgaaagccgtgatgatagctcctcttatagctttgggaagtttgattccttcagatcccaagacactgggttcttcccgcaggaaagtggtttctccaggtttgactccattagcagctccaaaggcgaggatgtatcaggattcgatacagggaatagctcaagaaattttggtcggtttgactctttcgatgacaccgatccgttcggttcgagcggaccttttaaagcatctggaagccggtctccacccaagttctgatacgttttctgctctgagtagggatttgtgtcttgcgtgctgctgatttgtcaatacaaggttcagattctttgagcgaactctagcgtaacaagaatatttctcctttgctcgacatttcttccgtttgccttgtgtgcaatttttccaggccatctcacgtacaaagtggacaggtttgggttatatctttgtatttgtataaacatttttctggtatcttggaaattacaccaagtctgtctttgtttatattagtttaaacgtacgaaatcacttctcctccaaaaaaaaaaaaaaaaaaaaaaaaaaaaaaaaaaaaaaaaaaaaaa

SEQ ID NO: 6969 - DNA, 215 bp, Zea mays
  Clone ID: MRT4577_106350C.1
aatgtcaaaaagcgtaaaaaaaatctctaaatgcaacaagaacagtaaccgacaaataatactagcagtgagcataccggaaaggcagagcgatcaagcacatagagtagctcatatcacgaggagtcacgcaaacaggtcggaagagagcggatgctctataggtcgaggatagatatggggctgaaagagctaagcatgggcaaggagcatcc

SEQ ID NO: 6970 - DNA, 277 bp, Zea mays
  Clone ID: MRT4577_106351C.1
caccagccagcaccatggtcacttatactaccacatccaacgtactgtcccagtcggtttttaaccaatcttagcctggcacctactccccaatcgcacatgaagttcctaacggcacacactcggccaaccgagacgacacacgcggatattagaacgtctcatactataaacctaaacacaggcatcactaacttactatgccaaaaattcttctataacttcaaacaagagaacttatcaaagcatgtacacaaacaaaatatcaatacacaat

SEQ ID NO: 6971 - DNA, 243 bp, Zea mays
  Clone ID: MRT4577_106352C.1
caagagtgctcatgtttacgctgtcccctgtacgcaccatctgttgcgatcccggccggccgaggccattgcagacgttggaagatgccgaagctcatgacacccgtgatccaggacaatccctcaggctggggtccctgtgcgggtcccgagcagtttcgggatatgccctatcagccgttcagcaaaggagatcggctaggaaaggctgcagactggacaggagccacatacgatgataag

SEQ ID NO: 6972 - DNA, 820 bp, Zea mays
  Clone ID: MRT4577_106353C.1
aattcggcacgaggggagagcccaggaactgaaagcctaatcgcaatcccactcgcagcaacgacctacgcccgcccctaactccaatccagaaccccagagtccagaggcagaccggcaagctggacacctgcggcatggagcgggtggcgctgctccgcacctcaggccgccgcctcctacaccgctgccgcaggggcaggcccgtcgtcgtgcccgctgccgcggcctcatccttggcacgccgggcgtcctcgttctcactcccggcgcgcggctactcggctctgccccgcggcggcgcgcgattcctggtcgctgcggcgccgctgcactgctccggccggtactggccggccgctgcgccccagctcgcgcggaggctgtccgcctccgctgtatctacctcgccctctcccgtgccctatgatacagatgacgtacatgagtatgccacaaagctcggatttgaaaaggtctctgaacagactatagatgagtgcaaatcaattgctgttctttacaagcacaagaagacgggtgctgaagtaatgtctgtgtcaaatgatgatgagaataaagtttttggcattgttttccgtacccctccgaaaaattcaactggcataccccacatccttgaacatagtgttctctgcggatcaagaaaatatcctttaaaagaaccgtttgtggagctctaaagggtagtttgcatacattcctgaatgcgttccatatcccgatcggacatgttatccggttgcatcaacaacactaaggatttctacaacttggtagatgtatatctttgatgccg

SEQ ID NO: 6973 - DNA, 200 bp, Zea mays
  Clone ID: MRT4577_106354C.1
ttcacggaaccgagggggctacctgatgcctgcattggatactggcaaactacaccattcctgcgctgtgtctgtccatacagatgatgccctccttcgaacagatggtcaacttccaagggtatccattttgggagcaccgttcttagcctttttatcgtaagaagggaatgtagactggacattaggcacaagagggc

SEQ ID NO: 6974 - DNA, 168 bp, Zea mays
  Clone ID: MRT4577_106355C.1
cgtatggcggcgacgcggcgcctactacgagtggagcgcagccgacctgcccatgctcggcgtcgcgtccatcggcgcagctaagctctccctcgccgccggtgggctctcgctcgccagctactccgactcttccaacgtcgcgtacgctcttgaacgcactggcac

SEQ ID NO: 6975 - DNA, 1507 bp, Zea mays
  Clone ID: MRT4577_106356C.1
ccacgcgtccgcgcttcggcggtgtgcgcttggaaaccccgggcggggtgtgtcactttcccacctcccgtcgtcactccaccgccgtccccttgagcgctcgccccaacctggggacgctcgccccagccgatccgatccgtctcaactccattaaaaaatctctcctttccccctccctatccaggaaaaggagaaggtaccacctcggtcgatcttccctccatttactcctccgggcgaggtcccgattcgatcgaaggcggcggagagagatgaggaagcgtgagcgagagaacccgtgcgggatctgcgggcactaccacaagtacgaggagggggaggtgtgcggcgtctgcggtcaccgcccacctgcagcgtcaccagtaggggcgaggcagcaagactcggcgttcccgtccgagatcctcaaggagttcctcttcctcggcagctacgacaacgcctcccgctcggagctcctcaagaccatcggcgtctcgcacatcctcaatactgtacctttgtgccaaaacctttaccggaattcattcacttatcactgccttcaagaggacaagactctgcagtttgatgatgcaaaccagtttctagagcaatgtgagagggagaaagcacgagtcctagtccattgcatgtctgggaaaagtagatcggcagcttttgtaatagccttcttgatgaagtcgagaggttggagattggcacaatcttttcagtgggtgaaagagcggagaccacaagtgcaactgtctgatgcagcacagcagcagctgattgagtatgaaaataagctttttggttctaatgatggcagcataccagctcaaccttttgctccggtggattcgctcccttctcttggatttggttttccaaaaccaccaggcgacatccaagcgcctacctttaatcagcaggctccagcatctatctttgagcgcgttaccccgaacagcttccctagtaatttcatattcggagccgaaagaactagtgatagtgatgcgaaacttccagatagcaacaatttcggtgtggtaaactcgtcgactgggagtgatagcatgatggacagctcctaggatggttttgccttcacggaggctatctccagcagcttaatcctcaactcctcatctctcgtttcaaatttcacttccactcttgtacaactatagcctgatatacaaaagaaatgactcagtcgcaaatttagtcaggtttctcgggatgtttttttatttctgagaaggaaacgcatttttgtaatagtatgttgtaatatttgccagtattactaaattgctgctgtgcattttaacaatcatgagtgtgcttttttaaataacttttctagggtaattcccgataacaacttacgctggaaagtttgaataaaaaattacacatgtgcttgttaagatgtaaaaaaaaaacaaaaaaaaaaaaaaaaaaagaacacagggggggcccccccccttag

SEQ ID NO: 6976 - DNA, 849 bp, Zea mays
  Clone ID: MRT4577_106357C.1
cattgggtacctcgaggccggccgggtttactcttgcttgttcttgtctgaatgtgaaatggcattgatgtccctttaattgcagactgtacctttgtgccaaaacctttaccggaattcattcacttatcactgccttcaagaggacaagactctgcagtttgatgatgcaaaccagtttctagagcaatgtgagagggagaaagcacgagtcctagtccattgcatgtctgggaaaagtaggtgtgtatggtacatatgtatattttttcatctgggggagctataatatttcttatttctgcactgatttgactaatgttatcgcgacactatatcagatcggcagcttttgtaatagccttcttgatgaagtcgagaggttggagattggcacaatcttttcagtgggtgaaagagcggagaccacaagtgcaactgtctgatgcagcacagcagcagctgattgagtatgaaaagaagctttttggttctaatgatggcagcatagcagctcaaccttttgctccagtggattcgctcccttctcttggatttggctttccaaaaccaccaggcgacatccaagcgcctacatttaatcagcaggctccagcatctatctttgagcgcgttaccccgaacagcttccccagtaatttcatattcggagccgaaagaactagtgatgcgaaacttccagatagcaacaattttcggtgtggttaactcgtcgacctggagtgaatggcaggttgacaagctccttagatggttttgtgctcacacggactatctccagcgcagctttcctctccactccatctctcggcaatttcacttgcactc

SEQ ID NO: 6977 - DNA, 264 bp, Zea mays
  Clone ID: MRT4577_106358C.1
ctggggggtttttttttgggtggatttttactttatattttttggacaggaaacaacaaattccttttgtttttgggaacataaggccatttaaagagcgtgcaaaaaattgttttgatcttggggcaatcctgtttacaagagtggtgtttaaattaaaaatggaaaaaaccaggggggctgctggaataagcctaaggtgaaaaattttgggaggatatttaataaatggcgtccttttactgtgcactttttttaaaaaga

SEQ ID NO: 6978 - DNA, 358 bp, Zea mays
  Clone ID: MRT4577_106359C.1
ctcttccgaaatgattccccatcttcagacgattacatttataacacaaatgctacttcaaatggatacgtttaattttaagattacacaggacatgactctctaagaatttcataaaataacaatcacacaatactaaagcactacttgcattaaacgctcactacaggaaacatgaagttgacaaagattagcactctctgcaaccactttcaaacaacaaataacatcatgaacttctcattaaactcacttcttacaacgatcatatgaatgaaaacccttaacttcattaccatgccaacaaatctcatagcatcaactactccctgaaacctacttaatgaaaaatgtacta

SEQ ID NO: 6979 - DNA, 2124 bp, Zea mays
  Clone ID: MRT4577_10635C.1
cctcgaggccggccggggtgacagcctaaaaccctattggaacgccgcacgcctcttcgtcgtcaagaacgccgccgcagacatgcgccccttccacactccccgccccaaccaacatcaccgcgcacggcccggcggcgacccgggcccgcctcaccttcccggtacccccatgcaccccgccttcccgccacctgtccccaacctcgccgccgccgccaaccccatggctgcagcggcggcggccaaccctttcctggcgctgcagcttctaggccaggcccagcagctccagaatctcggtttcctcgccgccgccgcgctccagaagcagcagcagcaggcgccgttctttcctggagggttcccttcgaaccccaatcagtttgcgcctttcgcgggtggccccccgcctgtcggtttcaatggcggcggggcgtttcgaccgggcggtgcttggatttgtgggccgcggccacccagtcccatgatgagccctgcggggaacggttccaacaacaacaacatcgctggaagcggtggagcgtcgaggccgattttcaacgttgggaggaaggaccacaacaatatagctggcagcggtggcatgccgaggccgattctcgacgctgggaggaaggaccgggatagcagtgctggcggcaacggcgagccgtatcactttgagaatagagcggatggcatatctaattttgtctctgaaaatgggaacaaaataacagaccagaaatcaggatttagcgttggaagagatggtagaggtggcaggcaatttggtgcatttagagggaggggcagaggaaggcatcctaatcaaaatcgtggaagaggaagcaacaactggggagaaataaaatcaaacttcatgggacacaaaagttcagcatcaaagcattgcagtgatattgcagctccagcatctggaggacgccgaaagccccctccaataatttatgatgcaaatgaagttaaacagtgggtagaggcacgaaaaaagaactaccctacaagtgtcaacgtaaataagaagttgtctgagatgaaatcagataatgaaaacaaggacaaagatgcccaactgcgacgtcaggaactgaaggaagtcatagcaaagcaacaagagctgggttttgacccacctgagctaccgcctggctatctatcagaaattggggatcaatgcattgaaaataaaaataataggaaaactcaattcagggattctcattttggaaatcgtttcaataataacaaaagatcaaggtatgagcgtggaggttttcagtctaaaagatctaaggtatggaaccgtactcctcacgctgatcacgggatggtcaagagcagagaaccaaccctcctgcagaagcttcttagctctgatatcaagagggataaacgtagacttattcacgtgttcagattcatgaccttgaacaatttctttaaggactggcctgacaggcctttacagtttcctagtgttaagatgaatcagattgaaataggaagcaatattagcacagatgagttggagaatgctgggatgtccaaagacagcatccttggtgtaaacgaaaatggtgattggaaagagttgagctcgattgatgaagaggataccgatagcgccaaccacaatgatgaagacgtcgatgatgacagtgttgacagcagcattgaggatggggccgaggaggacgggtacgaagagcagtttaatgagcctgaagatgatacggcagtctgaaaatttgactgagccgggtatccacatcaaaaagacaaagcgcttctccttgagtagagtttttgcacaacacattctgtagctcttcgcatattccagttataggagagggtctggtgtttaaagaaactttgtactttgttgtagttgaattgttatgttatcgccgggaatatatatactccctacgtttctttttatttgtcgctggatagtgtaaaattaccctatccagcaaaattaccctatccagcgccaaataaaaagaaacggagggagtattccatatgcggacgtgttttctgtccttttttgaatgtataccaaagagtaaaatgttttatgagtctttt

SEQ ID NO: 6980 - DNA, 411 bp, Zea mays
  unsure (1)..(411): unsure at all n locations
  Clone ID: MRT4577_106360C.1
caacagaattgtgtggtggtcggtgggcttctaccgcggtcttcgcaggccacgcgctagggtcccgctggatgcgccggcttctgcgtagccaccatcgaaggtccaactacctccgcacataaacagttgcgccaccacactcccagaatttctcccccacagcagtactaggtgcagagaacccccttcctccactcgacgtccagccatggcgcacgtcacacaagtctacttcatgttcgagctcctccatggacgcagggatcttccgcggttcagggagttttatggccgaaggcttctgctgtgtcaccacgggtcaaacagcgagggaaaacgcagagagagaggagggagatggagccggatgtcgctgccgcgtnccacacggagagatccagaagaaga

SEQ ID NO: 6981 - DNA, 692 bp, Zea mays
  unsure (1)..(692): unsure at all n locations
  Clone ID: MRT4577_106361C.1
ccggccgggaaacggggcgaggagctggagagacgccggcgacgcgaagcaaccgcccgatcggagccgcggttgagcaggaggagggagccggagatggtgggtctcgtcggcggcagcacggcgcgggcggagcacgtcgtcgccaacgccggaggggaggcagagtacgtgcgccgcatgcaccgccacgcgccgaccgagcaccagtgcacctccaccctcgtcaagcacatcaaggcgcccgtccacctcgtgtgggagctggtgcggaggttcgaccagccgcagcggtacaagccgttcgtcaggaactgcgtcgtgcgcggggaccagctcgaggtgggcagcctgcgcgacgtcaacgtcaagaccggcctgccggcgacgaccagcaccgagcgcctcgagcagctcgacgacgacctgcacatactcggcgtcaagttcgtcggcggggaccaccgcctccagtcctgatcgctggatgctatgcatgaaatgcatttgctgtgcttgcgagattgggcatttactatgagctttgtgacagttaacatcttggtcctgtttggaagctgngattgngaatcaaatccttacatggtttaggagcatccagtttgaacttaaaccattgtagacatctgctgcaataaaaacaattgggcttcggtgagaggcactcatca

SEQ ID NO: 6982 - DNA, 159 bp, Zea mays
  Clone ID: MRT4577_106362C.1
acgatctgcctcatctccgacctgaaattgcctaagttttatctcctgtcaaacgctaagcctgcactggtcgatttccccaatccagtgacccagcataccacagccacttcagtcaaggttctctcttccatcctttctacctataccaagttcaaa

SEQ ID NO: 6983 - DNA, 842 bp, Zea mays
  Clone ID: MRT4577_106363C.1
ggttcgaccagccgcagcggtacaagccgttcgtcaggaactgcgtcgtgcgcggggaccagctcgaggtcggcagctgcggacgtcacgtcaagccggcctgccggcgacgaccagcccgagcgcctcgagcagctcgacgacgacctgcacatactcggtgtcaagttcgtcggcggggaccaccgcctccagaactactcatccatcataactgtccaccccgagagcattgacgggaggccgggcaccctggtgatcgagtcgttcgtggtcgatgtgcctgatggcaacacgaaggacgagacatgctacttcgtggaggccgtgatcaagtgcaacctcaattctctcgcagaggtatcggagcagctagcagtggagtcacctacgtcgctgatcgatcagtgaagtcacctgcgtcgcccatcgatcagtgaccaccggtacaaaaaaagacgtcaatcagcaacaaataagaagaagcttcgaaggctggctggagagttcaacctttttgagaccggtggtttggccatcgtcttctgcgtgtaatgtctcttggaatatggaagtattagtcgttgtgtaggattaaacatctgtagtagcttgtatgctagggatggttgtttagccttagaaactgcacctagatacctcatggcatgtatgcatactgctagtatgtgtagagatcagggaaagcatggagcgggttttgcctcttaggtgcatggagatctgtctttttttccccctccattttgcggtggcgactctattggttggggttcttggataaatatactttcccgcgaacgcatagggccggattttgg

SEQ ID NO: 6984 - DNA, 1707 bp, Zea mays
  unsure (1)..(1707): unsure at all n locations
  Clone ID: MRT4577_106364C.1
cgtcaagcacatcaaggcgcccgtccacgtcgtgtgggagctggtgcggaggttcgaccagccgcagcggtacaagccgttcgtcaggaactgcgtcgtgcgcggggaccagctcgaggtcggcagcctgcgcgacgtcaacgtcaagaccggcctgccggcgacgaccagcaccgagcgcctcgagcagctcgacgacgacctgcacatactcggtgtcaagttcgtcggcggggaccaccgcctccaggtccgtgctgctgccgcccgtttgttgcgtccctgcaaaaatgctctgtttcacgcgccctccttgcttgtcagtgtactccaaattatttttgggggtatgcttgctttgttaccatttctcttttttttaaattaaattgctttcttgtttccatttcactgcagtcctgatcgctggatgctatgcatgaaatgcatttgctgtgcttgcgagattgggcatttactatgagctttgtgacagttaacatcttggtcctgtttggaagctgggattgggaatcaaatccttacatggtttaggagcatccagtttgaacttaaaccattgtagacatctgctgcaataaaaacaattggcttcggtgagaggcactcatcatcagttcaaacttaaaacgagataagccatcggttgattggcctaattaccttgcttcccgtgattgttcgcctcgctgaaaggatatgctcacaacccgtactgttttgacttgttatccacatactatttaagtacgaaaggacatgcgtactactttcatttgttgttcttcgtctagtcttcagactgataatataaggtgaaaaacttcgatgtttcgcgtgctgtcaagtgattgtgaagcaaagtttctgttagtgtcaatgcgtacaggctgcaatggccatctttactcctacttgaagcatatctctgatccacactgatgatgatgagttgtgtgcgccacttttttttctttttctttcagaactactcatccatcataactgtccaccccgagagcattgacgggaggccgggcaccctggtgatcgagtcgttcgtggtcgatgtgcctgatggcaacacgaaggacgagacatgctacttcgtcgaggccgtgatcaagtgcaacctcaattctctcgcagaggtgtcggagcagctagcagtggagtcacctacgtcgctgatcgatcagtgaagtcacctgcgtcgcccatcgatcagtgaccaccggtacaaaaaagaagcttcgaaggctggctggagagttcaacctttttgagaccggtggtttcgccatcgtcttctgcgtgtaatgtctcttggaatatggaagtattagtcgttgtgtaggattaaacatctgtagtagcttgtatgctagggatggttgtttagccttagaaactgcacctagatacctcatggcatgtatgcatactgctagtatgtgtagagatcagggaaagcatggagcgggttttgcctcttaggtgcatggagatctgtctttttttccctccattttgcggtggcgactctattggttggggttcttggataaatatactttcccgcgaacgcatagggccggatcttggaattggttcaaaaaagaaaaaaaggccatgagttggaattatatagatagntgaagtctttcgccctgggaagagagggga

SEQ ID NO: 6985 - DNA, 1439 bp, Zea mays
  unsure (1)..(1439): unsure at all n locations
  Clone ID: MRT4577_106365C.1
gatttttgtacccgccggctgggcctcggcctcggcgtgcaagaaactagaaagaggagcagacaaacaaaatcgattagaattaaccccaggccagaaacccactctctctctcccccgattcctttcctcgtcctcgtcctcatccgtccaggggagcaaacaagcaagcaagtaaacgggcgaggagctggatagaggccggcgacgcgaagcaaccgccgatcggagccgcggctgaggaggaggagcaagctcgagatggtgggtctcgtcggcggcagcacggcgcgggcggagcacgtcgtggccaacgccgtgagcgaccagccgcagcggtacaagagagacggagtacgtgcgccgcctgcaccgccacgcgccggccgagcaccagtgtacttccaccctcgtcaagcacatcaaggcgcccgtccacctcgtgtgggagctggtccggagcttcgaccagccgcagcggtacaagccgttcgtcagaaactgcgttgtgcgcggtgaccagctcgaggtcggtagcctgcgcgacgtcaacgtcaagaccggcctgccggcgacaacaagtaccgagcgcctcgagcagctcgacgacgacctgcacatactcggcgtcaagttcgtcggcggggaccaccgcctccagaactactcatccatcataactgtccacccggagagcattgacgggaggccaggtaccctcgtgatcgagtcgtttgtggtcgatgtgcctgacggcaacacaaaggatgagacatgctacttcgttgaggctgtgatcaaatgcaacctcaagtctctcgcagaggtatctgagcagctagcagttgagtcacctacatcgccgatcgatcagtgagtcgcctgcatccccgatcgatcagtaacaccggtacaaagacatgaatcggcaacaaataagaagtttcaaaggctggctagagggttcaacctttttgagattggtggtttcgccatcgtcttctgcgtgtatgtctcttggaatatggaaggtttagtggtatgtaggtttaaatatcttgttgtagcttgtactacctccgttctcgaatatttgtcgttgactagtttatttttaaactaaaccgcgacaaataaaaaagaacggagggagtatgttagggatgatttagccttaggaactgcacctacatacctcatggcatctatgcacactgctagtatgtgtagaaatcagggaaagcatggagcggtttttgcatcattggtgcatggagatctatgccttttttccctctccattttgcggtggcgactctattggttggggttcttggataaatatactttcccgctgacacatagggcctggattttggattttgtttaattctcgtgatgngcagtattgtattctccagtgttactgggatttgacc

SEQ ID NO: 6986 - DNA, 392 bp, Zea mays
  Clone ID: MRT4577_106366C.1
ctggggtaaaggaaccaacacgaaaataaaacaccaaaggccccaccacaacagaaaaaccccaaaatcccttaaacaaataaggaacgcaaccagcccaaaaaaaaaacagggacaggaccccggacagaaattgcacccgagggggcacccaaacaaaaaccaaatggaaaccaaatccaaccccggttgcagagacctcccaaaccaaaaacgaaccaaagaagacaacaaacggtaaagggaccaaaaacaaaggaagcgcaggggctgctaaagctccaagaaagccccggggcaaaagaaacccaaaaggcccacctagaagaaagggcgaagcccaggcaaactcaagggcaacggcccccagcaggagcccccccccggggcgg

SEQ ID NO: 6987 - DNA, 255 bp, Zea mays
  Clone ID: MRT4577_106367C.1
gttattatcccatggttaatcacaattacacaaacgtatggctacactcaaaacttaggtatgaggaggggattgttattatcacattgttattatcccaatcagcacattaaatacacaagagctacactctcacccccattctcacacttgtaggtgagagatacttaatgccttgtgttcttgagtcttgcaagttcttgtgcttctattttgggttttcaagctcactctcacccgcattctcacacttgt

SEQ ID NO: 6988 - DNA, 699 bp, Zea mays
  Clone ID: MRT4577_106368C.1
ctatgtagttgattcaattggatcgggagaggattggaaaagctaaagctgaatttcaggcaataatcaatgatcctttcatgcttaacagtgtcatattggtatttgccaataaacaagatatggtgaggcaacaatacttgacccttcatatatatattagctcggccgggagggggggagaccgcctcccggtattatattaagaaaaatcgaaacatggtcccggccgagaaaatctccgaaccctgcgcctccatcactagcgggccgtcaccatccactctgcaacggtccagtcggagggtggagcgcatgacgtaactcgggagcgagcggggcataacgaggggatttttttaaccaagccgaaattcgccctgagggtattgaacccgggacctggagaaaggggcaatgacaccaatggaggtgtgtgagggccttggcctctacgatttgaagaatcgcacctggcacatccaaggctcctgtgcgcttaaaggtgatggcctttatgagggcttggactggatggcaagcactctgaaggaattgcaagcttcaggtcgcctaccctctggagggacatcgttgttttaagaagcaaatctgcatgtaagatccttgggttgatactagtaataatggatcaagagatcatcaatgatgttaacatcttgatgagaatttcctttc

SEQ ID NO: 6989 - DNA, 498 bp, Zea mays
  Clone ID: MRT4577_106369C.1
ccggccgggattttatgacgtgttccttagatttccttctcgccggagacgatcggggtacggagggtgggactctgggaaccaatcgaacagccgcggatatgctcgagggcaacgactactgcctcattgaatggcgctaatgcggcgcgcgcgccaagtcggaggggcacaaatgaacaaccacgccacgaactatttacgcccacggctcccatgacacgcgctggaggagagcggctacacctctcccatcccatggaggaccacggagacaggctcgctgcattcaagctggcatctgagacacgagcgcgacgctctcgtcctcagccctcgatcgacgcgcgaccgcaagtgcagcacatactcgggtagctgcgggtctgcaatgcaactcccccctcacgatggtcaagagggcctcgtgcggcaggcatgcgatggcgcttccgctgctcatggactggagacaggtacaagaagcatgaccagacg

SEQ ID NO: 6990 - DNA, 437 bp, Zea mays
  Clone ID: MRT4577_10636C.1
cgcgtacgacgcacgcatacacagttcagagcgaggttagtatccgaaaaaagcagggatctgaacgggagggtcgtcagggccatgggtctcacctccaccgcgctcatctgcaagcacggcgaccagtaccacacacgcgtagggcgatgggcggatcaccatgcgcaagactgttggctagcccaagccagcacgcgtccggcagacactggtacggagactaccgtgtactgtacctgggcccgatgttcgagcagcccccaagctacctgaccagcgagttccccggcaactacggatgggacaccggggggttgaccgccgacccggagacttatcccaagaaccgacagctggaggtgatccactgccgctgggccatgctgggcgcgctcgattgcgtgttcccggagctgctcacccgcaacggtgtc

SEQ ID NO: 6991 - DNA, 516 bp, Zea mays
  Clone ID: MRT4577_106370C.1
actccgtgcgaccgctcgtggccgacgtcgtcatgacgctgggcttcctcacggcgatgccgccggatccaccggcccctgctgctccacctgccgccgcctcggagccgaagaaagacaaagcagaatcggatcattcagactcatcgtcatcttcttcggacgacgaagaggacgaagaggaggaaaccgaggagcaatgataagggcatgcaggtgtgttcctaggcttcagatgtggaaggccggccacgcagatgaatgtggcttcatgcacctattctgtaaggagctcaatatgtagaccgtggattaattaatcctttgggggctagctacatggtgtggttgcggttgcggcagtgtaaatttggggtgttcataatttttttttttttgactgtcaacgggggaaaggctccccacctgatttttcattgatatgttcttgtcgcccctaaaggctttacataaaaaaaaaaaaaaaaaaaaaaaaaaaaaataaaaaaaataaaa

SEQ ID NO: 6992 - DNA, 150 bp, Zea mays
  Clone ID: MRT4577_106371C.1
cagacaggaaacctgggtcctccagtatttaagacagcaagattttttccattccagggttatcatcagagaccccgctccccaacatgatcaaaagtactcgaaaggtctatgcgggtagtagcagtggggggggtggtagtatacgca

SEQ ID NO: 6993 - DNA, 1035 bp, Zea mays
  Clone ID: MRT4577_106372C.1
aacttgttcatttaacaaagcaccggtctgcctttggctcacaccacagttggctgttggcccctgttctcttcttccgatcctttcacacgcatcacccttattgcagcagcgagcagcctcggctcactgcctggtggtggtaccggtggtggctgcgttgctcgctcacttcacagccaccgcagcaccggcgatcgccgtgccgtcttccccgccggcgttgtcggcggtaccggtacgggcgatcagcgactcctcgcggtggaaccaggtctgctgcttcgcgatgaacgcctccaccgccagccggaacgcctctgcgtcgtccatccccagctccaccggcgccgccgccgccgccgccgccgaacgtcgttgccggcgcctgccgctctccgacttggcacgccgcagctccgccgacgccgccctcgccgtgccgcccgctgcgccgccggtcttctccgacatggcccgccgcggcggctgggcgcgcactgtcctcgcgtggtgcgccgcctccttgccgtcgagcgcctcatccggcggcgcctcctcctccccggagggctccgccacctcggcgaccggcggcagcggcgggcccaggagcgcgaggaacgggtgctgggcctgggcgtcgccgctggagccgggagggtccgcggacggcggcgaggacgaggctgcgtcgcggcggaagagcgtggcgagggcgatcaggatgacgtgcgcggcgaggaagcagaggcgcggcggggcgaggaaggaggcggcgacgcggaggatgcaggcgggggccgcggcggcagcccagggcaagtcggcgaaggcgcagaggagcacggccaagcctgcagcgacctgcgccgcgtgcacgagtcccctcgccaccgccacgcgggagctggacagcggcgcacccctgccatcggcggcagccatgggtcgaatgtcgcggcgggccttttggtggcggggttcggtggcagttgcaggtacggggagatcgacgcctgcgccctgcactgc

SEQ ID NO: 6994 - DNA, 201 bp, Zea mays
  Clone ID: MRT4577_106373C.1
ttctttacatctccctgctcctacgcctccttgtcgatccagtcaagccagggatcgccatgtcggactcggaggagccccacttcgaatagagggccgcatcctgagtagacacaaccaacaaaacattgttatttaatgctattagagattcattctgaaatattgagaacctataatggaaggtagtgggaggtaatt

SEQ ID NO: 6995 - DNA, 267 bp, Zea mays
  Clone ID: MRT4577_106374C.1
gacactcttagtgaagtgaggtactacaatgatctgcatgttttcgatttggaccatttcaagagggaggaattcaagccttgaggtggatgcctattgccaagtccaagaagtgtctttcaacttgctgtttacctagatcatatatatctatatggcgtgtattttaaagaagtttttcctgacaaagaaaatggtactgttcattcatatatgtggacttttgatcctataacttgatagtgttatatggtatatattgctttt

SEQ ID NO: 6996 - DNA, 225 bp, Zea mays
  Clone ID: MRT4577_106375C.1
attcaatactttatacaccaggcagggtgtatatttttgagatactgcccccccaaaccaagggtttaataaaaaacacccccgactttgcagttatacatgtatctaagtggttatccatcgacaacatacttaatctaggagactaggcaaaccttaaaccgtacttgcctacccgcaggcaacacgactaggttcgcaatgagtgtccttcaacaatacggc

SEQ ID NO: 6997 - DNA, 269 bp, Zea mays
  unsure (1)..(269): unsure at all n locations
  Clone ID: MRT4577_106376C.1
ncttatcatacgcagcatatttgtcgacgggatggcgtgcgtaagcgggggcttcgccatcagccagacggtggcggagaggctggagcggatgcaggacgcgtgcatacggctgaacccgtctctgtacggcagcgactaccgcatgcaggcgtgcatgggctagctgggcgtgccgttgacgaggcagcccgtgcttcaccagtacgacgtgtacggtgaccttctgggacttctcgcagcgcaccgcgacgtgccgctcgtgtcgc

SEQ ID NO: 6998 - DNA, 275 bp, Zea mays
  Clone ID: MRT4577_106377C.1
ctcaccggctccattcgaccattccatactttccttatcccctcccacttcgacttcctggctggcttcctttcttcgccatggcaaccatgtccctccgctccctcgccatggccatggccgataccgcgctaccgcccgcccacaagctcctacccacagtttcccttccgctcctctcctcgtccacccgcgccgcgccgttcctactgttcgccaggcgccacctgccgatcgcgcccctcgttaccttctgcgacacctgtgaggccaag

SEQ ID NO: 6999 - DNA, 387 bp, Zea mays
  Clone ID: MRT4577_106378C.1
tcaagacgcctttagcgagatcataaaatgaaacctctggtgatccgggagcgcatcgggcttacgacgcccacgatgcacagacagccaacggtttctcgcctccgatgttaccatctaaccaactctgcccatatacaatacacacaacagaatgtaccttgacaaacaagcaagccttaaagcactctttacagactttagggaaaccacccagccatccccttgcttctgagattatatacaaacaaactaccgcctacataacaataccgactattagcaagataaggctaaccacatcactgtattcaaggatacataccaaacaagagggtgttagaatacaattgtgaaacgcgtcaaatttgtccacgatgggtatac

SEQ ID NO: 7000 - DNA, 496 bp, Zea mays
  Clone ID: MRT4577_106379C.1
acaacaagacaattctggactgctctgactcagctaatcaaatacagtcacactgacccataacagcactggatcgcataccacagggtgacggtacacatcgattcagatgtttgccagcccgtggggattgtgtggctcgaatggcctttggggcctacccgcggttgggtggcttgaaatagtgtctctgccactgggtcttgcacctgtccgggatcaagcggatctccccgccgctgtactcggacctgtgatcttcacgacatggactttgctgaagccgtcgttcctagcaatacgagccttgatctgtattatgctaagcctgctgtcatcgaaggaagtccggtaaacaagcaccttcttcacctagcccataagcccctggagctgacgatcaaagacatgcttcatgacgttcatgagcatctcggactacggcaaattttccatattgaccttgaggtccacatctgtcacaaacaacttggga

SEQ ID NO: 7001 - DNA, 1444 bp, Zea mays
  Clone ID: MRT4577_10637C.1
catgaagcagggagatctccagggtgcctttgcactcaaggccaagatgattgaaagtggtttgcaacttgatctctattgctacacttgttttatctcgggcttctgtaatatgaatatgatgcaagaagctagaggggttctttcagaaatgattgggactggcattacacctgataagacggcttacaactgtctgataagaaaataccagaaaatgggaaacatggaggaagcgtcaagtcttcagaacgaaatggaaagtgttttgagctcttgcacagaagaggataccgcttctggttctggttgtgaaacctgagtttgcggctgtacaaagagctgaccggccttggagcatgtggcaagcaacatctggagaatggggggcgccatgaagcacaagctgctgaaggatgtttccaaaatgttgttcgtgcctaatgggatttcgactgagagatctactagatcaaattgtaacaaggatcatgctatcaaatcaaaagcaacacttaagggtgctttgtctttaattgcactaaacattgtcagttacaacaggaagatggaaaataggttttaaacactaagagagctgggatccaaaggaaaaagaagcaacccacaggtgcttgaagagttcatgtgggaaaatgaatgggttgaagaaaatgaagatgatggtgacaacaacatatagcatgctgtggatggggcattaggagcaactcaggctcttcgaggcagaaacgttcctaaatgaaggtttttgcgatgaagtggtcaaatgggccagagtcactgtacgttcttgaatcctgatgtcatcccggtcttagacaacgaagaggaattcaagggagagacatatcacatatgcaatagaggcgcgtgtagctaaaaacaagcccataacttgaagaccatgtagttttttttcagggacagcagcaacttgagagagaaccataacagtggatcttctcttgggtattggcaattccataccaagtggttatatacaggatttatgcaaagaatttgacaatgccaaacatctgccttttggagcttcttccagagaacagaacatttttgcgagagacatctgttgaaaaatcagcctcgaaggtgcctgtctcttctaggagcaaagagctgccgaacttcaagagaaaagtggaggaagaaagtctccttgtttaccaggaagaaacataggaaggaggcgtcaaaaacgcccgctggaaatgagaaaactgagggcacgtcctctgctgtagcaaaacagaaaccggggcacacgctctgcttcaaacgtctctaaactactttatgctatgaatttataatctttttaccattatgctcataaatcaatgaagtagtaagagaatacacacgtcgtcaatctatctccaattatttttttattatatat

SEQ ID NO: 7002 - DNA, 273 bp, Zea mays
  Clone ID: MRT4577_106380C.1
ttaaatattgaaatctatggcaccatggacgaattaatatgcaggctcggggactaattgtattgttaatatccaaagcagctggtcaaggaccaggtatgccagaaaaggaacatgactagagtgctcgcgttgaacatggacaacgcgcatcggccgaagtttgcgaaacgaatcagatctgacatttggtgcatcaaggttggactagttcacagggagtgccacatgctgaagcacgatttatgattgcaccggcgacacgacatttgg

SEQ ID NO: 7003 - DNA, 278 bp, Zea mays
  Clone ID: MRT4577_106381C.1
ttctatacataattcattctccttcccctctctctagtgctcgccggctctttccgtcgggggggcgtcctcctgtggtggtgcctgctgcttctcctggcctccgccgcgttcgccggcatcgagcggtgcgtgctgcaagggaaggcggcctactctccctcgctctccccggcccctcacggtagcagcggagcgtgcgggtactgcgccatggccgccgagatcaatgggggcttcctcgccgtcggcgggcccaggcagcaccgggggggccc

SEQ ID NO: 7004 - DNA, 276 bp, Zea mays
  Clone ID: MRT4577_106382C.1
gctcctgacagggtatttttctcttttatgaaggagacagactttccggacagcaggataggcgacacagaatatttgacggtcgcaagccgtgctagccacccacagacgtgcgaggtgctgccagcttatctgctaagcatgacatgccatgccatatgccacaccaaagattatctggcagccagtacactgagactgaactacccaactgcgcctctgacacgcgaccacagactgcctacgtaaactatgatgacgatgcctatgcaccaa

SEQ ID NO: 7005 - DNA, 130 bp, Zea mays
  Clone ID: MRT4577_106383C.1
ataaagaaatccgccacgcctgcaaataccgctccttaattcccaattcaacccacatcctccttctacaaccatctatcgctaccacccgagctcttctaaaaccaatcaagaaccactcacacaattc

SEQ ID NO: 7006 - DNA, 363 bp, Zea mays
  Clone ID: MRT4577_106384C.1
acgcgcggggctcctggctcatgtccggctactgcagggcggggatccttcaggaggccgttaaggtgttccgcacgacgcccaagataggcgtcccccggacggcgctgtcctacaacgccgtactcaaggccatactctgccggagacgcgaggccatggccagacggatctgcatcaccgtgatctgggacagggaggcaccggacgtgttcacctacaacacgctcagaggacaggccaggcctgttgctgaagatggagaccgcggcatggggttcggggacacaaaaggccatagggtgacccctgatgctaccacttactacaccctaatgaacgcctgattgcatgcccgatagc

SEQ ID NO: 7007 - DNA, 372 bp, Zea mays
  Clone ID: MRT4577_106385C.1
ataaaaagataataatcataaccgaaaggggtaccaaaggttacaatgacctggacgagaaatacttactataagaaacgaaggaaatacatcatcatcaagaaaaggaaaaaaacagggacaaaaatggggggtacatgggcaagcaaagccaagcaggttttttcctagggaagagcctggcttctacattacagagggaggaacaaaaacaagtaacatcttaaccctccctacctgggggactaagctcctaaactaaactcggggccgagcgaggacagccttctaccaatggacaataaaactacgtggcgggtggtttggggagggatagaataaaatgttaggaaggcctaaaaattaaacaag

SEQ ID NO: 7008 - DNA, 149 bp, Zea mays
  Clone ID: MRT4577_106386C.1
tcgatccaatccatatcagcaaagcggcagtttttttttagtatcgacgaacatatcagaatgcggagtgtcatcgttctacatgtgtgcctggctttagaagcatgtcatttcctacgtaatgcatatgcctcgcccctgtgcgtagc

SEQ ID NO: 7009 - DNA, 469 bp, Zea mays
  Clone ID: MRT4577_106387C.1
gttttcacattcacagctccctcggtcagagcagcaaaagcaagcggaggcgtggagctggctagctgctgatgggaggccgatgcggtgccgaactgctggactgtcgaagccaccgacgggaggccgacgcaggagctagcgagctgttgatgcggtgctgaacttccagaaccgttgtgtcgcgcccgcgaggtcgcgatggcgcgcacgagcgtgcccgcgatggagcgtcgccgcaccgagcgccggtgatggagagccttgtcgtggcggcgatggagacctttgtcgtggcggccggggggctgagcgagcgaacgatgccacgatggagctgtggatgacctattttttgttggactttgtgggacaggtccctggagttactggactgcgaccggggctgcagcccgggcagtcctggacgcaaatacgcccctgtgctcgtgtgcccaggcagcggaaa

SEQ ID NO: 7010 - DNA, 266 bp, Zea mays
  Clone ID: MRT4577_106388C.1
gatgtacagcatatattattgatcagctccacagggtgcatacaaaaatacactaacggtacaatgtgtggtttccacgcacagctgccttaacaaatactggtgcatctttcttttcctatgaatactgtacgtttacggagcaggcgtgcaagcatgatgccgcttgtcacttgccggggacgatattggtggctcaagcccatacattgttattgactgggtcggcgaagtggtcgctaaggttctcgtctgggccgttgccg

SEQ ID NO: 7011 - DNA, 404 bp, Zea mays
  Clone ID: MRT4577_106389C.1
gacacatcaacctttttcacaaatgtataatgaaaatatcctgaatcaaaaaaaccgggtgctctgaatatcgataaagcttccctaaatcatcttagtgcattgtcacttgtttttatgctgttatatgacattgttgcagaagctgtatatcatgcaatggcaatacacacagtaaaacatatcacattaccaccctttgtctcgctcgaagccaaggaacccttatgtgggcaaggtaagggtgccaaactatatgctatgccatttgagggcttgaggcaagagacccaaacatggcaaggttgactataactaaataaacttactttaacaatcgagtatgtcaaatataacatgtgtttggttacaagctaaaacttggattttattttaatacaatt

SEQ ID NO: 7012 - DNA, 325 bp, Zea mays
  Clone ID: MRT4577_10638C.1
gttctctgatgttgatgccgttgtgtttgacaagactggaactttaacaattggtagacctgtgataactaaagtaataccttctagaggcatgggcgatgcgaatacaaaggatttgggggccaaccagtgggcagaggctgacattctgagttttgctgctggagtggaatcaaatacaaaccacccgcttggaaaagccatcatggaagctgcaggggctgccaactgcgtcattatgaaggcaaatgatggatccttcatggaagaaccaggatctggtgctgtggctaccattggtgagaagcagttttctgttggaaca

SEQ ID NO: 7013 - DNA, 337 bp, Zea mays
  Clone ID: MRT4577_106390C.1
gttttaaatagcgccatctattggtcaggtttgagatacagacttacatacagaaagtattgtttcttgaaacgcctgataggatcgtcgagtgcactgagaccgtactggacaaaggcgatagacgtaaggaccaccgttgttcaagcacaacctgatgtgctagaacttgtgccacctgggacttcgacaggcattggtctgaaggtcctgatgaaccacctgtacattcatacagatgatgcgatggcccttggggaccgatacaaggacagtggaatggcgcaactagcttcagcaggggcagttcttgacaatggagctgacaacacaaaag

SEQ ID NO: 7014 - DNA, 384 bp, Zea mays
  Clone ID: MRT4577_106391C.1
taattccgggagccacccattcgtgcttacattcgttctaatcatctatttttttttgatacacgatccccaatattacacggatcgttcattcaagttcctggtctgccaaatctataactccagttactatacacactacttcttcttcatctactattataacaacctcaactttaaagcaaaatgcttatcatattacctacaatggaaacgtactttcaatcacaagactctactttgactatttattaatattgtaccatttcgtacaattcatataaccacatactcctgattatttacaactacttatatctatccaaaacatgtactcaaaatcttcaaaactttgcaactttgttcgtcatacatcatccaaac

SEQ ID NO: 7015 - DNA, 227 bp, Zea mays
  Clone ID: MRT4577_106392C.1
gggccaaccctacctaagggcggctgtgttttattacccttttaaaacctttggtccagtacaggggggttttactaccgaaccaaaatttaaggttttcacccgcacccaagggcccgggggagattcttttaccccctgtttgcttcccggaaaaaaccggagggggctattaaaaaaagtcccacgggcattggggtgcctttccaaaggaaaaaggctggggc

SEQ ID NO: 7016 - DNA, 494 bp, Zea mays
  Clone ID: MRT4577_106393C.1
ccggccgggacgcacataaaattcactgacggaatcctctcttcttcggctcatgctttcctgaactacatctccgcgaaatcgcttgagccgcatcgatggggcacaacgggtgcaacacccctgctgagacaaaaccagccgacgacgatgcggctggccctaacggctcggcgggcaacaagaccaaggcctgaaaagggcctacgccggctgccctggttatccggaaaccaaggcgagaccacatagtgaggaagacagtgaataattcaccggagacctaccacatattacatcttctgggagctcgaggcagggctcccccgcacagcggcatatcttcccatgacatgcccatcataaactccttcatccatgacgtcttccagaacctctgcaggctacggtgccacgcttgctcgatacaacaatataggccaacatcagctctcgatatactcaagacgctgatcgacttgtccttcacggat

SEQ ID NO: 7017 - DNA, 331 bp, Zea mays
  Clone ID: MRT4577_106394C.1
aaaccgaaccaaatgaccgatttacattaaaacgcgtgccgacgataatattgagcaccaacaaaggttctaacgcggatacaccgggacgacgacgatcaatcgagcggagagggggccagccagccactgtatgggacacacaacaactgactcaaaccgcttagctgccctgcctcgatcgtgggggccgggccaccgtttccagccggggcgtgctcttccatgccgccgggggcttccttgtgggcacccgggcgccggttctttttggggatggtcgggttggccttgctctccacctccttttttttgcgctggggcccccccc

SEQ ID NO: 7018 - DNA, 802 bp, Zea mays
  unsure (1)..(802): unsure at all n locations
  Clone ID: MRT4577_106395C.1
tggtacgcctgcaggtaccggtccggaattcccgggtcgacccacgcgtccgcacaggggaacatactgtttggtctgtgcccatgttgcgggacctgacacagaacactgcagtcagtattaattttaaagatccacagtttgctgaagattatgtttttaaagctgcaatgcttccaggagcaagaaagccagcaacagttctgaaacctggtgactgggaaaaatccagcaatgggcggcaatggaaacctcagcttggctttaaccgggaccggcggcctgttcacctggaccaggcagcctttagaactttaggccatgttacaccaagaggctcggggacgagtgtttatacgaacactgcactaccacctgccaattaccaggggaacaattacaggccactgctgagaggtcaagctcagatcccaaaacttatgtcaaatatgaggccccaagattcctggcgaggccctcctcctcttttccagcagcatagatttgagagaagtgttggagctgaacctctactgccatggaaccggatgatccaaaaccaaaatgcagcctttcagccaaatcagtaccagatgctaggaggacctggaggctatccacccagacgtgacgatcaccgaggagggagacagggatatcccagagaaggacggaaataccctttgccaccaccctcgggaagatacagttggaattaggctttttgtaagctttccacattccttttaccagtctacatttttatgctatttgnggaaaggtttctttcttaagtagtagt

SEQ ID NO: 7019 - DNA, 417 bp, Zea mays
  unsure (1)..(417): unsure at all n locations
  Clone ID: MRT4577_106396C.1
gcccccttgccctctcctacttctcctcccccgnnnngncgagattcccccccccccacactcttcaccaccgcagcgacgccgcgcacaaggcgattaagcgaagctgcaccggaaggagaaggagagaagcgagagactccccagtcagaggaagccgaatccgaagttagcgtagaggacagagggctgagcgaggatgccgacggttacctgcaacgcgagcaacgcggggttcgacgacgaggagcaacagcggattcactaccgcgctgaccggcaccgttacaacctcaagcgccaggcggttgtagcttctgccgtcacagaggctaagtttaagaatagccaagatgcttaggaggaggcgagcaagcctgctagcaccgcaatgctttacggatgtggtctttgtgg

SEQ ID NO: 7020 - DNA, 1855 bp, Zea mays
  Clone ID: MRT4577_106397C.1
cattgggacctcgaggcggcgggcgggccactgcaccgagcttctccatctccgagctacactgactagggaagagcattagagtgagcacgtacgcgcattgctcgcctgctttgctggcttggaggttcacgacgaggcatgccggtctgcttcttaccagcatccatggcgggccaggtgcagcggacggcgccgtcctcgtcctcgccctcgccgcggcagctgccggtcatcaaccttggcaggctcgggaaggacccggccacgcgggcgctcgccatccaggacattaccagagcgtgccgcgagcagggctgcttccaggtggtgaaccacggcgtcagcaagcccgtcatggcaggcgcattcgaggccgcctcggagttcttccagctctcgccagagcacaaggagctgtttgcatcgaccgacatcggaaggcctgtcaggtatgacacgagctcaagggacgggatcagcagggccaggtcgttcctgaagcactacgcgaaccctctggaagactgggtccagtactggccactgcaccctccatcatacaggaagaaaatgggggagtatgcagttgaaatacagagggtgtcaatgcagctcatggacgctatcctgcaaggtttagggttaaagccgctgtacatgcaagagaaacttgacaagggagtgcagttcctggccctgaacagctacccacagttctcacatcgaggtgacaaggtcggactggctcctcattccgactatggcttcctcacaatcctgatgcagagctccccggggctggaagtgatgccccatgaccgtgacacctggacgcccgtccccgcgatccccggggccctccatgtccatgttggggaccacctagaagtcttgagcaacggtcgtctcaagtcccttgtccaccgagccattctcaaccctgatgaagcaagaatttccattgccagcatccatggtctctccaaggacgagaaggtctgctgcgccgaggagctggtcgacgaggtgaacccagcaatgtacagggagagcagcttccaggacttcctcgacttcctaccgtcaaatatcaacaactacaagaggtttgttgagagcctcaagatcgacagagcttgagaagaaaagcattggttcggttccgctgcaccagaacatagctaaatggcattcttcagatacgaatggaaagccagatgataccaaaaataataataaaagattggatgtctttcaattaatagggtattgtgatgagaagacgggtctatatggcttgcagcattgctacattgaagatacagattcatatagacatagcaagcacattggcgctgctatgtgtattctgcagagcaggtctctccaagtgatgtcgatgtctctctgcaaattaaagagtctagttctacatccttagtactaaaatgctcatttaactatgtccaaacggaggagagccggccggctatgtactgttgcgttgtaccatatgtgtagcgtgtatctcttattactactactagtctactactgtatctgcagtgtatatgcagtcaataatcgctgcaggtaaggtaaggtaatgtatcagtagagctgcacccgcactcagcctggctgcatcaagctggactgaggtcccttttttttctccttttctttctttggggaaatgcattgtggctgcatgtctctttcactaaaaggaggacttggggaaccttgctaggtttttcaggttgtttggtcctacactatgtgtataccaatcttgtatcagctacccaataaataaagtctaataactattgcatgagatttgctgccc

SEQ ID NO: 7021 - DNA, 1379 bp, Zea mays
  Clone ID: MRT4577_106398C.1
taaaagaggaaaggcttgcggtggatacctaggcacccagagacgaggaagggcgtagcaagcgacgaaatgcttcggggagttgaaaataagcatagatccggagattcccaaataggtcaaccttttgaactgcctgctgaatccatgagcaggcaagagacaacctacccatcagccatccccttttgctgcaaatctttccctgaattgtgggtctccgacaatggcggcgctcgctccatccaagattctgggcacccagctcaacttcgcgggctcctcccgctacgccaccgcagcgcccaccgcgggggctcagaagattgtctcccttttcagcaagaagcctgcccagaagcccaagcccgctgcggtatcgtcctcttctccagacatcagcgacgagctcgccaagtggtatggtcctgacaggaggatctacctgccggatgggctgttggaccggtcggaggtgccggagtacctcaccggagaggtccctggagactatggctacgacccttttggcctgggcaagaagccagaggacttcgccaagtaccaggcctacgagctgatccatgccagatgggccatgctcggtgccgctggcgctgtcatcccagaggcctgcaacaagttcggcgctaactgtggccctgaggctgtctggttcaagaccggcgcgctgctcctggacggcaacaccctcaactacttcggcaacagcatccccatcaacctggtggtggccgtgatcgcggaggtcatcctcgtcggcggcgccgagtactaccggatcaccaacggactggaccttgaggacaagctgcaccccggtgggcccttcgaccccctgggcctggccagcgaccccgaccaggccgccatcctcaaggtgaaggagatcaagaacggccggctggccatgttctccatgttcgccttcttcatccaggcctacgtcaccggcgaaggccccgtggagaacctcgccaagcacctcagcgaccccttcggcaacaacctgctcaccgtcatctccggcgccgccgagaggacgcctagcctgtaaggacggacgccacgccgccgagcaatgccaagtcatgcgctgctgcatgccgtctttgattttaccgggataaaaagctgtatgtgagcccctgattttatttaacccccccccccgtaaattatcgagagggacttctctgattgactgctgcccccggatgtgagggtctcaagaatgggcaatgcccccgcgtgtaaattatcaagagggggcaacaaccctttccttcgtgactgtgatagggcggctgcttccattggcgccaaaaaaaaaaaaaaaaaaaaaaaaaaaaaaaaac

SEQ ID NO: 7022 - DNA, 646 bp, Zea mays
  unsure (1)..(646): unsure at all n locations
  Clone ID: MRT4577_106399C.1
actgacagccttccgatgtcggtcgatgcaaacagctccttgtgctctggcgagagctggaagaactccgaggcggcctcgaatgcgcctgccatgacgggcttgctgacgccgtggttcaccacctgtcaatcggcaccacaaggatatggtagcgtattgatcagcattggcactgaagcatcacaccagaatccgaggtttgcacaacatggagtttgttgacttgatcactgcgaacaagtgttgggaggacacggacagagcaacagacaagcagcacgcactgacctggaagcagccctgctcgcggcacgctctggtaatgtcctggatggcgagcgcccgcgtggccgggtccttcccgagcctgccaaggttgatgaccggcagctgccgcggcgagggcgaggacgaggacggcgccgtccgctgcacctggcccgccatggatgctgtcagtgtagctctggagatggagaagctcggtgcagtggtgtgcatgccaccaggcgacggacgtacctatttataggctctgctctgctgaatgtgcagcgnaaaggcagcagccgatggggactgccagtgcccactggccacagtggacacccnctnccccttttcttttcttttcttgtctctg

SEQ ID NO: 7023 - DNA, 648 bp, Zea mays
  Clone ID: MRT4577_10639C.1
ctccggctccatgccgctccaacccaagcagccagcagctgcagcctgccctcctctccgactccaacccaatccaatggctctccgcccctgttgtctcacctcacgcgctctctgccctgatctgccgccaggcgccagaacgacgcgctgctccgcaccgcgtcgggtagaatggtagatggaccatggacgatatcgcttgggagcggggaaggaacgcagacgactcttcccgtgccgtgctgacgccaccacgcggccccggtctcctctcgccctcctctccgtctggatctggtcctatcccctccgccgccgtccttgccctcccggcctcagccacgagccagagcgccgggctcctggcctcgtctcgcctcgccggcgacatggacggaggcggggagacgctgctggtgcggaggagcaagggcaagaagagaccgcagccggcggcgcccgcggaggagggctccggcagcgggggcaggttccgcgcgatctggcgggactaccacgacctgctgcaggagactgaggcaaagaggaagaggctggcaagcacgaagcggagaagcctcgccttgcttgctgaagtcaagttcttgagaaggaagtaccagtcctttctgaggggtggctcgc

SEQ ID NO: 7024 - DNA, 199 bp, Zea mays
  Clone ID: MRT4577_1063C.1
gttcgttataaggggcggcgaaagcgtgaacaaagtgtgcgtgggacatatacatacacctaacccaatccaaccaacccatctgttcatcgtttggggccctaaaccactgcacccccaccattattagtacttctttattctgaagccaccttttttcctcccattcccattggcataggaaaaatatttttttttt

SEQ ID NO: 7025 - DNA, 1819 bp, Zea mays
  Clone ID: MRT4577_106400C.1
cctaccaaacaaggactgaggggattaaaatcctcttcgtattcaaattaaatagaaagtagattttagtcttccgatctcctgcaattcttactctcagataagctctaaatgcacttcgcctcagttggaagccacagaaaaacaaaacaaaaggtgctgccagtccgccacgcgaaaaagaagtcagtttcgcagttcgcagcacgtagacgggtgtccccccccgcccgcccatcgttgtcgtcagctccgggcagccgaaaccggaaacctcccgttccccatccccagtcggctgtcgccgtggattcagcggaacccccggcgcaaaaacaagcattatctgggagcccagcccagatgcgggcgcgttcagccgtcagccacacacgcagagacacgcacggcgcaagcgcaacttggcgcgagaataacagaaaaatatgcccactccacagctggtgaccactgccaagcgaaaggaaccggggcgatctgcctcctgggggaaagatcttgttcacctggacgcacgcgcgcgcccgcgcccgcacggacgggggccccgcggcctgctcctggaccgaaatcttcccttcccagcgcttttgcatcatcctcgtcgtcgtggtggtggtggtggcacctaaaagtctacgtacaaggtatttgcccagggtcagcttgcagagacaagaagaaaaaaaagggggggagggggtgtccactccactgtggccagtgggcactggcagtccccatcggctgctgccttttcgctgcacattcagcaaagcagagcctataaataggtacgtccgtcgcctggtggcatgcacaccactgcaccgagcttctccatctccagagctacactgactagcgaacggattagcacgcttggaggttcacgacgaggcatcccggccggcttcttaccagcatccatggcgggccaggtgcagcggacggcgccgtcctcgtcctcgccctcgccgcggcaactggcggtcatcacctttgggaggcgcgggaaggaccgggccacgcggccgctccccctccaggagagtaccagagcgtgcggcgagcagggctgcttccaggtcagtgcgtgctgcttgtctgttgctctgtccgtgtcctcccaacacttgttcgctgacagtcacagtgaactcagtcagccagccagccagccatgagtattctcgacggaaaataaaaatacaaagacacacgtgtcctgtgtgccctttaaaacaagtgccagtcacccatgcagctcacgcacgctgtgacccaagctgaccagcttacttaccatggaactttaagcggcaactcaccagtgatcaagtcaacaaactccatgttgtgcaaacctcggattctggtgtgatgcttcagtgccaatgctgatcaatacgctaccatttccttgtggtgccgattgacaggtggtgaaccacggcgtcagcaagcccgtcatggcaggcgcattcgaggccgcctcggagttcttccagctctcgccagagcacaaggagctgtttgcatcgaccgacatcggaaggcctgtcaggtatgacacgagctcaagggacgggatcagcagggccaggtcgttcctgaagcactacgcgaaccctctggaagactgggtccagtactggccactgcaccctccatcatacaggtaattaaccagtacgcggatggggggtgcggtgcaggctcggacgaccagccgcatcggcgtcatgtccgccgcgcccgctgctctgcttccccctcctctccgcgcccggaggga

SEQ ID NO: 7026 - DNA, 1024 bp, Zea mays
  Clone ID: MRT4577_106401C.1
gggtacctcgaggccggccgggatccgattcagcgcccccgtcggccaaacagtaccggactggccgccgttcacagttcacgccccgcgtggtccctatttcccggcgagcactaggctaccgccgccgccgtcaggtgccggtgcccagaccttcgtcgtgcccatttcaccggcgacgagcacccaccagcccctgcccgcaggtgttgggaactggggatagagatggatcaccaccacccgcagcagcagcagcagcagtacggcgatccttaccgtgggctcatgacgtccccgcagcccgaccaccacctccacgctcttcagtaccatcagccgcagccgcagcaacagccggcgcttatgtctccaccgcagccacagccagcactgatgtctccacagccgcagcagacactgatgtctccaccgcagccgcagcagcatcaccacgcctctcttgcctcccacttccacctcctacatttggttacaagattagccgatgctattggtacaggaacaagggaccaaaatttcgatgcactggttgaagaattgaccagccagtttgctaggtgccaacaattgttgaactccatatcgggaacaataagctcaaagtctactacggttgagggacaaaggcagagtttggacgaaacacggcagctgcttgatcaaagaaaggagttgattacaaagtacagaggctctgtcgaagagctccttaagggagatcaaagataaagaaagcatcataaggcttaatatttaaggatttattgtcgtcaatacttgaactctgttacttgaattcggtggtatgcatcaatagagccggaagatgttctggagtaaggacctggcagtgtgatacgggaatttgacatctgaatagatattctcccttgtccctctggtaaaaaaaactgttgtcacatttgccttcgctgtgacttggatgtatcatgtatatctttgaccattgatatcttggttaatcagacggtgcattccc

SEQ ID NO: 7027 - DNA, 370 bp, Zea mays
  Clone ID: MRT4577_106402C.1
tcgcatgccgcgtacgtagctggatcttaagcggcgccttggttcgagcttgttcatagtgtgcgtgagcaagggcggctcacacaggagcggagcgaatgacccatgtttttattttttgaaaaataccaatttttaccccgttggggaaatcccttgccaagcaagcccatttaaaatgtacggggggggctgtttaaaaaaagaccccctgtttggggaacaaggggtcttattcgccatgggaccaaccttcccccccccctgaacaaaaaaaaaggggtatcttgccaacgaactccctttaaaaccccttcaaaaaaaaaaaaccgggggatttccccccccccctgggggccccccccctttt

SEQ ID NO: 7028 - DNA, 389 bp, Zea mays
  unsure (1)..(389): unsure at all n locations
  Clone ID: MRT4577_106403C.1
aatgggtactcctcgnaggccggccgggacacactnctagtagcgagggcaaggacgtaagnagtcntctaattcnattggatcgaattanacgccttcttccttcctctnttcatttcccctctctgtctcttcccctcccccttcatccacctccttactccctatagctccttctaccataccccctccttcaacttcantcacttcaaattnntcctctctatntccanctactcctccatttactctttactttacttcaaaacccactttctncatctcttcaacaatacccccatcttttccaataacttcacnccattttacaattcatcatacaattttnaactcacaanaaccccaatcaanctttcctcttcattttc

SEQ ID NO: 7029 - DNA, 270 bp, Zea mays
  Clone ID: MRT4577_106404C.1
gaacaataagcattgcgggtgagggagatccgccgtcggcacctagagccgtggatgccgccagagctttaggaaggggtccaagggtatcgttagacgttgtagaagcttgactgtgaccgaacaaagcattgaatcgactgagccatcggcaattgctcatcggtggtggaggaccaccgcggggaacgtgcgacatggtgggcaacatcacctccgccgctaccgttggtagaagttgctgagcaggagctcattgaaggaagttat

SEQ ID NO: 7030 - DNA, 228 bp, Zea mays
  Clone ID: MRT4577_106405C.1
attgcagacctccctctggtcgcgctcattggcggggaggggcaaatacacactgggctcggcgaattttacctttttttggttacctgtgccggtggccaacttggggggcttttttcctggggcgcttgttcggcccttgttcacttgggcgagcaggttccaaccgagcttctattcaagcattccgggcccttcctacttccttctggaaattgggggcttttc

SEQ ID NO: 7031 - DNA, 159 bp, Zea mays
  Clone ID: MRT4577_106406C.1
ggaggttatacgcagccaacaccgttgttgttctggagctagccaagaggccggggagggaggggtagctcatcgagaccgaccttccgagccttggccagcggtacctgtcgttcgcgctgttcgatgagctgctgaaggaggcacaagccatggaac

SEQ ID NO: 7032 - DNA, 1138 bp, Zea mays
  Clone ID: MRT4577_106407C.1
gagatccctcgacaccgagaaagagagggccacgagagagagcaagagaagagcctcggatcgtgggagattagcactatcacgtctcggtctgtgctcacgtctcgtgcttgtgagaggtcctgtggtgtgcggtgggctcccagcgtgttgacaggcgggagaaaacacccccgaagcttctggccgcgctcaccagtgtgggcggtcagcgccgcgccgtggacaccctctgggctacgagctccgtgcggtcacgaggatttgaagaatcaccctggtaactggaatctcaagtgccaggcaagttgtgcccttgatccacttttgttacccaataatattctttattatcattattcaatgcataggtttaattttgatgggaccctataggtcaccctagtctgattatcttttaccttgtttacccctgaatcatttgggtagttatgttattgctttacatggtattgggttaatatttcattatatccatgttccaattattctgttattttatttatgttcatatcaagatcaatatatttttaattggaacatggagcttaacttgagaaacacgtgccaccacaagggaggaatgggatcccttggctaactaattaggaaagctagtgaacgactaccttacccgaaaggggcaagggcagtaggagagtggttagtgtagggaggtccttgggttgattttgctgcgatggcggtcaggcgagggatctctgcactggagcttcctataaactgtagcgggttttctgaagctagtggaactttgtaaaggcctcgtagtgttaccatgcctcgcctcctcggtagaggtgtatgggaagtcgagatcccttggcagacgggtaacatgacttgtgggtaaagggtaccacctattggggatgtctggtgtgggtcgaagcgaagccggatccgtcgcccgttgtcgaacgactttattgttcctgtccaccttgaagttggccaggaacttcgcctttgcctcttgaatcagctgctccttgtgctcctcgaactggagctgttcgacagccggcaaggtttcccaagtcggctttataatgttgctgggagagacgtcagagctattccttgaaccggccat

SEQ ID NO: 7033 - DNA, 262 bp, Zea mays
  Clone ID: MRT4577_106408C.1
cggatgcgtggacggacgcgtgagcaagctagcatattctctctctctcactaaccccagagtttcggttcggtgctgttactggacagatggcctctgcgttagcatccgtcgggtaagtgcgaaagctgtcaactctttaccagctcggaattcccttcaccaggccagctacaccaattcatcgccaagcacgcatccaattccaaactcgtacctcaatcccccacctgatctcctttatctcccaaatcggacatct

SEQ ID NO: 7034 - DNA, 463 bp, Zea mays
  Clone ID: MRT4577_106409C.1
cccagaaggactgccgtgcaaggatcatccgcaatagcgcgtatcttgatcacgctctcctctcgatgaagatggctctctagagcaaggcctgagttggtttgacatggctctcatactaggtccatatcgtgatccatgctgaccctctccacacgtactgggtcacccttgttgaacctgacaggagtgagctgatttcctgggcctcaattcaaggactgacatatgatgattctttatattagtgcctcattcgaggcacagcattagaactccttctgtgtttggacaacgctggccacccagcacctgtggagaaggtcgagatgcctgacgatctgagctaggtactggagccatgtcagcggaagctaggccttgtctaggctgacctcaacctcgagagggaggtggtctatatgcgctatgcgatggaccatgcccagacgtacctctggcg

SEQ ID NO: 7035 - DNA, 515 bp, Zea mays
  Clone ID: MRT4577_10640C.1
gccgggccgggattagcacccatcttgctctgagtgcatgctcccgaaccgatccgcgcgcgtgtgttgatacatgatggctacagcaacttacgctcccttggggagctatgcgatgaagagcatgaccggtgcattctaggccgaggggcctgttagggactgggctcacacggacccgttcccggttcagcgttctctggccgacatcctgcccgagaaggcaacgtaccatgtggcgaaggccatgattggcgacccgttcatcatgagcctggagacgctcgtgacctccagccagctcatcgtgtgctacctctccaacctgccgacctaccgcaccgccgagagcaccactgctgagaagaatccaggtttccctcacccacggctacctcatcaacaggaccttcgcagtcaccgcgacgcttcgaaaatctcccatgaacagtacactcgaggcgcgcatcggagacgtagtcctcgaccctatcctcggcggctgcctaaccatg

SEQ ID NO: 7036 - DNA, 284 bp, Zea mays
  Clone ID: MRT4577_106410C.1
gccacgcgtccggacatgcgcagtacatgtggctgtctagattttctgctactccgagtgtgagtgagaagagcgcactcactgaggtcgccaccattggcaatgatccaccattaaaatgttgcgcgcctcattgtgttcatgcttcgaggaaaagatctgggcactattctgctagcccatgccccatggctgtagtcctcagtacatcgcctcatccgagaagagcctctcatggtacaaactcactgggatcggcctgggcatttctagaggtcttaact

SEQ ID NO: 7037 - DNA, 413 bp, Zea mays
  Clone ID: MRT4577_106411C.1
agcctcagttcgtatatcatccatactggtggctggtgccatttatttccattcaccaccaacctgacgagcactgttccgtctccctcgtctctgttctgttctgttgtgttctgtcccagttccagttccagacgagagaaacgcaggcggggcaggcacactgctaccgagcctggcgtcgtcgctggcagtggcatgcgctgaaagaccaccgaaaccacatgtggccagcaggcgcggaggacccgatgggcgtgggcgtggcgggcacggcgggcatgagccacggccccgcggcgccgtcgccgaggtcgtcgagcacgatgccggcggcggggcagtcgccggtgccgtacctcttcggcgcgctggcggccatgctggggctcatcgcgctgtcgctgctcgcc

SEQ ID NO: 7038 - DNA, 360 bp, Zea mays
  unsure (1)..(360): unsure at all n locations
  Clone ID: MRT4577_106412C.1
tgttttccctcgaggacggncgggatcgagaattcaggaccaggacgacgatggtccggccgcgcctcctcctcaccttcctgctcgccgcggcggtcgtgctgaccacggtgcccggtgtcacgttcgacaagtcaaagctcgacaagaatagcgactacgtcttgaacggccccctcctgaccgagaagatccaggcgaagaagacgctgatcgtgggtccggacgaggattttaagaccgtgtaatccgccatcgacgagaagcccgtcggaaaccactagtgaatcatccttaaccttcgctactgccttgaactgatacaaaaatgtgatactaatataaaaatacctttatctt

SEQ ID NO: 7039 - DNA, 299 bp, Zea mays
  Clone ID: MRT4577_106413C.1
tcggggtaaactggagtgatttaagactgtggtattgtcattcctgcgttggtgtaaacgagaaatgtgatttgacattgcggagggtaatgcttccgaggatagcttacagggatgcataagtgcttccttgcttaaagatgaaccgttcccaagaggagcacaaacctggtgggagggttcaaccgtacttaaaacattagcgcatgatttttcaaattctgggtactatgctggttgggcaatacaatctgaacggtgcacaaacaattgctggccttgcgctcgaatgcctattc

SEQ ID NO: 7040 - DNA, 327 bp, Zea mays
  Clone ID: MRT4577_106414C.1
aaaaaaaactggatcatgcctttttttatggggggggcctctcacttaagggggggggggattaccaaaaagggtgcggggatccatgtttgagaaccaaaacctgccccaaaaagataatggtgttaaaggggaagatttaatgggccgggtcgagagaacatgcatgggctgccctgaaccacggagcttgcaaacaattgtttattatgatttcaagctgagcccccgcgccgataaagcccgggttgatcaagcccgggccccgggggggggccccttgtcggtgctgccacacgcctggttgcacattttggtgcagggggg

SEQ ID NO: 7041 - DNA, 262 bp, Zea mays
  Clone ID: MRT4577_106415C.1
ggcgccttttttttttttttttttttttttttttttttttttttttttttttttttttttttttttttttttttttttttttttttttttttttttttttttttttttttttgatggacttatttttcactgttcgaaaacaaaaggggttaattaaggccccctcctgcagagaaaagaaaccccctgtgtagagataaacaaaattttgaatggaggcaataaaaccggggggttaaacggggcacgatcaattcatccc

SEQ ID NO: 7042 - DNA, 928 bp, Zea mays
  Clone ID: MRT4577_106416C.1
ggccgctttttttttttttttttcctaggaacccgatccccttttgacattacagaccattctggtttgaagtgtttaggtaaatttgaaactaccagtactacagaccaattgtggttccagttcctagtgctaacagagaatcatgccttactgttgcaaccagagcccttttgacattacatcaattacatccggtgcgggcaccatctacatgattgcaacgctcaagtaatcaccgatttggaatccgagctctagagaataccagcaggctgccgcgtctgcccgccgggagaagaccggcaggctgccgcgtccgcccgcctggagaagaccggcaggccgctgtgccgtcgaagaatcaggccgcggcgccggtgaagaagcaagccgtgacgccggagatctgttcatccgtggatccgtccgcccggtaggccaccgcgccgcgttcgaagatctgacaggcgccggagatccgttcgtccgcggatccgaccgcccggtaggccgccgcgtcgcgtctgccgcaggcctccgcgtcgtcgaagaagtaggccgccgcgccggtgaagaagcaggccgccgcgccggtgaagaagcaggcctccaccctggtgaagatccacccgcctggagaagaccgacaggctgccgcatctgcccgccaggcaccggagatccgtccacccggtaggccgcgcgccgaagatctgtcaggcgccggcccccccctcgtccgcggatccgtccgcccggtaggctgccgcgtcgcgtccgccgcaggcctccgcgtcgtcgaagaagcaggccgccgcgccggtgaagaagcaggctgccgcgccgccgaggatcccccaggcgaaagagagagggacacgctgcagtcgcgctcgaggaagaagagggtactgtctagcagaga

SEQ ID NO: 7043 - DNA, 109 bp, Zea mays
  unsure (1)..(109): unsure at all n locations
  Clone ID: MRT4577_106417C.1
gctcgcgtcatcngggaaggcattgcggaaggataaaccntcacaagatgtagaagaaacngctgttaaagnatccaaaccatcagctggtgnagatgatcgtccaaaa

SEQ ID NO: 7044 - DNA, 365 bp, Zea mays
  Clone ID: MRT4577_106418C.1
tattttttttggagggaatctacagaggttggggacatattaagtgcagattggcgatcttaatttgtaagcacgaccaggccaagaggccaacgactagttcaacagggcctgaaatggttccagaaccaagggctgccggacgcaaacaaacatcgtgtttccgaaacacttccagacagagtggcacagccacagcccacagcaggtacggctaagaacattgggtatccctgaacgccatcaacagtagccaaagattcagctcacaatattgagacgaatcctggggtatcgcatctggtccagtcagagtacggttgaggtagagcatgttcaccttccttgtcccggtgacaccacca

SEQ ID NO: 7045 - DNA, 825 bp, Zea mays
  Clone ID: MRT4577_106419C.1
agcaacagcaaactgagcactttcagttatttcagcaaattcagttatttcagcaagtgacttcagttatttcagcaaaccgagcgcttcagttatttcagcaaattcagctaaacttcagcgcgagacgaccagagctcaggccgctagaggcaaggacatcgcgagacggttggagctcaggccgccgagcagcagaggcacggagccgctggagacacggagtaacagaggcagcggagccgctggaggccgacgcggatccgtccgcccggagctcaggccacggagcagcagaggcacggagcagctgaagaccgaccgcggatccgtccgcccggtaggtcgccgcgtcgcgtccgccgcaggccgccgcgccggtgaagaagaggctgctgtgccggtgaagaagtaggccgccgcgccggtgaagaagcaggcctccacgctggtgaagatccacccgcctggagaagaccgacaggctgccgcatctgcccgcctggagaagaccggcaggccgccgtgccgtcaaagaatcaggccgcggcgccggtgaagaagcaagccgcgacgccgaggatataccaggcaccggagatccgtccacccggtaggccgcgcgccgaagatctatcaggcgccggagatccgttcgtccgcggatccgttcgcccggtaggctgccgcgtcgcgtccgccgcaggcctccgcgtcgtcgaagaagcaggccgccgcgccggtgaagaagcaggctgccgcgccgccgaggatctgccaggcgaaagagagagggagagttggagttgggatcccacgcgtccg

SEQ ID NO: 7046 - DNA, 287 bp, Zea mays
  Clone ID: MRT4577_10641C.1
gtttggcaagggtggacagttgaccgatgatgagactacaatcataggcggagccttggtcctgaccgaaaagactgctggagaagttatgacaccaattgatgaactattcactggatgtggtatccaggttgtattagggaagctagttggaaaaattcttgcacgaggtcatagtcccgtacgtgaatactctggaaaccatagaaacatgattgaactggtattggtgaatagtatattgactgtatgagcttaaacggtgacacacattttgtgctgtttta

SEQ ID NO: 7047 - DNA, 278 bp, Zea mays
  unsure (1)..(278): unsure at all n locations
  Clone ID: MRT4577_106420C.1
tnttttttttatttatttttttttttgtttttttgtgggttttttactgaagtatatcatgcaaccaggaacacgagggaaacaaggaactcgcagccccgagcgaacaagaaaaccgatgccaacacaaaaacatgatatcatgatcccaaaagcgggcaaaaaaacaaaaaaaaaaccgggagaacgccaaccaaaagctctggggtcacccgagtctacaaaaagaagacttgggactgaaacccagctggatctagaacgaaccaagaaaatga

SEQ ID NO: 7048 - DNA, 762 bp, Zea mays
  unsure (1)..(762): unsure at all n locations
  Clone ID: MRT4577_106421C.1
aaaaaaaaaaaaaaaactctccctctctccttcgcctggacatcctcggcggcgcggcagcctgcttcttcaccggggtggctgcttcttcaccggcgcggcgacctgcttcttcaccggcgtggcggcctacttcttcgacgacgcggaggcttgcggcggacgcgacgcggcggcctaggcggtcggatccgcgaacgaacggatctccggcgctgtcagatcttcggacgcggcgcggcggcctaccgggcggacggatccacggacgaatggatctccggcgtcacggcttgcttcttcaccggcgccgcggcctgattcttcgacggcacagcggcctgccggtcttctcccggcgggcggacgcggcagcctgccggtcttctccagagctcggattccaaatcggtgattacttgagcgttgcaatcatgtagatggtgcccgcaccggatgtaattgatgtaatgtcaaaagggctctggttgcaacagtaaggcatgattctctgttagcactaggaactggaaccagaattggtctgtaatactggtagtttcaaatttacctaaacacttcaaaccagaatggtctgtaatgtcaaaaagggctcgggttcctatgaagtcanacataggaaagtttgcatcttggagccagtccagttgggcaaattttgttcggtaccccattttgtttcgccatttctaaaatcttgtagccagggctagacttgaactggatggtcgaatttgcaca

SEQ ID NO: 7049 - DNA, 751 bp, Zea mays
  Clone ID: MRT4577_106422C.1
ttatttttttttttcgtaggaccccgatcccttttgccattccagaccattctggtttgacgtgtttaggtgccattttccaccaccagtattccaggccccattgtggttccagttcctagtgctaacagagaatcatgccttcctgttgcaaccagagcccttttgacattccatcaattccatcaggtgcgggcaccatctacatgattgcaacgctcaagtaatcaccgatttggaatccgagctctggagaagaccggcaggctgccgcgtctgcccgcctggagaagaccggcaggctgccgcgtccgcccgcctggagaagaccggcaggccgctgtgccgtcgaagaatcaggccgcggcgccggtgaagaagcaagccgtgacgccggagatccgttcatccgtggatccgtccgcccggtaggccaccgcgccgcgttcgaagatctgacaggcgccggagatccgttcgtccgcggatccgaccgcccggaaggccgccgcgtcgcgtccgccgcaggcctccgcgtcgtcgaagaagtaggccgccgcgcgggtgaagaagcaggccgccgcgccggtgaagaagcagccaccccggtgaagaagcaggctgccgtgccgccgaggcgaaggagagagggagagttggagtcgggatcggggaagaagaggcctgctgcgcagaagaatagtgaaagtttggttttttttttttttttttttttttttttttttttttt

SEQ ID NO: 7050 - DNA, 278 bp, Zea mays
  Clone ID: MRT4577_106423C.1
attcggctcgaggtgctctcgccttttcattcctccaccggcctcatcccccaactgcgtggagcattaccgtctgagggcggcggcgcggatcggcgcggtgccgccggcgacggggaccgcgtgaggcacgatcccctgaaggctcgtcctcctcgccgggaggcgtcgccgttgccccgccctctgggctggcacggcgtggaggggacagctggagatccagccgactctgcttggattgcttccttctcccgcagagggtatgagcaatgtac

SEQ ID NO: 7051 - DNA, 554 bp, Zea mays
  Clone ID: MRT4577_106425C.1
cccacgcgtccgaggacgcgtgggcgcgggcgaggacggcgacagcggcgtggactcctacgtcttccgcttcgggaggggcgagtgccggcgccagtgcctgcgccggcactgtgggccagccgtgggtagcacccagtagtgcctgaggcggtgcctccgacactgaactgttgcgctggacatgtgtgcatggagtatcgtgtcatgggcgaacgaggagcgacgatcaatgtagcctggaagaggtgcgatcgccaccactctggtgactggtgtgagaggccaggttgtctgatggtctgtgagatctgagagcggctagatgttggctgcaattgtgtgcggtgcgtcctggactaggaggacagcaatgaccgatgtccttgcattaatcagagctatggccaccacgctcgttaatcaggcacatttgcttccacgcttgcgagcagcctgtgacagcttggctggatgtagccatttactacactggaatcgaagatactgcttccggcggtgccagatgaaatgccggcgccacagcgatcggc

SEQ ID NO: 7052 - DNA, 259 bp, Zea mays
  Clone ID: MRT4577_106426C.1
tattcccgtcccgaataaagagcagcagggggggactttgggcgatcttgcggaaggcaaagcctgccataagctgcctgtccacctgggggtccgcgaacgaggggcacacagacaggcggtgcaaccaggcgacaaacgccacgctcgacgcatgcatatcgcacgaccctgacagcgcggtggcctgttcgacatgctccaagaccaacatgatgatggcgttcagcgagatcacgaccaaggcgaccgtggacta

SEQ ID NO: 7053 - DNA, 1086 bp, Zea mays
  Clone ID: MRT4577_106427C.1
cgcagccgcctcgagctggcagggaccacctcagacgcagcagctctgaagcaaactccacgactcggtctcctcttcctagcaccatccggcccatccagccgccgccgccttgcatcctccacctccccggatcccgccgcgatggaggaagacgacgagttcggcgacctctacacggacatcctcatccccactcatacccccgcatccacctccgcgctatccaaccctgttctagtcgaaaccctacaccgcccgcctccacaccctaatcctacccccgtggcggcagcagcagaggaggtcgacgatgactggctcctaggagggagcgaacccatacccggggtcgacccgaccggcgattgggccgacgaggacgacgatggaggggagcccgcacctcccgcgaagcggtccacctctgcggatgatatcgatccgctcatggggggtggtgcgggggattccgggccggtcatccctgggctctcgtcatcatcggcagctggtgcggccgggagcgacgaatgggacagcgatagcgaggacgacatccagatcgtgctcaacgagaccgatggccgcccggggcttgtggaggatgaaggagacgacgaagacggtgaggacctcgtcatcgtcgccgacggaccaacgcgatggaggagcaggattggggagaggacccagcagcggcaggggcagaaggagagcgaaaggacggaggtgagcctggtaagacggccgcggcacctggtggaaggatcgggtacagtggcggcggccaagggttccatcaacagcaccattccatgttcaaggtcagttatttgggccaagaagccgtacgatgcgctctggccacccctgcagagggagacggcataaacctggctgcgactcgctatcctttatgttgtactgtgttagtctgtggaaatttcttgtgaagttagtttctgttttacaacccgttgcgaaccattcccaatgtaactgtaaatgcattattagcatggtctataaaggaagaaaagaagaaaggttcaatgataaaaaaaaaaaaaaaaaaggccccta

SEQ ID NO: 7054 - DNA, 808 bp, Zea mays
  Clone ID: MRT4577_106428C.1
aggccattgtccatccgtacagtcttcacttaaaacagcgtgtaaaaccatgctgtacatttcaaacaatctgttgtaacttgtaagaggctccagcatacaatacaccagcgggtgaaggattgcatatgctgtagtgttgtactgatgcagcattgcattttgtcatgaatcaaggaaacaaatgggtagcaatctgtcacacctttgaagcttcctgctgtgctcactcgctgatgttttcagtttgtaatcgtcattgtacttcactacaaaacgtaacgtaacatcaggcatgcacttcttcgtgtaccttatattcttctttccatgaaattgtactttcatttttcataacataacttgataatgatcaaaaaaaaaaaatataaaaataaaaaaatgttgaaaataaaaaaacattagtcacaggcgattggttttagcctggacctcctattattgatgtccggatcaataacattgtgatgacccaccagatcccctacaggtacatgcctttacggagacgtatgatactaggaatacttcatggtcgtaggaaacatcatgtccgtcccagtttgccgttgcattttgaccatacctataacttgtgtaacacacggctggatactgggggagcctcctcagatacatagatcacatcaactgaccggccttccatgacagatacccgtaggggaaacttggtcctgccattcgatccatactattgtaaaagcccctggaaaaatagaaaacaaattggttttcactcgcaccatatgttcatacaccagctgac

SEQ ID NO: 7055 - DNA, 463 bp, Zea mays
  Clone ID: MRT4577_106429C.1
gttcacctcacacgttcgcacacctcctctcttcctctcttcctctcattccttcttctcatcccttcttcactgcacaccatgctggcttcaattcacgagaaggtctcgtccttggtcaaccgtcatagagacaccatcggcaaggtggtcgaccctgcgcttgtacagggggccgtcgacaaagccaacccaagcaagaactgggactataccatcactttcaagggcgcaaaggacgtcccccgcggcgatatcctctcctccgatccgtttcttgaggcctatgtgggtgccccagaggacccccagaccttggctttcgtcactggcattcactggaatacactgaatcctgtttgggatgctgtgtgggaactgctcaacgttgccgatgatactgtgttggacctgcacatcaaggacaaggacaagatgaaggaggacacccctcttggcaagg

SEQ ID NO: 7056 - DNA, 185 bp, Zea mays
  Clone ID: MRT4577_10642C.1
cttcagaagcttctgagagggaatgggatgatcctaccagttgccttttcagacctgaggctctaactcaagagattcctcctctccctcaccattcctgccaccattttttctgggtgatgcagcaagagttaaattgttcacattctagaatgtgtagaagcttctggctccagttgtctaat

SEQ ID NO: 7057 - DNA, 345 bp, Zea mays
  Clone ID: MRT4577_106430C.1
ggccacctgcaagggcgttcttcaagccgctccacctccctcccctccccggcgacgccggcctcaggccgctctccctctccgactacgcgcgcccgctgtaccgtcaggagcatgtcctggcatccgaggcggtggcggttgctgggcgcaacgaacgcgccacgtcccccgcgccgccgtccggcaccgttgacggcgcccggtcgttggaggacgccgtgccggaggagactggtcggctcgccatgatcggtgtctactacgccacgcggtgggcgctgaacgtcatcttcaacatttacaacaagaagggcctcaacgcgttgcccgccccgaggctca

SEQ ID NO: 7058 - DNA, 545 bp, Zea mays
  Clone ID: MRT4577_106431C.1
ttttttttttttttttcccaagagagctttcagtttctgatcgtgacacgtacatagttcacattcgttttgtcttccaaactgggtgtgacaaccgtgcttcccgcgaccaccatgtcccgacaccacggctcaaggaggcgcggcttggtcgtgacgatgtggtgggatgccgatagatcgacaggagcgatcgtcggggagagccgtgtgacctaggggcgaaggggtgatgcagatcaggtggagtggcaaccaccatggcatgggggcttgcttcctggggccaccatgcatgtctcggcaccatagcctaatgaagagtggcatgccttgcggttgccacgacgcatagggacgttgatagatcagcgaaggcgaccatctgggagagccatgtggcttggcggcgaagggacgacacggatcggtcggtggaggcgtggcggtgagatctctgatctagtaaagcatgacgacgaccaacgatgacgaggaacgacatgatcaaactgatctgtcgggcatcctatagtggcaacgat

SEQ ID NO: 7059 - DNA, 388 bp, Zea mays
  Clone ID: MRT4577_106432C.1
cgtgtacattaatccattgcacttatctgtgtacattgaatcaaccaccaaacaatttcaacgttaaacaggatggaacacaaatgaataccggatatacaacggaagctcacattaacttacactcagcaaagcgaaccgtgcaaaggctaaaacacaggcgggaaacggacatacggaacagcaagggggcacataccagcggtccgaagtcaaagccgattgagagcctccccaaacgaacgagaacgtagccagcaatcatcatgaaatacacatagagaataaacctaaccagacaagctcaggacaatcccaatccagaccctagatcagaaggagataacacacgtgatccatatgggacaggaagcaagcccgagcaacc

SEQ ID NO: 7060 - DNA, 342 bp, Zea mays
  Clone ID: MRT4577_106433C.1
cctaatcctaactacatgtactacgtaccagggtatagtcgatcgcctactatccgccccgtgcctgccagcgtgcggccctcgcctatatcgttctatgctctctccgtgcgcgccggcgtcgtacctggcattgcccagacactaacgcgccacaacagaataaatgtagttcacgatgcagtggacttaatgatttttggatgcaacattttctgcttctctgctctggaatacaaaaaatgccattgtgggctcaagaagataatgtacgggaagcgtgcatgcaactgctgaaggagatcgactcctctgaagctgaacagctcgcgccattcaaca

SEQ ID NO: 7061 - DNA, 384 bp, Zea mays
  Clone ID: MRT4577_106434C.1
aaatttttggacctttctttcatctgctagactgtccctagcctgatgtcaggacgtaaaaaagagtgagacaccgattggagaccaaagacgccaacgtagagatgaacaacgcggttgctgaagaaagtaaagaagcaaagaaattgaaaaaggagaacataataaagcagtataaaaacacaagcaacaaaaaaaaaaaaaaaaaaaataatcaataatgtaaaagtattaaactcaagatattcaaagaaaaccaaaagaaaaaatggaaaaaagccatatatccaagagaccaaccaaaacatataaaaacaaactcaaccaatacaaaaaaaaaaaaaaaatgataaaaaataatcatgataaaaaaatacacctcat

SEQ ID NO: 7062 - DNA, 280 bp, Zea mays
  Clone ID: MRT4577_106435C.1
ttctactccagcgctagccctaccaacctgaggtgattattaaactaggtgggacgaccagcaatgctgctgccttcgtacgttgctgttatagctagccactgccccctgcaagaagcgcgcaaggcattacataaccaaccattcatggccagatcgagggcgcagcctctcctctagttgagcgtcaagctcgtcaaggtggacggcctagaccatgagcatttgtagcgccgctggacccaattgcttatgttctacgttgccgaccgtctttctg

SEQ ID NO: 7063 - DNA, 224 bp, Zea mays
  Clone ID: MRT4577_106436C.1
aaattggatactaagaaaagcaacaactatgaacgacatttaggggatcaaaaaagtgtcagaggaagaaacatactctagtgaatgtcgataatatttaccacaacatagacctatgattaccgttggccaagccatccaaatatatggaagccgcaccaaactttgactcgagttcgggcgtcataaaaccatgctcatgggtgctgcgtgtacaagcagag

SEQ ID NO: 7064 - DNA, 598 bp, Zea mays
  unsure (1)..(598): unsure at all n locations
  Clone ID: MRT4577_106437C.1
ccggccggatgcatcccctacagacctctctgctctccctgctcctccatctccttattgatgcagtgaacgccaggtgatcctccatgtcctactcgtaggatcaccacttctaatcgaagggcgacgtcggagcgaacaatacctacccgaaacatgatggcaccgtgcgcaagaaggggttcttcgccatcaggaagcgcccctgcacggctgcggaggcttctagcgcatagactgccaagtatggccatgcatgatggcactttgtcgtcgtagacgtatatcaacgggaaaaagctcgaaaatattgttgcttcgacacacaactgtgatgtgagccttctgacttcagatggcaacagtaaggatgatcttagactcccaactgatgagactcttgtgcgccagatcaaggaaggtgttgaaagcggcaagggatcttggttgtgactgtccagtctgctatgcgcngaggagcagatctgcgcgctgaaagatgatgacctcaagtaacttccctgtcttggaatactgtatctcaacacctaaatcgaaaacagaagtgtatcagggattgctacagagacatccatct

SEQ ID NO: 7065 - DNA, 1367 bp, Zea mays
  Clone ID: MRT4577_106438C.1
ccggctcgagacggcagatagaaccctcgcatcctgtaaatggcgacacgcctcgcctccatcttctctgccgtgcgcagccccacctcagccccgccccacactctccgccgcgctctcccaagcttcagctaccggcgagcgcatccatctcagccccgcatgtcctcctcttcagccgcctcctccgcgccgccggccgccgagaagcctacagtggcgccgttcgggtcctggaggtcgcccatcactgcggacgtcgtatctggcgcggataggcgcctcggcggtatcgctctcgctggagatggacgccttctctggatcgagggccgccccgaggagaaagggcgtatggttattgtaaaggaggaggataatcctgtggatgtcatacctcaggaatttgcagcacgcacactggctcaagaatatggaggtggtgcatttgcagtcgacaagagtgttgttgtgttctcaaattacaaggatcaacgtctatacaagcaaacaataggaactggtggtccacctgtgcctcttacacccgattatggtgcgccaaatgtcagttatgctgatggtgtatttgatcctcacttcgaccgttatgttactgtgatggaagatcgtcgaaaggatagcttgaatcccaccacaacaattgctgctataaacttgagtggcagtgatgttcatgcttacatatgctctatattgaagaaccaaaggtgctgatcagcggcaacgatttctatgcatttcctcgcattgatcaaaataaaaagcggatagcatggattgaatggagccatccaaacatgccctgggataaatcagaactctgggttggttacttcgccgaaagcggagacttgaccaaacgggtctgtattgccggtggcaatcggctgctgattgaatctcctagtgaacctaaatggtcaccgaaaggagaactgttttttgttactgacagagggagtggattttggaatatttataaatgggttgaacaaaccaatgaaattgttccagtgtattcactagatgctgaatttacgagaccattgtgggtttttggcatcagctcgtatgattttcttggaaacagtgaccacattgttttcagttatagacagcaaggaaagtcacatcttggtgtgcttgattgtgattcaggttctatttcattgcttgacatccatttctctgatttatctgatgaggtggctgcagatgattacttctatattgaaggtgcttccgcgagtattccacggtcgattgctaaggtgacattaaatgaaagcaaaaccaaagtagtcaatttctcaatagcctggtcgtcctcaccagacctcgta

SEQ ID NO: 7066 - DNA, 230 bp, Zea mays
  Clone ID: MRT4577_106439C.1
actgcacttgaggaagaagtatttcaggcacctgatatcctgggtccttctgcattagaagaaatcgacactctgtctgaaagcaaaaacaaaggatcagacaaagcagaaacgagaggagacaagaaacggaaatcttctgagaagccatctgagaaaaaggaagctaacaaacctccagacagttggtttgatctcaaagttaacacacatgtctacataactgggtt

SEQ ID NO: 7067 - DNA, 262 bp, Zea mays
  Clone ID: MRT4577_10643C.1
ggattattcggaccaaactgggaccaaagaagcatctcctggcctgaatcgacacatcagtgtcttaatatcatcagatggacttattccagattcctcacgacatttaaaatgtctatgcaagaagaaattacactttcgatggtgtgaatgggcattcagaacttctgagaatagactcatcataccatggagattgcattgaagttgtttcaggcggaacaccacattctgcctcggacctccacagaagcctcaatat

SEQ ID NO: 7068 - DNA, 557 bp, Zea mays
  unsure (1)..(557): unsure at all n locations
  Clone ID: MRT4577_106440C.1
gaataaagaaaaatataaccttatatggtccagttgttgctttgacacaggttacaattgccctagttaaccgcaagcgaaaacattatgcaatcctctggagcacggcctcaacactaccacagccatcatctacaccggggccagtccagtatccagaaataacaataggcgcacctgggaccgcatccacgctacgtgtcatgggcagagcactctgagcagtgggagcgtctgcgggtctgctagcagcagcaactccttcagaagatcctgaacttgagcgatcagcaaggttccatgactccctctgcgacttggcagcgttcaaaggtagcttccaacgttggaattggtttagctccttggtgaagctctgacgaaccggggaaaggaagcacggccacagggcggcgaccgtggcggcccctgcagggacaggatgaagccacccacacgccatgggcgaggtcaccaatagacggagcggccggcaggaggaggaagcggcccgtggaattattaggagtagagctctccctcgggaatncggaccg

SEQ ID NO: 7069 - DNA, 351 bp, Zea mays
  Clone ID: MRT4577_106441C.1
tccacgcgtacgcccacgcgtacgcccactcgtccgaccacgcgttcgcccacgcgtgcgaccacgcgtacgcttttttttttttttttctggaaatgtaactttttataactggttggccacatacatcattcaaaaaactctattattgaattacatctaaaaagcaatctaaaagagggcaccaacaatgaagagtggccgacaggacgctgttgccaacatcaaagcaagctgaacaaagaacaacactcgccctatatctaagacataagcgcggttagccgtatactgacgctcaaacggaaccatacactggtgagtgaactaggaaccactgctttctgtttc

SEQ ID NO: 7070 - DNA, 570 bp, Zea mays
  Clone ID: MRT4577_106442C.1
ggaatttccgtccgacgatctgtctcttctgtgttggtcgccccggacacaggctaatcaagttcaagttcgaccgcgcgcaggctagctccacgcggccatgccatcgctaatgtcgctgacgccgtggcggaggaagaagagggtgcctggtgggccggtgacggtgcgcacgcggcggcgcacctcgctgggtgctctgtggcggcgcctggtgcggacgctcacctgcgcgcgccgcccctactactgaccgaccgatagacgatgtatctatcatcctccatggacgacgtgctacgggaggatgatatcggttgccagctgatgagagaggtgctgtgctaacagatgagggatcgatgcaatacaatgcaagcaagcttgtccgtgatgtgtttgttcatagtcgtatcatgtgagacggttctagctaatgtatcgtgtcgactacttttttataccacctacgtatatatatgtataatttctatatctaataacatgtgcccttcctcttgaaaagtttgggctctgcttgcctgaaaaaaaaaaaaaaaaaaacgctca

SEQ ID NO: 7071 - DNA, 327 bp, Zea mays
  Clone ID: MRT4577_106443C.1
ccccacagaggaaaaaaagggggggggcggggggaaaaatggaaaaacccaaaggcatttaccgggtaaaaagcaccgactggaaccaacccggccaaaaaacccaaaaccggggggggaaacaaaccacccaaaacttccccctgggggacaagcgggaaaccatcaaaaaaaaatcccccaaaattaacaggccacggggggggacgttgccggaaaaatgaacaaacccctgcccccgggttttccaacgggaccggaaccaaagaaccggcaccgtggcagggaaaaaaaacccggaaacccaggttcccgggggcatggggg

SEQ ID NO: 7072 - DNA, 1797 bp, Zea mays
  Clone ID: MRT4577_106444C.1
ttgcttcattccattccattccaatacccatctccccgccggcctttcccctcccgcgtgccgatctgcctccggaggctagctcgaccggccgatctagctcgcgtgccgccgctttcagctcgatcagctgccgcacgtcgtccaccgacccgccgtcctgtgagcgcgatcgacagattactaagatggctggcgcggggtgtgcgacagctgtgcagcggccggcggcggcgggggcgccggctgctgtggcaaggaccggggtcggggcaggcggcgcggtcgccgacccgcgcgcggaggcgctgcggtgcccgcgctgcgactcggccaacaccaagttctgctactacaacaactactcgctgtcgcagccgcgccacttctgcaaggcgtgcaagcgctactggacgcgcgggggcacgctccgcaacgtccccgtcggcgggggctgccgcaagaacaagcgctcctccaggggcagcggcggcgggaggaacgggtcctcctcctccttctcctcctcctcggcggattcgacggcgctgcccctcccgccgcctccgacgacgacggggtccctgccgtcgtcgctggggctgcctgggggcgcctcgctcctcctcggctccgctctccctggcggtgccggtgaccaccaccacctcggcctcttccaggcggccatgcagtcggtggtttcctccgacgcgaccgcctacgacgagatgcagcagcaacagcagacgcagctggaccacctgctgggcctcggctacggaggcgccggcgcgcagatccagctcaagccgtggatgcaggaggccgccggggctggcggcgcggccgggatcatggacagcttctacgcgccgctgctgtccagctccctcgtgccggggctggaggagctgcacgtcaaggcggaggccgccggcgccggggatcaccagcagaagccgtcatccagggaccagcagagcgccagctgggactgggagctgccgacgccgtcgtcgtccaacgtcgacgccaacgtcacggcgtctgacgcgctcatggccgccgccgccgccgctgccgccgcgtccatgaaccccgctgttagtgttagctccacgccctccgcggcaccaaccgccccctcctcgttcttatactggggcaacggcggcattggcggcgctgccgcggcctggccagacctcgccaactgcggatcctccattgccacgctcttctagcccaagccgccctggctgtcctgctggcctcgttaacttcgtttttttaccttaatttctggttaattttttcttgactgaaataacatgtaatttgcggggaaaagaaaactgagatgagagagggagaacgcgctgtgaaagaagagagctagaccatctcaccacctcatagggcagaaacttagacaaatcaaacaaatgatccaatccaatatttcaagagaattccttcgccgcgactatgatcttcatgggatctacggtcttggccgtcaagcgatgatcaaggccggccgtccacaactggcatgcatggatttaggaggaggaggaggagatcctgagaccatggcgagctagagatcgatcgagactcgagagcaaagaaggcaagaagttgtaagtgccgtgctgccctgacactactccttgatttgctactttcttggctagcttctccgatccttgggtgttttgtacatagggcatatggtgtggggggtaatacaatatatataaggcggtggcccatgtgagatcatggtgc

SEQ ID NO: 7073 - DNA, 471 bp, Zea mays
  Clone ID: MRT4577_106445C.1
gaatgtgcttcagggccttgtagtaacgcgacaacaccaagccctacaaattaaggatgcatataaacaaaatcaatgctagggtaacaacagacaacttcttaattcaccaaaactcttgtggggcaacagttttaaattaaaatcccaccccctttttcccaacccaaactggttttataaaaaaaaacttaactctttttacataacccccttcctttatataaaatatattcccaaaaaagaactttgaaggaaaaaaaacccgggtctccaattttacaacaccctctcctctgggggggaccccccattctaatcataaaaaaacctcctggggaataccccgctaaaagatgaaaattcccccccaaaaacttgtttttttttaatggaaaaaccactaaaaaaatcttattgtctctaaatagggtcaaaacccctcttaaaaaatatgacacaaattggttt

SEQ ID NO: 7074 - DNA, 353 bp, Zea mays
  Clone ID: MRT4577_106446C.1
gcagctttgagtccatgatttttgagctctatgaagagggtcggtttgatcaggctgacagattgttccaggacatggccaagaaggggttcaggccaaccatctgcatgtatgaggcaaagatcggtgctttatgcagggaacggaatgtggatgatgctgtggaagtgctggaagaggagctgccaaagaatgaccttgttccaacagtgacaacatataacttgctcatgaagggtctatgtgacacgatgcaatcaatgagggcactagaatacctcaaaaagatggataagcagctcggttgtgtcgctcaaaaggacactttctcaatcttggttcacggtttgtgc

SEQ ID NO: 7075 - DNA, 420 bp, Zea mays
  Clone ID: MRT4577_106447C.1
gattaatggaatctggctggctgacaaagagggagtagcattataacaatgcaattctctactctctactatattaaagcatcagtttcaacgatcgtcatgcgtcatatttttacaaataacctctcacatctatttcaaattaacccgttacatgcccaccgcgcagacaacctccacgtcccaaaccacaccttcgcatgtagatggccaaacgggcggcccagcacggccctgctagacccaacgcccacagttccggcccagtcacgacacgccggtttgttgatcatgccggcacgttagcctatgaagacggggcagccggggttcctcgccatggccgccggatccgagaggggaaggggagaccggggggaggaagaagcgttgacgacccagcgaatgcgaggagtcgag

SEQ ID NO: 7076 - DNA, 348 bp, Zea mays
  unsure (1)..(348): unsure at all n locations
  Clone ID: MRT4577_106448C.1
attcctacaatacatatatctggcttcaccactgatggagtatcatcagcatgcatcatcaagggttcacagccagcattttattccatccacacgtacatcttatatatagccagacagccagtacgtagtttcgtaggtgaagaaagatttacacacgaatctcttcattcactgatnggatcttcgatgcgtaacaaccacatatggattagagtggccggttgaggatccaacggctgaacatggcgaaacacctntccggctcgtactcaagcgctgtatgcccggcgcccttgatcgtaccgaatgtcatgttgtttgagtaagttatcgtaaatccagctg

SEQ ID NO: 7077 - DNA, 306 bp, Zea mays
  Clone ID: MRT4577_106449C.1
acaacaccccgatggcgaagttaacaagaaaagacgcaaggcaaaaaccaaaaccggaaggggggagggcccaaccccccatgcctaaaaaaggaaagccacgcctacaagaacagcacaaaaacagagggggagcacaacaagtgaacgaacaaatatccaccccaaggaccgaacaaaaaaaaaaaccacctaggggcccaggaagggcccaaggcaacttttccacccgaaaagggcgagggggttgacttgaaatggaaagggggaaggggacccccccaaactgcagggggaaccccccaa

SEQ ID NO: 7078 - DNA, 529 bp, Zea mays
  Clone ID: MRT4577_10644C.1
cattgggtacctcgaggccggccggcgactccttcgctccgcttctgtgtcgtgcggcgcctgctctactgtgtggtgtccatgctgatgatctgtgagagatggctctggcggatcctgagccggccactaccccaagtacaggccgtggccgggggaccacgagctgatgaagtacacctacgatgcggccgtgaagatctcggaccgcgatctgcaccgctactgcgaggacctcgacgacaactagacgacaatgtcttcagtgacgtgcaccacggtgtgctgattaaccgcaccaaggacgtgaccgaagcagctggagggatcgactaccaccgtataagcagctccgtcatgcacttgtacaccatcagcatcacccacaagctcaacctggttcgcctcatcaggttctgctctgaaatgcgggacgccttggtgaagtaccaggtcatctgtaactagatcgctgaatgcgctcctgctcctttactgctccatcgaaggacaacattgctggacctga

SEQ ID NO: 7079 - DNA, 610 bp, Zea mays
  Clone ID: MRT4577_106450C.1
gggtacctcgaggccggccgggaaacactttctgcgaccggaagaacgtaagaggaaggagtagcattaggaggcgacgccgaggagacgttccccacctctagcgtgccaccatggttacaggattgaagaaccttgagagacgttcagtgcacccagacattggatgctggacaagcttggggcaccttttgctcccaagccaacttagaggaactcagaagtctagggagagcctcacagtggtcatcatcatcacgaacaggatcaaggatgctctgacatacccggaggccatttccatcctgacgagacaccatggacttgtagatagcaagatctggacagacaagacttaccctgctgggtccaaggatgccatttccatcccccagaccaatgataactacagggtgctgtcccataccaagggacgatgccgacttcacccaatcaagcatgaggatgctaagtgcacgcttcgcaaggttatgactgttcagtttgaacacaaagacatcccctatctgaacacgtatgacggccggaccatccgctaccctgacacgctcatcagggtcatcgacatcatcaagatcggtctggagac

SEQ ID NO: 7080 - DNA, 226 bp, Zea mays
  Clone ID: MRT4577_106451C.1
attccttctgcttctttgttcttgccaggagcagaaacggacgacaaggtgcagctttttctacgggggcggtagctcaaatctaaagaattgtcatgaggttcctaaggcagcagcgcagccctatggggaggccccccctccgatcgcgggggatgcagccaggagcggcctggtattgccgcggccatgttggcctgatcttaggcagagtgagccacagtac

SEQ ID NO: 7081 - DNA, 1286 bp, Zea mays
  Clone ID: MRT4577_106452C.1
caccatttcgctcccgcaagcaccgatttgtttactgctctctccgacgcgcggcggcggagctccctacgacgactgaaccatgtgcggcggcgcgatccttgccaaccttcgcgagccggcgccgcgccggctcacagagcgggacatctggcagcagaaaaagaagctcaagaggggcggcggcggcgggaggcgctcgttcgcggcggaggacgatgaggacttcgaggccgactttgaggtcttcgaggccgactccagtgattcagatttggagctcagggagcggactgacgacgacgtcgtcgagatcaagcccttcactgccaagaggactttctccagcgatggcttaagcaccatgactagtgctgtagcaaggtcagccaagaggaagagaaagaatctatacaggggtatccgccagcggccttggggcaagtgggctgctgagatcagagatcctcagaagggtgttcgtgtttggcttggtactttcaatagtcctgaggaagctgcaagagcttatgatgccgaagcgcgcaggattcgtggcaagaaggccaagggaagtaactcctttggctgctcagacttgggctgggagaatgataccaagacaccagacatcacttccattgctcccatttccactattgcggaaggcgacgagtctgcatttgtcgacagcaattcaaacagctcatttgtgcttcctgccctggagaacagtgctgttgatctcactgatgggctgacagatttagaatcctatatgaggtttcttctggatggtggtccaagtgattcagttgatagccttctgaaccttgatggatcgcaggatgttggtagcaatatggacctctggagcttcgacgacatgcccatcgccggcgatttcttttgaggaatttgaagcttggccataggactatgtacatagggactagggaataaagactgggagattgggaagcacctgcttggcaccttggggtagcatatgctcgtgtctagctcagatgcagaagtcgcattctgaaactctttggttatcgacctgttccctattttaactatctctgtatgagagccatttatgagactgaaccattttgttttgttttcccccttctttcgttgttacagtatatggtttaacattatgatttatggatatgtgccaaatatggtgctcaacagtggtcaaacatgccttttatatgcgctttgtgcttggttgaaattgagttaactagttatctgctgaagcttttgcg

SEQ ID NO: 7082 - DNA, 272 bp, Zea mays
  Clone ID: MRT4577_106453C.1
cccacgcgtccgagagagttgactgaaagtgtttctgcggtgcgacaatacgcatttcttgagacttggaacttcatgtcgcatactttaaatttcatgtttcggacttaaaaaacaaaaattaagacaaattatacttgctaaactataaaatactcagattacataacctataaaattataattaaaggccggcccctctttaggttccaattttacatcccctagcttgcgacgccatatctcttttgtagggtcacctaacttaaatt

SEQ ID NO: 7083 - DNA, 1175 bp, Zea mays
  Clone ID: MRT4577_106454C.1
aaagtttcgtccccatttcgctctcgcaagtcgccaagccaccgatttgttacaggcgccggagctcccgacgacgactgagccatgtgcggcggcgcgatccttgccgagctccgcgagccggcgccgcgccggctcacggagcgggacatctggcagcagaagaagaagcccaagagtactttctccagcccacgcgtccgcaccatgactagtgctgtagcaaggtcagccaagaggaagagaaagaatctatacaggggtatccgccagcggccttggggcaagtgggctgctgagatcagagatcctcagaagggtgttcgtgtttggcttggtactttcaatagtcctgaggaagctgcaagagcttatgatgccgaagcgcgcaggattcgtggcaagaaggccaaggttaactttcctgatgcaccagcagttggtcagaagcaccgttctggctcagcttctgctaaagcatccaagtcaagttttggacagaagcctatcgtcaaaggaagtaactcctttggctgctcagacttgggctgggagaatgataccaagacaccagacatcacttccattgctcccatttccactattgcggaaggcgacgagtctgcatttgtcgacagcaattcaaacagctcatttgtgcttcctgccctggagaacagtgctgttgatctcactgatgggctgacagatttagaatcctatatgaggtttcttctggatggtggtccaagtgattcagttgatagccttctgaaccttgatggatcgcaggatgttggtagcgacatggacctctggagcttcgacgacatgcccatcgtcggcgatttcttttgaggattttgaagcttggtcataggagtatgtacatagggactaggggaataaagaccgggggagattgggaagcacctgcttggcaccttgggggtagcatttgctcgtgtctagctcagagatgcagaagttgcattctgaaactacttggttatcgacctgttccctattttagctatctctttatgagagccatttatgagactgaaccattttgttttgctttcttttcgttgttacaatatatggtttaacattatgatttatggatatgtgccaaatatggtgctcgaaaaaaaaaaaaaaaaaagcggcca

SEQ ID NO: 7084 - DNA, 459 bp, Zea mays
  Clone ID: MRT4577_106456C.1
tccgccgaacctgtttccaaccggaaccaatggggggttcggccagtcgcctatccaaggagctgggggccgagtaccaggacttgacgttcctgaccaaacaggagatccttctgtaagtgctgtttcgaacctcacctccgggatgctctcggaacggcttcgggaacggggaggctccgtcttactgatgggcaaaccgaggtcccgccagcgggaggggcaggggcctgcatgaagccagcagctgagccggaactgggggccggagccccgggccctcggctgtgccctcttgccggcacgccctcccgtctcgcgccggcggcccccagcggtgcaccgcggagcagcctccagccagagttgggtgctctttgaccccgctcccctggcttctgcaaaacggaacttcctgccccagtccggccgagactgctgtagttctgggctgctttg

SEQ ID NO: 7085 - DNA, 267 bp, Zea mays
  Clone ID: MRT4577_106457C.1
cccggggctgcatctatacttgtggtctgagatccgtcatcctggtggtgctggggggtccaacgctgaaatcgacactatgatatgcagtgcaagctgtatgaccacgcactcctagtatctagtacggagacactacttggtaagcgtagtactgcactatcttccctccatatgcatgttaacaacagacgcgtactgaatggaatgcaagcactgctactacatgctctgctacttccaaaccagggtcattaatcttgatgc

SEQ ID NO: 7086 - DNA, 286 bp, Zea mays
  Clone ID: MRT4577_106458C.1
tactctagctccagcagctcttgaacaaaatctaatcaagctcctctccttcaaattcatttgcaattaaatcacattctatccaaaaattgttttaagatggtcaatagaagggcagatgtggtgtagtggtgagagttgtctcactgagtcacaagtctgggtttcaaagcagtctctctgtgtctaatttggaatgcttgccccggttcatcctttcccagacggccagaccccactcatgtgggagcctctggcaatgggtctgtcttacttccccaagatg

SEQ ID NO: 7087 - DNA, 1700 bp, Zea mays
  Clone ID: MRT4577_106459C.1
ggccggggccggggcttccacagagtttcgtccaccatttggctcccgcaagcaccgatttgtttactgctctctccgacgcgcggcggcggagctccctacgacaactgaaccatgtgcggcggcgcgatccttgccaaccttcgcgagccggcgccgcgccggctcacagagcgggacatctggcagcagaagaagaagctcaagaggggcggcggcggcgggaggcgctcgttcgcggcggaggacgatgaggacttcgaggccgactttgaggtcttcgaggcagactccagtgattcagatttggagctcagggaggggactgacgacgacgtcgtcgagatcaagcccttcactgccaagaggactttctccagcgatggcttaagcaccatgactagtgctgtagcaaggtcagccaagaggaagagaaagaatctatacaggggtatccgccagcggccttggggcaagtgggctgctgagatcagagatcctcagaagggtgttcgtgtttggcttggtactttcaatagtcctgaggaagctgcaagagcttatgatgctgaagcgcgcaggattcgtggcaagaaggccaaggttaactttcctgatgcaccagcagttggtcagaagcgccgttctggctcagcttctgctaaagcatccaagtcaagttttggacagaagcctatcgtcaaagtagctatgaacaaccttgccaacacaaatgcatccttcttccaatctgctagctacccctccaattcatttgttcagcatggcaatataccatttgttccagcaatgaactctactgcttctgttgatgatcctatcatgaatctgcactctgaccagggaagtaactcctttggctgctcagacttgggctgggagaatgataccaagacaccagacatcacttccattgctcccatttccactattgcggaaggagacgagtctgcatttgttgacagcaattcaaacaactcatttgtgcttcctgccctggagaacagtgctgttgatctcactgatgggctgacagatttagaatcctatatgaggtttgttctggatggtggtccaagtgattcagttgatagccttctgaaccttgatggatcgcaggatgttggtagcgacatggacctctggagcttcgacgacatgcccatcgtcggcgatttcttttgaggattttgaagcttggtcataggagtatgtacatagggactaggggaataaagaccgggggagattgggaagcacctgcttggcaccttgggggtagcatttgctcgtgtctagctcagagatgcagaagttgcattctgaaactacttggttatcgacctgttccctattttagctatctctttatgagagccatttatgagactgaaccattttgttttgctttcttttcgttgttacaatatatggtttaacattatgatttatggatatgtgccaaatatggtgctcaacagtggtcaaacatgccttttagatgctcttgtttctcgtattgttgtgtaccttgtgatatttcattcgttgaaattgagttaaactagttatctgctgaaacttttcttgtacaagcaaaagtattcaagatttaatcttattggcatttggcaagatgctagacttttggtgccgaaaaaaaaaaaaaaaaagcggcc

SEQ ID NO: 7088 - DNA, 1025 bp, Zea mays
  Clone ID: MRT4577_10645C.1
ggtacccccgaggccggccgggaagacagtagaacaataatgctgaagcttagacagtccgaagagaaggtcatcagcctgagcaaagagaaggagcagttgatgaaggaaagagacgctgcgtttcaagaggctcatatgtggcgcgtcgaactaggaaaagccagggagcaagcagtgatacaggaagcaactattgcccggaccgaggagaaggcaagagtctccgaagcagatgctgcagctcggattaaggaagctgctgaaaaactgcgtactgttgagaaagaaaaggaggagcttctagccctggttggtgttctccagtcacaagtccagagagagcagagcagcacaaagcaagtgtgtggggagaggtctgagtcgtgttcaggcgccgacagcccccctcccctgacaaagcatgttgatgcatcggacgatgacgtggacaaagcctgcgtgagtgactctagaccagtgctggtgtcgagcgacagcactgaggtccagctggctgtggacggggtggacatccgtcctgtcggcgacgcagagtggggtggcttccagcagtcagatgcgctgatcgctgatgtccgtgaggtctccccagaggcagatggaggcagcttggacattcctgtggtcaaccctccaccgatcagtgatcatgttcagggaggcgcaactcatccctgaaggcctgaggttgctggcttgctgctgccttccgagattggtgtggttgctgggaaaccgatagggatgtctaaatctggagagtcgccgttgagggtgcatattgcatcgatgcgattgtatgtccattgaggtatacgattgaataaaaaggtagtaactgtgtctggctgtgggattgtaaatattcgcctcattcccttttgctacggctattcacgtgtgatattttagctcaggtggatggattgtgtgatatcctggtcaagatttaataaaattaatagagtatttatatcaaaaaaaaaaaaaaaaaagcggcc

SEQ ID NO: 7089 - DNA, 744 bp, Zea mays
  unsure (1)..(744): unsure at all n locations
  Clone ID: MRT4577_106461C.1
accataccagtgctagcaaatctagctatcccaccctctctccgtgagctagcccaccaccacaaggtccacaactacagctaactcggtcgagatggctcgcactgcagctactaagctcgtgctggtcgccctggtggcggcaatgatcctcgcagcctccgacgcggccatcagctgcggccaggtgagctctgccttgaccccctgcgtcgcctatgcgaagggcagcgggaccagcccgtctggggcctgctgcagcggcgtcaggaaattggccggcttagcgcggagcaccgccgacaagcaagctacatgcaggtgcctcaagagtgttgccggagggctcaaccccaacaaggccgcaggcattccctccaagtgcggcgtcagcgtcccctacacgatcagcgcatccgtggactgctctaagatccactgatcgatttctggccgccatcatcgccgattatagttccagcgattgatgctgagtacgttgaggtctcacacacacatatatacatatacatgaataaatgctctgatatgatctccatgtgagagataggagtacgtacatcgagccagctttgcatagctggccactgttgtatctattttgtatcagcgtttgattgttcgttcactccctttgagcagacacgggagtttgttgtactttgtacgatgtacgcttatcatatatggattataaattaatctacatctattcnngttagt

SEQ ID NO: 7090 - DNA, 350 bp, Zea mays
  Clone ID: MRT4577_106462C.1
tcgtccttttttttttttttttatgtacgaatcatacgcccgtacatactaatgccagctcgtgtaacgtacgctaatctactaatcatgtgacaagaacctatcaagcaccaagctggcaaacacaacatactagcccatgcttgcagagcctattccggattaaaccgtgcagaaagggacttggtaatagctgcagacgccacaagcgtgggacttaatgacataatgaatccaatgacacaactaacattacagcgaaccatccggatggcctgacaccagtgcttcaggataaagctaagcacatggagcatacgtatttgacggacgagtacaagcagtcctga

SEQ ID NO: 7091 - DNA, 207 bp, Zea mays
  Clone ID: MRT4577_106463C.1
gcacaggcgttctgcctagacggaagctcgtcctataccatatatacagacgctacggcagaagactttgatgatgctcagcgcgccatgattacggatacacatcgatggaagcaaatgaccaacatatatgatcaaggctctaacgtcgagcagcgtcaacccttgatactctggccatggtgtgggccaacctaacaacggctg

SEQ ID NO: 7092 - DNA, 388 bp, Zea mays
  Clone ID: MRT4577_106464C.1
aaaaaaaaaggcgttccagggctttttttatttaaaccataaaaaaattagcggggccttttccccctttttttaaaacaagaaaaaagagcccgcctttttcctcccccattttgggattggggggttcacctaaatgatttttgaaaaacaatagccccctttttgcttgttttggatccaatgccttggggggccaccattgcctaagggatttcccgttgttggggggttttttacctttttttttaatcccgatctaaataaagcttctggggtcccaaggggggaaaccaatgggggaagggcccctttttcaggaaatgcccttaaggacagccaaagccccccccaccgggggggaaaattttaagggttttaccccccc

SEQ ID NO: 7093 - DNA, 517 bp, Zea mays
  Clone ID: MRT4577_106465C.1
ggcctttttagaaccctagagccaggacaggtcgggggtgctggcaaaagcgacacttgcggccattgatggacagcctatgctgtatggcctctaacatacaaacttcgtcatcttgcaagaaagaaatctttaacgacctttagaagttcgtcaacgagcagggtgcgtatgaaacaccctccttgatatgacggtcaccacttaatcggctgttccagtttgcgccaacaatgattagcataaatattgtgacacggagagtagccatacttgatacagcacgagggtcatagacgagccttatcatacagaatattgtgaattcctgatcatgctacaatagctaagaagtgagaacccttcacatggatgtaccgactatctagagactgctaggatcaggcaggttcgggatgacgcatcaaacagtcgtcacatattgtaagcagttccacgttttaaacatgaagggcaataatcagaacacatgtactttccttgacataccagaaag

SEQ ID NO: 7094 - DNA, 331 bp, Zea mays
  Clone ID: MRT4577_106466C.1
ggccctctctctggtgctgcagctcgccccccccctctgctcaccatctcctccctggttcccatggcgccctcccctttttggtggccgacgccccccctctctctcctcttggcgacgactgggcggcatgtgcctaggtcttcttgggacccttcgccggcgacaagcactaccagcatcgcgtcacgcctgctgcttgtacgtgcgtgctctctccgtcacgcgtcgggggtggattggatcagagccgatcgagtgcggagaacaccacgccaggggtgcttcagatggcagtaaagttcagtcatgagtgggcttctcatgagct

SEQ ID NO: 7095 - DNA, 313 bp, Zea mays
  Clone ID: MRT4577_106467C.1
cggacgcgtggggtcctattggtctaatctgggagggtactatctcaacaaccgacaccacatcgagtcctacaatccttcagtatacggtaacataagtaaactagaggattgtaggatggatgtggtgtcggttgttgagatagtgtcctattggtctaatccgggagggtacttttcagaaggaaacgacataagccatttcggttcaaggtatgagatgcatgcttgaacccttggtcctggaactggggggaacatattcttaatatggaattattgtcgatctggggaaaaaacaatcaagctcatg

SEQ ID NO: 7096 - DNA, 594 bp, Zea mays
  unsure (1)..(594): unsure at all n locations
  Clone ID: MRT4577_106468C.1
ggtccggnatatcccgggcgcgagcgcctctccacccgcctctgagccgagcaccgcgccctcctccgaccatcgtcgttcatctccgccatctcagacgacaacgaagggtgcaaggagcgggcgttcgagccatccgagaaggtcatcgtctccgtctccggcgaccccgaaggcgatgctagcgaagagcgcgccttctacgcctcggggggctgcatgccgcccttctcgtggcgcaagctgtgggcattctcggggcccggctttctgatgagcatcgcgttcgtagacccggggaacatcgagggcgacctgcaggccggtgccacagcgggcggcacgctgctctgggtgctcgtgtgggcgacggccatgggcctactcgtgcagcttcacgccgcgcgcctcggggtggccacagggaggcaccttgctgagctgtgccgtgacgagtacccggattgggcgcgccgcgcgctctggttgatggccgaggtcgccttggtcagcgctgacatccaggaggtcatcgggagcgccattgctttcaagatcctcagccacggcctgttgcctttttggggcggggtt

SEQ ID NO: 7097 - DNA, 349 bp, Zea mays
  Clone ID: MRT4577_106469C.1
tatatttttttttttttttttctttatttttgggttttttttgtttttttttgtgggggcacagaaatctttttttcacgtttttttttgggtacacctcccagttcattatttaccaaggatcaaaattaaatccccttatgcccggaaccatccatcaatcttaaaccaaattccttcaacctttacccaaaaaataaccttttgttaacaccagccaaaccaacatggctggaagtgtaccctttgttcaggtacaaagtgtcccattaatacatggcgacaagaatcaacttttgcaaggggatagaggttcaactcttttagaataagctaataaacagtctgg

SEQ ID NO: 7098 - DNA, 301 bp, Zea mays
  Clone ID: MRT4577_10646C.1
aagacaaaacacggtcatacttcttgatattggtgtatgcagtcgacattccaacagacgtacaagggagacggaatggtccccataattggtgctggggcgtcgccagcacacggggcaccagaacacctggacgggccgttctatcggcaccagccgaagataggtgggaacggcgaatcggcacacggtaccattacccaccctcgaactgtacctgcctgacaggtgttcggcagtgggcaggacggcactagggaccgagggcaccaaagggagacagctaatggccacccatgcc

SEQ ID NO: 7099 - DNA, 157 bp, Zea mays
  Clone ID: MRT4577_106470C.1
cccagggaggggaggggcctttgtctagggaagggactgctagggaaggacgagtctaggctgagggcaagatgggaggtcagaggtgacagaagcgttcaggggtgcctgggcctccccaggagctgtggactcagttcctgacctctgctttggg

SEQ ID NO: 7100 - DNA, 271 bp, Zea mays
  Clone ID: MRT4577_106471C.1
gttttgctcaacaatattacccttaaatgagtggatgactgaattattatgcatataatgtctcaacaaatacactaataatatgcagttttattctgacctttatgaaatattactcatttgacacctcaagaacatcagagaataacagcagggaaatgatttacattttaatggttaatgactaacctatgataattttgtcttaaattccctttaacattttctgaatgccatacccctatgctcagaaaaagtaactgaatacatg

SEQ ID NO: 7101 - DNA, 329 bp, Zea mays
  Clone ID: MRT4577_106472C.1
ctgtaaacatcactattattaatatatttctatttgtattacttgtgtatgcaaagataaattacaaatgtaccttcggcttgaaggaaagaaaatacaggcgtggcgtaaaagtgaatgtcaagtccgcgtgaacagtacgggaatactgttcacctatttataggcacgggtcgcagcccatgcaaaattacattaatgccctttacatttatcgataactctatattaattcttcgaggtctagtttggcttttcatctttaagtcggtttcccccttccgccgagatgccgaagctcttttgcatatagcttcgtgatcatctta

SEQ ID NO: 7102 - DNA, 210 bp, Zea mays
  Clone ID: MRT4577_106473C.1
attcggctcgaggggagattgcttgctaacgggtcttaacaggttgggcagcatcatggacccgggagacgtatggattctcttgaaggcaatgttagctgcaagactaataaccctatggtccactacgctgctccactgttatgaccgatctgtgctcaccgggggcagtttctaaacctccgaacatagtcaccttctgtgattctt

SEQ ID NO: 7103 - DNA, 223 bp, Zea mays
  Clone ID: MRT4577_106474C.1
agctcgagcgcagaggcccacgcagctgcggagcagcaccatcgtgcccagattgtgtaatagcttaccatattatcttgacccagattgtatccatgagctatcgcgcgcctacgatacagaatggttcactagaggatgaaggagaggctagttgtatgctgtggctgcgccctaaccaccatataagaagacctgcattgttctctcttgacccgaagat

SEQ ID NO: 7104 - DNA, 367 bp, Zea mays
  Clone ID: MRT4577_106475C.1
ctcgaacacgcaggagatctgcgtatcattccattaatagatataggaaggtacaacacaacacacatgacacaacaagacacacaagacgcaacacagccaccacacacaaccactctgaacaagacacaagactatcccctgggtcaagcataaacacatgagttgaaagcatgttcaacccttttgtcccggcactacaccacattctgagctcatagcccgcgggggagagagtactagctaggctcgacgaccttccattgaacacatagtcgctgcgatgacgcctgaggctccaagcgccaagaataactagagaattgaagcctgattggtgatcacggggaaccttgtgcacagtgct

SEQ ID NO: 7105 - DNA, 195 bp, Zea mays
  Clone ID: MRT4577_106476C.1
taggtgagcgttggcgatccagcactagctgacgctcgctataggaggagtagatttgggaagaccctatccagatgcaatatcatgatcgaaggggagtcttatgacagcattgacaatgttatggctaggactcaggacaaggaggccagccctcatggacatctggcacgttatgttctgcggcaagcagct

SEQ ID NO: 7106 - DNA, 169 bp, Zea mays
  Clone ID: MRT4577_106477C.1
aagcattataaaataaacgaaagcctgggacaggggggcaacaagattaactcccgctattacatttgggacgggaaggtcaacccccttctattaaaacaggccaaaccaaggggagggattagtaaagcaagggggaaggggccgggggggcaaaacaagggaaacc

SEQ ID NO: 7107 - DNA, 738 bp, Zea mays
  Clone ID: MRT4577_106478C.1
tcgggatgcctcctcgcccgttccgaatcagctcgaggtagcagctccccccgcaaaaaccctagctttacctccccacaagcgcctccaagatgaagctcgtcaggttcttgatgaagctgaacaacgaaacggtgaccatcgagcttaagaacggcaccgtcgtacacggaaccattaccggttatccggtcgattatggtttacatatacggacagctatcttcagatagtgttgacatcagcatgaatactcatctgaagactgtgaagctgacactaaaagggaaaaatcctgttacccttgatcaccttagtgtgaggggaaacaacatccgctattatatccttcctgacagcctaaacctggagactttgctggttgaggaaacaccaagggtcaagcctaagaagcctacttctgggaagcccttgggccgtgggcgtggccgtggtcgtgggcgcggtcggggtcggggacgttgagcatgctagctgcttttggaaattgcattgcgtgcatctgcagtgtaatctacattcctatcaattgtacgaagtatgcctttgattatgcaaccatgtatcaattgtttttttttgccgtggatttatgttgatgaggttaccatgtgatcatatgttctttccctagaacttttaagaacaattaaatactaaaaaaaaaaaaaaaaaaaaaaaaaaaaaaaaaaactcgagggggggacccgggtaccc

SEQ ID NO: 7108 - DNA, 281 bp, Zea mays
  Clone ID: MRT4577_106479C.1
tagacgcgggggcagccaggccgcgactccggaccaaggaaaccccctgccgccaaaccacaggaagggattcgaggagaggaaaaaccaggggcccaggcctgacaacccggacggaggagaggacatgagctgggggcaggagccgtactacatggaccggaaggagaaccaggagccaatcgagaaagagcaaagtaacacccaccgccgggagcaaactgcttcaaacacaggagaacccggccagccgacaaaggagcctgtgaccaggtgtgaaa

SEQ ID NO: 7109 - DNA, 396 bp, Zea mays
  Clone ID: MRT4577_10647C.1
tgagtttatagccttggccgacaggcccgggttatcgtgggaaatataatcgtgatggggaaggtgataataatggagacggtgctcggatctgggccagaccacgacgacgacgacaagacacacaaagcgacgtatgaatggtatcttgaaatactgagctaagtgaacggcgcgcatcttgaagaacacgactggaggaggatcctcatgagtgctgggttcgcgtattacaagatcacgcacatccggggcatccatgtccatcattggagctttccctgtctcatcatgagatcagagtcgatcatatatgcatgtctgcacgtacttgggtcatattatatctatcgatcatgttagtgaccctttagattttggtatgtattctcatct

SEQ ID NO: 7110 - DNA, 861 bp, Zea mays
  Clone ID: MRT4577_106480C.1
ctcgaggccggccgggatgtcttctcgcccgctccgaatcagctcctcgagccgacctcaccccgcgaaaccctatcggtacccccctccacccgcatccaatataacgctcccgagccgcccggggaggtagcagctccccccgcaaaaaccctagctttacctccccacaagcgcctccaagatgaagctcgtcaggttcttgatgaagctgaacaacgaaacggtgaccatcgagcttaagaacggcaccgtcgtacacggaaccattaccggtgttgacatcagcatgaatactcatctgaagactgtgaagctgacactaaaagggaaaaatcctgttacccttgatcaccttagtgtgaggggaaacaacatccgctattatatccttcctgacagcctaaacctggagactttgctggttgaggaaacaccaagggtcaagcctaagaagcctacttctgggaagcccttgggccgtgggcgtggccgtggtcgtgggcgcggtcggggtcggggacgttgagcatgctagctgcttttggaaattgcattgcgtgcatctgcagtgtaatctacattcctatcaattgtacgaagtatgcctttgattatgcaaccatgtatcaattgtttttttttgccgtggatttatgttgatgaggttaccatgtgatcatatgttctttccctagaacttttaagaacaattaaatactatctttaactcttttctaaaaaaaaaaaaaaaaaagagacctgcccttgttatgcactttagatatacaacgtacaattatgtatctatttagatatacattatatattgatgcagagtaccaaaaaaaaaaaaaaaaa

SEQ ID NO: 7111 - DNA, 449 bp, Zea mays
  Clone ID: MRT4577_106481C.1
ccttatcatggtcgttttcgttgggttttcaaacatcctggggttcactcttcggtggggcccagatggggctcttcgtgtggcgcatgaacaagaccctggtggcgagaactgtggagggctcggttgccggcaagctttcctcagatgccgacgagcacgctcccgcctgcatcgcgaagctcagcccaaccctgccggagaggggctcctgcgtgcactcggtcacccagatggggggtgttacggtcgggagctgagctgtggatgcaaccgcacacgcgctgctgggaaacagggacgtggtcgatgcttttgtttgacgacacagtccggacgttcacgtggcataaattctctatcgagcgggtgctggggccatgcatgcgcccgccacacgggctcttgcttttatctgttaggaggacgtgctggtggtcgtgagcata

SEQ ID NO: 7112 - DNA, 202 bp, Zea mays
  Clone ID: MRT4577_106482C.1
gaagagaggccaacaggagctgaacacagaaaggctgccaccaggggccaactttgcgcgcgcctacaccgggagtggcagctgcagtcccctacaacttactggtgccaggacctgcagcaaaaaaagtcccttatcagcgacacctcagattgagtgcaggggaggagaggtcaaggcgctcaacgtttctggaagggga

SEQ ID NO: 7113 - DNA, 216 bp, Zea mays
  Clone ID: MRT4577_106483C.1
cgcacgctgctgaccgggagcagcagcagcaacgcgtcgtcggagtccactagctgcggcatcaagtactcgacgcccaggtcgtaccaggccatgtataccatcatcagtactatcgacgctaggttctctccgcagccacaaggcgtcagccacggcctcggcttgcaatagcaccgcgttgtgccgatgctggcgttcgcctcgccgtcgccg

SEQ ID NO: 7114 - DNA, 437 bp, Zea mays
  Clone ID: MRT4577_106484C.1
tttctattaggactcaaaggccgacaagggggactatggagtccattccggtgatattgatcttggagcttaccgatgggcatggctactatgggatgaagacaatcccttgtgcgaaagagtcctaatttcagagatggcttaagcacacatgactactgctggttctgatgcccatgcagcatgggtggccaaagggaagaggtagaatgaatacaggggtatactccagcgggcttggggtaagtgggctcttatgatcagagattcacaccagggcgctcgtgtacggcttggtactttcaatcgtccgaacgtagacgaaagatcttatgatgctgaaatgcgctagattggtcgcaagaacgtcaaggttcactataccgacgcaccatcaagtggtcagacgcgtccatctaggtcaactgctcctcaag

SEQ ID NO: 7115 - DNA, 2375 bp, Zea mays
  Clone ID: MRT4577_106485C.1
tctggccggcagccgcaccgccccgcagttgcacgccctcgccgcgccagtatccccgacgccccagcagcagttgccggcatcctgcgccgccccgccgttgcacgccttccccgcgccagtatccgcgccgccgccgttgagttcaataccactgctgacagggccgatgcagccagcgcccatatcatcggcggccccagccccggcaccggtggatcttacaagggcccacgcagctacccagcaggaaggcttcagcttctcttccatgtcggactcggagtccgacgacgagcccggggacgacgacatgacggcggagacaggcggaaaccaggaccgcctcggcaagcggaagcgcggcgacggcggcggcagcggcagcaacaagatgatgtctttcttcgaggggctcatgcagcaggtcgtcgacaggcaggaggaaatgcagcggccgttcctggagaccatggagaagcgggaggcggagcgcacggctcgggaggaggcgtggcgcaggcaggaggtcgcccgcctcaaccgcgagcaggagcagctcgctcaggagcgcgccgccgcggcctccagggacgccgccatcatcgccttcctccagcgcatcagcgggcagtccgtgcagccccctgctaccgccgttgttgtcccaatgccggcaccggtgtcagtccataccacgccgccgaaacaaccttctcgccagcagcagcaaccgccgccgccgtcgccccaggcgacaccgcagtcgaagccaatctcagccgcgccgctccagcagcaaccgccacagcagcaaccgaaggatacgtcgcagcaggacgccggcacgccgcgcagcttgcccccggcgtctagccagtcactcgagctggtgcccttcgccgccacggagcatcacgtcgattccgggctaggaggaggggatggaggtgcggcgtcgtcatcgcggtggcccaagacggaggtgcacgcgctcatccagctgcgcatggacctggacatgcgctaccaggagacaggtcccaagggtcctctctgggaggatatttcgtccgggatgcggcggctgggatacaaccggagctccaagcggtgcaaggagaagtgggagaacatcaacaagtactacaagaaggtgaaggagagcaacaagaagcggcccgaggactccaagacctgcccatacttccaccagctcgaggccatctacaacagaaagcacctcagcagcctcacaaccgcggccacatcgtccaccgccgccgccgccgccgctcctcgtcccgcctacccagatcagctgaacccgagcaggcaagagatagaggggaagaacatcaacgatgacaagaggaacaacggtggatcaggtggaggcacgcaggtgccgaccagcaatggcgagacagcgacgacgacgacgacgacgcccgtcgcgttcgacgccgacaccggcatgaagaagccagaagacatcgtcagggagttgaacgagcacccgcgtcgggagttcacgacggaggacgagacggacagcgacgacatgggcgacgagtacaccgacgacggcgaggaaggcgaagacgacggcaaaatgcagtacaggatacagttccagaggccgaacccgggcggcaccaacaccgcgccagcaccggcagcagcgacgacggctgcgccagcggtgccgacttcggctccgaccagcaccttcctcgccatggttcaataggggcgcgggcggcacccctctcaaaccgtacgtacgtatatgcgtccaaaccaaaaacctgcgcgcatcaccgtcacctcctcctttactttaccagtccaccaagcatgcaccatcagtccatcacactgttctcttgttcatcctgtaatcccccgtgccattccattatttattgatttgtttcgtgtataataagatccccaccgttgcggaggatgcagagtgaggctgcggtggtagagcaaaaaggaagagtccagtccctcagtaataacttatttataggtcatcgtcgatcgcgttaaacgagaactgtacatcgatgtaacagtcagtccatgatgtttttcctcccttttttttttagttactcccttcccgggacggcagtatacaagtttgtataagggtatacaagaattacagacagttcaagcaacctggagcttgcggaggtgagaaggtgtttttgccgttgggaatctacattttttttgtcgatcctttttcttttaacagtggatataattaaatcctgttacttgttacagtgtacattaatcgtgttgttattccagtactctgccctttgtggcaaatatacatgagcagttttacc

SEQ ID NO: 7116 - DNA, 1797 bp, Zea mays
  Clone ID: MRT4577_106486C.1
ggccggccgggatcgataaagaaaaaaaaaaatggatgctttcatggggtcagtgctgggtgccctcctggccgtgctcgcctccacgctgctgatcggagcgctgttctttctggtgtggaagccctacgtcgtcacccggtggtttcggggccagggcatcgggggcccaagctacaggttcctcgtcggctccctgccggagatcaagcggatgaaagccgccggcagcaagatcacactcgacgtcggctcccatgacttcgtccccatcgtgcagccgcagtaccgtagatgggtatccgattacgggaagacatttctgtactggttcggcgcggtgccgaccatctgcgtcgccgaggtgggcctggtgaagcaggtgctcgcggagaggacaggcctgttccccaaggactacatgaacgacagcatggaggtactccttggcaagggtctcgttctcgccaacggcgaagactggaaacgccaccgcgaggtggtgcacccggccttcaagcccgacaagctcaagacgatgtcggtggtcatggccgacctggtgcagcggatgatgcagcaatggcgatctcagatacagcgggccagcaaccatgaggctgaaattgaactcagcagcgagttctcggagctgacttcagatgtcatcgcgcacacggccttcggtaccagctacaaggagggtaaggaggtgttcgtcgcgcagaaggagctccaagaactcacattctcgacatggcttgatatccctgctcctgcttgtctaaggaaactgaaattgccaactagcaagagcagccgacgagttgaagagctggacaagaaggtgaggagcatgctcatggcgataatcgaagggcgccttgccgcgaggggcaccagtggatacggcaacgatctgctcggcctgatgctccaagcgcgcgctctggagcaagaagggcaccagatgctcaccacggaggagatcgtggacgagtgcaagaccttcatcttcgctgggcaggacaccacctcgcacctcctcacctggaccatgttcctgcttagcaggtactctgagtggcaacacaggctgagggaggaggtgctgagagagtgtggcgatgcagtgccaaatccggacacagtcaccaagctcaaactggttaacatggttcttctcgagtcattgaggctctacagccccgtggtgttcataagaagggccgtaggctcagacatcctgctccgcagcacgagggtgcccaagggaacaatgctgtcgataccaattgcattgctgcacagggacaaggatgtctggggccaagatgctgacgagttcaaccctgacaggttcgagcatggcgtgtccaatgccgctgccaaacaccccaatgccctgctgtccttctcccaggggcctagggcttgcatcggccagaacttcgcgatgcttgaggcccgtatcgggatcgccatgatccttcagaggttctcgtttgagctctcgccaaactatgtccatgcacccaaggaagcggtcacccttatgcccaggttcgggcttcccatcatcctgaggaaccttcacgattgagatgtgctaccataaatatatatacgcactgccacttccttttgcccgaggtttgtcacactaaacaaacacttgtgggtatttggtatgtcattatgtgatgctgttgtatttttttactttatttacggtttgctttagtttcttacgcagaatgtaatgaataaaaacttgtcagggagattacctgcaat

SEQ ID NO: 7117 - DNA, 750 bp, Zea mays
  Clone ID: MRT4577_106487C.1
cattgggtacctcgaggccggccgggaagactatcagaaggtgaaggagagcaacaagaagcggcccgaggactccaagacctgcccatacttccaccagctcgaggccatctacaacagaaagcacctccgcagtctcacaaccgcggcgggtcgtcgggcgcgtccagcaaccggtggccgcgggaggagacgcaggcgctcatcaggatccggtcggagatggacgcaaccttccgcgacgcgacgctcaaaggccccctctgggaggacgtctccaggaagcttgccgacctgggctacaagaggagcgccaagaagtgcaaggagaagtttgagaacgtgcacaagtactacaagcgcacaaaggaaggccgcgccggcaggcaggacggcaagagctaccgcttcttcgaggagctggaggcgttgcacgcagccgcgccgcagccgccaccacagcacttgccggcagccagcaccgccccgcagttgcacgccctcgccgcgccagtatccccgccgccccagcagcagttgccggcatccagcgccgccccgccgttgcacgccttccccgcgccagtatccgcgccgccgccgctcctcgtcccgcctacccagatcagctgaacccgagcaggcaagagatagaggggaagaacatcaacgatgacaagagggacaacggtggatcaggtggaggcacgcaggtgccgaccagcaatggcgagacagcgacgacgacga

SEQ ID NO: 7118 - DNA, 457 bp, Zea mays
  Clone ID: MRT4577_106488C.1
ccacgcgtccgaataagatccccaccgttgcggaggatgcagagtgaggctgtggtggtagagcaaaaaggaagagtccagtccctcagtaataacttatttataggtcatcgtcgatcgcgttaaacgagaactgtacatcgatgtaacagtcagtccatgatgtttttcctccctttttttttagttactcccttcccgggacggcagtatacaagtttgtataagagtatacaagaattacagacagttcaagcaacctggagcttgcggaggtgagaaggtgtttttgccgttccccccccccatttttttgtcgatccttttcttttaacagtggatataattaaatcctgttacttgttacagtgtacattaatcgtgttgttattcccagtactctgccctttgtggcaaatatacatgagcagttttaccgttgccaaaaaaaaaaccc

SEQ ID NO: 7119 - DNA, 202 bp, Zea mays
  Clone ID: MRT4577_106489C.1
caatctaatctaatcctttttctctccaccccttccctctcatattaccctttcttctaaattgtattttaaaagataacacagtactattattcattccaacatcaactttatatcactattttacatcaccttcctatcccctaattttatccttataatcctatctcctattttacatatattcacatactattactta

SEQ ID NO: 7120 - DNA, 464 bp, Zea mays
  Clone ID: MRT4577_10648C.1
acaagctttttttttctttgtcggacaaactaagtttctttttcagttttttaaaaaaaggaaaaaataaatgttttttctgaaccaagaaaaaaacccccccaaggccgaatgtcgcaaataacggcaaaattgcgggcgggggggggcggtttttttggggcccaatccgcccacaagggggggggaaacaaaggaattggcggttccttgccaaaattggaatgggaaaaaccttgccgtaaccaaactaaccggcttggaaaaaaatacccctttggccgcttggggaataaccaaaaaggcctaaacggatggcccttcccaacccttttccaaccggaaagccaaagggccccccctttttaagggaattaaaccccgccggggggggggggtatggcaattgggaccctttaactttccagggcccaaggccccgttcctttggttttttccctttc

SEQ ID NO: 7121 - DNA, 263 bp, Zea mays
  unsure (1)..(263): unsure at all n locations
  Clone ID: MRT4577_106490C.1
ttttggggggtttttttaaaggcgtctctctttatttcccagaacagagacaaagagaactggaccttgttctagagctcacaagttccaaagaagtcttcaagattatacaatgagcgattggactgaactgaacgtggagggaaaacaccggggaatacacccctgtataaccgagggcaaatgttgcctcatgataaatatgattttatacggtgcagcaccttcagaaggggncattatgcagtacatatccttttcct

SEQ ID NO: 7122 - DNA, 266 bp, Zea mays
  Clone ID: MRT4577_106491C.1
ccggagtaactgccggaggaccaactgacggatatatggatcgatgtggcaattaattgatacacaaaactaggttaattattactaccagctgctgcggtaaacagatcagaaagggggaaaaaggagaagagagagctagcaatggatcgatgcctgagggagcattgctgccagtgatagcacatgtggttttaccatagttcatttgagtaaagattcaatttactggattagtagaaggatgaaggatcattttttttcgt

SEQ ID NO: 7123 - DNA, 2074 bp, Zea mays
  unsure (1)..(2074): unsure at all n locations
  Clone ID: MRT4577_106492C.1
ccgggtcgacccagcgtccgccgcacgcgtacgcggaccaccactccacaatacacaaagcggctgcggatgtgagtactataaagaaagcgatgaggcgccaggccggtagccaaggatcgagtcgtttaattttctactaggagctagcagcgagcgggttatttgcaacgacggcatcgtcttggcgttggcgggcgtgtttggcaccatgggcgactactactaccgccgccgctcgccgcacctcctcccggcggcggtgctggcgctgctcgccgtcgtcgtcgtcgtgagcagcagcctcccgagtgcggcggcggcgggggcgggccggaatgtgatcacgcacatcaagggcttcgaaggccctctgcccttccacctcgagacagggtacgtggaggtggacgaggagcacggcgcgcgcctcttctactacttcatcgagtcggagaggaacccggcggaggacccgctcatcctctggatcaccggcggccccggatgctccgcgctctctggactcctcttcgagatcggacccctcaagttcgatgtggcggggtacacggaagggttcccgcggctggtctacttcgaggattcatggaccaaggtgagcaacgtgatcttccttgacgcgccggtggggacgggcttctcctactcgcgggaggaggccggcctgaacgtgagcctgacggagtccgggcggcagcaccacgtgttcctccgcaagtgggtggcggagcaccccgagttcgcgtccaacccgctgtacatcggcggcgactcctactcgggctacaccgtgcccgtgacggcgatggacatcgccaccagcagcgacgacgaggagccgccgaggctgaaccttgtgggctacctggtgggcaacgccgcgacggacgaccggtacgacacggggggcaaggtgccgttcatgcacggcatggggctcatctccgacgagctgtacgaggcggcgaagcagggctgcggcggcgacttctacgtggcgccggaccccaccaacgcgcggtgcgccagcgcgatgatggccatcaacatggtgaccttcgccgtgaaccccgtgcacatcctggagcccttctgcggcgcggccgtgcgggccggcggcggcagcatcttccagggctacggcggcggcgcgaggcggtcgatgctggtgcgggacgacgtccgccacccgggcttcttcgccaagcagcggctgggcctgcccgtggagtgcagggacaacgggtaccggctgtcctacatctgggccgacgacccggaggtgagggaggcgctcggcatcctcgagggttccatcgggtcgtggagccggtgcaccatgctgtcgcactacaggcacgacgtgaccaccgtcatcccctaccatgtcaacctcaccaaggcaggatacagggcgcttgtgtacaacggcgatcatgacctagacatgaccttcgtgggcacccaagagtggatcagaagcatcggctaccccatcgtcagcgactggagaccatggttcgccaaccgacaggtcgcagggttcacaagaacatacgcccacaaccttactttcgccactgtgaagggaggaggacacacagctccggagtacaggccgaaagagtgtcaggccatgttggatcgatggacatcagcagcaggccaactctgatgaatatggtgaccacggaattaacgaagtactacagctgtagtcgtcgttggtgtctctccgtcgaattactcatatttagtagtaataataataataataagacgggctttaatttgattcatagctacttagctagggagaggcaggctgcttgtagtacttttggctatgatccatgccagctccgaacatgagcatgtctcacgcgtgtggcttccaagaacattccacaccacaaaatcccagtgctactattgagcaccgccgtcctgcagggcccctctggccgtctcggttcgtcagtccgctgacgtgaggggctagcaagggntggacctatgtttatggagaacggggcacaaacctcactca

SEQ ID NO: 7124 - DNA, 477 bp, Zea mays
  unsure (1)..(477): unsure at all n locations
  Clone ID: MRT4577_106493C.1
ccaacaagtcagccgccgcaaccgctactcaggatgggcgccctgcgcaaccaagcccgagacgctttgttgttcatgccccagttgaggccgncgtctcctcacccaaagttgcgcccgaggccattccaatctccgttgaggntncggctgatgaacaggtagcttgacaggtggtggtggnggagccggctgcggcggccgacgttgagcatcagaaggctaatgaggtggtcgctccagaggcggtcngcttccgatctcgatcacaagnaggaggaagccgtggagaagaccgtcgtcnaggaggagaagccagcggtagccgccaatgtagaggaaaaggtcgccaccgcccgccgtagacaaccgacgtaccggtgggagggtgaaagaaagacaggacgttcgaaggaggcccaggataggagaagcagtgcgcaagcaaaagctttgaccgactggtcccgtggcatg

SEQ ID NO: 7125 - DNA, 433 bp, Zea mays
  Clone ID: MRT4577_106494C.1
cggcactacatggacctacgatgatgcaagcactacaccgagcagggccactgcaagcacagcgacaccacactcaagaactccaagacccttctcttccgagacagccgagcaccgaccctgcgcacctgaaccccgaggaaatccgcggggagaagctgtcgctgagaatggcaaccaatccaccgaggccgaaactgacaaggacaaggctgcagcacagcgcaaggcgggcgccaacaagatggccatctctgccccaagcaaagatgcacctatgctagatgatcgcgacaatgaggacgcggacaccccaaatgttaacatggacctcaatgatagaaggacaacaaactgccgtgctgcccccgctaacggcattcatgacaactcccagataatggaagatttgggggcaactgatcatgccatc

SEQ ID NO: 7126 - DNA, 680 bp, Zea mays
  unsure (1)..(680): unsure at all n locations
  Clone ID: MRT4577_106495C.1
aattcggcacgcggcacgagggacgctagctctcaagcaaatagaggcagcagagcagaccatagagagtggagatcagccagcagcagcagcagcaaggctgagccgccgcccccacgagtggagtggaggcagcagccagcgacaaggctgaatccgggaggtccgcgcgccgcagccgtggctgccatcgcaggcgccgccgccgccgccgcttgtgagaggcgctcgtcttgtattcacgaggagggcgacgacaccccctcggcaaaggagctggccactggccccgccctgtgatggctgctgcccgtgccccggcggcgaggggacgcgtaggtgctccggaggcggcagctgcgtggaggggcggcggtctccgcgcgaagcaggccgggcgcgccagctgccgcggcgcgtagaccgagcgactggacgccgtctctctctctctctctctcgcaatccgagtcgggggctcggggctagggttttggcgctgagggcgccggggttctagcggagcggctggaggaagaggggagggggcggngggcacggagatggcggtcggggacgcgctgcgacggctgtgcgaggagatcgggtggtcctacgccgtcttctggaagccatcggtgctgcagaccccgtgcatttggtgcaggaagacggctact

SEQ ID NO: 7127 - DNA, 464 bp, Zea mays
  unsure (1)..(464): unsure at all n locations
  Clone ID: MRT4577_106496C.1
tgatgcattgctgggctcttttttgtgctcaatgatggctataactggttttatttttccaatcatcatcaataaccacaaaatccttttaatcccaaaccaggtgggggtaggctgaattggaacccaaccggagccacaaaataaatggtatgcatgtggatggctggtttttcattggctctattaaagcctaatctttggacatattctatcctttcatgtcttcttttattatcttttcccatgttaactntggtctttctctgcctctcttcctattactatcacattttaggatcccattatgcactggtgcctctggaggtctccattgacatgtncaaaccatctcaatctgtgttggacaaacttctttttttaatcatgtataagttaaagaaatatgctatgacaaacagacaaatgcactggcatactaatattcatgggttagatgtttg

SEQ ID NO: 7128 - DNA, 284 bp, Zea mays
  Clone ID: MRT4577_106497C.1
gacctacaactttcatgttgtgagtttttgcatttgaagtctctaaagttatcaaacagtctgttgaagttagagtagaaaatctatgacagactgacgagattttttttgatactcttgtgttatatcttgtttttgcggcactcttgtgggaaaaaagagaatataaaaaggcatgtgcaaaaaaaaaaaaaaaaaaaaaaaaaaagaaaaaaaaaaaaggggggccccccaattttggcttccaccacccgggaattttttccgggcggggacttcggggg

SEQ ID NO: 7129 - DNA, 814 bp, Zea mays
  Clone ID: MRT4577_106498C.1
gccggccgggagcagcacaaggccccgtgcggccgtgccggcttcccctgccccccgtctctctctcctccatctccttgctgacacctttgcgtgccctgtggttctgatccgatctatccatcatccaaggccgcctccatcctgtccctgcttctcgcgcgcgcatgcacgctaggagggaggataggaatggcgacggaggtaaaccgggacgccaacgctgacgaccctcctctgccgcaaccggccccttccccgtcgtcggaggggaaggatgccaacaacatcagggacagggtatccttctcgtcgtcctcctccagagcccgcccttcgtgctggggaagcatcaggatcattcatcggtttggccggatccggagccggagcagaatgggcagcgacgagcacgacacgcgcgcaagcctcgggggtcgtgggcgccgctgcggttgcggttgcgtttgcggcggcggcaaggcgggtgcagcggtcgggccgacgaggtccctcctccagcgcaacgatttctactgcgacgattgcaacacgcacgcgtaggagacgtcccttctgctttctgctgcttcatcagattttgcccatggtgtatgttgtgcatctgaatctgatcaggagcgattcaagttttgtagtgcttcatcattttagatagccggtgttttcgctatactgtttcagttacgtatttgttgcctgaaatgtccgtagtagcaatcatttaggcagatcagtttatcctagagcatgaacaactaagaactgttttggttcctttagtcatctgact

SEQ ID NO: 7130 - DNA, 188 bp, Zea mays
  Clone ID: MRT4577_106499C.1
acattacccaaaccctccgtcgacccctcctcctcgatctacaccggttgtcggcggcgagcgatggaatgggcgacgcggttcctgtcggcggtgtgcttctttgctgcgggagtcctcttcgtgcccaaggctctccttggttcgcactccgtcggagcaccagccttcaccagtgcctacctaca

SEQ ID NO: 7131 - DNA, 346 bp, Zea mays
  unsure (1)..(346): unsure at all n locations
  Clone ID: MRT4577_10649C.1
atagcctgcgntacggggggatgcgtgtcttgcttctcccccatgggggccgacagaagcgctcccgcttctgatattcttctcatgttgtgcgaccagcgctcggcgatgcctgctttcgaggacaccttggagagattggatcacgagcccacatctcggcatcccctgtacacaggcccccaactgacagggtgcacagctatgctgctgcgaacatggcggttaagctgatggccgcatggcatctcccaaagcccatgcaggacaaggcgatgcactacccaccttgttgaagaagactgccgctggaaaacacgtgcccagggatgaatttcgtgacctt

SEQ ID NO: 7132 - DNA, 265 bp, Zea mays
  Clone ID: MRT4577_1064C.1
ctcggaagcgttcatgagaatatgtcagaaggaggaagtagacggaatagtttcttcccagtcttcaacagtttttcttttccagagcatgaacatatgaatgaacacagggatggtaacagtgatcaacagactagggagacttattatgctggagaagctaataatggagatggtttaagggcttctctgctttctcaggcagcaagtgttgaagtaaatgatacaaatacctcttttacttctgaagggagctcttcatatt

SEQ ID NO: 7133 - DNA, 650 bp, Zea mays
  unsure (1)..(650): unsure at all n locations
  Clone ID: MRT4577_106500C.1
cncggattttttttttttttttttttttttttttttttttttttttttttttttttttttttttttttttttttttttttttttaccccggggttgggccaaaaccaacgcttgcctactccacgtgggggggccccaacggacgaggggtgaaaaaaacccctttaaagggggccaaaaacccacttgaaaaccagggggttttgctttgtttttttaaaccccggtcgggaggaatccccacaactgggagtctctcccccttacccttgaagttcaaaaaaaaccccggggcaggggggggattaacacctcacccaagacacaaagatcacaggaaatccccccacccaaaacccaaacttgggctcaaaaaactagcccactaaaacggggctcaaatcactaaaatggcaaacaagggcccaaaaaagaagggggagggaacaaaaatgcttaggaaggcttggggcccccccccatgcccctagggggcccttttatacccccaaggcagttaggacccgttgaaagcaatctgggaaggaaatttttgccttttgtcggggggcgcaccggaaagtccggggcacaccggacactgtccggggcccgatttttttccttaaacagcgcacccacccgttggc

SEQ ID NO: 7134 - DNA, 963 bp, Zea mays
  Clone ID: MRT4577_106501C.1
cccagcgtccgcacaggtcttatctatctccacaagcattctcggctcagggattatccatagggaccctgaaagcaagcaacattttgctggacactgatatgaaccctaagatctcggactttgggatggcgagaatattcgatcccaaaggaacgcaggccaatacgaaaagagttgtaggaacatatggctacatggctcccgagtatgctatggcaggcaatttctccaccaagtccgacgtgtttagctacggagtgttgcttctggagattatcagtggaatgagaaacgctggacctcgaaggcatggcaactccgttagcctccttggttacgcatgggaactatggaacgaaggcaggtgccatgagctcatcgataaaccattacgcggcaggtgtcctgagaacgtagcgttaagatgcatccatgtcagcttgctgtgtgttcaggagcaagctgcggatcggccctccatgactgaggtcatttcaatgattaccaacggaagtgccacgttaccagacccaaagcaacccggtttcctctccatgttggtcccaaacgaaaccgatgtcgctgaagaaacatgctccctgaatggtctctcagtcaccatccttgacggaagatagcactagttcaaatcgccgcctttctttgcttggtccatgcatgcgcgttaccattgcatcactttgcatggtatttcccaaaagttatattacgggagcctgaaagttttgttctcatgcatccaggctaatggtatataagcatcgccgcatcattgagtccttgtccttagaggaacgtatggttgttgatggtgccaacctggcattatgactttctgatttcatcacatattttcatccaggctatatatatgctcgcttttattctgttcggtcaagattcaacacgaggatttaagggacaaaaaaaaaaaaaaaa

SEQ ID NO: 7135 - DNA, 383 bp, Zea mays
  Clone ID: MRT4577_106502C.1
cggggcaggtagatggagaaagtcatggcgcagccaagggtggcccctcctacggcggcggcgctggagcagctaagcagcagcaagatgttcgacggcttcaatctccgcttccgccaccagagcgccactccttggatgagcctgactcccggaatgccccctgactcaggaggatgcaaccagccctgtgaaccattttgcccttgagataggggaggggaccacttacaacttctatgccggctaaaacatgagtgatctaatcatccgcttcgcgcagaatgttacttcacattctgccccacatctgttccctcattaacaagcaccttttacactccccacccaacaagggtggctaccttactctttacgaagct

SEQ ID NO: 7136 - DNA, 279 bp, Zea mays
  Clone ID: MRT4577_106503C.1
acgcgcccagcaaaacgcccaaaaccactctatgcccctgctagctccatctctcctgggcctgtcctgcatgcctccctctcctccattactactttttcttagcgctgcttgttcatactgcagctgccttagctacagccgcagctcccttaattttgacgttagtatatgctacaaactgaacaaagtaaaaaaaaagttcttgaatcaaacaaaccaccgcttctctagtggcaggtgttgccgcttgtattcctttaaatccgaaaacaatgc

SEQ ID NO: 7137 - DNA, 435 bp, Zea mays
  Clone ID: MRT4577_106504C.1
ttcaggggtttggcgaccgggggggcttggttgatggctccacctaaggcaagcggtttggaccattttttaatggcagaggaagttaaatttaagttggccgggggttggaaaaactgggatgagcctgtaaaggatctcccaacgttgggggtgggccattaatggggatctgtattccacatgtggatgggatcaagatttgctgggcagcgaaggggaaatgtcctgatgtcctttaccaccagggaggcaggctttgcgatcccacttatttaacctgtaatggttcctatggcccaaagtttgggccctatattttcccaatgggcatcgtatccaacaatccgatttggggcagaagcagcttttaagcagttggggaatttaagcccacttgtggttaagcaatttttacctttacttaaacaactt

SEQ ID NO: 7138 - DNA, 198 bp, Zea mays
  Clone ID: MRT4577_106505C.1
caaagtgagaaaaacagattaagctaacatcacagatacttgttcatgtgttctcatacttcatctctagcgtttcagactgcttttccataagaaagatctcttccccacgagactcgacgcgcttattggctgctttcaaaaccttctttatatcagccgtctcctcttctttcatgtccatcttctttctcactt

SEQ ID NO: 7139 - DNA, 277 bp, Zea mays
  unsure (1)..(277): unsure at all n locations
  Clone ID: MRT4577_106506C.1
ctctcgaccagactccccgtccgcaatcatgtctgaatccctctcaatccacttccgcgctggccatggaaggagaatcaggcgccccggatcgccgcccagcctccatggaaagggagtcctctcgatctgtgtccgcgctgtccatggaagaaaccttgctgtcagcgcgtctccacttggtgagtgatctttgggtagtcttgctatgaacaacaattccgtggtgctggtggacctgtggaagggcttgcggtcactaaagtgtangtggatg

SEQ ID NO: 7140 - DNA, 290 bp, Zea mays
  Clone ID: MRT4577_106507C.1
gccacccggatgtagccgcctgtcccgggagcctggactgtgccctgaagaggcgggcaatgtgtcctcctggtgcacatgcctgtgggccctgccttcagcccttccaggaggaccagcaagggctctgtgtgcccaggatgcgccggcctccaggcgggggccggccccagcccagactctagatgagattgacttcctggcccaggagcttgcccggaaggagtctggacactcaactccgcccctacccaaggaccgacagcggctcccggagcctgccaccctgg

SEQ ID NO: 7141 - DNA, 205 bp, Zea mays
  Clone ID: MRT4577_106508C.1
gaatccacaaaacagcatcaatttgttttccaacatattctccatcctaacgcggggggctttcactacatgtgtcgccctcacgccacttgcccctcaaacgctcacaagctatctatagctttctttcttcatccatccctgccatcaattattgccccagtttgccaaaaccactcatttctaccctatccaatcctacatg

SEQ ID NO: 7142 - DNA, 397 bp, Zea mays
  Clone ID: MRT4577_106509C.1
aaaacggagggcggccttacagagataaacatcagcggggccattagtccttaaccccggccgggggaaccccagggaaaaaggggaaatctacggcggcccttcccatcatttatgacccaaaaccctttatcctttaagaaacggttttgcttctcgaaaaaatattaaaaacttttttatcctgctgtttgcaagggggggaaaaaacaatacaaatatccaagtttttcctgggggacaagaaaaaccccatcttttcccattctaattaatttccaggggctttcttttattaacaaaggattggggagcctttttttttaaacttcggggggggccctggcccaatataaacgactacgggaaggggaaaaaagctgggcctcgttttttt

SEQ ID NO: 7143 - DNA, 581 bp, Zea mays
  Clone ID: MRT4577_10650C.1
gccggcctggccgggacatgatcttcagtcatgatcaagctatcacactatatctgaccgaaccgcaggggcactaacgaccagagcatcgaagtgttctatgcagtatcacacgaatccaacccgtcgcttcggcctatgttgcgtccatcgatacagatgtcgtcagcactatcccactcagactagcgatgaacgggcatgtgcgtacaatctccctgatcacgttagcaaccccgcaaacaacatcaatgggtgctactgaacctacttcatccacaaaaagtgaaaggaatgaccgccgaagatcatccactagaccctatagcatatcatcataacaatgaatctcaagttaaaatgtgcccaatcctctacttattcccatgaggatgatgagtaacattgatatctaaaagttgtaacgactgcaacagaacacggttcttactgtgatataggattgccgctagcgcaatttccgcttgtcatgcatataacagatgcgacctctgactattgtgccacacacgatacagcatatatcgagatagactccgcacgttttctgcatgtttttc

SEQ ID NO: 7144 - DNA, 194 bp, Zea mays
  Clone ID: MRT4577_106510C.1
gccgcagtcccaccgaccccgccgccagtcgccttcaatttcttcgcggttgcttctcgtttcccttttcattagtcagaataacccttggtggaattgccgttgttggtcaaagtcctctgggtaacccctttgaagcgggtaaccccccaaaaccagcattggaacaacttgaaagtgctcacacctgttga

SEQ ID NO: 7145 - DNA, 1130 bp, Zea mays
  unsure (1)..(1130): unsure at all n locations
  Clone ID: MRT4577_106511C.1
gagaancggccgtcgcgacgtcgacgccgaccgtgccgagcacgaagaggaggctgcgcccccgccgcagggggagaggtttcctcaaggccgccatgacgtcaggctgttcgtcaacaaccgcgcgctcgccgacaccaggaagctcctgctggaaggcgtggtggccggaggaggagcgcacgggcggctgcaggacgagagcggcaaggacaggaacggcggggacagcagccggttcggcgcgtatgtcgacgctgacgagcgagtccacgtccaagagctcggtggagtggcagagctcgacgctgaccaaggactcggagacggagtaccccttctcgtcctcgtcgcgccggagctcggcgcgctgggagtcgtacacgctgttccgcaagtacgacgaggacatggtctacttccaccgcgtctgcgcccagaagctcaccgaaacagagtcgttccggtccatcaagtaccagccgcggtcgatgtcggagcggatcgtgcacaggctgacgacgcccaagccgtcgacgccgagcgccgctatcgggctgcgggacccgtacccggagctggagcgcgcgtacgtggcgcaggtgtgcctgacgtgggaggccctgaactggagctacaccagcttccggcggcgcaacggcggcgacggcaacctggcggcgcggtgctgccccgcgcgcgtggcgcaggagttccagcagttccaggtgctgctgcaccgcttcgtcgagagcgagccgtacgagtgcggccggcggccggaggtgtacgcgcggatgaagaactccacgcccaagctgctcctcgtgccggagttcagagacgaggatgacgagaaggacgatctgatatcggcggtccagttcctgctcatactggaggagtccatcaggacgttcatggcgttcctccgcgccgacaagaggagccggtacgagatgttcagggagatggtgaagaagaggagggcgagcgccgccgtggaccagacgctggtcgtcacgctcaagaaggccaacaagaaaaagaagaggcggctcaaggacctgactgggatgtggtggccggccggcgactgttcagaagaagaggcggctcaaggacctgac

SEQ ID NO: 7146 - DNA, 427 bp, Zea mays
  Clone ID: MRT4577_106512C.1
caagtatccagtgccaatttttgaccagttaattgatgagttggcccattctaaatggtttagtaagctcgatctccgagctggttatcaccaaatcctcttgaagcctggcgaagaatataaaacagcttttcaaactcatattggtcactatgagtttcgggtgatggcgtttgggttaactggtgctcccaatacatttttaagtgccatgaatgaaactctgaaaccggtgttgcgaaaatgtgccctggtattctttgatgatatactgatttacagtaagacattcgaggatcatgtgttgcatctccaaactgtcttgcagttgctgttgactgacaattggaaagtcaagttgtctaagtgtgaatttgctcagaacaagattgcttatctcggtcacatcatcagcgagcacggagtg

SEQ ID NO: 7147 - DNA, 676 bp, Zea mays
  Clone ID: MRT4577_106513C.1
gccggccggtccgggctgaatcacgcaaggtccttgcccgtcaatgtcgcccatctgcgtcgtgcccccgacatcacgtgttggtcaatgtcgcccatctgcgtcgtgcccccgacatcacgtgttgggatccgagactccagcggcaaggcgaccaccacgccgcgcgggcgcggtgcaggagctcctccagcggcgccgtgaccgcctccgagccctcatggtccagcacgaccgacctgctccgcacccgcccttgtcccccaggcgtcggcgtgcgggatccggtaccggtgctggagctcctccagcggcgccacgaccgcctccgatcccccgtggtctggctcaaggctgatagtcagagacactagatcaccgttcaatcaaatttccttatggatgggctattgatagcatgagagttgcgattgcaaaattgttattgctattcttgcacttgtcctatggaagttctttggatataatccccaagatcataatgaccagggaaagatcctagaccgacataagtttcaactccttaagagtgaagtttctgttatggttctggaagatacttgtgttgccaatttggaaatgcaacgccaacaagagaaattggtggggagcatcatttcaatttccccaaaaaaaaaaaaaaaaaaaggcccta

SEQ ID NO: 7148 - DNA, 813 bp, Zea mays
  unsure (1)..(813): unsure at all n locations
  Clone ID: MRT4577_106514C.1
cggccgctcgaggcggcgggccggggatcggatccattccaaaccgagaggaggtatccttggaggagggaggagggggatcctcctcgccgctccggtttccatggcggccgcccccgcccccgcccgttcgccgccggaagcgtccccgccgcccctagacgcctccgcctccgcctccgacgacgagtgggatgcggatggatttgttattcctgatgtgactattcaagatgatgatgatgatgatgttactacacacagtgtccccaaagcaagggatcctgaacctcaacaggcaaaagaggagaagatatacttgggacctcatggggcgccaccatcaggagcaaagcagcagcaacttaacacagttggccgcaagcagagtttcagaaacaagctgaaggaggcagataggaaatccagtggcaatgctcaggagaacaaggtggaaagcctaagagagctcatgggggctgtaacaacagatagtaggggcatggcgaagagttctcgtcgcgactggcttgacccacactgtcgtgagtctgagtttgataggaaaccacgctagctaggtggctgccatatgatgcgtccgtttgcgcaaaagttttaactgtatactgctgtgggctactggctaggcccganaaacatgtctttgttatctgcaagtttatgaggagaaatagccaatggtatcctatggtatgcagaatctcatgatcttgctagaatgtggntttagttggtttgttgtatgtctgacttgagatgaatctgtagcggcggcatgtgcttatgtat

SEQ ID NO: 7149 - DNA, 977 bp, Zea mays
  Clone ID: MRT4577_106515C.1
cccacgcgtccgcacgagctcgcgtgtgcccctcgcgctccgccgccaccaccttctactaccataccgctgcgtcgccgcccggaccacgcccgccaccaaggcctctcctccgcctcgtccccatcacgggcgcggcccctcgacctcggtggccggccggctcgacaccgcaccgtgaccctcggctacggaggaagaagacgtagtggtggactgggccatagaaccatgtcaagttccataatttcaacagtggccacagaattgttggtggctgagaagagcaggggtattgagccactaccttttattaatgacaaacatggaggtgtcatcattgagatgacgactccgatggatcctggagcgttttcagcttccttgaaagcagctctggtgaaatggagggagcagggaataagaggtgtctggatcaaactgcccatcaccctttccaaccttattccaccagttgtagaggtcttggctgtacaagaaaagagtggtgtacttcgaggactaggtgtgtggaaatttccaactggcgtagtagaaccgggggaagatattaacgttggagccgtccgagaagtaaaagaagagacagggatgcagaattcgttgaagtgctggccttcaggcagagccacaaatccttttttgataaatcagatctatttttcgtgtgcctgctacgacccctttcatacgacattacgaagcaagactcggaaatagaggcatgccagtggatgccagtagaggaatttgcagcacaaccatttgtccagaaacatgagcttgtgaagtacatcctcgaagtcggcctggctaaagttgacaaggaatacgcaggcttttcgccaatctccataaaatcggcatttacagacaaattgtccttattttacatgaaccgggaggatctggatagggcctcagggtagagtatatatgtaatgacatggcattca

SEQ ID NO: 7150 - DNA, 1397 bp, Zea mays
  Clone ID: MRT4577_106516C.1
cattgggtacctcgaggccggccgggggcggcccactcgctctcgctctacctccccgtcgtcacgcgctcgcctgtgcccctagcgtttcgccacctcctgctcccgcaccgcctccggctccgcctcgcctccgccgtctccccatcccgggcgcggcccctcggcctcggcgcccgcccgccccgcccccacgccgtacccctcggctacggagttggtgcagggagaaggccgagtggtggactggaccacagagccatgtcaagttccacaaattcaacagtggccacggagttgtcggtgtctgagaatagcagggaaattgagccgctaccttttgtgaatgacaaacatggaggcgtcatcattgagatgaagactccaatggatcctggagtgttttcagcttacttgaaagcagcgctggcaaaatggagggagcagggaataagaggtgtctggatcaaattacccatcaccctttccaaccttattccaacagttgtagaggaaggtttctggtaccatcatgcagaggaaacttacttgatgcttgcgtactggcttccaaatacaacacatacactaccagtaaacgcaacccaccgtgttagtgttggagcttttataatgaatgacaaaagagaggtcttggctgtacaagaaaagagtggtgtacttcgaggcctaggtgtgtggaaatttccaactggcgtagttgaaccgggggaagatattaacgttggagccgtccgagaagtaaaagaagagacagggattgatgcagaatttgttgaagtgctggccttcaggcagagccacaaatccttttttgataaatcagatctatttttcgtgtgcctgctacgacccctttcatacgacattacgaagcaagactcggaaatagaggcatgccagtggatgccagtagaggaatttgcagcacaaccatttgtccagaaacatgagcttgtgaagtacatcctcgaagtcggcctggctaaagttgacaagaaatatgcaggcttttcgccaatctccataaaatcggcgtttacagacaaattgtccttattttacatgaaccggagggacctggacaaagcctcaggatagagtaatatgtaattaaacacagggaattcaagatagttgaaatttcagttctggtatgtaaaagcaggccaagtcatattcatacttgattattttgttcacaaattggaagtttcgggcatccgacacttgtgatttttcgaccatatgtcgtctgctacacatctgtgtttcaaaggagtgttgcaatccaaaagtagagataaaactgttgtgcttatggatttgtatttgtaggtctacagacaataaaatactgttttcctttattatat

SEQ ID NO: 7151 - DNA, 253 bp, Zea mays
  Clone ID: MRT4577_106517C.1
ctgccactggggtcatggcggttgtggcagctggggaggtttggccccaacagccctcctgtgcctgcttccctgtgtgtcggggtcctccagggagttgtctctgaggtggaggccacggaggcagggtctctggggactgtcggggggtacagagggagaaggctctgcaagagctccctggcaatacccccttgtgtaattgctttgtgtgcgacagggaggaagtttcaataaagcagcaacaagcttc

SEQ ID NO: 7152 - DNA, 2076 bp, Zea mays
  Clone ID: MRT4577_106518C.1
gccggccgtccgcacgcacgccgctgttctgtactgtctctttgccagcttgcctgctgccaccagtggcacccgcaagcgaacctccacgcgagctgcccggccccggctgcccctgcgccctgcgcccctgcccctgtccctgccggccccttccaaaataaagcgggagggagatgcgcccgggcggatggcggcccactcgctctcgctctacctccccgtcgtcacgcgctcgcttgtgcccctagcgtttcgccacctcctgctcccgcaccgcctccggctccggctccggctccgcctcgtctccgccgtctccccatcccgggcgcggcccctcggcctcggcgcccgcccgccccgcccccacgccgcacccctcggctacggagttggtgcagggagaaggccgagtggtggactggaccacagagccatgtcaagttccacaaattcaacagtggccacggagttgtcggtgtctgagaatagcagggaaattgagccgctaccttttgtgaatgacaaacatggaggcgtcatcattgagatgaagactccaatggatcctggagtgttttcagcttacttgaaagcagcgctggcaaaatggagggagcaggtgacccccccccccttctctcagcatcaatgttaccatttatcctatcatgccaagtaaatatcccaatatttaagttttgaactgtggacgacatacctcaaagatccatcaatccatgcaagcatctttatatggtaggtttggtaggtgaaaaaaatggtgctattcatgacaactattttaaaggtttgaatacactgtatatcttctatgagccttgaagagccaaccatcttgcaagtcatgtgacaatagacatctggagtctactgtacatgcacatcattattttcaatctcaggtattcacgagtacctcaagtagagatatggttacaaatgcatagcctgcacttgtcattgaaaagagctttacatctattactgtactttcctcattgtagggaataagaggtgtcaggctcaaattacccatcaccctttccaaccttattccaacagttgtagaggaaggtttctggtaccatcatgcagaggaaacttacttgatgcttgcgtactggcttccaaatacaacacatacactaccagtaaacgcaacccaccgtgttggtgttggagcttttataatgaatgacaaaagagaggtcttggttgtacaagaaaagagtggtgtacttcgaggcctaggtgtgtggaaatttccaactggcgtagttgaaccgggggaagatattaacgttggagccataagagaagtaaaagaagagaccgggattgatgcagaatttgttgaagtgctggccttcaggcagagccacaaagctttttttgataaatcagatctatttttcgtgtgcctgctacgaccgctgtcatatgacattacgaagcaagactcggaaatagaagcatgccagtggatgccagtagaggaatttgcagcacaaccatttgtccagaaacatgagcttgtgaagtacatcctcgaagtaggcctggctaaagttgacaagaaatatgcagggttttcgccaatctccataaaatcggcgtttacagacaaattgtccttattttacatgaaccggagggacctggacaaagcctcaggatagagtaatatgtaattaaacacagggaattcaagatagttgaaatttcagttgtggtatgtaaaagcaggccaagtcatattcatacttgattattttgttaacaaattggaagtttcgggcatccgaaacttgtgatttttcgaccatatgtcgtctgctacacatctgtgtttcaaaggagtgttgcaatccaaaagtagagataaaactgttgtgcttaaaaaaaaaaaaaaaaaaaaaaaaaaaaaaaaaaaaagcatcaatgttaccatttaccctatcatgccaagtaaatatcccaatatttaagtttggaactgtggacgatatacgcgaaagatccatcattccatgcaagcatctttatatg

SEQ ID NO: 7153 - DNA, 190 bp, Zea mays
  unsure (1)..(190): unsure at all n locations
  Clone ID: MRT4577_106519C.1
ggggccggtccggttttcccttttttgtttccacgcgccctttttttcaccacccggaaacagggacaccngaagtggtgctttttaaagagcatagaggcctcatccaccctaacccctgatgctctctatgcaaaaattataacacaaggaacgccaccgtgcccttatattctcttagacgacaaaa

SEQ ID NO: 7154 - DNA, 257 bp, Zea mays
  Clone ID: MRT4577_10651C.1
gggccctctaaaggcccaaagttttacaaaaaggcctcggctaaaaaaagataaaagggggccccatttaaaaatggaaaaatgtcccccctttgttaaaaacttgttagggaaacaaaatttttttggagttttaaaaaattaaaaaaagtcctcccattccaaaaaaagaaaaaaaggtagaagtaaaaaaattacactggtcgactgaacattttagtttttaaaaaaaggcacccttaatttgggattaagga

SEQ ID NO: 7155 - DNA, 1090 bp, Zea mays
  Clone ID: MRT4577_106520C.1
gccactcgttctcgctctccctccccagtcaccaccatcacgagctcgcgtgtgcccctcgcgctccgccgccaccaccttctactaccataccgctgcgtcgccgcccggaccacgcccgccaccaaggcctctcctccgcctcgtccccatcacgggcgcggcccctcgacctcggtggccggccggttcgacaccgcaccgtgaccctcggctacggagttggtgcaggaagaagacggagtggtggactgggccatagaaccatgtcaagttccataatttcaacagtggccacagagttgtcggtggctgagaagagcaggggtattgagccactaccttttattaatgacaaaacatggaggtgtcatcattgagatgacgactccgatggatcctggagcgttttcagcttccttgaaagcagctctggtgaaatggagggagcagggaataagaggtgtctggatcaaactgcccatcaccctttccaaccttattccaccagttgtagaaggaaggtttctggtaccatcatgcagaggaaacttacttgatgcttgcgtactggcttccaaatacaacacatacactaccagtaaacgcaacccaccgtgttagtgttggagcttttataatgaatgacaaaagagaggtcttggctgtacaagaaaagagtggtgtacttcgaggcctaggtgtgtggaaatttccaactggcgtagtagaaccgggggaagatattaacgttggagccgtccgagaagtaaaagaagagacagggattgatgcagaatttgttgaagtgctggccttcaggcagagccacaaatccttttttgataaatcagatctatttttcgtgtgcctgctacgacccctttcatacgacattacgaagcaagactcggaaatagaggcatgccagtggatgccagtagaggaatttgcagcacaaccatttgtccagaaacatgagcttgtgcagtacatcctacgagtcggcctggctaaagtgacaagcatatgcaggcttttccgcaatctccataaatcggcatttacagacaaatgtccttattttact

SEQ ID NO: 7156 - DNA, 620 bp, Zea mays
  unsure (1)..(620): unsure at all n locations
  Clone ID: MRT4577_106521C.1
ngcaccgccgtaccgtaagnncttggaatccctctagaagncggccccgccctntanttttttctttctttcttttcttttcttttctttttctttcttttcttttttttttttttttttttttttttttttttttttttttttttttttttttttttttttttttttttttttttttttgggggaaaaaccttaaggaaaacaaaggaaaaaaaaaccggcaaaaaaagggccaggggacaacggaaaccccccaaaacccaaaaaaaggggcccgaggaaatgaaaaaaaaaaaacccccccccaaacaaaaacaccaaacaagagggaaaacaaacaccccccccaaccctttttaaaccccaaaaaaaaaaaaaaacgggagcgaaccccgcaaaaacaaaccgaaaaaaaaaaagggaaaccaacttctctccccttccttcccgaaaaccaaaccaagggggagggggggggaaaaaagcaaccccgggcaattccttaaaccaagcccaaaacggcttgcccatggaaaaaacaaaaaaacccaaccccccaaacttttcgaagacaacaaagttgcggccccaaaaaacaaagcgggcttctccaagtgggc

SEQ ID NO: 7157 - DNA, 442 bp, Zea mays
  Clone ID: MRT4577_106522C.1
cggactctctggcttggggctttagcgggtttatcgatagaaatcaatcgttcattcccagatgctgcgtccctcccttgcttgtacctctagctattcctatgcgagagatataatgcttcgtgacaagacgaaaattacccctttttgaatgcttttttagaatctgaagcatattgaaagactacatggatatcgagtgcattctttaattatttctctatgtttgattacttaggtcacgaatttcaaaaattctgtattctattggattggatttggtcgataatacggagaattacatcaaagacgctatacaatcacatttttaggcaggaactaccatggattatattctggatcttttctgtggatcctaaattgatgactaatagattaggtatacgatttaggttaagtcgatccgaaaaggaaaggaggc

SEQ ID NO: 7158 - DNA, 749 bp, Zea mays
  unsure (1)..(749): unsure at all n locations
  Clone ID: MRT4577_106523C.1
cctcgaggccggccggggttgttgtggattgttgcaggtcaaccacgcgtcgcgctcacctgattccgcccgccagccacgcccgcagatctcgcttcgacaccctgattccgtcgtatgcaaaatcacagccccgccgtccatcgtcgcccccatgccacgctccccttccatcctcgctcacttccagccgtcgtgaatggcgtcccttgtctgccttccattatctctccacacggcatgcccctagctgcccccgcctgcccccgcccgcgatgctgtgcttggccttcgcccccgtccgtctcccgtcacagccgcgcttgagctgcaacgccccctcctttcgagactaccgccgcgtcgcacttcgcggggacccggacctcaacctcccgctcgtcgtctttgacgcgtcgtcggcctacacaaccgccccgctcccacaagtaaacccactgctatctcccgattctttcttttttgttagaatcactgcattgtttttaggagtcctgagttcttcctcggcgcccacagcggctggaggacttgggcgatgacagattggtcgtgggtgccgcagcttccctacctcactgccatcgccgtgcatcccgctcccttcacagcccccactgcgtagatccacactcccactcccttcctagaccccggcgccatggcgtcctcctaggccgatgtcgcggatgccgagcccgccccnctccacaggtcgccgctgccgc

SEQ ID NO: 7159 - DNA, 403 bp, Zea mays
  Clone ID: MRT4577_106524C.1
gtccccgagcccccctgatatacggcaggcacgcagcagatcggccgggctcggcgccaagcgcgatggactgctcatccggcgacgtgaaggcggagaccacgcggcccgcggctgttgctgccgctgccgctgccgccgccggcggcggcacgccttcgctgctgcgggggtggcgggagttccggcggagcgccgtgccggcgaggttcctctgctttgaggacggaaagtgggtcgatgtcgccggagaggcggcggcgcagctgcggcgggcgttccaggagaggagggtgatggccgacgcctcgtgcgggggcaaggcgtacctgttcgacttcctccgcatggtcaggatcgacgaggccacgggcgaggagaccgggctggcgtggatcgacca

SEQ ID NO: 7160 - DNA, 363 bp, Zea mays
  unsure (1)..(363): unsure at all n locations
  Clone ID: MRT4577_106525C.1
cagtcagaggccggaatcggctcgagcgccgtcgtgcgatcgctacgcctctctatcgacgtctttgccggcgaagagcggccagtcggccaacatgatgaagtttgttgctggctatctgcttgctgtcctcgctgggaaatccagnctctcgggcgatgacttgacatccattctggagtcagttggctgtgaagttgacaatgaaagatggaactccttctgtcccagctgagcggtaaggacattaccgagctcattgccgccggcaaggagaagtttgcttcagtcgcatgtggcggtggcggtgtggctgtcgcggcagctgccctgctagtaaaaaggcggagtactgcagctgag

SEQ ID NO: 7161 - DNA, 318 bp, Zea mays
  Clone ID: MRT4577_106526C.1
tcgacccacgcctccgaaaaaaaaaaaaaaaacaaaaaaaccaaaaaaaaaaaaaatttaaattttaaaaaaaaaaaaaaaaaaagaagcaaggcggggtggaatttgataaggagcaagccctggttaccgcgttcgctgttgataaagctgcccctatgagctgttcatcccgcctaggttaatgtcttcgcgtcaccgtccatcggcaccgtgtggtaccacggccctcgcccgttagttcgtggtctccctcttcgagctccgctctcgctacggcgtgccgcccatgaattgggacaggacgctgacgcggct

SEQ ID NO: 7162 - DNA, 553 bp, Zea mays
  Clone ID: MRT4577_106527C.1
cccagcgtccgcggccgcgtgggtgcgggtgggggatactctaagggaactgacaactatctagttgtagttcaataaatttgtgatcaatcgtgatcggtggagtttccttatgtgatttactttgatttacggccaagttcacctgtcttcaaaaactaacaactgcaggttaaatgatacatatctcgtgccaaaatttttgagctaggtgtgattatggtgcgatcatggtgagcaggttgtgattataatggaagtatggtgctgttgttgattggatagtaatgcgtggctgcaattatgtgcttcgactgagtgttcttccacaagtttatgttagacagtgatattcagtagttgtacatgatacaagtggctagtcaatctgtaaatccaaactgatcattgggtaagagttttctgaagtggttccttatcttgacgatcatagtttagatttaattactactatgtatcacataatacttttgacttagaataattttgtacttccacaatactttgggcagctgtaaaatgctctttaacg

SEQ ID NO: 7163 - DNA, 231 bp, Zea mays
  Clone ID: MRT4577_106528C.1
tcgttcacgcgcgcgaccgacttccccggggtcaccgactacactaccggggtgtgctactaccaactctcgaaaccctacccaacccatgagagatcgatcgttcgggcccgaattacccagccgtgagcggaggtatcggtcaccgccattggcactaggaaccccgagccgattccacgccgtcaagacgtagttgagcttgcatctgccaaccccatttttctttca

SEQ ID NO: 7164 - DNA, 799 bp, Zea mays
  Clone ID: MRT4577_106529C.1
caaacctaatcagcaggatctactagctagctagctgttgagagcttgacacaaagaagcgaccgagcggtcgagctagcttccaccatgtcttggagccagagcgagaacgcgcggttcgagcgcgcgctggccacctacgaccgggacacgcccaggcggtgggagctcgtggccgccgcggtgggcggcgggaagaccgccgaggacgccaggcggcactacgccgacctcgtcgacgacgtcggcgacatcgagtccggcggctacggcgccaacgacccaaacgccaacggcggcgccaacggccgcaacgggaacaacaggggcggcagagccaaccggccccagacatgaggggcgcctgcctgccgcgggagaccgcaccagcacgccggacgacggcgcgcgcgtgcatgcaatgattgttcgtcgtgtacgtacgtgagtcctgagatatatgtatgtatgttcgtgtgcctgtgtgtaactatatatatatatatgtgtatacatatatatcggcatgcatgcatatgcgcaaagtgcgcacaagtatatatgcgctgttgtggcagaagccgtgtctgatcagtgtgaccgagtgcgaggagctagcacgggcgcatagctgcagcctgctagctagctcctgatggatgtgcatgcagtagttgctccggcctcgatcgtctgttgcattgcatattgcagtattgcgctacttatatatgtgtaaattaaaggctgctcctgaatttgttcttaaaaaaaaaaaaaaaaaaaaaaaaaaaaaaaa

SEQ ID NO: 7165 - DNA, 421 bp, Zea mays
  Clone ID: MRT4577_10652C.1
cctacggcatgcagattacaggaactcggcatgctcaatgggtgggatgcagacgacgacgacgctccaagggccgtcttcacccacgcatcacggcgatgcccgtcgccacgccgtatgcgatgtcgcagaagagctccaccgatatcgacgtcccaaactgaggggaaaccaaaaagcatattctgagccatcctcaccccataaagcctctaactcctcagcacatgtcaggaaatgtgaaaccacatgtcatcacatgatctactccgcgtgcagcgcgaatgccgagaaaagactggcactactacttagacgagaccctatacaccatggatagtcgtgatgaaaggagccatatcatgctcgagaccatcagctgacgcgttgtgagctacactactccagccgttctgtattg

SEQ ID NO: 7166 - DNA, 514 bp, Zea mays
  Clone ID: MRT4577_106530C.1
tgtcgctctggcgtctatgctaggaaggctctcgtttctagctagtccagggtttctgttctgctgaagaaaaaacaatcgaaaatccttcatgccaaatgcctatatctttatcaattatcgacggtaacctacacaaaatactgctatactacactacttataaagatgaattaactatactgaaatatatgagatctaaataaactagagcggggggggaaccaacggggcccccttcctaaagtacccaaccttacacccccgtccttcgcaattgatagcttttctatagggcaaccaaaaattcatttcacgggccgtcgattaacaactcgaggactggaaaacccctgggttcccccaacttaaaacgcatagaaaaggacccccttttgaccaggtgggttaatatcaaaaaggccccccccaatcccccttcccaaagattgccacctcctgggtggacactggcaaccccccataagcgccggcttttaaaccgggagtgggg

SEQ ID NO: 7167 - DNA, 314 bp, Zea mays
  Clone ID: MRT4577_106531C.1
atcatcctatcctgtcaattgttccctgccatttacgttcatctcaccggataccttcagacatattattgtcatctgcagttttggacgcatccctctggaagataagcctttgcagcttaacttggcggcagatgatcggacgttgtgacccacaatagttgacgcatgttcatgtagtttaagtgttctcagttcccacgaccaaattgacagttaccacatggggttgtcatgctgattgcaaatttctacgtgggatacgtgcattggtacccacggattcaactttattccgacctaaaacaaccttt

SEQ ID NO: 7168 - DNA, 273 bp, Zea mays
  Clone ID: MRT4577_106532C.1
ttcaaattaaactccacatgggtacttgtacttctctatgagctgttaatcacttgcaatatttttatttctaatttgattgatcagccatgaaatcacgccacatgttcctcagatgattgtatgatcatgttacatgttccttgcttgcatgtatgatctccgtggcaaattctgaaaaatatatagagaacagaacatgtctctctctattttcagccctttcagatgtggtctgtcagtgtcaccagagacagccaaccgggatttctt

SEQ ID NO: 7169 - DNA, 689 bp, Zea mays
  Clone ID: MRT4577_106533C.1
tgccgcccctgtctagctaaagatccttatcttcttaaaactctcaacaaactaactgataaccttcctagataatctcaactaatttcctaaataatctcaactaatttcctaaataatctcaactaatcttctaatcttatctctaactatccttatctaatccccttggaggactcatggctgctgctgtcgcagcccctccgtgggcctccttaggccctgacatcactcatgtctaggctccaccatatatgcctagttgtgggatcgaggcaagatggaattcttttcctcaaaattatgccaaccaaatcttgaaatccgaaccttcgactctgaacagtttttagtctcagtcactgaattttattccagcaacatgatgtatatgcacatacatttggtgtaagtggtctaatgggcctcatgagccaaacacatacacaaatttatccaaagtgttttcttaaggatcaaagtatttgtttaaataatcactttcattacaaatgttctggaaacaacctccagcatatgttggtgaatgagggcttcacaacaagttaaatttttaagaagaacgagaagctgaattatgtaaacatgtggcaagtagggatggcaaaaaactcatggttcactatcttgctcgacttgtggtcaaatagctcgactcgactgggctc

SEQ ID NO: 7170 - DNA, 257 bp, Zea mays
  unsure (1)..(257): unsure at all n locations
  Clone ID: MRT4577_106534C.1
cggacgcgtgggcgaatctcgatcttcgccgttggacgagacgatgatcgtctcgagtctcgaacgagccccccgtgtaagctcgagcgntnnntctgatgacgccccccgatggcccgatcacgttcgagagtatgagtacataggaagagtttggagagaaagggttgcattgatcgagatgtacaaaaataattaacttcgaaccaaagaagacttttgctttgtaaaaaaaaaaaataaaaaaaaaataaaat

SEQ ID NO: 7171 - DNA, 274 bp, Zea mays
  Clone ID: MRT4577_106535C.1
gctatggccactgctctaggatttcgctgcctttaccgaacgcgacctgcgacgctcggtcggtacgtcgataggctgtggaggagcccgagtcgggggcaccggctttctccggctgacgatgagttataccagcggacgcgtatctctttgctgcaaaacgagttccctcaggccgtatacatcgacagctacaatagcagaggtttcactatcaacggaaaccgcgtgtttggaccttgtgcgctgctcccacagaccgtggtccagtgga

SEQ ID NO: 7172 - DNA, 648 bp, Zea mays
  Clone ID: MRT4577_106536C.1
tttttttttttttttttttttttttttagggcagatgcatcagattcagatatgctccaaaagacaacttttaaacaggtcatacacagatttcaagatcaactaagagttaagtgatacatggaaccaatatcaaaaatacgaaagagaactaattagcgaccaattcacaaaaactaacaccaacacatagaattctattttagatattaacaatttacttgatacctatagagctatagattagatgaaccatcaagtcgtcaaccatgtgtcagcctacacgatctatcaattgcaggaaagttgtcgaggttcaaaatgttattgttgcttgcaagggcatataaggctgcagtcactattagtcatggtgcaaaaaacatcagaaaagctttttcccctgtcaggaaacaaaacttgtctatagatagcaaactcaaaaataatacaatgtgtgataatcaagccaattgcaccaagaaaatgcagtaggaacctaaagtagcgctcctttatgtcatgagtcatatttttatgagagatcgtatcatacaacaattaacaggccaaaagttccatatgatcacaatcagaaaacgtttaaccgagtaaccgacttactacagatcgattaacatgccaaac

SEQ ID NO: 7173 - DNA, 612 bp, Zea mays
  Clone ID: MRT4577_106537C.1
acaaaactatttttctagattcaatctataatttctgcaattaatcgtcgaagtttaagtttctctccaactccaacgaaacttcggcgatgaattgctcctctctattcatcttccgaggtgacctaggagtctaggacaccgccgtgaccgggtcgacgagagcttcatcaccatgctcagttcatcgatcagatcttcggtttgccgtcaatctaaaaaacaactctttcttctacgatgagctcctccattctcgttcttcgtttttcttcaagttcttcactgcactgtccatcttctcactcttccgcaccacatcccgcagctccgtgtcccctctctcctctaccctggccgctcctccccttctctccgagacatgacgcggttgcagcaaggcccttgctgagcccccctgtcagcattgtcggaccggctacaagacctaacgaaattgaagaagttgaagatgctgcatttgggaacaagcgagataattctctgaagaagctgaaggttcgtgaaggggaggaccggcacctattggggaggggagtaaaaggggatccaaacccaacccaaagtataccagcggtgactcggtgtaat

SEQ ID NO: 7174 - DNA, 868 bp, Zea mays
  unsure (1)..(868): unsure at all n locations
  Clone ID: MRT4577_106538C.1
agatagattatagatagataggtactgggtactatataaacaccccaccgttcaggtcacggcgagggcagctagcttttgcttccaaccagcggcaggccgcaggcgagcggcatggcaaggatgccaggggcacatcaggcggagagctgggcacttccgagcatcggccgctgcggcggcggcgtttccggcgacctcctcccggcgttcggcgagctctcccctaccggcggtaacagcaacaccatcaacccttacgactgccgctacaggtggtggcaggggttcctgatcgggccggtgctctactcggcgtggtcgtcgccgttcgagctggccctcgacagggcggccaccacgccggttgtcgtcgcgagcctggtcatggacgcgttcttcgccgccgacatcgccgtttccttcttcgtcgcctacttcgacagatccgccgatctcttcgtcgacgaccgcaggaagatcgccaccaggtacctcaagcggccgtcgttcgcgatggacgtggcctcggcgatcccgttcaacgtgatctaccagctggtgagcggcaggagcactgggtggttcaggtacctcaaccttctccgcctgtggagactgcagcgcgtcagcaagctctttgcgaggttggagaaggacatacgattcgactatttctacaccaggctcatcaagctctgcggcgtgacgttgctggcgctgcactcctcggcgtgcatcttcctgtggatggcgttccaccacggcgacagggagcacacttggctcggcagccaggtgcgcgacttcgcggacggcagcgtctgggtcactacacctacgccgtgtactggntcatcacacgctc

SEQ ID NO: 7175 - DNA, 643 bp, Zea mays
  Clone ID: MRT4577_106539C.1
aacggagtaactaccaaggctaccataccgcctcgtagctccaataatcacgcactcccacctgggacactgacttggacagcactgtgaatgccccacgacgtgagaccacggcatcggcactgaaagacgtggagccgccgcttatccgaacgtgaacgatgctatagatcacaaggtgcaacatacatcgaggccctgcgccactgcaggcaatcgcgatgaactgatgatctgtgtagtctctgcgttcgacgatggactctactccattagcagaaaacacgtgttcccatcaccagaccttagcgacggctcggactatgagatgtctgccgcagccgcctacgtcgacacgctcgagaggtcatacaggtcggtgacgacaccgcgaacgcgctcgtcttcgaggtcccggaggacgacatcgtgcagtacctcgccgacgtggacgtgggcatcgaccacctcgcgcggggcgtccccggcgcggcgcgcgccgacgactgctaccagatcagctagtggcaggactggtacgactatgtaccccctcatggactaccacgacgtccccatcgaccgcacggtcctcttcttctcgctccaccacctctcgctcgagtccatggacgacctcgac

SEQ ID NO: 7176 - DNA, 305 bp, Zea mays
  Clone ID: MRT4577_10653C.1
cccacgcgtccgcacaaaagcaaatcagcgaacaatcttcaaaaatcaagagtggtagcaatgggaagaatgaggagagaatctccagagaaaagcacactgaaagcaagtcagtacactgaactgccacaaccagttctccttcgtctaccaccgctaccacaaccgccgccgccaccgcaacccctgccgcctgctgtaccacctccattgcctccatcaccagaacctgagccacctggagttctagccgaggatatgatagaagacatggatatctgtgacaccccacctcacactagtgc

SEQ ID NO: 7177 - DNA, 448 bp, Zea mays
  Clone ID: MRT4577_106540C.1
gaaaaagggcccttctttttttgggggggcccccaacctcatccaaaaaactttattttgggaccttaacccaaaagccatctaaaagaggggccccccccatgagggggtggggggaaaaccctggggggtttgtcaaaacaaggggggtgaagggccccaattgttgccgttgtaaaagggggcccccgtttggccccccgggccgggaaaaccgcaaccaccgttgttgggtcaaaaagggaacagggcccacaacaactaactggctgaaaggggggagctgttgctggtggaaaaaaaccgcaaagttcaatgccccccgttgggtgaagggaaaaaaatgctgggggggggccgcacccacccgcccgaaggggaggtgggggtgcaaaaaaaccgcaaagttcaatgccccccgttggtttaaaggaaaaaaccgcttttg

SEQ ID NO: 7178 - DNA, 386 bp, Zea mays
  unsure (1)..(386): unsure at all n locations
  Clone ID: MRT4577_106541C.1
ctactcggcggccgcccgttattttgttttttttttcttttttttttttnntgtttccaccagccaaaaacaaacaaggaatcgggggaaactattccatcgttttttaatccaccaaatacataaattctgtttaacaactaaaggttatcttttgtacaaacatcttcaattctaccagggagcatcattctttttgaccccaggtctggactttggaaaccataaccgcggctttacaaattagctccgtttgaaccaaccaacttacaaggtgaaacaccaccataaccaatctcaaagcgggaaaatgctggtactttagctacggcaccccataacttgtcatcccctggtgattctaggaaaatgctacgtggatgggg

SEQ ID NO: 7179 - DNA, 693 bp, Zea mays
  Clone ID: MRT4577_106542C.1
ccggccgggctcatctcttgtgctccgatcctgtgcagatagtggaccgatctgatgtgattatcagcatctgtaggcgggcgccagtgggagagtactcgagagacctatcgcaacaatggcagagatggtcgggtccgtcgttgtcggcgaggtggtcaaccggaccttctccttcctcatcagcaagcacagcagggagcgtctgagcacgcgggaaggcgtcgagcggctggagatggcgcacatcaagatggaggccgcgctggagctgtccggccgctggcagcaccacgccaccgacgccgacgcgtccctgctccgctggcgccggaagctgaggcgcgccgcggacgagtgcgacgccgcgctgcaccgctggaagctgcgggagctgcaggaggaggacgcccgcgagaggctggcccgggcgccgctcccgcgccgcgtcgcgcacgcggtcctctgcttcctctcggcgctcctgctcctcgcccgcgcccgcgcccgcggcggcgacgacgacgcgtgctcccacgcctgtgccgccgtccggaggttcgagaggctggccagcggcgccgccgatttcctcaggtgcgtggagttcggcagcgcgccgcggaggtgcggcggcctgttcggcgggcggccccctcgctgggaggctcgcgagctacgagaggctgcagc

SEQ ID NO: 7180 - DNA, 194 bp, Zea mays
  Clone ID: MRT4577_106543C.1
aggaggcgggggcccctttttgatctctttctctggattagctaacaggaactgttacacaaaatcccatatcaccatacggaagaatattagttcagtttcaccattgaattatattaattcacaggaatctaaaaatttcgattacacacttactggtgaagcattggttagtatccctggtgaagataaca

SEQ ID NO: 7181 - DNA, 487 bp, Zea mays
  Clone ID: MRT4577_106544C.1
ggaaccaatggcaagcctgataaggtggcctttttaaagggtttggtgcaaacaccagcccttgggagatttgaccccggttttaaaaggccacggcgggattacacggtttccggggaacaccccaattaggacaaaccttacccaattctttatttttggcacttaaggcaaattccaccttctggttgcaggggacttaacattaccattccggtgtatggattttgggaagggaaccatattcctttatttgaactttgcccaatccattttcggggggaatttttaagacaaccaaaggccccaattccccggcaacttcttggccccggaaaggacaacgtggaccttaacctaaggcccctttagggacccggacctgggcttgcttttgggccttgggttcccccccccgttcaagggccttaacccctcccaacactgggtggtgctctcccttgggttggcttgcttgcccttcaag

SEQ ID NO: 7182 - DNA, 368 bp, Zea mays
  Clone ID: MRT4577_106545C.1
cccactcttcctaccatggttacccactatctctttatgatcctggagtacgactccaagctccgcctcatggagcacctcaagcacctctccagcatccacctcaccatcctctcctcccagatcactcaatcaactgactatgcatatctcgtgagccatcaaccatttctctcaaccatgaacctagttctgaatcctgatatgctgatctagaagcgtttaaatagcatcctattgtctctcaactttcatttcaatcaattcaatgtatttgtcaaggatcagctttcgctttatgttgattattattattgcaatgctccaatcacgaccttcatcatctatccattttatccacattatca

SEQ ID NO: 7183 - DNA, 240 bp, Zea mays
  Clone ID: MRT4577_106546C.1
atgaagcatttgagaacaagtgaccaacattggcgcccacctccggtgaactcgaacgaccaccttcggcaagcattcaccttcgtcatgccgccaaagaagacaacaatgccaggggctgcactgcagccactggatacaaaccaagagacgctccccctccgagaagctaggactcacaagagaaaagtgaaagggaaatgtgcccttgggccatttctaagtgttttggtgatttag

SEQ ID NO: 7184 - DNA, 851 bp, Zea mays
  Clone ID: MRT4577_106547C.1
cacattataccacatgctatagtgccctgtcgtattttgatgtagcatttggaatttctggtctcgctgtcacttacaagttcctcaacatcttatcgctccatcactgtgttaacgttgttcattatgcagaaaatggttatgtctttgtcatgcgataaggctgtttgggatgctgtcatgaataatgaggcagttcaagatttcaggagacctttacatgatggaaaagaaagcgatagaaaacccaacactgggccccctgcttccgccccgcgtcctgttcaagtgatcctggaaagcgcccaggcaaaaatagttgaattcctagagaatgttcagaagataatcaacatgctgatccacactccagaggatgatgataatccagatggatacagcgatgcagttaaggtgtcgttcatgctcacggtattcgtcttcatcgtggtggccattgctcgtatcaattatgaacattgggattacaaagtgtggtgaggcgagattctggcatcctacaagcccgtctatatatatgttttgtagaacacaccaaagttcgataacttagcctacacacagttttactcaatgctttggctgtatcatttcatcccggcagatcatgcaagggaatgttgttctgggtcatatttgtgttgttcgactttggagccggatggacctctgtagctacacttccttactccagcagtccagcgccagcaaatttcatgtttgcagtccattttaagcatacagcattaactgttggaatagcctgtataaatgttacttgaggaaattattttacaggttatcaaaaaaaaaaaaaaaaaggcggccgc

SEQ ID NO: 7185 - DNA, 173 bp, Zea mays
  Clone ID: MRT4577_106548C.1
gtgagtgagagagagacagatagatcgtctagcgttcgacgaccatggctaggcaacgagaattgggttccatgctggcgggtgctctgctcgttgcatacgacgtttgcgtacattcctacaaccgtgcactccatcgtcgtctgctacatgcacgctgggcaacaacctgc

SEQ ID NO: 7186 - DNA, 305 bp, Zea mays
  unsure (1)..(305): unsure at all n locations
  Clone ID: MRT4577_106549C.1
ttctttatttttttattttttctctattccttttncncctccttcctaagaagatcagttatttcctttccctcanccctcactaccttccttaggccgattcgaagacacttaactttcaaccatatccttcttttcttatccccaccatttcaaatcctccctattcagaggattttgagagaatttttggtctatccccttcccttccttttttccctttttccactaataattcaacttcaattatctccaaatcttttctctatttttcccttctgtcaaaatcccctctctttccctta

SEQ ID NO: 7187 - DNA, 573 bp, Zea mays
  unsure (1)..(573): unsure at all n locations
  Clone ID: MRT4577_10654C.1
ttagctttcttattttntcatttaaggcaatcaatctgtttgctcctttgctaccttctattatatgctatatttgctggtacaactcttgaggcggtgagggttggatgatgatcagttgcatagttcaaatgattactttggtaatgactatgattacactgaattgtctttcgctcctaactgacaacctatggaccacctgattttgcatggtaatcttggaggatttttttgtgtatcacttatctttagaacatactgactttgttatgcttatctattttttaaaagttaatttatttaattcagaagttctattactttccttattaacacatgtccatagagattgcttccgtatgagtacttcactgcatcaactgtacacgtaatttgttaatacgtactttatttggatgaattctctttgcacaccggccgttgaatctgcaaagaattcttcaccttataggcacaacagtatgctgcatgctattcctacaagacacgtaggtgcagccactacactgactaatcagattaggcagtcttaagtttgcactggaggat

SEQ ID NO: 7188 - DNA, 219 bp, Zea mays
  Clone ID: MRT4577_106550C.1
acctttggttttttttttacaaatgtactctcttatatctgggaagccacacacatcagacaaaaactctattattgagctctatctcatatgaaatctataagagggcacccccactgatggggtgttgggagaatgctgttgggtgtgtcaaacaagggggtgaaagggacaattgttgcacatgtaaaagggggccaccgttaggcccaccgcggc

SEQ ID NO: 7189 - DNA, 690 bp, Zea mays
  Clone ID: MRT4577_106551C.1
gaaagcgagctcgcagtcgcagcgggtcgacggggagaagaaagaagagctactcctgctcccacactcccagccgagctcacgcacacacgcgcgagcaggagctccggcaagatccaaaattaattgtcccctgcccgcgcgcgtcggggccgggcgcaaagcggcaaagggatcatcggatggcggtgttcgcaggggcacgggcacggccgctgctgggcgccctgctgctttcagcgctcctgctcacggtcacggccgccgacagccagaacaaccctgccgaccagctcgttgcactgatcaacagcaaccgtaccgccagcaagtccgcttccgtttctgacaaccaaggcttgggatgcatcgctctgcagtacatcaaagcgtacgaaggtcactgtgaccaggtggacgacaagaagccgatggagtcgagtttcacggacacgttcgccccgacctgtggcgtccaggccgcgactctttccaggatcaccggcaggcttgtggcctgccagtccaagtacgcgaccccagccgaggccctcggcatcctggtgaacggcgccaagaagggccttcaaacgttgcacggcaagaaccccacgcggaggtcggggcggccgtgagcggcacccgacggtggtggaccttacttctggtgcgtcctgttcagtgacggca

SEQ ID NO: 7190 - DNA, 163 bp, Zea mays
  Clone ID: MRT4577_106552C.1
gggggatccttttaacacaagggttttcaaaaacttgacacgggaacaaagaggttgtccgagcattagtgccttaaaactttttcaaacaaaccggttcctcattaacaagtcaggaaacttgtacagtttttttccacccgttcccctgaatatttttttt

SEQ ID NO: 7191 - DNA, 363 bp, Zea mays
  unsure (1)..(363): unsure at all n locations
  Clone ID: MRT4577_106553C.1
gggacgagggagagcgggacgagaaggcggcgacggaaggagaggaccgagagcgagacggcggcccccccagggccacagacgaccagcacccgcacaacgccncgagaaccaacggccaggcccgcagagcccaagaggaccncnccaccggcaaacgcagacggacccgcggacncggcccgccncacccacgacacggaggaagcacaagcggaacaccaacaagggcaagaacagaaaggagcnggacaggcgcaacaacaacgncaaagaggcccaaacgccaaaaggaccaaagaggcggaaggcagaaggacagggggggcacaaaaaacggccaaaaaaacggaggggggagcc

SEQ ID NO: 7192 - DNA, 273 bp, Zea mays
  Clone ID: MRT4577_106554C.1
agttccgagcttcaagcaaaaaaaaaaaaaaaaataaaaaaaaataaaaaaaaaaaaaaaaaaaaaataaaaaaaaaaaaaaaaaaaaaaaaaaaataaaaaaaaaaaaaaaaaaaataaaaaaagggggcggccgttttaaagaatcaaagcttacttccccgagcatgcaattaaaaattttttatatagggcaaccaaaattaaattaatgggccgtcgttgaaaaacccggaaattataaaaaccataggggcttccaaaataaatcct

SEQ ID NO: 7193 - DNA, 293 bp, Zea mays
  unsure (1)..(293): unsure at all n locations
  Clone ID: MRT4577_106555C.1
accccgcgtccttgtctctcgtccctctccctcttctctgtggtgtgcctgcccngttgcgcgagccggtgagcccttgctggccgccgccgtggcgtccttggttcttcgtgccggtgtcgccgctcgtgtttccttccttcgtcctcgccgctgcggcggcggtttgttttccggcttgcggtttgggtggggggggtgcggcgtgcggctcgcgcttttttcgtccgcggcgggttgtccctgcgcgttcggggccgtttgccttcctgtcgttggtcgctgcccgggcc

SEQ ID NO: 7194 - DNA, 536 bp, Zea mays
  Clone ID: MRT4577_106557C.1
gcacccaccatcacatatctgatatatactcgtacatgtgcactcagcaacacttcatgacagggactttaatggaccttaccacaaacgcagtacataagacgggcataaatcctgttaaaatcacttgattgactgaaaaaatcccatccatctaatgattctaaccaccactctttgtaacaaatggtgaaaggcaaactgaactgatatcatctttttgttcactgagactgcatccagacgacctggttactgacatggcagaagtggatgcaaccaactcactgccatatttaccgatgctccacagaatgtcatgctcactagattcatgctcggtgaggttgctctttaggcggagctaagcatcgaacatcctggtcatacagtttatctaccgatagattgatcgcgtcagtcgattgcacacacgtatctagtgcttgaataacatcggcatacacagaccgattgattgcccattttgagcaaacacgctcaatgatcgccttctgtgtgtctatcagactgct

SEQ ID NO: 7195 - DNA, 283 bp, Zea mays
  Clone ID: MRT4577_106558C.1
aagaacccaaagccctcttcgcgttatgctggctcagaagcagctataaacatgcgccgtaaaaaacatttcacgtttaacaagccatccaaatgctcaggtacatgaaaaaaaccaggttagaatcctttacaaaagcgttcataacgctcaactagcaagaaaaagggtttttcgccccaggtaaatgactacgcgttacatcttaataccgggccaagccctttttttcattaacatcagggctgctggacctcaaactgcttcttcccctgcggttgta

SEQ ID NO: 7196 - DNA, 244 bp, Zea mays
  unsure (1)..(244): unsure at all n locations
  Clone ID: MRT4577_106559C.1
accctggcaactttacgtaaggcagagttgggttttttggggttgatagtggaaaagccnacagataagtcatcctcactgtccctctacagacccggacacgagattgtcaccacatacgcctcctccgccacttctttcaaacggagccggggccgcgacctccagtctacgacccacgccctccaccagcaaccccccatccccttccaaatacagctctcttaatcattcattcgcatgt

SEQ ID NO: 7197 - DNA, 246 bp, Zea mays
  unsure (1)..(246): unsure at all n locations
  Clone ID: MRT4577_10655C.1
tctttnagcaggggtaacaacgcagagtacttttttttttttttttttttttttttttttcgggggcgttagctgggtgcggacggaggaagagaatccgacgaacaggggggagtcgattcgattgggatttgggattagctaccggcggcgggaagaaggaaggaatcaaaatgacagggtacgaaataagctagaagaaagatccccgctgtctctgcgttgttaccactgctaaagggcgaa

SEQ ID NO: 7198 - DNA, 1302 bp, Zea mays
  Clone ID: MRT4577_106560C.1
ttcagaggcatccaatttcagtgtgtactgcaatacttgggtccacctgtttaagaagcgctacgcggacttccacggccgcgctgccgatctcgtccacggcctccggggcacggcgatgcccaggagacaggccctcgaggaagagcaatgtacagaagagaaaggtatctcgactattccaaagcacaagtatgcatccaaagcctgttccccaaaaggaacctttatctgcagctctctctgcgcttactcttgttgtgcaatttaatgggtggctatcatttttcctcttgctttattataaacttcctctgcggccagaaactcacaagacatactatgaatacactggcttgtggcacatctatgggctccttgccatgaattcatggttctggagtgccatatatcacagttgtgacacaatttggacagaaaaagctatatttttcatcagatgctgcctttctagggtattccctcattttgacgatagttggtgagcatgtagtagcaagtttcatgggctctggtagattaactgacctttgtgtgttccattagcctgtgaagttcgaaactggtcatattgctaagaattctaggaggttactattagggcctagagtaaatgactacgtgctgatgaaaatctgttcagattaatcattctggaacttgtactaacaattgaagcaagtggaggcatagcaccaattgtgtctgtgctgcagctctggatgtcagtagacaagaggtgtatcagagagaagcacttcaaggttaatttgttgagcaaattggagatgctggattttgtattttggtaggtgatgtatgcttttcagcatggcgtattttattgaactggtcaagtcctgcagaagctgaaactgatcatggataagactttgccttgtgtcacaatgggtgcatttgctggtggtccttggatcaggttgctcatgggtggtgaatgatctgacgacttcagaagaggatagatctgagattacctttcatgcatgtcaaggaagttaagtagctgatgccatcaaagcaatggagaaacgtcaggtgaaccgcgagcagaattccgtggcgcatttgttagcgcagttagttaggactctgttcatacaactgttcgattaagccaaatacctgatttagttttatattggttgttgtcaaagaatttgtgaaatattgaggttgataatatatgtggcgttcgtttttatgtaatcattgttcactaatattttgtcgaatattttatattatatagacattact

SEQ ID NO: 7199 - DNA, 1098 bp, Zea mays
  Clone ID: MRT4577_106561C.1
gggaccctcgaggccggccggggaaaagtctcctcacctcccggtcccggcctcccttcctctctctccccccctctcaaacatccccgcgccgatggatctccgcctcgcccactaggcctccggcgcgaccgagggtgggcagggggatggggctcctcgggcggaggacgttgctgcggctcctcgccctcgcttccgcggccgtcgccgtcgccgtcgccgtggaagcctacgagggcgacgctgatccgctctacaggcctgaacatgaaggtttgtactgtgataatcattgctcagtgtctcctatgggcactgtgggctgtcatgactcggcatccttcacggctgaagatcatatttgttgccatcggaggtgcggctgcggtacttctggaagcttctgacattcctccgcgatggggatgtgtggatggccgtgctatatgccttgctgtggctatccccctttcgtacctttggtggagctttgccaaggaagatgcggagatgcgaacgtcagcaatcctgaagaaggcacgttaacaagtcgcctgtgtgataatttcatgcctgcgcccagccattgtaaagataaaagtttcacttgtaatcttaggtaactactaacttagcatgtgaattaccgtcttatttttgttccacgatgttcttgtcccagttcagaaggccatgttgtttaaggggccacttctattctttaatttatacagcaactgccacttggtaggctcgtgctcatcaactataatctcagaagattgttaccatgggttaaaaaaaaaaaaaaaaaaaaaagggggggggggaaactcgagccgtaacaagcgctagcatctatacaaagactgtctgaaatcttctagcaaaacctataccctattggaaatggagacgctctcggcgaagcagtagggcacagtggacgtgaagctgaacccgacttccaaccaatccaactcgtagacgggcggtaaacggatgtgccaactagaaaagtggtctctctcggcgcttgcttgacaaacgtgtgttattacccgttgtatataatgttattaattaatgttcttt

SEQ ID NO: 7200 - DNA, 1326 bp, Zea mays
  Clone ID: MRT4577_106562C.1
ccggccgggttcctttctctcctcccctctaagcatccccgcgccgatggatctccgcctcgcccactaggcctccggcgcgaccgagggtgggcagggggatggggctcctcgggcggaggacgttgctgcggctcctcgccctcgcttccgcggccgtcgccgtcgccgtcgccgtggaagcctacgagggcgacgctgatccgctctacagtgacacaatttggacagaaaagctatatttttcatcagatgctgcctttctggggtattccctcattttggcgatactgcggactttaaatttaagagacgaagcatctagagttatggttgccgctcctattctagcatttgtgacaacccacattctgtacctcaacttctacgaacttgacaaaggcctgaacatgaaggtttgtactgtgataatcattgctcagtgtctcctatgggcactgtgggctgtcatgactcggcatccttcacggctgaagatcatatttgttgccatcggaggtgcggctgcggtacttctggaagcttctgacattcctccgcgatggggatatgtggatggccgtgttatatgccttgctgtggctatccccctttcgtacctttggtggagctttgccaaggaagatgcggagatgcggacgtcagcaatccttgtgacggcacggagcatgctaatcagccccttttggttcctcgtgcagcttacgttcaatcagtcaaaaggataacctactgtcccggtaagtgttactaagaactgaatgatacttccatattttaaagccaaacctggcccaggcaccacccaggcaccagaggcctccaaacggtcaaggatacaccactgtcacggtcaagtcctgcagaagctgaaactgatcatggataagactttgccttgtgtcacaatgggtgcatttgctggtggtccttggatcaggttgctcatgggtggtgaatgatctgacgacttcagaagaggatagatctgagattacctttcatgcatgtcaaggaagttaagtagctgatgccatcaaagaaatggagaaacgtcaggtgaaccgcgagcagaattccgtggcgcatttgttagcgcagttagttaggactctgttcatacagctgttcgattaagccaaatacctgatttagttttatattggttgttgtcaaagaatttgtgaaatattgaggttgataatatatgtggcgttcgtttttatgtaatcattgttcactaatattttgtcgaatattttatattatatagacattactaagaaaaaaaaaaaaaaaggcgcc

SEQ ID NO: 7201 - DNA, 1296 bp, Zea mays
  unsure (1)..(1296): unsure at all n locations
  Clone ID: MRT4577_106563C.1
gacctgactaacggcgaagcgcctgccgcacccgacgcgccgtccttgggcggcgtcactccgtcgcagatccggttgcccgcgccgttcgtcgcaaatcctattcgagccgtccaggtcgcggcagcacgcacgcccgacagctgtggacgaagccatcggctctcccgacagtcacgaccgctgtcgtcgtgcgtggacgccggcgcgctgccgttgggagccgtgtcgcagccgagatccgcgttgctgtacccgagttccatgcgtcgtccctcccgagatccacgcggcgaacggcgaagcgccgggcgagcgcgacccacgcgccgaacgttgctgtacccgacttccacggccgcgctgccgatcttgtccacggcctccggggcacggcgatgcccaggagaaaggccctcgaggaagagcaatgtacagaagagaaaggtatctcgactattccaaagcacaagtatgcatccaaaacctgttccccaaaaggaacctttatctgcagctctctctgcgcttactcttgttgtgcaatttaatgggtggctatcatttttcctcttgctttattataaacttcctctgtggccagaaactcacaagacatactatgaatacactggcttgtggcacatctatgggctccttgccatgaattcatggttctggagtgccatatatcacagttgtgacaccatttgtacagataaagctatatttttcatcagatgctgcctttctagggtattccctcattttgacgatagttgattaatcattctggaacttgtactaacaattgaagcaagtggaggcatagcaccaattgtgtctgtgctgcagctctggatgtcagtagacaagaggtgtatcagagagaagcacttcaaggttaatttgttgagcaaattggagatgctggattttgtattttggttgctcatgggtggtgaatgatctgacgacttcagaagaggatagatctgagattacctttcatgcatgtcaaggaagttaagtagctgatgccatcaaagcaatggagaaacgtcaggtgaaccgcgagcagaattctgtggcgcatttgttagcgcagttagttaggactctgttcatacaactgttcgattaagccaaatacctaatttagttttatattggttgttgtcaaagaatttgtgaaatattgaggttgataatatatgtggcgttcgtttttatgtnnnnnnnnnnnnnnnnnnnnnnnnnnnnnnnnnnnnnnnnnnnnnnnnnnnnnnnnnnnnn

SEQ ID NO: 7202 - DNA, 1326 bp, Zea mays
  unsure (1)..(1326): unsure at all n locations
  Clone ID: MRT4577_106564C.1
acatctcctacttcaaccactcccgccattgtcctgcgcctttctgcaccgccacacacaccccgctccaatccaatggcgcctcgccaagccgtcctcgcggtcgtggtcctcgccgcgctgctcccgttcgccctctctcgcgggctgcggcttggccaccaccgcgcccagccgcacccgaggccgcacggccacgcaccgctcggaggtggcgcgtggtcctcggctcacgccaccttctacggcggcggcgatgcgtccggcaccatgggcggggcgtgtgggtacggcaacctctacagccaggggtacggcaccaacacggcggcgctgagcacggcgctcttcaacaacggcctcagctgcggcgcctgcttcgaggtgcggtgcgacgcggcggggggcggcggccgctcgtgtctgccgggctccgtcgtggtgacggccaccaacttctgcccgcccaacaacgcgctcccntccgacgacggcggctggtgcaacccgccgcgcgcccacttcgacatgtcgcagcccgtgttccagcgcatcgcgctctacagggccggcattgttcccgtctcctaccgcagggttgcgtgcaacaagaagggcggcatacgtttcaccatcaacggccactcctacttcaacctggtactggtgaccaacgtgggaggcgccggcgacgtgcacgcggttgccgtgaaggccgagcgctcccccgggtggcaggccctgtcgcgcaactggggccagaactggcagagcaacacgctcctggacgggcaggccctgtccttccgcgtcaccaccagcgacggccgctccgtgctctccaacaacgccgccccccgcggctggtctttcggccagactttcagcggtgcccagttcaactgaacacacccccaccgttcatgcagcgtcgacgcagtggcactagtactagttgttccgtccaccccgattggagcctgccgagaggcgccatggttttatgaatggtctgcacctcgcatttgctcctgggaattaccagtagtttaggcctagtaatagcgcgggttttatcgtgcttgcgttagcatggtgttttagtgttccttggttgtatccggcttggaaattggaggtggtggtaaggctggtctgcagataaacggaggcaggctgccttgtatcacccgccaattatgcgtttagggcctcatggtgatggctccttcgagatgagatgttttctgagttattcaagtgtgttagttgtaatgaatcttatcaagttactatttcctaatatattatccttcgcaaaaaaaa

SEQ ID NO: 7203 - DNA, 651 bp, Zea mays
  Clone ID: MRT4577_106565C.1
gactccgctcaatcccatccccacgactctggtggcgacggcgacggcgacggcgacgccgcggggccaactcaaaacctgatgtcgtttgccaagaagctgcagacagaccatccacaatcatggtccgcgctgccatctgagcttgctggtcaggtccttcgtcgcctcccttcccacgccgaccgtgtgcgcttcgctgctgtatgtcaccattggcgtttctccagacaagagcattgcctaaccccacctttaccatggcttgcatttcctgatggtaccttcttcgtttttccccatggaaaaggggcaaaagaatccttcaagctccccagcagtgccaactaatgcatctcctatggtgactggcttgccttcgcacacaatggcacctgtttcctaatggaccccttctccgagatcaccttaacgcttcctaacctatcttctttctgtcttgtggatgagcctgttggaattattaatggtggcaatgtcctggatgaagatatggctggtcctctactacagatggatactatgatatctctgcgcaaggtaatcaggtgctcggaactccttattgctgccatcattgacattgcgcctcttttgactgttgcgtactgcgaaccgggttcaccacat

SEQ ID NO: 7204 - DNA, 506 bp, Zea mays
  Clone ID: MRT4577_106566C.1
ggttgccaagattttacttagttcgatgtgggagcaaaaggatatgccaaattgaatgtagtttcattagttatgctcaattatggatgttcagaggcatccaatttcagtgtgtactgcaatacttgggtccacctgtacttgtcactctccgacagctcatcgccgcctggttctcccgccggtacacaaggtttaagaagcactccgcagacttccacggtcgcgccgccgatctcgtccatggcctccggggcacggcgatgcccatgagacaggccctcaaggaagagcaatgtagagaagagaaaggtatctcgactgttccaaagcacaagtatgcatccaaagcctgttccccaaaaggatcgaaaggagctccaacctgaaccagcgagagtatcgatacaaagactgtctgaaatcttctaggcaacatttcaattattgtgctattgtgatgattgtattgtaactggtatcacaattattgtggtattgtgaat

SEQ ID NO: 7205 - DNA, 1391 bp, Zea mays
  unsure (1)..(1391): unsure at all n locations
  Clone ID: MRT4577_106567C.1
ccatctcctcactnacaccactcccgccattgtcctgcgcctttctgcaccgccacacacaccccgctccaatccaatggcgcctcgccaagccgtcctcgcggtcgtggtcctcgccgcgctgctcccgctcgccctctctcgcgggctgcggcttggccaccaccgcgcccagccgcacccgaggccgcacggccacgcaccgctcggaggtggcgcgtggtcctcggctcacgccaccttctacggcggcggcgatgcgtccggcaccatgggcggggcgtgtgggtacggcaacctctacagccaggggtacggcaccaacacggcggcgctgagcacggcgctcttcaacaacggcctcagctgcggcgcctgcttcgaggtgcggtgcgacgcggcggggggcggcggccgctcgtgcctgccgggctccgtcgtggtgacggccaccaacttctgcccgcccaacaacgcgctcccgtccgacgacggcggctggtgcaacccgccgcgcgcccacttcgacatgtcgcagcccgtgttccagcgcatcgcgctctacagggctggcattgtccccgtctcctaccgcagggtcgcgtgcaacaagaagggcggcatccggttcaccatcaacggccactcctacttcaacctggtgctggtgaccaacgtgggcggcgccggcgacgtgcacgcggtggccgtgaagggcgaccgttccgcggggtggcaggccctgtcgcgcaactggggccagaactggcagagcaacacgctcctggacgggcaggccctctccttccgcgtcaccaccagcgacggccgctccgtggtctccagcaacgctgccccgcgcggctggggcttcggccagaccttcagcggggcccagttcaactgaacaccctccatggttcccgcagcgtcgtctcgtccgtcgtcggcgcggtgccacaagtagtagttttccgttggtcgtggtagagtcgtccaccctcactcggagcttgccgagaggcgccatggttttatgaatggtgcatctcgctttggatctggggaattaccagtagtttaggcctagtattagcgcgggttttgtcgtgctggtgttagcctggttggtgtggtagcgttttgcttggttgttttggaattggaagtggtggtaaggctggcttgcagattaacggaggtaggccgccttttatcacccgccaattaagcatttgtggggtctcatggtgatggcctctttcagatgagatgttttgcgtgttacccaagtgtgttggttgtaatgagccctattaagtttgtgctggaacttcagtatgcatagacatttaataagaagcggaaaaaataaaaaaataatataattt

SEQ ID NO: 7206 - DNA, 539 bp, Zea mays
  Clone ID: MRT4577_106568C.1
acataaaaacgaacgccacatatattatcaacctcaatatttcacaaattctttgacaacaaccaatataaaactaaattaggtatttggcttaatcgaacagctgtatgaacagagtcctaactaactgcgctaacaaatgcgccacagaattctgctcgcggttcacctgacgtttctccatttcttcgatggcatcaactacttaacttccttgacatgcatgaaaggtaatctcagatctatcctcttctgaagtcgtcagatcattcaccacccatgagcaaccgaaatacaaaatccagcatctccaatttgctcaacaaattaaccttgaagtgcttctctctgatacacctcttgtctactgacatccagagctgcagcacagacacaattggtgctatgcctccacttgtttcaattgttagtacaagttccagaatgattaatctgaacagattttcatcagcacgtagtcatttactctggggcctaatagtaacctcctagaattcttagcaatatgaccagtttcg

SEQ ID NO: 7207 - DNA, 1431 bp, Zea mays
  Clone ID: MRT4577_106569C.1
gccggccgggaaacactccccagtccccatagactccagcctgagctgcaccgtgagcgctcgccgctccgcatcgccgtcccagtcccacaccccgcatccagcctgccccagcgtaatggcgcttcgccaggccgtcctcctggccgtggtcctcgccgcgctgctcccgctcgccctctctcgcgggttgggcttggtgcacgggcatgtgcggccgcacacgcacgggctggggctcggccaccaccacgcccagccgcacccgcacccgcacgggcacgcaccgctcgtaggtggcgcgtggtcctctgctcacgccaccttctacggcggcggcgacgcgtccggcaccatgggcggtgcgtgcgggtacggcaacctctacagccaggggtacggcaccaacacggcggcgctgagcacggcgctcttcaacaacgggctcagctgcggcgcctgcttcgaggtgcgctgcgacgcggcggggggcgggagccactcgtgcctgccgggctccgtcgtggtgacggccaccaacttctgcccgcccaacaacgcgctcccctccgacgacggcggctggtgcaacccgccgcgcgcccacttcgacatgtcgcagcccgtgttccagcgcatcgcgctatacagggccggcattgttcccgtctcctaccgcagggttgcgtgcaacaagaagggcggcatacgtttcaccatcaacggccactcctacttcaaccttgtgctggtgaccaacgtgggaggcgccggcgacgtgcacgctgttgccgtgaaggccgagcgctcccccgggtggcaggccctgtcgcgcaactggggccagaactggcagagcaacacgctccttgacgggcaggccctgtccttccgcgtcaccaccagcgacggccgctccgtgctctccaacaacgccgccccccgcggctggtctttcggccagactttcagcggtgcccagttcaactgaacacacccccaccgttcatgcagcgtcgacgcagtggcactagtactagttgttccgtccaccccgattggagcctgccgagaggcgccatggttttatgaatggtctgcacctcgcatttgctcctgggaattaccagtagtttaggcctagtaatagcgcgggtcctatcgtgcttgcgttagcatggtgttttagtgttccttggttgtatccggcttggaaattggaggtggtggtaaggctggtctgcagataaacggaggcaggctgccttgtatcacccgccaattatgcgtttagggcctcatggtgatggctccttcgagatgagatgttttctgagttattcaagtgtgttagttgtaatgaatcttatcaagttactatttcctaatatattatccttcggaaatgggtgcttgagtttaagcaggaat

SEQ ID NO: 7208 - DNA, 1107 bp, Zea mays
  unsure (1)..(1107): unsure at all n locations
  Clone ID: MRT4577_10656C.1
aaaaaaagtcccttcgttttcgttgcgtcttgaaagggggagagagagagagagagagagagagagaagagagagagaagagagagagagagagaggagtgggagacccgcgagaggctgccgtgtagggaccgtagactcagcgactgcgaaggagggataaggggatggccgggatcggaccgatcaggcaggactgggagccggtcgttgtgcggaagaaggcacccaccgccgccgccaagaaggatgagaaggccgtcaacgccgcgcgccgcgccggtgcggagatcgataccatgaagaagtacaacgctggtacgaacaaggcggcatccagcggtacatccctcaacaccaagcgcctcgacgacgacaccgaaaacctcgcccatgagcgagttccaagtgatctgaagaagaatctcatgcaagcaaggctcgataagaagctgacacaggcacaacttgctcagatgataaatgagaagccacaggtgattcaggagtatgaatcaggcaaggcaatccccaaccagcagatcattagcaagctcgagagggccctgggaaccaagttgcgtggcaagaaatagctttcctacgagtttgtgtcccggagcatcataatagggggaagacaaggcaagctgtctgcttatttgtctatgtttggtatctcaagtcctgcggactgtttctgttggcacaagagggaataaatgtgttcacggacctgtaatgcttgctccttgtcatatgaccttgctctaaacatttgtgatgaagctgtcaaggtaatatattttctctaatatttagccctagaaaaacaaaaaaaaacctgcgggggggggccccgacccattttttcttatagtgagggggtggaaagcggggggnnntttccgcgcgcgggcgcttattaccccgggccccggccggatgggcgcgggggtggcgtatcggagagcgcgggcgttggcagtttcgggggggggcgtcaggggctcacggagttgcgagggtgagagacaagctccgagctgtgcactgcccgaccggtgttgtgttcgacccggccgccgctggcgcggaagagtaggc

SEQ ID NO: 7209 - DNA, 2161 bp, Zea mays
  unsure (1)..(2161): unsure at all n locations
  Clone ID: MRT4577_106570C.1
ctcgattcagcgacgtcgtgtcatcccgaacctgaccgaactgatcccccatacagcaagggctcgggcagtcgcccgcggggaggcatagacggacgcccgcacgcaccgccacccttcccgaaaagtctcctcacctcccggtcccggcctcccttcctctctctccccccctctcaaacatccccgcgccgatggatctccgcctcgcccactaggcctccggcgcgaccgagggtgggcagggggatggggctcctcgggcggaggacgttgctgcggctcctcgccctcgcttccgcggccgtcgccgtcgccgtcaccgtggaagcctacgagggcgacgctgatccggtctacaggcgaaccttcnaggttactccgttttaggcctcgctggacatcccagtgctgtccgtctcggtgcctctggtggtttcagcgaaggcgagcggttccggaaaggaataaaaatggggctgtctgtcttcgcctcttggctactggcattgggggtgtataagttctgattacgctacatgattcagagttatatattatcaccttttcatggatgccaaaaggttgactagcacaactaccactcgcaccagatttttaacttgcaatggaaggactggaactgcaagagcgaatgcagataccactgtatgatggaaagggagggtgaaagagcaaagcttggccttcagcctgttaagtatcatggcaaatggcctttgaaacgcgcctctgtgtttcaggagcctttatctgcagctctctccgctcttactctcgttgtgcaatttaatgggtggctttcgttcttcctcttgctttattataagcttcctctacggccagaaactcacaagacatactacgaatacactggcctgtggcacatctatgggctccttgccatgaattcatggttctggagtgccatatatcacagttgtgacacaatttggacagaaaagctatatttttcatcagctgctgcctttctggggtactctctcattttggcgatactgcggacttcaagtttaagagacgaagcttccttaaacatggtgctgcatgaaaatctttacttttgtgacaaacacacctctgtacctcaactcttgggcagctaaccggttaattgagaaggatgaggcataaactccagacgatgctcctttaaattatttgccgcagaagaggctaattttgacaagccagttgatccagcaacttctccctgctataccagcgaccattttgagaggacaagctgtgtctacttacggaagtgcgacatacactctatcaatgttgacactaagggatgcatgcagcatggtagcatcattatcatcatcatataactcttgctcacctgtggaggatgaaaataacccatctgaacaaacaagtgctaagaaaatggaagacagagtatcaaaggttgtggaagtcttcgctggaagaatccagaagatggaaaatgactttataagtgattccctcacggttgtgtccttcacaaaggaaggatgtgaagccacactattatcaagcaacaaagccaaagttgtgtgacacaattataacaaaggaatcatcacccattagcacactaaaattggcgcatacagataacgcacctgcaaagtgggatcatttgaacatagttcagcaaagggccgacgcacttgagtcactcctcaagctctacgcaaagcttctggaggagaggctcgatgagctcgccgacgtttttcgaccatttggtgagagagctgtgtcatccggagagatgagcatacaatgatgtctgaccataagcctgatgactccaccgaagttttgagagtccccaacaatgcttttgtagcagcgattcgtttcaacatttttttgtttttcaaataccatttcgagagtgtaaataacttcaacggaattcaaaattgatgtacttaggtaggcctgagccctgtttatttttgatgtatatggtttgcatgtcaccaactgttgtgagcgatgattgattatttatcgtcttgttttatctgtctgtactcctttaatgcagcaccttcgtttgtcaaaaaaaaaaaaaaaaaaaaaaaaaaaaaactcgagggggggcccgtactac

SEQ ID NO: 7210 - DNA, 389 bp, Zea mays
  Clone ID: MRT4577_106571C.1
aaaaaaaaaaaaaaaaaaaaaaaaaaaaaaaaaaaaaaaaaaaaaaaaaaaaaaaaaaaaaacataaaccctctgccccgtaccggcctatgggctgctttttctcaattatccttcacactggctgccgcttgaatcttgcagtgtccagggcccactttttccttatagggattccattttacatatcacttggctttccattttacaacgttgtggaaatggaaaacccttgccgtcacccaacttattggccttgaaccctttcccttttctcctgttggcgtaataaggaaaaaggcctggcccctttccccttcctacacttcctaatcctaaagggaaatggcctctccctgcaattaaccttaaccgctgggggggtgctg

SEQ ID NO: 7211 - DNA, 1299 bp, Zea mays
  Clone ID: MRT4577_106572C.1
ttgggtacctcgaggccggccgggctcctcagcccgttctcttttcccccaccctatcaacacaatttacccttcgtcttcccgcttccagcgcacccccatcttgagtctcgccgccgcaagcttgtgtaaggtgtaaccctaaccctaaaacacttaccttcgcctccagcaccacacttccatggaggggcgcggaggctaagtatagccaacctctacaccatatccccatggattgagcggattcccaaggcatgggtacaaaccctcacctgcaagagctggccgcttcggcggtggcggcttctgaaccaccaccgcgggcgcgcgtggtgcggatcctagtgcacgatgctgacgccaccgattcgtcctccagcgaggatgaggcaccgccacttcttcctcggcggaggtcgaggggtggtagcagcagcctgagcgtgaggcgccgtgttatggaaccggctggggcaagctcggccgttcggttccgtggcgtccgtcgtaggccgtgggggcgctgggctgcggagatccgcgacccgcacaaccgccgcagactgtggctcggcaccttcgacaccgctgaggaggctgccaacgcctacgacgctgcgaacatccgctctcgcggccggagcggcactaccaacttccctgcggcccgctactcgccccctccaaagccagcgaagcctatcatctcgctgactcctgaacccggaaaggtgatcaccttgccaccggtacctgtgaagccaaccttccctgttcaggtgaaggaagtgggtgggagctggggcggcctggtcaagggagctaggtcggaggtcaaggcgtttgcaccgaagccagtatggaagatgatccccagggtgcaccagaagtttccgggttgtgccgatggctctggcctgcgtgccgtccatgctgcctccatctacgtggaggaggttggcggtggctgatggtccaagtatctgcaattactatcgctagaggttttattgtctatctccatggcatcattataacctggtactgtattattttggttagtgttaaactgttgatgtggaaacctatgactcttgctgtgttatgatcggtggtaatataatgtgtatatggtgacatttggtaatatgttcctgatctatgtgatgcaatgtgctgtgctttgattgtgggatcaaacctgtcatatagtagtacaatctagatcctttcacatgaacagtgatacctagatgtatttgatggttatttcagttgaattaaacaaaattgctc

SEQ ID NO: 7212 - DNA, 719 bp, Zea mays
  Clone ID: MRT4577_106573C.1
ttctcgctcttgacacataaagctatcgccgctaagaagcggactcccaggtaaggaggatggtacaggccgccgccgtgatgaagcggaatcctcgcgtgacgatatcccgctgtaattgtcgcagggcgcactttacggtcccggcctcagaacaccgcgctatcatgtccgccggcatgatcacggagctccgccacagtacaacgcgctttccatccctgattcgaaaagacgaccaggtgcaagctcagcgtctcacctacaacggccgtgagagcaactcgatgcactggtaccgccgccgctggggcatctacgtctagtgcatgccccgctagaagaggaacggatccacagtgcacgtgggaatccaactcgcatccaatgtgatctgcccctggttgaatgctcgacaaggcactgtacacagcgctctctcgaccgctaggtgcggtgccgcacagtctactaggctaaggtatagctcactgccgacgacaccactaccgacgccgctggtggttgcgacaccggagcctctctccaggacatcgactatactcttcacggtcatctgattgttgtcgtaccgccttttcctcatctctttaatttttgctaccaactgttatgtgatagaggtcttatgcgatttgaatactgctctgtgtctgaatgagagtcatgaaacataatgtcgacctgtgcgaatgaga

SEQ ID NO: 7213 - DNA, 327 bp, Zea mays
  unsure (1)..(327): unsure at all n locations
  Clone ID: MRT4577_106574C.1
cattttttttttttttttttgtttcaatcctgggggtatttgctctgcccaaaaccacacaaaattgggggggaaatacgggggggaaacaccctcttttttttttaaaaaaggggccccccgtggtttgttgggggggttcccccgcaattgaggaggaccattaaaagggccctcggcgggggaattattttgggaaaaaaacacctccttcttctattaaaaaaaagagggggggggattatttnaggggctggggcgcccgcctaccagatgaaaccccctgtttttatacacaaccaaaagggggggggttttttttggggg

SEQ ID NO: 7214 - DNA, 784 bp, Zea mays
  Clone ID: MRT4577_106575C.1
aacaaaacacgcaaatacgtgcatcgatcataaacctccttgttgaccgatagtggccggccggcaatggctagacctcgcgttagcatcttcctcacggcggtcgccatcgccgtctccatgcacgccgcgcctagcaccctccacgctgccccgttggagccggctatggagttcttccaggaatggtacacaaccttcaagaacacgttggaagaagacccagccgaggtgatcgggaagataaaggatgccgtggatatcgggcagaacctgcatgaagcccttgaatcaagatcatcagatggcggagcccgcggcacggctacggcaccgtcgacccagcagccgtacatcgccgccggcaacctgaggtttcatgtcgtcgctgtcgacatcaccaacaaggtcacatggaccaacatgtgcgacaggagcgtctccgcggcggccacgtgcaccacccaggcgccgtcgatgtacgccacggcggcgcgtctgccaaactgcggcgccgcgtccgccggtagtactactgcgcctatatgctgccgctacagtactagcgcagctctggttcagggcccagtgacattgtccgcggagcctaacggccggccattatatggcggttgcgcgctctacacgtgcaggatcgccgacggaggaggcgccacctcggcctcggcaggggcggcaccctcacgtccatactcggcggattctcctatttcttcgatagcaaccttcggacaaacctttggctgggccgcgacgccgacgc

SEQ ID NO: 7215 - DNA, 300 bp, Zea mays
  Clone ID: MRT4577_106576C.1
ctccggtcctcatcaatcactaagcaaaacacacttgcaagatggagctggtctcgaagacacatctccttgcggttctggtgtccgtgtcgtctggagctgtggtaatgtgacccgcgatccaattcaacgagcgggacatgtgcgtcagacgaggctctgtgggacgtgttcaagcggtggcaaacggactgacacgatgaaacagggtcacagttaaatgggcatgcggttcaggacgtacatggagatcattggcttgaacttggcgcaagagcaaactacgtcatgctggaactg

SEQ ID NO: 7216 - DNA, 233 bp, Zea mays
  Clone ID: MRT4577_106577C.1
acggcaagaaaccaccatcgttttttatctcttggaggcgcccaacggagttcacacccacggagggtaggaacttggcaaggcaaagaagccacgcaactgagtgcaagtcgaacaccacaaaaccctgccaaagtgtcaagtgttgcaacgcccaaacctccacggtgcggctcaacaagacagtctaataaatccctcacagttaatgaaatctggaaccggggaagacc

SEQ ID NO: 7217 - DNA, 316 bp, Zea mays
  Clone ID: MRT4577_106578C.1
gttgagaaagccccaaccaagcgcctatatttgggacgaagaccagttacagccactgagacctgatcccaggaatgggatctgcaccaacaggcgcataagagtggtgcctgcttgtacctggtactggccagaccatagttctaggacccggcgggggatcattctcatgatgtgtggaggaggtagtactccctggtgaggtctttcgccaccgacagcgggggtataatatgcatatgcctacccagtctctgaagggcgtgatttcgcgctgctatcagtgttggcagcttaaaatgagttgctggtcctc

SEQ ID NO: 7218 - DNA, 478 bp, Zea mays
  Clone ID: MRT4577_10657C.1
cgcggggggaccctgacctagaccacacgttgcagggaaagccggacctgaagcgatttctttgattgtacgggtggtgatgcatggcacagatcttagttggaggagcgatttgactggttccttccgttaacgaacgagacctcagcctgctaactagctatgcggagccatccctccgtagttagcttcttaaagggactatggccgtttaggccacggaaagcttgaggcactctcagggctgggatgcccttagatgttatgggccgaacgcgcgctacactgatgggtccaacgagtatatattcttgggccacatgcccccttaatggtgggaaaataaaattaacgggcccgggtttttacctggggcgcgaggaaactacgggggaattccgcaaatatccatctcactggcaaccccctcttcatgcatgtagaggacccaataaaggccttagcgagtcgcctttca

SEQ ID NO: 7219 - DNA, 290 bp, Zea mays
  Clone ID: MRT4577_106580C.1
atgggacacacgggcacatatgggacacacgggcacataaggaacatgcgtgcatgggacaaatttaaagtggggatacgagggaagcagcgtacatggaaataaataaagaccggatgaactcaaaaataaaccaaacagggcaaaaggacatgggccggcttctccgtgctccttctctcttctcaacacacacaccaaacacatggggcgacgtggcgcgggagaggggtttttatctcagtgagtagtacacggtgagcagtagtgagacatggcaagtgcgtgga

SEQ ID NO: 7220 - DNA, 370 bp, Zea mays
  unsure (1)..(370): unsure at all n locations
  Clone ID: MRT4577_106581C.1
aagggatgcaaggcttggcgatccactgattcagggcagatcagcgggttcgtgaattgagattatagcgtgggagattagaagggcaaccttttttgtataagacaagctgtaatggtttatttacttagatccggtaaccatgcctggttattccttgtnaaaaaaaaaaaaaaaaaaaaaaaaaaaaaaaaaaaaaaaaaaaaaaaaaaaaaaaaaaaaaaaaaaaaaataaaaaaaaaaataaagtatttatataaaaaattaagggtggtttttataagaaagaaaaaattagttttttttggttgtgtacaaaattaagtgtggggggcggttataaagggtacactatttgtcccccctttta

SEQ ID NO: 7221 - DNA, 713 bp, Zea mays
  Clone ID: MRT4577_106582C.1
ccggccgggacatgctctttagcaacccagccgtggtgaacgccaactggacgcgcgacaccgagggccacggcacccacacgctctccaccgccgccggtggctttgtgccccgtgccagtctcttcggctatgccactggcacagccaaaggcggcgcgccgcgtgcgcgcgtcgccgcttataaggtttgctggtcgggagagtgcgccgccgccgacgtccttgcgggcttcgagtccgccatccatgacggcgccgacgtcatttccgtctccttcggtcaggacgcgcccctcgccgatgacgtcaagtcactcttccacgagcctgccatgctcggctcgctccacgccgccatccacggtgtctccgtcatctgctccgccggcaactccggcccgtacgatgacaccgtcgtcaatgccgcgccatgggtcaccacagtcgccgccaccaccgtcgacagagacttccccaacgttctcaccctcggcaatagcgtgcgccttaggggaacgagcctcgagtctactacgctgcactccagcatgctctacccgatgatcgacgccgcgcgcgccgcgcgcaccacctctaacccgtacgacgcggccagctgcgggctcggcaccctcgaccctgctgccatcaggggcaagatcgtcgtgtgtcgccgcggcggcggaggcggaggcgacgtctcccgagtc

SEQ ID NO: 7222 - DNA, 303 bp, Zea mays
  Clone ID: MRT4577_106583C.1
gcaagattgaggatctttgcgcacacgacgacaaacagaccaaggggagggggcgagcaaatgaagcaagggcaaagacaaaaagaagcagaggccccacaaaaagacaagacaatcacatgcaaaaacagggaggcaacaacagtgcaaggagaccacaaacaggacaagaaaagaagggggccaacgagccgaggagaaagaaactaaagccgcacgggaaagcaaaaaccaggaagagaaggaaagagacatgaaagcaccaaggaaaagagagaacgagaaaaccaagagaaaccgcaa

SEQ ID NO: 7223 - DNA, 876 bp, Zea mays
  unsure (1)..(876): unsure at all n locations
  Clone ID: MRT4577_106584C.1
cattgggtacctcgggcccggccgggaatcccttgtcctgtcctcgaaccgtccgccgccgcgttcaacatgggcgacccgccgacgctcaagaggcccaagctcgagaaggccgacgacgactccacctactgcccccgcccggcctccaatggcgccgcgcccgtacgcacaccaggcgccaccgccgccacaggtgcggcgccgggtgacgacgtggaggaggatgacatcgcggaggaggcggtcatcgccctgatcgcgcaccgcgagcgcgacgtcgagcgctgcaagctcaagttgctccactaccagtctctcctggacaccgcggagatgaagctggaggaggcgcactcgaggctcgccaggttccgagatcgcaagccgccgccaactcggtcggaacccaagccaccgacgccgccaatccagagggaacacaagccatccccgccgccgatccagagggatctcaagccatcgccgcagccgctaatccagaaggctccttcgcccgcgccgcagccgtcggcgaggccgcagcttgtcatccctgggaccagcaaccgaccgaccccgcgccctgagcccatgcctgggttgaagagggccgccgccccgtcatcatcttcatcaccggcgccaccagagcggtcaaggaaagaggagaagaagcccaagataaagatggaacagaaggggcatcagaacttgattccgagtgttgggaaatcatctgcgactgtgcttagatttcaaggcggaaatttggtctcgagccaacacaggaggaagcttaggtgtcttgagctatgccctgctaatgatcagcttgttgntacagtgcgctggacggattggtactttatggca

SEQ ID NO: 7224 - DNA, 589 bp, Zea mays
  Clone ID: MRT4577_106586C.1
ggcgcctcaggggcaggtctatctcgcccacgtccacgtccacgaccatcagcttggccaccggcccgagcccaacagcaggcgccggctccagctccggggagagggacagggacagcgacgccaacatctccgacccggagaagctggccgtggaggcgcccccgcccccgcccccgccagccctggtttactccgcggtcgggaccaagctggtgggcgccgcgatggagtgtgccatctgcctggccgagttcgcagacggggacaccgtgcgcgtcatgccggtctgcggtcacggcttccacgcgcgatgcatcgagctctggctcgcggggggacgccgctcctcctgcccgacgtgccgcgcaccggacggagctgccgcggccacgccatcgtcgtcgtgaataatggctcgatttggccatggtcagttgcgacgatgttcactgttcttggcacaggcgcacagctagcatgtgtcggttcggcgttccttcattttcagattgcgtgctgcagaggatccttctatatattctaatatactgtgtccatatatcccgcaacaaactaaatagcggcc

SEQ ID NO: 7225 - DNA, 822 bp, Zea mays
  Clone ID: MRT4577_106588C.1
aattcggcacgaggcagtagtagcctggcggccatggcgatggcgcctcaggggcaggccgagcacggccaagtccacgtccacgaccatcagcttggccaccggcccgagcccaacagcaggcaccccgaccccggcgcggccgccacgagcagcatcgccaccaaccggtgggggccctactccggcgccggcgattttgccagcaacatggccgtcatcctggccgccctgctgaccgcgctggcgctcgccctggcgctcaacgccgccgtgcgctacctcctcagtcgcagccgccgagctcggcgcggtcgcgccggctccagctccggggagagggacagggacagcgacgccaacatctccgacccggagaagctggccgtggaggcgcccccgcccccgcccccgcccccgccagccctggtttactccgcggccgggaccaagctggcgggcgccgcggcggagtgtgccatctgcctggccgagttcgcagacggggacaccgtgcgcgtcatgccggtctgcggccccggcttccacgcgcgatgcatcgagctctggctcgcggggggacgccgctcctcctgcccgacgtgccgcgcaccggccggagctgccgcggccacgccatcgtcgtcgtgaataatggctcggtttggccatggccagttgcgacgatgttcactgttcttggcacaggcgcacagctagcatgtgtcggttcggtgttccttcattttcagtttgcgtgttgtagtggatcattctatatattctaaaataatgtgtcaatatatctatatactcttgttt

SEQ ID NO: 7226 - DNA, 551 bp, Zea mays
  Clone ID: MRT4577_106589C.1
tatkaaawacatctgctgtaaatttatttsccccccattgaarrggtatmacaakgatacaagscttccaagtcsmwtgtmcatcacagctaacacattctcagattsaacargctactatatgcmccatgtaarctttkactccgatcacctctcthwtatmccatctccgtgaaacgagtccctcctggtaggctatmvaaattcttctacrcctmaggcctgatctacatgtagaraggsaggcacaaaactttcctwtggggmacaaagatggaagtgttgattmatacccgctggggaaaaratgggtttsatgtactctctcgcagtcggcaacctttacatactacmcccgctgamgcgtagttgctgatccgttgatccactcttgctcagctccggaccaactgttcctggctactgtttccattsaccaggaccgcvccctsacttgcaccctcagcctcaacstcgacagcttcgtcttgactttctatctacyccgtcatcttctgcmtcgacctccactgcatmttcttgastytctc

SEQ ID NO: 7227 - DNA, 403 bp, Zea mays
  Clone ID: MRT4577_10658C.1
aattcctctggtctatctcactcttcctctgactctttttcttactcttgggaaaaaaaaaaaaatataaaaaaaaaaaaaaataaaaaagaaattggaaaaaaaaaaaaaaatataaaaaaataaaataataaaaaaaatataaaaaataatataataaaaaaatataaaaatatatatttaaataacaataaaaaaatttaataacatgtatacaagactatgtatctaaaattagaattattttctgtagaacatatgacatttgattaacttaaacttaaaaatcgcattgatgaaactgtttcaatgattgaagcatacctttaagcctataaaataattgtgtactacaattagcattcaactgaaagaatatactcatatttagctgaaccttgat

SEQ ID NO: 7228 - DNA, 234 bp, Zea mays
  unsure (1)..(234): unsure at all n locations
  Clone ID: MRT4577_106590C.1
ccatttctttgtatgcgtcggtgtgcctgtggtgtgcagtggggctgtcatggtgtacacagaccaccatcagactgaacgtcttgcctgctcttcagtacgtccactattcatggttctagtatattcttaatccaacgtctgccactgaatatataattacacagctcgttttgtagaacctattattattgagctgggggggggggggggatctanctacctatttcaact

SEQ ID NO: 7229 - DNA, 322 bp, Zea mays
  Clone ID: MRT4577_106591C.1
gggagctgttagagtaagaaaaattattattctttactaatatctgttttgagttagattctagtaaaaaaaactgaacggagtattcaaagggaactacgaattttgtgccccatctggcgatggaaaattcgccattgaaatccctggtggcagagcccgagcagcgaccgccgaggttgagacttgagagacctatgaaaccgcgaggcgccgcacacaaaccaacccccgggttccgagaatatgcgaaaacaggcgtgggggcgcggggcggtggcgcgcttgatgacgccattcaatcgccgcgcggtccacgcct

SEQ ID NO: 7230 - DNA, 417 bp, Zea mays
  Clone ID: MRT4577_106592C.1
gacccgcttataacctttaaaaacctttaaaaaatttttaaaattaataatggtgcccataactttgggccaatattttcaggttgtattatgctttccccgggtttgactgaaaatggtaatgccattttttggggaaaattgggtaaataaaaatgaccaggccttccaagttcaaactttgccctacctacctgaaaaaagccaattgccacaagattttgcagttctgcatggccactgctgacaccacttttgcccaatttagggctaccccttgggggattgaggggaaaattatctgacaacctaaagggaggggactctctgggccttctctagagcttccttgatcttccgaggagggttttcgaaaggtattcctggatcattaaactgttctgcaaggctgggccg

SEQ ID NO: 7231 - DNA, 291 bp, Zea mays
  Clone ID: MRT4577_106593C.1
cgaaacacacggacacccaagccgcctcccgccgcgacgcacgaaggatcgcgcgcagcagcacctcgtcggacacccggccttgctcatcatcaccgacctcactcacatcttcgcgccgccgacaccccatcaccgccacccccatcaccaccctcctcaccaccaacatccgcatccggcgcatcgtccccactcgcctcatccgcatccgcacacggcgcatcatccccacccgcactcggcgcaccacctacagcaccccgacccctgcacggcagtcatacagga

SEQ ID NO: 7232 - DNA, 337 bp, Zea mays
  Clone ID: MRT4577_106594C.1
cacccgccgtagccaattgcttcgcatcaaccgccaggcacaccacctcgattcagactagcgactatgataggagaaagaatcgatcctgggggaggaagcctcaccggaaatcatcgcatggagccccctggccacggcgaatggcgaccctgcagcgtcggcggggaaagtccaacagtgccccagatcccctccatagatccgatgccaccacgagactgcgcatgctctggtaaagcctccgtgctacctccggggactggaacatcggtctaggtccaggtcgtcgacggcggtgagctccatccttacttctgcgtgttgacctggtaca

SEQ ID NO: 7233 - DNA, 336 bp, Zea mays
  Clone ID: MRT4577_106595C.1
tttcaattgggaggaagcacttataaggagggttcgttttaaaactgagaacatcatatggtccttgtagtctcacagttgggcgctatcggctcagacctgtccttgatgttgcgtcttgcgttaaatgtaattgcagtagtgtatgttaacattctttaaaccatagctggactacaacgactggtgatggtgctccaatgctattacagcacgtacttatgtatggtaaaaggtgaaaataagttgtgtttgtatcatttttccatgtaaactcgactatgggattgcaacatggattgtttgttgattgattaccggttcattgcctaaaac

SEQ ID NO: 7234 - DNA, 339 bp, Zea mays
  unsure (1)..(339): unsure at all n locations
  Clone ID: MRT4577_106596C.1
cccctctgccattttttggggggttctattcttgattggcgggcttcacgggtatataggtcttaaaaggaaaaacgttcaaaacaaattcccgggggggggggggggttccctcccggtagacctattctacccacattttatgtatcattacattggggagcaatccacccctaacccggtttgctaagctggggcccctgaaccctatctgcaaaatatgggcgcccctgaagggggtttacttttcttcttccttganccggctccctccctccccggggcctggccgctggtcttgcttcgtggccttcctttccgggctgtttggtggggggg

SEQ ID NO: 7235 - DNA, 339 bp, Zea mays
  unsure (1)..(339): unsure at all n locations
  Clone ID: MRT4577_106597C.1
tnttttttttttttcttttttttttttttttggggtttttttagtttaggccgcggactaaaacgcattattagatatcgaaagggcaaggatacaagaggcatattttacgtcatctaacaaaaaacataacccgtgcctttaatttgcaaaagtttaattcacaaaaataaaaaacaaaacggacccaattcaaaaaaaacaagagcccgggtataaaaaactttctaaaacaggggttaaagaaaaaaaaaagtatgcactcttataaacaaaattgaatgtccgtggccatcaaaatcaccaactggtggaacccaaattatcagttgcggaggc

SEQ ID NO: 7236 - DNA, 677 bp, Zea mays
  Clone ID: MRT4577_106598C.1
attggacgcatcttcatatccaccgctccggagcacctcgtgcgactccatcggcaccgcctctcctaccttcggaacaactgagcttccactggtgccaacgaacaatgcacatatggaagaagctcaccgccgaagatcatctagatgctgctgctgtcctccgaaggccgcaatcatcgacactgctctcgccgtcttcctttatattcgagggcgaactccatcacccgcagatgcacgctcacgtagtctcatcgttcgtccgagtctcacccacggcttatatatcagccacctctctcgctgtcacacataacacacgtagaggatctgggtttctggaatcacatttcttgagaactatctggaggagaatcgatagtagtgttcttgctcatactatggatcagaaatgtaagattgatgctgattttcttgactcaactgcactcttagatgatacacattagctatagtactacaaaaatggctataatgatgaatcgcatctggaaagggataggataggcagcatggattaaagatgggggttaccaggtcgatgaataactggctcctttcaagcctgtctggatgtgaggacgtctgcaattctcattgatgcagatgcctgcacagctcctgacaagaagaatatctagcaactggatgca

SEQ ID NO: 7237 - DNA, 298 bp, Zea mays
  Clone ID: MRT4577_106599C.1
ccaccgcggcgctgcggtcgccggcggtggttggcagcgcgctgggccgcgccgcggccagggccacggcgtaccgtcacttgtgcacaagcgagaccgccgacgaggccgcggccgtcgagcgccgcctatggcgcgggggcatgggcgggatcctcgactacgggatcgaggacgcggaggacggacacacctgagaccgcaacgccgtcaggttcgcctccgccgtggattcatccggattgcttactacaggcttggctagcgtgagcattaagatcacgtgtgctctatacta

SEQ ID NO: 7238 - DNA, 962 bp, Zea mays
  Clone ID: MRT4577_10659C.1
cattgggtacctcgaggccggccgttccgcctctatatcttcttcttgtcctccgcctccatttcgcgttcccttcgttgcgtcttgaaagggggagagagagagagagagagagaagagagagagaagagagagagagagagaggagtgggagacccgcgagaggctgccgtgtagggaccaccgtagactcagcgtctcagcgactgcgaaggagggataaggggatggccgggatcggaccgatcaggcaggactgggagccggtcgttgtgcggaagaaggcacccaccgccgccgccaagaaggatgagaaggccgtcaacgccgcgcgccgcgccggtgcggagatcgataccatgaagaagtacaacgctggtacgaacaaggcggcatccagcggtacatccctcaacaccaagcgcctcgacgacgacaccgaaaacctcgcccatgagcgagttccaagtgatctgaagaagaatctcatgcaagcaaggctcgataagaagctgacacaggcacaacttgctcagatgataaatgagaagccacaggtgattcaggagtatgaatcaggcaaggcaatccccaaccagcagatcattagcaagctcgagagggccctgggaaccaagttgcgtggcaagaaatagctttcctacgagtttgtgtcccggagcatcataatagggggaagacaaggcaagctgtctgcttatttgtctatgtttggtatctcaagtcctgcggactgtctctgttggcacaagagggaataaatgtgttcacggacctgtaatgcttgctccttgtcatatgaccttgctctaaacatttgtgatgaagctgtcaaggtaatatattttctctaaatatttagcctaaaaaaaaaaaaaaaaaaaaaaaaaaaaaaaaaaaaaaaaaaaaaaaaaaggaaaaaaaaaaaaaaaaaagcggcc

SEQ ID NO: 7239 - DNA, 228 bp, Zea mays
  Clone ID: MRT4577_1065C.1
cggtccgagatttccgggctcccgctcagcagcgcgtccacagatcacgaataatgttgcatgaccggcggtagtccaagcctcgcaaccgcggtcatccctatgtcagagagactgccggtgagctaggacctcggtgcacgcccactctacacgctcgaagcatccgccctgggtctggggagtgtcctgctggtcacgccacggcgaggctccgagtgcctgaca

SEQ ID NO: 7240 - DNA, 359 bp, Zea mays
  unsure (1)..(359): unsure at all n locations
  Clone ID: MRT4577_106600C.1
tgaagatgnngtcatcgtnntcttcgtcgtggtggcctnggggctctgtacagctttgccanngcgcctnnctgcaatgggcagatgccctnngcccctgcgcggnnggctgcaggtgcttgtaccggctngctggcgccggccctgaccgaccgatgatgggctngccggcgggctgtaccccctacgcgtgagtaccctgagggcagccgcagtgcagtcccgctggtcggcgggcgctcctactacgccggggtgtgggcagaccgagcgccatgtacctagccgctccggcaacagtgctgccagcagcagatgaggatgatggacgtgcagtccgtcgcgcagcagctgcagat

SEQ ID NO: 7241 - DNA, 210 bp, Zea mays
  Clone ID: MRT4577_106601C.1
cccactcttactcccactcttccttccactctttctaatctatatctctttctgccattcactatccatactggttccttttaaatctaatgcgacctaccctttcaactctaactccctaacatattttacaacatatcactattataatctcatttacactacctttaattctaacttataatccatcattcataatttttaacacct

SEQ ID NO: 7242 - DNA, 275 bp, Zea mays
  Clone ID: MRT4577_106602C.1
gccgaaaccaacactccatctgcacaacaccacctctcttctccaagatcaccaagaagcttcttttctaaggactgcaagggtatacaccagcaagacaaggtaggaattttctcttgccctaaatcttctagttctccaatttttcccctgaatgaaattaggaaacctgaagcaatatcagtgcttcagttagatgtggctattcatgcattctttttgctattcctcgacttgttgagtacctttgtactcattccgttttgtatccctct

SEQ ID NO: 7243 - DNA, 426 bp, Zea mays
  Clone ID: MRT4577_106603C.1
atagaagaatgtgcacatccttagaatgtcaacagtcgtaccaatatcttgtcggttactccagaagcacaggcatctctactacaatcatctcgaacctaccgaaccactcacaaaactaccagaacaaactttcatatgctagagtgtaaaaataattaaatggatggaggtaaagcatataaacttgccacctcataatatccccctccttttttcgccttgatcaaccaagcattaaatcttttagccttttgaggccattctgcgaccaaggatcagcccaaacccacagcccttttttgcgcatctccagtataggaaagaatgatgcaccactatgatacagacggtaagaattgtgtccccctatggtacagatcaaaactcctgaggtatctgaatggcagttttcacaggggatgg

SEQ ID NO: 7244 - DNA, 665 bp, Zea mays
  Clone ID: MRT4577_106604C.1
ccggccgggatctctcctccaagtgatcttcttccacctttgccgatcgcccgttgccaccggccgggcgatcctcgtacttccacttccaccatggcctcctcctcctcctcctcctcgtcctccagcttcctccttgggcggcaccatgaggagcatgacgaatgaaggcctatcgtatctcaagaagaggatcaaagagatcgtcgaaggacaggcagcggtgcaccactgcagtgccagcgtggacttcatggaggaaacgatgaagccgtacccggccgtggtcaacgacgaagggatgtacgctcacgccaaggaggtggccgagggcctccttggggagaagaacgtcagggtgggtccccaggtgatgggcgcggaggacttcggcttctacgcgcagaggatggcgggcgccttcttcaccatcggggtcggcaacgagagcaccatggcgaccatccattccacccactcgcctcacttcgtcgtcgacgaggacgtgcttcccgtcggagctgcgttccatgccgctgtggcgattgaatatgtcaggaagaaacgtgcgtcgacctaaacgctaaactcaaataaatcagacggaacaaaacggcagtagtttgtcttaagtgtcactatatataatggcgagtattcacatc

SEQ ID NO: 7245 - DNA, 330 bp, Zea mays
  Clone ID: MRT4577_106605C.1
aagaaaacaatgctaaccgtatagagtctaatacaaaatcattataagttagtttgcggagataataaaaaaggtttgcacacctgaaggatataaagtaaatgatattgatagcatcgatgtcattgatactcttcaatgtttccaacttccaagtgaaaggattacattttgaatttttgtattcgctatagctcagatcaaatttcacacatatctcctcttcctcagttaccgctgaaccaaatacctataatcttctatgtccaacttggtttacagatgtacattttgtccatcataaaagctaaatggagccaggttctttaa

SEQ ID NO: 7246 - DNA, 834 bp, Zea mays
  Clone ID: MRT4577_106606C.1
ccggccggggaaatggcaggagctctgctcgatgactcggcccctctcgaaagcccgaaaatcgctgggccgttcgattcactcacctcactccacctcttgactgaagaagccgtctgcctgcctgcgactcccgcgtctctcctccaagtgatctccttccacctttgccgatcgcccgttgccaccggccgggcgatcctcgtacttccacttccaccatggcctcctcctcctcttcctcctcctcctcctcctcctcctcctcctcctcctcccgcttcctcctcccgctgctactgctctgttcgcacctctccctcgcctcggcagaggaggcggcgtcggcggcagcggacctcctcagcgaggcgcgcgcgccggggttcgccgcgtggctgcgcggcgtgcggcggcgcatccaccagcgccccgagctggccttccaggagttccgcaccagcgagctcgtgcgggccgagctcgacgcgatcggcgtcccgtaccggtggcccgtcgcccagaccggcgtcgtggccaccatcgcgggcgccgccgccggccccgtcgtcgcgctccgggccgacatggacgcgctccccgtgcaggagctggtggactgggagcacaagagccaggagagtgggaaaatgcacgcttgcggacacgacgtgcacacgacaatgcttctgggggctgccagaatactccaggatcgccagagcgacctaatgggcactgagacgcaataatcccatccggtcggggagggccagtctagagcgtactaggtgccatgcatatgcgtacgacgacacgagtaagccatattcg

SEQ ID NO: 7247 - DNA, 459 bp, Zea mays
  Clone ID: MRT4577_106607C.1
tgcagccggagtgcagcaacatgcctcggtcgatgcttcttgctcacgttatgaccatgccagacaccaggacaagcgacgactggcgctcgcatgacgcagccatggtctgtagcgattgctgcactcactgagacgttcttaacaagctatattgaccggccaagcgacatcgcggagctcgtccttcgaacgacaccattcttatgtacagaaatcctacttacacaaaccattggtgagtgcattgttactagagtatgcagcaaatgctacttattaaacattataaagcgaggaatacttactcacacttattgtttaacactctcacacttgttgtataattgtgtggactgccgatctactcggtcgcgggcgatagggtattcttcgactgttgttgctgggactacttactccggcttgctcagacacgcccaagggactagtccctgc

SEQ ID NO: 7248 - DNA, 1640 bp, Zea mays
  Clone ID: MRT4577_106608C.1
ggaaaggcaggtagctcgatgactcggcccctctcgaaagctacgaaaatcgctgggccggtcgattcactcacctcactccacctcttgactgaagaagccgtccgcctgcctccgactcccgcatctctcctccaagtgatcttcttccacctttgccgatcgcccgttgccaccggccgggcgatcctcgtacttccacttccaccatggcctcctcctcctcctcctcctcgtcctccagcttcctcctaccgctgctactgctctgctcgcacctctccctcgcctcggcagaggaggcggcgtcggcggcggcggacctcctcagcgaggcgcgcgcgccggggttcgccgcgtggctgcgcggcgtgcggcgccgcatccaccagcgccccgagctggccttccaggagttccgcaccagcgagctcgtgcgggccgagctcgacgcgatcggcgtcccgtaccggtggcccgtcgcccagaccggcgtcgtggccaccatcgcgggcgccgccgccggccccgtcgtcgcgctccgggccgacatggacgcgctccccgtgcaggagctggtggactgggaacacaagagccaggagagtgggaaaatgcacgcttgcggacacgacgtgcacacgacaatgcttctgggggctgccagaatactccaggatcgcaagagcgacctaatgggcaccgtgaagcttgtattccagccggcagaggagggccagggcggcgcgtactacgtgctgcaagaaggcgtccttgacgacgcgtcagccatattcggcttgcacgttgacccggccctccccgtcggcgtcgtttcgtccaggccagggcccttcgcggcgacgtccggtcggttcctggcgacggtcaccggtaaaggcgggcacgccgcgatgccccacgaatccatcgaccctgttgtagctgcagccactactgtcgtcagcctccagaagatcatctcccgggaaatcgatcccctgcagggcgcggttgtgtccgtcacttttctgaagggaggagaagcgtacaatgtcatcccagagaatgtggcctttggcggcaccatgaggagcatgacgaatgaaggtctatcgtatctcaagaagaggatcaaagagatcgtcgaaggacaggcagcggtgcaccactgcagtgccagcgtggacttcatggaggacacgatgaagccgtacccggccgtggtcaacgacgaagggatgtacgctcacgccaaggaggtggccgagggcctccttggggagaagaacgtcagggtgggtccccaggtgatgggcgcggaggacttcgggttctacgcgcagaggatggcgggcgccttcttcaccatcggggtcggcaacgcgagcaccatggcgaccatccattccacccactcgcctcacttcgtcgtcgacgaggacgtgcttcccgtcggagctgcgttccatgctgctgtggcgattgaatatgtcaggaagaaccgtgcgtcgacctaaacgctaaactcaaataaatcagacggaacaaaacggcagtagtttgtcttaggtgtcactatatataatgcgagtatttacatctaacggcaaaaaaaaaaaaaaaaaaaaactatatat

SEQ ID NO: 7249 - DNA, 1114 bp, Zea mays
  Clone ID: MRT4577_106609C.1
aaaaaaaaaacaaagaaaacagcgaggaccaagaggacgcaaagcacaaaaaggacacactaaaggaaaagcgggacagccagcagggacaggacaggatgaccccctcgagcatccggctctccgccgccgctatggccgctcgccgcccgcgcgggccttcaatacttcatccaagctccattttctctgaggaagcgaaccttccctttccccaggcacagatccggctctccgccgccgctatggccgctcgccgcctcctcctgctcctcgccgttgtcgccgcgtccctcctggctgccgacgcgcggccgtgccacggcttcctcgtcgccatcccgtccgatcccaaccccgaccccagcagaggcgacggcgccgtcaaccgccacctcggcgctccccacgtcgccacggtcatcaccgtcttccgcgtccgccgcctcggtccacacgtcccccacggccaccgcaaccaccaccacctccattctatccccgccaacgttcagatccatcgccccgatctcctgcaccccgccacggccgcggccgccgggccccaggagcgcgtcagggacatactcgtggtggtcgtggggctcctcttcggcctcgcctgcggcgcgctcaccgctgcctccgtgtacctcgtctggtccatggtcgccggcgccgccgcggcttccccgtacgacgagctctatgaggacgaggacgagtcgtctgacaccgagagccccaagaaggtcggatacgtcatcatccaggagctcgaggtgcatgaaggcggtaagaagtaggcccagatctagtggcgttcgtgctcccggctcccgggtgctagggcaagttcctgtagtgggatgacctattgccatatgattatgtgttgagtgaatcttaatgtctgtatgactatgtagtgggtggctgggacttgggagccttagggttttgccctccatgtgaatatatgatcgtgaagcacgcttaagctacgaaatgtgtttgtttctgatgaacttatcaatcaatttcatgcgccattgtgaaatgttcttctcaaaaaaaaaaaaaaaaaaaaaaaaaaaaaaaaaaaaaaaaaact

SEQ ID NO: 7250 - DNA, 936 bp, Zea mays
  Clone ID: MRT4577_10660C.1
atcttcttcttgtcctccgcctccatgtcgcgttcccttcgttgcgtcttgaaaggggagagagagagagagaagagagagagaagagagagagagagagaggagtgggagacccgcgagaggctgccgtgtagggaccaccgtagactcagcgactgcgaaggagggataaggggatggccgggatcggaccgatcaggcaggactgggagccggtcgttgtgcggaagaaggcacccaccgccgccgccaagaaggatgagaaggccgtcaacgccgcgcgccgcgccggtgcggagatcgataccatgaagaagtacaacgctggtacgaacaaggcggcatccagcggtacatccctcaacaccaagcgcctcgacgacgacaccgaaaacctcgcccatgagcgagttccaagtgatctgaagaagaatctcatgcaagcaaggctcgataagaagctgacacaggcacaacttgctcagatgataaatgagaagccacaggtgattcaggagtatgaatcaggcaaggcaatccccaaccagcagatcattagcaagctcgagagggccctgggaaccaagttgcgtggcaagaaatagctttcctacgagtttgtgtcccggagcatcataatagggggaagacaaggcaagctgtctgcttatttgtctatgtttggtatctcaagtcctgcggactgtttctgttggcacaagagggaataaatgtgttcacggacctgtaatgcttgctccttgtcatatgaccttgctctaaacatttgtgatgaagctgtcaactgaattctgtcaggtaatatatttgctctaaatatttagcctatattgcgatgtcagtaaccacatcaatgttagcgagcgtgtgacgcatagcagttatagaaccaaaaaaaaaaaaaaaaaagcggcc

SEQ ID NO: 7251 - DNA, 953 bp, Zea mays
  Clone ID: MRT4577_106610C.1
tcgaggggccggccgggaaaaaaaataaaaaaaaaaaaaaaacatcatcaatcaggcaagcgacggtggcttcttcctcccccttcaccgtaccgagacccaaaccaagccgcctcgccagcacccagcagcccgcatcactcgtctccattaaaatcggttttctccttggaaatctgctgccaaatcgggctatagatcaaacgctgcactgtagggagcgtgaagccagcggcgaatggaatccctagccgccacctccgtgttcgcgccctcccgcgtcgccgtcccggcggcgcgggccctggttagggcggggacggtggtaccaaccaggcggacgagcagccggagcggaaccagcggggtgaaatgctctgctgccgtgacgccgcaggcgagcccagtgattagcaggagcgctgcggcggcgaaggcggcggaggaggacaagaggcggttcttcgaggcggcggcgcgggggagcgggaaggggaacctggtgcccatgtgggagtgcatcgtgtcggaccatctcacccccgtgctcgcctaccgctgcctcgtccccgaggacaacgtcgacgcccccagcttcctcttcgagtccgtcgagcaggggccccagggcaccaccaacgtcggccgctacagcatggtgggagcccacccagtgatggagattgtggccaaagaccacaaggttacgatcatggaccacgagaagagccaagtgacagagcaggtagtggacgacccgatgcagatcccgaggaccatgatggagggatggcacccacagcagatcgacgagctccctgaatccttctccggtgagcagcctcgattgctgagaaggagagaagatttgatgttgccgatgatgttatgtgaatagtcacttttggtcttcgttctgataggggggatggggttgggttcttttctatgat

SEQ ID NO: 7252 - DNA, 400 bp, Zea mays
  Clone ID: MRT4577_106611C.1
cccactcgtccggacacgcgttcgtagatcgcgagcggctggcctttttgtgttttttttgaacatgataatctggagatcattctgagttatcaataaattttgctttgttcaaaaagggagatatgccataggagaccgcacaatgaaattatgcacgacagtataaccgacatgatcaggactgaaccaactggcaactgaatcattggttgatgcatattttaccacttggtaatgataacgtaggctctaagctggctctctattcgtgcaactctactattgcaggtacacgaacactatagcgtggcaacctaatcttacagtgtgcatgcgacaagtcggctctatctaacataacagcgcacatgatgactgcgacacatttattgactca

SEQ ID NO: 7253 - DNA, 289 bp, Zea mays
  Clone ID: MRT4577_106612C.1
agaaaaaaagggggccttgggcaggatcccaaatttatgcgcctgtgttaatgggtagttcccaaaaacaggaccagggaacccggtcccaaaatcaactgaggactttatatgtcatggcccgacttttttaaaaactcctgaacaacagaaactttttgaggtccttgctttctgggcacgtgcaaaaaaaacgggcgagtgggtcttggtggggggtttaaacttttgttgcctttggggaggtctcgggcgtttatagggggagtttttgtggcttgtttggctt

SEQ ID NO: 7254 - DNA, 1000 bp, Zea mays
  Clone ID: MRT4577_106613C.1
gccggtcaagaaaggaaagccactccgatttgttccgccaccactagtgatggcccatcaccgccgccgcctcctccactctccctccatccatttaccaccccaccccgccgccgccctcctcttctctcccctgagcctgactgaaaccttcccgagagaggatacaaaggcacccggatcgaggaaaccaatccattccattccacacaaggctaggcacaagcgaaccaaagccgccatgatccgcaccaagggggaggccggcacgggcaacgtcgtcgaggccgtgcgccacgtgcgctccgtcatgggcgacgtccgcgcgctccgcagcatggacgacgacgaggtcttcgcctacgccaagcgcatcgccgcgccctacgacctcgtcatgcagaccaagcagctgggccgcctccccgtcgtgcagttcgccgcggggggtgtcgccacgcccgccgacgccgcgctcatgatgcagctcggatgcgacggcgtcttcgtcggctcgggcatcttcaagagcggcgaccccgcgcgccgcgcccgcgccatcgtccaggcagtcacccactacagcgaccccaccatcctggccgacgtcagcacggggctcggggaggccatggtcggcatcaacctcaacgaccccaaggtggaacgatacgccgccagatccgagtgaaccctttctttccgtagtcatctccatccatctgccttggattgcatttccgtcgtctcatgtcttctcaatcagtaataagtggaatgaagtgaaattggtaagaaacaaagctatggtactatgcagaacctctttaattttgtgctacttgtacttaagttagcctagtcccccccacccttggattagtcagtgtactcaaagtgttggagggattgtaggtctgtcactgagccagaccttattgcttggaacgaggaatcaatcctctttctcgaggacaaaaaaaaaaaaaaaaaagcggcc

SEQ ID NO: 7255 - DNA, 526 bp, Zea mays
  Clone ID: MRT4577_106614C.1
gggcccagccaaaacaaaacaggggggccttccggggttccccatgacataacatttccaaatctggcacgggcaacataaccttttccaaaaaaaaaaaaaagaaaaaaagaaaaagagagaaagagagagtaaaaaaaaaagccccatgggggaatcaaccaaagcagcaaacccccatcggagcaaaggggaatctcaactcaaaaaacccaggaggccgggcaaccaaacaaaggggaaacccgtccaagggaagggggggtaaagcagcaaaacccttggttatgctcaagctcactcacccaaaaattttttttggctaccccccccggggacataagccatggcgggagagggccctgacccaatgcccctccctcgccggggccccaaaagaaagaaagcttaaaaggaaccccggcctccgccgcaaaatttaagccccgccttcccccttagggaaacacccaattcttccggttaaaaaaaggggcccccccgagaaacaaaccccccccccccc

SEQ ID NO: 7256 - DNA, 1303 bp, Zea mays
  unsure (1)..(1303): unsure at all n locations
  Clone ID: MRT4577_106615C.1
cattgggacctcgagccggccgggaaaaaattccaaaaaaaaaaaaaaaaaaaacctgagcctgactggaaccttcccgagagaggatacaaaggcacccggatcgaggaaaccaatccattccattccattccattccacacaaggctaggcacaagcgaaccaaacccatggcgtccgacggcagcggcgtggtgacggtgtacggcagcaacggcgcggagctgctggagccgtccaagcagcccaagtcggcgactttctccgtcaaggtggggctggcgcagatgctccggggcggggtcatcatggacgtggtgaccccggagcaggcgcggctcgcggaggaggccggcgcgtgcgccgtgatggcgctggagcgggtccccgccgacatccgcgcgcagggcggcgtggcgcgcatgtcggacccggggctcatccgcgacatcaagcgcgccgtcaccatcccggtcatggccaaggcccgcatcgggcacttcgtggaggcccagatcctggaggccctgggcgtcgactacgtggacgagagcgaggtgctgacccccgccgacgacgcgcaccacatcaacaagcacaacttccgcgtccccttcgtctgcggctgccgcgacctcggcgaggcgctccgcagggtgcgcgagggcgccgccatgatccgcaccaagggggaggccggcacgggcaacgtcgtcgaggccgtgcgccacgtgcgctccgtcatgggcgacgtccgcgcgctccgcagcatggacgacgacgaggtcttcgcctacgccaagcgcatcgccgcgccctacgacctcgtcatgcagaccaagcagctgtcgccacgcccgccgacgccgcgctcatgatgcagctcggatgcgacggcgtcttcgtcggctcgggcatcttcaagagcggcgaccccgcgcgccgcgcccgcgccatcgtccaggcagtcacccactacagcgaccccaccatcctggccgacgtcagcacggggctcggggaggccatggtcggcatcaacctcaacgaccccaaggtggaacgatacgccgccagatccgagtgaaccctttctttccgtagtcatctccatccatctgccttggattgcatttccgtcgtctcatgtctctcaatcagtaataatggaatgaatgaaatggtaagaaacaaagctatggtactatgcagaacctctttcattttgtgctactgtactaagttagcctagtcccccccaccctggattatcatgtntggatggattgtatgtctgtcactg

SEQ ID NO: 7257 - DNA, 1525 bp, Zea mays
  Clone ID: MRT4577_106616C.1
cctcgaggccggccgggacagtggtacagacgcacagtctcgcactctcgctcagagtcagatcacgcccctcccctccatttctctcctccctataaagcggcgtcccgaggcaagaatccagccggcactacccccagccgggccagcccccccaagccaagcagaatcctcgccccgcaatgcagcacctggccgccgtgctcctcgtcctggcggctaccaccgcgctgccgcccggcgcggcggcgtggcgcccgtggccgccgcgcgacaacgcgacggctgcggcgggccttggcgcgtccaagaggctggagggctcgtcggagttcgtgaagctggagtaccacatgggcccggtcctggcgtcggccatcacggtgcacccgatctggtacgggccctggccggcggcgcagaagcgcacgatccgcgcgttcctccgctccctgtcgccttctgccgccatcccttcgccgtccgtgtcggcgtggtggcgcacggtgcggctgtacgcggaccagacctcggccaacgtgtcggcgtcggtgtcgctgggcgcggagaagtcggacgcgcgcatgtcccgcggcgcgcggctgtcgcgcatggacatccaggcagtggtccgcgacgccgtgacggcgcgcacccggcccctgcccgtggacgccagcggcggcgtgtacctggtgctcacgtccccggacgtcgccgtggacgacttctgcgggcaggtgtgcggcttccactacttcaccttcgcgtcggtggtcgggtccacgctgccgtacgcgtgggtgggcaactcggcgcgcaggtgccccgaggtgtgcgcgtacccgttcgcggtcccggcgtacgtgcgcgggcgcaggcccgagtccccgcccaacggcgacgtcggggtggacggcatggtcagcgtcatcgcgcacgagctcgcggagatggcgtccaacccgctcgccaacgcctggtacgccggcggcgacccgtcgttccccacggagatcgcagacctctgcgagggcatctacggcaccggcgggggaggggcgtacacggggcagctgctcacggacgcgcgctccggcgcggcctacaacgtgaacggcgtcggcgggcgcaggttcctcgtgcagtgggtgtggaaccccgtgctcagctactgctccggccccaacgcgctcgaccagtagctgtttgatttcggtttcgtttcatctcctactaggatggaatggaatgggattttactacgtaccaatgaatcgaatcctctagcgcatttggattttcctctcctctccccggggaaatccatgggatgcttctgtatagagttgttattatcaattaattaatgccactttcggtggaaggtttctagggaccaatgaatggaatcctctaggggatttggattttcctctcctttcttttcctgtccccggggaaaaccatgggatggttttgtaaaaagttgttattatcaattaattaatgcccctttcggtgg

SEQ ID NO: 7258 - DNA, 811 bp, Zea mays
  Clone ID: MRT4577_106617C.1
tgggtacctcgaggccggccgggaacagtgatcacggcgacgatcgccggctcgccgccatgaagcacctccacctctcatcttctcttcctctccgccgcgtcgtcgtctcctgcgccgaagaagaaggtcgggcggaaggggtgggaggagatgagcctgggcgagaaggccgtggacctctacgtcggcgagaagggcctgctcttctggctcaacaagttcgcctacgcctccatcttcatcatggtcggcgcctgggtcctgttccgcttcgtcggtccctcgctcggcctctaccagctcgacgccccgccgctgccgcccaccgccgtgttcagcggcggctcgccgtgatggcgtcgagtcgttcccgagtgggcgtacactaggtcgaggcgtagagctagcgtagccgcggattaataatggtgacatgatatggaaagattgaggaagatgatgctgattctggagccaaagtttggaccttttgctgccaatatgtgaattgtagacgcgcggttcttggagcttgaattcctggtttgtctgtgcaaaacctgtttggttttgtacaggcaagcaattcatttcggtatggtctggttttgagaagaagctgatatcaagaagacatccattctgctgtcgttcttctaatggagaagaaattctcagaacagaccttatattcagaagcccattatgaggagcagatggaactagatgtaattccaagtcatttccattatgttctaatgccaatctcttaatttttcgatgctaaaaaaaaaaaaaaaaagcggcc

SEQ ID NO: 7259 - DNA, 681 bp, Zea mays
  Clone ID: MRT4577_106618C.1
gtactcccccgccaccacctctgaatcccagcctccgcctccacacgacaagagaaactcagcaacaaccaacgccaagagcaggcagctcggtcctttagcaccaagcaatggcgacgtcgcgggcggacgtggagaagggcgcgtcgtcgtcgcgaggaaggcgaagcaggagcccgggaaggtgccggcgccgctgtacccgcagcacgagggggagcgggagtggacgccctggctggtgccctccatcctcgtcgccaacatcaccgtcttcaccatcgccatgtactacaacaactgccccgcccacaacgccaggcccggccgcgacgacggccagtgcgtcgcccgcttcctccaccgcttctccttccagcccctccgccagaacccgctcctcggcccctcctccgccacgctggttaagatgggcgcgctggtgtgggacaaggtggtgcacgggcaccaggggtggcgcctcttctcctgcatgtggatgcacgccggcgtcctccatctcctcgccaacatgctcagcctcctcttcatcggcctccgcctcgagcagcagttcggatacgtgcggatcggcgccatctacctcgtctccggcgtgggcgggagcgtgctgtcgtcgctcttcatccggagcgccatctcggtgggggcctcgggggc

SEQ ID NO: 7260 - DNA, 686 bp, Zea mays
  unsure (1)..(686): unsure at all n locations
  Clone ID: MRT4577_106619C.1
gcgcgccccaccaccaccggnaaaagaaattccccaattctactccacccggcgcgctctccccacgcgcatccggatccgtccgctctgatcgagtgagttgatctggactctgtgcctgcctgtgagggcgaggagggcatggacgagttcgagctggaggacaacctcgagttcatcctccagagcatccaggagctgatggaggacccgggggacaacaacgccttcggagacgccaaccagaacgagctcttcgccagcatcgttaactacgaccaggagaacatgctgcccgacgtgtctgcagcggacgttgctgcagggaaggacattcaggggatcccgtgggagaagatgctcttcgggagggataagtaccgggagatgaagatgaagaactacagaaattaccagaatctaagttacgcacgggaggatgctttgcaggagtgcaagcaaccacgaaacatgatgtttatacaatgcatgatcaatcagtgacacactggtcctcactggagcagacaagcactgagctaatcaatgccgatgattgcatcgtcccanaacagaggggccatggttcacagtcagtggcaatggttcaggtcacaacaatggccgtggatagtaatttattggtaagttggtggctttcaggggggagatatatgcaagcgttt

SEQ ID NO: 7261 - DNA, 1063 bp, Zea mays
  Clone ID: MRT4577_10661C.1
cctcgaggccggccgggccggggtagtgcattcaacatctccttaggccactccgccgctcttctccgcttccaagatgtcgaagcgaggacgtggaggttctgctggtaacaagttccggatgtcactgggtctaccagtggcagccactgtgaactgtgctgataacactggagccaagaacctttacatcatttctgtgaagggaatcaaggggcgccttaacaggcttccttctgcctgtgttggtgacacggttatggcaactgtgaagaagggaaagcctgaccttaggaagaaggtgatgccagctgtcattgtgaggcagcgcaagccatggcgccgaaaggatggtgtctacatgtactttgaagacaatgctggagtgattgtgaacccaaagggagagatgaaaggttctgccatcactgggcccatcggaaaggagtgtgctgatctctggcccaggattgctagcgcggcaaatgcgatcgtctaaaggaagcagtttgtcgaagtttcatttaaaatggggacttgagaagggagttcttagttagacgagcttttgattgccctgaatgtgtttccccggctaatgcttgtgctgctggaccgtttcctgatagctttgctttgatgacatcctccccgttatcgataaagttgcttagcctgacactttgcagagtttaagttggctggttttggtgggagggaaatttgagggatctatggggaggaatttatctcacatggatcccctccaattcctctcccaccaaatcagcaataagggttagtttggaaacttaatcctctttgaatttggaggggattaaagggaaaataggttcattttcatcctaatcctctttcgaagggccgttgagttttcaaactagccctaaactgtagaaagtgtttatgttgtttctacaagacactgatgcttcagcatcacaggatcaaatcgcatcagcagtaagtgccatttgcaaaaaaaaaaaaaaaaaaaaaaaaaaaaaaaaaaaaaaaaaaaaaaaaaaaaaaaaaaaaaaaa

SEQ ID NO: 7262 - DNA, 1860 bp, Zea mays
  Clone ID: MRT4577_106620C.1
attggagcggcattctttggggaacaagtcgagagaagcgggccgtacgccaccacggcaacggagaagaggactttcagctgcggcggctggccggcgcggcgacggggatgggggatgggcgcacaggcggcgccaaccgtccggcgtggctgcagcagtacgaactgattggcaagattggggaggggacctatggcctcgtcttcctcgcgcgccttaagccgccccacccggcacctggccgacgcggcccccctatcgccataaagaagtttaagcagtcaaaggagggggacggagtatcacccaccgcaattagagagatcatgctcctgcgcgagatcaaccacgagaatgtcgtcaagctcgtcaatgtgcacatcaaccacgctgacatgtccctatacctcgcattcgattacgcagagcacgacctctatgagattatcaggcatcacagggagaagctgagttcctccattaacccatacactgtcaaatccttgctgtggcaactgctcaacggcctcaactatcttcacagtaactggattatacatcgagatctaaagccttccaacatactggtcatgggagaaggagatgaacatggaattataaagatagccgattttggacttgctaggatatatcaagctccactgaaaccattatgtgataatggggttgttgtaactatctggtatcgtgctcctgagctgttacttggggggaaacactacaccagtgctgtcgatatgtgggcagttggttgcatttttgctgaactgcttacactgaaacctctattccaaggtgtggaagcaaaaaatcctccgaacccattccagcttgatcaactcgacaagatttttaaggtcttaggccaccctacagttgaaaagtggcctacccttgccaatcttccatggtggcaaaacgaccaccaacacattcaaggacataagtatgagaacccaggtttccataacattgttcatttaccaccaaagagtcctgcatttgatcttctctcaaaaatgcttgagtatgatccccgaaagcgtataacagctgcacaagctttggagcatgaatactttcggatggacccactacctggacgaaacgcgcttttaccatcccagccaggggagaaaattgtacagtatcctattcgtccagtagatactacaacagattttgaaggaacaacaagccttcaaccaactcaaccgccatcagggaacgctcctcctggaggtcaatctgtagcaagacccatgccacgacaaatgccgcagcaacctatggttggggggattccaagagtggcaggtggagtaaccatggctgccttcaacgctgcctcacaggctggcatggctgggctaaatcctggtaacatgcctatgcagagaggcgcaggtggtcagtctcatccgcaccagttgagaaggaaggcggatcaagggatggggatgcagaaccctgggtatcctcagcagaagagacgattctgacgctatcaagatggagccatctgctgtatatcaggtgtttgaaacacgttgcctgtgtaagctgctgtagttttgttatcagcatccgaatgccaatgctggcacctgtaaaacacattaatcagtcgagagtccagataccagttgtccttatgggttatgatctaagctgctcgaatttggctgatttggtttgcaacaaaaaaaaaaaaaaaaaaaaaaaaaaaaagcggtcgtgcttttgctcgtggcagtaaatatttttatggccacaaactaaaaaatcattaaattctagtggcagtaaatatttttatggccacaaactaaaaaa

SEQ ID NO: 7263 - DNA, 801 bp, Zea mays
  Clone ID: MRT4577_106621C.1
cccagcgtccgcccagcgtccgaaatactgccacccaccaccgcgccgccgcgccatggcttccccatccccttcctcgcccctccacccgcaccagcacccacctcctccgaatgttcaccaccaattccaatccctaccgccttcgatgccgccaccgccgccgtcaacggcgctgccaaaggcgctcgaccttgaggttaccgtcgtctgcgggaagcacctgaagaatgtcaactgccgctggtagtggcagtgggaacggaaggtatggagcaggcactgggcttgcggtgggtgctgtggctggagccctcgggggtctagcaattgatgaagcggtgaagtacaaggaggataagggtgcagaacgggtggaagagaaggtggtacctgctgggagggatgattacagcgagtatcgtggcgactattgaaccgaagtttgtgtgagtgtggaagaaagcgctgtgagttgattcttcttccatgcctatgtgggaataattccagtgttagtctatggctttccccatgtatgtatatatatttgtgatgttgtgtattattctgatacctataaactactctctccgttcttttttatttttcgccgtttagttcaaaaatgaactagcgggcgactaatattcgagaacggaggtggtacaatgttttatgatgacagatttggtgtgtaacataaaggtatcatggcttgctttgatggtgtacttgtgtcttgatgaatgatgatgggtgttatctttaccagcaattgtattgctctgttttcagttt

SEQ ID NO: 7264 - DNA, 242 bp, Zea mays
  Clone ID: MRT4577_106622C.1
ctctcccccccgcgctgcgagatgcctgggaacgccggggaggacgccgaccctcttagcccccaatctaggccgcgctaaacgacaaccgcccaccggaccttcgccaagacgcgtcgcccggcccccctgacgggcgacgagccaagccgagtactcgagcaggtccgagaactagcacagcgtggaggggggcggtcggcaagggggaaccccccccggagcgcccgactgcgcgcaga

SEQ ID NO: 7265 - DNA, 101 bp, Zea mays
  Clone ID: MRT4577_106623C.1
tcaagcgcgtatcatttcctacttttattgccgcagcggctactgcaagtacggggcgggagactactacgacagcggttacaacagcaagaccatcactg

SEQ ID NO: 7266 - DNA, 2207 bp, Zea mays
  Clone ID: MRT4577_106624C.1
ccggccgggacacactcctcaccttgtattctcaaggaaacctttatccatggctcgaggtatcatactactcctgcttgtcatccccctcgtcgtgagaattgaagggagtgtcatgggggagagatccaactcgttctcacaggactccaataattctagccctgctgaaaacaaactccaaccaggtgaaaagtccttcgcatcggaagcatatgcggtgaactggaacgaaccaccagacctgcaaatgcaagactccttcgagcgacctgagctatatcggaagcaatcagtgcaaggtgaaaagtccttcgcatcggaggcatatccggtgaaatggagcatatcaccatcactaggtcagcaatcacaagagtctttcgagccagaggcatatccgatgaaatggaaagaaccaccaccatcaggccaacaatcgcaagactctttcgagccagaggcatatcgggtgaaatggaacaaatcaccaccaccacaccaacaatcgcaagactccttcgagccagaggcatatcgggtgaaatggaacaaatcaccaccaccactccagcaatcccaagactccttcgagccagaggcatatcgggtgaaatggaacaaatcaccaccaccacaccaacaatcgcaagactccttcgagccggaagcatatcgggtgaaatggaacaaatcaccaccaccactccaacaatcccaagactccttcgagccagaggcatatcgggtgaaatggaacaaatcaccaccaccactccagcaatcccaagactccttcgaaccagaggcatatcgggtgaaatggaacaaatcaccaccaccactccagcaatcccaagactccttcgagccagaggcatatcgagtgaaatggaacaaatcaccaccaccacaccaacaattgcaagactccttcgagccggaggcatatcgggtgaaatggaacaaatcaccaccaccactccaacaatcgcaagactccttcgagccggaggcatattgggtgggatggaagcaacatgcgcaaggagaaacagacgttgctgatgggacgacgccagcacgcggccatggcctgcatgtcgcgaccgggatgcttttcacgaggaagagcttgcttccagggacagccctaccggaaggcaccaggttcagcggccacggcttccccgatccgcagaggttcgcgctacgggcagacgcggacgccatccccttcagctacagccagctcgacgcgatcctaaggatgttccggatccctcgagggtccaagaaggcggagcaagtcgctgacacactccgggcatgcgaggccgagtcctcggacgctcatgcctgcgccacctccgagcaggcggcggcggactttgctgcctcctcgctcggggtcagggctagcgacctggtatcggtcgtcaccgccgtccacggggggaaggacgccactaggtacgtggtggcgcccgacggcgtcacacgcatcggcaaggcggcgggggccgcgaccgcggtgccgtgccacccgatgccgtacccgtacatggtccattactgccaccggccgacggacgtggaggcgctccgcgttgagctgactgggctcggagacgacggcgcgaccatcgcgatcgccatgtgccacgccaacaccatgagctgggacgaccgctacttccagatgttgaacgcgacgcgcggcgaggagatctgccacttcatgccgtggaactatgtgctatggctgccggctgccgaccttctagcgaataactaggatcactttctaggcgggtgatacaccgtccattctaaaatgtaaaaaataaaaataaaaactatatacatagttttttattatgcacttagatatgagacaagcggccatatataattagatatataagtcttataattaccatgtaccatccacgtcgctacttccaaatgctgaacgtgacgcgcggcgaggagatctgccacttcatgccgcgcaactatgtgctctggctaccagctgccgagcttctagggaactagtggcaatgccactatgttaggtgtcgttgctttgataaaatgaagtgtatgacaatgacagcatcaacaattgttcgtatggacatatggttggacatgataacggcgagaaagagaggatatatgttgttgccctatgaattgtg

SEQ ID NO: 7267 - DNA, 621 bp, Zea mays
  unsure (1)..(621): unsure at all n locations
  Clone ID: MRT4577_106625C.1
ctggnaaagacgatgttgccatacagatactgtactgcgggatatgccactctgacctgcacaccatcaagaacgagtggaagaacgccaactaccctgttgtccctgggcacgagatcgccgggctgatcaccgaggttggcaagaacgtgaagaggttcaacgtcggagacaaggttggcgtcgggtgcatggtcaacacatgccagtcctgcgagagctgcgagggagggcacgagaactactgctccaagatcatcttcacctacaactcccacgacagggacggtgacatggttgtcgtcaacgagcgcttcgtcatccggttccctgatggcatgcccctcgacagaggcgcgccgctgctctgtgcagggataaccgtgtacaaccccatgaagcaccacgggctaaacgaggcaggcaagcacatcggcgtggttggactcggggggcttgggcacgtcgccgtgaagttcgcgaaggcgttcgggatgagggtgaccgtgatcagcacgtccccggggaagagggaggaagctatggagacgcttggtgcagacgcctttgttgtcagcggtgatgctaaccagatgaaggctgcgaagggcacaatggatg

SEQ ID NO: 7268 - DNA, 1328 bp, Zea mays
  Clone ID: MRT4577_106626C.1
cattgggtacctcgaggccggccgggacgcagctccgctatgtcggtcgctgtgctgcgagtgcgagccatggagctactggcacgacccgcagcggcagcgtcctcctgctgcgcctgcgcgcgaccctcgctacagctccccgccccgggcacatcccgtccccgtcggctcgggttccctactctccgcgcagctgcggcggcggcgatcgccgcggagccgcaatcgaacgagcagcagaatatcattatggaaactgaggtgtttgcctgccctgtctgctacgagccattgatgagaaaagggccaccaggcataaacttgccagcaatttataggtcgggattcaagtgttcaaagtgcaacaagtcatttaccagcaaagacatcttcctggacctcactgtaactgcagggacaaaagaatatagcgaacagaagcccgctagaactgagctgttcaggagtccacttgtctcatttctttatgagagagggtggcgacaaaactttaatcggagtggtttccctggtcttgacgaagagtttcaaatggctcaagactattttcaacccattgctggtggtatccttcttgatgtcagctgtggcagtggcttgtttactaggaagtttgcaaagtctggtacatactcagctgtgatcgctttggacttctctgagaatatgctccgccaatgctatgaattcattaagcaagatgattctctccctcaatgcgaatctcgcactcgtgagagcagatatttcgaggctcccttttgcttcttgttcagtagatgccattcatgctggagcggctatccattgttggccctcaccctctaatgcggtagctgaaataagccgcgtcctgaggcctggtggagtgtttgtgggaaccaccttcttatcctctcccaggaacaacccattctctgttgaagcactaaggccacttagacagattgttgggccagttaacaccagctacaactattttactgaaggagagctagaagacttgtgcaaatcctgtggccttgtcaactacagcagcaatgttcagaggtcatttatcatgttctccgggcaaaagccatactgaagaatcctgtcaaatccaagctctgtttagaagtatttgcatatatttgtgccatactgtgcataggttccttaaaaaaatgcatgttgcagactcttggaaaaggcctacgtttctgtgaatcaacacactgtttgttgtgcttcgttgggctacaagcctaaaagcctagaatctctactacttattaaggctgcaagattccttgttctgcgtt

SEQ ID NO: 7269 - DNA, 1482 bp, Zea mays
  Clone ID: MRT4577_106627C.1
ggtaaccactgaagagcggctcgccacgcgggcacgcggccgacacaggatcagagccgtcttggccgcgtcgcctccttggcaaacgcgggcgctgggcggcacgccacgccataccgctgccacccaccgcaatccaagcaagcagccccgctatgtcggtcgctgtgctgcgagtgcgagccatggagctactggcacgacccgcagcggcagcgtcgtcctcctgcgcgcgaccctcgctacagctccccgccccgggcacatcccgtccccgtcggcccgggttccctactctccgcgcagctgcggcggcagcggcggcgatcgccgcggagccgcaatcgaacgagcagcagaatatcattatggaaactgaggtgtttgcctgccctgtctgctacgagccattgatgagaaaagggccaccaggcataaacttgccagcaatttataggtcgggattcaagtgttcaaagtgcaacaagtcatttaccagcaaagacatcttcctggacctcactgtaactgcagggacaaaagaatatagcgaacagaagcccgctagaactgagctgttcaggagtccacttgtctcatttctttatgagagagggtggcgacaaaactttaatcggagtggtttccctggtcttgacgaagagtttcaaatggctcaagactattttcaacccattgctggtggtatccttcttgatgtcagctgtggcagtggcttgtttactaggaagtttgcaaagtctgggacatactcagctgtgatcgctttggacttctctgagaatatgctccgccaatgctatgaattcattaagcaagatgattctctcctcaatgcgaatctcgcactcgtgagagcagatatttcgaggctcccttttgcttcttgttcagtagatgccattcatgctggagcggctatccattgttggccctcaccctctaatgcggtagctgaaataagccgcgtcctgaggcctggtggagtgtttgtgggaaccaccttcttatcctctcccaggaacaacccattctctgttgaagcactaaggccacttagacagattgttggaccagttaacaccagctacaactattttactgaaggagagctagaagacttgtgcaaatcctgtggccttgtcaactacagcagcaatgttcagaggtcatttatcatgttctccgggcaaaagccgtactgaagaatcctgtcaaatccaagctctgttgtttcttcaggattccttgcaaaacacgtttacaagtatttgcatatatttgtgccatactgtgcataggttccttaatttctgtactattcctgaatgtattcagtacaacaacaaaaaatgcatgctgcagactctcagaaaagccctacgtttctgtgaatcagcacactgtttgttgtgcttcgttgggctacaagcctaaaagcctagaataatgcttgaattc

SEQ ID NO: 7270 - DNA, 179 bp, Zea mays
  Clone ID: MRT4577_106628C.1
ttggtgcccttcgcgccgtcccgccccgtcctcgccaacctgtaggaggagtatcccaacatcacgatagccgttcgtcagaccaaccaagcccctaggagagatgaccataaagaacttcttctcaggcaacctgagcccatcttatacgctcaataccaagacagagagggggacca

SEQ ID NO: 7271 - DNA, 371 bp, Zea mays
  Clone ID: MRT4577_106629C.1
ttcttgagcggaaaagggcgaaagccaaaggggatgtccgccgtgacgacggtggcagcctggctccaagccgcggtcaccctgatgcagccggacaagatcggctgccgggcgccctttgcctcgatgacgtgccggccgatgccgcaactcgactgcagggcgttcggcgtgaacgccagcgccctcaggatcacgtgctccatgcatgacgacatgagcaggagcgtggaccccgcgatgctggtcgggttcgcgctggacaccttgtcgctgctcttctcgggcgcgagcgccatgggcacgcccaagaggctgacctacgacgagatccagagcagaacgtgcatggaggtgaaaggcacgggcac

SEQ ID NO: 7272 - DNA, 1071 bp, Zea mays
  Clone ID: MRT4577_10662C.1
gccggccgggtcggggcgagggccttttaccccagcccggccctgcgagcgagaccaccccacccattcactcgcctgcgctccctcgccgccccagttccccacgcactgctcactgacccgaaccctcctgtgcgcattgggtacctcgaggccggcgggaaaaccctaacctcgcgaccgtataaacgagccaacccgcccacctcccgcccgggcgccgccgccactcagcgccgcgcttgcgtttccttctctccgcttccaagatgtcgaagcgagggcgtggaggttcggctggtaacaagttccggatgtcactgggtctaccagtggcagctactgtgaactgtgccgataacactggagccaagaacctgtacatcatttctgtgaagggaatcaagggtcgccttaacaggcttccttctgcctgtgttggtgacatggttatggcaaccgtgaagaagggaaagcctgaccttagaaagaaggtgatgccagctgttattgtgaggcagcgcaagccatggcgccgaaaggatggtgtctacatgtactttgaagacaatgctggagtgattgtgaacccaaagggagagatgaaaggttctgccatcactgggcccatcggaaaggagtgcgctgatctctggcccaggattgctagcgcggcaaatgcgatcgtctaaaggaagcagtttgtcgaagtttcatttaaaatggggacttgagaagggagttcttagttagacgagcttttgattgccctgaatatgtttccccggctaatgcttgtgctgctggaccgtttcctgatagctttgctttgatgacatcctccccgttatcgataaagttgcgtagcctgacattttgcagagtttaaataggcttgatttggaggagcttttgatggccctaaagatgttttcccggatgatgtttgtgctgctggaccgtttcctttagcttcgatatccaatccacttggacctaacactttcgaagggccgttgagagcaaaaaaaaaaaaaaaaaagcggccaaaaaaaaaaaaaaaaagcggcc

SEQ ID NO: 7273 - DNA, 328 bp, Zea mays
  Clone ID: MRT4577_106630C.1
cggtctcgtgggcggacatctagctcatttaaccgtaaagtttgaagaatgtcatggcgtctgttccacgacaaggagtgagacctgtcttatgctttcagctgcaacgagatctacatgtctgagggcctttaatgcagtatgaacagacctttattaccgatactgtgatagcacccacagatcaaatctagttggctattgtgagattctagaggtaatatcatgacggtagggaatggaacatcatctagtataatgccgacatgtacacagatcgcaatgcgcattctgtgtgttatataatcgacctgcaaatggagtagac

SEQ ID NO: 7274 - DNA, 479 bp, Zea mays
  Clone ID: MRT4577_106631C.1
ttttttttttttttttcgcgatagaggtcaattaagtaccaaggtcaactcatagagtgacacggtaaggctcgctccaattgatgctaatataggaatgcaaatacagtgatccaaaccccacaagagactatgaaccgtcgaagggcacagaagggaatgcacgtttagatggccatggcaacggcaataccatttttgccagccattccgaggatatcggcacccatggtaggagcagcagcgcccttggacttggaggtggagtgagaggtggcgctggccttggaggtctcggtcttggtagagtgatgctcagtcttggtggtggtctcagtggtggaagcggccatggcgcaggtggccagagcagcagcgaggaggaagttcagcttcatggtgaaggattaaggtattaacttaaaaaagttgtaagtttgaaagattgtactggagtgagtaaactcgtgccgaattct

SEQ ID NO: 7275 - DNA, 1222 bp, Zea mays
  Clone ID: MRT4577_106633C.1
ccgggaaatccatgaccaaccaatccaagaagaggactacatagacatggatctgagctcaccagcagcatcgggagcggccaccaccaccgcaagcttgttctgctacaacagtgccatggcagcctcgccacaacactcgcgggagtttgaattccacatgtcggctccacctgacctgtgggagcccgtggcgtccccagcagatgagctcttctacaagggcaagctgctaccgctccatcttcccccacgcatacagatggttgagaagctacttgagagcgcgtctgagaagggcttactttcagcaagcactgccccagcaacaccataccagtcagcagcaaactcatgttatcccagcggcgagctcgctgcagagtactacttccatgattgcatatccactggcagtgatgctgccgaggaggcggcagcctgtgagaagaagccatggtccaagaagctcaagttcatcaggcacctcaacctcggcctcaagcttaaggcgtcgaaagcttatctgaagacaatatttgctagtaaaggagggaatccagatggcaagaatggtgtacctagagcaaatgaactgtccagcacacagttcagtacctggaggaagaacccatttggccacatcggaagcaagaggtacatagcctcacccatcagcaatagcaccacggtaggaggcaagtttaaagagggcgagtctggccatagaagatccttctccagcatcatcgtccgatactcgtcatcaaacaagacatcctctgtttcgtcgtcgtcgtcgtcgtcgtcatgttcttcgtcaaactcatcatccttctcaatcccaagctcaaatggctctggcggtgttggaccagtgctgaggaggagtagcagtgcaagttcagagatggacaatccaattcaaggcgcaatagcatactgcaagaagtcacagcagctcgcctcagtgaggaagagtgcaagtgacgcagggttccgtttcatgtcatcatcagcatcaaaaatagcagcggaatccgaagacgctgatggtatatttgagattacccgaaatacaaatgtaaattcagtgtccccccaataattttgtactcttttgatcttgagctttctgtagatatgatatatgtctgatgttatggccttaaggaatatcaatgtaagcaatttctgttcaaggacaaacagttttatatgt

SEQ ID NO: 7276 - DNA, 233 bp, Zea mays
  unsure (1)..(233): unsure at all n locations
  Clone ID: MRT4577_106634C.1
ggccgggccgggactgcaaaaagcgccccgccncaagcgatctgcccgctcgagcctagctacacaaccaagaagcgcagcgcccatggccatggcctttcaagccaccgccgccacgcgccacctgctggccgccgcctgggcgccggcggagaagccgcggcagacgagcccacagctcgcactgccgacgtcgcccacccgagcaacggacacgctccgcgcgcccacca

SEQ ID NO: 7277 - DNA, 462 bp, Zea mays
  Clone ID: MRT4577_106635C.1
aattcggcacgaggcagccagtggctcagcggctgcgcccgtgcctgtacgtattggcctcatctctctctctctctctcaatcctcacctctccggctctctttctcctgcccagtccccaacggggaggcccccgccgcgcagcccaatcagacagcattgcacgatgcaagcgcggacaccgagggctaacaacggcggcggggccaaggttcggagctcggtcgggaatggcgaggcggcttatgctggagctccctgagctcctcttattattgctagacgggcaatgccacggaggaaggagtggcgcctgctacggccgcaccgccgacgaccttacggcgccagacaaggcggcgcagctaaaacaccagcagtccatcacgtaccagcgcatctacgacaccgacatcgacgccagcaacgcatacaccaacaaccggcgaagagctcatggt

SEQ ID NO: 7278 - DNA, 299 bp, Zea mays
  Clone ID: MRT4577_106636C.1
cgcgaggcgaaccaaaccaacccactctccccaatcccgcgcgcccaggccgccagccctaccaaccatcggcgtcggcaatggcggacatggcgaccaatgccgccgcgggcaccgtgtcgctggacctcgccgcgccgtcgcgccggcatgatggaacaaggtctgggcggctggacttccggtccgtccctcatggtctgcgggctgctgggcgcaccgtgatcgacgaggccactgatgatgccacagatgatgacgcctaacatgatgtcaccattgatgatgtcgagcatgat

SEQ ID NO: 7279 - DNA, 269 bp, Zea mays
  Clone ID: MRT4577_106637C.1
gggtgtgtgtttattaaaccgtgggtacccccccaacccccggaccggaaccggaaaagcgacaacgtttcccaaaagggaaccaaattaaagcatggcgaaacaaaggaaaaagcggtccaaagaaggaaaaaggtttccccgcacaaaaccacaaaaaaaacaacccggaaacaaaaaatgaaaaccccggggaaaaaaaaaaaagacccaactcaaaaaaaaggcaacgaacacacagcaaagtttaaacccgaaaaacccgtctt

SEQ ID NO: 7280 - DNA, 301 bp, Zea mays
  Clone ID: MRT4577_106638C.1
aaaatgcaactatttttatttcattacaagatgacatcacaagaggacagataacgcactatttttattagggttggtccgggatgggacaggcttcctaactcccaacaagggacgtgggtgagaacggatacatttggcagtggaaccaggcaaaaaactgccacattaaaagtggaaaccaaagggaagggagggtccaacaaactgagacacccacttttggaaattactaacgggccgtcggggttaatacaacgcgttttataagggggtaaaaatgaacttatccttgctccca

SEQ ID NO: 7281 - DNA, 281 bp, Zea mays
  Clone ID: MRT4577_106639C.1
ttaaccctacaaaccattgcaacccaacatcaacaacaacaacagttctcagccatcactgcgccacctagccgtggtgaaccctgtcacctacttgcaacagcagctgcttgcatccaacccacttgctctggcgaacgtagctgcataccatcaacaacaacagctgcaacagtttatgcgagggctgagtcaactagtcatggcgctccctgccgtctacctactactactctcatctagcccgctcgcgctggtcattgcatctacgttcgtacatc

SEQ ID NO: 7282 - DNA, 432 bp, Zea mays
  Clone ID: MRT4577_10663C.1
cccaaactttccaacagagccatgaaactgctgaaaaagtgctttttattcatggatacagcagccatcagggggaaaaaaaaaatgaatggaccaccgcctcggtgggaacacaaacatagctgaaacatgggggacactctacaagaatgacacgggaagaggataacgaagagccaaccacaattatataaaaacaacaagaggaggaagataatcaagatgcaccatatcagtcaacactgacagaacataactacggaaagaaatatacacccgatatgatcacatccgaaacaatgaaacaaagaaagaagacaaacacacatcgccattaacattagtagcgaaagaaaaaataaactgcgagcaatcatatcaagttactgaaaaaagtgaaaagacattacaagaaccattacaggcatacaa

SEQ ID NO: 7283 - DNA, 308 bp, Zea mays
  unsure (1)..(308): unsure at all n locations
  Clone ID: MRT4577_106640C.1
gctcccttctcttatggtctctcctcntcgtctgtgactgtgcgccggcgncgccatcgncnattgaccagcgccgnccgnccgctcgaatactgagacccacgcgccgaccgcccgctgcccgcgcatcgccgcgccctgctccagcctgaggaaaagcgaccaaccaactcggggaattatagtctcgaggccgncacctccgtctccgcctccgcctttagacctcaaacgaattaactgtttggaactggaagtgtaccactactattccattggtcctttgtctcttatagtacgacgccccc

SEQ ID NO: 7284 - DNA, 304 bp, Zea mays
  Clone ID: MRT4577_106641C.1
ggacaacagggaagaaacccgggggaaacccaagccaagaggcgacgggagccgcaaccagggaaggaagaagaacaaagcagcaacagccgacaggacaggagcgaagaacacgaggcccgccgcccaaggcagcgaagcgagacaaaaaggcaagagagcagcccagggaaccggcggcagagcacgcaagccccgcaaaaggacgcccgggcgcacaccagcccaaacgacacgaaaaccaacccacgcagaaccagagagaagcccccgcgcccgaccaacaggccacagaaaccaagga

SEQ ID NO: 7285 - DNA, 719 bp, Zea mays
  unsure (1)..(719): unsure at all n locations
  Clone ID: MRT4577_106642C.1
aattcggcacaagtgtttgtcaggatcctttctacctcggctgctgcgttgcgtgtggcgctgtgcttgggcagacgtgggcaccatgcctgggtgacttggtgtagcactgtagctgtggcatggagctgaggaagacgacgacgggggagagaagaatgctccccgggtgctaacttggccgccgctgctcaggggacgagtcgagggggagaagaggaaagtccagtttcttcagcttcttggttggatgcagcgaagtgaggcgcaggccaggaaggcatcactcgccgagtctgttctagcagccatctccgagctgatgccttcagcggcagccgccgtcgatgctgagcacgagagcttcatggatgtcggcagccacctccaccatggagccctgcccacagtgtcagtggaggcgcagaaggtgcagggttccccagccaacgcgctgcacgtgatggagtatctggctgccaatgttgacctcgccaaggacctcgtcacaaggtgcagcgccatcgcgcagcagctcatggacgacgacctcctgggcataaccgaggacttggacaaggtcatcaagaacataagcaatgagctcaacaagatgccagcagcgacgttcgagagcagcatgtttgcggaaccagcggtcagtggacaccttcangttgtcaggaaccagcatgatctgttcgagcagcaatcctttg

SEQ ID NO: 7286 - DNA, 359 bp, Zea mays
  Clone ID: MRT4577_106643C.1
caaataaattttttattttttccaacaaaaaaacaaatttaatacaaaaccaacccctaataataatactaacaaacctttatcaaaccaaataaacaaatcataacaccccaaatagggaaacaccaaaaaaaaaaaaacctcacctccaaaaaacaaaaaacattaacgatcaaacacaaaccaccccattattcaataaaaaaatacccccccacttatcaaaaaaaacattcccctccttaaaataaatgccaaagacaacgacctccctggcttcaacaaccacgactttaaaagaatctcgccattcacaaactaaaaaaaaataccttttaaccaatcccaaaaccaatcca

SEQ ID NO: 7287 - DNA, 364 bp, Zea mays
  unsure (1)..(364): unsure at all n locations
  Clone ID: MRT4577_106644C.1
gcgtgaacaaactagtaacgaaaaccaactgtttctaccagacaacagagtacctggaggcacgtantagatctttacatctataacaagcaccgaaaaaagagagcggcaaggaatggctccaaggcaaaggcacattatattggcgcatacatgcttacacaggcttatattgatctttgcgtggtgcctaagcaaacagacaacagggataaatccattcatacatagcgagtatctaatggttaataaattaggcgattacataggtccagacctggtgccatgatcacggtcgcttgggtcgaccccaaactttactaccaggacatataggcggcccacctatggctatatccagata

SEQ ID NO: 7288 - DNA, 1023 bp, Zea mays
  Clone ID: MRT4577_106645C.1
tgagaccgtgcgagagagccagagagggcacgcaggacaccaccgcggcccctgccccacgcccacatcggctcccgcgtcggccccgcgtccatccggccgcctttccgctcaccgtccgccgcttcttctcccctgtgggcccgtgacctggcctccctctgtccctcccacctcgccccgccgattcagctccccttcctcgacgcagtcatcggggccactcatgcataacgttcgcacggtgttccgcttccgcccgtcttgagaaacacacagagagagcggtagcggtagcggggacggagtgggtgcccgggccgggcaccagcggaaggaagaggttatcggcggcggtagacctcacggcgatggatatcacggaggtaacggtggtgcaccacgcagcgctcgtgctggcggcgctctgggtcgccgcggcatccggctggacgcacccggcgctcttcctcgtcgggctcctgtacatatttgcggtgaatcaacggtacacaatgaggctgtggaggcggatacagtatgaggaaaggaaatgcgccaatcagagaaagcttctctctgatgcagagactgtcaggtggcttaattacgctgtggaaaagatttggccagtttgcatggagagggttgcatcccagcagttccttttacccatattcccgtggttcctagagaagttcaaaccgtggacagcaaggaaagcagtaatccaaagcctttacttgggtaggaacccaccgatgtttacagatattagggtagttaaccaatcaaccgatgatgaccacttggttctagagatagggatgaattttctttcagctgacgatatggatgcaagaatggctgtgcaactaaggaagagattaggatttggcattacaacaaacatgcatataactgggatgcatgttgaaggaaaggttctggtaggggtgagatttttgcggcagtggccatttattgggcgtgtaagagtatgcctttgttgagcctccatac

SEQ ID NO: 7289 - DNA, 247 bp, Zea mays
  Clone ID: MRT4577_106646C.1
gggggggggaaaacaatccattgaaaaccggaacatgcccccaaaatatcctgttacaaaactgggcccaggaggggaccaaacaaagggttcccaggttgaggattttgacaaaggggactttcgttgccccgaaaaaccttaccccttgggcttaccaaaaaacctctgtttttcattgggaggtgggaagcccccccccccaaatttggaccatggggcaaagaacttgagcttgatccccccc

SEQ ID NO: 7290 - DNA, 1308 bp, Zea mays
  Clone ID: MRT4577_106647C.1
gtgcggcgctcgagccggccggtccggccgggacgccccaccccgctcggcctccagtccagctccaccgctttcacccgctccgctccgtttccgtcgctcccgtcccaaggagccgcgccacgcgagagggggccacggacggtggcagttttctgtttcggtgggcggggacgtcgtcgaccgaccgaccggagcggaaggccggagatgatggaggagggggcgcccgatctgcgagagctcgtgcgcctgccagatgttctcgtcgtatgctcatctactggatggacagatgaaaagcacatgctttatcttcaattattggaagaaacatttgtgcaccaattacatggaagtggttgcatttttaagggactgtttaactgctctccaagatattgtaggcaaatgaaatcatctaagcaaattgttaaatacactacgcctggtcagggatgtgccatagttgagggtggcaaagtcaagtcctgcataaaggctgagcatgttgagttaccttcctgctgtggaaatcagcaagatgaaaaagttcgttccctggaagataatgcatcaaccactaagcccatggaaaaagccacttcccatgcaagggcagcaagcccaggacaagcttccacgtgctatgttggcaaacacagacattctccttccagaagtgcagaggggtcggatcagaactttgatgaggaaacccaagggactggagaatcaaaacatgaatacaacccgaggcgactgaaatctgctgatggcacaagggatcatcaggttgtgaatgcagaagctcatcaggtgggctgccttgatgtgagtgacaaaaatagcgagaacttcagtgcatcgtcaaaagtgcttgctgcatcacttgatgttgaagcgagagttaccttgaaatcaaggcagtacgtacgagtacgatcgacaatgtcgacggtcacttcttgcacctttctgagcctcgggtccccagtgcggccggcagtctcctccgcgagaccggcggcggcggcggtggcttcccgacggaggccccggtccctttctgtgtgctgcgaggccggccggaaaggggatcacaacccaaagacggatctgcatccatttaacatccctgccttcgttctggtgcacccggtggcaccacgtgaggaacggtggcagctggaggaggacgccgacaaggtgaacctgtggttcgaggtgcctgggcagtccaaggatgacctcaccgtggagatcgacgaagacgtgctcgtcatcaagaagaggaaggagctggtg

SEQ ID NO: 7291 - DNA, 1579 bp, Zea mays
  Clone ID: MRT4577_106648C.1
ggcgagagggggccacggacggtaggggctcccgacccaatcctccgcctcctcctcggctcctccttgccctccacaagaccacagctcagcctctccgtgctggtgttgttatgcttgcggcgcttgtggccgtggaggcgcgggtgtgatgcggcggtggtgcatttgcaggtggcagttttctgtttcggtgggcggggacgtcgtcgacgaccgaccggagcggaaggccggagatgatggagggagggggcgcccgatctgcgagagctcgtgcgcatgcgtccggtaaaataacagttctggtgcacccggtggcaccacgtgaggaacggtggcagctggaggaggacgccgacaaggtgaacctgtggttcgaggtgcctgggcagtccaaggaagacctcaccgtggagatcgacgaagacgtgctcgtcatcaagaagaggaaggagctggtgggccagcggagccctggcagtggcgtcgcagagtacggctcccagtcccagcagcagagcaggaggggcaccgcagatggcaaggacccgctgccggcggcacagcagggccagggcggcgaggtggtctatgcccggatgctccacgcggcgggcttttctggcgctgcggcgcaattgctgcccccggctggtgtgctcaaggtcacgcccgagccggagtatggagcgagcgtgtgggaagatttgcggtcgcatttaagtcagcgcttggtgcaaagggcgaacatggcgaggacgcagtcgcactcgcggcgccacggcgaacccgttactgcttcaagagatgttctcgtggtatgctcatcttgtggatggacagatgaaaagcacatgctttatcttcgattattggaagaaacatttgtgcaccaattacatgggaagtgttgcatttttaagggactgtttaatttttcatgctgttattgtggggggatgaaatcatctaagcaaattgttaaatacactacgcctggtcaggggtgtgccatagttgagggtggcaaagtcaagtcctgcataaaggctgagcatgttgagtcaccttcctgttgtggaaatcagcaagatgaaaaagttcgttccctgggaagataatgcatcaaccactaagcccatggaaaaagccacttcccatgcaagggcagcaagcccaggacaagcttccacgtgctatgttggcaaacacagacattctccttccagaagtgcaggtattaagttcatttacttgagtgacgtggccagatttttaaaagagaactactcgtgcatttactcagaggggtcggatcagaactttgatgaggaaacccaagggactggagaatcaaaacatgaatacaacccgaagcgactgaaatctgctgatggcacaagggatcatcaggttgtgaatgcagaagctcatcaggtgggctgccttgatgtgagtgacaaaaatagcgagaacttcagtgcatcgtcaaaagtgcttgctgcatcacttgatgttgaagctgggtctccctccggcgactgcaaggatcatggaccaaaaagatatggcatgt

SEQ ID NO: 7292 - DNA, 1757 bp, Zea mays
  Clone ID: MRT4577_106649C.1
cactagtcagggcgaattgtttttccccacccggccggggcaatcttccggaacatccatcgatctccccccagcggcgaggagagccggcggccacaggaaggagaaatggcttccgcacacaacgctctccgggtgtttttcatcctagccgtggtatgtgccgtatgcacagcgaaaaggacaggagccaacaaggaagaatcggcggcagcccccggtggcgctgctggaggcagcggcgggacgttcgacatctccaagctcggcgcgaccagcgacggcaagacggactgcacaaaggcagtccaggacgcgtggacgtcagcgtgcgaagcgaccggaagcgccacggtggtgatccccaagggcgactacctggtcggccctctcaacttcactgggccatgcaaggggagcaacatcgccatccagctggatggcaacctgctgggatcaaacgacctggacaagtacacggcgagctggatcgaattgtctcacgttaacaacatcgggatcaccggctcgggcacgctggacggccaggggaccgccgtttatagcaagagcaagaccgacaacgtgaaggcgatgcccaacacactggtgctgtttcacgtgatcaacgccactgtcgccggaatcaaactactcaactccaagttcttccacatcaacatcgacaactcagagagcatcaccgtgaaggacgtgaacatcaccgcgcccgccgacgttgagaacacggacggcgtccacgtcggaggctcctccaagatcagcatcctcaactcgaccatcggcaccggcgacgactgcgtctcgattgggcccgggtgcaacggcgtcttggtggacagcatcacctgcggccccgggcagggcatcagcgtcggctgcctaggccgctacaaggacgagaaggacgtgagcgacatcacggtgcggaactgcgtgctcaagaacaccaccaacggcgtgcgcatcaagtcgtacgtggacgccgagtccgtgctgacggcctcccatctcaccttcgagaacatcaggatggaggaggtggccaaccccatcgtcatcgaccagtacttctgcccgcagaaggtatgccctggcaagcggagcaactcctcgcatgtctccgtcaaggacgtcacgttccgcaacatcaccggcacgtcgtccacgcccgaggccatcagcctgctctgctcggagacgcagccatgcagcggcgtctccctcatcgatgtcaacgtggagtacgccggcaagaacaacaaaaccatggccgtctgcagcaacgccaagggcaccgccaagggaagcatcgaggcactggcttgcctggtctgatgatgaccttccttttgcatgcatgcatggtatctcatccttgatgatgatctagctcactagttctttttaatttccgcttcattcgcttttccaaattcgattgtgtttcagccaagttgtttagcgggacatctcttgtctgatcttcctgctaaatagagttggactcctatatatagaggccttccggcacatataatatacgtcggaccaatattattgtgatcactagttatatctctatatgttgcgacggggataaaaaatttgaatgaaacatagatactgaacgacaaacatcaccatgatatataaaatttacgtggcacacatatatcgtgttgagtaagcagcatccagtctggaatcgtggcaatggttggcagcatataatt

SEQ ID NO: 7293 - DNA, 1076 bp, Zea mays
  Clone ID: MRT4577_10664C.1
aaaaaaaaaaaaaaaaaaaaaaaaaaaaaaaagaccgactctcggcaacggatatctcggctctcgcatcgatgaagaacgtagcaaaatgcgaaaaaaaaaaaaaaaaaaaagaaattgttacaaggggtactcgaataatagccgcaaaaccctaaccttggcaccgtataaacgagccaacctgtccaccccgcgccgccgccactccgccgctcctctccgcttccaagatgtcgaagcgaggacgtggaggttctgctggtaacaagttccggatgtcactgggtctaccagtggcagccactgtgaactgtgctgataacactggagccaagaacctttacatcatttctgtgaagggaatcaaggggcgccttaacaggcttccttctgcctgtgttggtgacatggttatggcaactgtgaagaagggaaagcctgaccttaggaagaaggtgatgccagctgtcattgtgaggcagcgcaagccatggcgccgaaaggatggtgtctacatgtactttgaagacaatgctggagtgattgtgaacccaaagggagagatgaaaggctctgccatcactggacccatcggaaaggagtgtgctgatctgtggcctaggattgccagcgcggcaaatgcgattgtctagtggaatcagttgatcgaaatttacttcaaataacatttgtttgtgttgcgaattgggaagagagtttttagttagacgagcttttgatggccctaaagatgttttcccggatgatgtttgtgctgctggaccgtttcctgttagcttcgatggcatcctccccatatcgataaactgttgcttagcctgacaatcggaagagtttaaatgttaaagatttgataaaaaaaaaaaaaaaaaaaaaaaagaaaaaaaaaaaaaaaaaacccgcggccttgaatgagagagagagagagagagaggaagagatcgcgcggcgaaggcaatagcaaacggtccaccagcacaaacatcatccccatatcgataaactgttgcttagcctgacaatcggaagagtttaaatgttaaagatttgat

SEQ ID NO: 7294 - DNA, 300 bp, Zea mays
  Clone ID: MRT4577_106651C.1
ctagtctacataagaatgttgacagcaagctgaaaaaagttcccatgaaactggtatctgtcaagaggtaactcagagcatgtaccataagcattttctttgatctatagtttgttggattcgttctaatgaggtccttcattaggatcttgaggtgaactgactgtactgtacccattagccggcaattacctaacgtttggtaagcatgtagtccccaccagaaagtaaatagaagtgggtgtagccaatacaacatctggtacatgtcctaaaatatgaaaaatttcaggtaatttt

SEQ ID NO: 7295 - DNA, 178 bp, Zea mays
  Clone ID: MRT4577_106652C.1
actaccacacacagaagcggctgcggcgtagaaacgcacgcgatcgcgaccgtgtgatggaatgagcaccagccatgctacacgtcaacttctaccgcagctatggtaagacgttcaagataccatggcgtccttatgagaatgagcgtcttgatgctagactgaagctggtcagtga

SEQ ID NO: 7296 - DNA, 455 bp, Zea mays
  Clone ID: MRT4577_106653C.1
ataaggataaaaatattgtagaaatagttgaatctgatataaatggaagccaaacgaacatgctgaaaattattatgtgaaattcgaaattaagccacactcaaatccaaactaaactattttctctcattttttctcaaaaagccatcatgaagcagtagcgcggcaagttgcgtcttactcttgaagcagtaacgggttcgccgtggcgccgcgagtgcgactgcgtcctcgccatgttcgccctttgcaccaggcgctggcgcaccagcgactgcaagacctcccacatcggcggccgaaactccggctcgggctgcaggttgcaggaaccagccggcgccagcaattcagccgcagcgccagaaatgccactgccgtatagaataggggcaatgagatcgagctggatggactggagatacttcttcacctgaacgcatagagcgatggca

SEQ ID NO: 7297 - DNA, 532 bp, Zea mays
  Clone ID: MRT4577_106654C.1
gggcagtgtgtggtacaagccttctacaacactagtactgcaacttaaatttaagaacggccagctactggatttgaactaagacttcgttacattttattttctggtcctgataatcaatccatctcgcttctaggtgatgctttcgttggaggcttcctctcacagttggttctaggcaagggcattgaagactgcgtgagggcaggttgctatgccgcaaacgttatcatccagcgcccgggctgtacttacccggagaagcctgagttcaactagtgcaaaaactgaggcacgtcatgagagggactgttataggcacacttaattgttaaccagtgcgtggtccggtgtctacacaccctgtattcttccgaggcttctcttctgatccggccaatatttttgccgtgaaatttgtgttatgcaactatggacgtctctcctttgtcgctgtataaggcatgatttgccatcattctgttgcttcggtgatgcctgcaatgcaatgaaaatgccctcggaacgatag

SEQ ID NO: 7298 - DNA, 665 bp, Zea mays
  unsure (1)..(665): unsure at all n locations
  Clone ID: MRT4577_106655C.1
cccggngtcgacctcacgcgtccggaagtgtagaggggntcggatcacaactttgatgaggaaacccaagggtactggagaatcaaaacatgaatacaacccgaagcgactgaaatctgctgatggcacaagggatcatcaggtgaattgatcataagcgtagcgtagctttcgttgtgttctgccgctgttctacgttttatgaaaacattcttacttcacatcacattgtcaataggttgtgaatgcagaagctcatcaggtgggctgccttgatgtgagtgacaaaaatagcgagaacttcagtgcatcgtcaaaagtgcttgctgcatcacttgatgttgaagctgggtctccctccggcgactgcaaggatcatggaccaaaaggataatgcaatgtccaccgagtgttttctggagttgactaacacacccacctggcgcgccgcaactgaatcagagataggaagtcaatcagtgcaagtttgtaagataagctagcttgcccgttattctggtttggaagtcaaaatagttcgttcaacttagcctaggcagttgacggttttgttgtgtttctgagggactctgatacgaaaatcaaattccctttgttctgtgtttggcgctgcaacctgtaaatggagtgctttttttttgcgt

SEQ ID NO: 7299 - DNA, 1417 bp, Zea mays
  Clone ID: MRT4577_106656C.1
catttctggcgctgcggctgaattgctggcgccggctggttcctgcaacctgcagcccgagccggagtttcggccgccgatgtgggaggtcttgcagtcgctggtgcgccagcgcttggtgcaaagggcgaacatggcgaggacgcagtcgcactcgcggcgccacggcgaacccgttactgcttcaagagaaagtctcaaggtatcctcctactggatcaggacggatgaaaagcacatgattaatcttcgattattggaagaaacatttgtgcaccaattacatggaagtggttgcatttttaagggactgtttaattgctctccaagatattgtaggcaaatgaaatcatctaagcaaattgttaaatacactacgcctggtcaggggtgtgccatagttgagggtggcaaagtcaagtcctgcataaaggctgagcatgttgagtcaccttcctgttgtggaaatcagcaagatgaaaaagttcgttccctggaagataatgcatcaaccactaagcccatggaaaaagccacttcccatgcaagggcagcaagcccaggacaagcttccacgtgctatgttggcaaacacagacattctccttccagaagcgcagaggggtcggatcagaactttgatgaggaaacccaagggactggagaatcaaaacatgaatacaacccgaagcgactgaaatctgctgatggcacaagggatcatcaggttgtgaatgcagaagctcatcaggtgggctgccttgatgtgagtgacaaaaatagcgagaacttcagtgcatcgtcaaaagtgcttgctgcatcacttgatgttgaagctgggtctccctccggcgactgcaaggatcatggaccaaaaggataatgcaatgtccaccgagtgttttctggagttgactaacacacccacctggcgcgccgcaactgaatcagagataggaagtcaatcagtgcaagtttgtaagataagctagcttgcccgttattctggtttggaagtcaaaatagttcgttcaacttagcctaggcagttgacggttttgttgtgtttctgagggactctgatacgaaaatcaaattccctttgttctgtgtttggcgctgcaacctgtaaatggagtgctttttttttgcgtaccgtgatatctgcgttttggaatactataatatcagaatttggagcgtgtttcgccatgctcgcctctgcttcaagagtaagacgcaacttgccgcgctactgcttcatgatggctttttgagaaaaaatgagagaaaatagtttagattggatttgagtgtgccttaatttcgaatttcacataataattttcagcatgttcgtttggcttccatttatatcagatcccaaaacctttacaatatctcaatctttataaaa

SEQ ID NO: 7300 - DNA, 501 bp, Zea mays
  Clone ID: MRT4577_106657C.1
gggacgaattattttatttttacttaaaaaatggaatcatgggatacaaaaaaacccctgccttgggaaagggggggttccgaaaaagggatgggcattaccagaaggggggaacaggaaaggaatactggtcactatttatggggccaggaaaaagcctggggggaattacaattaaacccctaaaaaaaggttacaacattgacttaaacctttaggggctaaaagaacattttatttttaaggcggttggggaggccgaagctttctgaaaaggaacctttgggcattttatacaaacaggtttgggcgagagccattttttcctaaaaaaacttcggggacgaagcatattcccaacagggggaaacggggaaaacacttccctggttttccttttggaattctatcgggggggtttggggcaattttccctttctaaacacttttgggttcttttctctttggggccctaggggtgggacttaggggggccccttt

SEQ ID NO: 7301 - DNA, 798 bp, Zea mays
  Clone ID: MRT4577_106658C.1
cattgggtacctcgaggccggccggggttctgatcttcgggcaccggcgcaccgcacaggccctctctgccccctcgccaatcgccatggccatgaccgtggcggtcacctggctcccgtcgaccgcctcccgcgggagaaccttagccgctccgctccctccgttcgcggcccctatctccatgcacatgccactgcgggcgccgcctcctattcccatcccccacaagccgcgcctcgtcgtcgcctccgcacagttcgatttctccagagctgttcaaacggtatggcgggtcggtaacgatgccgtggaggccggaagtaatcttgtcccaggttcagttccacgaccaattgctaggataggtgttgccgttgctgctgtgtcggttgcccttttccttcttaaatccattgtgtccactgcattgtttgttctggcaatgatgggcctcatatatctcggcttcctggctatgaacccaaaggaggcctctggctctaggttggatgaagcaacaggcgacccatcggaagacactgttgaagaggcccgaaggataatggagaaatacaagtaatgaacctgcgcaaaggtgttgtactctcagaggtatgatttgtctgtagtttccttacgtgacgtgatggatggatctgattttagcacactgcacttagtggtttgatatatgtaaatatagttgcacgactgaaatgagtccttgggaccaaatgaattatgcaaatctacaagaggctaacaacaaaaccaaaaaaaaaaaaaaaaaagcggcc

SEQ ID NO: 7302 - DNA, 167 bp, Zea mays
  Clone ID: MRT4577_106659C.1
agtcggatcatagcgtgatctgaagcttctcattcggctccttaaagccatcgggggagtgactgactgagtcagttagtgggtgtgtaggagtgtctttgaggggaggcagcaactacggcttcctccgacgccggacattgtgggatgaaagcacctgtgcctgg

SEQ ID NO: 7303 - DNA, 301 bp, Zea mays
  unsure (1)..(301): unsure at all n locations
  Clone ID: MRT4577_10665C.1
ccagccagccctttcccctacccacagncaccgccgnccgccgccgctccctgacccctagtgtccggatttaacttcaaacatggcggacgtcgacgtcgagccggaggtcgccgccggcgatcccaagaagacgacgccccgggaggacagctaccgcggcgccaacctcaatgcgctgcccgacacgtcaaccgaccacctcgttcagatcttcccagcgcgcgccaggagaacggcccagaagcgatcgaagaggaagcccaccgccttcatctagaagctgtgcaaggagaaaaag

SEQ ID NO: 7304 - DNA, 1032 bp, Zea mays
  Clone ID: MRT4577_106660C.1
ctcgaggccggccgggccggggtttggctcctttcccgtccgttctgaccttcgggcaccggcgcaccgcacaggccctctctgccccctcgccaatcgccatggccatgaccgtggcggtcacctggctcccgtcgaccgcctcccgcgggagaaccttagccgctccgctccctccgttcgcggcccctatctccatgcacatgccactgcgggcgccgcctcctattcccatcccccacaagccgcgcctcgtcgtcgcctccgcacagttcgatttctccagagctgttcaaacggtatggcgggtcggtaacgatgccgtggaggccggaagtaatcttgtcccaggttcagttccacgaccaattgctaggataggtgctgccgttgctgctgtgtcggttgcccttttccttcttaaatccattgtgtccactgcattgtttgttctggtaagaaatcacaacatttgtggtatgattctcttgccgttgatgatcaatgtgttgtgtgcaatattgaatgacatttagtcatgtagtagctgtagtcacttacttgacaaataccaaatggaccctacacttccaataactaacatatttatgagaattaaagcccgtccttttgacattccagtcttttgtggtacttgatcccaccaaatgatgggtcatgtggtcgtaggcaatgatgggcctcatatatctcggcttcctggctatgaacccaaaggaggcctctggctctaggttggatgaagcaacaggcgacccatcggaagacactgttgaagaggcccgaaggataatggagaaatacaagtaatgaacctgcgcaaaggtgttgtactctcagaggtatgatttgtctgtagtttccttacgtgacgtgatggatggatctgattttagcacactgcacttagtggtttgatatatgtaaatatagttgcacgactgaaatgagtccttgggaccaaatgaattatgcaaatctacaagaggctaacaacaaaatcattcttcc

SEQ ID NO: 7305 - DNA, 479 bp, Zea mays
  Clone ID: MRT4577_106661C.1
actctctctcactggctgacgccgcgaccgccccaacccaacctcccttttcggagatctcgccgcctccgccgtcgacttccgtcgcccccctatcccgcgtccgggcttacccgatggcacggctgcactggcttgaggctgtcctgccgctggggatcatcggcggcatgctctgcatcatgggcaacgcccagtatttcatccacaaggccgcgcacggcaggggtattgatcaacctcaaacttttctggatgttgacgaacctcgttcaaaagcacagaagtactgctcttttgtttcctgtacaattggaaccaagacttgtttgttttgctttgaaatatcaacagttcggagaataatctgtatctgacatctgtttaattgaacaaagccaaatactttgtcaattgtgtatgcacaattatttccgccaccggggcagatccatgaacaccgaaaaaaacacgtttcg

SEQ ID NO: 7306 - DNA, 501 bp, Zea mays
  Clone ID: MRT4577_106662C.1
gggtacctcgaggccggccgggaccctctccctattcagcttgtgttgtgttgagccttgctgtgctgcgagaacaaggacaagcagaggaagacgcaggtgctgagaatgcctgtcggcgcgcgttacgacaagcatatatgggggagatcaccactgtcatgggaggacctcgagccatgcgccaagaccgaagcttccgaagatggcctacgactactactcgtccggcgccgaggccgagcgcgccctgacctacaccgcttctccttctcccgcatatgttccgtccgctcatactgacctctatctcccctgccacctcgtcccccccttgttgccctgcttgacccccccgtttttttttttcccccccccctttccccttcttcccctctctttctctcccctttcccctcccctccccttcccttcatcattcctttctcccttctttctattatcttcatattcttttaacatttttcttctctttcctcc

SEQ ID NO: 7307 - DNA, 318 bp, Zea mays
  Clone ID: MRT4577_106663C.1
aaaaagaagctggggccccaaagccctctggggggtttttttttttgggctttaaacttttggggggaacggggttaaaaaaaagaaaagcccttggcggggttaaaaaatagggttcaacacctggccgggccggggttttatcaaggggataaaaaacaccccttacggggtggcgcgttttttttggtcaaacatttaacttaaccctgggggggggttttcccccaatcaacggactaggggtgttttgtcccatttttgggcaattttaagatggtttttgggaagaacaagcaagaacggggggtcgttttt

SEQ ID NO: 7308 - DNA, 791 bp, Zea mays
  Clone ID: MRT4577_106664C.1
gggtacctcgaggccggccgggaaaaaaatacaaaaagagtcgagaaaaaaaaaaaaaaaaaaaaaaaaaaaaaaaaaaaaaaaaaaaaaaaaaaaaaaatactctctctccactggctgacgccgcgaccgccccaacccaacctcccttttcggagatctcgccgcctccgccgtcgacttccgtcgcccccctatcccgcgtccgggcttacccgatggcacggctgcactggcttgaggctgtcctgccgctggggatcatcggcggcatgctctgcatcatgggcaacgcccagtatttcatccacaaggccgcgcacggcaggccgaagcacatcgggaacgatatgtgggacgtcgccatggagcgccgcgacaagaagctcgtggaacaatcctccggcaactagggtattgatcaacctcaaacttttctggatgttgacgaacctcgttcaaaagcacagaagtactgctcttttgtttcctgtacaattggaaccaagacttgtttgttttgctttgaaatatcaacagttcggagaataatctgtatctgacatctgtttaattgaacaaagccaaatactttgtcaattgtgtatgcacaattatttccgccaccggggcagatccatgaacaccgaaaaaaacacgtttcgcagttgttttggcttttgtttaatatatgttttgatctgtccatggggggtccaaacggggtacatctggatgatataagggaataaggatacccattctaactaaaaaaaaaaaaaaaagcggcc

SEQ ID NO: 7309 - DNA, 132 bp, Zea mays
  Clone ID: MRT4577_106665C.1
tcgacctagccggcgtagccacagagccctgatatggtccgtactcgggggccttcggggaggagccatcgctggagcctggagaccaaagaagcggacagatctgaagtcaggagggactggcggatgctg

SEQ ID NO: 7310 - DNA, 722 bp, Zea mays
  Clone ID: MRT4577_106666C.1
ctgtgcgtgtgcgaggccggccgggccggcgcccgggccgggacactccgacgccgcgcccgcgcactctctctctctccactggctgacgccgcgaccgccccaacccaactgcccttttcggagatctcgccgcctccgccgtcgacttccgtcgcccccctatcccgcgtccgggcttacccgatggcacggctgcactggcttgaggccgtcctgccgctggggatcatcggcggcatgctctgcatcatgggcaacgcccagtatttcatccacaaggccgcgcacggcaggccgaagcacatcgggaacgatatgtgggacgtcgccatggagcgccgcgacaagaagctcgtggaacaatcctccggcaactagggtattgatcaacctcaaacttttctggatgttgacgaacctcgttcaaaagcacagaagtactgctcttttgtttcctgtacaattggaaccaagacttgtttgttttgctttgaaatatcaacagttcggagaataatctgtatctgacatctgtttaattgaacaaagccaaatactttgtcaattgtgtatgcacaattatttccgccaccggggcagatccatgaacaccgaaaaaaaaaacgtttcacagttgttttggcttttgtttaaaaaaaaaagaaaaaaaaaaaaaaaaaaggcccctaggttcgggttcgggttcgtgaggttctccg

SEQ ID NO: 7311 - DNA, 2015 bp, Zea mays
  Clone ID: MRT4577_106667C.1
tttgatcttgaattcttgatccactatttcgaggagaaagagggagagagatgactagctgtagttgaagccttgcaggtccaccgtcacctcgcgccgcccggcgagtcgcaggcatttgtttaagggaagggattctcttccgccgcggctgcctctgcctggctggctgcgtcgccacaccccgcgcacatcgcgctgcccagctctgctgctgctgccgctgcgtgcgcatcactggaaagatgggcctgtggggacgggctccttctttccttcaccgcgccatgaatgatgcgccttttttttgctgctttgcttccatctggctcagctctgtgcctctgtcgcccttctccttcctctcggtgtcccctctgtcggtccatgctcgtctgctggctcctgcttgttgcttaggcgttcttggtcaggtgagcagcactggcggcgatggcgaaggagacggagtactacgacgttctcggcgtctgccccgccgcatccgacgaagagatccgcaaggcctactacatcaaggcgagacaggtgcatcctgacaagaatcccaacgacccacacgcggccgagaacttccaggctcttggagaggcttaccaggtgctgagtgaccctctgcagaggaaggcctatgacggctatggcaagaacagcgtatctagggagaacatactggatggtactgtggtgtttacccttcttttcgggagcgagctgttcgaggactacattggccatcttgcaatggcaacaatggcttcctccgagttgacaagcgataacgacacccccgaaaagcttcaggataggctcaagaatgtacaaagggaaagagaagaaaagctagctagattcctcaaggaattcctctctcagtatgttcgtggagacaaagaaggatttgctaatcgtgccgaagctgaggcaaagaagctctcatgcacttcatctgggttggatattcttcgcaccattggatatgtctattctcgacaggcagcaaaggagcttggcaagaaggccatgtacctaggagtgccattcgtagctgagtgggtcaggaacaagggtcatctgtggaagtcacagatcaccgcagcgaaaggggccttgcagctgttgcagttgcaagaggaggcctgccggcagagtagcaaggatggcaatgccaccgagcaggatgtcgacttgcagatgaggatgaacaaggacctgatgatgagctcactgtggaagctgaatgttgtggatattgaaatgactctgttgcatgtttgtgaaatggtgctgtctgaaaacaatgtcaagaaagatgatctgaaggcccgagcaacggccttgaaatttcttgggaaaatatttatgagggaaaaggaggcattgccagggccagcaccagcgccaggtccatcaggaccgtcgaaacgaacggttcttgacgacgacagcagctcagatgacagttcagatgatgacctgactcggacagcgccataccggactcctgcatttacccagggaatcggcaggctgttccgatgcttatgcaatccggcttatgatgttgatgatgattttgagccccacaaatgagtcctaaagaggaaggtaccaataccaatggattttccaaaggttggtgacttttgtcaagcgtatgattcagaacagtgtgaattcggatcatacgttgtgatcctttgcttgccttgaggatacacgtgtagatgctatttcatctctggtgaccagaccaacagctcagagatcctcatttttttcctcccatgaacagtagacctcctctccgtttttttaaatagatccaactgaatggtgttgagcttatgtaatcgcttgctattgttgttgtcaaaaacacaaagaagtgaaagaacaagtgcctgtaaaaatccatttctgatcctgaatcgggaattcagtgtgatgaacatcaactttttgatccaaaaataaaacaaagggccgcctgc

SEQ ID NO: 7312 - DNA, 297 bp, Zea mays
  unsure (1)..(297): unsure at all n locations
  Clone ID: MRT4577_106668C.1
nntccggaagaagaagaagaagaaggccgccgttgttttcttgccaaaattaaccttttttaggttggggaccccctgtcccgtgtggaagtggttaaaggccaccgctcccaccccgcgcttttcttgaccgatcttctttatccctcccttaatcccccggcgctcatctgtttaagtggggtggaagccccgttctggtttcgattcttttgtttcttcttttttgtcgtcgcctgcttatatatcatttgcgagatcttcttgtgtttaatatttctctcgcttcctggtttt

SEQ ID NO: 7313 - DNA, 343 bp, Zea mays
  Clone ID: MRT4577_106669C.1
tcgtttttttttgcgccgattcatttaatgtctttcaccacatcttggacggtatactggactcaaaagattaatgggagaggttgttccatagcgatcttcttactgacttctcaatgttaactgccagttttgacctagttgcgattcgaattggtcaaaaactagcagtgaccaccactgtgatcgtcatagataaagcttgcattcttgacttgaagcatgtggtcaatggatttatccttcactccgaattacggataaggctatatcttatggctgggcctacaactaccacctcaagtgctgaagttgactatggaccgacttcgaatccttatgc

SEQ ID NO: 7314 - DNA, 362 bp, Zea mays
  Clone ID: MRT4577_10666C.1
acgcactcgtccgtcgacgcgtccgtaagcatataaataagtggaggagaagaaacttactaggattcccctggtaacttggagcgaaccgggagcagcccagcttgagaatcgggcggcctagccgtccgaattgtagtctggagaggcgtcctcagcgacagaccgaccccaagttctctggaaagggactcctgtgagggtgagagccccatgctgcccggaccctgtcgcaccacgaggcgccatcaacgagtctctttgtatggtaatgcatgccaaatcgctcggtatactacgtccaatgctaaatacaagcgagataccgatagctaacaagtaccgttaaaaatataaattat

SEQ ID NO: 7315 - DNA, 314 bp, Zea mays
  unsure (1)..(314): unsure at all n locations
  Clone ID: MRT4577_106670C.1
cggggcgggccaacccgaacacggccagcccccttagcccccttttcctttcctttctcttccctcccttcctccccactggggccgcttttttccaataaagtgtttagaaccaaaaaatcccttaaggnttccaattaattccttaacgcaacctcaaccccaaaaaacttaattagggtaatggttaacttatttgcccatccccctaataaacatattttccccctttaacttttaatccaactttctaaatatagaactttttttccaaacttaaccaacactaaacccttattcgttctatttttttt

SEQ ID NO: 7316 - DNA, 477 bp, Zea mays
  Clone ID: MRT4577_106671C.1
gaaacaaaaatcttaaactcgctcgcacacgtaaaccttacagtacatatatttcagcaggataggatatgatccgtcggtccgatagcttgcacagctgcacggacaccgcgaccgacgagaccgtgcctcgggcgtcccgtgtgtgtgtgtgtgtgtgtgtgtgtgtgtgtgtgtcacactttgtctaccgcgtgccgccgccgtgcggccgggacgtcgttggggtgtgctttttcatcgccgcattcgccgtcgtcgtcgtcggcggcggcggcggcggctgcttgtcattgttcgggggtgctgctttgcccgatgcggcggcggcgacaacgggcaggcaggggcccatctgctgctgctgctgctgcttcttcttcctccgggcgtgctccttggccatctcgcgcgcgaaccgctccaccttctcggggttggtctcgccggacagcttccggccctggaacagcaccg

SEQ ID NO: 7317 - DNA, 464 bp, Zea mays
  Clone ID: MRT4577_106672C.1
cgtaagctcggaattcggctcgtggttcagtgcattcagaacaagcccctgtattttgctgatcggctgtatgactccatgaagggcaaggggacgcgagataaggtcctgatcagaatcatggtctcccgcagtgaagtggacatgttgaaaattaggtctgaattcaagagaaagtacggcaaggccctgtactattatatccagcaagacactaagggcgactaccagaaagcgctgctgtacctgtgtggtggagatgactgaagcccgacacggcctgagcgtccagaaatggtgctcaccatgctttcagctaacaggtctagaaaaccagcttgcgaataacagtccccgtggccattcctgtgagggtgacgttagcattacccccaacctcattttagatgcctaagcattgactggccttgctgtctagtctctgctgtaagccaaagaaatga

SEQ ID NO: 7318 - DNA, 247 bp, Zea mays
  unsure (1)..(247): unsure at all n locations
  Clone ID: MRT4577_106673C.1
agctcatggactccatattgtagaacacgacaccatgactgtgctgatcgctggacttgctcttctggacgctagctgtgagcgccacctccagctcaatgaagtggcttgcggagtgctcagacgaccacacggctatagtttactctgtcgaacgntgctatatcgccagcctacggatctatctcgacgnctgactactatgctgacgcgtgggaataccccgcccaagcaccgaagctcatta

SEQ ID NO: 7319 - DNA, 238 bp, Zea mays
  Clone ID: MRT4577_106674C.1
cagcgtgctgaatctctgaggacagacatcatcgccaagattgtaggccggctcgggcttgataaaaccatgtttgaagcttccaactccaacacctcggagtggttcgtcagacgttatggcccaagggtacggactcctctccctcttggaaagcctcaagctgactaatgctaataccattgtttctcattgttcatttgatcccgatgctttgacatgtgtcggtctgcaaatg

SEQ ID NO: 7320 - DNA, 115 bp, Zea mays
  unsure (1)..(115): unsure at all n locations
  Clone ID: MRT4577_106675C.1
gggattacatacgggtttcattattggaactgccataacaaaaaaggactgtagtttattaccaaacaagtgttttattttctagtgtgggacgcnnnataaactaattgtcaca

SEQ ID NO: 7321 - DNA, 465 bp, Zea mays
  unsure (1)..(465): unsure at all n locations
  Clone ID: MRT4577_106676C.1
caggacgcgtctatttcatgttgctgcactgcactaccctgccctgccataatatcgtacgtgagcccggccgatcgagagcgtagggagtaggcatggctgctccgcaagctcgcgacgctggcgctggccgtgctcctggcggcgaccgtggcggctcccacggccgcggtgcgcgcggcgatgtcttgttccaccgggtgcagtacgctgatgccgtgcctgtcgttcgttcagatgggcggggccatgccgccccagccgtgctgctggggcatccgcagcctgctgcagcaggccaacaacacccccgaccgtcgcaccatctgcggctgcctcaagaacgttgccaactgctcctacgggagcggtacctacatcatgcgcgccgacgagctggccaaccagtgctgcgttntgctgccgtacaacactgcttccgacgtttactgctcatcgattaaa

SEQ ID NO: 7322 - DNA, 235 bp, Zea mays
  Clone ID: MRT4577_106677C.1
attcggctcgagcgtgagggggaggcacttgagtatttaaccaaagacgccagcgcctcctaagagggcatgagacaaagacttcaggccattagcacttgatgaagacgaaaaggctatactggaactatttattgacagaacgaacatgcaatgaaacctcaactgtcatgaggcctgactgtgaaagatacaaactaatcgactgatatagtatagttacttgaatcagaac

SEQ ID NO: 7323 - DNA, 140 bp, Zea mays
  Clone ID: MRT4577_106678C.1
aactattcggtagacttgctattgatctacctggttttgggattaatgttatactaaattatgctcatgttccattcaaaggagcagaagaactacaatactctacaaaaagtacagattgtgtgtcagttttaggacct

SEQ ID NO: 7324 - DNA, 343 bp, Zea mays
  Clone ID: MRT4577_106679C.1
aacaaatggggttctcttgggttttttttttctgtttatcccggaaacacccaaagggaacaacaggggtaccaacacctaacccaaaggcagaacggacactaacacggggacataagcgaacggcaacaccatgctataaatagatcacataacgaagtcgaaaccagcatggacccacacataaaaacctccaaacatgggcgccaaaaaaaaaaacgtcactaccacctaagggccgaccgaccaataacaaaaccactcctgagccgccgtcaccaccattgggccaaccgctgtaacccacaccgaggacataacccccctcacggtggacgccatc

SEQ ID NO: 7325 - DNA, 351 bp, Zea mays
  unsure (1)..(351): unsure at all n locations
  Clone ID: MRT4577_10667C.1
ttcccccntcgacccacgcctcccccttttttcaccctccatcccgaagctatgaacattgtgcctattctaaaatcttcccgctgctactccacacgcatccccatcccttccaccctaacgctaccaaaccccatcccaacctccctcccatcaaaagtatcattcacctcctcacccaatatataccatcaagacatatacacatcatggacatccaccaaagaaaaccacacacactcacccactcactactctcctcaaatcctccttcttctcacgattacgacgatgatgcttaaccctcatcaacaacaccttttaccatcgtcccacccttatcataaccac

SEQ ID NO: 7326 - DNA, 798 bp, Zea mays
  Clone ID: MRT4577_106680C.1
cactcctatgggcgattgggattctccaggccggccgggaacagacggctggcgtgtggatccctcccgctctcctcgccggatctccacccgcctcgctctctctgagtccagtggggcagagatccgtgagcgcgaggactggtcccttcttgggttgggtctcttctccagctcgcgagttcgccactggttgacactgattgtagcacttcgtggtgcctgattggatcgcgggtgcggtttgccctccacaaatttgggtttggttccactgaacccccatgacccaagcgaagtccgctcctggaaggaaggagatgggccgtgggcggtcgccggaaccgctcgatttcttcatatggactgtcgaggaatttccatgttcctatttgggcctacccttgagcgttcataaactctcaagagctgaacttcacaagattgttgacaaggtggcagacaacctcccaaaatggaagggagcactcataaacaaggctgcctgactggtcactgtaaaggctgtcctgtccgccctaaatatttatcacatgactgcccttgatctacctaaatgggtgttcaaggcaattgacaagaagcgcagaggctttctttgggtcggaaaagataaagctaatggaggaaactgtatgatatcttcggattcaatacaacgacctctccaatatggtgggctgggtgttctgaatttagaggtaatgagttgggcccttcatgtctggtggatttggctggaaaaacagattcttgcagacccttggaaggattacc

SEQ ID NO: 7327 - DNA, 1103 bp, Zea mays
  Clone ID: MRT4577_106681C.1
ccggccacgacgaagtcagtctatccaaatccaagccatcaattacatcaaggtccatggccgcgtcacgacccacggcgggggtcttgctgcccaacgccctagccggcgagccgccatggctccggcacaagccccagctccggcgagccaggctccgtcggccaggcggcggaggctcgcagctctggctcctgccgtaagtcgccctcctgaagcccaggtggtccagcgccgcgcgctcgcagtccgacagcgggctcgaagccacgcggctgttcacgggcgacgtgttgcgcctcgtctccgtctccgtctccgggtggaggccaggtgccgccttgcgggaccgggacgaggcgtcatgctcgtgcctcgatggcttgccggtcccgtagcctctgctcttcacctgcatcaccaggtggtggaggagcaccaccagctccagcatgtagtgctcggttttcgccttgtcggcgtggtgcagcgtctggatgcggatgacgctgtgcctgtgctggtagcctgatttcttgcccatgtcaagattagcccattcgccaacccatccaaaaccttggtgcgcccttattgtattttctgctaccggcagaagccagcgaagagttttctgcatttcggcttttatttgagctaccgtacgctcttcttcggggttatatgtttgcaatcgtgatcgcagagctgacttcactgttgttgggagaccatggtacagattgtcccttgcactaggaggaagagagaggggccgggaaactatattttcaatttggttgataatgttagcgtaatgtagcgccagaccacaggaacctagccttttgttctgagtttgctcggaagcgcagaagtcagttccagtttcgttaaatgaatctcggatttgtttgtgcaaaaatattacgatatccacaagtttctccacaatctcttccaaggtcctagaccacaaggatttcttcttcagatttttcacgagcttcctctggcgctttaattcactatgcaatatcattatactctctcgtctagctgctggcacagactcctcgtcacgaaatttccttttaaaatcc

SEQ ID NO: 7328 - DNA, 129 bp, Zea mays
  Clone ID: MRT4577_106682C.1
aagaaaaggaaaccggcacacaaaatatgggttgggtccggtatcatcaaaaacagatggaatccttatatttaaaacacataccggcactgaagatctcttcgagtaatcagaataagaacaagaaac

SEQ ID NO: 7329 - DNA, 195 bp, Zea mays
  Clone ID: MRT4577_106683C.1
cttgagggaggaggcaataaggaaccgaagaagacatgaaggtggctcaaagctcggtcaagtgacaactcgttagccatgcttgatttaagacagccaagtgcgcaccatgtgtgtgcccacaggggatttcacgggctctagacacgatttgtgctttgaagaagaagaatggtggggggcacaaactctttt

SEQ ID NO: 7330 - DNA, 144 bp, Zea mays
  unsure (1)..(144): unsure at all n locations
  Clone ID: MRT4577_106684C.1
gtatcagtgtcacaaactcacaatgtgtatcatgtacaacgtttatttatttgaccatgcatccatgcgtgctgacggcntgggtggccggtgcgcgttcattctttctctgccgtggctgtcggctgtcgtctgggtgctggg

SEQ ID NO: 7331 - DNA, 393 bp, Zea mays
  Clone ID: MRT4577_106685C.1
ttctcagcccttcctagctctgaaggggtgctgggtttattttaggagggccctggaatcctgcccgaagagtgggatcctgatgcagatcggtccggacaccagatgccagcacctgaacatattgtaggctgggcgtgaccatacaccagccgcagtactgaacaagcaacgtggagcaatgcttaattcaggacaaaaacaatgtggagccacatacaagggcggcggacgagagcaaatttagcgaaaaaacgaccgagtcatgaccaagatgcaacaagggcgaggcagccttcaaggagatccagattcaaaccgacgcagaaccgctgaccacaatggactggagctgcaaagaataatgccagcatgaaaggacagaggactgac

SEQ ID NO: 7332 - DNA, 322 bp, Zea mays
  Clone ID: MRT4577_106686C.1
ttttaggtattagtatggcaaagaagacggattcaagccactagcttattgtccacacacgtacacgaactgaatgggggcacgtaccataaggagatacgatgaccctgcacagccaggcaaccaccggcatacattaagcacacaggcaagcacgaacgggcgtggatgccgcgccgccgggcggttcaactaaccctggcgaggaagctatccctgcgctcgaggacctctccggcgcaagcgacgatgctctctaagaccctggaggcgcgcaccacgaatacagggccgacgtggtgaccatggaagagggggagga

SEQ ID NO: 7333 - DNA, 491 bp, Zea mays
  Clone ID: MRT4577_106687C.1
acttccgtccccatcagtggacccagccgagatcgactggatctcctggctcgggcggctttgatggttcctggggtcggcccggggaggagttcgaggcgatgagcaggcttgcgtcggggctccagcgcccgcggaggtcgttgtcgccgtgcgaggtgctgtgggctggtgttactcgcggctatcgtgctcggccgcctgtggaggaggttcatcggagtgacggcgtcggcgccgctcttcgtgctcttcaacatcctcctatcgtggggcgtttacatcttcgtaatccgtagaagtgagctcttgtggtaatgcttgcggacttgcactgtattggtaggacacaatcgatcgctgtggtgtggatatttgctatttttgtcttgctgcctctggaagttagtaaaattacctggaaggttatacctctatgtcttagcttgagaaatttgtaattttgccactatcagttttggcttcctgtt

SEQ ID NO: 7334 - DNA, 718 bp, Zea mays
  Clone ID: MRT4577_106688C.1
ggccgcttttttttttttttttttcgaataaattttttcttgaacagcaagattcagaaacacctttgtgtgcgcattaggtcggactaacacactaaatagttgtttaccagtccaaagctcaacaggtttaatcaaggctggtgttggcaaatcaatgttctccattccatcaccaaggtatgagcacaaaagagtaaaggaagatctatcatagaaagtatcttttcttgtaactaggaaagatgaggtcaagaagtcttgcgtggaagcaaccagtatctcaccattcttaggagtacataaattattctgaacccccatgagcataagcgcttcagtgcgagcttcctctgtctgagggacatgcaaattcatttcatctccgtcaaaatcagcattgtaagggttgcaaacagactcattaaatctgagtgttctccatggcattatccttgcctgtgctcaagtataaaagcaaatattcaaaggtgaagaaatgcttgatgtatacttttatgaaataaggagacattgataccctgtgacacataattgacattctatgcaggcttcggctgtctattaaagaagacaacatctccatcttctaaatgtctttcaactatacatccacactttaaatcccgagcagtaatccttcttcaccatactttaagctctgcttcatgccatcaaggttgtgtaacaaaattag

SEQ ID NO: 7335 - DNA, 818 bp, Zea mays
  Clone ID: MRT4577_106689C.1
cattgggaccctcgaggccggccgggtccgattcacttccgtccccatcagtggacccagccgagatcgactggatctcctggctcgggcggctttgatggttcctggggtcggcccggggaggagttcgaggcgatgagcaggcttgcgtcggggctccagcgcccgcggaggtcgttgtcgccgtgcgaggtgctgtggtgcgcgctcgcgtcatgcggcctagtgcttttctcgcagctcgccgtggcgatggttccccgcctcttcccttccctctatctcctcgccatgctccccatcgcggggctggtgttactcgcggctatcgtgctcggccgcctgtggaggaggttcatcggagtgacggcgtcggcgccgctcttcgtgctcttcaacatcctcctatcgtggggcgtttacatcttcgtaatccgtagaagtgagctcttgtggtaatgcttgcggacttgcactgtattggtaggacacaatcgatcgctgtggtgtggatatttgctatttttgtcttgctgcctctggaagttagtaaaattacctggaaggttatacctctatgtcttagcttgagaaatttgtaattttgccactatcagttttggcttcctgttattatacccacccgtctctataaatagtgggcctatctgggtctatgatttgtgggcccgatatcatattgacgaagcccacaaatcataatggcaaaattgtcaatgtctcgtcttagcttagtattcagccatacatgtttcccagatttagaatccgaccttgactgaaatagttgaagtgaa

SEQ ID NO: 7336 - DNA, 1749 bp, Zea mays
  unsure (1)..(1749): unsure at all n locations
  Clone ID: MRT4577_10668C.1
cgggacaatgacgacagccgtagcccagctaccgcgacggcggtgacgacgatcgccgccgcgggaaacggcggtccgtttccccgtccgagtccccgccaccttcggtgaagcgggatcgctcgtctagccgcccgcgggagtccgttgagcgtcgcgactccaccgaccgcgagccgcggtcgtcgtcgcggaagcggaaggaccacgagggcggtggcgacggggatgagcccggtcgcgaagggggcaagcgggccaggtcctccgtggacctgcctccgtccaaggaggagaggcctagacgggagcgcaggaggtttgaggatgtcgatgagaacgggaagaatggtgatatgggtaaatggggcaaggaaatctcatctcatgagctgcagaaggaggagttatcaattaatggtggtttacagagctgcgatgcgcctaatgctggttctcagcaaccactcagtgctgtttctgtgccatcttctgtttccattccttcaaaggtatcttcaatttctaccaacaatgcaaatgagggagttagtattagatctgatgaggttaccgtaaaatctagtacagatggaagtgcaacgtctgctgctggcaaaagtagtaacctatctcttgatgctttagccaaagcaaaaaaagctttgcaactgaagaaggaactgtcagaaaaactcaagaaattacctatgcttaataataagcttggtacatctgttactgctacacaagtttctaaagaagaagcaaaaacttctgtatcagctgtagatgcacaactcttttctaaaggagaagcaaaacttactgatgtttctattctgccaactagtaccatctctggaacgccggccgtaggtggtgctatcggtattccaggtcttacgaacattcccaatcttgaatctgtgaagcgagcccaagaacttgctgctaagattgggtttcgccaagatccacaatttggtcctcttatcaacttattccctggtacatccactgaagttactgtgccacaaagacctgcaaaggctcctgttcttcgccttgattcccatggtagggaaattgatgagcagggaaatgttatcagcatgacaaagccaacgaatctgagcactctgaaggtcaatataaacaagcagaagaaagaagcttttcaaataatcaagccggacttggattctcttgcaaaatcaagtgttcattttgatgaaaggatgggcataaaccaaaagaagctcctccgtcctaaaaggccaggatttcagtttgttgaagagggtaaactcactaggcaggctgaattgcaaaaaattaagagtcaatttggtgaagcacaagctaaagagcttaaagtaaagcaagcccagcttgctaaggcaaaggcagaagtagacattaatccaaactttattgaggttgctcctggtgtgagagctccaaaacaaaagcagaatgaagatatccctgaaattgagccatgggatgcaaaaattttaatttatgccacatatgaggatatctctgtggagaagattaatatggacaagatcaccatatatgttgaacatccagaaccatatgatccacctgctgaacctgcaccaccaccgncccagccactgaagttgactaagaaggagcagaagaagttgagaacacaaagggcgtcttgctaaggaaaaaagataggcaaggaaatgattaggcaagggcctcttggag

SEQ ID NO: 7337 - DNA, 636 bp, Zea mays
  Clone ID: MRT4577_106690C.1
ccagccgtcaagccggcacaacctatccctcgacccggtataacctctcgatcccgtccactacgagaagctctccctacctacctcttcaactcccggtaggtcaccacatttatttttcgtcggttctactctgcatacacataccgtacctcttccagcctcatcatcatcatcactaccgtcgtcaagcgctagctattacaacattcatttttggtactacacgtacataatttattatatataagcatataatttatattatgaaggttatatttgtatacttgcgaataatgcagatatatatgctgaaggtcatgttagttattgtgattatcgaattagtatatatgctgaacaaattgattataaacattttgttattaaatgtcctgctattgcacgaacttgttaacattttctatattattattatccttatacttattctctatattattatcatcgttattctcgacatcattatcatttacaaactcgttttagttgtctactatatcgttttaaacttcctcatctataacaacattataaatgactatgacaaaaatgactactactactacattttaactcccatctactatgacttccaaaacaacaagtatgatc

SEQ ID NO: 7338 - DNA, 258 bp, Zea mays
  Clone ID: MRT4577_106691C.1
gggggggagacagttttgggtgggattaataaaaaaggaaagctccgggttcacatcaaaatattatacttttaaacagatcaaaacttggcttgtcggatggactacgacacccaagactgggggtacccaattatacttaaacataaaccattgctttcaaaccgggctgggctaaaatcccaccccacgggggggtcccctgttcaaaaaatttgactggcttatggcccccaactttattataggatcacggct

SEQ ID NO: 7339 - DNA, 313 bp, Zea mays
  Clone ID: MRT4577_106692C.1
gggcacggcgatcgccccctcagcagctaccgcggcgccgtgttgctcccctcggcgtccgcggtgccgcgtcacggcgcgccgtaaccggggggggggcgcgaggaggcttggcctgtgcggctgctcctcgcctgccgtcgctgctccctgcttcgcgcacgaggccctgttgggcccgcttgccccccccggggcgtttcttttcttccgccgcggccctcgccgctctcgctccgtccgctgtcccactgcgccgcccccccccccgcccccgcgaatatttttttttttttccccccccccccggggg

SEQ ID NO: 7340 - DNA, 446 bp, Zea mays
  Clone ID: MRT4577_106693C.1
aaagcccaagggaaaccccaccggcaaacgggggggttccccccttaaaaaaaatcaagcctatcgcccaaaacaggggggtttggggccccacacacactctttgggcatttttcccgggcgggggtgcttgctttaaaacccagggcattttcctggggggggggggggcccctcccccagggaacggggggggggttactgacaggggccggggaaccctttattcgggtttcaacaggggggggggggggacccgggggggggggggttccgttaagccctcggggcccccaccctgggccggccttttgaaccccccgggggttttgaaaaaaaacagttctttttcggtaccccgccctttttatttttgcggcccacggggccctgaagcccccccgggggccccccccccccccccggggggccctttgggacccccc

SEQ ID NO: 7341 - DNA, 680 bp, Zea mays
  Clone ID: MRT4577_106694C.1
cattgggtacctcgaggccggccggggactgcttccgacccccctcctctcagtgcccacacactgcgcgccgccgccgggtcctcctagtgtttcgccgcgatgtcgctccggccgagcgagcgggagcagatgcgaaagggcaactacaagcagacggtggacgcggaggagagccgccaccgccgcgagggccagatgatggacatgcgcaaggccaagtgcgaggaaagtctccagaagaagcgccgcgatgggtttcccgcctccgccgccggtatgccgccgatggtccactccaccgcgctccagcagaagggtatgggtgacgtggtggcactccatttgctgggttcggatctgactttcttggtgacgggatggctttccggcgatggcgcatgctgtccactccaacgacccctccgtgcagcttgaggccaccacacagttcaggaagctgctttctataggtgagattgggatcttatgtgcagttagcattccggatggatagagtttaggggttgagatttgggccatgctcgaggtattaggccatacccaaacgtgagggtatggtcagttgtagctgtttcgtgtaattgttgtatacaggacttgacttgtggattgcgagctatcaaaattaaaataaaaaaaaaaaaaaaaaagcggcc

SEQ ID NO: 7342 - DNA, 610 bp, Zea mays
  unsure (1)..(610): unsure at all n locations
  Clone ID: MRT4577_106695C.1
ngttcaaaacagaggaataagacgacttgttttccgtttcttgaagacaacgagattcttttgaccacaccgtcgaggttgtcttgcacatgccgatcaagctgaccatggggttactactgcaagtgggactactagtccctgacctggaggagacgagccccgccgggcttgccaccgccctcctcggcgtgcccccggaaaataatgacgcgcacgatttcgtagaggccgcggcggtatccggccgaggcgaccacggctgcaactgtggtgaccactgcaagcgcgactcctggaactgctgatacacatcgatcaacaaccatggatatccattattatctatctagcttgtggcggtgatagattcctacataagcgatgactaactggctgccatacataggatattgtgcggtgtcacgtgttgcgcgtgtgctaaagaaagaaacagagttctctcgtttgctatctctctctctctctcttatctgcatgcttggcgactctctttgtgctcatgtacgagcgtatgctcgataccatgagtaacagctgttaccatatataatacgtacctcgccgttctgatttgatactatatata

SEQ ID NO: 7343 - DNA, 1434 bp, Zea mays
  Clone ID: MRT4577_106696C.1
cgaccccttaaccttcctcccgtccccttccccttccctcgctgtaattccatctccgtctccatctcgttcccaccacgccgctccctgtcgcggtgtcgccattgccccggcttccaagcaaaatcccgcttgcctcgccccaagcattcctgctttcacccggccgccactcttccccagtccccgccactcaaggaaggcggaggattttatctagtcttgcagcgcggccgtctccgtcccgccttctgcgcctcctgtggcgtttggagcatcttccaattttaagctgacactacttgaacttaatgcggctctacgcacctgcgctctgtctgctgcgatcaagcacgcatccccaccctaatcagttccgtgcaggattcacgcagagcatggcctcctggaagtgctcgcactcgccgtcaagcccgtaccttgcgaagtcgggtttagtcgattcttctcttaacaggaatgtaaagtcttctcagccacaaagtataaaatactttgtcagcttaatgggccagcagttccgttgcggattgtcaaccagggagggtagcctaagtgtaaagcttgacattccttcacacgaaaaatcaaggataggctggaactggaaaaacatgcatcaaaagataggaggtgtagctggtggactctgctttggtttctcggttactggagtagcaagtgccgaggttcctatcattagagtcaaagacaatgccgagacttcgtcatcatctaccagttcaactcatggaaaggaagtgtacacagattattctgtcacaggtattcctggagatggaaggtgtttattccgctccgtggtgcatggtgcatgcattagatcagggagaccaatacctaacgaagatcttcagagaaaactagctgatgaattgagagcaacggtcgcagatgaatttgtcaagaggcggaaagagaccgaatggttcgttgagggggattttgatacatatgtatcccatattagggagccacatgtgtggggaggcgagccagaattgttcatggcgtcccatgttcttcagatgccaataacggtttacatgcgcgacgaggatgctggcggtctgatagcaatcgcagagtatggccagcagtatggtaaagaagacccaatccaagtcctgtatcatggttttggccattacgacgctctacagatcccagcaaaggttggatcgaagaggaaactgtagacgctgcgcgccgcgagcttgaggtacgctccttgttccagtgtttatacaaccttgtcgaacactcatgctatatgcatgcgagtgtggaagaagacaagcttaacatgaaatggcgttaactcgccgccatgcataaatgttattacatgattcatgtacttccccaggagcagatgagttggaacacttc

SEQ ID NO: 7344 - DNA, 365 bp, Zea mays
  Clone ID: MRT4577_106697C.1
attttaaactagaacttgatgtctattacataaagaaaggttacatatagattcaggggaaatcttaactctaatagaccggcaggccaaataatgatgccgacccacatacaggctaacctccatgaccatgcgtgtcaactaataaggtttctagcagactgcttgacttataccatatattactatattagtataaaactttgattcggcactgcgactgtacattaatcatgaaaagctgggccacgttcatcaaatgatcaatcgattgaacgcaagaaacgtcggatttcacatgcacacacggtgcgagaacgacacgacagagcgcagggcggccgctgtctgcacagtgacagggg

SEQ ID NO: 7345 - DNA, 1499 bp, Zea mays
  Clone ID: MRT4577_106698C.1
cattgggtacctcgaggccggccggggagctttctgcatcctccgaccgagacgaggcagaaaccttcctcgatctccccttccccttccctcgctgtaattccatctccgtctccatctcgttcccaccacgccgctccctgtcgcggtgtcgccattgccccggcttccaagcaaaatcccgcttgcctcgccccaagcattcctgctttcacccggccgccactcttccccagtccccgccactcaaggaaggcggaggattttatctagtcttgcagcgcggccgtctccgtcccgccttctgcgcctcctgtggcgtttggagcatcttccaattttaaggattcacgcagagcatggcctcctggaagtgctcgcactcgccgtcaagcccgtaccttgcgaagtcgggtttagtcgattcttctcttaacaggaatgtaaagtcttctcagccacaaagtataaaatactttgtcagcttaatgggccagcagttccgttgcggattgtcaaccagggagggtagcctaagtgtaaagcttgacattccttcacacgaaaaatcaaggataggctggaactggaaaaacatgcatcaaaagataggaggtgtagctggtggactctgcccacgcgtccgggttactggagtagcaagtgccgaggttcctatcattagagtcaaagacaatgccgagacttcgtcatcatctaccagttcaactcatggaaaggaagtgtacacagattattctgtcacaggtgagaaatgctcacttttttttttcttaaagcttcatgaatcatgttcagccttttatgcttcatagttataatagaagaatgagcattgacctcattacttgtgactgagttacatggatccccaggtattcctggagatggaaggtgtttattccgctccgtggtgcatggtgcatgcattagatcagggagaccaatacctaacgaagatcttcagagaaaactagctgatgaattgagagcaacggtcgcagatgaatttgtcaagaggcggaaagagaccgaatggttcgttgagggggattttgatacatatgtatcccatattagggagccacatgtgtggggaggcgagccagaattgttcatggcgtcccatgttcttcagatgccaataacggtttacatgcgcgacgaggatgctggcggtctgatagcaatcgcagagtatggccagcagtatggtaaagaagacccaatccaagtcctgtatcatggttttggccattacgacgctctacagatcccagcaaaggttggatcgaagaggaaactgtagacgctgcgcgccgcgagcttgaggtgcattcgttgggcaaccatctaacctcctactactacagagaaaattcggaaacaataagctgcatgcatgcatgcattgagatgtgtacctgtacaaaatgtcaatccaagctttggatgctgaatctgtaccccatgccctt

SEQ ID NO: 7346 - DNA, 448 bp, Zea mays
  Clone ID: MRT4577_106699C.1
tttttttttttttttttttttttttttgctgcaaataaaattcaattccgatccaggagagtgccggactcaactgtctatgtgctctccacatgcccctcattcaaaacatgtacgctcactggacgtctggaccaactggtgagctgtgtagcttacttcactctaaatgaacgtacttgcagtcatcagagtatggtaaatgggtccccggcgccccttctatcttctactgtaccagtcacacaaactacacaagtgcggttttcagggcatggtgtacagattcagcatccgaagcttggattgacattttgtacaggtacacatctcaatgcatgcatgcatgcagcttattgtttccgaattttctctgtagtagtaggaggttagatggttgcccaacgaatgcacctggaattaagtatcaaattatcgtctacatttt

SEQ ID NO: 7347 - DNA, 3351 bp, Zea mays
  Clone ID: MRT4577_10669C.1
cattgggtacctcgaggccggccgggaaaccgaggaactacgatccccaacggcccaattcaacccgtaaccccacgcgacgccgaccgcagatccttcatctctttcctccctcgtaggcgaacccgactcaaactctagccccctctccttgccatccccgcccatggatcgcgatcgctcctcacggcgcactcgcaacgacgacgggcaccaccgatcccgcggccgggacgacgaccggcaccgccgccgtagtcgccacgacaccgaggatcaccagcacgacggtggagacgaggaccgtcgccaccgccgccaccgcgacaaggacggtggcagaggcggcgaggatgaccgccggcaccgtgaccatcacgataaggacgacagccgttgccaccgctaccgtgacggcggtgacgacgatcgccgccgcgggaaccgacgttccgtttccccgtccgagtccccgccaccctcggcgaagcgggaccgctcgtctagccgcccccgggagcttgtcgagcgccgcgactccaccgaccgcgagccgcggtcgccgtcgcggaagagaaaggggcacgagggcggtggcgacggggacgagcccggccgcgaagggggcaagcgggccagggcctccgtagacccgcctccacccaaggaggagaggcctaggcgggagcgccggaggtttgaggatgtcggtgcgaatgggaagaatggtgatgtgagtaagtcgagtaaggaaatctcatctcatgagcagaagggggagttatcaattaacggagattcacagaacggcaatgggcctaatgctggttctcagcaagtgctcagagtcgttactattccatcgtctgttccgagtagttcaaaggaatcttcatttactaccaacaatgcaaattggggagttagtattagatgtggtgaggttaccgtaaaatctagtacagatggaagtgcaacatctgctgctggcaaaagtagtaacctatctcttgatgctttagccaaagcaaaaaaagctttgcaactgaagaaggaactgtcagaaaaactcaagaaattacctatggtaagaaaacatagctagtcccagtcccttgctctaatttttaattgtacctttgcaactgttctaagcttttttcctcccccacagcttaataataagcttggtacatctgttactgctgcacaagtttctaaagaagaagcaaaaacttctgtatcagctgtagatgcacaactcttttctaaaggagaagcaaaacctactgatgtttctgttctgccaactagtaccatctctggaacgccggccgtaggtggtgctatcggtattccaggtcttacgaacattcccaatcttgaatctgtgaagcgagcccaagaacttgctgctaagatggggtttcgccaagatccacaatgtagtcctcttataaacttattccctggtaaatgcactggagttactgtgcgatataggcatgcaaacactcctgttcttctccttgatgcccaaggtagggaaattgatgagcagggaaacgttatcagcaatacaaagccaagaattcgtagtactctgaaggtcgatatcagcaaacagaagaaagaggcttttcaaataatcaagccggacttggactctcttgcaaaatcaagtgttcattttgatgaaaggatgggcataaaccaaaagaagctcctccgtcctaaaaggccaggatttcagtttgttgaagagggtaaactcactaggcaggctgaattgcaaaaaattaagagtcaatttggtgaagcgcaagctaaagagctcaaagtaaagcaagcccagcttgctaaggcaaagacagaagtagacatgaatccaaaccttattgaggttgctcttggtgtgagagctccaaaacaaaagcagaaggaagagatccctgaaattgagccatggttgtttttgtttcctttttgaatgatgtttttaaggttctatgttgtgaatgaacataaagtaatttttattgttgttttcagggatgcaaaaattttactttctgccacatatgaggatgtctctgtggagaaacttaatttggacaagatcaccatatatgttgaacatccagaaccatatgatccacctgctgagcctgcaccaccgccgccccagccactgaagttgactaagaaggagcagaagaagttgagaacacaaaggcgtcttgctaaggaaaaagataggcaagaaatgattaggcaaggcctcttggagccacctaagcccaaggtcaaaatgagcaatcttatgaaagtgctaggctctgaagctgtccaagaccccacacggatggagatggaaataagaactgcggctgcagagcgtgagcaggctcacgttgaccgtaacattgcccgcaagctcacaccatctgagcgccgtgagaagaaagaacggaagctttttgatgatccaactaacacagtggagactatagtttgtgtttacaagataagagacctgtcccatccacagacacgcttcaaagttgatgtgaatgcacaagagaataaactgacaggtgctgcggtcattactgatagtatcagtgttgtggttgttgaaggggggaaaaagtcaatcaaaaggtataataagctcatgctaaaccgtatagattgggctgctgctgttggtggtgatgaagacgcagaagcagaagcggaagctgacaagccagtgaatagctgtgaattggtctggcagggtagtgtggcaaagcccaccttccacaggttcactgtacataactgccggagtgaatctgcagctaagaagatattcgttgatgcttctgttcctcactactgggatcttgctgtcaattcctcggagggttctccctgagcaaagcacctgttcagaaccttggtagctactgctgatctttgctggctacatgctagttatgtgtggccagtgttatagcgcttgttatggtaagacccttaccacgagtatctacatcaatggcctcatcagttgaagtactgaactcagtaatgcctggtgttagggggtgtttatccctccattttatttcatttgtccctaaattgccaaatacagccatatttgtcaatttaggaactaaaatggaataaaatggagggactaaaaattagtccctataaaccgaacacccccttaatctgttgtgaacatgctatttcagagatgttattgttggattttcctgtggcctagaaactgttatgtgagcaactgttgaattttgcacgctcagcgtgcatttggaataaaccaattgcatc

SEQ ID NO: 7348 - DNA, 1106 bp, Zea mays
  Clone ID: MRT4577_1066C.1
cttttggctaagatcaagtgtaatatctgtttttatcagtttaatatctgatatgtgggctatgtgcctacttcgatattaaatttatttttttgtgggagagggtccattgccggtggcttgcccttcggggctctcatgcgccgtccagctacagctattgcactctgctggccggacctggcgcaccccaaccaaaacaaaggttttaggtggtatacaaggcagcttagtatggatgaagacggcgacgtggctgatgagttcttggatgaaattatcccagaaggctcagtcaacaacgccaaaagcccagtcggaaggttccaagtgaaatataacacgaaacgaactgctctagcattgaggaagcatgtaattgctgtcgatggcgacatccgccatagcttggaacaccaagggcaactgcggtgggtgtgaccgagtctgttgagcccatatgaaagtgcaggttgggcagaggcaggcgcgcccatgggcgaagcgaatgacctaggttacccgtctttgaagtggacctagaggtagttcattgctaatttatccatcgttctccgctcagtgtgttggtacgcctgatctcgaggttattcagacaccttgtaccactagtagtttgtcacgatatacctgaggatagcttccaggccacgaagggaaagcatgcccaataggagaatttctgggccagaatgggtcctgtaagcggtgcagtggagggtttttctttttctgttggcagtagtgaacgggtttattatatatatgggagatggttcgtgtggatgagactaggctgggaactgaagattgaaccggctgcctccgggagaccgggaggggcagtgattcgtgagaggaaacgaacaccgggagcggtgttcaagcccagattcctaccgagttcttacatagttgtacattattgaacagctaccgctggacaagttgaatgtgcttggctggcaatggagccaccgaatccgtgcatcagatgatgttggttagccattcattcatgtatgctgttcggccaatctgcaagctgacagactgatggaaaaaaaaatagaatgtgtgaatgt

SEQ ID NO: 7349 - DNA, 245 bp, Zea mays
  Clone ID: MRT4577_106700C.1
cggactcgtggggtcggagatgtcccttaagattcagccgcaggctagcgccggcccgcttcgcgcctgctttggtggaggtggtgagcctagtgggagcacatcttgcttcttcctgccccatctccctgtctagcctaagctgcatatgatcgtccttcgtgatttcaacacttatgttattcacaacaccattgctcttgatccccttttcagtagagtctaagaatttgacaattgcaatt

SEQ ID NO: 7350 - DNA, 596 bp, Zea mays
  Clone ID: MRT4577_106701C.1
actcctataggggattgggtactctcaagggcggccgggatagcctcgttattgtttttgcctctagtctcaattcttagagagaaactaccatcgaatttagagatgtatcatttatttcctttacggctgctccttgccatgcgatagacgttccaacgccgacaaaatgcccgccatccctccatcaacgacgataccctcagactcagggcatcacggtctcctcgcagtccgccaaaatgacgactcaaggacatcatttaccgccgtaccaacagcctacaagagtgccgacacctcgctccaccccggcgccgtcgcaggcattgtccttggcgccgtagcggccttcctcctcctactatacatcatctacatgcttcttcatcgtggtcccgtcgtaagaccaatgggcgacggtgcttccacagtggcctctggctatcccatgagcactgtcaccagcgatacgtccacatatctaagcttccgaagcagaagggaccgcaggccgaagaacagatcccgcagcagaggcacatccagagcgacatccagatccaagaggacgcggtctcgtacaactgtgcagt

SEQ ID NO: 7351 - DNA, 265 bp, Zea mays
  Clone ID: MRT4577_106702C.1
ggtccaaccaatttttttttttttccaatttcatctacggagatcctggttaaaagcgaacgaagactacaaactagatgtgctcaccgcattgcaccctgctatgcagggtaggagcacactgcatttgttatgaaaaacaagctgttttacatccacaagcaaaaagccggtggagagacccttttcttacgagaaagagctattctatatgggggaccggaggacaccaaaacatgccttatcctagctccatctggatggg

SEQ ID NO: 7352 - DNA, 348 bp, Zea mays
  Clone ID: MRT4577_106703C.1
gagctttctagttggcggccgcccttctaccttttgggttgggggaaattttagggggtttggcctctttcacaccacatcatttgcatcacaatcttaacgaagaatcaccgatcgtacataacgagaagtcaacatgaggaacgtccactcataccaagaacgtaacgtaagaacctcaaaataattaaacttcgggggtgtcagatttggtagacagttcatcttcatcatccttgataggccaaactaaaggccaattaaggtgctgcatcaccattaatcgtcagattttggaacggggaccaggctggccagcttgaccctgggaaatgtgtactcaccact

SEQ ID NO: 7353 - DNA, 880 bp, Zea mays
  unsure (1)..(880): unsure at all n locations
  Clone ID: MRT4577_106704C.1
cgttcgcntactganagagccactcaaaacttttttttgtccctgaaagatctagagagccactcatcatcgatagatagagcagtttctatttctactaccttgcctttgctgctgctctactgtgctttgtggtgggctggtggcagcggcggcggaccggcgacagtggtgatggagttcacctctaagcagaaggctgtgcttctcctctgcttcttcatgctctcctgccttcttcttcttccccgggcttcctctgctgcgcctctttccagaagcctgtcgctgacgaaccgccagctgcccacgaagaaccctgctctggaggtgcctgcccagcaggatcagggtgcggtggaagatggaaacctcggcgaggtggcggcgaggatggacatcgaggtgaacgactaccctggatccggtgccaacaaccgccatgaacctaggagccctgggagaccatgaactttgcttgacgccccgtcatatatatcatccctgcgtacgtctcacagaagaacgaagagcatggcatggagtcttgagagttttataattaagctactaagtacgtagcatgcagcaggagtacattgttagctataaattctactagagcttattaacgagtcttgtcgtgtatacttaattacgtagcttagtacttgtatacgtcgatcgtatcgtggggtgtggtacggccggtggtgctgaggccgtctaagctagctgcatagtattttgttagggccttcaacaacgcactgtcagaagatcaagtgaacgagctggccgtgctagctgttccgtgtatagccagcggcagtcttgttcgtttgagcttatcagccgaatctgctagttatttagtagt

SEQ ID NO: 7354 - DNA, 232 bp, Zea mays
  unsure (1)..(232): unsure at all n locations
  Clone ID: MRT4577_106705C.1
gttttngagacgatgatgagtccggggggnnagcncgaggctcatcatccagagcgacgacgacgacgacgnccgatccggccacgacgtggaggagccggagccagagcaggagcaggactccgactcctcgtnntcgncctcatcctgcgccaccccacgccgcggcccaagctcaggcgggtggtgcagcaatggccgcagagttacagggaatcggtcgacattctca

SEQ ID NO: 7355 - DNA, 258 bp, Zea mays
  Clone ID: MRT4577_106706C.1
aaaaaaaacaacttcaaaaggccccattaattaaggggaaaaaatgggggacaaaaaaaaacacctgcttgttttggggggtggatttttgctccagttgaacacacggggggcaaaaaacacagcctggggcgtttatttcttgttcttgggccaccccccccccctgatgctagttcaagggcctcacgggcaaaaaacaaccttgtagttggttcccgcggggcaagaaaaggtgctgggggcccgacccctggg

SEQ ID NO: 7356 - DNA, 572 bp, Zea mays
  Clone ID: MRT4577_106707C.1
tgtagaatagaggggaggaaggaccgaggtactaaccggagccccactcgcccgccgactctaatgtccacagactgtctgcgtcccaccgctcactgctgccgcccgttcgtctcgccattaaatgcatcgccgcctccgccctcttgaccgccatcacgccggatgagttcacgatgacaagcgcggaaacctgtcgtggtggaagcgtgcccggactgagacttcttggtcataacggaccacaaggatcctggagattaagagaatgggttccttggaggcccgaaacacgccgaccgcgggaactgaggactctttttttacatcgacccccaaaagaaaaattttcgaagacgatgagaaattcgatgtttttgtgcttgaaaaaagttctgcctgcaaattccggtcgttgcaaatttatactctacagaataatgcctgctgagattctaccacttctatagacaccatctgtgcatgaacatcaaatgcatgccaagctcccgacttgctaatgagcgcatatggtataaggagagaatccgatcacccgagatgtatcttct

SEQ ID NO: 7357 - DNA, 627 bp, Zea mays
  Clone ID: MRT4577_106708C.1
ctctgctctgccgaccgcggccgcctattccataatgcactggggcggctctctccaccttgacctgggagcacgacaccgatgacctcggtcgtgatatgcctgtgcttcgccgacttgctgtccaggcggattcacacacgatgtgatcctcatcaacgagaactgattggtacgcccggccgcggccatacaacaacgacatgctacctgatttcgcccgtgtgcacaccgaatcctactcgtctgccggcgcttgggacagcgtcactcctgttgcaacctcatcctcctcgctgtcttcgatgctcagtgcgttcgcgagatctacagttcgcgtcgctctacgacagatcgacgaccctccctcctgaccttggcgcctctctctgtctactcagaaccgagtatggagccccgtcccactggatgtgtgatccatggtttccaaacctctgtgctggcgaacgtgtgcaatgccacagtgctagagggagcacatcgtaggataacttctactacacctctccaacagctctttgcctgttacaatatctactgatcctagactgtgtctcagctgtccagagtttgaatatatcttacaacacgatgacctggatcgat

SEQ ID NO: 7358 - DNA, 290 bp, Zea mays
  Clone ID: MRT4577_106709C.1
ggtattcgtgcgctagagcggcgagctcatcgagcatctgtttaccggctagatggcgagaaacggggcatacagggagcaggtttcttccagccggttccgtgtggctagggccggacaggctggcagactctagagacaaaacaaggcgcggggccacaccggtccagagagcggcgaccatgatgtacgagggcattttttagatcctgaccgcgagaggtgccatggttgtcaccccaggctagctagagaaccagtatttcccctcataaattatattgtgctcc

SEQ ID NO: 7359 - DNA, 1627 bp, Zea mays
  unsure (1)..(1627): unsure at all n locations
  Clone ID: MRT4577_10670C.1
ctcgagccggcgggagctcgcccctcattagagccagaagccaatttcctttcccaaaacaaaaagaggcaccaagggagaatcagcaagacgacaccatggcagcggcccactacggcaacggcagctcgacgagcggcggcggcggcggccgtggccgcgggaagcccatcacatgcaaagcggcggtggcgtggggtcccggagtgccgctgtcgctggaggaggtcgaggtggcgccgcctanngccccatggnnaggtcnncgcgtcaaggtgcttttcacccccatctgccacaccgacctcagcgcctggaagggagagtgcngaggcgccancgtagctagtcttggatatggagccaagctgtatctggtggacatgagaatggttttttctcccttaacagctaactcctagtgacttttgcacttgcagagtggtagagagcgtgggcgaaggagtagaaggcctcgccccaggagaccacgtcgttccgatcttcaccggggagtgcgagaaatgcgtgtactgcaagtccgacaagacaaacctgtgtggaacctaccgtgtggatcctttgaagagcagcatggtctacgacgacggcacgaggttctccgtggtggaccaggcgtcaggccagcggcggccggtgtaccacttcctcaacacctccaccttcaccgagtacaccgtgcttgacgcggcatgcgccgtcaagatcaaccctgaggccccgctgcagaggatgtgcctcctcagctgcggcatctccacaggagtgggagctgcgtggaacactgcaaacgtttctgctcggtccaccgttgcagtgtttggactcggcgctgttggtcttgctgtagctgaaggtgccaggctacgaggggcaactcggatcatcggcgtggacgtaaacccttcaaagttcaccaaaggtaaagagatggggataacagacttcatcgaccctaacgacatctgtgacaaaccggtccatgaggtgatcagggagatgactgacggaggtgtcgactacagcttcgagtgtaccgggataaatgatgtgctgagagaggccttcttgtccacgcatgatggttggggcctgacggtggtgctagggatccattcaacgcccaagatggtgccgctgcacccgatggagctctacggccgtaggatcaccggctgcgtctttggcgacttcaagggcaagtcccagctgcccgacctcgtcgataaatgcgtcaacggggaggtcaatataaacttcgatggcttcataacacacaagatgccattctcggacatcaacaaggctttccggttactcgaggaaggcaagtcgctgcggtgcctgctcagtctctgatcgacaatacttcatcagcgaggacagttttggattgagtagcaaaataaatgtacaaggaaagtttttccctcgtatactcgcttcttataaaacgaatgcatgcaacttcttttgttctttgaaaaaaaaaaaaaaaaaatctccccccccccccccnaaaaaaaaaaactttttttttttttttttcctcccgggggggggggggagaaaaaaaaagtgtgttttttttttttggtggcccccc

SEQ ID NO: 7360 - DNA, 337 bp, Zea mays
  Clone ID: MRT4577_106710C.1
tcttccgtcgacctccgccgagggggtcgcagggcgagcctagggttaggggttggtgcctccggccccggttcgggccagtccggctcggcctccgtcgcgccgtggccgccgcctccatcgtggtggacttcccttgcgtgggcgccgccctctggttccccagcctcgcttgacggggcggcgactccggctcgggcttcctcgccgccgtgtccgccgccccaccccccggggcagccggcctcaccaactttcaccgggtgttctcgcgcgtgctgagcgcctacccggtcccaccggtcggggctgtgtgggtcttgtgcgggctctgctt

SEQ ID NO: 7361 - DNA, 175 bp, Zea mays
  Clone ID: MRT4577_106711C.1
agtcaactccacttctcttctccgcgtcacatcgtcttcaccgtagccgacgcttcaaccggcatccatccattgatgacgagcacgacgagatggaactaggcactgggatccaggagtgcatcctcagacggtctccgctctgtagacagactcaagggtttgcatatagaca

SEQ ID NO: 7362 - DNA, 388 bp, Zea mays
  Clone ID: MRT4577_106712C.1
ggggggtgtgggtgtttggtggggggttttttttttctttggcgcgggggggggggggggaggggggggggtcccagggggggggggggggggcttatgggggcccccgctgaaaacaattgggggggtcaaagggcccaaattgggaggggggaaaaagaaggggcaaacgcgggggggcaaaagggagggggcggggaaaaaggggggggggcgggggggccccctcggggcaaccgaaaaaaaaaagtggggcgggggcattaggccactgccaaccggaaaaacaggggcgcccgcgtttataaggaaatcccccaaaccggggaaagggggggttagaattggggccccttccccaaaacggggacaggaaacctgaaagggc

SEQ ID NO: 7363 - DNA, 431 bp, Zea mays
  Clone ID: MRT4577_106713C.1
tgagctatcgcgggcccactcgcacgggtagcggtaggctcggaattcggctcgagaccgctccaccgaacacgattctaggcagaacgaagctgaagaagctgggggtgcacctattatggcggaggtgccgaggattctggccctaggtctgctagcgcttctgggcgctgccgtcggcccggtcgccgggcaaaactgaacctgccacccatacttgtgctacagcaagttccgctactgaggcacgaccgacgcctactgcggcgacaggggccagtcgggcccttgccaatcgggcggctacgaaatccacagaggccgctgacgctgcggacgcagtgacagtgcaaacgacgctaatggggtcaccgacgcgttcttcaactgcataaagaaccagcccgacagcgatctcgagggcaacaact

SEQ ID NO: 7364 - DNA, 818 bp, Zea mays
  Clone ID: MRT4577_106714C.1
cttctcttcgaacactgcccaccgtcacagcagaatctcctccggtcctcccttctctccgtagaaacatttttcgacgggtgtttcccacgccggaatggaccacccggcgccataagcaagattcgtttgcattcagtaatgcctttgcctaaatcagacctggggtcataactctttagtagagaaccaagaagatgcaggcatctagggcaaggcttttcaaggagtacaaggaggtacagcgagagaagtcagctgaccctgatatccaattaatatgtgatgattctaacatattcaagtggactgctcttatcaagggcccttctgaaacaccttatgaaggtggtgtgtttcaacttgcattcgcaattccagagcagtatcctctgctgcctcctcaaacaggtgagatttgtctggatatattgaagaatgcatggagccctgcatggacccttcagtctgtttgtagagccataattgctctgatggcccaccctgaaccagacagcccacttaactgtgattcaggcaatctcctgcggtccggtgatatcagaggctatcaatcaatggcccgcatgtatacaaggctggcggccatgccaaagaaaggttagctgtagaacatgtgccaggccaagagcctattgtccatgcatggctacatgttgtcaggtctgccttgtgctgtctggatgaactttgtggttcttgattcatgaaatactaaccgttcgtgtgttacgtgtgtgtctggggtaatgagaggacactcgggttctcgatggtgttggtctgtgatgtattta

SEQ ID NO: 7365 - DNA, 484 bp, Zea mays
  unsure (1)..(484): unsure at all n locations
  Clone ID: MRT4577_106715C.1
cggccgggnaaactacaccgcagatatccgggttagcaccataccaaactatccgtcgacgaaagtgatctatgatcagcgtgcatatgaaggtcttggtgaggacgtttggtcgaggaagaccatatgaatggtggaggagatgtgctacatacctgtgattgaccaggaccatacgcaggacgaggacaggatcaccgcggacctgcagtgccttatttgcggcaacgggctaatggaggacagcaagacacctagccactccaccaatgggatggagtcaagcctacagctgacattctgcctccgatgcgtactgaacacccggaccatgaacacgtccaccactccctacaagatcaacacagaccgagccgggggggctctgcgtgctgcaagctgatctggccaaccacctgacagccattgcgacccgcctccctacggagcggcacaagccagaacgacgatccatcctgttatc

SEQ ID NO: 7366 - DNA, 1183 bp, Zea mays
  Clone ID: MRT4577_106716C.1
gtgtttcccacgccggaatggaccagccggcaccataagcccaagattcgtttggtacgctctatttcatccgtatctttacttcaatacgtatacggttatggttgagataatatttaagggcgttgagggaagtagcggctcatgtcgtcgggttaggggaattgaagttcctgactagtttccggtgcgcgtttttttggtatttggctggcatcctgagtccgctgctgcccgccgaacgatggtcgatctgatgattgggcaggcaaatacccagatcggtggcaccggcgtttaagttgaagaggagctgggatgagtttgtacgatactggctctacagttaggagaacacatttaatctaccttcactagcattcagtaatgcctttgcctaaatcagacctggggtcataactctttagtagagaaccaagaagatgcaggcatctagggcaaggcttttcaaggagtacaaggaggtacagcgagagaagtcagctgaccctgatatccaattaatatgtgatgattctaacatattcaagtggactgctcttatcaagggcccttctgaaacaccttatgaaggtggtgtgtttcaacttgcattcgcaattccagagcagtatcctctgctgcctcctcaagttcgatttttgaccaaaactttccacccaaatgtgcatttcaagacaggtgagatttgtctggatatattgaagaatgcatggagccctgcatggacccttcagtctgtttgtagagccataattgctctgatggcccaccctgaaccagacagcccacttaactgtgattcaggcaatctcctgcggtccggtgatatcagaggctatcaatcaatggcccgcatgtatacaaggctggcggccatgccaaagaaaggttagctgtagaacatgtgccaggccaagagcctattgtccatgcatggctacatgttgtcaggtctgccttgtgctgtctgtatgaactttgtggttcttgattcatgaaatactaaccgttcgtgtgttacgtgtgtgtctggggtaattgaagaggacactcggcttctcgatggtgttggtcttgtgatgtatttagtaataagaaaataaaaaatgatttctcgataagcgaggttgtgatcaaaaaaaaaaaaaaaaaagcggcc

SEQ ID NO: 7367 - DNA, 886 bp, Zea mays
  Clone ID: MRT4577_106717C.1
tggggtcaaataatcttgtaccagctattttttctattttgactgtgaagacagcgtcaggatccatcaccacctatgcacttgagttcattgagaatctgttgaggttggatattgatttgcagcagcaagatgaacatttagtgaagaaagttgttcttcaacatatggatgttcttatccatagtctccatgattttgttaatcatcgcaaagagctcaacaggagatctggtacatggcttgggcaacgtgaacttaggctgttcaaattattgctaaattacatcacagacccctcaactgctgataagttcatagaccttattcttccatttttcagcaagaaagatttgaactccgacgattgtttggaagcactatgtgttgtgaggggaataattcaaaatctgagatgcaaagtatctgaaaaagttctaaatgcactgaacccattacttgcaattgttggattggaaccgcgactatgtatctgtgatatttatgctgggttgtcattgaataatccttcgatgttgtttctggctgggttaataggagatctgaatgcagtttcagcttcagaacttggtgaactagattatgacacaagacttaacacctatgataaggttaggccacagttgtttcttggcttgacagaagagcatgtgggcgccatattatctcattgtgtgtatgatatgtcatctgaagaattaattttgcggcaaagtgcatctagggctctgcagtcgttcctggacttttccgcctcagttatgaataatgatgtgtccaaatactctattgatgataaatttagagagaataataccagaagcatttgcaccgacagcaccggaattcgagccggtacccggga

SEQ ID NO: 7368 - DNA, 461 bp, Zea mays
  Clone ID: MRT4577_106718C.1
gggtattaatgcatgacattccggtccatccatcgctcaagttgctgagtaaaaacgagaccatgcccatctgcaagatcttggcctcaaagccaattgagccagtcgagtagccagcactgcaaatatttcagagttgataacattgtacctttgggtggtactgccctccagcatctccatctcttggcttgtttttttgttatccgttccctaggtttcaatatgatagtgtattcagacaagctacgagcttcaagtaaagatatatgaaggaacaaaatgaagaacaatcactggagaaaccttgtctgtaccaatcactatagaataacatcctttctcttttgagtgttcgggttcagggacacatgacatgtaagaagacattgtgcactatccttttgctgtgtggcctggccgcctgggtgaattgattctctgggcttggtgttgttttg

SEQ ID NO: 7369 - DNA, 601 bp, Zea mays
  Clone ID: MRT4577_106719C.1
cctcccccaaagccccactgtttccatgtgagcgaaaaaaaaaaccctgcttcggtgcttccgtagccttgtcgctgtttcctcccgcgagccatccccggcttctaccgaccccgccgcttcaccgccgccgccgccgccgccgccatgaaccagccggtgcagaagaacaccctctacgtaggtgggctggcggaggaggtggacgagaagatcctgcacgcggcgttcgtgccgttcggggaggtcaaggacgtcaagacgccgctcgaccaggccacgcagaagcaccgctccttcggcttcgtcacgttcctcgagcgcgaggacgccgccgctgccatggacaacatggacggcgccgagctcttcggccgcgtcctcaccgtcaactacgccttccccgagaaaatcaagggaggggagcagggatgggccgcgcagccagtttgggcggatgcggatacttggtttgagaggcagcagcaagaggaggaaatgaagcgccttcagacagagcagaatgcagcaatgaaagaagcagagaggcttcacagggagaaaatagccgcagaaaagaacggggagacggatgaagcag

SEQ ID NO: 7370 - DNA, 842 bp, Zea mays
  unsure (1)..(842): unsure at all n locations
  Clone ID: MRT4577_10671C.1
cattggtacctcgagccggcgggagctcgcccctcttagagcaagaagccaatttcctttccgaaaacaaaggcaccaacggagaatcagcaagacgacaccatggcagcggcgctctacggcaacggcagctcgacgagcggcggcggcggcgcccgtggccgcgggaagcccatcacatgcaaagcggcggtggcgtggggtcccggagtgccgctgtcgctggaggaggtcgaggtggcgccgcctggccccatggaggtccgcgtcaaggtgcttttcacctccatctgccacaccgacctcagcgcctggaagggagagtgcgaggcgcagcgcaaataccctcgcatcttgggccatgaggcagccggagtggtagagagcgtgggcgaaggagtagaaggcctcgcccctggagaccacgtcgttccgatcttcaccggggagtgcgagaaatgcgtgtactgcaagtccgacaagacaaacctgtgtggaacctaccgtgtggatcctttgaagagcagcatggtctacgacaacggcacgaggttctccgtggtggaccagccgtcaggccaccggcggccggtgtaccacttcctcaacacctccaccttcaccgagtacaccgtgcttgacgcggcatgcgccgtcaagatcaaccctcaggccccgctgcagaggatgtgcctcctcagctgcggcatctccacaggagtgggagctgcgtggaacactgcaaacgtttctgctcggcccaccgttgcagtgtttggactcggcgctgntggtcttgctgtagctgaagtgccaggctacgagnngcactcggatcatcg

SEQ ID NO: 7371 - DNA, 351 bp, Zea mays
  Clone ID: MRT4577_106720C.1
cggctcgaggccagcctcctggcccaaggtggagaagatgggcgtgacagcgttgtttcaacaggagggtgaagggagcaacaatattgggtttgtcgtcaaccttcggcttaattcgctgacggagttcgggacgccgccagttcatcgcgggcaaacttctgcaagcagagaagaaaaaggatgttctcagtgggagagagatcaggtcatggcggcctggcagtgtatgaaattgagtacacactggatagcactaggtgagggatgaaacagatcttctcgggtgcatttgttgcttcaaggaagctttatctgctcaacatagcctattcagacacccggacagtg

SEQ ID NO: 7372 - DNA, 219 bp, Zea mays
  Clone ID: MRT4577_106721C.1
ccaaggcctccgccaagatgactcggagactgctgtcacctgaatgaagaccacttataacttccatcggtagagcccttgcggaacattgccttgaggtattagtgtctacacagccacgccatggcaggctcctattgttgggctaccggctaccgctgctgtacttgagacgctcgacttaagaatttcatgaaaactccttctgggcgtatacac

SEQ ID NO: 7373 - DNA, 661 bp, Zea mays
  Clone ID: MRT4577_106722C.1
attgggtacctcgaggccggccgggcccccaaaccaaccgatcccaatcccgccgtatccggcgaacgcgcgccgcggccatgtgcagctgctgagagaaggagcgagcgcaacgacgccactggccatggacgagggctattccaacctccccaccagccacctcctcggctccgtccccgctgtgacacaagatgacaggaaattgggtccccccgccgcccaagttgcagatgcagctgccacctctcggttgcaggagttcccacctggaggtggtaatgttggagggtatcggccaccaggtggccctgcagatggagatgttgaaaaccaagcagattggaaaggatacttcaatgttgcatcttatgctccatacttcaatgttgatactgatgttgtagttgacaggctcatcagttcagtttatccaatggatggtttttacaggaaaattgatgctaatcctgacatgtatgggcctttatggatcaccactactctgattttcatgcttgctgtgtttgtattttggatcacgcccaagtcttgttcgattttggtgtatgtggggctattctctggttatcttctacctgcatctgtacttttgcttattcctgtgggatttcttcatgggtcatcatagctcttgctg

SEQ ID NO: 7374 - DNA, 449 bp, Zea mays
  Clone ID: MRT4577_106723C.1
aagcaggcacgcctgcaggagctgggacggaagtatataggcggatccacgagctgttttggcggtggacgcacccagccaggatacggtggcggaggaaacagccaacctggatacagccgctgcagaaacagacagacatgatacgggggaggatacatgcgctatcaaactggtggaggatacggacatggacaaggtgggtctacatgaacatgcggaggggggtatggtggctgctttggccgacctgggcacggtgaaccaccaggtggaggaagtggcactggtggcggtgtaggaatagcagtggggtacggaggtggaggaggcggaggttttagtggtcggtccggccgaggttgtgatttcgcacacggaggcggctgtcaccacgattgtgattcccgaagccaggcctaccattgccagctcgatacccttcttca

SEQ ID NO: 7375 - DNA, 1174 bp, Zea mays
  Clone ID: MRT4577_106724C.1
ggctttgccccccttccccccaaaccacaccgatcccaatcccgccgtatccggcgaacgcgcgccgcggccatgtgcagctgctgagagaaggggcgagcgcaacgacgccactggccatggacgagggctattccaacctccccaccagccacctcctcggctccgtccccgctgtgacacaagatgacaggaaattgggtccccccgccgcccaaggttgtggcatgctgtgaaactgtggattggtgcgggcgcgtgctgcagttttttttttgtaattatcacaaattaattttcagttgcagatgcagctgccacctctcggttgcaggagttcccacctggaggtggtaatgttggagggtatcggccaccaggtggccctgcagatggagatgttgaaaaccaagcagattggaaaggatacttcaatgttgcatcttatgctccatacttcaatgttgatactgatgttgtagttgacaggctcatcagttcagtttatccaatggatggtttttacaggaaaattgatgctaatcctgacatgtatgggcctttatggatcaccactactctgattttcatgcttgctgtgtttggtaactatgccacttatctggtgcaaactaaaaaggatatggacatatggaactttgatgttggttatttcagttgggcagcatcagtcatgtatagttatgctatcattgtgcccgtcgtgttctttttcctgtttcagtattttggatcacgcccaagtcttgttcgattttggtgtatgtggggctattctctgtttatcttcatacctgcatctgtaagtattcgatttccatctgtttgtttcgttatttatatcactggcaagaatacacagacattcaattttaacatgatgtacattcataggaattttcagttctctaggttgcaattatatataacggtcctaaaaattgattcacttaatgtaaagaatccatgacgttatcatggttgtgagcgcttggaactcacttctgttcttgaagatgaatgttgccattatgctaacatgagctgccctcctattttgtctggttaaggtacttttgcttattcctgtgggatttcttcaatgggtcatcatagctcttgctggtggtgcattatcttggttcataacttt

SEQ ID NO: 7376 - DNA, 211 bp, Zea mays
  Clone ID: MRT4577_106725C.1
gcgcggcttcttctgcgccgtcgccgtcgccgtcgcgggatccaccagatcggtggcgccggacgacgccgtcttctcgccggccatgtcggacgccgaggctagcttcctgctggacggaaacgaaacacacttgtgttgtgtattgcgaaagcgaggtggagttgtatttgtagagagatccaagggagagagagagagagagagagag

SEQ ID NO: 7377 - DNA, 120 bp, Zea mays
  Clone ID: MRT4577_106726C.1
ttctttttgtctcccgcaagcaccgatttagtgtactgggctctccgacgcgcggggggggaactccctactacatctgaaccatgttcggcggctcgatccttgacaaccttctcgagc

SEQ ID NO: 7378 - DNA, 422 bp, Zea mays
  Clone ID: MRT4577_106727C.1
atgtggggatgcacaagggccctgagatccacgccaagctttcttggcccccaacagaaagcccaaaacagagcacaggggcgcggcgccttctacactaaaaaacaccacgcaagctttgtggtgcagcgacagattttacatttaagaacctggccgagacgccacattacacactgaggaacgggaaagcgaacacggggcattccttattgatgcgtgaggtgccagaagtgctctagacggagaaaaaaacagacttggggactccccccaggtcaaatgcaacagaaggctttaggggaaacactacctgccgggggggacgcaagaatattggtgggtccaaccttacgacaaggccctgcatgagagcataagcaaagattggaggcaacaaacaggtccccctggacttagac

SEQ ID NO: 7379 - DNA, 349 bp, Zea mays
  unsure (1)..(349): unsure at all n locations
  Clone ID: MRT4577_106728C.1
aaatgcgcaaggctacttcgctggttctcttataaaacagctttgagtccctcacctncttcaccgaacgttatgacattgtctacgtctaccgcaacaataactgcacgcgctacatgaaggagtcttccaatttttttaaacatttcaactccacaaaaaatcccaacaagaatattcttactccaccttataaattcttggccttatgatgtgggtgcaccccataaaaaactggtttttaatttgcaacctaaaattttctctgtttttaccccaccatatgatcttcattcatactctccatcaccgtttttaataactcattgttccaattcaatcttttctt

SEQ ID NO: 7380 - DNA, 619 bp, Zea mays
  unsure (1)..(619): unsure at all n locations
  Clone ID: MRT4577_106729C.1
cttggcacaaccaacgggggctcggaagaggagaagagccgaccagccgggcatattctctcttcctccctccggtgctctctccagcggtccagccgcagcgccctgaaagaggaggcttccactcttctttctccccgagcacccgcccaggttcagatttagcctgggtgcgtctgcaggttccggttcatggagagatggagcctgggtgccaaagtggtagctctcgcactcctgctgtctgctgcttctcatggaagaggtgtatatgacagatttaaccgctctgtttacgtggacatgctcaagatgcaatgacttgactcaaggattcgagatgagatctctaattgttgatgtggagaactgcttgcaggcatttgttggtgtagatcatagtctgaattcgataattgttgcaatcaggggaactcaagagaacagtgtacagaattggataaaagacttgatatggaagcagcttgatctaagttatccaaacatgccaaatgcaaaggtgcacagtggatttttctcctcgtataacaatacaattttgcgtctagctatcacaagtgctgtgcacaaggcaagnaagtcatatggaggaatcaat

SEQ ID NO: 7381 - DNA, 277 bp, Zea mays
  unsure (1)..(277): unsure at all n locations
  Clone ID: MRT4577_10672C.1
tagcttggacgcagctatggcctgcttaaaacctctctccctctgcaacgtggaatactcccancaaggagtagtacaaagcagtcatgaacatggctagccccaggctaaagctcttccgcttacacgtctccaaagaagagcaccagctgtgtttttttaccagggggggggccaaaacacccacccanaaaacgcaaaaacntcccctaacagggggggggggggcgactcttttttcttatccacccaccccaccgccacgggcacggggggg

SEQ ID NO: 7382 - DNA, 1733 bp, Zea mays
  unsure (1)..(1733): unsure at all n locations
  Clone ID: MRT4577_106730C.1
ccggccgggcctttttttctctctgaagagtgggagtgtacccggcggcctggcctaaaccgccttcatttcttggcacaaccaaacgcgacccgggggctcggaagaggagaagagccgaccagccgggcatattctctcttcctccctccggtgctccctccagcggtccagccgcagcgccctgaaagagggaggcttccactcttctttctccccgagcacccgccgttcagatttagcctgggtgcgtctgcagcttccggttcatggagagatggagcctgggtgccaaagtggtagctctcgcactcttgctgtctgctgcttctcatggaagagagttgcctgtcaagagtagtgaccgcagttttatctacaaccatactcttgcaaagacgcttgtggaatatgcatcagcggtgtatatgacagatttaaccgctctgtttacgtggacatgctcaagatgcaatgacttgactcaaggattcgagatgagatctctaattgttgatgtggagaactgcttgcaggcatttgttggtgtagatcatagtctgaattcgataattgttgcaatcaggggaactcaagagaacagtgtacagaattggataaaagacttgatatggaagcagcttgatctaagttatccaaacatgccaaatgcaaaggtgcacagtggatttttctcctcgtataacaatacaattttgcgtctagctatcacaagtgctgtgcacaaggcaagaaagtcatatggagatatcaatgtcatagtgacaggccactcgatgggaggagctatggcttctttttgcgcgctcgatcttgctatgaagcttggaggtggcagtgtgcaactcatgacttttgggcagcctcgtgttggcaatgctgcattcgcctcatacttcgccaaatatgtacccaacacaattcgagtgacacacgggcatgatattgtgccacatttgccaccttatttctcctttcttccccagctgacataccaccatttcccaagagaggtatgggtccaggattctgatggcaacacaactgaacggatttgtgacgacagcggtgaagacccagattgttgcaggtgcatctccatgttcggcttgaggattcaggaccatttcacttacctaggagttgatatggaagcggacgactggagcacctgtagaatcatcacagctcaaagggttcagcagttccgactggagctagcgggcaacatcatgatgaccaagcacgatatcgacgtctccatcgttgaacctagtgtacaaaacagattggagcagttctagataggcggaacattcgttttgtccagattcagagaagcaacagcctcttgttaatgcagtggaaattgttcagagacgaaggcgacccttgttttctctattagttcggtcagaatgggatgttctttcagatcaaggaaataaatcgggagtcatctcttgtaacaaagagaatcagagcatgatgtacataaggaaaaatcataggcacggtttatgctggatatggtagggattgcttctgtgtaaatatatgtatacaatgtaaacttgcaatggctatatttgcagcaacataagcaccaagctaactgaaaaatatcagttaaccgaatgaatgaggcgtatctattttgaaaaaaaaaaaaaaaaaaaaaaaaaaaaaaaaaaaaaaaaaaaaaangggcg

SEQ ID NO: 7383 - DNA, 1194 bp, Zea mays
  Clone ID: MRT4577_106731C.1
aaatgaagtgatcctggaattcagataaactttagggagttcaataggcgttacagatttttcaaggaataacactgccaccaccccacgctttgtccaggatattacagatgcagtaatgccaggctaggaatcaaaggtcacaacattttactgcctggtgacacaaatactaccaatctgtagaagatgaagctcattatctgaactgaaattacttataacctgaaatcactgataaaggtgcaagtgcaacagtattggacacatggacactgcagctattttggtcagcactcattttacaaacaaacaattacttgcgactgtattttcaagtgaaagaaattccgaaaataagaaaaggtgccatacctcggctataaaaaaatatcacctatacagaatcaaaagaatggagaactttttccagaacggttcttgtctccctgtccaagggcttctcctgggtgtctgaataggctatgttgagcagatagagcttccttgaagcgacaaacgcacccgagaagatccgcttcatccctccccttgtgctgtccagcgtgtactcgatctcatacactgtcaagccaccatgacctgacctctctcccactgaaatcacctcggcagacttggtactttcctttttcttctctgcttgcagaagcctgtccgcaacgaactgcggcgtcccgaactccgccagcgaattgagccggacagggttgacgacaaccccaatattgttgctcccttttccctcctgctgaaacagcgccgtcgcgcccgccttctccaccttgggccaggaggccggcttgaggagggtgaagccctgctcctggtcggtgtaacgctccaatgctaacccctcagaagctccgctctctccttccgccgtctccgtctccaactccgacgcggaggcgacggggagttgcggcgacggcgcggggacggggacgacagcgacaagcagcgagccagcggcggacatcctccgggtcagaagtagcggaggagaggagacctcgcatttgagcgcgagggaccgggcccgatacaagctgcggcggtggcggcgcgcgagcgaaagcggcggaacgcggcggggacagacggcgaggagtggcatcggttgtttctgtcgccggctatgccgctagcgctgtggcgactcctgggtcg

SEQ ID NO: 7384 - DNA, 156 bp, Zea mays
  Clone ID: MRT4577_106732C.1
tagcttttttttctacttcacgcgcatccactggaaggacagttctcgtcgtcggtggggtcgccaacccagttttccatttttagaatcattattatcaggcttcatcccctccttacattttttacttattcaactgaaacagcttatgccacc

SEQ ID NO: 7385 - DNA, 428 bp, Zea mays
  Clone ID: MRT4577_106733C.1
ttcttaaaaaaaaaaaaaaaaaaaaaaaaaaaaaaaaaaaaaaaaaaaaaaaaaaaaaaaaaaaggggggccagataaaaaggatccaaaacaaaaaagggcggccctgcttaggggttccctcttttctagcgccaccttactccaatttactgcccttttttttacacctaaatgcctgtcaaaaacccgggggtggccagaccttaatcctgtaaaaacccttccctttcccaccttatggggttttaacaacatgcccctttcccctggccctttcaaacagttgggccccctacaagggcgacttgcccaccccttgctcagcctcattaaccactggggctcgccctgttccgccccattatgccccgtccattgtggaggtccctaccaccgggtcctttccctttgtcacctccctttct

SEQ ID NO: 7386 - DNA, 352 bp, Zea mays
  Clone ID: MRT4577_106734C.1
gccgccgccgccctctaaggagaagagggtcccgtcgtatccttgcctcgatggcgggggggaagaatcagtacaaccccgtgcgtgatatcaaggtgcaaaagctggtcctcaacatatccgtatgggagagcggtgaccgcctcacccgcgccgacaaggtgctggagcagctcatcggtcataccctcgtattctacaaggcgaggtacacggtgcgctcgttcggcatccggcgtaacgagaagatcgcctgctacttcacggtcaggggcgacaaggccatgcagctgcttgagagcggactcaaggtcaaggagtacgaactgctcatgaggaacttcagcgacac

SEQ ID NO: 7387 - DNA, 859 bp, Zea mays
  Clone ID: MRT4577_106735C.1
cgggacacgttcgccggccgccgccctccccgctccctctcccctccgcttggttgtttacgcctgcacccaggctagggcaggacatccaacgcgccaccttgtacggctgctgcctgggcctggtttgagtctttgacgaaaccgcagaagcatccggcgcccgcgctagcctcctcctcccccaagcgttgtttcgccgccgttcgatagctgagggcagaggcgggcaagtataggagatgtcggtgctcatcgtcaccagcgtgggcgacatcgaggtggatctccacaccgaccggtgcgcgctcaccaccaagaacttcctcaagctctgcaaaatgaagtactacaatgggtgtctgttccacaaggtggagaaggatttcttggcacaaactggcgatccaactggaactggcaccggtggtgattccgtatacaaatttctctatggtgatcaagctcgattttttgatgatgaaatccgtccagagttgaggcattctaaaactggaaccgttgctatggccagtgctggtgaaaactgcaatgcctcgcagttctacattaccttgcgggatgacgtggattaccttgatgataaacacactgtgtttgggatggttgccgaaggttttgatacgctgacaaaaataaatgaagcttatgttgatgataatggaagaccattcaaggacataagaattaagcatacatatgtcttggatgatcctttcgatgatcctcctcaacttgctgaacttattctgagaattctcctacaggaaagccacgtgatgaggttgcagaagagcgcttagaggaactggggtcctttggaccaaacagtgctcct

SEQ ID NO: 7388 - DNA, 167 bp, Zea mays
  Clone ID: MRT4577_106736C.1
ttcttcacacgtacggttccagcctcaccggcggacttaatagtgggaggcatctagcctatcagtgaaagcctattcaccgtccacacgataatcagtgtgactaccatcacctactacctcgtacgctagtcccgcactataccttcaacacactcatacatatt

SEQ ID NO: 7389 - DNA, 361 bp, Zea mays
  Clone ID: MRT4577_106737C.1
tgagggtataattgcgctgcttggctgtaatcatgtgccatagcttgatttccttgtgctgagaatgtgttattccgcttcacaatttcacacacaaccataccgacgctcggacacgcatagaaggtgtacaagcccttgggcgtcgcctaactgagatggagctaacttcacagtgtaatgtgcgttgccgctcacctgcacctgctttccagtccaggaaacctagtcgtgccagcgtgcattaatgatatcggaccaaccgcccgggtgaagaggcgagtttgtgatattggagcgctcttcctgcttcctcagctcacctgactcgacttgcgctcggctcgttccggcttgcggt

SEQ ID NO: 7390 - DNA, 438 bp, Zea mays
  Clone ID: MRT4577_106738C.1
ggccggggacgacagtcatcccattatacctcgtttctgacgcgcagtcagcacctccacttccacatgtcccccggagtaggcgcgatgcagatgatccatggaggactccaaggatatctcggaggacgccctccgtgacccgcaagaacatgaacaaccgcctcgtggaccgcaagcaattcgatgctcgaggtgatccaccccggccgcgccatcgtgtccaaggcggagttgaaggagaggcttgccaaggcgtgccacgtgaaggaccccaacagcatctttgtcttcaagttacagcaccgacattcttgaggagcataagtcccatgatcacagaactcatcaacgacaacctcaaggctgccaagaagatcaagagaaaatacagcctcatcgagaatggtgcttgctactaagggtgacaattcccgc

SEQ ID NO: 7391 - DNA, 467 bp, Zea mays
  Clone ID: MRT4577_106739C.1
gctcttttcattatttttttttttctgtctgttttttccttttactgtgatggagcacatagtgtgatcttggaacacaggacgcacattattggtattacctactcgaacctgcgaaagcgtgcataggcctccaccgattcagagccaccgcttgttttatgtctccgtgctttgcacaggctatacatgccatccgcatgcatgacacccccatctggccattggcttccctgagcgagagttggtgtatcatcatgtgttctagcaccttgcgccgatgccgtgcacagtggtcatgtatcattagcatggccactccaccttgttgacccgatcattcgcagaccgccacacagacagcaagaggcttcaacacaatcccgaaagtggttgcccgcagattcttctttttcggtctcgcgcttgacagcacctgaccttgcacttggggttctagaacccct

SEQ ID NO: 7392 - DNA, 469 bp, Zea mays
  Clone ID: MRT4577_10673C.1
ccaagaacaaaagcaccggcgacaggccacgagtccttattatgcctcgatcgcaacatcgcttacgcgcaggaaagccgtgacaccgcccatcagggatcttcccatggacgaagaagacgctcaggacgtcaaaaagctgattgaagaatggggacacaagacccttctgctgccaggagatgcaaccgcagacaagttcgcccgctatctcgcttcacgaagcccccaacgtctaacccgacctggatattatgaaacaagatcatcggaaaaaaggttgccaattcggatatagccgagctgaccgactatcaatttcaaaagatctttgccattaacgtattgcacgctgatgtgcctaacccacgtaaacgatccccctggctaccgatagatgcaagtatcatcgcccctgcgacaatccatgcataccatccaaatccgcatttacgggactatgcgagta

SEQ ID NO: 7393 - DNA, 453 bp, Zea mays
  Clone ID: MRT4577_106740C.1
tcatacgctcaccagaacccctggttcaatggttctttctccccccctgtcgctaatggtagggggagtagatatacaaagtcgggcgccatcacaaaactgttcccgttgctgagcttccaagtgcacagattaccgcatgccactgcctattgacctgctgcagattttccttattgatacagccattctttccatgggtggcatggccatggcttccctcgccaagcaccacaaggccaacatctcgatgcctactttaaagtgctgcttctggcagtttatgtgcttgtaattgccaacctaatcgcattttagattatatatgtctatccatatctctattccttgctggtgcttaccgtagatctaacatcattgcatcttacattgcttccaaatttttatgtccatgtgtaaaaaatattttattctatcgctattaaaatactt

SEQ ID NO: 7394 - DNA, 598 bp, Zea mays
  unsure (1)..(598): unsure at all n locations
  Clone ID: MRT4577_106741C.1
atccactacangaaacgtccatcaccacggtcgccttgcgtagagagctgaccagcagcacaacttcacccattgctaaacaaggcagggtgaccaggttctaccaaacagccgacgcagacgaatacggttgcgtcctggtaccactctcggctacccccgacgtgtgacgacccaccaatgcagcgatccacgcaggcgagcaacgatgggctggccgcaagatcgctctgatggtgggaatcgactatccggttaccaagggcgaactcaaggagtgctacaacgacgtcgaccgcatgggtcgctgactcttcaactgtttcggattctgacgatgtcgatattcggatcctcaccgacgtcgatcgatccgcgtcgcaaaccacggcggatatgatgcggcgaggcctcgtccgactcgtaggagaggcgcgtcgcgggaacttcgtcttcttctactacagacggccactgcactggacccgccttctcgtatacggtgctcatcgacgacatcgctttacgacatagtgcatccagacctgtgagatggacctcctctgcagaatctgattatcggctactcgtgcacaag

SEQ ID NO: 7395 - DNA, 192 bp, Zea mays
  unsure (1)..(192): unsure at all n locations
  Clone ID: MRT4577_106742C.1
cgctgtggtgactcgatccttcgncatgtctcaaccgtatgattgctccaccnggngcacgnncnaagggaacgcaagnngagaggaactttatgaagagaaacaaaaacagncagaagagcacaaaggcgangaaganggnngcagcaccaaagcnacgggcngnncagacgaggaccgaaaagacacgcg

SEQ ID NO: 7396 - DNA, 430 bp, Zea mays
  Clone ID: MRT4577_106743C.1
aacaatgcaaataaaattgcaaaagatccttttgtgcagcaacccaatgtaccaacaacaacatttttaaccatgacccccgaccacttttttttgtaagggtccaccggtacactttttttttattcttaaacacaaaatttaaatgccgccttttaatttcaggtttaaaaccaatgaaccagactttatttcacaatgccaactacaaatcggatggatcaaaacacagttatgtgtcgaattatattttattggcccatgtttccaaaaagtcgctccactggaaaatgaacatttccagcaggggcggccaaggcttggatttttttctgtgtgtaaaaaaaacccattttttggagctgaactaattgggttgcaaacagttcttttgggggcacattaggagcatttggaacaccttgggccc

SEQ ID NO: 7397 - DNA, 146 bp, Zea mays
  Clone ID: MRT4577_106744C.1
gcgacagacgaaaacctctaccactataacaccgtagagtggacgttgactgaataaggcgtcgtctcctccagagggacgggcggggcctggagagcactgctgtgtgcgcgccgccgcccggagcggcgaggcagctgagagga

SEQ ID NO: 7398 - DNA, 406 bp, Zea mays
  Clone ID: MRT4577_106745C.1
gcccggattcccggtcgacccacctccgagtgtacaacaatggcagccaaaatatttgcttcttatctcctggctttctcaaggtggggccaaccatttccaaatgctcacaactctatagcttccttttcccatacctataccacgtgctttaattttttacccaattgttaaccctattgtcctactgttttttacattctttaccatttttctttgttctttaatttttttctcattcaactatttcttttttattattttttttttttttttttctattctttatatcttttctttttttcttttttattttttttccttttctttttttttctttatctttttttttctatttttttctttttttatttttttcttattttttttctttttttttttattt

SEQ ID NO: 7399 - DNA, 506 bp, Zea mays
  Clone ID: MRT4577_106746C.1
attattcctttttgtattttgtttacttcaacatgctcaaacagtatccacttttcatatggggcatatttaatgtaaaaacaagggctgtatcagaaaccgttaaaaaccagcgggatggttggtcacgccccctgtatcattcagaatcaaacaacagccgtcgggaacatcttcctaggtgcgggctcctaaaaagggtccgataaaaaactcagatttcattcttgaccaaagtggcctctagaacacttgcttaaactcaaacagattccttagcttcccaatgtttgtacactatttctttaccctttttaatttttgtcttaaaataagccttaaggggctaaggggggtcattcttatacccagaatttccctgcaggtcctgagagatgaccgactttccaccattcttgcccaacttgactcttggtgcaaaaaatggcaagtcaggttatctcagacaaaacaaatgcgctctcataaacacccaaattgccagc

SEQ ID NO: 7400 - DNA, 453 bp, Zea mays
  Clone ID: MRT4577_106747C.1
tttcttttcaattcctactctacgatcgacagagccatacattatgggagaggcctatgataacgaccatcatgaagaggagctcctggactacgatgaggacctcgactggacggacgaaggctacactgttaagaccgacctagaggtcgaccataagggctaacgtgatatccacagctgcggttacagagacttgctgctcaagccagagctgctcattgctatccagcattgtgagccagagcatccattgcaagagcaacactagtgtatccctcacgccattcttgtaatggatggaaattgacacgctaaatttggaatggcgaaaaccgctgagtttgtactttcagacgtgcaacaatttgaccgtgttgcgtttcagtttagtagcacttgtgctgtgccacacaagtgaacttgcattatgacatgtgccacgaatttgag

SEQ ID NO: 7401 - DNA, 201 bp, Zea mays
  Clone ID: MRT4577_106748C.1
ttatttcggaaccccaaaaaatataaattcacagcaaggctgctggtacaccagttataccttcattaaacaacctggacatacattccttcaaaccctccaagaaaaaaaaaagagaacttgcaaatccgaacaaagtgcgcccttatttaaaatgggccaagcatgtcaaattcaaagaaaacattcccccccaaaaat

SEQ ID NO: 7402 - DNA, 780 bp, Zea mays
  unsure (1)..(780): unsure at all n locations
  Clone ID: MRT4577_106749C.1
gaaccggattgttcgaaacgccgatatgccagtagcagcggttcttcattgcccgcctccaggtaccggtccgggcttcccgggtggcactcccaagacagaagtccatgaaccaccctgtccgctgtgcacggcacccactgacgacgaagcacatgtgtcattctcggaacctctgcatgttgccctccgatctgctcgcaggaacctttcgctgggcagtggcgctggagggagtaacagcagtggcgcgaggcctccttgcagtgaccgtggcctgaagaggaaccattctgctatcgtgccgagacgcggcggcggcggctcgttgttccgcaaccgcttcaagaggcagttccccttcaaggctaggatcgggaaggagctctttggcggcagggttttcagcaaggttgggtcgtcttcaggtcaacaggatgaccatcgacagcaagcgccgaagcgtgaccggcccatgaagtagctagagaacttagtggcacggagtatatgttgtgtgccctcctgatattctatccgtgtcatcagttatcatgtctagtgtaacctataacagcatgcgaaacttggcatccatgcgcagtagtcgtccaagacgggggctctgtatatggaggctgcctgcattgcatgtagcacccaccgttggctaactatgaggtgtattttggatccttgcagtaagaatctcagaatctatgccctatgattactatgttctgctaaaaaaaagcaaaaaaaannnnnnaaaaaaaaaaa

SEQ ID NO: 7403 - DNA, 410 bp, Zea mays
  Clone ID: MRT4577_10674C.1
cccacgcgtccgcggacgcgtgggctcggataccgacgttcataaggaggagctcatggactacacgatgactactacaagacggccgatggctccgctgttaagcccaccgcacaggccgcaaagactggcaccgttcggatccacaagaccgcttccagagactttctactccagccataactgctccgggctatacaccattgtagtaccgcgcctccttgctaattgaaacactaagtgtctcccctcacgcaatatttgcaaatggaagctatctgctctgctaaatctactacccagacaactgctgtcaatgacctttcatcccttctacatattgaccctccttccagaaatgcaacaccacttctactggacctcacaacgactccgatttatcatatatc

SEQ ID NO: 7404 - DNA, 452 bp, Zea mays
  Clone ID: MRT4577_106750C.1
ggaagcaccaaaaaaccccgttttttccttaggaaaaactaaaaacaaaccccgaggggggaaacagaatccatcgacccaaagcccaggcgggtggaggcaggggtctgcgggagccggggatgaacagggggggaacaactgacaaaaagcgaccttgaaaaaaaaaacacaggggggcaaccccaaacgaaccgaacgaaaataaaccctttggcctggggaaaacatcccggaagcaaacaggataattgggccgggggggccccaccgttcagttcctccagttcccgggggggtggccgaacccccccccacggtggccaccgcggaacccgccccccccaccaccgtagccacggccgccacggtagccgccgccgcccccgccgtatcccccgccgccttcagggggcccgccgccgcggtagccgccgcttcccgggccccca

SEQ ID NO: 7405 - DNA, 1870 bp, Zea mays
  Clone ID: MRT4577_106751C.1
cccacgcgtccgcttctgcattgcctgggattccaaagggtagtgcaaggcaactgtttcagcgccttcaaggaccgtttgaggaagggactctcaagacacactttgagaaaataatattgcttggtcaaaaattgcatcaaactcgtagaaaggatgagatccatgagctgaggcaaaaaaatccacttcatacttctcatggttttgcactttctcaagcatgtccagggaacttatctggtgtcattttgacgccacttgacctttgcgatggaccttcgaactcggatgcactttctattggttatacaggatccaacacaagtgggttaggtcttccaaacaataactgctctgttggtgctactcttcctacatcaaatatgaacttaagattaccaggttctcctggtatggttttgggaagcaattcaccattgcctttgaatgctccctctagggatgttcagaggtatggtgtgcctagaccaacctcgatacagggtgacgagcaatcaagaattcattataaccagatggtaaatggcagaaaccttcagcaacctggagttcctgttcctggtgtgttgccatctggtgttgatcagggtgcccgaatgatgccacctgcccatggtgttggaatcatggctggactaaatcgaggcacaccaattactaggccaggttttccaaggcttggttctcttggaaacatgtcacccaccaatggtcaaggcttaaaaaatactgtaaacgttcatcctggtgccatactgggacctggaagtactatgttgaggccacgtgacccaatgcagatgcttagacctggccagaattcagaggagcatagacagatgatgatgccagagtttcagttacaagtctcgcaaggaaataatcatgctgtgcatttccgcgcgcccccatattccaacactggggcatcttcacctgttcaatctttacctgcccagcagtcccaaccacatcagatgccacaacaatcacacatgtatggaaacacacaccttcttcatacccaaggaacaaaccagtcaaatccacagcaacagcaggcttatgctatgcgcttggccaaagagaggcatatgcaacagatgatgccccaacaacagcgtccattatctgttgccagtgcagtgtcagctgtacagaatggctcaccgatgcaacagcagagccaaggatctgcaacttgcgtaatcccagctacacagacacaacataagcagcaatatcctgcacaaaatgcacaaggtagctcaatgcttccccatcagccttcagccaccactacacataaacagaagaagcaacagggccagcagcagcctagacaaaatcaacagcaacgaaatcaaggcagtcaacaagctaagcttatgaagagtttaggccgagggaacatgatgcagcagagtcctgtggatgttattcaagcaagtggcatatcaacaagctgtaaagatcaagttcctgataagaatatgatgcaacagggtccagggcattttgttgtaagtaaaggatcaatcccattgatacctcaacctgggaatcaaccaaatgtatacacttctcagatgcctccgtctccaatgcagacaccggatattagtaatcagggtgcagtcaagggttcttccaaccatgccttgttaacttcccagcaaggttcactccatacgccttcacagttgggcacagcagcagcagcagcaactaccgttcatgaatccgtcacagaataatatgcacaggttgaatctgcaacagcattggcgcgtgactacagatggtaggtattgagtttacctggttgccaagtacaggttaccca

SEQ ID NO: 7406 - DNA, 335 bp, Zea mays
  Clone ID: MRT4577_106752C.1
gccccgctgtcagcctaaaacgcagactcaccaatgcccgtgccaacagccctatccgagcccgtgcttgctgtatgtaacctgctgggtctgcctgaccccgttgctgggcctgcgcttttagcttacgactcattagcgcagctagacggcctagccctactggtcgcctcatcaccagccgctgctgcatgagaattgccagcacttcatgcccatggggtcggaccagcagttgcaggcgatatctggcctgtaccaccactgcatcctgcagaatcggcagcgcagcatccggtgcggggttttgttcgcagcacctatagaccactgac

SEQ ID NO: 7407 - DNA, 673 bp, Zea mays
  Clone ID: MRT4577_106753C.1
ccgcgctcgaattccgttgctgtcgtaattaaatatatttatgtaccgtttaaacgcacggtcaatgcataaaagttcggacggacatttgaggagctaagctgtgacaggagtcgaatacgataacgccatggcgccgccgactccgacgaccttctccaccccacagtagaccttgagcgggtcgccgaacttgagcccttcctccgagtaacgccacctggagtactcctcatggcgcagcgggttgtacgccagcgggtgctccgcgtcgacgaggtcctccatcgcgcgcaccgccacgccgtccttctgccggcggccgaacagcaccgagaaccgctcgcggttgctgggcgtcctcacgcggtggaggcacgccggcacgcgcccgttcgtcacgaccctgaactgctcgccagcgacgaaggtgagggtgccggcttcggcagggacggcgacccagcgcccgtccccggcgtgcacctcgagcccttccacctcgtgctgcacgatcgcggtcaccacgctgtcgtcgtagtgcggctgcatcgacatgttgccctccgtgtccggcggcacgccgtagtgcgacagccggacgtcggcgtggtcgagcgagccgaagtgggcgcggatgctctgcccgcgggcgccgaggccttccaggggg

SEQ ID NO: 7408 - DNA, 290 bp, Zea mays
  Clone ID: MRT4577_106754C.1
aaaaaaaaaaaaaaaaaaaaaaaaaaaaaaaaaaaaaaaaaaaaaaaaaaaaaaaaaaggggggaaaatataaatttttacaaaaataggggccgccgtcttgcgggatcctagcttttttacgggggcatgcgaaatccatatctcttgtttggggttacccaaaattcatttctggggccccccttttacaacccagtttcttggactccccgggcgttcccctttttactgttgtggtaaaacataaccgttccgcccggtgggtttttaccaaaagggccgcaacc

SEQ ID NO: 7409 - DNA, 612 bp, Zea mays
  Clone ID: MRT4577_106755C.1
ccgtcccggctctatattatgagtaacagcaggcgccgttcgatggcgtcctgactgccgcgtggagcccagaatgacgcccaagccaggagaagattgtttggagatccatcttccttttagttccaagccacaatacctggccacacctcggcgaaaaaaagaaaaaaaaaaaaaaaaaaaaaaaaaaaaaaaaaaaaaaaaaaaaaaaaaaaaaaaaaaaaaaaaaaaaaaaaaaaaaaaaaaaaaaaaattgcccccccccccacccccccaaagttaacccggaacctgttcttttccaaggggggaatgggtttggggctccgttatttcccaaaggggtaaaacccccgccccccccaaggccaaaagggggacaaccgacctggcaaacctaaaaaagttttacggggacgggacctcccgccggacccctaattattttttaaaaaagttggggccaaaaggaaaaaaatgggaacaaggggggccctttttaaaggggaaaaaaatttaatccggggggggtttgcaaaaaaccttccccctgatgaacgtagggggttgaatttccggcccttttccggcaaaacgggggtttttcaaaag

SEQ ID NO: 7410 - DNA, 268 bp, Zea mays
  unsure (1)..(268): unsure at all n locations
  Clone ID: MRT4577_106756C.1
cacaaacatcaattcacgttcgcattcacattctcaaatatcaactcacattcacaaacacatcgcaacaagtctttaacatcaacatatagttccaacatgcgtcacacataaaatcttcatagntcatctttcacataatatcatcataggtcgacattaacatagcctttgacatcaacaatgatatagttccaaatcaaacacaggtgaagaactgtcaaacatatccgtcacacataaaagcaattgcgcctgatgcttttac

SEQ ID NO: 7411 - DNA, 274 bp, Zea mays
  unsure (1)..(274): unsure at all n locations
  Clone ID: MRT4577_106757C.1
acatgcttgangcaggcgcgcgtacgtgcagctaagagttcgcctcgaggaggaatggatgggttattctgataactcttgaagagtccagtatgaaaatgagtatgcccgcctagttacctaccggagagttatcctgataaattaacctctcacagttagtgatcctgtccttttaacaccttttttgtggggttctctctgacctttcatcgtaaagtgctggggaccttaagtgagtggcctgtaattttggatgatataaaaaggggta

SEQ ID NO: 7412 - DNA, 354 bp, Zea mays
  Clone ID: MRT4577_106758C.1
cccacgcgtccgaaaaaaaaaaaaaaaaaaaaaaaaaaaaaaaaaaaaaaaaaaaaaaaggaaaaggaaaaaaaaaaaaaaaaaaaaaaaaaaaaaaaaaaaaaaaaaaaaaaaaaaaaaggaaaaaaaataaaaaaaggggcgggtttatttaaagggtccaagctaaaataaagcttttttataaggtaatgtatttttaattgggtgccctaatttaaaaaaaggggcgactggtaaaaaccttgggtttgggaaaaaaattggtttacccaaattaaacgttttgaaagaaaatccctttttgaaaaggtgggtaaaaatcaaaatgcccaaaacttttgcactttgaaa

SEQ ID NO: 7413 - DNA, 595 bp, Zea mays
  unsure (1)..(595): unsure at all n locations
  Clone ID: MRT4577_106759C.1
caacctgggcagggggtggggcgggggcgcctncacctgcnccatcgccgcgggcctcctcgtcttcctggccggcacacgcatgtaccgcttcaagaagctggccggcagccccctcactcagatcgccgccgtcttcttcgcctcctggcccaagctcctgcggggggggggggccnaccccnccatnctctacnacntcnacntcnncaatgccccctccctctttgattgctcctccaccangaatagcaagcgcaaggagcgcctcccccacaccgaccagttccgcttcctggacccctcggccatcaacgaggatccgtccgcgggggctagcatctccatcttttttctgctggcgccgctgtcggtcctggctcatgttaataccgtcgcctctctgctccccttctgtgccaccacgatccttttctcggccctctccctcgctccttttcttctttctctcttccttccttcccttccccccctcccccccccctctccctttttcctttttcccttctcccctcctcccgccccccctctcctcctttttttcccccccctcgctcctcccctcccctacaac

SEQ ID NO: 7414 - DNA, 286 bp, Zea mays
  Clone ID: MRT4577_10675C.1
atcctctacacagatctagagctggaagggcatggataaatggagaagacacatgcacttgctgcttgctgccgcatccgtggccctggtggcagcaataacgctgccgaccgcggaggcgaagctgtccccggactactaccggtcaacgtgcccggacgtggaggcaaccgggaaggcagtgctggccaacaaggtgaatgagatcttcgccacagtcccggccacgctcaagatctagtagcacgactggttcgtcaatggctgcgatgcgtgggtcatcatc

SEQ ID NO: 7415 - DNA, 950 bp, Zea mays
  Clone ID: MRT4577_106760C.1
ccccgcgtccgcagattcgcctcaagccactgccagcagaactggaggaggcttggtgtggataagcgggtggaattctctccagcatgccaccaatgctgcgttcctatctgttgtgtacagcgactacatgctctcgacgcggacagcggcagtgcagtgcagcgggaagtactacagccctaccgatatacgcaactttgctgcatcacaggtgcgctatgcttaacttaaccttgctagacaccaaagtcccagatggccatttgtccatatcacactgccggttcctcctaagacttaccaagcaggctgcactgtgtaaactgaaagacactgtgaagtttctaactcatgtcctcatgttgtatcccaggctaactatatcctgggagacaacccgatgaagcttagctaccttgtgggatatgggagcagctacccaaagcaagtgcaccacagagggcgtcgatccccgcggatgcgaaaacaggctgcaaagggttcgagtatctccactcacccagcccgaacccaaacgtggctacgggcgccctggtgggtgggccgttccagaacgacaccttcgtggactcccgtgacaacgccgtgcagacggagtccagcacctagagggctcctcctatgttctggcctggagcgatgcgtgtacgagtacgattgcagtttttttgcttggcgtggctgatggtgatgcgcgatctgtgactgtgagagagaaagcttggttgccaaccgttcagttcagacggatggcatatgcaggatgcagcagtagtttagtagtgcccacgcgtttcttctgttgtgtgtgtacaatgacggtgctgctcctgcagtgcagctatagtttttcaccgcgtgctcctatctggtttgctggtgtgcctgtaaggctgtagctacgagtaatgtattagactatttgt

SEQ ID NO: 7416 - DNA, 321 bp, Zea mays
  Clone ID: MRT4577_106761C.1
gaagcaaggtgcattttggaaaacagacataggggcaatttgaacgcgcatatagttgtaaacacgcgaccagaagtctagaacacacaaagggtatatgttagggggaaattcctcattgagctaagtaccaaaaaaacaaaaattctatagtaaaattgtaataaaggccttatggcccagaaggcgggcacgtattgagataaatggtggaacgtgggggaaaaaaagagggggcacctcaattaaatgttatgccggttgcgaaccgtttgcctttctttaaaaagaaggagctcatcctgattctagcgggggccc

SEQ ID NO: 7417 - DNA, 2284 bp, Zea mays
  Clone ID: MRT4577_106762C.1
gccggccgggctggcgggtgccccacaccgcactccgcaccaaccaaccccggccggccatgcagcccacgagccccatcccgccatccgcccgcgcggcgagcgcagagccgagccgagctgccggaacgcaggcagcggccaccgggaggcctccgaaacgcagcggaacacctgaggaggcggcttcccggcgaatgctctaggaggaggcgcggcgccggcggagatggggtccaagtacacgcgcgggtgctgcggctggctgatcgtggcgctgattgcggcgctggtggccacggccgcgatgttcgccatcatgaagcgcaagcccgggggccgccacatcaagccgctgccggtgccggggccgccgggggccatcgactccaagtacggcgacgcgctcggggtcgcgctccagttcttccaggtccagaaggcggggaagctggagaacaaccagatcccgtggcgtggggactcggcgttgaccgacgggaaggaagcggggctggatctttccaagggaatgtatgatgctggggatcacatgaagttcaccttcccgatggcattcacggcgacggtgctctcgtggtcggtgctggagtacggggatcagatgagcgcggcaaagcaactggaccctgccctcgatgcactgaagtggattacagatttccttattgctgcacatccttctgacaatgtgctgtatatccaggtcggtgatcctgatctggaccacaattgttgggaaaggccagaaacaatgaccgagaaaagacctctcacacagatcaacaagaagactcccggatcagatgttgctgctgaggcagcagcagccatggcagctgcttcaatggtcttcaaatccagagataccacgtattctgatgtgcttcttcagcatgctcagaaactattcacttttgctgacacttatagaggcctctcaagcgagagctatcccaagctccaggatttctataactccaccagttacgttgatgagcttctatgggcagcgagttggctctaccacgccacaggcgaccagacgtatctcagctatgtaactgtacagaacgggaaaagttatgctgattggggaaggccaacatggttcagttgggatgacaaaaatccaggcacacaggtgcttttgtccagactaaatttcttcgggtccaaacagatatctaatgccgaaaatgaggggttgaaaatgtatagagatactgcagaagctgtcatctgtggtctgattccagattcgcctcaagccactgccagcagaactggaggaggcttggtgtggataagcgggtggaattctctccagcatgccaccaatgctgcgttcctatctgttgtgtacagcgactacatgctctcgacgcggacagcggcagtgcagtgcagcgggaagtactacagccctaccgatatacgcaactttgctgcatcacaggctaactatatcctgggagacaacccgatgaagcttagctaccttgtgggatatgggagcagctacccaaagcaagtgcaccacagaggggcgtcgatccccgcggatgcgaaaacaggctgcaaagggttcgagtatctccactcacccagcccgaacccaaacgtggctacgggcgccctggtgggtgggccgttccagaacgacaccttcgtggactcccgtgacaacgccgtgcagacggagtccagcacctacaacagtggcaccctggtcggtctcctctccggcctcgtcaccacttcctccgtggtacagtcgttcacctagagggctcctcctatgttctggcctggagcgatgcatgtacgagtacgattgcagtttttttgcttggcgtggctgatggtgatgcgcgatctgtgactgtgagagagaaagcttggttgccaaccgttcagttcagacggatggcatatgcaggatgcagcagtagtttagtagtgcccacgcgtttcttctgttgtgtgtgtacaatgacggtgctgctcctgcagtgcagctatagtttttcaccgcgtgctcctatctggtttgctggtgtgcctgtaaggctgtagctacgagtaatgtattagactatttgtaggtcgtatttcatttgttcattctgtggtgaggtagttcagcagagctttgtactgtaccgatgaattgcaccgtctcccaactgaaatgtgccttgtggattcaaagctggaggtgaatggcacgcattcgtgcggctcttcactccatgttttt

SEQ ID NO: 7418 - DNA, 1593 bp, Zea mays
  unsure (1)..(1593): unsure at all n locations
  Clone ID: MRT4577_106763C.1
ccacgcgtccgctcagctatgtaactgtacagaacgggaaaagttatgctgattggggaaggccaacatggttcagttgggatgacaaaaatccaggcacacaggtgcttttgtccagactaaatttcttcgggtccaaacagatatctaatgccgaaaatgaggggttgaaaatgtatagagatactgcagaagctgtcatttgtggtctgattccagattcgcctcaagacactgccagcagaactggaggaggcttggtgtggataagcgggtggaattctctccagcatgccaccaacgctgcgttcctatctgttgtgtacagcgactacatgctctcgacgcggacagcggcagtgcagtgcagcgggaagtactacagccctaccgatatacgcaactttgctgcatcacaggctaactatatcctgggagacaacccgatgaagcttagctaccttgtgggatatgggagcagctacccaaagcaagtgcaccacagaggggcgtcgatccccgcggatgcgaaaacaggctgcaaagggttcgagtatctccactcacccagcccgaacccaaacgtggctacgggcgccctggtgggtgggccattccagaacgacaccttcgtggactcccgtgacaacgccgtgcagacggagtccagcacctacaacagtggcaccctggtcggtctcctctccggcctcgtcaccacttcctccgtggtacagtcgttcacctagacggctcctcctatgttctggcctggagcgatgcatgtacgagtacgattgcagttttttgcttggcgtggctgatggtgatgcgcgatctgtgactgtgagagaaagcttggatggcatgcaggatgcagcagtagtttagtgcccacgcatttcttctgttgtgtgtgtacagtcaatgacggtgctgctcctgcagctatagttttttcaccgcgtgctcctatctggtttgctggtgtgcctgtaaggctgtagctacgagtaatgtattagactatttgtaggacgtatttcatttgttgattctgtggtgaggtagttcagcagagctttgtaccgatgaattgcaccgtctctcaactgaaatgtgccttgtgaattcaaaaaaaaaaaaaaaaaagggctcctcctatgttctggcctggagcgatgcgtgtacgagtacgattgcagtttttttgcttggcgtggctgatggtgatgcgcgatctgtgactgtgagagagaaagcttggttgccaaccgttcagttcagacggatggcatatgcaggatgcagcagtagtttagtagtgcccacgcgtttcttctgttgtgtgtgtacaatgacggtgctgctcctgcagtgcagctatagtttttcaccgcgtgctcctatctggtttgctggtgtgcctgtaaggctgtagctacgagtaatgtattagactatttgtaggtcgtatttcatttgttcattctgtggtgaggtagttcaaaaaaaaaaaaaaaaaaaaaaaaaaaaaaaaaaaaaaaaaaaaaaaaaaaaaaaaaaaaaaaanaaggggcgnggggttctaaa

SEQ ID NO: 7419 - DNA, 373 bp, Zea mays
  Clone ID: MRT4577_106764C.1
gccaagcgttcgctgtggctctatgcagacacgcgtgaactattcatccagaacctggagttatgccctgacagaacgagtccactccattgaatgatgctcaataatgctacgatcgcttttaacagggacaacctcattcgctctctcatacacggcaccgtccacactgactaccacggccggatcgtagagtacagcgatagcacggccatattgtgatatcgacgacgcgaactgaatacacgtgccgtttacattgctgttcatgaccacaagctcacgagagctggtcacactgaactgcacggtaatgcagattgcgcaacagcatggccatcactgagcaccatgtacatcactcatggagtac

SEQ ID NO: 7420 - DNA, 473 bp, Zea mays
  Clone ID: MRT4577_106765C.1
aggtgttctttttcaccccctacccctttaacgaaagcaagagtgtggtatcctagcccgtccaacaagggtaaggcggccatggagaacgtaaggatcaccgcgggttttctctccgaaacactatatttggtaggatctaccagaaaatgcgctaggggtacctagtgttccaacatctgaacccatgggatggatcctgacgaatagacaaggccgtgctgccttaataagggaaacacgcactgcttatcgtgctgcctctcttatctgtacaaagaacgaggctgcgactccctctggcaatgttgggctacagttatacgctgtcccaaagaagactccggcggcttcatgggaccgagatgtgaattgattgcgctggagagaagaagcggggccttgataacatccctgggggcttgggtcttcagcttcagaacaagctctggatgatctgtagggtactcccc

SEQ ID NO: 7421 - DNA, 728 bp, Zea mays
  unsure (1)..(728): unsure at all n locations
  Clone ID: MRT4577_106766C.1
atatcctttcctcacgctatctagtgtacatgaccaataatctcatcttcacctcactagctaacaccagctaacagatcgatcgctctgtcctgcaataatggccgctcggtcctcctcccagcatttgaacgcgatgcaagacatggcagcgtggctgctgctagcttaacggccaggatcgggacgatgaccccagacaagaactgcacaaaagagacaaatacagagttgccgtgccacttacacacaatgacaacactggcgccatcctatctgctatgatacagcgtgatatgctctctccttctcgctactcgcctgaggtgccacgatatgccacctgcaactgcctcaccaacatagacagctgcctactgcactggccttctattggcacggcctgcgatcaacacccgaagtgtggatcctccgtacgagggccaagcagaccccactgcggcatgacttatatgtagagaccgatgatgccataaggcctttccgtcctctcttggatgtcagcttatcaggacaacaacagggtaccgcgtctttggtgacctaaatggaccatttaatggaggccttgatattcctctgagacatgaataagtttgatgaattccacaaggacgacaagcacgttggatattgatacccaccgtcaagtacatctatggtggncatgttgctgactacacgaagagccttgctgaagatgaccc

SEQ ID NO: 7422 - DNA, 497 bp, Zea mays
  Clone ID: MRT4577_106767C.1
tttttttttttttttttttttttttttttttttttttttttttttttttttttttttttttttttttttttaatttaatcccacggggttcccgtcccccagcttttttttttttttggttttttgccccaaaaaatacattttgcaaatttttttacaaaattccacgctttggccggcccatagcatttggcaggatttttgtccacagggttaaaaaggtttaacctcacataaaaaacacctaaaaaaaaatcgttgacccaatgtttttttgttcgtagcctaacattgtgcataaaaacagggggggtgtcggttttaatgacagccttaaaaaatcaaaaatgcttttcccgtttataaaatccaccattttggtgactgccaggtccagtgcccccgtcacggaaattaggttttgcaaaaactcctaaaattttggtttttccccatccacaattttagtcacggttttaaaaaaaatcgttggggtt

SEQ ID NO: 7423 - DNA, 673 bp, Zea mays
  Clone ID: MRT4577_106768C.1
tagcagaaacttttctgcgtcaagttgatagtgctgctgtatttcataatgcgagtacacgattctctgatggggctcgttttggattgggtgccgaggttggcataagcacagggcgtatacatgctcgcgggcctgtgggtgttgaaggtctcttaacaacacgctggatcatgcgaggaagtgggcaagtggtgaatggtgacaagaatgttgcatacacccataagaaccttcccttacaatgaggctgtttttatgcttgatcaggattcgtgtctatccagtgatgtttgatagtttcatcaggcaggagcagagaatggtgaatcttttcgattgaggactgtgaatccatggatgttcagtcattgtttgtgtagacattgtggtgagcttggaggccaccccacctccccaataaagcagtgctgggagtaatagagcactgatgtactgagggtgcctaggttatatttgttttgcggtcgaacacaaacaatttttgttggtgacttgtttcttttgattctacatatttcaaggtttatgtgctgtcctaaccgggttctttgataccgcgtattttggatactgtaggcatactgtaacgacagcagaagacagctgggctgcagtagccgcagctgtactgctgcaaatagctgttacg

SEQ ID NO: 7424 - DNA, 335 bp, Zea mays
  Clone ID: MRT4577_106769C.1
acaagacgagcgactactgccgacattgacacctgacttcacgctactaccagctatcgcggcgtgtgtgaccatacagagccccatgccgacacgatcagcgacgacaaccgcatataccgcaaagactaactacgttgacgcactgcctggcactctgcagaatgctactagacgaataatcgcccatggctgaaccatagatacacatggagcatgcagctggactgtacatgcactgaaatcaaatgcaacaacactatcgcccacaggaccatggtgaaactcttgcacggagggttcagcatcacgacttgtaactgcatggcacacca

SEQ ID NO: 7425 - DNA, 505 bp, Zea mays
  Clone ID: MRT4577_10676C.1
ggccctaggtgccctttttttttttttttttctgatttttttatgattcatggcgtcgaaatcattattaacacgagatcacaacgttcctgcactggcaatgtaacaaaataaactcgccactcggcaatcgcacacgaatacactgcccaacgtacaccctgtcaatctaatttttagccactagagtatcagcctatgccctctgaaccaaaaggtaaattgatttgcaattgccaaactagcagctgcccaatggtcccgataaatgtttatcaacatgaaaccaccaagtttcgtcactggcaatgcccaacaacgaaaactaggtcaaaataaccccacttcaaaaaagttgaagtatccgacttctgccccagtccgaaatccgtaaaagagcactgctcatcttgtaccatagaaaaaaatacccttcagattgacacactataatacattcgccgccatgcttttacagctttctctgccgcatctttcaaatctt

SEQ ID NO: 7426 - DNA, 528 bp, Zea mays
  Clone ID: MRT4577_106770C.1
atgcctacatctcttatatgttcgcaaattcttattgttttggataaatcaggagttgctatttttggggggcctgttgcacatgaagtattgtgcattccagaagcaaattcattccatcatgaatatagttctatggcctgcacaattgagtttgttgatgatgtacagtcagcgattgaccatatacattgttatggaagtgcacatacagattgcattgtcactacagatgataaagtagcagaaacttttctgcgtcaagttgatagatatctcactgatggtatatttttctacaattgcaacagtgctgctgtgtttcataatgcaagcacacgattctctgacggggctcgttttggattgggtgctgaggttggcataagcacagggcgtatacatgctcgtgggcccgtgggtgttgaaggtctcttaacaacgcgctggatcatgcgagggagcgggcaagtggtgaacggtgacaatgatatcgcatacacccataagaaccttccattgccatga

SEQ ID NO: 7427 - DNA, 3145 bp, Zea mays
  Clone ID: MRT4577_106771C.1
ctccccttgctggccaaatcgatcgctccccttcaggctccaggctccggagcttgctggcattcaccgacacaaccggggttaaggaggcctaaccttcgactggaggaacggtgatcctacaagacctgaacgagatgcgctgctttggacagaccctaccgaggacaactgccgtacatgagaggggcagtcgtaggacagccaccatcccttcccggattgcctgatcctcatggcgaggaggctgagggactcctcctgatggggactggaggccattcggctcgaggttgccatttttgttccctcacccagtccgtctcaccacttcaaaaaccctctcctctctcatccgccttcctggcgattgcggcgacgaggtgacgatagagctgcccccgcaaggaaaacggacaagagaggcggaggctgatagggagaggagacggaggaccaagagcggcgtcgatctaaaagcgttggcggcggccatggccaccgcggaccggacccggactttcatgaaggacgtcaaacgcgtcatcatcaaggtgggcactgcagtcgtcacgaggggtgatgatgggcgactggctgtgggccggttggggtgtctttgtgagcaggtaaaagagctgaatgtcttaggatacgaggtgatccttgtgacctcaggtgctgttggtgtggggaagcagaggctcaagtacaggaagcttgtcaatagcagctttgctgatctgcaaaagccacagacggagctggatggaaaggcttgcgctgctgttggtcagagtggcctcatggctctttatgatatgctatttactcaacttgatgtgtcctcctcgcaacttcttgtgacagatagtgattttgagaatccaaactttcgggagaggctctgtgaaactgttgagtcactattagatcttaaagttgtaccaatatttaatgaaaatgatgccatcagcactagaaaggctccatatgaggattcatctggtatattctgggataatgacagtttagctggtcttttggctattgaacttaaagcagatctccttgttctactaagtgacgtagatggtctatacagcggtccacctagcgaaccgggatcaaagatcattcatacctacatcaaagataaacattacagtggaataacttttggggataagtcacgtgtaggtagaggaggaatgacagctaaagtgaaggctgcttttgtggcttcgaacagtggcacacctgttgttattacaagtggatttgcatctcagagcattgttagagttctccaaggagagaagattggtactctcttccataaggatgcaagtctgtgggagccatccaaggatgttagtgctcgtgagatggctgttgctgcaagagaatgttcaaggcgtctgcagaatttatcatcggatgaacgcaagaaaatattgttagacattgcagatgctttggaacaaaatgaggatctaattagaactgaaaatgaagctgatgtatctgcagcacaagatgctggatatcagaaatctttggttgatagattgacattgaagccagaaaagatagcaagccttgcgaaatccatacgcactcttgcaaatatggaagacccaatcaaccagatactcaaaagaacagaggttgctgaagacttagtgctcgaaaaaacatcttgccctctgggtgtgctgttgattgtttttgagtccaggcctgatgccttagtccagattgcgtctttagcgattcgaagtggcaatggtcttctcctgaaaggtggaaaagaagccatgagatcgaacacagtattacataaggttataactggcgcaattcctgacaacgtgggtcaaaaacttattggccttgttacaagtagagatgaaatcgctgatttactaaagcttgatgatgtcattgatcttgtcattccaagaggcagcaataagctggtttcgcaaatcaaggcatcaactaagatacctgtcctcggtcatgcggatggtatttgtcatgtatacattgacaaatcagctgacatgaatatggcaaaacgaatagtgatggatgccaaaactgattacccagcagcctgcaatgctatggagacattgcttgttcataaagaccttataaaggctccaggtcttgatgatatactcctatcactcaaaacagaaggagttgctatttatggagggcctgttgcacatgaagtactgtgtattccgaaagcagattcattccatcatgaatatagctctatggcctgcacaattgagttcgttgatgatgtacagtcagcaattaaccatatacatcgttatggaagtgcacatacagattgcattatcaccacagatgataaagtagcagaaacttttctgcgtcaagttgatagtgctgctgtatttcataatgcgagtacacgattctctgatggggctcgttttggattgggtgccgaggttggcataagcacagggcgtatacatgctcgcgggcctgtgggtgttgaaggtctcttaacaacacgctggatcatgcgaggaagtgggcaagtggtgaatggtgacaagaatgttgcatacacccataagaaccttcccttacaatgaggctgtttttgtgcttgatcaggattcgtgtctatccagtgatgtttgatagtttcatcaggcaggagcatagaatggtgaatcttttcgattgaggactgtgaatccatggatgttcagtcattgtttgtgtagacattgtggtgagcttggaggccaccccacctccccaataaagcagtgctgggagtaatagagcactgatgtactgagggtgcctaggttaaacaagaggaaccggttatatttgttttgcggtcgaacacaaacaatttttgttggtgacttgtttcttatgattctacatatttcaaggtttatgtgctgtcctaaaagggggccttgatacccgtacccaattcgccttagtgagtcgtattttggatactgtaggcatactgtaacgacagcaaaagctggctgcagtagccacagctgtactgctgcaaatagctgttactaaaatatcgtgcatcacatgtcggccacaattaccc

SEQ ID NO: 7428 - DNA, 2592 bp, Zea mays
  unsure (1)..(2592): unsure at all n locations
  Clone ID: MRT4577_106772C.1
atggccaccgcagaccagagccgtattttcatgaaggacgtcaaacgcgtcatcatcaagctggggaatcctattcctatctatggaattgaacgtgtccgggaaaaagagggaattgaacgggctgaacgggcccgggaaaaagtgggcactgcagttgtcacgaggcatgatgggcgagtatccacaggcaattttggtgttctttgtgaacaggtgaaagagataaatgctctaggatacgaggtgatcattgtgtcctcaggtgctgttggtgtggggaagcagaggctcaattacaggaagcttgtcaatagcagctttgctgatatgcaaaagccacagacggagctggatggaaaggcttgcgctgccgttggacagagtggcctcatggctctctatgatatgctatttactcaacttgatgtatcctcttcccaacttcttgtgacagacagtgattttgagaatccaaacttcagggagaggcttcgtgaaactgttgagtcactattagatcttaaagttgtaccaatatttaatgaaaatgatgccatcagcaccagaaaggctccgtatgaggattcatcgggtatattttgggataatgacagtttagccggtctttcggctcgaggacttaaagcagatctccttggtctactcagtgacgtggatggcctctacagcggtccacctagcgaaccgcgatcaaagatcattcatacctacatcaaagataaacatcacagcggaattacttttggggataagtcacgtgtaggtagaggaggaatgacagctaaagtgaaggctgctctcgtggcttcgaacagtggcacacctgttgttattacaagtggatctgcatctcggagcatcgttagagttctccaaggagagaagattggtactctcttccataaggacgcgagtctgtgggagccatccagggatgttagtgctcgtgagatggctgttgctgcaagagaatgttcaaggcgtctgcagaatttgtcgtcggatgagcgcaagaaaatattgctagacgtggcggatgctttggagcaaaatgaggatctaattaggaccgagaatgaagccgatgtagctgcagcgcaagatgctggatatcagaaatctttggttgatagattgaccctgaagccaggaaagatagcagccctcgcgaaatccattcgcactcttgcacgtatggaagacccaatcaaccagatactcaaaagaacagaggttgctgaagacttagtgctcgagaaaacatcttgccctctgggtgtcctgttggttgtttttgagtccaggcctgatgccttggtccagattgcgtctttagcggttcgaagtggcaatggtcttctcctgaaaggtggaaaagaagccatgagatcgaacacagtattgcataaggttataactggcgccattcctggcaacgtgggtcaaaaacttattggccttgttacaagtagagacgaaatcgctgatttactaaagcttcatgatgtcattgatcttgtcattccaagaggcagcaataagctggtttcgcaaatcaaggcatcaactaagatccctgtcctcggtcatgcggatggtatctgtcatgtatacatcgacaaatcagctgacatgaatatggcaaaacgaatagtgatggatgccaaaactgattacccagcagcctgcaatgctatggagacattgcttgttcataaagaccttataaaggctccaggtcttgatgacttactcctatcactcaaaacagaaggtgtgcctttctctggacggccgcttcctcatgaagtactgtgtattccgaaagcagattcattccatcatgaatatagctctatggcctgcacaattgagttcgttgatgatgtacagtcagcaattaaccatatacatcgttatggaagtgcacatacagattgcattatcaccacagatgataaagtagcagaaacttttctgcggcaagttgatagtgctgctgtatttcataatgcgagtacacgattctctgatggggctcgttttggattgggtgccgaggttggcataagcacagggcgtatacatgctcgcgggcctgtgggtgttgaaggtctcttaacaacacgctggatcatgcgaggaagtgggcaagtggtgaattgtgacaagaatgttgcatacacccataagaaccttcccttacaatgaggtagcagaagcaaactaaacctatgcaactatgcaggctcttcccttacatnnatgcttgatcaggattcgtgtctatccagtgatgtttgatagtttcatcaggcaggagcagagaatggtgaatcttttcgattgaggactgtgaatccatggatgttcagtcattgtttgtgtagacattgtggtgagcttggaggccnccccncctccccaataaancagtgctgggagtaatagagcactgatgtactgagggtgcctaggttagtatttgttttgcggtcgaacacaaacaannnnngttggtgacttgtttcttttgattctacatatttcaaggtttatgtgctgtcc

SEQ ID NO: 7429 - DNA, 253 bp, Zea mays
  Clone ID: MRT4577_106773C.1
ggaaaaagaaaaaaattattccttgttgattgaacaatagtttaaattatggtacaaaccgaaaaccagggtgcgcttaaatgcattcggaggggtaaaggtaaccgggggggccttccttaattgccggggacaaaattggtggcgtaggcccaaacgttgttgttgacggggtcggaaatgtggtcaacgaggtttttgagcgggcccttcccggtgacaatggcctggacaaaaaatccgaacatggaaa

SEQ ID NO: 7430 - DNA, 1601 bp, Zea mays
  Clone ID: MRT4577_106774C.1
tgagaatctaattaggaccgagaatgaagccgatgtagctgcagcgcaagatgctggatatgagaaatttttggttgatagattgaccctaaagccaggaaagatatcagccctcgcgaaatccattcgcactcttgcacgtatggaagacccaatcaaccaaatactcaaaagaacagagattgctgaaaatttaattctcgagaaaacatcatgtcctttgggtgtcctattggttatttttgagtccaggcctgatgccttggtccagattgcatctttagcgattcgaagtggcaatggtcttctcttgaaaggtggaaaagaagccatgagatcaaacaaagtattgcataaggttataactggtgccattcctagcaacgtgggtgaaaaacttattggccttgttacaagtagagacgaaattgctgatttactaaagcttcatgatgtaattgatcttgtcattccaagaggcagcaataagctggtttcacaaatcaagacatcaactaagatccctgttcttggtcatgctgatggtatctgtcatgtatacatcgacaaatcagctaacatgaatatggcaaaacaaatagtgatggatgccaaaattgattacccagcagcctgcaatgctatggagacattgcttgttcataaagatcttataaaggctccaggtcttgatgacttactgctatcactcaaaacaaaaggagttgctatttttggggggcctgttgcacatgaagtattgtgcattccagaagcaaattcattccatcatgaatatagttctatggcctgcacaattgagtttgttgatgatgtacagtcagcgattgaccatatacattgttatggaagtgcacatacagattgcattgtcactacagatgataaagtagcagaaacttttctgcgtcaagttgatagtgctgctgtgtttcataatgcaagcacacgattctctgacggggctcgttttggattgggtgctgaggttggcataagcacagggcgtatacatgctcgtgggcccgtgggtgttgaaggtctcttaacaacgcgctggatcatgcgagggagcgggcaagtggtgaacggtgacaatgatatcgcatacacccataagaaccttccattgccatgaggcaagtaattatttatttttctataaagctgttgcaatttttttttgttataaagtactgtcaaatgatagtggtaagcgcaactatgcaggccgtttttgtgcttcatcaggattcgtgtctatccagtgatgtttgatagtgtcgtcagacaggagcagagagtggtgaatcttttcgatgagggacggtgaactgcaatgtccacttatccagtcatttttatctagaacattctggtgagacacccaccaccccgataaagcagtgctgggagtagtagagcactaatgtaccgaggctgtgtctagtctaggttaaacaagagaattcggttatattgttaattttttttgggtctgattgaacatatatgttgtcagtttttgtagtgatacatatatttctttaaatcctacttgatcgcaagagttatgagct

SEQ ID NO: 7431 - DNA, 413 bp, Zea mays
  Clone ID: MRT4577_106775C.1
cccaaacaggacatattttttaaacagggaccccgtccgtacagaaaacaaagcaattatttacggggcctcggggaaagggccccaaaaaacaacctttttcagccgaggcaaagggaaaacaacagcgggcttgcttgataaacaaaaaaaatggaacccaaaaaaaaaccaaaaatccaaaggggctttacggaactacaagctaggtttgtttttgcccaaaacaaagctgttcaagggaaatccatttgaaaaaacaaggaacccctttgccgggccaaaaggtaggtacccgaggttgatttagcggtttaacacaggcggatcggacctggccacgggggaaaaggaaaacaaatcggggcccgaataataagttgtcgtcgttggccccaacaattttgcccagg

SEQ ID NO: 7432 - DNA, 428 bp, Zea mays
  Clone ID: MRT4577_106776C.1
tctacgcgtccgtgctgccgtatccaccaacgggggagctgaagtgcctgagaggggtctggatcaaggaactgtaccaatgctagatcaagaagccggtacctttgtttaagtcggttgtctgactcgcgggctagttgggaaggcaagaaattcgtgagaactgctgcgcatcacgtgtgcgaccgcgcgaattacgggaggcagagaggattgcaggccttctaattgggtgtactgaggaagtccaagactggtcaaagactaagacggaacctgtgccagaatgaggagggctgggtctgacacagctgcaagggggcatgcacatgctgaggctacaactaacggactgcgcgctgacttgctcacactgctctgggagctcgtgcacgcctgactggtggcttccgaactcaaggtgatta

SEQ ID NO: 7433 - DNA, 471 bp, Zea mays
  Clone ID: MRT4577_106777C.1
gcccgaactagcggggcatacccccgtttagggttagggatccgacaagaaccaaaagcgggtttgccacccgccttttactggctgggggggtggtacctcaaatacaggggggattttgcccatcaaaagtaacggaacagggctcgaacccatcccaatttacatgggcccaaaagggggaacgatgggttatcggccaaggggaaaattgggtccccgggggagtttgagtaaaaataaaaaaaacttcccataggggccaaagcaccccgggcaaaatgggccaaaagggcaagcccccaaaaatatgaagatcatgaggaacaccctccgcccaaaaaatttttttattattaaccacctgttggaccaaaagccgttgaaaaactctaggagctggccctgggctcccttcacgttagccaccggttcccccatgttctcggcaattctgaatggtagctctcc

SEQ ID NO: 7434 - DNA, 471 bp, Zea mays
  Clone ID: MRT4577_106778C.1
cccaagcagggaacctataccattacatccccttccatccaacaaccgtgtctttacaaactacaatcaacccgcctttccatcacaaactgcctgaaaaataagttgcgtccaaaaattttctttttgggtactattttacagcaaaaacgaaaacgtataccaccagaaactaaccactgtgggtaaagtaaacttgtggggcaaaaaaaggaaaactggaaagtcccagcccaatccgggtgcatgtgttgtctctctgcatagacaggggggaaaacaaccattgcatttgcacaaatccagaaagtgtttctgagctgattgatgatctacaaactataaagcctgcacggtgatcacaaggtcggtgaagttatctcgcaatttggccctggcaaaaaatactcctgctaatagaccaaacagaatgctcaaaaagttctgcacgcttgtacaaaacgttgaaaa

SEQ ID NO: 7435 - DNA, 286 bp, Zea mays
  Clone ID: MRT4577_106779C.1
gggggggggcggggggaaacgacgggcttttttttttgaagaaaaaggggcgcccaatttttacaataataggaaccaggccggggggtgccaaaaacccttaaacaagaaaaaaaaaaaaactggggcccaaagtttttggaaaccaaatccccattactccaatacacgaataacaattggaattggggggaaacagatttaaatggcggggaaggttttcccggcggggcttttttttttttttttttccccgcgctaataggagggcaagggaacctgggtt

SEQ ID NO: 7436 - DNA, 224 bp, Zea mays
  Clone ID: MRT4577_10677C.1
ttctacacaacattcgatcccatctcataaatcgtcaatccattcatacctaacgattcatctaactactattaatataccatgcgctcactgcctgattctcagttcatcaactcttctttccaactccttcaattaatcgatcaccgctctgctatatgccttctgcaaacttgtcgctatctcatatcttattctcaccatatatacgttcaacatctgat

SEQ ID NO: 7437 - DNA, 348 bp, Zea mays
  unsure (1)..(348): unsure at all n locations
  Clone ID: MRT4577_106780C.1
agacaaaagggggggcatgttttaagacagccttacgcggcacgcgaacattccatcccatccaacatcaggaggcactgcatgttttccaaaacnaccttctcacataacaaaagcgggcctgttgcgcaaccggccacagcgaagcccaagaatggttctgggaacagctccctgtgatacgcacactgntgcagaagcattatgaaacgcccgcgccggccggcaaaacaatctggggaagcctaaaaataagatataacaaatttccatnggcctaaggattttgcacgcgccttgcttgaaatgcacagactgggttgagccgcgccgncggatgaaccccca

SEQ ID NO: 7438 - DNA, 328 bp, Zea mays
  Clone ID: MRT4577_106781C.1
cgggtccgacccacgccgtccggcagaagagccggtaccttgatccctcttccgccctgtctgtcgtgtgctctctactggcgcctcctacagcaggcacgttgtcggatcactcatgtccacgactaccagacttctccggatcaggcacaggtatcgttaacaagtagcctcgacttagagcaggtctacagggaaaggaactgggaccaccagatcctgctgacggatctggtctttttacacatagaacgcggcagtgccagtggctcaactaatgccgtcgtaggactcgagaaagcttatcatggcggcgcttctgcacgtt

SEQ ID NO: 7439 - DNA, 570 bp, Zea mays
  Clone ID: MRT4577_106782C.1
ggccgccccttttttttttttttttttcaccgctaactgtcgaaatttaaaatactactcggtaaccaaagcaatatgaaaacatcccaatataatagggctcacttaactgtatcaatagtcacttcgcaattttacatgggtaagaaacttacgcataattcataacgcttgagggcacacttggagagagatcaccgggtgctaacatatttcaattattcataccagagacttatattcattatagagagcaaagcaaatagttgctagttcagtagtttatagtttatacgtggtgcctgtctgtacgactctatctctgttgatgccgtcgccgatctgggaggccacgacgctgcggcgtttttgggagggcgagaggggagggcgagggcgtgatgccgacgcacggcttgcaaggcacgacggcgattcagctgggaatgggagcgtccgcacgttcgactctgctgggtgccgcggtcgccgcccaccgacggaccctacagcttgctctactgtagccgccacccatcggaaccctagctccatggctgccccggccgg

SEQ ID NO: 7440 - DNA, 655 bp, Zea mays
  Clone ID: MRT4577_106783C.1
cctcgaggccggccgggatagtgtcttctctcgctagtctctcgcccacgcagcgcagccatggagctagggttccgacgggtggcggctacagtagagcaagctgcagggtccgtcggtgggcggcgaccgcggcacccagcagagtcgaacgtgcggacgctcccattcccaggtccagttccagcctctctcaactctcatccggtcgtccatggctgactcgtcgtcttcgtcctagctgaatcgccgtcgtgccttgcaagccgtgcgtcggcatcacgccctcgccctcccctctcgccctcccaaaaacgccgcagcgtcgtggcctcccagatcggcgacggcatcaacagagatagagtcgtacagacaggcaccacgtataaactataaactactgaactagcaactatttgctttgctctctatatgaatatagtctctgtatgaatattgaatttgttagcaccggtgatctctcccaggtggcctcagcgtatgaatatgctagtttctaccatgtaaattgcgagtgaccatgatacagttagtgagcctattatattgggatgttttcatattgctttggttaccgatagtattttaaatttcgacagttagcgataaaaaaaaaaaaaaaaaagcggcc

SEQ ID NO: 7441 - DNA, 326 bp, Zea mays
  Clone ID: MRT4577_106784C.1
atgaccccggacccactcttacgtaacctctaaattctctcgaggtatctttttcattttttatacaacccgaaaggtacctctcttttttttatattatactctcaacataactcgacctttatcacattcattcacaatgccgctccatgctcgcacactaaaacatttagtcaaccaacgcactgctccacataaaccacaacccttacctctcacactaccttctgaccttattaacaaaccttacgatcaccacttttcaagctaccactcactaccaagctcagcacaccttctaatccaagaaccacacccacaactcc

SEQ ID NO: 7442 - DNA, 260 bp, Zea mays
  Clone ID: MRT4577_106785C.1
tagttctagatcgcgagcggccggccctttttttagtttttcaaacggtcctaagctttaacgccgaagttctttcccttcagtttggttaacttgcaggacctttttattagacgctacatactgaaggcaacctacttgttctaaggcgtttaatttgaggtatttagctctggaagaatctggccattgcagtaatgggtcacatttttacagtttgaatccatctaccacaaacttcatcagtcctgaatgatctg

SEQ ID NO: 7443 - DNA, 249 bp, Zea mays
  unsure (1)..(249): unsure at all n locations
  Clone ID: MRT4577_106786C.1
gactgctaagaaaattctgtctcagactatcccgccggggggcgaaccttatcttcccatggagccagcggggggcgcanctttcctcncctacccctccacagcccaccacccnataaagaaccacccctccccgctcactcacaccgagaaccccccgaggaagaataattctcaccagcccccccccccttggggggggggggggaacccacccaccccccaaaaaccaacaccccccttcccccc

SEQ ID NO: 7444 - DNA, 271 bp, Zea mays
  Clone ID: MRT4577_106787C.1
acgcaaaaacacaccttgctattcgcattatcaacgacctaacaacattggctacggagatatttgccctccttgcgcttattgccctttttgtgagcgcaacaaatgcgttcattattccacattgctcacttgctcctagtgccattattccacagtatctcccaccagatacttcaatgggctttcgaacacctatctgagcaagctaacatgctactacaagcgttttgctgtgaactttttacaacaaccaattgccaattgtaac

SEQ ID NO: 7445 - DNA, 406 bp, Zea mays
  unsure (1)..(406): unsure at all n locations
  Clone ID: MRT4577_106788C.1
gcagcaccaagaagcaccattttttccttaagataacttagaagaaactggctttaaatagttccttcgtaaacanncctgctgtngtgctgggtctgctgaaaccggggtgaacacgnctgacgcgggcacgagcgccttgcnncaaaaaccaggtgggcaacacaaacacgacacgaacgagntaaaccctctgcctaggggnaacacacgggggcgaacaggaaacccggccgggcgggccccaccgctcagnncctccagttcccggcggnggggccggggccgccgccccgggggcccccgccggagccgccggccccctttcggggccggcgccggcgcccngggcggcggccccggcggggccgncaccgccngcacggggccccgcccccggcggggg

SEQ ID NO: 7446 - DNA, 200 bp, Zea mays
  Clone ID: MRT4577_106789C.1
ccgtgacgcattcctagccgctccgctgctacagctcgtacaggacatttgtagctacaacctaatacggcgatactacccagtttattcccagctgcgtagaaatacgaaaagttatctataacatagggcatgccataacatagtagttgatttcacgggtttaaatatataaaaaaagaaagtcatgaattgggatc

SEQ ID NO: 7447 - DNA, 368 bp, Zea mays
  Clone ID: MRT4577_10678C.1
ttctcgacgacttacaatctacttatacgagcactgctatcgacccgactgatgctgctccacattaggagaggtagatctcgatgcagttcgaacctggatctggtggtgttactgaccgtgttctcgggattgcttctgattatctctaccaagcggaacaagagccgcccggcgtgactagcgacgtgggagattatcatagaaccttggctagccagattgaacaccagcttccacgccaattgatcatacttatcactgatctctcagcctatggaccggcctttttctctctcccacactccatcctggcggtgctctcttccccgagctacctgtgctgcaggctactgatccccatgctg

SEQ ID NO: 7448 - DNA, 524 bp, Zea mays
  Clone ID: MRT4577_106790C.1
gtgtttgttttttttcatggttttttttcttttttacaacttatgttctgatgattaggcgggtgggtgtgccccttatatagcgggaggcttcgcttccgtgcgccgactcggtagagcgttcgtcaccgaacagtaagcaaaccttcatgcagaaaaaaacaaagcaggccctctggggaggccaaaaacgggtccaggggccggcgggacaaccaaaagggacacgcgaaagcgctaccaggaaaccaatggtgaaacaacagcggaaagcgggggcccccccagggggcaacccccataggggggggggaggcaacggggcaaaaaggaaaggcgggggggggccccccccccgggaacccaaaacggggaaaaggcccgagaaaggactggaggaaaaacccccggcaccaaccggacaaggggcacccgggaggagggcgaaacgagaaaaaaacccgccaaagacggaaccgggggccaaaacttaaggaacggggcggaaacgaggggacgctcca

SEQ ID NO: 7449 - DNA, 380 bp, Zea mays
  Clone ID: MRT4577_106791C.1
cgctggcgccgcgccgccccgcattcgtcgacgagttcgacaggcccagtgctgccggctcccatatgagtggggtagtaaccgagccaagacttaattccgtggtacattctacatagaggcttcatcgaactcaggacctttggcttaatggaaaggcctgtcaccattgcgtcaggtggctgaccaagacagcttgacttgactcccaccttccatgaaatgcactggcactcagccaaaagacttcaggagttcgacacatacattgaatcgcaaaatcaatatttacattacttcactccattacgattcacaacagctaaagccgctccatgaccatgggcacagttgtcggtgagatgcttgcatcggctgtc

SEQ ID NO: 7450 - DNA, 315 bp, Zea mays
  Clone ID: MRT4577_106792C.1
cccggggtgggtggtctacttattttttggggcaacaccaaaaaacaccattttttccttaagattcacttaaaacaaatcctggcaggaggaacatgatccatcgacccacaggccattctgggtgatgcatgggtcttatggggcccaggatgaacacaatactaaaaactgaaccaaagcgactttccaatcaaaaacccagttgggccacaacaaacgacgcgaaccgagataaaccctctggtctagggaaaacatcacggaagggaacaggtttacttggtggcgggggccccaccgttcaattcctcc

SEQ ID NO: 7451 - DNA, 572 bp, Zea mays
  Clone ID: MRT4577_106793C.1
aaacccaaaaccctggcaaactcattaactttaaacaaaaaaacatccgtcccggggtttttaaaaaaaagggatatggaaaaaaacgggcccccctcaacaataaactcaaaccaagaggtttataaaaaactcagctccaaacaacgtttggggaaaaaactaaaagggaaaaacgggcatcccagcacaaacttgacaagctgagccggtgccgttgcccaaactcaaaaacggaactttaaatcttggggaaagccacaagggcgcaactctggacgaactcattggggggcttttgggaaagggggcccccaattaaaggggcgagggacccaaaaacgtcgggagagaaagagagagagagagagagagagagagaaagagagagagaaagacacacagagacagacacacacacacacacagacacacagaccgacccagccccgcccccctacaggaatcgcccaccccccctgggcccatattccgggcccccggggggggcctccttttttttacgggcgggcccccccccgcggggggggcccccaggctgaggagccctt

SEQ ID NO: 7452 - DNA, 294 bp, Zea mays
  Clone ID: MRT4577_106794C.1
ttgactagtcacatgcttttatcaatcaagaacctactccagggcccggactatctactatgcatcggcgacgacaattccaacaagaacatgatccatcttatcgacaccgctgcctgcatgaactcgctgacatccaatgcttacttgttcttatacaccgtcagcctcaagcccagcaaggccaactactacctcgacgacgctctctacttcgtgagtctgatacaaggcctctcctacgtctacgacgagctggctctatcgaaccatctacattaagactatgactcc

SEQ ID NO: 7453 - DNA, 156 bp, Zea mays
  Clone ID: MRT4577_106795C.1
cggacgcgtggggtggaaagcttgagcgcgacctgtttgtgtggcgcagtttagggaaatttggtttaacggactaaattttagtacctaaattgccgaacacagatattaaaatagagataaaaaaatagagagaatttctcttttagtctagtc

SEQ ID NO: 7454 - DNA, 814 bp, Zea mays
  Clone ID: MRT4577_106796C.1
aatctcagatgaagagaaaagttacattgaaatcatttttggccttattcattccaagttgctgaatcttggggagtacaacgttcatttgacaaagctaattgatgggggaagaaataaggttgcaacggagtttgcaatgtctcttgtccaaacattgattacacaagatcctgttagcatatcagagcttcacaatgttgttgatgcaatatcgaaagttctagctgcccaggtaaacaaagaggaaagcattgctaatgaaactacactaattgatccaaatcaggtggcagtcctgttttctgagtggtgtcagatatgtagtcatgtaaatgctagtgatgcaatatacagtcgttttgtcacacagttggagcaggatagtctgttgaatggagatgatatctctgaacgcttcttccatattctcacggaacttgctgttacacactctctagtctccgagcaaattgttgctcctggtggatcatctcagcaatcaccacagcaaccccatatttcatatttttccattgattcatatgcaaagctcgtggttatggttctcaagtactcttcagtggagataacaccaaataaaggcagtatactttccaagattatttctgttactgtgaggaccattcagaaagatgctgaggaaaagaaagcttcatttaatccccgaccatacttccgattgtttataaattggctctatgaccttactactactgatggccatcatgatgggtctaattttcaggttttgactgcatttgcccatgcattccacttgctacaacccctg

SEQ ID NO: 7455 - DNA, 275 bp, Zea mays
  Clone ID: MRT4577_106797C.1
cccacgcgtccgcattggcgtgccgtatcgtgctgttaggatcgcacaacgcgacacagctagatatgcttggtcttccatcttcgccccctgctcaaggaagaaaagacgctccaccagggagaggacaatgtcaggtcgtccccacactactagataaccggatggacaggcttgacattgcctgttgctgctgattctgctatcactgttagtcgtgttcagtgccgaatagacatgaatactgtgacggtcctagcatctggagaaatctg

SEQ ID NO: 7456 - DNA, 1720 bp, Zea mays
  Clone ID: MRT4577_106798C.1
cggacgcgtgggcggacgcgtgggatttagtactcttcagtggagataacaccaaataaaggcagtatactttccaagattatttctgttactgtgaggaccattcagaaagatgctgaggaaaagaaagcttcatttaatccccgaccatacttccgattgtttataaattggctctatgaccttactactactgatggccatcatgatggttctaattttcaggttttgactgcatttgccaatgcattccacttgctacaacccttgagagttcctgcctggagctttgcttggcttgagctggtgagtcataggagcttcatgccaaaattgctgatgtccaattcacagaaaggttggccgttttttcagcggttgcttgttgctcttttcaaattcatggaaccatatctgagaaatgctgaactcccagaggcggtggaccttttatacaaaggaactatgagagttttgcttgtattactgcatgactttcctgaatttatttgtgattaccacttcagtttctgtgatgtgattccttcaagttgcattcaaatgcgcaatgtcattcttagtgcttttccacgtaacatgagactgccagacccttctactcctaatctaaagattgatttgttggctgaaatttcaatagcaccacgaatcatgtcagatgttgatggtaccctcaaatcaaagcagttgaagactgagtttgatgaatatctcaagaggccggaaggctcttcctttctaagtgtcctgaagcaaaatttgctgctgcctcagaatgaagcagctgttgctgggacacgctacaatgtgcctctgatcaattcacttgttctttatgttggcatccaagctgtgcaacaactgcaacagaacaaggctaatgcatctgcatcagtgcagcagattaaacatacgcctacgatggacagtttccagattgaaacagctaccgagatgttcacaaatctcataacaagttttgatacagagggccgctaccttctgttgaatgcaattgcaaaccaactgcgctatccaaatagccatacacactactactccttcatcattctgcatctatttgctgaggctacccagggagattatccaggagcaaataacaagggttcttctggagcgtctaatagtgaaccgcccccatccttgggggttacttattacttccattgaattgataaagaatccgcgttacaacttttggaaccggtcttttacacatagtgcacctgagattgagaaactgtttgagtcagtggctaggtcctgcggcgcaaaagctgtagatgaaggaatcagtgtgcaggatggcagtcactaataaagtaatttgctttgttagtgctgtttttgtgctatttcgcactgtaaattgtgtgctaccctatctgggcttgtacagaccacggaaatacatagtgcgtcacgtcagctatttgggtgcctgtgctttgcctggtagctaggaattactattgatcgccagatgctccaggtgcaaatttttccgtggactggttcacttatttgattcaactatgtcagaatggtagatggtgcgaacttcagcttagatagtgagttgagttgcaggcatgtttgtaaattatatttttgatgccattctgttttctcatagaacggaacatttcaagatcagtctatactcctatgccgtttt

SEQ ID NO: 7457 - DNA, 338 bp, Zea mays
  Clone ID: MRT4577_106799C.1
caccagcgtcgtacaacaggagggagaaaggcttggcgtgccgtctcggtgggagctcggcttggccgccgtatcggcctcgaagacccattttggggaaagggtagaccttggggaaacacgcggaggcaccttcgagctttgggatcacctgctgttgccttaattgctcaccggagccaatagttgctgcggtgccagcttgatccgtgggccggtgacgccgctgctccatcaaagctgggaggtaacgagaatttgaagatcatgctggtacctggaatctcgagtcccaggtcatgaacaggtatcgcatgaagaggcgcatggaggatgct

SEQ ID NO: 7458 - DNA, 1389 bp, Zea mays
  Clone ID: MRT4577_10679C.1
cttgctttctgtgcctctcagcaaagggcagcgttccttgctatgtcatctagctagatagcacagagcaagctgcctgggcaggcagctagaaaattaacaacaaaaaaaaaggtcaggagcagtgggatttggtcgcttgctgttgcttttggcttcgtctccgggcacatctcactgctgaagcctcatggggagagctccgtgctgcgacaagaacaatgtgaagaaagggccatggtctcctgaggaggatgccaagctcaaggagttcatcgagaagcatggcaccggtgggaattggattgctctccctcaaaaagcagggttgaggagatgtggcaagagctgcagacttagatggttaaactacctgaggcctaacattaagcacggggagttcactgagaccgaagacagggtcatctgcagcatgtatgcaagtataggaagcaggtggtcgatcatcgcgtcgcagctgcccgggcgcaccgacaacgacatcaagaactattggaacaccaagctgaagaagaagctcctcggctccacagccgcgccacaccctcaccgcgcgccacggcagcagcagcagcaccaccaccaccggcccggcctcaacctgatgctccaacaaacgttgccctccttaccccagctggccacctacaacagcttcttctccgtcgcaggcggaggagccctccaccacgacgacccaatcatcccagcgctagcacttccgccgccacaccaggactacatgctaagccccggcggcggcggcggcggccttggcatcccaacgtcactgctgcacgcgcagcagcagtttcagcagcagcaccagcagcatgtggtgaaggaggagagcggcagcatgatcgtgttcggcagggaccagcagagctgcagctcgtcggacggcggcggcggcgcgcatagccagcaccagcagccgcagtacggcaatggccatggcaaggagctgagcttcgacggctacttgttcggctacagcaacggcggcagcggcatggagcacgacaactgcggcaggctgatgcagcagctgcaggacgctcaccagcagcaagcccatcagcatctagtgcctgtggagtacaactacgaggagatcaagcagctgctcatgagcacagccgccgccgatactctgcacgccgccggcagccacgacgacgacgacgacaacggcgggattgaagggttcggcggctcgcaagggaataaggtgacgatgatgtaaattgacgactgatgctgagagatggacgtacgacacgacacagggtaaaagcgattgatgatcaacgcgcaaggtgtgtgtttgatttttactgctgtattatttcttcttgcttcttc

SEQ ID NO: 7459 - DNA, 290 bp, Zea mays
  unsure (1)..(290): unsure at all n locations
  Clone ID: MRT4577_1067C.1
attcggctcgagctgtggtaacctgtttgaggtggtcgnacagagggtggctgggcgtcctctggagagcttagaggaggtcccgggctttgcagactctaacgtctgagctccatggggagaggctccgggagcgaccagatgttgcgcgtgaacgagtacccgccttgtctcgactgcagggactgggctgcagcgccacgggctagggtgagcacaccgaccctgagatcatatgcgtgctccgatccagacggtacctccagactgcagatcgcgctccttgacgg

SEQ ID NO: 7460 - DNA, 3378 bp, Zea mays
  Clone ID: MRT4577_106800C.1
cggacgcgtggacgagacgcgtgggatttagaactcttaagtggagataacaccaattttagagcagagtacttctccaagattatttaagttactttgaggaccattcctaaagatgctgatgaaaagaaagcttcatttaatccccgaccatacttccgattgtttataaattggctctatgaccttactactactgatggccatcatgatggttctaattgtcaggttttgactgcatttgccaatgcattccatttgctacaacccttgtacatcccaaattcagcaccagcatcctccgttaatttgtctactattcgtatgatgcgacaattcgcgatgactaagccagtggctctggggccgggggctcccgttactggtatcgcacaatttttgagtaatcctgcccaagttggagtaagcgagtctcctgtcctactgggtggaacgattggtgctgcatctaacgaccttcctgtcagttcaacgactgtcacaaccaatgaaataactgctatggtgccacctccatcaacatctgctgcggatcgcctaggatctattttacctgaacttttgaatactggggatgctttggagagataccaacaggttgcccaaaagctggaagccttgattgctaatgatggcaaagatgtggaaattcagtctgttattatggaagttcctgatatcttgcgtaggtgtgttagccgtgatgaggctgcattagcagtagcacaaaaggttttcaagagtttgtacgataacgcatcaaatactgcttatgtctcctggcttctagcaaccttagttgcaatacgagatgtctgcaagcttgttgtcaaagagttaacaagttgggtaatatattcagatgaagagaagaagtttaacattgatatcatttttggccttattcgttcggagttgctgaatattggggagtacaatgttcatttggcaaagttaattgatgggggaagaaataaggttgcaacggagtttgcaatgtcccttgtccaagcattgtttgctcatgatcctgttggcttcacagagtttcagaatgttcttgatgcactatcgaagcatacaaagagaccaggttcacctgaatcgttgcaacaattgattgaaatcgcaaggaataatgtgagcaccactactggttttgttgctgtgaaggatgaaaaggtcaaactgccgaaggataaaaaggttttagctacccgggcaaacaaggaggaaaacactgctaatgaaattacactagttgatccaaatcaggtggcagtcctattttctgaatggtgtcagatgtgtaatcatgtaagtgctagtgatgcggcatacactcgttttgtcacacagttgcagcaagatggtctgctgaagggggatgatatctctgaacgcttcttccgtattctcacggaacttgctgttacacactctctagtctccgagcaaatcgttgctcctggtggatcatctcagcaatcaccacagcaacctcacatttcatatttctccattgattcatatgcaaagcttgtggttatggttctcaagtactcagtggagataacaccaaataaagccagtatactttccaagatcctatctgttacagtgaggtccattcagaaagatgctgaggaaaagaaagcttcatttaatcctcgaccatacttccgattgtttataaattggctctatgatcttactactaccgatggtcaccatgatagttctaattttcaggttttgactgcatttgcaaatgcattccacatgctacaacccttgagagttcctgcctggagctttgcttggcttgagctggtgagtcacaggagcttcatgccaaaactgctgatgtgcaattcacagaaaggttggccattttttcagcgactgcttgttgctcttctcaagttcatggaaccatatctgagaaatgctgaactcccagaggcgatggaccttttatacaagggaactatgcgagttctgcttgtactactgcatgactttcctgaatttctttgtgattatcacttcagtttctgcgatgtgattccttcaagttgcattcaaatgcgcaatgtcattcttagtgcttttccacgtaacatgagactgccagacccttctacccctaatctaaagattgatttgttggctgaaatttcaatagcaccacgaatcatgtcggatgttgatggtgcccttaaatcaaagcagttgaagactgaggttgatgaatatctcaagaggccggaaggctcttcctttttaagtgacctgaaccaaaaattgctgctgcctcagaatgaagcaagtgttgctgggacacgctacaacgtgcctctgatcaattcacttgttttttatgttggcatccaagctgtgcaacaactgcaactgaacaaggctaatccgtctgcatcagtacagcagattaaccatatatctccgatggacattttccagattggaacagctaccgatatattcaggagtcttataacaagtttggatacagagggccgctaccttctgttgaatgcaatcgctaaccaactgcgctatccaaatagccatacacactactactccttcatcactctgtatctattttccgaggctacccaggaaattacccaggagcaaatcacaagggttcttctggagcgtctcatagtgaaccgcccccatccttgggggttacttattactttcattgaattgataaagaatccgcgttacaacttttggagccggtcttttacacactgtgcacctgagatcgagaaactgttcgagtcggtggcaaggtcatgtggcgcaaaagttgtggacgaaggaatcagcgtgcaggatggcagccactaaagccatctgctttgttcaagtgttgtttttgtgctatttcttctctggcactggaaattttctgtgcttgtacagatcgtctgtatagtaaagctgttagtcacacgtgtcggtgcactgccaaaccttagcaggtgcctgggagaatgcttttgtttgtatgaattttagtcagcaatatggatggtttgcaataaaaaaaaaaaaaaaaaaacggaaatacatagtgcgtcacgtcagctatttgggtgcctgtgctttgcctggtagctaggaattactattgatcgccagatgctccaggtgcaaatttttccgtggactggttcacttatttgattcaactatgtcagaatggtagatggtgcgaacttcagcttagatagtgagttgagttgcaggcatgtttgtaaattatatttttgatgccattctgttttctcatagaacggaacatttcaagatcaaaaa

SEQ ID NO: 7461 - DNA, 249 bp, Zea mays
  unsure (1)..(249): unsure at all n locations
  Clone ID: MRT4577_106801C.1
attttgagcattcaaaaacacacnaagcgatgcggacttacaaccaccttacaaccatgggttacaagaattttacccttcctgtgctctttggccttttgtgagagcgcaacatacgcgtcattattccacaatgctcacttgctcctagagccattattccacacatcctcccaccagatactctaatgggcttcgaacacctatctgtgcaagccaacatgcaacaacaagcgcttgcggcgagcg

SEQ ID NO: 7462 - DNA, 408 bp, Zea mays
  Clone ID: MRT4577_106802C.1
aagatgtttccttcagtctccctgagccaccgcttcgtaccgacaaccttagacaacggcacccgaacttggcatgctatcgctcgcgctaatgaactcaatgtgcgcgatagacctacctagtatgcgttcggtcaagatcatggcgtagcaccgacctaccccctatctcatttgccagaacaactgcaaacgtggcggttttggccgaggtgaccaacccttactgcttgatccactttcaaggggaggagaacttcttcgagtccttctgaggactgcctatcgcatccgccatgctggtgatcaacacctctactggtgccaccatgatatgaggcccacttttggttgcaatccagaacgcactacatattgccacgtactcaatgcgaggaagaggtgcag

SEQ ID NO: 7463 - DNA, 209 bp, Zea mays
  Clone ID: MRT4577_106803C.1
aaacacataaaacgtccttaaaaacccattaaacaaatgatatcaaaactaactgggctagagacacatgccagaccttctaacatatccaatcttaccttcccatccatgcaacttactatatcttctatcctgatccctacattacaatccaatgcacgatgtctacaacattgtatactgcaaaaaccctaccctcacccaactta

SEQ ID NO: 7464 - DNA, 2363 bp, Zea mays
  Clone ID: MRT4577_106804C.1
gacttgggaacaaaggtaaaaattgaaggtgacatcaatagatgtgtggcatattacaagatagctctatactacattggcactgtgctgatgccatgtataatcttggcgttgcatatggtgaaatgttgaattttgagatggcaatgtcttttacgagcttgcgctgcacttcaatcctcgctgtgcggaagcatgcaacaatttaggagtcatatacaaagacagggataaccttgacaaagctgttgaatgttatcaaatggcactgtcaattaagccacttttcgctcagtcgctaaataaccttggagttgtctatactgttcaaggtaagatggattctgctgctagcatgattgagaaggccatacatgcaaatcccacatatgctgaagcatataataatctaggtgttctttacagagatgctggtagtattactttagcaattcatgcttacgagagatgccttcagatcgatcctgattcacgaaatgctggccagaaccgtttgcttgcaatgaactatattgacgagggctcagatgacaagctttatgaagctcacagggagtggggaaaacgctttatgaaattgtatccacaatatacaagttgggataactcaaaagttgctgaccgcccattgatcatcggttacttgtctcctgattactttactcattccgtgtcctacttcattgaagctccccttacacaccatgattccacagtttgcaaggtggttgtctactccggtgttgtgaaggcagatgccaagacacttagattcaaggataaggtgttgaaaaagggtgggttgtggagagatatatatggtattgatgaaaagagggttgctagcttggtaagggaggataaagtggacatacttgtggaacttactggtcacacagcaaataataagttagggacaatggcatgccgacctgctcctattcaggttacctggattggctaccccaacacaacaggtttgccaacaatagactaccgaatctcagactcattgactgatccacctatgacaaaacaaaagcatgttgaggagttggtgcgccttcctgaaagctttctttgttatactccttccccagaagctggtcctgtttgtccaacgccagcaatttcaaatggtttcgtcacttttgggagctttaacaatctagcaaagattacaccgaaagtgttgcaagtttgggccagaatattatgttcagtccctaactccaggcttgtggttaagtgcaagccattctgctgtgagaacataaggcagaaatttttggccacactggaggagttgggtttggagtcattacgggttgatctgttgccactcatccatctgaatcatgatcacatgcaggcgtattctttgatggacatcagcctggatacatttccctatgctggtactacgactacatgtgaatctttatacatgggggttccatgtgttacaatggctggtgctgttcatgctcataacgttggtgtcagcttgctcagcaaagtcgggttggggaggctggttgccaaaactgaggatgagtatgtgagcctagcgttggatttggcatcagatgtgaatgccttgcaagaactgaggatgaccctgagggagctgatgatgaagtcgcccgtctgcgagggagagagattcacccggggcctggaagctgcatacatggacatgtggcgcaggtattgtgacggagacgtaccatctctcaggcgcttagcactgttagaggaacatcctgttgccaatgggccagactcggacaaaacctccgagaagcttgcagatctgaaagcgcagagagcaagcgcgaccgtggaggaagataaccagcccccagcaatggcgaatggtgtgagatcgcccagttcacccgctgctgcaaaatgtgaatcaaatggtcacagcagccaatgaccaagaacggtgtcacgctccattgatgcagaccgatactgatatattgtaggtcgagtgatgttagcaacatctgtgtttagaggggaggggttgttaagctccgggtgtctgatttattgacacttgcggtctgtaaggtgattaaatgtgtcttataaagttcgatttgtagggctttgcccctgtaggttcttgatatggtaacttaagttgcttcattagaaggcgcgggttcccggttgtatatgtagtagaaatatgacagtaaaacaacttgaagagtcgattaaccgacatagatgtcattatgctattataaaaaaaaaaaaaaaacattaaaaaaaaaaaaaaaaaaaaaaaaaaaaaaaaaaaggaaaaaaaaaggggggcccca

SEQ ID NO: 7465 - DNA, 295 bp, Zea mays
  Clone ID: MRT4577_106805C.1
agtttttgaaagggaagtgactcaagaccaagtaattctgatggctgctagagcctcccgaatagaaaatcaagatgctattgatactgctatagttggcatgctagctgatccaaaagagcgccgtgctggtattcaagaggttcatttccttccatttaatcctacggacaaaagaactaccttgacatacattgatagtgatgggaagatgtaccgtgttagtaaaggtgcgccagagcagattctcaaactcgcctacaataagttggagatagaacgaagagttcatgct

SEQ ID NO: 7466 - DNA, 171 bp, Zea mays
  Clone ID: MRT4577_106806C.1
tctcccattcaaaaaatgaaaaaatattctataccataatctcacaatacttaatctcttactacaatctccatcacagaacttcattctataactcaaacatactcataactatatcctatactataaaaacccaatactatcaacaactaccctcttaaactctccaca

SEQ ID NO: 7467 - DNA, 241 bp, Zea mays
  Clone ID: MRT4577_106807C.1
aaaggattatgaggaggttggtgtggattctgttgcaggcgaaggtgaagacgaaggagaggaatactagttataaccttcctattggccctgacgcatgtcatgctcacagaatttcagcttcagcttaactgacagacgttaaagctttctggttagattgttttcacttggtgatcatgtcttttccatgtgtacctgtaatatttttccgtcatatctcagagtaaagtcattaaca

SEQ ID NO: 7468 - DNA, 150 bp, Zea mays
  Clone ID: MRT4577_106808C.1
ctcgccttcagactcacgtggcacttcaggcccggttcagcacagagctggcgagagagacgcgtatcagacagcagatggctgaccaggttgctcaaaagtcctctgaactggaacagtatttacagcgagtacgggagctggaagaca

SEQ ID NO: 7469 - DNA, 234 bp, Zea mays
  Clone ID: MRT4577_106809C.1
aaaaaaaggtttgagcggggacagacacccttgacaaataaatgcaggggaacaatacccgcccacatggactaggggtaacacaaaacagtggggtactaatttgagcatttccagcctactaacaagaaaaaagaagggactggggaccaaatcctcttcaataatatcacaccacaacttccaccggataaaacatttaaaacattggggctcgaacaactttgcaccccc

SEQ ID NO: 7470 - DNA, 487 bp, Zea mays
  Clone ID: MRT4577_10680C.1
aataaaaatcaaaccccagcgcgcacccatcttctggcctttacaggcgacgagtcttctagcaagctgtcaatgcacgcatcgattcccatccggcacagcgcctgcgccttgatctgcactaggcgataggctgcatacgtgttctcttttcgataaccaacatgagccgtggtggtagtgccggtggctgccaaagctctctgggtttgtctttggaagcgcggagtccactaaaccaggagggggaccagtctgcaagtgctccacctgactgagaaaccatctgctgcaaagactgatgcggccaagcaggttgctgctggggttaccagccaaaccaataactaccttttttttgttggccccaccaccggcaacttccttacggaccgtccttcaaccaaggtccacgctgatcctagagaaggctcttccctgggctacctgttcgggggaaactgttgcccgagttggcgcgttcacc

SEQ ID NO: 7471 - DNA, 495 bp, Zea mays
  Clone ID: MRT4577_106810C.1
ccgggaacgttttttttccccgcctcaggggggaatcctttgggttaaagggccccgccctttcccccttaggggggggcccccgccggaggcccccccgggggttaaggcccccttcctttggtgggggaaaattgtttccccccccattcccccgttccaaaccggcccggggggtccccccgggatttccggcccggtccctgggggggtcccatttttccttttgggggggcgatttaaagttgggggaaataagggccaaaggttttccctggggaaaaagttttcccctcacaatcccccaaaaaaaccagcccgaagatataaagggaaaagccgggggggccaaaggggggggctacctccactttatggggtggggctaccggcccgttttccagggggaaacctgttgtcccccttttttataaaaatcgccccccccccgggggaggggcgtttttctttttggccccccgggggggttttttt

SEQ ID NO: 7472 - DNA, 249 bp, Zea mays
  Clone ID: MRT4577_106811C.1
atcgatcacatgtgtcgagtcgtactctgtggctgaccttgtgcctgataacagggatatcatggggagcaacatctccagtggtcagatcgtcacagtcttatggacgagcccttatgatatctggggaagttaaagtccatatgatggctgataagagtacgatacaggtgccatgcggacacgtgacatcactgaagactgcctggcacgggccgcgcgtgtgttcatgcctatacggtaaacatg

SEQ ID NO: 7473 - DNA, 613 bp, Zea mays
  Clone ID: MRT4577_106812C.1
gctggccgtgtagctgcacgtagccgccgcaggggaagtactacggagggaatgcggacgacgtgcgctcgggcggcgtctgtggcacgaaggaggaggaggagtccagagacgcctgcgccggggccgcgctctactcgtccgagtgcgctggcggtggtaggttcatcgagcacttcttggtggacgaccacgtgcgagcagccctgttccggacggcgtcgtctacgcagtcgaccggtggcttactcacgtaagtcggggcacgccggagcaccagccgatccaggtccacttcgggtactgctggtcgatgtcgtcggtggagcagacctgcagcgtctctgaatggggggagtttgagttctttatctagtgacgtacgatgatcacaagtggccgggggacactcgtgttcaagcacacgtaagggccggacctatacgagttcattaggagtgggctagggactcgtgagttagccctgcagagcaacggtgtatgcatagtttgagtagatggaagtgcaggttcagggactgcccatcaagcgattgtttgttatagccatcgatcatttttcatgcatgcaagagaagttttttttctattc

SEQ ID NO: 7474 - DNA, 522 bp, Zea mays
  Clone ID: MRT4577_106813C.1
aaagggccaaacctcaaactttataggggttcggcccatccgggggaaaaaaagtttggggtcccccccccaggggacccaccggggcctttaaaccaacgaggccccccccccggttggggacccccaacccccaggggttttttaaacccccccccccatatggggggcccccagggggccccaaacgacccaaatccccaggtccaggagcggtttaaaggccccagggtttactgccccccggggggggggacccccagggggggggggccccccttcgggagggggaaccccgctggggggcggccatcctccaggtgtttgccaaaaaaaataaaaccctgggggtggggggggacgcccctttgggccgggatcttcccctccacgggggggggggggggggagctctcaccccccagggttaggggcttgccacccaaggtcttaacaaaaatctgcataccgcccctgaaacccaacaccaaggggggggggccctccttcggggggggggaa

SEQ ID NO: 7475 - DNA, 700 bp, Zea mays
  unsure (1)..(700): unsure at all n locations
  Clone ID: MRT4577_106814C.1
gctcgccgccgtttcccatccgcgaggacgcctcctgccctgccactcttcctcgttgttaatctcgatgtcggataccatgataagatcactctgcaccgccctcgtgaggggacttatgaaatcatgcccgtgcattgacacaatgtgctgtgtcacgtacagctattcagcagtagatgaactattcattaggtttaaggggctctccacaatgtaaatggggactcaaggacaacacaagtagctgttggtcacagacacccaacaaaattttaaggcaacaagcaaaagtacacatttgtctatcagagccattgaggcataggatgtaaaggaaccccctgttgctatcagtatgtgaaggttatagtcatggtgcacgctgccgcttaagtgcaagaacagctgagggcctccaaccaactggctctggccgtacgtagttgcaaactagttcaacaacagaaacaacagntgttggcaacgcttagcaaactaggcatcggcgaaccctcccgtttacgtaacagaacaacaactgctttcatctagcccgctcgctgtcggcaatccacctacatacctgcaanaacacttgttgcaacagattgtaccagnnctgactaacttagctgtgggcaacnctgttgcctacttgcaacagctgcttccattcaacaactgactctgtcgaact

SEQ ID NO: 7476 - DNA, 978 bp, Zea mays
  Clone ID: MRT4577_106815C.1
acctgtgtcattcccgcccacacgcttctctctctaccagcagaccgcgccgccgccgcgccacagctctccggatcatcggccgtccacctcctcctcctcgcccgctcaccggccgtccctactgcggtgccatccacttcctctccctgccgccatagctcgcacaacccccatctcgccctcttcttgccacaccgtcgctaccaccgccccgccctgagagggaccgacgccatggacctcctcgagaatatgatggcacgaggagtgctctcggacctgtagaagttctccggcttgatggagcacctggggctctgtggctctggttcgtgcccccgctgcccccaccactcggccccagtggctgctggtgcggtccgctgtccaggtaacgcccaggtgaagtttttgaaggggttcagcgaagatgctaaggtgacgcacaataataacaggtgcacacaaaaaaaatgtatttagcaaagatggtaaggagcactcatgaatgatttcataggaaggataaaacgagaagagtggaaaccacccaaaggtgaaattcgtactgtccgagttaccttagatacagcgcagtaccacattgatgttaccgagacagcagagaagggcacagaaaatgtgtatggaacatttaatattctaatgagaaggaaacccaaggagaataatttcaaagcaatcctggaatctatacgtgatctaatgaatgaaacatgtgtagttccagaatggttgcataacatattcttgggttatggaaatccttctgctgcacagtggatgaatatgcctgatcttctggaagttatagatttcaaggacacttttcttgatgccaaccatgttcagcaaagttttccagattaccaggtatatattttgactattttttttttttttgcttttttggagtgtatctattctcattttcatcttcaatctccagtgatc

SEQ ID NO: 7477 - DNA, 374 bp, Zea mays
  Clone ID: MRT4577_106816C.1
gggaaaacccgccaaaagcccaaggggaaccccccaaaaaaccccgggcccaaaagggggccgccttccccaggggagaaaaaccaaagggccccccccgggggggaaggaaatttcgggggatgggcccctttaagggaaaaaaacccaaaaaaaaacctctcaagggcccccaaaaaaaccccatgggccccccgaaactaaaggggtgggttccctccaaaaccccgggttttggacccttcaggggaacctggaagccttttcccccagaaaaaacttttggaacgggagcccccaacaacacggggatttggtgaaaccccaaagggtgaacggataaatccccccccgaaaccacaggggcccccttt

SEQ ID NO: 7478 - DNA, 323 bp, Zea mays
  Clone ID: MRT4577_106817C.1
gcagaattctccttttttagcgtgcgcccggggagaggactatgaggattgatcgacaagagcaatgagatcactgaacaacaccttgctttagctccatcggagccaggcatgtgcttatgacagatacattgtggtagggggcggtcttacgccagctgctgggcagagtatattggaccttggggtgctgggggtaggtgatcttggtgctgcctctgagcctacccttgcggaatactatcatgacctgctcgattcagaatgatgtacatggtccttaaggactacacagagatctgactaccatcatgaagcagagc

SEQ ID NO: 7479 - DNA, 214 bp, Zea mays
  unsure (1)..(214): unsure at all n locations
  Clone ID: MRT4577_106818C.1
gscgcgcctccccymmccccccsggtcaggggtmtcgcgykcsggaggytctccgggggtgmggggamggggcgacrcgcagmtcagaggcagccgscccccgatscgsmgcacccgcccccaccaacscyrccacgcctascscsacggmsgmcmactccarccasmacvcccncagcascyacggcgaggtcctcgagtccacagatcatcc

SEQ ID NO: 7480 - DNA, 238 bp, Zea mays
  Clone ID: MRT4577_106819C.1
tttttttttttttttttttaccaccatgacaaattataacacaggcaaagttttgaccattacacacaccttcaacaccactactgcatgagaaggcacatgacagtgcttgcttgaaagagacaacaacgacgcctacaacaggcggtaagacgaggtgaacttgggacggcttgtaccctccgagacggggcttgcgagctcgcgggaggacgaggcgacggaggtctgatctcgc

SEQ ID NO: 7481 - DNA, 271 bp, Zea mays
  Clone ID: MRT4577_10681C.1
gggaacaactgctgtcatgttagtgaaacaaaggggagtaatgttacaactccataattggggcattagctgcatatatagacatgtttgtatatgagcaatgcaataaggggacaatcaaatttctgtattttggaaacaccacaccttcacaccatgaaccatttatatacccaaatttaatgatcacgtatgtatgtatatgtatgcacgacaacgatccatgttgacacctggcgacatcgttgtcacgggccacggggataccagc

SEQ ID NO: 7482 - DNA, 586 bp, Zea mays
  Clone ID: MRT4577_106820C.1
cccccctcgggtcgacccacgcgtccggaacaaagtatatgcccccatgacaccgagtccaagcagcaggctcgagcatgagctggagaagcccccacatccgcatgggctggatgcccatttcatgaggaggcttgtgagccggagctgggaggagtccaggctgctatggcgccttgccttcccggcgctcctgacggaggtgtttcagttctccatcggtttcgtcaccaccgccttcgttgggcacctcggagaggtggagctcgcggctgtcagcgtcgtggagaacatcttggattcctctgcctatggggtcctgtttggcatgggcagcgcgctggacacgctgagcgggcaggccgtcggcgccgggcagctggacaggctgggcacctacacgcagcagtcgtggatcatctgcggcgccaccgcgctggcgctggcgccggcgtacgccttcgccccgcggctcctgcactcgttcctccaccagcccgaccacgtgtcgcgcgccgccgggccgtacgcccgctgggcgatccccgagctgttcgcgcacgccgtgaacataccgctcctcatg

SEQ ID NO: 7483 - DNA, 294 bp, Zea mays
  Clone ID: MRT4577_106821C.1
gcgcactacctgaaggcgatgtgccgcctgtagctgtagtagacaccttcctgcccttgcggcgcagctgtccgcggggtgtactactgagaaaactatgtcctcgaacactaatgtaatggaggcagtgactagctacctatcttgctcgtggactcatgtatcggagatcagtaacgtatcgtgacccatcaccatcggtggcaatgtgagcaatcaccagtctgaacccttgaagtgggccggatttttatttacgaaaaaaagatgattccaggttaaatctcccatggc

SEQ ID NO: 7484 - DNA, 627 bp, Zea mays
  Clone ID: MRT4577_106822C.1
gggttgggggttttttttttttttttttttttttttttttttttttttttttttttttttttttttttttttttttttttttttttttttttttttttttttggggaaatttatttttttatgggaaaaaaaaatttaatgggggcccaattagggggggggtccaggaaacccaatggggtaaaccaaaagggttggggacccacgtccatgggcccaaagacgggccccaaaaatggggggggggggatagcaaactgaaaaactttggttttttttttttttaaaacaccaaaaaaaacctttttttgggacccagctcggcctcctttttttttgttaaaccccccccccaggctagaaagaaaaaaatcatttcccggggcggcaatcgatgggaacaaaagttgcggggggcgaatttgaaatttttacccaaacccaagggggggggggccttcccggactcccccggggccttaaaaaaatggggggcggccttttttttcggggccaccccaaggacaacgggggcctgcccgggggggctcttttcctccagggaagggtactttttgccccacttgcagtttgagcccaaaccccaatttgatccccaattgcaag

SEQ ID NO: 7485 - DNA, 411 bp, Zea mays
  unsure (1)..(411): unsure at all n locations
  Clone ID: MRT4577_106823C.1
gctcctatactcctttttttattaaatttatcaatgtattanaaaaaaaaaaaaaaaaaaaaaaaaaaaaaaaaaaaaaaaaaaaaaaaaaaaaaaaaacgaaaaaaaaaataaaaaaaccataaaccgccacaaaacacaaaaaatagatccccaacaaggacgaaaaaatgcccgttaaaaagaaaaaaaggggcccatctgttccccgggccccaatttttctcccccctaaacggcaccataattccctgccgcggcaataaagggcacatggtcgtaccccctaataatatggtctccgtcccctttttgccgatctgcccccggcccgccttttaggctaaaaatcctggcggcccccatggaggagtgaatccccctttggggggggggggcacattccctttt

SEQ ID NO: 7486 - DNA, 220 bp, Zea mays
  Clone ID: MRT4577_106824C.1
ggccgttgcccaggatcgtcccgcttgctgcttgcgcagcacaggatccgggaccggcttctccgcgggcttcgcctccgcccacgacatatagctgaacctgcccagcccgttgaagagagacgccggccgcctaaaagggtgatacggcggggcgactaggacgtgagtagttttcgggagggcgagggctttggcgacgcctgagccgacgcgtgga

SEQ ID NO: 7487 - DNA, 528 bp, Zea mays
  Clone ID: MRT4577_106825C.1
gcaagctttttttttttttttttttttttttttttttttttttttttttttttttttttttttttttttttttttttttttttttttttttttttttttttttttttttttttttttttttttttttttttttttttttttttttgtttttttttttttttttttttaacccccccgggggccccctaaaaaggggaaacccaaacacaaagggggaagccttggggggcaacgagcgggccccaccacatgaggtaaaaggggcaaaactgcccccccgggaaaaaagaaacccccccagccatccccaaaaaaaaaccagccaaaaaaaaaaaaaaaaaaacgggggggccccaaaaggggccccaaccaaaaaaaaaaacggggccccccccgccctttttctaggggaaaaaccctgggcccacttttttttaaaaattcccccaccccccggggaagggggttacgcattaagggcctttttcccttatgcccgcaaaaggccattatccctaaaaaggccgg

SEQ ID NO: 7488 - DNA, 483 bp, Zea mays
  Clone ID: MRT4577_106826C.1
ccccgcgtccgccccgcgtccggcggtgcagcacaaacccgtgggtccgtgcccacgccgtgatacatggccgtcagaggcacgcgttggccgcatcatggacgacaggccaccggcgattacgcgtagtcgtcttacgaccgtgccaagcagatggagcgcgccgtgcgctcgtacggggtcgttatgctacttacccgcatcctgctggctggggtgctgcagcccggccgtcacctgaccatgaccaccagacgcgtccgtatgggtgccatctatgccatcaccagactcttggtcctgcatcacagcaagaggtgccaagccattcgggcgtgtctgacctcctacactctatccaaacaaaccggtcctggtctctactgcgacaccctacgtgcttcctgtggcagagtctgctgtgggcccctaaaacaactgggtgtaatgctgatgatcatgggcagccaggcggagcgcgga

SEQ ID NO: 7489 - DNA, 226 bp, Zea mays
  Clone ID: MRT4577_106827C.1
tcgctccttttttattaaattattagagctttcacgaccggtcgtggaccgaatttggtggggcggatttttaagggccgtcggtggctcaccggacaccgttcgatttgcggtgctatttcggccgttgtaccctacctgcggctgaaccgataccagggttggcgggccgtaaagcacaaaagtaaactcttcccgaggcccccggcttcgtttgttgactttc

SEQ ID NO: 7490 - DNA, 227 bp, Zea mays
  Clone ID: MRT4577_106828C.1
aatattccttttttctttttctttctctatttttttattcctttttttcgcgccccaggcaccgtgtactttttatttttatgagggccccggggaatactttttttatctaagcgaggggaattccgttgtggaattaaaaaaaagttctatccccttttggtgcaattaaaaaaattccttgctttaccctgtggatgccataaacaccccctcccccgggttag

SEQ ID NO: 7491 - DNA, 183 bp, Zea mays
  Clone ID: MRT4577_106829C.1
ttccctggtcgactccactcttcctgcttctgcttgctctggggggaaggagtgagttagagctagagagagatctagtataggatgtatctatttagtcctcgaacgaacatgttcgctgtcttcatctttcacctaccagtatatcactaattattttcttaaaccctatatctttttcat

SEQ ID NO: 7492 - DNA, 600 bp, Zea mays
  Clone ID: MRT4577_10682C.1
tccctctcgtagtggcatcgctaccatcacttcccttttatccgcaggatcataatattaggagaacctatccgtcagcataaccaaagagctgcctccaagacacgcccacttcctcgatagctgttcctatctagctagtatgacttgcaaagaagcaacagctgtaccccatggcactcgagcccctccgccatgccagtgctgtcggtgatcgtgctgctgatgctggtggttcacgcgcacagcggggggcgcgcgcgcgagttgcacctggagacggagaccacctacgtcgcttaggcgtgcgccgtgtttttctttgcgaaccgccgcctcgtggagcagactgctgcatccgggactgatacagcatccacgctcagagacctcgctacggccgccactacgtgtacggtgacctgctcaggtaggactgcgcgtagacggcacgagacgtcgccgcctacacataggggctcgagctctatggcgaggctaaagatgtgtgggtgtttgacgtctatgatcgcgagcctcattaaggtcccctactactacgacactgaagtatggggtgaaccatacaacgtcgcctac

SEQ ID NO: 7493 - DNA, 621 bp, Zea mays
  Clone ID: MRT4577_106830C.1
taggaaaccagtcgagcagacatatgcatatcagcatatccatgaatggagtctggagcaaatatgaatagtattttgttccggattagagcgcaggcgcaaccgcgcaacgacgaacgaaatgtacaggtcgcacaagcatagtacggggtgcaggagcaggactcgctcgatcactggcactgctcaggaggaagacatggaagcaggagaagctaggcggagaagaggccgtcggcggcggccagcgcgagcccggtcttgggctccagctgcaccgcgacggtgaatctgaccccggacgcggcggcggaggcggactccacccacgagctccacaccttggccacggccccgaagttcctcgtctcgccgccggtcccgctgccgctgccgctgtccccgccgggggcgcctcgccttgccgtcttctcgaactgctccgccaccagcaacgcgatgtccgccatcctctctctcgtatctgctgggctcgctgacgacgatctcactctgctcttgtcggttgttgctctgctctagtgctctggtgactgtggaatggatgctgtctgtgaaactgcgatggccgatcccgggccggccggcctcggggtccca

SEQ ID NO: 7494 - DNA, 771 bp, Zea mays
  unsure (1)..(771): unsure at all n locations
  Clone ID: MRT4577_106831C.1
aagaagcccattgctgcgcgctttcatccttccgctccaaacaggatgatagtatccaacgaagatatcaacatccttgtgcgtgccaaggcgcacatgctcgtcgcgctgaagctcgaccgctgctccggcttctccactccctccatcgcactcgtcgcccgttcctgcaggaaactggaaacacttttcctggaagaaagcacaattgatgagaaagaaaatgatgagtggatccgtgagcttgctacgagcaattctgttcttgagacactgaatttctttcagacagatctcagggcatccccagagtatcttacccttcttgtgcgcaactgtcaaaggctgaaaaccctgaagattagtgagtgtttcatgcctgatctggttagtttgttccgaactgcacaaacactacaagaattcgctggtggttcctttgaagatcagggtcaacctgtggcagaggatcactgccagatagttcagcgctgccccaatctggaaaccttagaggtgagggatgtcataggggatcgtgggctacaagttgttgcagagacctgcaagaaattgcagaggctcagagtagagagaggagatgatgatcaaggaggtcttgaggatgaacaaggtaggatttcacaggttggggtgatggctatagcccaaggctggcctgagttgacatactgggcgatatatgtatcggacattacaaatgcagctctagaggcngttggtacatgcagcagaaatcttaatgatttc

SEQ ID NO: 7495 - DNA, 2117 bp, Zea mays
  Clone ID: MRT4577_106834C.1
tcgttgtcctcgtcccaagttccaccccggcggccgcacatcgccaaaccctaactaggtttttgccaagcctccccttccctaccctcaccccccatggatccgttttccaagaagcgcaagcccgacgacaacggcgccgtcactgcttctcccgccggtggggctgccacgctgggcctcacccgcgacgacgtcatccgccttctcgagccgctctcccgggaccagcttgcggacatcgcggccgccgctgcactcgtctcggcgcacgcgctcgatgccgtgcgcgcagccgccgaccgcgacccggccctgcgcaagctcttcattcgggggctcgggtgggagaccacatccgactcgctccgcgccatcttctccgcctacggtgacctggaggaggccgtcgtcatcactgacaaatccacggggcggtccaagggctacggcttcgtcaccttccgccacgccgattccgccgtcctcgcactcaaggagccatccaagaagatcgacggtcgcatgactgtcacgcagctcgccgccgccggctcggcaggcgggccatccgttggggctcccggcagtggcggtgctcctgtggctgatgtgtcgctccggaagatcttcgttgggaacgtccctgcagacatgtcgtcggagcgtctccttgcgcactttgcctcctacggcgagattgaggaggggccgctgggatttgacaagcagacgggcaagttccggggctttgcacttttcgtatataagacacctgagggtgcgcaggcctccctggtggactcggtgaaggtaattgatagccaccagcttgtatgcaagcttgccatagatgggaagaaggggaagcaggggcaatcacagcaatctggacctggcaaccagcagcagcaacagcaacagcagatgctgccgggtggtccgcaggaaattcagggaggcctggggcttggttcacaaatgggagcacagtatggtggccctgggagtggtatgccttcgtttggttttggtggcgttggcggtgggtttgggggtccaaacccttatgctaacatgccatcttccatgggtggaggaggcgcaggtgggttagggtcggtgggaggccaggtgcccactgggttggctggtgctggtggatttgggcctgggggattgggtggtggctcatttgggggatcatctcagtttggtgctgctgggatgggggcatatggtggccttggaatgggtggaggctccatgtaccgcatgcaacagggagcaggtgggctgcctgcaggcgcatttggtgaaggaggaaactaccctcttccaggttctggtttccgaggccacgaccctcaaggtggaatgtctcctcctgggccaggtggcagggctcctcctatgtatcccaacgtgccaccttatttctaagtgaatgtgtgactcaggtgtgtgacaactcttgggagcatatcctttgaaatggttgtgctgaattcagaagtgttgtctgcttacatggatgccttgcatattctggctacttctgatctggaatggaatgtggaatgagtttgcactcgcagtttcccttattaagggatacatgaagctaggtagttgtgataatgcttagccgtgataatgcttcacatgtactttcttatgagtcatgactgctttgcagtttcattttctatatagataagtgaagttgcattaagtgtgtgttgtgttgattattgtcgtattatcctatgaaacccctttattttcatggtatgatgatgtgtttaatcttatggatttctatttgtcttgtctatatttttggtggaccaagggcaatctatatgtatgattggtgattgtaatgcaccttctctttttttctataaggtccaatttatagttatatcccctgcgacacaaatatctcattatagttaatatggttattgttagattggaaccatgagccacactttggtggtaactggagattacaggtcatatcgaaacctgaagtcaactttttgttgctattttttatttgtagataggtctgatctgatctgctccatgattacaagtttagaaaaatt

SEQ ID NO: 7496 - DNA, 978 bp, Zea mays
  Clone ID: MRT4577_106835C.1
ccggccgggctcctcgtcctggtcctcgccttccccattcgcccggccgattaccagcgccccaaacccccagccgaatccgcgtcgcctcgcctcccgatgtcgccggctgctggtggccccgcgcccacgcccgctcaatcggcgcccgccgtcccgcaggcgatcgcgccgccgccggggcccggccgtgcggcgcccgcggcgccccgccgggatccgccgggcgaccccgagggggccgatcccgccaatgcggcggcgaggaagacgccgtggagcatgctggtgcagccccccgccgccgccgcggcggcggcggcggaggccccagagagcggcggcatcatcggtggggatgcttcgtggccggcgctcgcggggtcgacgcgcgcgggccccaagtcgggctcgtccgactccctcaaggcactctccgatgcgtccggcccgtcgcctcaggaggttccaattgccgctccatcggtacccccatatccagttgtgggggctaatccgattcccaccgcccaaaaccctacctccatacctcctcccatggccgcggcttcctctcagcagaacggtggcacaacccagacgattccagttcggcgcggtggcagcagcggtggaaacggtggaggtggcagtcgtgggtatggtagcattggtggtcgcagggctgccaatagtaatggaggtgatgggagcagcggcagcggtggtgatgataactggaataatggaagccttggtactggcagtggttgcaacagcaccaatggcgatggttctatcaacttggatgataatgcccctggcgctggtcatgctggtgggaatggcaatggcagcagcagagatgctcctgggaatagacactggaaccacaacatacgtggtggtatcagcagtaacggtgctggtagtggtgatgggaacaatagaaatagtagtggtagcagcaaccactgg

SEQ ID NO: 7497 - DNA, 267 bp, Zea mays
  Clone ID: MRT4577_106836C.1
gcgagcgacaccaactggcaacatcgaaagcacaattggggccccactttggtcgataatatattccgccttcatacgctccgcggtctctacgcgagtgctgctaccgacaccattttctcacagcgcacacaagcttatatagctcctctttttcccacgcacctcataacaacggggtctacggtgtgagaaaacccaattctacaaccctacacgatccaacacgcaatcggagcgggcattacacctatatcacccgtggtc

SEQ ID NO: 7498 - DNA, 361 bp, Zea mays
  Clone ID: MRT4577_106837C.1
caccgggaattaataacaaacccaaagaaataagaaaaaacccaaatgggaaaggaccccaacttatggaaaggggttaagggaaaaaaaaggcccgaagactttggcaggcacccccaccgattttgaaaacaaaagggatttccgccccagccgggccagggggggcccaaaaataagggtaggccgccaaattcggggggaaaaagggtgggggaaaacgggcagttttcccttaaggggggattaaaacaggggccagccatccgttatccatataaccacgtaaaagggggacagcaggctaaaaaaaccccccaggggcgccaaagggggttcaccgaatacgggcgcaaaaacc

SEQ ID NO: 7499 - DNA, 146 bp, Zea mays
  Clone ID: MRT4577_106838C.1
gataaagcaaaggaaagaatatgcaaaatccagagcgacagtgccaccatgttctgcattgcaatagaggcaatggtctgcatgttatacctgagttcctgaatgaggacttctctgatggggctgcaggttcagagtcaccatat

SEQ ID NO: 7500 - DNA, 561 bp, Zea mays
  Clone ID: MRT4577_106839C.1
gaaactaacaaaggcgcagcacaacaagccaagacaaacgacagggaatgcacatcatccgtcggtctctcctagtacacgcccaatcaaagaaaaggtaataagcccgcatcatgattctgagggaatattgccattgcaccctactaccactagtgcctgcctactaatgtccatcgccagtcgtcaccatgagcagcgcagcgaagggaaaagaaaaatctatcgggggtagatctggtccgcacggccggcagcgggggggcgggggccgcgccctggtctaatcatcgccttcccgaattaggttccgcgtccacgcgatggcgcgcctactgtttcccaatctggcccacagtccggtacggttccgttggtcgtgctctctagtccctccggcctccggcctccagggcgggcaaacgtgcgtgggatggtgcaatcacgcccggcccgggtacgagtacgacgcccaccactcgcggttggtgaaatgtggcgcacgcgggtacagaccgaccacccccacccccactacgctggccggctgtgcgcgtgcag

SEQ ID NO: 7501 - DNA, 351 bp, Zea mays
  Clone ID: MRT4577_10683C.1
cccacgcgtccgaacaaagttagtcctggtttccacaaaatctactcagactaaagctcagacacatgctcctactcccggcggcgcaacgcgctttgccgcacttgaccgaccttggcgccatggctaaactcgcgctggcgctggcgctcctcctcctgctgaccgtggcggcgtctcggtcggccagcatcaggagccacctggatctggacctgggctttctctcctctggggaccgccggagggagtgccgaaggaccggggccgagtgccttgcctaggagcccgatgaagagggccttgaactggacgggatccaacgccgtgcgctctacgggggcgggtaca

SEQ ID NO: 7502 - DNA, 452 bp, Zea mays
  Clone ID: MRT4577_106840C.1
ttacacctgcaacaagtcagtttgggagggacattctataatgctagacccaatttgacaacggtcaccagctcaacgcaatgacactgacagttttgctagaacagcccccataaaccctagcagaataatactgacaaaaaacccggcaccaaaacaaaacgacctttttaccccgctgttatagataaaatacgtaacgtagttacacagcacagatgcatccatcttatcttggcacacaaatctattatttatactttggagaggaacaccacctagatcaaggagagaagcagcacggccatcccttcatccagcctgccgtcggagccggagcatcccgtccatccaggcgacgattctggcgccgacctttttgtgcttgggctcgaagagcatgtcgtgcaggaatccgtcgtacaggcgcaagtccttgtgcgcggaccccg

SEQ ID NO: 7503 - DNA, 203 bp, Zea mays
  Clone ID: MRT4577_106841C.1
acgctcgtctcacgctcccttcctcacacaagatatgaggaaaggtaccgcccttttactacgacatccacaaggtgcgaggggaatacacgtgcatatacgcggcggctatcatggccttggttccggtttcggtgactactaccggcgacgtcatactatgcctatgcatcgtgctctgctgtgccgctgatgacgacccg

SEQ ID NO: 7504 - DNA, 410 bp, Zea mays
  Clone ID: MRT4577_106842C.1
gggaaaaacaacgggtggatttgctttaacacccaaaaggggggcccgttggttaaacccagggctttaacccattaacaagggctaaggccctaacctgcccaaggaaacccaacgcctgtttttttgacctttaccaaaaattggttgccatgccacacggtttacaaataaaaaaaaacccgttcccctaacaaaaaacactggtttaaaaccctgaccccctttgttttcaccaaaaaaaagggcaggggctgtttccccaaaaaagcagaacatttccccttacccataggggtgtccccccccacaggtggtgcccccccttcccttttggggccacccttaggccaaaaattgggggaaggggcatttccttttaaaagtttttttaaccctttttttttaaa

SEQ ID NO: 7505 - DNA, 325 bp, Zea mays
  Clone ID: MRT4577_106843C.1
agaccgaggggggttttttcttaatcaaacgggcacttagacccctacaagggccaccacaacttgggggctcttggtttgattacaagggtcttgagaataaaaatggggaagaataaagcgcgattggaaaagccaagcaacaagggcgacaaataacacacaaatcacttttttttttttttttttaagccactaatcactaatgatcacttggctcaattggggaacttggagagattagaggctttgattgggtcttggaatggattgctagatcttgtattgaatgttgaagggtggaatgcttgggtgttgtaagggg

SEQ ID NO: 7506 - DNA, 297 bp, Zea mays
  Clone ID: MRT4577_106844C.1
ataaaataaaaaaatatataaaaataaaaaaaaaaaagaaaaaaatatataaaagagaaagggtagataaacatatagggttgatgagttgaatattagatagttataatgagtgagatctgagatttgaaggcatattcgattacacttttttgaaggctatcaacactgggaatagggctggccgttctataggatatatgcttacgttcgcttgcatgttacgttatatctcttttatagtgttacgtaaattccattcactgttgcgctttttacaacttcctgactgggaaa

SEQ ID NO: 7507 - DNA, 556 bp, Zea mays
  Clone ID: MRT4577_106845C.1
ctctaaacggccgggggggggggggggggtttttttttttttttttttttgtgggtttttttttttttttttttttgggcaaaggggaaaatgtgaggaacatacattggaaacccaagggggggtgtactaaaaccactccgaaggggaattggggatcacaacacgggggggggggggggatgattttcatattggcccaccaaaaggaaaaaaagagcggtttagatcattgggggaaatataatattccgataccggaccaatggatccttgaactgaaaccggtggttgtacaccctccacgcataggcctccagtgggaaagagtgaaatctccatccattctggttggggggtccagaaccgttgggtttgggattggggtcttttccgggcgtatcggggaggggggaccagggggggaactatttttgccaaaggggagaggttttagggccgtgagggataaagggggggggtttccattgtggggcccccttgggggggtccgaattggggtggaaaccaattcctttaacttttttaaactttg

SEQ ID NO: 7508 - DNA, 422 bp, Zea mays
  Clone ID: MRT4577_106846C.1
tcgacgactaagttttcggtgtaacataatttagtccccttttttcatccgtgacatcacgtctacggattttaattgaattgttctctagtcgagtgttcgactagcgaacggaattcgtctaaattcaactaaatcaaacgtcgactaaaatatcgaatccgatatcgtctagtttaatccgtctacatctcgctcccgtgacgatgctgacatcgtctccggggggattccgattgcgatgccgcatccggttagcacagtttaaaatttacttatttctaaaagtgtcgggcctagtgccaatttaaaaataaacgattaaggacagactgaaattgtcacctaaatattttgcttggtttgagcactctctataaattcggtaaatacactacttggggtaagctattagataaacg

SEQ ID NO: 7509 - DNA, 516 bp, Zea mays
  Clone ID: MRT4577_106847C.1
tcgagcggccgcccgggcaggtttttttttttttttttttttttaaaattttttttttttttaatataatttcctttcaattcaaagggttaattaaggtaatggttaaaactgcaaccaaggggaagggggaacattacttaactaatcgcccttaaagaagaaaacaaccaacctaggaagttagccaggggttccttaacataataacagaacctgggccgaaacaaccctaagggcaaattttgaaaatatcaataaaactggcggccgttgaagcatgctttaaaagggccaaattggccttaaaggaagtggaataaaaatcaattggccgtggtttaacaacgtgggaactggaaaaaccttggggttaccaaactaaatcgcttggcagaaaatccccttttcgcaagtgggggaaataccaaaaaggcccgaaccaatcgcctttccaaacatttgccaagcctgaatgggaaaggaaccccccctgaaccggccaataaaccccgg

SEQ ID NO: 7510 - DNA, 666 bp, Zea mays
  Clone ID: MRT4577_106848C.1
ccgtccgtcagtcgcgccgtgcctccctcctgccttcttgtctggctgagtggtggagcgccgcggacaccccttctccttccccacagcacagccggccccctagccttctctctaactatggctgccccattgactgccattaacgccagcgcttttcctctccccgcatatgcccacctgcaaatggaacgccacgagcccgacgcctccctctgccctgcactaccagcggtcgcgcagcagcctcctcaccttctccctccactcgcgcgttagttcctctccccactagccgaccgtcttttcttttccaaactccccgaccattaattgttgtcgactgcgattgctcttctcggcatcgcttgacctccctctcggcatataaaatctagctcagcgttgtttgccactacccgcgctgtgcgttgacgaccaccatcaccggagtgctgcatcaccatcgtcgatccactgatgcgcgtcgtcgaggcctcaccgtcccttctgcttgctggagacctgcccccgtgttcgactcccgccgaccgttgagaccttgttgcgcccacgtcgcgacgctgcccgtgtttattcagcttgccgtcgtcgagacctcgccggtgccttgctaccctgtgctggagtcgctgcgtccccatt

SEQ ID NO: 7511 - DNA, 239 bp, Zea mays
  Clone ID: MRT4577_106849C.1
ctggactggctaggactggtatgattagatggcctatcaataaagcaacaccgcttactgctgacaatcctctattgacaaatgccaatttatgtcgcgcaaccaatagcgatataagcgaaaaataagccctgaaaccggaccaggctaaatgtgaattctgccgaacgatagggacgaaacagaaatttaagaagtaatatacgcctcagttcgttagcctgtgccaaagatcacag

SEQ ID NO: 7512 - DNA, 770 bp, Zea mays
  unsure (1)..(770): unsure at all n locations
  Clone ID: MRT4577_10684C.1
cggccgggnaaaaaaaaaaaaaaaaaaaatttctatagttgtggtattcatgttctttcatgatgatacattttcataatagacacttggcctatactatagatatgtaaagaaacccattggctgtaacaagggaatgatcaatgtttaataattgatttttccgacggccttgtggcaaacttatgattaaaagtgtaagcattggattttaatacatgctgtcctgattagccttatttagattagcacgcttgtctgttggatcatgatccattcgtagatatacctggggtttgttagtttttttttataaatctacgtgagccggtggtggtaggatttaaatattaaatatgacatacagttgggtcatgatataacggatcaggagtctcacttgcacgcttgcacatacggttagattagtgaggatagttctgattttacaatagacttgggtcaaagtgttccacaaccaaaatatattagctaaaccagttgtggatggagacagacaactggaagcctcatgtaatttctatattgtacccagttctttcctgtgttttagactgcaaaatagcacattcaacatactattagataaattatgatgttttgatcacctagtttgagcatggtcatacatcaggctntttatgattgtggcttgtgggctgtctatatgcaaggaatattgcatctactgcttaccatagttggtgaaatggggttgatgtatcatgccaacatgatcaaaatgacta

SEQ ID NO: 7513 - DNA, 684 bp, Zea mays
  unsure (1)..(684): unsure at all n locations
  Clone ID: MRT4577_106850C.1
cattgggacctcgagccggcgggattcacttcgacgcactgtagatcgagccctcgccctctcctccacacaagtctcatatctccgtcacctgcgccgccgcttcgttctcgagaacggcagaagatagtctgccgccgaccgaagtcgagctcctgaaggatgagcaacaccctcctcgacagctccgccggtgctgatgactgcttcctgacaagacatgacagctagctgaacaacgctgttctcagtgactacaagaccttggctatgtgtgacgagttgcatactgacatcagtgctgccatatagtagaggaggaggcatccataacgctatctctattccccagaggatgcactaaactccaggtgcaattcgtgacatgatatgtgtcggaaacgacaatcctgatgtggctatgatgaaaaatgttcatgctgcgatagttactgctcatgactacgatgatgaaaacgctcctactgatacatgggctgtatgcgatggtgatgaaccaagggctttgagtgcaaatctgatagcgctgacctgatactgctcagacattnaaaagagacgcgacaactgtgctccaggtgaagacgcctaatacatctacattgctggatattgccttacagtgacgcctgcatctatccagctaggcgctgagcttgctgc

SEQ ID NO: 7514 - DNA, 616 bp, Zea mays
  Clone ID: MRT4577_106851C.1
tattctacataatattgcgtcgtctactgtccttctattgcgtactcatacactgtgtcctccttatctgctagcctactcctcctctcctcctgtgcgaaatgagatcactcacactcccatctcgcgcgaattgctcaccgcgaatctaggaaataatacaaccaccgagcacctgatctacacgatggatatgattaacaagccggcgactccagacggttgagaaggacgccgcctgaaatgagctacatatgcttgtaatcatgcgtgcgtcgcttgacaagctccaggctgaccgcgagatgcaatagcaccattgatattgctctgagtaaattggagaccacacatactacgattgcaccgcgtattgatgcccctgcagaccgagactttatcaaagaacatgtagtcactgatgacctcgcacgctgactgcgttgtgcttatcatagactccaccactggagtatttgaagctatgatatccaatgatggccagacactggagcatgatgtccttgcgttaacgcttgcacctgaagtagatgatatgctgctgcagcaagatggatgcaaccactaccacatacttgaagatacctcatgagga

SEQ ID NO: 7515 - DNA, 174 bp, Zea mays
  Clone ID: MRT4577_106852C.1
ggaaaatgaatttacctaatttttgaactacaccataatcgtaacggtcaaaacaaattacatgatgactccatgggaaaaactgtatcgttttgaagggcaataggattaaccatgcccagtaagttgtggcctaggcaaaaaaaattggctcaacgtgctttagatgacaac

SEQ ID NO: 7516 - DNA, 374 bp, Zea mays
  Clone ID: MRT4577_106853C.1
gacctacgcgtgcgggaacagcacgatatgctagtgtaaacacccatcttgtagtacgtgagtatcggtgatttaacggtggtgcttagaggtttaaataatgctcaattatacagaacattttgatttaggtttttatggttacacaatctattacataaacagggccttttagtcccaattaatttggggtaggctatagatgtgaccctacggaaaggaaaactcttataaaatataaaaaggcattatacactcccccatcacataatataaggcgtatgtttcattgtgtcgagcctttttccaacaattattttatatatttttttgcgaaaactcatgatagctgcgcgttatttaaaaaataaaaa

SEQ ID NO: 7517 - DNA, 548 bp, Zea mays
  Clone ID: MRT4577_106854C.1
acaatgccggacgagcctatcgctgttctcagtcagtactcggtagagacagatcggcaagtccttgcaagcgcttcgctgaacctcctctagtcctcttcctcccagaactgccgcattaggtttcgatccactggtcgcgatggtcgttgatccagttctcaagggatttgacctcaacatcgcggcagtagatgagtcaagccctttggaaggaatcggccttggcctgtatgcgactgagttcatccacaagtacctcagattcaatcccacggaccaggagctgatggagtggctcgaggccaaggtgagggatggaggcgcgagatctgaccctctgattgataaattcatacccaccatagaggtcgagtacggctacccccatcctcagcaacttccaggtgtgacgatggacggcacgatcaagcattttttctgccgtccgagggcgttcgagagtggacggaggaaacatcggaagataaaggcggagcgcaacgatcgtaccgcatggcacaagaccggcaaaagcatggcattga

SEQ ID NO: 7518 - DNA, 468 bp, Zea mays
  Clone ID: MRT4577_106855C.1
gggctgtccccactggcgcctcttatgtggctttgtgtaattcgagcgcaactctgatccctacaccgatcatcagttggggcgtgggctggctatgcaatggtctgtggctcggacaatttttcccggacagccatacggtacatccggtataggacaaaaattggactggttgcggggacacggctcgccagacggggagtggtgcatatatctgcaggcttcatgattgtcttctatgtccttggtaacttgctttagctgattttttttattgttaacatatactgcaatgcaggtgccttttgtgctatgttcatgcatattttcaccgatgccggggcaggctgatgatgtgttgtgccttgtccaaaccaggaaaaccgaagctttgtttgcgtacgatccgctacccgtatttgcctgcatgtactgaatcttcttcgcatatgtaggtggagttggact

SEQ ID NO: 7519 - DNA, 370 bp, Zea mays
  Clone ID: MRT4577_106857C.1
cgggaagaaacagaacgagaccgaaagacccatgatgacaagttctatgagtgggagaagagtaagcttgaattggagcgagatcgacatgacaaagagataatgcaaacagacacaagcacaatggatgaagaatcgaaacaatacttcaagttgatgaaacaagagattttggctcgccgtttcgggagtagtcagccatagttgttagctgttggaaacttagatagtattttgtttttgccagacatctgttattgataatcttgtgaacttttacatatggcacctgtcaactacttcctcctttctaaaatattattcgttttagggtgttaatagattcatacaatatttgatgtatgtattt

SEQ ID NO: 7520 - DNA, 250 bp, Zea mays
  Clone ID: MRT4577_106858C.1
ggttcaacaaaatcccacaccgaccagatcatgccggaagagcacctaactctggcgacctacaagccagacgagtaccgcaagcacggaacgttcgacttcgcggggctccaatccgcggcctacccgacgccggccggcgctccggatgaggagtactcccgccacgccataattgacagcggagccaacttctggagcggatactatcgcgagcacgcacccgtcgcgcttggggccggtggcgcac

SEQ ID NO: 7521 - DNA, 544 bp, Zea mays
  Clone ID: MRT4577_106859C.1
ttctgacttcttccgcatggtcacaatgaagggctgaatcacatgattaagaacgatcggctggctacgcaccagagcctctctgcactggagggtgtctagctcgtaacctaactccacccgttaatcaccacgtcttacatgacgtacctgtacaacatctacaccattgcacaggctgtgcgagcgcatatacacatccctgaacgatctccttgaccctgatcttcaggtgctaaccaaccacgagattaagactcttgtaccgcggagcacatcgaaggagactggcttttcctgattctgatcacgggtcctattgctagttacttcacactggacgcgatgcctgctcatctaagagcatgatgccccagaaggtacggatgtctgatccattacataccgctcccatgtatgacagaacggtcaatcactgcaaatacacataaccacatatatttgaaaacaaagataactctacacctacctgacttgcttgcatacatatggatctttatgacaactcaggcactgttgacga

SEQ ID NO: 7522 - DNA, 284 bp, Zea mays
  Clone ID: MRT4577_10685C.1
aagaaaattaagcagggtctttgctatacaaaagtgttttccactaattttgcatgcgtatttataagaaaaatgtgaatttggtggttttattctatcggtataaaggcatcgatattttagatgcacccgtgtttgtaaaaatgtagagcacaatggaatatgctggaagtctcaaataatatttttttcctattttatactcatggaagagataagctaaagaggggacaataatgagaaatgttggtgtgcttttctaagcatttaaaacataattgcca

SEQ ID NO: 7523 - DNA, 556 bp, Zea mays
  unsure (1)..(556): unsure at all n locations
  Clone ID: MRT4577_106860C.1
gccggccgggtccaanacacaggtttgccagcatatccattccctgttcctctctactgactcatacaccaccgacaacaccatgacgacgaagaggtgttcttgtcctcgcttcatgtatgtgataacgatgctcctggctgtcatcgtgtcttgctatatcattgtcgactgctccgccgaggtccaagaagctcagccagacggagggcatgagggctgggcgccgccaccaccgcgagggggcactgtgcaacacatgtgccccgaccctgagcctgagtgcagacaccccggtgctcccccgccgccgccgccaacgccgcaccgccgcaagatcgcgcgcccggagctggcaggatagtggataggaacgccgccaatgatatattagcgatgtgatgaactgatgaccccctttatcacctttgtgctatgagactatgatgtactcgtacgatggatgctgcttttaatttgtatttgcctgagacagcttcgttttcaattattgtcagcttaattgccgcaaaaaaaaaaaaaaaaaaggccccta

SEQ ID NO: 7524 - DNA, 711 bp, Zea mays
  Clone ID: MRT4577_106861C.1
atggagagagagtccgccgcggtgtatggcgacccgaggcttctcaatccttcggctcgaccacccgaagattcccagcagttcgccgaggcacaatattcaggttcgtatgaattgcaatggcggcggcgcacgcttctctgtcgccctgctcacggcgcgctcggtgagtcgcacaaggatggacaggagaagcgcaagccccaggtattttatagtccgcacaaggggatcatgccccggaaggagctgcggatagaagggagtccgtcacagcgatctgttgcgcgcggatttggtggaatgcggagtagcgattcggccaacgcagcagagggaagtccaaacgcggcggcacggctagcaacatcccaagcgagccaggcgcagcggatcacgcgcgcaaccgttccccggaggtcccggcgcaagctccgttctgttggcctcggcggcgcgagggatggacggagtccgagccagggagatccggcggtgtcgttcggccggcacaatcctaacagaacgaagaagatttcatccgacgaggtggccccacgcggtagtctcaaggaaacaccgcgctgcgctattgagaggctggagcgcggccccagcggtcagcccaagcgccacaagcgcgcacgccactgtggtcaggaatgggccgagtcccgagatgggctggactcagcccaggggcagagctga

SEQ ID NO: 7525 - DNA, 107 bp, Zea mays
  Clone ID: MRT4577_106862C.1
gtcgtcgaccagctataccgctaagaggcgaatcctccgcctctcatccacgacgacgctgcatgggtgatgtccttggactcgaccgccttcaaggtgctcgacca

SEQ ID NO: 7526 - DNA, 180 bp, Zea mays
  Clone ID: MRT4577_106863C.1
ggcagctgagtcataatgttgccaagttcatttttgcactcccaactgtagattactgcagttcatctgtaaatttcaatcttgttcaagaagaatgatcatatattggcatgttttttcttagcagttgtataaaaaaaaaaaaaaaaaaaaaaaaaaaaaaaaaaaaaaaaataaaaa

SEQ ID NO: 7527 - DNA, 365 bp, Zea mays
  unsure (1)..(365): unsure at all n locations
  Clone ID: MRT4577_106864C.1
caaggagtcatctggctgctgcgccttcatttagctctcaggccgtcgcacgttcagcgtcacctgcacccacgtgaccagtgacacgccacatcagcatcgcgagcgatcgtacatgtctactctcgcacgtcgaccaccacacgacacctgatatacagagctcggacgcatagacatgcatgtcgatctacaggtcacagaaggatgctgctgatatgtataaaccgaacttcaagtacgcatgggtgctatacacgctcaatgctgaactagagagaagtactaccattgatactgctatgaggaagtttgaaaccaccagattctactgcacggacattgatgtcantggacacagtgac

SEQ ID NO: 7528 - DNA, 1919 bp, Zea mays
  unsure (1)..(1919): unsure at all n locations
  Clone ID: MRT4577_106865C.1
cattgggtacctcgaggccggccgggaaccagatcgccccccgccgcataaatcccccgctgacacccgatcgagcaaaccctcgcttacctcccgtcacgtcgcgtccgaacggcgacgctgcgccgtgatggacgccttcttcggcaagggcggcggcggcggcggcttccgcggcgccaagtggtggagcacatcatccgggaggagaacatgatggccgcgcaggagatcctcgagctcttctgcgagctcatcgctgtgcgcctgcccatcatcgagacccaaagggagtgtcctattgatctcaaagaagcaatatcaagtatctgtttcgctgctccaagatgtgcagatctacctgaactgatacaagttcaaatgatgtttgcaactaaatatgggaaggaatttgtcgctgcagcttcagagttgatgcctgattgcggggtcaatcgtcagataattgaactactttctattcgtcctcctcctgtccatgcaaagttgaaactgctgaaggagatagctgaggaacatgaagttgactgggatccatcagagacagagatagaatttctcaaacctcatgaagatctattgaatggcccgacctacttcaacggctccacactacctcttcccaaggagaaacacgaggaaacagtagcggcaagtgctgccgagcggcctgacaaagactgcgagtcagataccggtcttgactcactggattttcctgaagtcccaaaagcagcaatacgtccaccttctaacacaccattgaccccagatattggtccccatgctccgggctctcagccgcttcctcgtgagttctcagaccgtactaacttggaggagaatccaacagctggcggcgcttttaatgttattcagatgaaaagcctggaacatcttatctctgcaccatctgctcagccaaacacaccagatttgccagatgaaaagaagcaatttattccttttgcatctccaccgccagttgttgctactccattggaaaaaactgagacagttccctcaccttcaatgtctcctccagtgaagccaacagagccaaaaatctccacaaagcgggttgatgaattggccacacctccagtacctcccactgattatacgttcacaaaacaaccagaacaagtacggccaatctcttccgagagtgaggcaagtatcgacttggacgatgtactatctgctgctcagacagctgctgaatcagcggagcgagctgcgtccgcagcccgcgccgctgcgaaccttgtgcagctacgcattgcagacctaaagaagaattcaagggtctataacaagtacaccgacagtgctcaaaaggaaagccctcatcaggccgagggtacacagaaaccagtatttgatcaccaggactccttcaccaacgagacacaggactatgtgccgtctcatgtgccgcagaggtcgccgtctctggaggacgatccgtatttctcctaccccaacttgttctcggcgccaaaaccttgaaggcggaaactagtggcctgtaactgctagtagtagtcctattatgtcttggtcttcgctgttgcctcggaatttctgtgtgttgctgagtttggtacataacggtacaaaaggagactactgggttattacttggctacgaaacctgtctagtttgagtctctgtaaactgtacatgtacggtgtctgtatcagttttctgaaacatttctgcagttctacacgtaagtaatgccagatcatctagtttggttgggctgggcccaaaacaacatcttgtaatttggaatggacttggaataaaggaagtacctggagatcaacacaaaaaaaaaaggacagnnnnnnnnnnnnnnnnnnnnnnnnnnnnnnnnnnnnnnnnnnnn

SEQ ID NO: 7529 - DNA, 740 bp, Zea mays
  Clone ID: MRT4577_106866C.1
gcgttctgcgtccgcagcccgcgccgctgtgaaccttgtgcagctacgcattgcagacctaaagaagaattcaagggtctataacaagtacaccgacagtgctcaaaaggaaagccctcatcaggccgagggtacacagaaaccagtatttgatcaccaggactccttcaccaacgagacacaggactatgtgccgtctcatgtgccgcagaggtcgccgtctctggaggacgatccgtatttctcctaccccaacttgttctcggcgccaaaaccttgaagggctggttcggttctaccccaatccatatggattgagggggattgagggggtttcaatccccagtaagtcaaaatccccttcaatccgtatcaatcccctccaatccatatggattggaaataaccgaacaagcccgaagcggaaactagtggcctgtaactgctagtagtagtcctcttatgtcttggtcttcgctgttgcctcggaatttctgtgtgttgctgagtttggtacataacggtacaaaaggagactactgggttattacttggctacgaaacctgtctagtttgagtctctgtaaactgtacatgtacggtgtctgtatcagttttctgaaacatttctgcagttctacacgtaagtaatgccagatcatctagtttggttgggctgggcccaaaacaacatcttgtaatttggaatggacttggaatcaaggaagtacctggagatc

SEQ ID NO: 7530 - DNA, 556 bp, Zea mays
  unsure (1)..(556): unsure at all n locations
  Clone ID: MRT4577_106867C.1
agcagcagcccnnccccggggagcagcaccacaggggcagaacgancaancaaccagcaagcaaagcgcgcacggcacaggngggcagcnagcaagggcgacgccgccgaacccnccnccnccgagcacccccagagcngcggcggcgcccnnanggccagcagagnncaccagaggcaccgnccgggccnngnacgnccgccggaccggcccaagcagcagggaganganncagccggggagaccnnacgangagcngggcagaagacncaccagngacnacccggngnacganggccgnggcnccgacaccgcccnngncgcncgcacgcaggggancaccgnccncgncggnaacgcgcaccagcngnncaccancgngnncgagaccgggaggggcaagggcnccacgccccncancaacggganggngacggaagggnccgacgagggggcggncnacggcgggaccggagcgnnngcganggccaccggcgncancagaaggaagaaccnnnnngccggnggcggngacagnggcgggaaccccgacgag

SEQ ID NO: 7531 - DNA, 2306 bp, Zea mays
  Clone ID: MRT4577_106868C.1
accgatcgctcaccactccccccttcgtctccaccagatcgccccccgccgcataaatcccccgctgacacccgatcgagcaaaccctcgcttacctcccgtcacgtcgcgtccgaacggcgacgctgcgccgtgatggacgccttcttcggcaagggcggcggcggcggcggcttccgcggcgccaagtgcaagacgctgctgaagctgtcgatcccgcggataaggctgctgcggaaccggcgggagctgcagctgcgccagatgcgccgggacatcgccaagcttctcgaggccggccaggaggccaccgcgcggatcagggtggagcacatcatccgggaggagaacatgatggccgcgcaggagatcctcgagctcttctgcgagctcatcgctgtgcgcctgcccatcatcgagacccaaagggcgtattatcttgaagtataaagcagggatcctgaatcctgctcgtgaatacaaatgggctatagttgataaaattgattaactgttttgtgactaaaaattctgcaagagatgcagataagtctgactgaattgtgtttccttgttttgttggcttcagggagtgtcctattgatctcaaagaagcaatatcaagtatctgtttcgctgctccaagatgtgcagatctacctgaactgatacaagttcaaatgatgtttgcaactaaatatgggaaggaatttgtcgctgcagcttcagagttgatgcctgattgcggggtcaatcgtcagataattgaactactttctattcgtcctcctcctgtccatgcaaagttgaaactgctgaaggagatagctgaggaacatgaagttgactgggatccatcagagacagagatagaatttctcaaacctcatgaagatctattgaatggaccgacctacttcaatggctccacactacctcttcccaaggagaaacatgaggaaacagtagttgcaagtgctgccgagcagcctgatgaagactatgagtcagataccggtcttgactcactggatttgcctgaagtcccaaaagctgcaattcgtccaccttctgacgcaccattgaccccagatatttgcccacatgttcagggctctcagtcacttcctcatgagttctcagatcctggtaacttggaggagaatccaacagctggtggtgcttttaatgttattcagatgaaaagcttggagcatcttgtttatgcaccatctgatcagtcaaacataccggatttgccaaatgaaaagaagcagtttattccttttgcatctccaccgcccgttctttctccttcggtgggaaaagccgagacagttccctcaccttctctgtctcctccagtgaagccgacagagccagaaccagaaatcctcacaaagaaaattgatgaagtgaccacacctccagtacttccctcagattatattttcacaaaacagccagaacaagtgcggacaatctctccttctgagagtggggcaaatattgacttggacgacgttttatctgctgcgcagacagctgctgaatcagctgagcgagctgcatcagcagcccgtgctgctgcaaaccttgcacaactgcgcatttcagacctgaagaagaattccaaggtttatagcaattacggtgatagcgtccaaaaggaaagccatcatcagactgaggcgacacagaaaccggtatttgatcaccaggactccttcaccaatgatacacaggactatgtgtcatcccatgtgccgcagaggtcgtcatctttggaggacgatccatatttctcgtatcccaacttgttctcagcgccaaagccctgaaggcggaaactagtggtctgcaagtagttgttcagaatagtctgaaacatgagatatcactttttcagctctgtccggtcctcttatgtttggtcttttctgatgcctccgaaaattctgtgtatgttgagttggtacatagcggacaaaagggagactatgaaacctctgtctagttttgtctctgtaaattgtacatgtgcggtgtttgtatcagttgtctgaaacatttctgcagtctactggtaataacagaaattgaatctcaacatgtaaaaaatctgtatcagttttctgaaacatttctgcagttctacacgtaagtaatgccagatcatctagtttggttgggctgggcccaaaacaacatcttgtaatttggaatggacttggaataaaggaagtacctggagatcaacaaaaaaaaaaaaaaaaaaaaaggaaaaaaaaaaaaaaaaaaaaatt

SEQ ID NO: 7532 - DNA, 620 bp, Zea mays
  Clone ID: MRT4577_106869C.1
gacccgtgccgaaccgccgcgacgacccacgcgtgaccgtcgaagactaatacttgatggcctaaagagtctgttgaaggggtctccgaacatgaatacgctggttggtttaggtgctttgtcatcctttgcagtcagctcaattgcagccttcattccgaagctggggtggaagacattttttgaggaaccagttatgttgatagcttttgttcttctagggaagaatctggagcagagggcaaaacttaaagctaccagtgatatgactggactgcttagtattcttccatctaaagcacgcctaatggtggataatgatgctgagaaatcatcattgattgaagtcccatgtgatactctagctgttggggactatgttgttgtgctacctggggatcacatcccagcagacggtattgtgaaagctggaaggagtacagttgatgaatcaagtttgacaggtgaacctatgcctgtaacaaagataacaggggcagaagtatcagcaggaagtattaacttgaatggtaaactcactgttgaagttagaagacctggtggtgagactgtcatgtctgacatacttcacttagttgaagaagcccagacaagggcgg

SEQ ID NO: 7533 - DNA, 735 bp, Zea mays
  unsure (1)..(735): unsure at all n locations
  Clone ID: MRT4577_10686C.1
tacttcttaacttgtcaattcggcacgagggttacttcttgcttcctcctcactacctgatactaccgcatcaaattaattccaggtcctcaaaacaagaaactccaccgtaccagagctgtgcttcagataagatccaaagacccttacttggttccctgcattgattttcagtcttgttgagccaaccaaggtgggcggatcatctcctcctgtggctgttgttaactgccgtattcggaaagcaggtcaagatgaccccggagaaagtcagcgtaagcattgccatgagcccccctatacttctgatagactactcacgcgcaaaaccattaaatggggcagcagtggtgcgcgttgaagcaccctcatttatgaagaaccatgcccccattgacctagtcacacttatcaatattaaccaaagcatgagctggccagcagcatcgcaaacagagaatgccatctaggttggatctactgaaaaatgccatgaagttcataataaggcagcttggtgatgatgaccgcgttgccattgtagcattcaacgatcaggtcatcaaagagtataccactggcattttagaaatatnccggcggtggtcggatggctatcgaaaaaaaaggtggatgggctttgtggctaagggtgacactgcttttaaaccaagcttggagcatgctgtgaagctcctggatgacagagcagataagaagcgtgcaggcttcatc

SEQ ID NO: 7534 - DNA, 516 bp, Zea mays
  Clone ID: MRT4577_106870C.1
acagaaaaaactaaccggtgccattttcctaccatcaacagagacagaccctgggctccatgacccattgcccatgcacaactggaggcccgctttacaagcaggatagcgagcttctgaatgaaagggtcgatgaccactacaactacgacggaaacgtacactcaaaccaagagctcactatgggggatcatgccttaaaaaggggaagatcttcagcgaccatgcctctggagatatacgccacttgatattttcagctaccactacccttgtaacttgattgatagcatccattgtctacatgaaggcaaagcacttgactgactatcaaatctagtgaatcaacattcttccgcagaatcttcaggtgcataactaacctttccaagcctatcatttacttattcaacctcaagcacgaattgatgcacttatttcctttcgaagatgcttcaagtgcggattcctgcaagcggccgacgacgtcccccaagcactccatgttatccgccg

SEQ ID NO: 7535 - DNA, 399 bp, Zea mays
  Clone ID: MRT4577_106871C.1
aggccggccgggccggggtgttaccgtagctactctactgctagcgcgagctaccgatccgcgccgagcggtgcttccaggatgtctctgtcgccgcgtgctcctctgacttcacccgatagacttcggcggacctgcggcatctccctcgtcctcctcccagagatgcccctccctcaccagagatgcgaggcgcactatggataccgagttctagtatcgggcggcactcgtgggagtagcgcgccccctggatgcgttcgcatgccacggaacagaactcatcgctccgatggctctgacgcgcgcgtgctgagggggtcggcactgcggcggcgcggtgtgcaaggtgacttcgtctccgggcagaggtcatctttttgtttgaccgcgcaggcg

SEQ ID NO: 7536 - DNA, 299 bp, Zea mays
  unsure (1)..(299): unsure at all n locations
  Clone ID: MRT4577_106872C.1
ccgtcccaccttctttctgatgtgtcaacattcgccatatcgatattctctgcctcggctccaacatttttgttggcccccnccccaactctatggccacttccccctcgctcgtcgagctccgcctcttcgcaaacagcctcaactgcgcgcttcccgccgacctcggcaagaacgcaccgctcgtgtgcctcgacgttttcgacaactccatctccggcgagatcccccggagtgtatgccaccgccccaagcttaaggagcttctcatgctcgacaaccacctgtcaaaacacatc

SEQ ID NO: 7537 - DNA, 428 bp, Zea mays
  Clone ID: MRT4577_106873C.1
cccacgcgtccgcccacgcgtccgagcggaagatcggcgtggcgatggacttctcgccgagcagcaagaaggcgctgcgttgggcgatcgacaacctggtccgcaagggcgacaccctcgtgctcctccacgtccggcaccacggccgtgaggagggcaagaacgtcctctggtcccgcaccggatcgccgctggtcccgctggaggagctcatggagccgcccgtgaggcagcgctacgacgtgccgtatgacgcggaggtgttcgacatgctcaacgccgcggcccggcagaaagagatgtacactgttgttttggtgaaaaaggctgccagataaactgcccagcttgtatcactacatgagaaagtcactggacagcatcactattaccattttttttaacaagggatagaatggttctgctta

SEQ ID NO: 7538 - DNA, 882 bp, Zea mays
  Clone ID: MRT4577_106874C.1
ccggccgggacgcacgcaccccacccctacgaaaccacaggcttgtcacgggccggcgatcgatgccaaagcaatagctagccggagcgaaagaaagcggacaccgcgattatattactgcggagcggcagggcagcagcatggcggagcggaagatcggcgtggcgatggacttctcgccgagcagcaagaaggcgctgcgttgggcgatcgacaacctggtccgcaagggcgacaccctcgtgctcctccacgtccggcaccacggccgtgaggagggcaagaacgtcctctggtcccgcaccggatcgccgctggtcccgctggaggagctcatggagccgcccgtgaggcagcgctacgacgtgccgtatgacgcggaggtgttcgacatgctcaacgccgcggcccggcagaaagagatgcgcgtggtggtcaagatgtactggggtgatccgagggagaaggtgtgcgacgcggtggaggagctccagatggagtcgctcgtcatgggcagccgcggcctcggccagatccaaaggattctgctgggaagtgtgacgaactacgtgctgtccaatgcgtcatgccccgtgaccgtcgtcaagtcgaagtagtggctctggcctttcatttccagaaagatgaatctgcagctaacctatacgcaaaccgaaacaactaaatccgatatattgcaaccttacgtttcagctgttttcactccataatttgcttttctttttctagatgtacactgttgttttggtgaaaaaggctgccagataaactgcccagcttgtatcactacatgagaaagtcactggacagcatcactataccatttctttttaacaggatagatggttctgcttgtggtcg

SEQ ID NO: 7539 - DNA, 819 bp, Zea mays
  unsure (1)..(819): unsure at all n locations
  Clone ID: MRT4577_106875C.1
gggagngattcgttgattccttctgcacacaacactccgcacagtcaagacactcaaggactttcccgtgtttctacacttttaatttatagtctctcgtcgactctccaaggttgcacccagacgcttacagcgagaccaccacaatgacttcgaggccgtccttcatgccgccgaccgaagggtctttcttgtcttcgggcagcttcactccatctggcctcacacctagcacacgtacccaagccgaagaggcccttaccgcaaacagcaccgcccagaccgactcggcagctcccgatcctcgtcttctccctttgatgggcagcggtggcggcaacgagacacctacccaaaacggcccaaccgaggccctaaaggcatacacgggataccgccgacctggtgttgttcgcgccagctcgaccaactacgagaatgcgctcaagagggcccaggaggcatccgtatcgtctgacttctcaaccgattcagagctacccgacaacaacaacggtcagaccgtcgcctcgcctgcgtccatgtctacacctttcccactcccaggacagggtgtcgtacctctcaactacaactcgcctgttggtctttcccaaggcgactcgcagaaagaagtcgcggtctcgaggcctcaggcctgagcggtctcgcacagcagcaaggctggacggagcaggactacaagcgcatctacaggtgctgaactcatggcagcggatcccaagagttcttgctggatacggttcggccgcaagactgagacgcctaagggtcttggggtctcctatactactacct

SEQ ID NO: 7540 - DNA, 343 bp, Zea mays
  unsure (1)..(343): unsure at all n locations
  Clone ID: MRT4577_106876C.1
anaggggtaacaacgcagatacacgggactcgaagaaaaaaaaaaaaaaaaaaaaaaaaaaaaaaaaaaaaaaaaaaaaaaaaaaaaaaaaaaaaaaaaaaaaaaaaaaaaaaaaaaaaaaaaaaaaggacnntggggggnaaccaatgtttaagggggaattncaaaaaggggggggggggtactattggaaccaaactccataccaaacttgcattaaaaatggtaatagttgtttcctgggggaaaaagatattggttaacaattcaaaaaaaaaaaccagccggaagcaaaaagtgaaaaactgggggggcttaaagagaggatgaaataatattaata

SEQ ID NO: 7541 - DNA, 454 bp, Zea mays
  Clone ID: MRT4577_106877C.1
gggtaccctcggagcctgccgggctccggcgcgtgccgctggctctcccgcctccgcggccaccagccgcccgtccgcccggccccggagcgatgatcacgcatggcggcgacgatggtccgtggctggcacgcaggatcgcagatccagtgtaggctggcggggccttcgccctgccttgccttgcctcgggtgtacattttttcttcttcttcttcttccccccggcgggcggtctcttctttccgttcccctgttcttgtgtgaaccggaacggacagcagcttcttgctagtagtagcacaactaggcacggcacgagtgttgttgtagatttgcaagaggcttcggttgcgtggatttttgtttgttttgtttagttggcatgcgatgcgaacatgcatctcggggtctgcattcgaatacgaaattcagatgcagtagaatttgacat

SEQ ID NO: 7542 - DNA, 142 bp, Zea mays
  Clone ID: MRT4577_106878C.1
tggggaaggggcaccctagaggccgcccggcatatctccttattattaagaccacgagtagcatagaacgcgcagtacttcgccagcaaaggcagccaggctattgtgcctgcttatgctccttgggattcccgcgagcgct

SEQ ID NO: 7543 - DNA, 477 bp, Zea mays
  Clone ID: MRT4577_106879C.1
ctgtggtgtgttttgttttttttttttttttttttttttttttttttttttttttttttttttttttttttttttttttttttttttttttttttttgggggccaattcatattattccgggacattaaaccaaacaaacagctttgcaaaggcggggggggggaatccccgccaaatatggggcattctaaaaaacaacgctgcaacaggggcagggctttttttccctggaaaaagcaaaaggcttggggcccgaaaaccagcctccacccctcatttatcaactggggaaacgaaacaaaacaggggggcaaaacatttagagggggggcttaattaaaaacaggggcaaaggcaagggcaatgggaggcagttttagggcacccccaccggggccgggacaaaaaaaacaacacgagggggcctaaaagaaagctttcagaaataaaaaacgggacagccctgggaaaccccc

SEQ ID NO: 7544 - DNA, 320 bp, Zea mays
  Clone ID: MRT4577_10687C.1
gcggccggaaaaaaaaaaaaaaaccgttctccggttcaaagccgagcggcgtctcctctctccagcggttccagccaatccggcaatcccgctcccccagctcgctgctcacccgctctcctccgccctccgccatggcggccttcccctccgcctccccgtcgccggcgatctccgcctcgacctggagcatggcttccctccgaacgtccctccccgcactccgcccctcccccgcgggcaggctccgttcgccgatctcacccgcgcaggcggccacggctgcataggcaggatgcctcgggtccttcctccggcct

SEQ ID NO: 7545 - DNA, 265 bp, Zea mays
  Clone ID: MRT4577_106880C.1
gggatcctatagggcaaccctcctttttctttctttactaatagcttttgaaaaaaaataatatcattctgggttcggggtttattttattatcccttcatacccaaaaaaaaacatattcaaaaataaacttatagcaacaatgcaattcaaaaaaagtatcccttttttacaaaaaaacgaatcttattttaagtgacacctataacccaaacccatttcatctatcaggctcaaactgacccaacgtcgtcagaataaaaat

SEQ ID NO: 7546 - DNA, 362 bp, Zea mays
  Clone ID: MRT4577_106881C.1
ttgttcttgttctttttcatttttacttcttcggggtcttcctcgaccttgatctctcttcgccggaaccgaagcatcgccgacagaggaaacatccttctgtcttttcaccctcaaaaacataacctttttaccggaaaaagcatgctaaaccaccttcaccttctctgcatcacgaccctccccgattgctgggaacgatacatcaaaattcagagacaagcaccacattggggagccacaaagcaggcgtctgttcgaaaagctccacacgcgaggggggaggccctcacccatcatttttttataaaagagagccaatggaccaaacgacgcacttcctcaggttggcgtgcgtggac

SEQ ID NO: 7547 - DNA, 797 bp, Zea mays
  unsure (1)..(797): unsure at all n locations
  Clone ID: MRT4577_106882C.1
cattgggtacctcgaggccggccgagaagggaacttacatcgagcaatgcattccaaaccagacgagcaaggaatcccccgatgcctcatcgcgttctcctcctcctctctctcgcgtcggtcgccgcggtggccgccgccgccgacgcgggggacccgctgatccgtcatgcgcttcccggcgtagatgacaaccatctgcagctgaacgcgcagtcccacttcctgagcttcgtgctgcgcgtcgtgaagtcctacaaggacgccgacgagcacgcgtaccgtgtgtacgtattcatagtggcaacctgcgtcgcgcgcgccgaggccggctgctggactccggcatgcctatacattgagatagctgagatcgtcctactgtcccgtcaagtttattgcccatgggaaagcaacctcgggtgtcctctgagcgatactgtctgactccctacgaaagatgtcaaaagctggcgtagacattctagaacactcgggagtcaccggaccgaccgtttgcagtgacactgctacatacggtcagncctgatctcgtttcggtttcaatcccgtaccaggcttctactactgtctagtatttggcttgtgctctctatgcgattacaggctacgaacagatctaagatacgctgaatttctaataccgaagcagaacagatccaaacagctctccttagttattgagttaccaagggggatcttttttgtggtgactctcgataaaagatatgcnaactggaatggttttattataggtttatacccatgttgaaccg

SEQ ID NO: 7548 - DNA, 240 bp, Zea mays
  Clone ID: MRT4577_106883C.1
atatttttttttttttgaggggaaaataaacgggccctggcattttttgagcaccccatggaaatactggctgaaatcaatcatttgcgtaaacatatgttacacccgaggtatacatatatatatatatatatatataggtatagacgctctggcacattatttgggggtgatttcggacaacggggtaagtgcaataggaacgcataaattgcacgattacacacagtactagcagca

SEQ ID NO: 7549 - DNA, 629 bp, Zea mays
  Clone ID: MRT4577_106884C.1
attaaaaaaattctaacattcgcgtagcgcgcgaactttgcgcgaaaaatgccgcgacttgcgacttatggaaacgggcgagtggggtggtcctaatacaaataaatttttttactatttttaaaatctgttttatgtttcctggaaacgatttgcactggcggttttattacgtcgaccgccagtgaaaatcgattttcactggcggtcttcagttacccgcctgtaaaaatgatgatttttactgacccctagcactgcggttacgataaacgccactaaaaatgggtttacgaccgtcagtatagatcttctctgtactagtgtactcttggcctttgcttgagaggtcatgggttcaaatccccttgaggacatgtgtgtttttttaattttagctagacgtgggttgtacgggggaatgagaataaaaatgagctttgcgggatgagggaactttgcgggaggagggaatgagaaagacagaataaagaattggaatgacagacatgggaatgagaacggtggcagaacacgggaatgaccgactacttttgcagccttaatagtagtagagatattggggagttaaaaaattatgctcctcattgttatctattcgaccccta

SEQ ID NO: 7550 - DNA, 256 bp, Zea mays
  Clone ID: MRT4577_106885C.1
tcctgacgctgcgcgacctgtcggcgaaacctagctaccttagacccgccgccgctcctaggagagagagacatgcaatcttagggtgtcgatgcggaggaagaagaaggcgtccataagctcttctgctactactggcaccgcgagctcgactactagaacatcctcgttcagagctcaagcccagacttccgtgccacctatgccacgagaagctctccagcgcctctgggatggccatactcgtcctccaggt

SEQ ID NO: 7551 - DNA, 340 bp, Zea mays
  unsure (1)..(340): unsure at all n locations
  Clone ID: MRT4577_106886C.1
cggaacccccgggccgacccacgcgaccggataagataagacgagcaaggaagcccccngcacagggggtcaggtcaaaggcaaccagggaaaacaacagcaagaagccccgacggcgaaaacacagcgagcggggccccaggaacagngccnacacaacaggccggcgaaagaaggcaggacccagaagacgaacagaggcaccgggggcagaaccgaagagngccggaacaaagaaggcagcaagaacgcngccggaccaccaacaacacagacagcgngaaggaagaccggaggaagaccaaccagcaaggcggngcaaaacaaaccaaacacaagg

SEQ ID NO: 7552 - DNA, 336 bp, Zea mays
  Clone ID: MRT4577_106887C.1
gtcgttagttttttcttttttaaaccgccgggaggcattgttggtgaaatcctagcatgccctttttggttttgagagaaagtttacccccgtggcaaaaaaaagccctatttgcagtctggactaacccctatatccgctcccattgaaaaaaaaataggacctttacgctaaaagcgcccaaccggcggtggtttcttggcgtgctatctaggaaacagtaatgggagaacccagccaccttttttaggatgtacaaaaagttcaaaaaaaatgagaaccattggtgacacccctttttgaaaaccacaaacaagggaggggtaaggaattttc

SEQ ID NO: 7553 - DNA, 526 bp, Zea mays
  Clone ID: MRT4577_106888C.1
agcgtccggctgttctagatcgcgagcgccgcccttttttttttttttttttttttttttttcttttttttttttttttttttttttttttttttttttttttacacagcagcagcagatatactttatcgctttaatcagagctttacttcatcatatgatgtgttatctacaacttgtgtaccttcaggcttcaacaataacttggcgagcaggtgcgcaggcaggatcccggccttggcgagccagacgaactgctcgacgaagtagtagacgccctcactgccgtaggcgagtagcgcaagcgccgggggaaggtgcgggtgggcgcggagggactgcacgaacttgccgagacggaaacccttgcggctgaggacgacgctggactcgaaagacttgaggcgggcggaggcgccggggccccagcggcgagtgcgaggggcgtggcgtagcggaagatcttgaggagcttgtcgacgccgtcgcggtgggcgaggaagtcgcgggccggttggtgagcggc

SEQ ID NO: 7554 - DNA, 329 bp, Zea mays
  unsure (1)..(329): unsure at all n locations
  Clone ID: MRT4577_106889C.1
ggcacagcacaaaccaacaacagctcagctcaccagggaaacaaagaaagatcctcctcgtaaccatcgctgcggccctgtcaaatcgaccatgcgccatgcatncctcaggacctgtagatcgccatgtcctggtcgtcgctgattagcgcnngcgtgatcaagtcgggncctttcatcgcgctggctaaccatagtgnntgggcggttggcggtgctgctgccacttgcgtcctcggacctgctgccacggcggcgnacaggcggcgccagggcacagcagccaccancggtcatgttcgttcantggccgttnaccaccagctttt

SEQ ID NO: 7555 - DNA, 134 bp, Zea mays
  Clone ID: MRT4577_10688C.1
atgtattttctccagacccacccaaaacggggggggttagttaggaaaaacgggcagtcaacaaaacaggccaataccaacccgcgcaataaagggggcgcagctcaacacaatctgacgagcacacaaaagag

SEQ ID NO: 7556 - DNA, 550 bp, Zea mays
  Clone ID: MRT4577_106890C.1
aaaaaaagtaatacatcatttctatttctctgatgctagaaacgggtaacaaacatccatcccagggagtttatgggggcaccaaaaacaaatgataacgaagtttacaaaacaattgtcaactaatatttcgtccctacagacaaggaaagcagagctgtcctcaatcggtgtaccacctattgctacccttcccatccttattgagcttcttgccccgccggaggcggtgctcggcgtcctccacccggcggacggtgcgctcaagcgcgtgcacacacttcggcagagccccgatcaccgagcactgatgcgcgatctgctctcacagggccatgacatctccataaccttccgagtgggcatggcgctgttagcagctcccgcctcccctgtcggcctaattacctaactcgtcatcggtgtctgcggaggcgcctaagtggaacccgtggccacaggagtaggctccgtttcatacgtcaccatctgctattcgccctgattggagacttccgtctggtcgccgttaatgtacccgtcgacctgc

SEQ ID NO: 7557 - DNA, 871 bp, Zea mays
  Clone ID: MRT4577_106891C.1
ccggccggggaggcgagtggggccggcgatcggccgaccaagttgcgcgtctcagcgccatcagtttgtccgtccgtcaccgttcatcgtcggccgtcgccttcctatatccgctcgccggcggtcccttttccccctcgctgcgccaagccgccaaccaacgaccacccccttcctcgcccgcgaccactcgggcctgctgggtcgcgcttttccccctaccaactgcccgtatcgaggaaaataactgagccgtctgagcgcgactgaagttactagtcgggggcgaacggtggccggggtgtggctcttgcagtaattctgcccggaaaagcgcggggggccgtcctgtagttgtatcctcgagaaggaaaggaaggccagtgccacttgccacgccggggggcggtggtagccctcgccggccggctcgcccgcccgaccgcgacgtgcttgtcgtggctcgtgaggtgggcgatactatcctgtccgtccgccacgcacgcacgcacgtccgtcctcatcggcggatgcgtgcatgtgggtggggtgcgggtggataagcaccgtgacgagactcacaggccggtgcacgcctcgcctcgctagacgcggtcctgcctgcgcccgcactcccgctgccatcgcccagcgcgtgcgatcctggcttgtcggatatctagcggcagtccggttcagctccacggccacaccgtgacgtgctgctgccgctccggggacgacagatctgctcgctcgctcgctcgtccgtgcagctgacccggtgcagaggccccgtctaccacgttcctcggtccggggagccagagtctgagcgatcgatcccaaaaaaaaaaaaaaaaagcggccc

SEQ ID NO: 7558 - DNA, 680 bp, Zea mays
  unsure (1)..(680): unsure at all n locations
  Clone ID: MRT4577_106892C.1
agcagtgtcccctctgtatattatgtataaaattttatggtcgcatggnagaaaccaaatttatttgcattctcttgcattatattgtttttctactatttacttcaaaagaaatagttgtgtatgttggtagtattgcagttagatacttggtaggcatgtctcccttgttcttatagaacaagatatcctgaatgaacaggaatatttgaaaagcgtcattttcttttgctgcttcttgtactatgttccaatataagacatgacaccgatgatctggttgttcagacttcagatccgtgtggcacatcatatagagaaaacatgcagggagagagttgttacaaataagggagactgaattggatgattgtattgagattcaatgtgactacatataagtacatgacaaaaccctagactaggagattacactactacccttggcttttataccttaacaagaattatgtctgtattgcattgagccatcatagttgcaagcggaagaaccatttacctgtaagctcgggttccaatctctcagtcgacacatcagtactttttactttaattcaaacacatacaatgtgtgtttctgctgcgttctatcaaatcaatcattaatcgaatatttgaatttatagcgccttatgtgcaaattaatgatcctgctttgt

SEQ ID NO: 7559 - DNA, 213 bp, Zea mays
  unsure (1)..(213): unsure at all n locations
  Clone ID: MRT4577_106893C.1
tttacgcctgcaagtactcatccttaattgccaagaagacgcacgcgtcccactantactanttctcgagcgcccgctctctatatacaaacttacatatctcaaagagccgaatgcctaacaaatcaaagtatgtctctctaaactcaatatacaatccactccttttacaacatacatctcaattaaaacccaaaacccactcaacacctt

SEQ ID NO: 7560 - DNA, 336 bp, Zea mays
  Clone ID: MRT4577_106894C.1
actatctcactcttaagctataggctgaaggtcgactggcgtgacgaaaggaagcagaaaccccacgcatggtatggagcctgacgagtttcactaggggcctcattatatgacatcgtcgcccgcagtgggggggaagggcttctacctcaaggcctaccaagtttgtaaacgtgaagaccccaaatgatgagaagcactacgccgatctcccctccaagcccttcttccagctcctcctgaacatacatcctctcggtccctgtgctggccatgcctctgagattgcagagcgccttaccaactggacgaaaaaccattgccgccaccaacccc

SEQ ID NO: 7561 - DNA, 210 bp, Zea mays
  unsure (1)..(210): unsure at all n locations
  Clone ID: MRT4577_106895C.1
actccaacctcaccancaccacccccntctccaccaccaaccataaaaggacctcaaccacttctaccttctcactacaaaaccaactntcaaccatttccaacacantctacctcaantcctttcaactcaccacctaccaaaaacccaaccttccccatcaatctgaacttatcaaacccttcaacatccactttttctcgctcaaat

SEQ ID NO: 7562 - DNA, 261 bp, Zea mays
  Clone ID: MRT4577_106896C.1
ttttattttttttttttttttttttttttttttttttttttttttttttttttttggcatccccaatttttttagcatatgtaggacaacaggggcccagcattctggttcgttttctctaataacactacgacacaaaatatccggccttaattactgggaaattttttggacaaaccaaaatgggtaccaaacaaataggcatacattcgggccttttttgtcatgctacacacaacatggttccaagaaaaccaaatc

SEQ ID NO: 7563 - DNA, 886 bp, Zea mays
  Clone ID: MRT4577_106897C.1
aatttcagaaccgctacccaaagcagccagcctagccatagacaaccccagtcctagccactagctacaacgaacaagctcagacccagccagccttgtggctccggttggactggccggtaccgttgccgctcctggtggggaactgcgccggcgtgcaggggaacgccgagatcaacccgaccttcagtgctcccaacacctcaggtaacaattccaagagcagcaacagcagcaatgcgactgataccagcacttttggcaagagttcttcgtcgtcggtgccaccgactcctcggaccgagaaggagatcttgcagtcgtccaacctccgcaagttcaccttcagtgagctgagaagttccacaagaaacttccggaccgacagcctgctcggggaggggggcttcggctccgtgttcaaggggtggatcggcgagcgcacgttcacgccggtcaagcccggtgccgggatgatcgtcgcggtgaagaagctcaagctggacagtttccaggggcacaaagaatggctggctgaggtcaattacctggggcagctatcacaccccaatcttgtgaagctcatcggctattgcttggaggacgagcagcggcttctcgtctacgaattcatgcccaagggtagcttggagcaccatcttttcaggagagctccacatttccagcccctctcatggaatttacggatgaaggttgctcttgaggctgccaggggacttgctttcctgcatagcgatgaagctaaagttatataccgtgatttcaagacctccaatgttcttcttgactcggaatataatgcgaaactctctgattttggcttgcaaaagatggcccaagtggcgataaagtcatgtttctacta

SEQ ID NO: 7564 - DNA, 300 bp, Zea mays
  Clone ID: MRT4577_106898C.1
gggggtcaaaaagcattggtactggtccatcaaataacaggtggccccggggggggccgggggcgggggcccctaactcccggggggcacgcgaacattccagggaagcctgcaagcgggggccaccccacctagggcgaggggaacttggggacgggcttggggccctcggagacggggggcttggggagctccccggggggggccaggcgcacgggggtttggatctcacggggggggggggggggctttttggtgtacccggcgagcttgggggccttgggggggagctttttaaaa

SEQ ID NO: 7565 - DNA, 1306 bp, Zea mays
  Clone ID: MRT4577_106899C.1
tgttttgttacctctgcgagaacagctatcatgtgcgcaaattcccaaatatcaaatgcccgcccggtccaagccaagtccaagcttcatcctcttgctgcggccttttctttttgagcagagcctttgcagcgagaacctctgccacatcctggttgcggcctgttccagtcccggagtacacagtccgcgcagccgtcacctgtgcaaccacccttgtcactccagctacactgtcacgagttggagagtacgatggcttagggtagtgtttgtgctcgcataattccttcagttccgacacggggtcaggctccatggtcccgggggtggcaagaggttccagtagccgcctgatggcactccagacaacctctttgtcgttcccgctgtccacgtaaattgcgccagctattgcttcaaacaaatctgcgagatcctccgggagactaatgccagcttcccaaccatgtgatgggcctgaaaatgaccgccctgaattctcaagatcgttaaccatctgttttgacgatgaatgaagaatgtgcttgtgtaaccctgctttaacagctgcatgtgcatagcaacagttgttcacagaagcttttcgtagatttgtcaaaacagatggttaacgatcttgagaattcagggcggtcattttcaggcccatcacatggttgggaagctggcattagtctcccggaggatctcgcagatttgtttgaagcaatagctggcgcaatttacgtggacagcgggaacgacaaagaggttgtctggagtgccatcaggcggctactggaacctcttgccacccccgggaccatggagcctgaccccgtgtcggaactgaaggaattatgcgagcacaaacactaccctaagccatcgtactctccaactcgtgacagtgtagctggagtgacaagggtggttgcacaggtgacggctgcggggactgtgtactccgggactggaacaggccgcaaccaggatgtggcagaggttctcgctgcaaaggctctgctcaaaaagataaaggccgcagcaagaggatgaagcttggacttggcttggaccgggcgggcatttgatatttgggaatttgcgcacatgatagctgttctcgcagaggtaacaaaacaaactactgtagtatataaatgttgtgtatatgaatcaaggacagttgaactacccttggtttcgatagctgcaaaaaaacaaaacaaaaaactcgaatctactatgcacagtggcttcatgtggtggacccttaatgaaatgatgaattctacgtggc

SEQ ID NO: 7566 - DNA, 1557 bp, Zea mays
  Clone ID: MRT4577_10689C.1
tgattttttgcaacaagagcatggatatattgatcgcgcacacgcacaaaaagcttagagagggatggtgtggataggaaacgtcagctttggttacacgaatgcctcatggtctcgatgtgttgctttgtacattttttatttatatttttccacgctggcgcgccaccaccagcagcgggcgctgctcctgttcccactcgtcttcctcctcctcctccttgccccgcccctcgccggcgcgtggggaaaggagggccacatcatggtctgcaagatcgccgaggtcgcgcccgattccgccctatgaaagttgggtcgaattgtagacagcagagctgggcgagcgctccttcctggaattctgatggatgcctctttgcgcggcgtgcagaagtacctgtcggagaaggcggcggcggcggtgcaggcgctgctgccggagtcggcgggcggggagctgtcgacggtgtgcccgtgggcggaccaggtgcgctggcactaccactgggccagcccgctccactacgccaacaccccccaagtctgcaacttcaagtattctcgggactgccacaattctcgtggccagcaagggatgtgcgtcgtcggggctatcaacaactacacggaccagctctacagctacggccagaagacttcgtataacctgacggagagcctgatgttcctggcacacttcgtcggcgacgtccaccagccgctgcacgtaggcttccaagatgacgagggcggtaacaccatcaccgtccactggtaccggaggaaagcaaacctccatcacgtctgtgcctgctgcacctcttcgatgctaaatttcagatgtgtactcaccaggtagccagtcttgagtctctgagagtcagaatcctgtgtttttgctaggtgtgggatgtcagcattattgatacggcaatcaaggacttctacaacaagagcatggataccatggtagaggctctcaagatgaatcttacagtaagtatgatattcccttcgttcttttttatttgtcgtgttttagtttaaaaatgaactagcggacaacaaatattcgagaacggagatagtacaagattgacatgttactccaagaccaatgatgcttttctagtttctaacactgtaagctgtaggatggatggtctgacgacatcgtccactgggaaaattgcaagaacaaacacgcgacctgcgcgaacgactatgcgattgagagcatccattattcctgcaactacgcctacaaagatgtggagcaagacatcactctaggagatgattattttttcagtaggtacccgattgtggagaagaggttagcgcaggctggaatcagattggcgttggtacttaatcggatatttggtggaggtgaagcggatgatataccactacaagtacagtaacagctgtaataaaaaggaagcatggctattacaaggatttgtccattacatcgtctatacatcaataaattggcatgaatttgtaactccattgctatacatcaataaattggcatgaatttgtaac

SEQ ID NO: 7567 - DNA, 209 bp, Zea mays
  Clone ID: MRT4577_1068C.1
gggcccgaaaaaacgaaaatttgtttttagttttggttaaacgttcaaatgttgggttccttgtggatctataaaactggcggaattaaatgttcggggggggagttaaaccaaggtggtttacttaacattaaaggatccacaaaattgttgggtggcgaaaacaactactttttatttaccaagggggagccctaccgggttttttt

SEQ ID NO: 7568 - DNA, 381 bp, Zea mays
  Clone ID: MRT4577_106900C.1
ttttctttttttttttttttttatattcctatgtgattcttcttatcggagggggacaagccttttgaattcattgtttccgctgcgaaaaatcaataattggccgttaccgacatgaaagttgccccttcaacgccgggggggggcctatacacattctgggtggggcttccccaatatataaagcccaggggctccgtttccatattaccatatatatgccggcaactttattacactgctgctgcaggtgcatacccctctgggccgggtgaatcgaggggcaacctgagttcaatagaatcggacggcggaagggttaactggattgggtcttcagctgcccgggatgctacttttagacagatccttttttcccga

SEQ ID NO: 7569 - DNA, 305 bp, Zea mays
  unsure (1)..(305): unsure at all n locations
  Clone ID: MRT4577_106901C.1
acccatcnatcgggggggggctttctttttatttttttttatgtgctccttctcatttttacaatggaaaccaagaccttttttacgcctggtgatcggacacggggtgatcagccacacaaaacaaccgggcctttgttaaaccaatcatggggaccattacgtggcccggaacggcggtggtctttcacaacctccttttgggggggggggccctaatgcctccgggccatgggtgcgtttaacccgcccaggtttttctgtcccccaatggggcgggactcaagggggggggggcccctctt

SEQ ID NO: 7570 - DNA, 516 bp, Zea mays
  unsure (1)..(516): unsure at all n locations
  Clone ID: MRT4577_106902C.1
cccgggncgacccagcgtccggagactttttgtggacgatctacaggggcctgggggcgacccacagacctttctaccggccgagctgacgcgacccccgacccgcaaagccgacacgccccaacagaccccaccgccgcccgaaaccatgcagcacggaggagccgacgcgggaagagagcatttttttagccaaattggctgaaacaggcaagcggaacaagcagcaatacctagatcacggagcgcgtcgcaagctccgccagccgtacctgcggaggagaggagctatcaaaccaggagcgcacactgctggcagcaacctacactaacctgagatcaaccaagcagggtctggcaaaccgatcatccctactcatcagaaacaacagaggagggccatgcaaaacaaggcgcacactgaaccctgctggccatccgcagcaacaactataaccagctagccagcaagcgacagggtactctcagcaacaacaactcctaccatgtaacaaa

SEQ ID NO: 7571 - DNA, 668 bp, Zea mays
  Clone ID: MRT4577_106903C.1
gccggccggtccggaataccctcaactcagaatccgcgttcccagactggctatctcagcttggtggactgccctgccatcatatcaatatcatatcgtacgtgagcccgagcctagagagacggacaagcatggctgctcctaatctcgccacctctggcgctgcccgagctacctggctcccagcgtggtgtgtcctccggacgactggcgacgcgcaaatgtcttgctcctcatggtactgcactgctgatgcctcgcctgtcgatccatcacatggaagatgtcctgacggcccagcctcgctgcggcggcatccgcaaacagctgcagcgggccaacaaaacaccggatccgccgcaccatactgctgctgcatcaagaacgtctgctgcgcgcaacaatcctgaacgagactctacatctatgcgcgatcgtcgcatgtgccacaccaagtgctggacgcctcctgaccaaccagatcaggaccgacgttaactgcaacgactgtaattaacgtgtggtgaactgtgagcgtgccatcttaggaatgcatgcatgtcatgtgtgatggatgaataagataatgctactgttactcttaagctatatcgagtgtggactgccactactcatttatggagtgcatgaatctacgacaccgcact

SEQ ID NO: 7572 - DNA, 398 bp, Zea mays
  Clone ID: MRT4577_106904C.1
gcgcgcctgccttttttttttttttttttttttttttttttttggtgggtttttttttttagaggggaaactgttttagttaatttaatagagtaaaaacacataatcggggacccattaaaataatgggcgaggaaacccaatcggtcaaccaacggggcatgtataaccacacacggggcacaaaaaaagaaggccaacctgcgggggggggttgcaaaccgagaaaccttgtttattttttggttccacagacaccacacaattccaatggatggccaccaggttgggcccggtgtataatgttaaaccccccccccaagccagaatggtaagtaatatattcatgggcgggcgacggagtgatcaacatttggaggggggggaccttgagcccc

SEQ ID NO: 7573 - DNA, 731 bp, Zea mays
  Clone ID: MRT4577_106905C.1
tgggtacctcgaggccggccagtgctctcttttctcaaccagcttctcctgttccagctcatttcttgttcatccatgagagcacccaaaaaaaaaaaaaacaggcggactgatgtacttactattcctcctcctcctcctcccatgtccatgttgttgaatatatatatgatggcaagcagcctgatcttttcaaaaaaaaaaaaaaacggcacacgtcttttggcagctacaaaccacccaaaagccacccccagaaactcgtccgctccttgggtgttccggatcttacccatcactctgataagatgatgagcgccgcggccgccatgacgacgtcttccctgaaccccaacgcgccgctcttcataccatgcggcgtaccgataggtggaggaattctcgcccgagcggtatgagatctgacaacaccaccctctggtaccggcaccactggttccgccagcaccaggaccaccaggccggcttacgcgccaccgtcgacaccgagttggaaggcgacgctctcctccacgaatacttcgacgacatacacgacacctaagacctcttaatcacgactgacgctgatcaccaacatgacgtcaacgcaggagtacatgacggcaacaaactctccatacacatattcatcgagactgtactcaacacacttcatcctcatgaaagcccttgcatcttgcatgtttcacccatctgatggatgctgt

SEQ ID NO: 7574 - DNA, 620 bp, Zea mays
  unsure (1)..(620): unsure at all n locations
  Clone ID: MRT4577_106906C.1
actccatagggcgattgggactcccgaggccggccgggcccctgccatctctctctatcgcattgcttgcgcgagcgcagaaggcacacacgctacagccatggcgaactcgtcgtccggcctgacggtgagctactagtgcaaggcgaagttcctggatctgaaggccggcgggaggttgcgtgtcatccggtccacgatcgacgacaatgacatggggatcgaggagggagcgcctcggggggcggaaccaggctacggcgactgcaccgacggtctccccgccgactagtgccgctgagccatctaccgcctcgacgttcaccaccgtagtaaactgccataagagcaagatcttcttcttctcctggtcgcctgaaactgcacgcacccggacgaagaagctcgtacgccagctccaaggacaggctcaggagggacctcgaaggcaaccagtgcgaaatccaggccaccgaccccgtccagatgagcctcganatcgtcaagagccgggacgaggtgatcgtccatcgtccaactaaccaagcaacacgaagtaaccgccgcctgctnttatatattgcatcattatatcgtggttttattaactttcagcaccg

SEQ ID NO: 7575 - DNA, 713 bp, Zea mays
  unsure (1)..(713): unsure at all n locations
  Clone ID: MRT4577_106907C.1
gttcatattcagtcccatgcttgaagcgttgttgcctgagcaagatgatcccaaccgggagagcgccagttgggatgtgaagcttgcatcggactacaaagacctgcagaggaagatagtatcgtccatcgtcacttcctgtacctcagccttggaaaatctgtagctcttgctggatggaagtgcttcactgatgaattgcaagagcacacgccctgggggccctgttggaatgcctctgctggcgtgtagatggccaagctattgcagcaactgcaatctgtgaccatctctacaaaccgaagctgctcgtcgtgagttgctccatccgaggaacgcggagacacggggtcgtgctcccgaggctggcttgtgtgattttatccgcacctgattgttaccgcatactgtagttgcgtttggtgaaagaaagctacttttgagctagttcattgggagccaaacttgctttttggtgaacgaaagctactttggaactaatttcgtcgcaatgtggttgtggtccatgtgctcctgaaatcgctttagcaacactagattcgaaatacgtattgccggtgccggctccagttctaaggaactaatttttagtctctagtttcttaacaggtgactaanaaaactaaaatatattataattcatttaatgataaaaagtattttagtccttcttatgatttatttaatgtgtt

SEQ ID NO: 7576 - DNA, 1201 bp, Zea mays
  Clone ID: MRT4577_106908C.1
cggacgcgtgggcggacgcgtgggcggacgcgtgggcttgcctggttcctggcgctggacttctgaaccactcggtatcccctcatatcttgaactatggtcgagtagatgaagccacaaaatcgttgacgtttcccttgtctcgaccctgtgatgcaggggagcaatgctttctcagttatgggaaacatccagggtcgcatcttgatacgctctatggattcctaccaagaggagacaacccttatgattacatacatgtagatcttgacacatccgccgatgacgaggacatcgcagctcagccttcggcgactacaagccaaacaactcatatggttcgtgggacatggctgtcgacatccggaggattccccacgtatggcctgcctcagcccttgctgacccatcttcgtgctgctctaggctgtgaggtagacgaacccgctgcggaggctgatgtaagggtgctgtgatggtcccatgaatcacggtacaggccacatcgttcgatcgacatattcgtcatctaaaaatcacatctttctcgttgtgctttcagatgaaggaaagcgacaaggtggtgctggagacaatcctgtccatattcagtcccatgcttgaagcgttgttgcctgagcaagatgatcccaaccggtgctgcttcatgctcaaacccattttttgcggtgatgccatacaccgtcatcaccacttacccgctctagttcatccgattccctgcagggagagcgccagttgggatgtgaagcttgcatcggactacaaagacctgcagaggaagatagtatcgtccatcgtcacttcctgtacctcagccttggaaaatctgtagctcttgctggatggaagtgcttcactgatgaattgcaagagcacacgccctgggggccctgttggaatgcctctgctggcgtgtagatggccaagctattgcagcaactgcaatctgtgaccatctctacaaaccgaagctgctcgtcgtgagttgcttcatccgaggaatgcggagacacggggtcgtgctcccgaggctggcttgtgtgattttatccgcacctgattgttaccgcatactgtagttgcgtttggtgaaagaaagctacttttgagctagttcattgggagccaaacttgcttttttggtgaacgaaagctactttggaactaatttcgtcgc

SEQ ID NO: 7577 - DNA, 328 bp, Zea mays
  Clone ID: MRT4577_106909C.1
tgtcaaaggtgctgtgcagcatgtggtgtggagccataaggacttcgctatgttgcgcagtgcccagcacataacattgatgatctgggtgtggcattctggtaactgcgagtatacatagtttgggcattcagaggtggtgttatggctggattactgcagtcagggggatcagctatacttgacctctggttcacgagacagatctgccaagatatgggattgcaagactaggagttgggttccgacattggaagggcatacagatgttgttaacgatgcatgctgaccagcagatcttttaatgctgaatacaggaccatagaac

SEQ ID NO: 7578 - DNA, 349 bp, Zea mays
  Clone ID: MRT4577_10690C.1
cacggaccggcccgtacttaattccttggttgaccagctctctttccggccggcggccgtccttttttttggtgggtgttacacagtgcacgggtgatatttgacagcacggcgcgttatgcaagaatacacctggtgtgaaaacagggattaagcattaccagattagaaccgaggtgtgacccagggacaaccagggggtggacaccctgggtagggaaacgtacgctgcaaataacagaaagggcccctagttcatttctcttggatggaaatggcgaacttattaggcaattgagagccagaagcccgcaattttgtggtttaggactcgagcaccatgcacctc

SEQ ID NO: 7579 - DNA, 419 bp, Zea mays
  Clone ID: MRT4577_106910C.1
ggcggtaggtcagggcttcctgctggtggcgttggcgatcctgacagtgcaggggcgttcatgagcctggggtcggggcctagaatcaggtggtgttggaggccagatgtgtgcgcggtgcgtgctaaccatcagcaccggtcggtgcgccgcgacgtgtggatgcgtgatctcggaagacctctcgcatgagacacacacacatctgatgtggatcgcggcagctaaaccatatagaaacaatccaatcacgaagaggttattgggattcttctccgattcattccataagtgcaacagtttaggaaagaaaattggtcaacgggtaaagaaaaaagtcctactgctgtacacctaggaaaaaaaatgttagctccactttcacatattgtttatactgctatttgatttattagttc

SEQ ID NO: 7580 - DNA, 1070 bp, Zea mays
  Clone ID: MRT4577_106911C.1
gaaggggttctgggggagagatccaactcgttctcacaggactccaataattctagccctgctgaaaacaaactcgaaccaggtgaaaagtccttcgcatcggaggcatactgtgagaggtgtccagacctagaataggtgtgaagtgtgtgtgcgtgctgggcgcgatgggtggagtgagccactgtaaccaggatacatatacattgtcttgtggagggggaaaaggggatgcataatgagaattatcaacagaacttctctcattccttttctctgttcctgcttcctcttctccgatctctcatcttgtcctctacttccctattctgattaggtctgctgctctggttggtgatcctaaaggggttgctaacaattggtatcagagggaaatcgttcctcgaccggaagcatccatggcgtctccttcactggtcgatactcagctcatcgaagcgttggagcaccaaacccgggttatcctcgccgaactcgacaagcggttcacggcgctcgactccaagtgggaagcgcgagtccagacgcaccaagtagcggtgggcgccgtcgtggagtggcggccccaggtggatgcctccatcgaacatcttcaacaacaccaagcagatcagccgcacctccgctccgtcgggaacatgccccacgagggcggcctcctctcttccgccatcaccaagcagatcgaacccgtctgccttaaggagcttgcattgctgggggacgccgactcgcgggtccaggccaccgaaaccgacgtcgtgttcccttccagcaaaatgctcagcctcgtcggcgcggtcgacaaggaggaacgccactcaacccaggaagtcccgagacgcgcacctcgtcgcaacgcgctacgaggggggaccaaacccaccccttcgccgtcttcgacgaccacagcgccgctggagcatcctgcactgggttcgcgcgagacgtggtcccgcgcctcctccacgctttgctcgtccgcgtcatgttcgtcgagcaggtggagggcatgcgcgacccggaggacgagggcttggcgcccaacg

SEQ ID NO: 7581 - DNA, 962 bp, Zea mays
  unsure (1)..(962): unsure at all n locations
  Clone ID: MRT4577_106912C.1
gccggggttttttttttttttttgataatgccgttcttatttttcccgaaagcctctataaatcgtgattggctcaaaccgagccctatagagaaacctcactcccattgctgcaaanacaagaccaaggtatgattccccttttttttcattttcgccagaaccttacttgcgcatagggcgggcacgtcgcttgcgggcatcggccttgttgaccttggcctcggcaatacgcttggccaggacctgggcatactcgttggcctcgtccttgaccttctcggcctgtcgtcgcttgagagcagcacggtgacgcttgtgctgcagacgctggggggtgacaagtcgctgaatgcgaggagccttggtgtaaggggacttaccctcacccttgggctgaacctctcgtcgaataacgtacttgcggacatcgtcatccttggtgaggccgaagaacttgcggatcttggtggcacgcttgggaccaaggcgcttggggtgaacgacgtcggtgaggccggggatatcagcatcaccctgcttgacaatgctgagagcaaggacggaaagatccatggcgacgatgcagccacggacagactttctcttgcgctcaccagtgcggcggggggcggtagcaggagtgaccctcagagaggaggaggcggacacgggtagggtgcatgacaccctgcttcatggggaaaccctgcttgtcgtttccaccggtgatgcggaagatgtagcccttgaactcatcgccgacggagtcaccgggaacctcagcgcccatgcgcttgtccatgaagacacggaccttgcgctcatcctcaatgtcgatgagcttctggctgccattggcagggtagctgatgttcaacttcatattgccagttgtgatggtggtgcaagtttacttgacctggcctgctgcgaagttagtcgcggccggcccggcccgg

SEQ ID NO: 7582 - DNA, 116 bp, Zea mays
  Clone ID: MRT4577_106913C.1
gaggggtattactaaaatggtgaaagcattgggtgaccacctggttctgggtaacttagctaatgcgacactgatcatggggaatcgggatgacactcctgaaacgtccagctcgg

SEQ ID NO: 7583 - DNA, 611 bp, Zea mays
  Clone ID: MRT4577_106914C.1
aaagaaacagctcgagctcctccgattccgcccgcctccgttcctccgcatcttcccggccgccgccaagatgaagctcgtcaggttcttgatgaagctgaacaacgagacggtcaccatcgagctcaagaacggcactaccgtccacggcaccatcactggtgttgacataagcatgaatactcatctgaagaccgtaaagctcacaatgaaagggaagaatcctgtaacccttgatcacatcagcgtgagaggaaacaacattcggtactacatcctccctgatagcttaaacctggaaacgttgctggttgaggatacccccagggtcaagtctaagaagccaactacagggaagcctatgggtcggggtcgtggacgcggccgtgggcgtggtcgcggccgggggcgctgagctttattgttccctgctttggaagctcgtgcagtgcaagtccctacagcgtaacctgcttcctctgcgagctatgtcgaggattgtttctgttctgttagaagatgtcaatctaagtacgtgttgatgcggaatcatctcgcctgtttgacctatgttcttatatattgttcgtaatgcattttctcgggaattc

SEQ ID NO: 7584 - DNA, 460 bp, Zea mays
  Clone ID: MRT4577_106915C.1
cacgcgttcgaccgggcggacgactggatggaatttgttgggggctgggatggacgctggaatgtgctaaaatgcggtgaagcaagctctgaccctgtgtctgaccacaatcgcgtgaaggatggcctctcatctgtgctagcatgggtttcaatgattgctgacaacaataaagacaaccttcgaggagatgagctagacactgttcaagatatcggccgcacatactgggccacatactgcacacactactactcacactatgactatgcaaatgctgatgcagagcctgttaaagaccttatggccaacctagtatgcatgcatgcatcactcactgatgtcaacgagatgctcaatgagatccgtgctgatgttgctgatgtcgatgcagctgacaaggatgctgacaatgattctgtggacagctacgagtgcatgcaccaccgcattcgatacc

SEQ ID NO: 7585 - DNA, 452 bp, Zea mays
  Clone ID: MRT4577_106916C.1
ccgggcgctttgctattttctttcccacactaacggaggcgagattcgcggggtcaggcgtccgcgtgactatggcgacggcacaactgggcataaagtggaagcgcaaccccccgatcccgtctctcccactcgctgtacgccagtggcccacgtggtggtgcaagaaagacaacttcccgtgggacctactccgccaagcagacgtgctacctgctgcaacgcaaggtgaaggtgtacccaaagagccacacgcaggagttcgtggagatccgagcgggagaccttgctcctcttccccaaggcatgagctgcacctgtgacatccgcgacgccgtcgacaagcactacaacttcaagtagccgccgccctcgactagccctacggcgctcgatgtagacttgctgtgctcttgcactcttaacctatgaatcttcactccagagttaac

SEQ ID NO: 7586 - DNA, 2275 bp, Zea mays
  Clone ID: MRT4577_106917C.1
tcacggcgcataaagtaaagcaagtctcttagctcttacaaccttagccacgccgacggaaaccatatctctttctaaccattcaacattgatcttggatttaggaacatcctcacgattgaccatgtaatggaaggtgacacgacaccattcgcatacataataaccgcacaggacagtacccggaggttgtttgtcaccatatggaaataatgatattgacaaattaggcttgtcctctggatgttcgccgccaagatctttccaataaaaacggtatgcattctctaaaatcttcaagaagtcattatacatagccttttccattctcagtgagtcgaagaccacgactttaccatcctttggaaagatcatgatacaaatgtagtggtcattaaagtggtgcggagctattattaagtccttgccatgttgtacatgattatacatggctcgtccaatgtatgccgccattaccttcattttctttctctgattctgtttgacggctttctcaaattcagcatcgtccaagtctttgtattcttctccatgtctccgagcaacttctttgtagcgagcttgggatatcatcaacgggtcaagaaaccctgtcttaagttgtttcttcttatcatccatgtattgcatcaagcaaaagagggttaagtagttggtttccatcctttgtcggtggtacaacgaccagagatcgtcaaagaataaatgccgcacaggatctatattatctttgctccaaaatgcatcttctgacacaacaaatgtgaagtcctcgagtttgtatttgttgctagccaccatgtaccactcatgcattctaatctccggagtcgataacttagaaagttgcactgtcgtcaagaacggcctcccattcacaaatttaggaggaacatcctccttattgtatatcgagatattggttttaagacgtaatgattctcgagtatgaatcattccatcttcttcccatactttgaaattgtctatttgggaccatgtgcctactccatgagatgctaattccgcttttgattgatttgtcataactctccgcaatttatgcaggtaacgtgacattgattctgacggtttcttgacatcgtcagtggcgattcgctgatgaattttctttgaaatagttggcccttcaacattggtgtcaacctttgcttccttttttatgtttacgtcgacattctgaggaacaattttgtctacgtcccccttgtcgagttccttcgcaagaggcgatatgattgtttcaatgatttttttggaggtcggtgtcatattttcctgcaccatggggtatgtaatgatcgaactatctttttgttgcattggtgttgaattcagcgttggtgacttatgacgcgatacacggcttaagatcggctcatcacccaacttgatgtcgcgtcgatgccaaaggaccaactcgttcattgcctcctgcaaagttatgatcccctcaactggaaagtctatctcccaatcttcacaaccactgtctgtgatttctagaacttggaccacagcatagtgtggcgggacaggattatccttgtagttaacaagtcctggttttaccaaaccagtagcagcttgttttgtttttgtcccagatcgatttattggaatatgaagaaagcaaggcttgtcctcaacaatatcgtctacagggtacttggtgaagtcttgcacagatcctacgctgctagggactataggtggactcatgtggcttggcttgagttcaaatgatatgcattctgttttcttcatcctcgtcgtctttcttgttcacccggtacggcacgcaccaatgtatccaagaccgaggaaaatcaaaaaggcagacgcccgaccctgcgacgaggcggaactcgttgtcgtagcgctgcttcagccggcccttcctgctgctggcggccaccgcgtcggacgacatggccactgctgcgcgcttgtttcgccttgtaaataggcaagcgcgcgcgattaacagggacaggacaggggatccagaggagaggcagatcgagcaagctagcaacgcacgcggttgccccaccgccagcagcagctcgggatgctgggggtggtggtggcgatgacgacgtcacgatcctatccccacctgacctgagcgaggaaagggcaagaacgcctgaactgctcacgcgaaaggaagagacgacgacaggacaagaggcgattggctgccaaagctaaaagaacggacgcgtgg

SEQ ID NO: 7587 - DNA, 264 bp, Zea mays
  Clone ID: MRT4577_106918C.1
gggggggggtgcagaaagtgagtttctgtttcaagaacagacttcactagttcagagttgcacagctagtgaggtatggagctgggctttgaatcaggtcagctgcctgaatgcccaacttcttcagcccttggaaggagagggtggggagaagaagaaggaaaagacaaggacgaaagaaagaagagagaaggggacaggaatggaagtccaaagagtgggacgaatttgatttcagaaccatctccagctgacccttgagcc

SEQ ID NO: 7588 - DNA, 838 bp, Zea mays
  Clone ID: MRT4577_106919C.1
ctggccgggactgcccactcccctccccacccctcccctcggctctccctcggctctgtcagtctcacttttttctcccagcaggccagcaccagtgcaccaccagaccgcgggaaatgtccgtatagcctcagcaataagcaaggagtagtcgggaggcaatgggttgctgcatcagcaagaagtgcgacgagccgccgggcacggcggctggggaagtttcccggcgtcggtcggaggcgcgcgacccgccgccgcccccgccggaggaggagacggtcaaggaggtcctctcggagaccccgaaggccaagccgaggcccagccacgcgagcctgaggatagtgcatctccgccgccggtgcaaccagaggagaatgccgggtccacgaccaccgcggttgccggcgacggtgaggggaaggagtcgctggacaaccctttggtggccatggagtgcttcatcttcctgtagcactaaccttctcctgacccgttctccgctgtcagcaaattactccacatagttttagcaggagtaaaggtggtggtgttggtagcagcagcaggcagtaggccagtagcagcgtaatttggtgagtaataatctcgtcgtgtaaaacgtttcccccctgggctggctttttaacccccgcgggagaaaaattactggctattcccgtagagccttcagcccgtcagaattcagatcacagggctctgacgcgctgtgctgatgtattgtctgcactctgtagagtacctctccgattgtgcatgtctacttgtaatcttctgttcctttttgcaatggcgagtcattcagagctggagacta

SEQ ID NO: 7589 - DNA, 167 bp, Zea mays
  Clone ID: MRT4577_10691C.1
acgacaacaaggccaaggatccggagttcgcgccattcagctggattcacgggcgccaggttcagctttgattaaagatgatgactgggggattcgccgactctctccgtcctcagatgatatgttgtactgtactagcatataactaagaattgattgaagttgca

SEQ ID NO: 7590 - DNA, 1821 bp, Zea mays
  Clone ID: MRT4577_106920C.1
atgtaccttaaatcatccaagaagctggtgttcatgggacacagacggttcttgatgaagcagcataagtaccgaaagatgaaagaggaatttaacaatcaactggaaagtgaaggtgcaccaaagccttatagtgggaaacttgtttttgaaattgtaaagaacattcatgttgtattcggaaagggaaaaaacaaaggagaaaagagaaagagaactgacccttcaacttacacaactttcaagaagcaatcaatatttttcaagtacctcccatactggaaggatatggaaatttgccacagcattgatttgatgcatgtaacaaaaaatgtttttgacagcatcattggaaccttgctgggcatgccgagtaagacaaaagacggacttaaatcacgcaatgatctagtagatcttcaaatcagaccggaacttcatccagtggatagtggcaaagggaagccttacctccccccagctagctacaacttgtcagttgaggagagaacaaagatttgcaaatgtttgcgtggggtcaaagtgcccacaggtttctcatccaatatcagcagactagtcaggatgaaggacttgtctctatttggctacaactctcatgactgccatgtgatgatgacggtgttcctcccaattgcggtaagagccctcgaaacagagcatgtcaaagttgtcatcacacgcttgtgttactttttcaatgcggtttcacaaaaagtaatagctttagaagacttggactatctaaaggcatacatcattgagactatgtgcaagcttgaaatgtgttttcctccatcattttttgatatgcaattggagcgatacctgggagtattaaaaggttatgtgcgaaatcgtgctcacccagagggttcaatcatggagggatacactacagaagaagtgattgagagctgtatagattacatcagtgacggaacaatgataggtgtgcctgtacctaaacatgagggtaaactatgtgggagagggagaatgggcaagaaaacttttcgcgttgaggattacaagctagtacattgtgctcatggtagtgtactacaacatctcacgatagccaagccttacatagaggaacacctgaatgagcttcgtaaagaaaatcagaaccacacagaggactggatcatgagggagcacaaacatcgtttcagcgaatggttaatggacaaaaacatcccattcggagactcttcggaagagaaaacaatgaagaatttggcttctgggccatcgtgttttgtgacatcatggcaagcatatgacatcaatgggtacacattctacactaaatcaaaagacatgaaaagtgttgcacaaaatagcggtgttcgtatcgatgcttttgacctacatggacagaagaccacatattttggattcatagaggaaatatgggaacttgattatggcccaagcatgaaaatacccttatttaagtgccaatgggtacaacatcccgtgggggtgatagtggataactacggactcacactggtagacttaaagaaagtaggatataaagatgacccgtgggttctcgccgaatgtgttgcacaagtgttctatgtactcgatccagcagatgagaagatgcatgtagttatttctggaaagcaaaaaattgttggagttgagaatgtgggagaccaagatgaggaatacaataagtatgaagagatgttcgtctttaactgtccagagagaatcaagcgtgtggaaaagaaaattgataagaacttaaagccatacatgcggaaaaatggtagttcatga

SEQ ID NO: 7591 - DNA, 4105 bp, Zea mays
  Clone ID: MRT4577_106921C.1
cgcgtgggcggccgcgtgggcggacgcgtgggtttttgttgaggagcaaaacccagtgtttgggtggagaagaaaggaactccagtgcagcaaacaccccgtgttcaatgaaatgtttaaatcggaatctttagcatatccgcagtttggtttagctatggtgcgctagttgatcacgtgatgtggaagtcgagctgagtcgaccatgagatgctgttaagcgtgggtttcttcgcaagggatactgatgaatgaacttgaagatttgcatgatcggatcaagcgcttggatgtgatatgctcgccaagtggacgtcatatactaacactaacctagtgttatcccagaccggatttgaagaaaagcttaggaattccaagatttggacttgtagtagttgatctaatttaaagattctttagaaacacagttgtctcacctcaagggataggtaatggatcgaggttggatgtacaatgtgccaagaccacatccgtcgttcattcgaaatttgagaagctttattgaagcggccaacaagcacgcgaatttgcgaaagagcaaggagatattatgtccgtgcatcgattgtgataataagatagcttggagagatacaggagtaatccaatcacatctgctaaaaagagggtttaaaaacaattacacgatatggtcagaacatggtgagttggatccgtgtgaagtgcctggtaatgacgagagagttgtcggaattttagatcttaaagttgatggtaaagtggataatgtggatgctaatcaagattttgaagaatttgattgtgaagagatgttgcgccatatggaaccagaaatgttaagttctgtgggatcgcagaaagggctatctaaaatggagggactggaaagtgcctcaaaagaacctttatatgatgaatcaaagggttgtgacaaagagtttactacactgcgtacagttctagaacttctgaagttgaaggctagcgccggatggtctgatactagcttcacagatcttttgaattttctgtctcaattactaccaaaacccaacaaactaccaacaagcacttataaagcgaagaagcttatatctcccatagctctgggtgtgcaaaaaattcatgcatgtccgaaccattgtattctgtatcgtggcgattttgagaacgcatcaagatgcccagtttgcaatgtcagtcgatacaagaagagctacaatcaagactgtgtaaaaaaattcccgaagaaaaataaaaacaagaaatccactattggacctgaaagtgacgatgacacttttgatgacatggatgggaaaaagaagtcaaagaacccagctttggtgatgtggtatcttccagtaattgatcgcttaaaacgtttgttctcaaaccctagggaggctgagcttatgcgttggcatgctgaaaatcgcaagcagaataacaaacagattcgacaccctgctgatgcatcacaatggaaaaatttcgatcttatgtatcctgagtttgccaaagaaaccagaaatgtaagatttgctttgggtatagacggaatgaatccatttggtgaaaaaagaagtgtacatagcacctggcccgtgactttaacgatgtacaaccttccatcatggctgtgtcacaaaagaaagtatattatgttgactattcttattcaaggtccgaaatcagctggtgttgatattgatgtgttcctagaacctcttatggaagatatgacaaagctctggaatgaaggagttagaatatgggatgagtattgccgtgagtatttcaacttaagagcaattatatttgttaccatccatgattctcccggtggcgccacactatcagggcaaaagactaaaggaaagaatggttgtgtagtgtgcgtcgatggaactgcttccatgtaccttaaatcatccaagaagttggtgttcatgggacacagacggttcttgatgaagcagcataagtaccgaaagatgaaagaggaatttaacaatcaactggaaagtgaaggtgcaccaaagccttatagtgggaaacttgtttttgaaattgtaaagaacattcatgttgtattcggaaagggaaaaaacaaaggagaaaagagaaagagaactgacccttcaacttacacaactttcaagaagcaatcaatatttttcaagtacctcccatactggaaggatatggaaatttgccacagcattgatttgatgcatgtaacaaaaaatgtttttgacagcatcattggaaccttgttgggcatgccgagtaagacaaaagacggacttaaatcacgcaatgatctagtagatcttcaaatcagaccggaacttcatccagtggatagtggcaaagggaagccttacctccccccagctagctacaacttgtcagttgaggagagaacaaagatttgcaaatgtttgcgtggggtcaaagtgcccacaggtttctcatccaatatcagcagactagtcaggatgaaggacttgtctctatttggctacaactctcatgactgccatgtgatgatgacggtgttcctcccaattgcggtaagagccctcaaaacagagcatgtcaaagttgtcatcacacgcttgtgttactttttcaatgcggtttcacaaaaagtaatagctttagaagacttggactatctaaaggcatacatcatcgagactatgtgcaagcttgaaatgtgttttcctccatcattttttgatatgcaagtacacctaatcatacatctcgtggatcagataaaaatattagggccactatatttacatcatatgtttcagttggagcgatacctgggagtattaaaaggttatgtgcaaaatcgcgctcacccagagggttcaatcatggagggatacactacagaagaagtgattgagagctgtatagattacatcagtgacggaacaatgataggtgtgcctgtacctaaacatgagggtaaactatgtgggagagggagaatgggcaagaaaacttttcgcgttgaggattacaagctagtacattgtgctcatggtagtgtactacaacatctcacgatagccgagccttacatagaggaacacctgaatgagcttcgtaaagaaaatcagaaccgcatagaggactggatcatgagggagcacaaacatcgtttcagcgaatggttaatggacaaaaacatccctttcggagactcttcggatgagaaaacaatgaagaatttggcttctgggccatcgtgttttgtgacatcatggcaagcatatgacatcaatgggtacacattctacactaaatcaaaagacatgaaaagtgttgcacaaaatagcggtgttcgtatcgatgcttttgacctacatggacagaagaccacatattttggattcatagaggaaatatgggaacttgattatggcccaagcatgaaaatacccttgtttaagtgccaatgggtacaacatcccgtgggggtgatagtggataactacagactcacactggtagacttaaagaaagtaggatataaagatgacccgtgggttctcgccgaatgtgttgcacaagtgttctttgtactcgatccagcagatgagaagatgcatgtagttatttctggaaagcaaaaaattgttggagttgagaatgtgggagaccaagatgaggaatacaataagtatgaagagatgttcgtctttaacggtccagagagaatcaaacgtgtggaaaagaaaattgataagaacttaaagccatacatgcgaaaaaatggtagttcatgaaaaattgtatgaatcaaattgtatttgttatcatgtatgatcgactatgaattgtggttgccaattaatttaaaatctctctagttatctatgtgtgctattataattcatttaaattgtatttgcatattattgttaaaaattaaatattaattcatttaaattgtatttgcatatttctgttaaaagttaaaattattttcatatttaaattgtattttcaattttcacaatcacagacgtttttccttagggtccgtttgtgaaaaggataaagcaccacaggc

SEQ ID NO: 7592 - DNA, 348 bp, Zea mays
  Clone ID: MRT4577_106922C.1
gctgtcctgccctgcttactcttgtcgacacaaacaccactccctccggctcaggcatcccaaggatttagaaccagattcctacaagcccggaagacagccctgtctgacaatggaaggcgcacggacggaaaacccctatgctgcctaagtggccccacgtgcacaagtgacttccttaaggaactccaatatggcactgaggagcaggaaggagtccttgacagccatcactacttacatgaatacatatccaatgacgaagcactagacagtgagcaaacccggacattgaacatcatgatcataacgaacggtgtgacaactatatacactagctatcatata

SEQ ID NO: 7593 - DNA, 534 bp, Zea mays
  unsure (1)..(534): unsure at all n locations
  Clone ID: MRT4577_106923C.1
atgttactcatatacatgtaccttgcttacgttgttcgtatttctatacattttcgtgtgaaacacatacttgacttgacttcagatgaaacagaaaccaacggttccagcgctgcggaagactgcccttcgccgtgccctgccgcgtgccgggctttgttaagggcggggcaggtggaggcgttcggcgggggtgagcgtatggcggaagtggcagcggtggccgtaggggcagacctcgccggcgaggaccatgcggcagacctgggtcttgtagcgcggatggcggatgacagggcggagctcggcgacgccgtgagcgaactggcactggtcgccgtaggggcacgcccccgtctcctcccacttgttgcacagctccgtctttaacatgccctggttgtacacctccagctccacgccgcccgccgtgcgatgctccttgggttcctcgcttctcttgtcgccgccattgcccttgtacacgcgcgagcttcggttggtggntcgggttcgacgcgcgaggcttgcggt

SEQ ID NO: 7594 - DNA, 202 bp, Zea mays
  Clone ID: MRT4577_106924C.1
gtgaaatggggatggtgacactgtagaagagctgcgaaagggggatggtgagactgtagaagaggtgcgaaaagggcatggtgtgactatagactaggtacgaaaaggtcatctagagcctactagcacggttgcaaggtttcctcaatagtggacatgcacggttccagtgttagattgatatcagccctggattcttcca

SEQ ID NO: 7595 - DNA, 1505 bp, Zea mays
  Clone ID: MRT4577_106925C.1
ttcaggttcagttgataagactgttaaattttgggaccttgaaacttttgagttgatcggttcttctggacccgagaacaaccgagaatactttgagctggctagtgtaatccgttctatgaagttcaacagtgatggtaaaacaattttttgtggattacatgacagcttaacggctgtgtggggggaacccaccatatgtcatgatgtgattgatgtaggctggtccacattagcagatctaactgttgacgaagggaaacttcttggctgctcatataaccaaaattgtgtcggtgtgtgggttgtggatttgatgagaaatgagccttatgttgatagtagtgctggatcacacttaaatggaagtataaataggccaattcaatcagatgatagcatgtcatcagtgtttgggaggctatcgatttccagaagcccagccaatgaaattggatcggatactctgcttggatgctcaatgtctggttcaaaagaaagtgctgtctggacttctgcatcaatgaggggattgtcaaagccacctggaaaaggggacctccggctctcaagatctatttctacacctcttctttctcctagagttagattgaacccaaatttcattgtcggctcgaggaatcaggcagctactgctgtaccattaccagaaccaatagtccgctttaaagcgaatctctcttcagatgctggaatgttgtctcgcaagtcacatgcatcagcagctctcatgtatagatcaaggtccaatagttctcggtatggtattatggaatcatcttccatacctgttctggccttgaggcatagctctagaaaggatgctggtcccgttcacagtgaagctgccacaggtgagttagcagatattgagcctcaaaatatagaaaaggaaggtttagttgccaatcatggcaaagaagatggcaagttggtacctgtaattgcttcaaggagctcaaagatagtcgaagaagttggctatagaagaatcaccaatgatgtaggatgtaagagagtaaccctagaaagtggtttgagagttaattcagatatggactatagaagcagagctccagaaagccacgaggtgcagcagcttatacatctgtcagaacctgctggtttacatgggaaatttataagagaatcttcaggtgctggggacaataactgttctgggtcaatatgcactgagagtgctgagtttaatgaagatgatatctggtacagggtatctggttttgataaatggaaccctgctgctgcaaggaatccagaatttgccagcatccacagaaatgaagtgattggaataagacagttgatggagtcaagtggaaagtatgttgttgacgatcgaccttcctcttctaattacgataacatccagtatgtgacaacactatacagctcgaggctgcattcttcactttctggaaaacttagtgcatctgcaagttatgaagatgatatttctggtc

SEQ ID NO: 7596 - DNA, 540 bp, Zea mays
  Clone ID: MRT4577_106926C.1
cagcgcgccgcgcgtcgtcgcctctacccaccggacttcgcgcgccacgacgagcctgcgagccatcagcccatcacccacccacccccccgccacgcagatctagggagcttaccctcccaccgggcggtcattcttccgtcccatcaccgatgcggacgccggcgatgctccggtgggccgcggcgctcgcggtcctgctcgctgtcgccgcgccggccgccgggttctacctccccggcgttgccccgagcgatttcgcgaaggtttgttcgtttcatgcggtttccctccccccttggtgccctttggagtggctgtgtaactgtgttcgtgttcagagctggatctagtcaacgggatgccggcacaggggctggtatccacagatccagctcgagggtttcttgtatgttgtgcagagtgccagattcgttcatctggtttagttagcacggttccatagctgggcttaggattcacatgttgcacctcaattcgcgcacttttctagcctctctatcgtggtttgctgttaac

SEQ ID NO: 7597 - DNA, 844 bp, Zea mays
  Clone ID: MRT4577_106927C.1
ggtaccctcgggttcggccggggttcttagtggattaatagaattggacgcgaattggacgctcgaggccggcccggccgggggagaagatggcctgcccactgctcacagtagtctagtccctgcccaccaagtacggatctcatctcaccagctgcctgtgcagcagtccaattcctcttgctggagcataccagaagcagaatcgggtgagaggaaatgggatcaacaagaacgtctcatccatctttcccggtcctcctgctcttcctcctcgctaccgccgccgccgccggaagcaacaaggctgaggaggtggacgacctccagtaccttattgacaactccgaagacatcccacccaacgaccctgacgggtggcctgagggcggcggcggcggcgactacgacgacgaccttctcttccaagatcaggaccaggacctcccagactacgagccgcagatcgacgagacccacgtcgtggtcctcaccgccgccaacttctcctccttcctcgccgccacccgccatgtcatggttgagttctacgccccctggtgtggccactgccgcgagctcgcccctgaatacgccgccgccgccgcgcatctcgccgtccaccacaaccagaccgatctcgctcttgccaaggccgacgccaccgaggaaaccgacctagcccagaggtacgacgtccagggcttccccactatcatcctcttcatcgacggcgtccccaaggactacaacggcgcgaggaccaaggacgccatcgtcgactggatcaacaagaagctcggcccggccgtgcaagatgtcaccagcgtccacgagggccgag

SEQ ID NO: 7598 - DNA, 243 bp, Zea mays
  Clone ID: MRT4577_106928C.1
ataactcataaagtgagaaggttcaagataattcttccaactgcaacttttgccttaggcattacattcgcccaatatatcacatgcatatgacaagacgctacaggtgaagaagtaatctttctttatacgattactacattgcattctcatctaggatatcctgagctcgtgataaagatgtatccttaatggagaatgtcacatcatttgcgcgagatgaaacgtggggattatttgtct

SEQ ID NO: 7599 - DNA, 823 bp, Zea mays
  unsure (1)..(823): unsure at all n locations
  Clone ID: MRT4577_106929C.1
cctcgaggccggccggggaaagcctgtggacgccagtgagcgaaaaaacgccgaattgtaccgactcccaacccgctaagatactcggctgctgcagccctggctacctcttcgtgggctctccaccgccgccgatcccacccagctcttcgggtgccgagcttcgctgcgcaagtcggcaaaatgggcttggtctggcatgggccgcgagagatgacccgcggagcattgcggtgccaggcgtgccagcagccaactccgccgactgcgtcccccacatgaagaaccggaaagtgatgaacctccgcctcctcgggcgcatctcgttgcccaccgtcagcatggtcgtcccctaccgagacttcttcgtccctgccggatcccggaacgcccgacgcgggacctaccccgaggacaagctggacaacgacatcacggaggaggcgtggctcagcacgcaaggtcccgacgatcgcacgctcgcgcaagggctcaagggtgaccccacgtacctggtggtggagcaggacaagacgctcgccacctaccggatcaacgccgtgtgcactcacctcggactgcgtcgtgccttggaacgacnccaagaacaagttcatctgcccatgccacggatcccagtacaacaaccagggcaaggtggtccgtggaccgagcccactttcgctggccctggatcacgccgacgtcgacaacngtcaggtcctcttcgtcccgtgtgtggagaccgacttcaggaccggcgaggacccgtggtggaagncatgaggatgatccgggaacagcggtgctcagtgctcacaca

SEQ ID NO: 7600 - DNA, 288 bp, Zea mays
  Clone ID: MRT4577_10692C.1
aaagttgtgggcatttgtcgtgtcatgttgaagcatcatcacagctctcatatctttcttcccctttcacaccttcttgtgctcactatcgaatccttccccgatctggaggttcgggaccatgccaggatttgcttgcggatgctatcttgtgctcctgggaaggacatgaggcatatcatgggagttggagaacaaccgtcaggtgtcacaccttctcatcctgattctttgtttgacatccatcaccgtgtcctgctctagatcttaagagcatgcctgatctgg

SEQ ID NO: 7601 - DNA, 451 bp, Zea mays
  Clone ID: MRT4577_106930C.1
gcggcacgagcaggctcaccgcccgccacgcgtgagcggtctgctgcggccattgtggccatcactggtgatgccggcagcgcgtgggctctatcggcttatggtggattgcccatcttgattaatgctgggggttttttttctggatcccccgcattgcaggcatttgccgtggcggcaattaagaatgtttcttcagtcgatgatgtgcgctccactctggtggaggagagtggtttgcctgttcttgttgacctgcttgccagtggcactgctgagacgcagaagagtgctgctctctgcctctgggcacttgcttcgatgggagaccataagacacagaaccagattgtgcaagcaggtgcattgtcgccactcctacaagcactgcatatcgcctctgatcaggacctccatgattctgtactgcgtgctatacacgcacttacat

SEQ ID NO: 7602 - DNA, 621 bp, Zea mays
  Clone ID: MRT4577_106931C.1
gaaggtttctccgccactgagtccccatctcacgcatctccttgtaccacaacactgccattcacccaactcggcggcgatgactgggcgcgtcaagagagccaagggaatggggaaggccggcgcgaaacgccaccgcaggttctccgcgacaacatccatggtatcacgaaggcgaaaatccggaggatggaccaggcaggggcagccgtgaagcgtatctccgggcttatctactaggaaacccgcggcgggctcaagatcttcctcgagaatgacatccgcgaacgcgccacctacaccgagcacgctcgccgcaagaccgtcaccgccaaggatgttgtgtacgccctcaagcgccagggccgcactctgtacggcatcgatggctgatagcatctcttccctcgtatgcagcggctgccggcggagtttcctcagtaccctctgacttgattggcttggtgtacagagttatcatattagaatacctctgatgcgcttcgttatcgggcgaaatcatgtgccccagcagcgctgtgaaatcgagatcaagatgtatctttctttggagtaatgaaatgccaaaatcgagatcaagatgtatcttttctttgaagc

SEQ ID NO: 7603 - DNA, 174 bp, Zea mays
  Clone ID: MRT4577_106932C.1
cccacgcgtgcgtggacgcgaaggtgaacgacaatgtcgtctacatcgacctggactacgagacggagatggacactgcttaggccaggtatagttttgagaagagctacgagctggctgacagacatgtgattaacatcggtgcttagcgctagggcttctctgaggtactct

SEQ ID NO: 7604 - DNA, 244 bp, Zea mays
  Clone ID: MRT4577_106933C.1
gcattcagaaacacaccgagcgaagcggactaacaacgacctaacaacaatgggtaccagagatataacccttcttgcacctgttgcccttgatgcgagcgcaacacatgcgttcattattccacaatgctcacttgctcctagtgccattatcacacagttcctgccaccagttacttcaatgggcatcgaacacctatctgtgcaagccaacatgcaacaactagcgctagccgcgagcgtc

SEQ ID NO: 7605 - DNA, 184 bp, Zea mays
  Clone ID: MRT4577_106934C.1
ctcatatacgctggcatctagctcaagaagctagagggggcacctatttgattctttggctggactgaaaccgagaaggagaaaacatatgctatgaagttatcgattgcactggaattccagaaaaggaggctgcaaaaagattttttcgtgctagatgtggatccgacactgagaaggacat

SEQ ID NO: 7606 - DNA, 287 bp, Zea mays
  unsure (1)..(287): unsure at all n locations
  Clone ID: MRT4577_106935C.1
cgacaattcctctgataaagatagagaagatagcatcacttatactactgtggactggagagattttatgtgcaatacatggcatctagaacctactcttagattaatttcttggactggaagaaagattgatccagtaggtgttgatttattcttcaaaaattgggcatttttcatgctaggactactattcctaaatggcttcaaagaggagtcatggatccactggacaaggttctgtcagttcttatcanaaagctcggtactgcactacaggatgaaaagga

SEQ ID NO: 7607 - DNA, 968 bp, Zea mays
  Clone ID: MRT4577_106936C.1
ttgggtacctcgaggccggccggagaggactgcacttgtctgcggtggtgagcagccgagaggataaggtatgaggggaattttcgtcatcttgggcgggagatgggaaagtcaaaaaagaaaaaagaaaggaccctctctttcgttacctacaggctacagctcccgtctctccgccgcttgcttggaaaacgaagaaaccctcctccaccaacccaatccagctacatccgtctgggtgaactccagggccaggagcagttcgccgccttcgttcgcatcacctacgcggttcgatccaactggcaggaaggaacgtgatggccaagacgagctcgttcaagctggagcacccccttgagaagaggcagtctgaggctaatcggatcagagagaagtaccctgacagaattccagtgattgttgagaaggctgagaggagtgacattcctgacatcgacaagaaaaagtacctcgtccctgctgatcttacggttggacaattcgtgtatgttgttaggaagagaatcaagctcagtgctgagaaagctatcttcatctttgtgaagaacacccttccaccaacagctgctctgatgtcttcaatctatgaagagaacaaggacgaggatgggttcctctacatgacctacagtggtgagaacaccttcgggctgctctagatggctcaccacaatcgggtctgccttgcccttgcttccctactgatgccctgcctcctgtaaagaagacctgccaagcaattgtgtatattctggtttcctcgctcaactgctggaagtctaaaacctaccttatcagatgtcgtcgatgtaatggacaccgtttaaattaagtaattgactggacctgaatctcgggggtcctatgacctatgtcgtttacgggtactggtccttgtaaatgctgtaacgagggcaattggattcgcagtatgctattgaatc

SEQ ID NO: 7608 - DNA, 1090 bp, Zea mays
  Clone ID: MRT4577_106937C.1
ccggccgggaaaaccgactctcggcaacggatatctcggctctcgcatcgatgaagaacgtagcaaaatgcgatacctggtgtgaattgcagaatcccgcgaaccatcgagtttttgaacgcaagttgcgcccgaagccttctggcggagggcacgtctgcctgggcgtcacgccatgcgcttgtggccttttacataagcaacccccccgacctctgttccgtaccctctctttcgttacctacaggctacagctcccgtctctccgccgcttgcttggaaaacgaagaaaccctcctccaccaacccaatccagctacatccgtctgggtgaactccagggccaggagcagttcgccgccttcgttcgcatcacctacgcggttcgatccaactggcaggaaggaacgtgatggccaagacgagctcgttcaagctggagcacccccttgagaagaggcagtctgaggctaatcggatcagagagaagtaccctgacagaattccagtgattgttgagaaggctgagaggagtgacattcctgacatcgacaagaaaaagtacctcgtccctgctgatcttacggttggacaattcgtgtatgttgttaggaagagaatcaagctcagtgctgagaaagctatcttcatctttgtgaagaacacccttccaccaacagctgctctgatgtcttcaatctatgaagagaacaaggatgaggatggattcctctacatgacctacagtggtgagaacaccttcgggctcctctagatggctcaccacaatcgggtctgccttgcccttgcttccctactgatgccctgcctcgtgtaaataagacctgccaagcaattgtgtatattctggtttcctcgctcaactgctggaagtctaaaacctaccttatcatggacaccgtttaaattaagtaattgactggacctgaatctggggggtcctatgacctatgtcgtttacggttactggtcccttgtaaatgctgtaacgaggtcaattggattcgcagtatgctattggatccgaaaaaaaaaaaaaaaaaaaaaaaaaaaaaaaaaaaaaaacaaa

SEQ ID NO: 7609 - DNA, 1570 bp, Zea mays
  Clone ID: MRT4577_106938C.1
gtttcgtgcccccaaccacccctatccgccccccgtcttttcccttttctctaccctctatctacccaccgttcccgtctctccgccgcttccttggaagacgaagaaacccccctccaccaccaacccgatccagctacatccgttgaggcccgtgcgtttcttccctgttctcccatcaatcgacctagccttacgccgaccaggggcttcctctaatcgatctggtgtctgccggccagggctggtcctctggccgacagccagtggtcgtctatctgccccccgtgcgttccctcttccgcaccctctttctagccactggaccacaacctgctccacccctccctccagcaacccactccaggcccatccctcgggatgaaccccaggccccgtaccagttcgccacccacgttcgcttctccggacgtggtccagcgccaggagcaggccgcgcacgtcgatggcggagtcgaccccgttcaagcgggagcgcagccttgacagtaggggctcagaggctactctgagcacagcagcagaccctgacctgactccaatcagtgatcaggctgcagtggggaatgaaatataagtccacggcggcgagagcataccttggcgacttgttgttctgctgctgaacgaagtagagtaaattgctatgatggaagtatagatattggtgagaagaatcagtcaagttacattgatagtgaagaaaaaccccatcggagcgagctgccagtactggaggtcactctgtgagtattacagtgaattgatgagatggcggtgtaggtggatcattcgtgacatcgacacgaaaacgtacctcgtccctcctgatcttacggtttgacaattcgtgtatgattgttcaggaagagaatcaagctcagtgctgagaaagctatcttcatctttgtgaagaacacccttccaccaacagctgctctgatgtcttcaatctatgaagagaacaaggatgaggatggattcctctacatgacctacagtggtgagaacaccttcgggctcctctagatggctcaccacaatcgggtctgccttgcccttgcttccctactgatgccctgcctcgtgtaaataagacctgccaagcaattgtgtatattctggtttcctcgctcaactgctggaagtctaaaacctaccttatcatggacaccgtttaaattaagtaattgactggacctgaaatctggggggtcctatgacctatgtcgtttacggttactggtccttgtaaatgctgtaacgaggtcatttggattcgcagtatgctattgaatccgattgctgttgccgttttattgctaaaaaaaaaacaggagcctgctccgtgggctctgcccccgtcagcgccagctagtggaacggctcaccgtcaggcacgagggccttatgtcgccggtgccattactgcgtttgggctctgatgctgatggcggcagagtctggatggtgatgggcgtgtcaggatgaatgcatggaatcctggttcttgcgttggcgctatatgggctggtctgttgctgctagt

SEQ ID NO: 7610 - DNA, 1135 bp, Zea mays
  Clone ID: MRT4577_106939C.1
gccttttacataagcaacccccctgccggccggtccggaccgtctctttcgttacctacaggctacagctcccgtctctccgccgcttgcttggaaaacgaagaaaccctcctccaccaacccaatccagctacatccgtctgggtgaactccagggccaggagcagttcgccgccttcgttcgcatcacctacgcggttcaatccaactggcaggaaggaacgtgatggccaagacgagctcgttcaagctggagcacccccttgagaagaggcagtctgaggctaatcggatcagagagaagtaccctgacagaattccagtgattgttgagaaggctgagaggagtgacattcctgacatcgacaagaagaagtacctggtccctgctgatcttacggttggacaattcgtgtatgttgttaggaagagaatcaagctcagtgctgagaaagctatcttcatctttgtgaagaacacccttccaccaacagctgctctgatgtcttcaatctatgaagagaacaaggatgaagatgggttcctctacatgacctacagtggtgagaacaccttcgggctgctctagatggcgcaacaccacggctcaccacaatcgggtctgccttgcccttgcttccgtactgatgccctgcctcctgtaaataagacctgccaagcaattgtgtatattctggtttcctcgctcaactgctggaagtctaaaacctaccttatcagatgccgtcgatgtaatggacaccgtttaaattaagtaattgactggacctgaatctcgggggtcctatgacctatgtcgtttacggttactggtccttgtaaatgctgtaacgaggtcaattggattcgcagtatgctattgaatccgattgctgttgccgttttattgcttgactggtgcctgcagcctgctgcttggtgtctgctgccgacagcagcagctagtggaacggctcaccgtcaggcacgagggccttatgtcgccggtgccattactgcgtttgggctctgatgctgatggcggcagagtctggatggtgatgggcgtgtcaggatgaatgcatggaatcctggttcttgcgttggcgctatatgggctggtctgttgctgcta

SEQ ID NO: 7611 - DNA, 294 bp, Zea mays
  Clone ID: MRT4577_10693C.1
attttgcgagcgggcggggagtcggttgctagaggccgcacatcgccatcagatgctgagcagctgcacgtggcgcccccagtgaagaaactaagcgctgacttatagccgctggctcgctagatagatcaaaccatgtatgggcagatattgaatcatttctttgtgacgctttatcatgggtgggaatgtaagtgctagaatttaatctcaatgacctattgtagatacaagaagaaagtcttgttcccaacaaaacaatacgaaaaaagggcgcccgcccgatagagagct

SEQ ID NO: 7612 - DNA, 3311 bp, Zea mays
  Clone ID: MRT4577_106940C.1
atgaatggccatctccatctcatcccctccacccctccccggctccacctcacctcactgtcccctaccttcctctccttcccgcccgcgccgtgtcctcatccgcctccccatgggccccatccccgcctacccctccgctcggtggccgtcgcggccgccgccgacccccgcgccgcgcacgcggcggcagtcaagtccggcgcgctcggcccctcctcagacgcccgcactgccaacgccgtcatgtgcgcgtaccttcgcgtgggccgcctgggcgacgcgcgggacgtgttcgactggatgcccgcgcgcgacgccgcctcctacagcgcgctcatctcgggctacgcgcgcctcgctggtggctccggctccgtcacggccaccgtcgcctccgcggagcttcttggacgcatgcgcctcgcggacgggctgctccccaccgagtacacctttgtgggcctcttcaccgcctgcgcccgcaggggcaacccgcgcctcgggacacaggtgcacgccctcgccgccaagtccggccactcctcgttgctcctcgtggccaacgcgatcctcggcatgtacgtcaagtgcggccgcttcggggacgcgatgagggcgttcgatggcatggaccgccgtgacgtctcgtcgtggaacgccgtcctggccgggctcgtcgagctggggcggcacgatgaggcgttcgagatgttcggcgagatgcgggcgagcgggaacgtccgcgccgacaggttcagtctgtcagcgctcctcacagcagcaggcgagggggttgggcagctccaaggggaggcggtgcatgctctgtcgttcaagtcggggctggagacggacctgagtgtgggcaacgcgctcatcgggttctacgcggagcatggtgcctctgttgaggacgtggtgagcgttttccagaggatgcccgtgaaggacgtgatttcgtggactggtttgctgaatgggtacatggagtttggtctcgttgacatggcactggatgtgtttgagcggatgccgcagaggaacttcgttacatacaatgcggttctcactgggttttgtcggaacaaggaaggcgtgcgcgccacttttgccaagaaggcggggctccgagggctgggtttgtttaggcaaatggtggaggatgggctggagatctcagatgtcacggtgacaggcgtgctgaatgcttgtgctattgctgcggataggaaggtgagcgagcaggttcatgcgtttgtgatcaagtgtggatgtgtgtctagtccatggagtgatgctgcgttgattgacatgtgcatcaaatgtggccgatctggagacgcgcatctgttatttgagcaatggcagcatgaggagagctttcacattgcctggaattctctactgctggcaagtgtcagaggtggtgagtatgagaaagcactttcgaccttccttcagatgtttagaagcagtggtgcagaattcattgatgagttcatgttgacttctgtccttggagtatgtggcagtctaggttttgctgaacttggaaaacaaatgcatacttttgctgcaaaatccgggcttctgagcgctcgtggagttggtaacgcaattatcagtatgtacggcaagtgtggggagttgaaagatgcaatcagtttgtttgagcggatgagttgtcgagacttggtgtcatggaatgcaatgatcactgcccatcttcttcttcatcagggggatgatatattgaagatatggtctgagatggagagatcaatggtcaggcctgattccattacctttcttctggtcatatctgcttgcagtcacacaagctcagactccacagacaaatgcagaaaactctttctttctatgccaagcacatatggcattgaaccagccatggagcactatgcagcctttgtttatgtccttggctgctggggccgttttgacgaggcagagcagcttataggtggtatgccattgcagcctggtgcattagtttggcggtctttgctagacagctgcagcaagcactccaacatggctgtgcggaggcgggccatgaagcatctgctggcattggaaccacaagacccgtccacgtacgtgctgacttcaaacctactatctgaatcagcaaggtggcgctcctctgagaacacaaggctagagatgtatgaaaagggtatgcgcaagatcccggccaggagctggacgtttcatggcaacatggtccactcatttttcgcacgggataaatcacacccacagtccagggacatatacgctggcctggatgtgctaatcctcgagtgcatcaaggccgggtacgagccagacaccacatttgttctgcacgacgtcgaggagtaccagaagaggcacttcctgatgtaccacagcatgaagctagcatcaatgtacggtcttctgatggcaggccctgggcagaccatccgcgtcgtgaagaacatccgcatgtgtggggactgtcactctttcttggagcacgcctctgctgccaccggtaaagtgatctcggtcagggactcgtctgggttccacattttcaggggagggaaatgttcctgtagtcaatagagactgccagagtgggtgccagttttgacatgtttgcagtttaggaactataggagctagtgagttacccttgtacttacatcactgtgatattcttcaggtgcctgacgcatccacgtagatatttccagagtataagttcaacaccccggttgttttagtttcagttatcttacctttgctgttttgcttttatatcatccatcgaatcgttttgcaagattcctgtctgctcttcctctggggcttgacttgccaaggccataggggaagcggcaatagggcgggcatttgaccaggcaggcatttccacagccgtccaggtccacaggccgggccgttggatgaaggatggctggcagagagagaactaaagcgaagacaataatgaggctagtcagagctgtcagatgctactcaatatgaaccatggccaccttgcttgtgctggagcatctgaaggagctcatgcatatctagttttggaaggcaatattgaaggttcccaacgtccatgtgctggttctagtttctttcaccttggggacatgtctgatagcatcgctgtcccctactgcatacacatatagtgtcgatctgctctcgcctttttccacatgcttggtcacctttgttctcatcctctcacactttcattctatatgggagcttaccggtacatggttggcatt

SEQ ID NO: 7613 - DNA, 306 bp, Zea mays
  Clone ID: MRT4577_106941C.1
tattttgttttttgttttttttttttttttttttcctttgttttatttttgaggttttatttgtgcaaaaagggggttattttagatctcttgggtgaatttgcggacgttgtatttttgcccccacccaacaaaaagggggggctttttggaaaaaaaaacccccgacaaaaaacattttggaagaatactccggacccacaaggggaaaatctttctacacggggggggaagcacaaagacagggggggaaaaagacacccttttcattatgaagacaaaaagaaaaggccttttttcggtgtg

SEQ ID NO: 7614 - DNA, 577 bp, Zea mays
  unsure (1)..(577): unsure at all n locations
  Clone ID: MRT4577_106942C.1
ggtccctcgggctgccgggacaccaaacaaacacaccaggttctctaagatacaatgatgagagtcctggcggtggtggtggccatgctggccaccgccttcttcgctgtgcccgctcgcgccgagcagtgcgggtcgcaggccggcggcgcgctgtgccccaactgcctgtgctgcagccagttcgggtggtgcggcagcacctccgactactgcggcagcgggtgcgggggccagtgcagcgttttttgtggcagcaccccgaacccgccgagcagcggcggcgtggcgtccatcatccccgagtcgctcttcaaccagatgctgctgctccgcatcgacgcggcgtgccccgccnncggcttcttcacctacgcgggcttcatcgcggcggccaacgcgttcccgggcttcggcgccccgggggcgcgcggcgggcggaagcgcgagctggcggcgttcctggcgncttcgtccctcgtgtcgtcgggcgggtgggcgtcggcgcccggcgggccctacgcctggggcctctgcttcntggcggttccgggcggctcgtcggtgccggtcctct

SEQ ID NO: 7615 - DNA, 484 bp, Zea mays
  Clone ID: MRT4577_106943C.1
gaagacttcccactggatctacgtgcgaagatcgtggtgaagatcgcagaagcattagaatacctccattcaccagcaactggtattatcagacacggctatgttgtgccatccaagatactcgtagacaataatttcatgccaaagctcaccggcttttcatgggcaaggaggcttatccaggagagtaacactactgccagcgacgacgtaatttctagtcatcagcatccatcgagcgggttcaacaacgacccgatccacgaccactatgtgtcgctaaaactgaagaccgatgtgtaccagttcggtgtcctcctcctgacactgattagcaggaagagctttgtgttttacgccgatcacgacggcctcgtctcgcagttcctcacagcttgccaggaagatggcagtggaagggcgttctttgatgatgatgttgcagtccatggtggagatgttgttctgcttgaggagatgggga

SEQ ID NO: 7616 - DNA, 525 bp, Zea mays
  unsure (1)..(525): unsure at all n locations
  Clone ID: MRT4577_106944C.1
atcccgctaggctcgtccatatctccatctctcatcccttcctctgttgtcgcagcccgacgcaggcggggccatgggtagcagagaggaggaagggagcttcatgcccagaatccagtcgccctgggcctacgcgagcagctccgcagctcgatctccccacccgacaaggacgaggtggtaggtgttgacaatggcaggccagggtcgccagatctatcaccattgttgttcttttggtcaagacggccgttgtcgacgtgctcctcctaaagctcatcctcaccaccatggctggacgctagtgaggttagcctcccctccaagcgcagagatcaggntgggnttgactaggtttggagtcatcttctcgnttaggatcctcatgctgcttgacaaggggttcctcgcaatggncaatattctcttcgtctctggtgtttcactaaccattgggntgagtcaactgcccagntcttcacaaagcctaagaatcgcaaggccatatacatgcaatattgaatt

SEQ ID NO: 7617 - DNA, 564 bp, Zea mays
  Clone ID: MRT4577_106945C.1
cactcctaagggcgattgggatcctcgaggccggccgggattttatgacgtgttccttaaatttccttctgctggagccgatcggcggacggcgggtgggacttgggaaccagccagccagccgcggggatgcgcgagggcaacgaccacggcctcattgaatggcgcgcatgcggcgtgcgcggcaggtcggcggggcacaagtgcacaaccacgccacgaactatttacgcccacggctcccatggcgcgcgctggtggggagcgccgacacctctcccatcccatggcggaccgcggcgacaggctccctgcattcaagtcagcacctgagacgcgcgcgcgcgctctctcctcggccctcgccgtcgccgaccgcgtgtcgcgtacatactcgcgttgctgcggctctgcagtgcaactcccccctcccgctgctcgagcgcgcctcgtccgccggtcatgggttggtgtttccgcgcctcatggactgtagtacagctcgtggtgcatgacaagtcgtcaacatgttctctcaaaaaaaaaaaaaaaaaatttgcggcc

SEQ ID NO: 7618 - DNA, 608 bp, Zea mays
  Clone ID: MRT4577_106946C.1
gtttatttcaccccatcgcttcctctcctgacgtgttacttcaaattcgaatcccgcgacccaccaaatccaaacaaataaactcgtcatcgacgacgacgacggctctttccttaccaatcaataaaaccattcccaactgagatttgaagcctaaggccgatggggatggaggcgagatgcggtgacctggccgtagctgccggcgcccgcgtccggcgcccgctacaaccgcgggacaccaacgtggcggcgtccacggtagtggtcggcaaggctgcgccgaagcccaaagctcatccaaagggggcgacgaggcccactttgccttcgctgccgccggcaccgctgttcccggtggtgaagccaaccccgcccgtgaaggaccagtgcgacgcgtctgttgcgggcgtggccgaagtgtcgctggcggaggagctcgagagggcgcgggagcggcgcgctcggctccgcgcggcgcgggaacagacggaacgggagatggtgagccgtgccgagacgatggagcgagcgacggcggagtgggagcgccgcgcggaggaccagcgaaggctcgtctcggagctcatgcgcctattcggggtgcc

SEQ ID NO: 7619 - DNA, 326 bp, Zea mays
  Clone ID: MRT4577_106947C.1
ttttcatttttgctaaagcaaccttgctagggggggggggaccaccattgttagcaccactttctacatttatttaagctctacacatgttaaaattttttcaccacactgatacttgcttcatttctttgcctaaatgctttcaagctataattgctgcccaattattccctaacctgttcatccattattagcttattcatgcgtaaacccagcttcttaaccctatatgctccaacaagcaatcccaacaagcaacatacctttatcacccttgtttcaacattcgtcagccctatctttggtgcagtcattggtacaaacca

SEQ ID NO: 7620 - DNA, 185 bp, Zea mays
  Clone ID: MRT4577_106948C.1
gcctttctgtcccagactctctctcccaggcagaccaagaactgcagacccaatccccagaaccatagctgctggggtaggaggaatcctcatgcttagtctgccagtactggctttaaatcccagttcttaagagtccagcctgcctaccttctccctttcagggctggatccagcagggccgt

SEQ ID NO: 7621 - DNA, 306 bp, Zea mays
  unsure (1)..(306): unsure at all n locations
  Clone ID: MRT4577_106949C.1
ctccatctttataagcaggaaccaaggtgtgtgtttaattggtacattgaaggggcaaaacaaccnnaactngaaaaacacactacttaaagtaaaaaacgacaacacaataaaaacatctatacattataacaattaacactccataacgttactcttcaacttcatcattttaatattatacaaatgtatttaccaataatagtgttaccatcttcaacctctaatcaaaccttacttcttcaaacttttcaaataaccttttgtacttgacctattataatcctgaaacagactttacaaaaa

SEQ ID NO: 7622 - DNA, 582 bp, Zea mays
  unsure (1)..(582): unsure at all n locations
  Clone ID: MRT4577_10694C.1
gtacgcctgcaggttccggnccggaattcccgggtcgacccacgcgtccgcgctgagtgggttttcggatcatgtctggtggctccgcggattacaacagagaacatggcggcccagagggaatggaccccgatggtgtcatcgagagcaactggaatgaaattgttgataactttgatgatatgaatttaaaggagtcccttcttcgaggcatctatgcatatggttttgagaagccttcagctattcagcaaagagctattatcccttgtattaaagggtatgatgtgattgctcaagctcagtcaggtactggcaagacagccacatttgctatttccatcctgcaacagttggagattgagttcaaggagacccaagcactagtattggcccccaccagagaactggctcaacaggtattgatagtgtagttcaaaaaactgcttgcgtgttgcataggtttcaggtttcacaactgtgaagaatttaaaattaaaacgtataaattgtcctagtcctgtgagagcccccattntaattgtccatgctgcagggagnttctgntgaaagctaagcagg

SEQ ID NO: 7623 - DNA, 317 bp, Zea mays
  Clone ID: MRT4577_106950C.1
cagcattcagaaacacaccacgcgaagcgcactgtcctcaacctaacatcactggcttgcggggggtgagccctgcttgcgctgctcgccctgttagtgagcgcaacacatgcgatgattatatcacagcgctgagttgattctagtgtcattatatcacagttccttccaccagatactttaatgggcttggaacatacaatcgagccaggctagaggctacaactagagcttgccgtgagcgtattacaacaacccattgcacaattgcaacaacaatacttggcacatctcaacctacaaaacatagcaacgca

SEQ ID NO: 7624 - DNA, 309 bp, Zea mays
  Clone ID: MRT4577_106951C.1
cgggcgcgaccacacgcgtccgcccacgctgtccgccacacgcttccgtgtgagtcttttttacttaaaatggcaccattaaggaggatcttaaactccaaactgatgaaactctgggggcccaaattaaggaagggttcaaaggcggaaaggattttgttgggactgtccagtctgcaatgggggaggagcaaatttgtccgtttaaggattttgtccccaataaacttctcttcttctgtaaacttaaccttactttttctaaactaaaatcgaaaattaagtgtatttctaaaggattatttacct

SEQ ID NO: 7625 - DNA, 288 bp, Zea mays
  unsure (1)..(288): unsure at all n locations
  Clone ID: MRT4577_106952C.1
ctcgagccgccggnacacgcgtcgcatgctcctgttcttccacctgctggctgctcctgcctcccctgcgccccaacccacccgcctcgccgtccccgcaggactcagcctgctctcagctcccgccgccgcctactctgagtagcctcagcggaggcctccgccgacgccgcgagatcctaatgcgttcgcaggaggagtaaaacagaggagaactacaactggtgtgacgagacgaaatcacccagaaaaactggggacgaggcatgatgacccctgcagaggcat

SEQ ID NO: 7626 - DNA, 319 bp, Zea mays
  Clone ID: MRT4577_106953C.1
aaaacaaaaaaaaaatttttttttttttttttttaaaaacaaaaaataaaaaaaggggaaaagagcggggcaaaattattttataagggggcatcttagagaaatagttataagttgagaataacagaaaatttgggagagaaaattataattgaaaaaaccaaaatgttttttgagtgagaattatatacacgatggattggacggtgactcaccacgcaaggcgcacaatatgaatatacgggagcctgacattcaaaaaaccttttttttttcccgttttggacatgaacggaacaacccaaaaattgctagtgaa

SEQ ID NO: 7627 - DNA, 275 bp, Zea mays
  Clone ID: MRT4577_106954C.1
cccccccctttttttttccccccccccccacaaccaaaccccaaggggggggtttaattgatactttcccggtggttccccacattggctggattttttctcatgaaaacattcccggggccccaaaccacccctgatctcttaaccaatataagtaaatgggagactaattcttaccacgctgaaaagggtagggcacataaggaaccccgtgaaacttttcaaaagactctcagaccgcaacaggcccaggtatcaaaaaaacttctgggcca

SEQ ID NO: 7628 - DNA, 360 bp, Zea mays
  Clone ID: MRT4577_106955C.1
aacactaacgcctacacggagggggacatggacacgatcccaaagctccgtgctgcagacggccaggcggacgacgcagtcactgctgcaccggctcgcgagaagcacacagtcatggcgacagagcttctcggcggtcgccgcagccgcgcatcaggatgcggggcggctgctgctgcaggtgcagtgattagcgtttaacggagagctcctgcatgaagttaaccacaagtccacacggtatacacgacggaacaagtgtttccatcagacgatcatcactgaagaatcaaccatctcatcactgtatgtgtgccgtgttcttgtcatttcatcgttccaatgcaacagaaacgggtt

SEQ ID NO: 7629 - DNA, 269 bp, Zea mays
  Clone ID: MRT4577_106956C.1
cctgcacctcttcatgacactccacaaatgacgaaacttgcacctgaacatatgggcaataaggtgaaccgaaaagcgatgccattatttaagcttggggataaatgtgacgtaacattggacgtactctatctagcttccgatccaggatcatatgtaagtggggctataattagtgttaacagtagtctttggttgagtcgctcgctccatattccccacgatgatctcaaggcagtctttaaagttgtctctaaaattgttaaggc

SEQ ID NO: 7630 - DNA, 239 bp, Zea mays
  Clone ID: MRT4577_106957C.1
acctgtcactagcgaagcataattcgtcgagcatacacttgctattatcccaacgagttcggttcagtggtttactctcagatttacgcacagatatatcatggcatcatcgacaacaaattcgcacgtgattcggcacagtagcatcctgttagacgcgttctcgctcgaactcagggagcctttcaacatgttccgctccatcatggattctgagggttcgtccggctccggtacag

SEQ ID NO: 7631 - DNA, 403 bp, Zea mays
  Clone ID: MRT4577_106958C.1
gccggccggtctccggatcttattgttgctttaaaatgtactctaacatcctcgctcgtactgccatgcgctctgctgcttctcgtcaactcgttcgttctgatctctatcacttctccaactccaatggacaaaacattcctttcaacaccaagaacagagctggtcttgctattaagatgacattgtacctcggtattggctttgctgctcctttcctcggtgcttggtggcaattctataaggctggttaaatttttagtttacgaaagctttgattcatttacacagatacatactcacactcacacacctacacgtcttatacaatgataatattaaaggaggaaataaaatcactgcatcttttgtattaaaaaaaaaaaaaaaaaaaaggccccta

SEQ ID NO: 7632 - DNA, 299 bp, Zea mays
  Clone ID: MRT4577_106959C.1
agagtctgtacttggagctctctctatatacgcacgacgcggcggcgccctacccgcggacctgtcgactgctctgttaccctgactgttccatccatgtagcttactagggcttatctccggtggcgagacagtgctgagtcttacggacccgacgtgtgacagttacgctggcaaggcaagcagactcgagtcggactaccccatgcgggaagtgtgtgtgccagtccagctcgaagagggtgagggcccccaagcgccttggatccgggtggaactttcagggcgtcccttacttg

SEQ ID NO: 7633 - DNA, 338 bp, Zea mays
  Clone ID: MRT4577_10695C.1
cacacctccccctccgcggcgggatataattgttgcagggggagtaggaatcaacgatcacacaaattaatctccaccatttggttatacaatagtcttaaacaaaatcctcactaatagaaaacgcctccccgccagtatcgtcttccccttcatactaatgaaacccccactacaacacattaccacaaggctcaggcagctacaaaaattccaaaacatggtataaatgagaaaaaatcacaaattgcccatgacaaccacttcaacatagaaaccctccaccgtccttatcatcccctttcccaccggttttccacaaaaccaatccttaccag

SEQ ID NO: 7634 - DNA, 236 bp, Zea mays
  Clone ID: MRT4577_106960C.1
tattgacgagaatcaacgcggaacttatgacttcatctacctgccaattgattttagggatagatgtaacgcgggatatgcattcatcaatatgacagatccactgcaaatagttccattttacatgacattcatcggcaagaaatgggagatgttcaatagcgataaagcggcatcacttgcgtacgccagaatccagtgaaggaacgctatgagtgctcattctcagaattcta

SEQ ID NO: 7635 - DNA, 386 bp, Zea mays
  Clone ID: MRT4577_106961C.1
gaaggtcatgaccctacatgtccaacatttttcagaccgtactcagactgattctgggggtactttcaaaacctacacggggatgtcacatgccattctctgtacgcgagttgtcaattccgaaagacaacgttcacatgtacatagctatacgctgttcgcacttacgtacccacagtctaaaatgttccctgctgtcagggaaaagagtgtggtcgttgcactgttctactgttcaagatgtctgatatcatgtacaagatacagacacttctgagtgtagcgaccttgttcccacctgagctcttaaagctagacacgctgagtaactatggatggaactcaattgattgaatactcatttatgactatgcgaagactgaaaa

SEQ ID NO: 7636 - DNA, 773 bp, Zea mays
  unsure (1)..(773): unsure at all n locations
  Clone ID: MRT4577_106962C.1
tcgaggcttggccgggaaaaaggtcacccctctacaccacgccgccgccgtttgctgctcggcgcctctcctcacaacccgtacgccaacgtctccaatctcgtatactttcgtgctcagcgtcatggacggcttccccaagagcgtcggcggtggcggccctaacattccggcgggatcccaccccgcaggcgggagccaggcggcggcaggaggaggcgcgacgcagcggacgcagtaagtctgtccgcctatgttcggttcttgcgttcgtggttcagatcgcgacttcgcgttactttgcctacccccctcctcgtcctcctccttcgggtgaagatttcggtgcttccggtcgcggttcagatccctactttgcgttacttcgctccgcttcttttgggcgaagatttgagcaaattttgcggtggactattagtcgaatattgagaaaattgatattttaggaccgataatattaggtttcgcatatttatgacttcaaacgttggctttgcaaaattagtacttatatcattgacatcttgattaatacgacatcatagtttatttcttgttttctaatccgttttctaaaatgcttgccatctaagatgactcatgtccctgtgtcagctgctacgcttagagtgtgccagganaaattcaaaaaaaataaacaaaaaatagagatcaacatgacttgaaccttgactgccaagttcaaaaaatagtacttacaccactatgctaaactaacctatatgatctta

SEQ ID NO: 7637 - DNA, 350 bp, Zea mays
  unsure (1)..(350): unsure at all n locations
  Clone ID: MRT4577_106963C.1
attcaagataaatttattgttgntgctcaatctacatctgaccgtgaagggtcacttttacgaagggccgtacctcaaggaacgagctggccggtcacacaagtcctaacccaaaatattgacagttaggggcggaactaggattacaatataaatggggcgacaaaaaaatggctactaacgatcaacagtgcaaagaatactggacctggcttaacatacgaaacgtgaattccgcttacgcacaaaccgacacgattgaccgtccgaacgcacgcggatccagcgcacttacccgcggattcgcccacctggcttctgtgcacgcagggcacgtcatgccgggtacg

SEQ ID NO: 7638 - DNA, 466 bp, Zea mays
  Clone ID: MRT4577_106964C.1
aattaaacactcgggtttaaattggaagactcgaactttaaactcaaaaccatggcaaactcattaactttaaacaaaaaaacatcagtcccgttgttttaaaaaaaaaggtttatggaaaaaaacgggcccccctcaaaaataaactcaaaccaagatgttaaaaaaaaactcagctccaaacaacatttttgtaataaactaaaagggaaaaacgggcttcccagcaaaaacttgacaagctgacccgttgccgttgcccaatctaaaaaactgaactttaaatcttgtggaaagccacaaggtcgaaactttggacgaactaatggaggggctctggggaaggggggccctaaattaaaggggcgagggacacaaaatcgtcgacaatggcaaacatgaaagtaattttttggaggccgtatccaacaggcacaagctttgaggctcccaaaggaaaaccctc

SEQ ID NO: 7639 - DNA, 353 bp, Zea mays
  Clone ID: MRT4577_106965C.1
cccacgcgtccgcggacgcgtgggctcaatgcccagctctcatcaggagctcaacaagctgtaggatgctgagagcacccctcctttcagaggcaagggacgctgcgggccgcttgcgtggcgtctcgggcttctcgacggcgtcagctcccatcccagggctagccggcaaggtcgccgtcatcaccggcgcggccagcggcatcggcagggcgacggccgccgagttcgtccggaacggcgccaaggtcatcctcgcggacgtgcaggacggcgcccgccgcgccgtggcccccgagctcggcccggccgcggcctacgcccgctgcgacgtcacggacgaggcccagatc

SEQ ID NO: 7640 - DNA, 332 bp, Zea mays
  Clone ID: MRT4577_106966C.1
gtgttgagaaatgttcaagattgtgaaattcttgtggtttcaaagataggctggagtttttttaatgaagctatgcaggtgcactcagcccctgggatgtctaaacaatatgggatgggaactgtctgaaagatttaaggggggttttttgacccgttaatttgcttaggccaccagcggccagtcagcccttagaaaacggtggcttttaggacgggctgccttgccatttgaagtgccagcattggaaccatttcggcattcttcgactgggggatgacccacttgtttagggggccaatcattatacttaaactggtaatttgaaaagg

SEQ ID NO: 7641 - DNA, 158 bp, Zea mays
  unsure (1)..(158): unsure at all n locations
  Clone ID: MRT4577_106967C.1
tccgctnaacccaaaagggagaaagatgtatgaaccttgtatataatatcttacctaacacggccctttcatttttatgagcggtcgaggnctntaaaaaannaaaaanaaaaaanaaaangcaatcacaaattnactaaancttttcatttttcctc

SEQ ID NO: 7642 - DNA, 555 bp, Zea mays
  Clone ID: MRT4577_106968C.1
gggatttattcccacggggacggggatgataagctattccccaacggggaattccctgttgccatcactaactgcaagtggctatatagaatcaaatggaagacagatataacactgaacaaatataaagcaggctggtggtaaatggttttaaggtagattatgtggagacattcagtcttctggtcaaatcatctactatcaggatcattatgggatagagccagtgtgggaggctctcgcatgagtgtgttctagggaaggataaaccgaggaaaccctttcatcagcaaatgttgtacaaccacagcttaatcatttaatagatttcctgtgagacaatttttatttctaattccatggtgtggttcgaacttgtgaaaagtacaaagctcatattgcttaatgatggaaaaaacacaaccatgcttgagttgggtgctataaattcatgatatggtttaatgtcataggactggactggcagatagaagtaaatcgatatttatctcttgtacgagttgtgctaagaaaatcatttttgtgatcatttac

SEQ ID NO: 7643 - DNA, 1435 bp, Zea mays
  Clone ID: MRT4577_106969C.1
agccgggagtctcctctcctcaccttgccaggaacccaggaggaggagggatacagcctgaataacctaggtgcaaaggcatggtgtggaatgtgcaaatctcttaaaagaatcccttcagtccgcagagactatagggaaaaatattggcattagcacgactccaaccaggttgtctgccatagttttgctggagggacaaaaacagaagcgttcctgactctacctcaaggatgagagctgcgtcctccacggtttaccctgtctaccttagcctccaccgccaccccaacagccaccaagcctcttttcgtccctcgagagcaaaccatgacaacacccataaatgtaccaagccacccaaagttcttagacggtctctcttctccctgcctgcctcatttcttctcctccacacatcctcctcccttgccgtagatgacgcaaacatgccatctacctcaacaattgacaccacgatcacagatcgcatcttcatggacttcagcgtctgtccaagctactttcgctcagacagacctctaggagctgagctttcctcgtgccctgattccgagcctcttggtcgtgtcgtctttggtctctatggccggcttctccccgtcactactgccaatttcaaagctacgtgtactgcagctgcatataggggcacccttgtccacaagctccttcagggacagttttttgctgctggtcgacaaggtcctcggcatgacaagggtgaggtccagcctccctctggcctcgttaggaattctgagactgttaaccctaaagcgttcgagctaaggcatgcaaggcctggcacgctttcgttatgccttggacagaatgacgatgatgacgacatcaagctcaaccccaattatcacaatcttgaattcttggttactacagggccaggaccctgtcctgagcttgatggccagaacatcgtctttgggactgtattggaaggaatggatgtcatcaccagcatcgcaaccatacctacctacaaaccagctgaaaggatccgcctcttcaacggctttgcgcagttgattggtgatggaagggctcaaactgcccgggctatgtgggaccgcccgcttaagaccgtgtatatcagcgactgcggggagctgacagtaaccaaaccatctctttcccctccaagcttgccatgactgccagtgtaatgacactacccacatagccagttttctgtctctgttgcttgggtcctctttctgtactctatatatgcagtgtatatattacctgtgttattaaacttatgcatgttccatgagctgtatatatatcgcttccgttgttaatttatgcatgttccctttgacaatgactgtacttgatgagtacatggatgttaattatatggtcaaggcctaatcaattatagagtcct

SEQ ID NO: 7644 - DNA, 307 bp, Zea mays
  unsure (1)..(307): unsure at all n locations
  Clone ID: MRT4577_10696C.1
agacgggaagtantagagtaggatatgacgggtgatgcgttgggtaccttgaattctgttaaagttattgatttggttgaagaatcgacctgtcccgatccagatcaagacctgaggtatggacgcaaacaggcaccctagtttaactcagcagctgctggctgcggagcactgagctcagcataccgtcaatgccgctagagctgtcatgtcatctaggctcatgcatcctatacatgtaggctaaccgtaaaatatccgtataccgtgcccatatggacgcttaattttagagtaaggtttgctc

SEQ ID NO: 7645 - DNA, 301 bp, Zea mays
  Clone ID: MRT4577_106970C.1
ggggagctccatatcccatccacacagctagctagcgtacagacgaataatctcttctggacgtcactagctaccaccagctagcaattcaaccgctctgtcctgaaaaatggccggacgctcctcctcccagcagctgaagcgcggcggcggtcctggcagcggctctggtgctgctggcgggggtggccgtgacggcgtcgccggtggtgagcgggggagaggagaccacgtggtggcgcgccgcgcctgggttacgctatgggcagagtggtcttgcctctccggggcgtgccgcagc

SEQ ID NO: 7646 - DNA, 770 bp, Zea mays
  unsure (1)..(770): unsure at all n locations
  Clone ID: MRT4577_106971C.1
cgaggcggcggcgtggcaggccaaggcgctctccgagcaggccgccgcggtcgccctgcacgcgcagctgcagcaggccncggccncggcgcgggcgtcggtcgaggagctcaccgccnccgccnccgcgggcgacgccggcccggcggagtcgtcggcgtcggcgttcgtggaccctcgccgcacgaggccgccgccagaccacgcgtgcctcgcctgccgcctcaggccggcctccgtggtgctcctcccctgcaggcacctgtccctctgcggcgagtgcttcgccgccggcgacgccgacgccgccatgccgtgccccgtgtcccacgccgccgggacggggagcgtggaggccatcctctgctgagctttccccgcctctcatcatcgatcatccggccgtccacctcgtgagccggtgagtgcatgatgtgcaggaacccatcaatgccttcccaagaaattgaggagaaaaaaaaaacgtaggaaagctagaactttctcttttttaatttcttttttctaagtttttgttcatattaatttcgactcctctgccctaccttctatgggttttaggagaattcaattgataagttcattgttaatagtaagcagcaaatgcggcagatgaaacgcacagtgaaggaacaatataaccctccaaaaaaagggggggcgccccttttaaaaaagcaaaacttactaacgcgggattgcaacgtcaaattttttttttagggccccctaaatcaaattaatgggcg

SEQ ID NO: 7647 - DNA, 294 bp, Zea mays
  Clone ID: MRT4577_106972C.1
accacgcgtacgagatgactccagcgcaaacgtacaggccatgtggtgattggtgtcttcgcatggatgccggtgagatcatgccctgagattggcctgaaggtactgaccaagatgagaggtgctctatatacctacagttctgaaggaccatttacagcgtgtacctcaagcttaagatcatgtgagaggaggcagctctggcgcacgggctatataactgtctcgacgagttgactatcatttcacctttgctgatcagccccatgcagctcgcgacggtcaacacgacca

SEQ ID NO: 7648 - DNA, 296 bp, Zea mays
  Clone ID: MRT4577_106973C.1
tggttacccccgccgatccggcacgtgagggcaccatgattcaggcagcgccggtgatgctgatgcttgaccctgaagagcgcgtgtccagacgaccggcgtaagatatggaccatcggagcctattggagctcatgggaggatgccacgaccaaagatgaactggagtgacccgcctccgctcgcaagggagaacaacctgagccgtgaggccaatcctgacggcggaccaaagaagatgctggcgcatacgtgtggcagtacatgaaagaggaggcttgatagcgcgaggccta

SEQ ID NO: 7649 - DNA, 169 bp, Zea mays
  Clone ID: MRT4577_106974C.1
caaagaaactgattacgaagcacccaaaccactgataacttactaggccgaacgaaccagggccctccaccgtcactggaaagacagggacagcccacgccaatcttaagggaaggaactggaacgaccagcaccggggccaacaagctgaaaaccggaaactcccacg

SEQ ID NO: 7650 - DNA, 1408 bp, Zea mays
  unsure (1)..(1408): unsure at all n locations
  Clone ID: MRT4577_106975C.1
gnaaaaggagggcctctcttttgtgccaatagtacacaaagtattatctcgaccncacctggaaagtgtctattcttaatgatggatctgttgctgttgaagttggaggcattgagttaggccaggggctttggacaaaagtgaagcagatgacagcttttggtcttggacaactctgtcctaatcgaagtcaagagctgttggagagaataagagttattcaagcggatacattaagtaacgtacagggagggtggaccactgggagtaccacatcagaatcttgttgtgaagcagttcgtctcgcatgcaatgtcttggtcaacaggctgaagccagtcaaggagcaatctcaagaaaagcaaggcaatgtttcatgggatgaacttatttccaaggccataatgattggtgtagacttgtcagcacgagaatactacattcctggtccttctggttcttacctaaactatggggctgctgctagtgaggtagagattgatcttctcactggagcctccacaattgtacgaagtgatcttatatatgactgtggccagagcttaaaccctgctgtggacttgggacaggttgaaggggcgtttgttcaaggaataggctatttcatgagtgaggaatatgtcaccaactcagatggattgcttatctctgacgggacttggacatacaagatcccaactgtggacaccatcccaaagcagttcaatgtgaagttacttaacagtggattccacaagaaacgcgtgctctcttcaaaagcatctggagagccaccattgctccttgcagcttcagtgcactgcgcaacaagagaggcaattagagctgcaaggaacgaaccgcactgctctgggtccaaaccttcaccatcccattttgatctggaagttcctgccatcatgcccgtggtgaaggagctgtgcggcctggacaacgtagagaggtacttggagagcctgctgagctccgaatgaaaagcctactctcaccgtcagcacctgttacccttactcccttagccgtgcaataccagacgtagatagcataacgatagcacaatacgcgattgtgccgaagtcgacagagaagagagaatcatagctgtcagatgatatcaccaggtcttttgcacttacgtcttgtcagcgagaacattttgggtttcgaacaagacagacttcctctgtgtgtaaaaactttgggcatacccccctctcatctccattggtgagattggtgtgtacatgctactgtagttcagagttcagacagagtgacccggatatcatagcagtacttgcagcgatggaactgagattatttctatattctttggccaaaaaaaaaaaaaaaaaaaaaaaaaaaaaaaaaaaaaaaaacccccaac

SEQ ID NO: 7651 - DNA, 834 bp, Zea mays
  Clone ID: MRT4577_106976C.1
cggacgcgtggggccgcaccctcaaatcccgcgggcgttaaactctttctcggtcaccgtcaatggaaggtcccagatctcttctcgccattaccgcgcccgccccgtcaattcccatatctcttcaataaggccgcccgcggctggcgcgacgtcgccggccatggtgcgggtgcaggagaccgggccatggcggcaccggcgccgagccccatccctggcgacgacgcggcatcaagccccggtgacggtggcccctgcgcagacgcggccaccggccttagccccggtggcggcgcgctgcctcaccgcccccagcgtaggaggacgcgtcggtggctcggtgctatggacgcgttggtggctcggtgctatcgacctcgctgtcggatccctgttcccgctgtcgctcgtggcctgctccaccagcacgcaggcatcaccctcggccacggcctccaaccaccagccacgcttcgccgctgaccccctcgcggcggcttctgttcggtccctgtcctccacgccattctcttcctaacctcgccttcaagttcatgtccccgtcgtcgcccatgggcctgctccatcggcccgtctcgccctcggccacggcctccaaccgtcggccctgtttcaccaccgaccgcacgccctgccctgtgccagctcttgccctcccctgactcgtcggccccgtttcgccgccgaccgcacacgctaccgtgcgccggctcctgccctctcctgacttggtattcgtggttcgagcaagcaccaaaatcacaacattcttgcattatggtaactgcaacttttgttagaatttctgtc

SEQ ID NO: 7652 - DNA, 253 bp, Zea mays
  Clone ID: MRT4577_106977C.1
ttttctgccacgcctacggtgggctggtacagggggttgcatactacccattggctgatgtatctagactgtttcatgaaatactcaagacaatctctttgttgatcatctggacacttacactgtgtattgctaagctagtcctgaatgtttactcgcgtgcacccttgctagcatgatgctgtgatcttaaacagacaccaagtgcccacgcttttggagaccagaaatggctcatatggatgggctcctt

SEQ ID NO: 7653 - DNA, 368 bp, Zea mays
  Clone ID: MRT4577_106978C.1
aaaccagcccttttaaaagggccattcatactttgcacgggtgctaaaattacaacgcttttaaaattcaaatacatacaagggggacagtccaagccaaattttttacttttagtttttccggccccgcacaacaaaccaataatgtttgacaacccattttacaaaccaggtgttacaacaaacacagggggctcgcacatggattggggccccaacatacaaaggggggggcctttccccaagaagactttagggccgatggaaacaaacaaacgttttatgcaaatctgccacacattttttgggaattgggggggacattttttgggactaggtaacccccaggaatttttgaaaccctaaaa

SEQ ID NO: 7654 - DNA, 333 bp, Zea mays
  Clone ID: MRT4577_106979C.1
tcgtgcccaccagcaggtggccccttgctggcggcggcttttcgggcgaccgatctaccggcggcggcaccatgttgcttatcggcggcgagggctttcaacatattctgggtctggtggacaccaacctggatgggaaggagaagatcatggtccccatgaccctcataaagggtggtgggcgccggtttttcaaccttgtttgcaagaagggcgacattgacatgaaccagagggcccgtgagctgacccctgaagaggttgagcgcctggtgaccggcgtgggccacccttggcaggtcaaggtgcccgactggtttcttaacaaggagg

SEQ ID NO: 7655 - DNA, 456 bp, Zea mays
  Clone ID: MRT4577_10697C.1
ggggcactcccaaggcccccattgaaaggggggaaattttttccgtttcctttagggggcccggaaaaaaaaaacgggttcctaaaaacaaatttttaagggggggggggaactaaattttcccaaaaaatttttattttccaaagggaaaaaaaactaattttttttgggaaaaaaaaaattttttggaaaaacgggggggaaaaataaccctaaaagggggaattatgccaaaaaaacttttcagtctaaaaaggggaacatgccttccaaccaaaaaaaatggccgccttattctaaatttttttttttttaaaaaaatttcactggcgggggggggaaacttattaaaaggggaaagcaaaaatttcccaaagatttgggccttttcgtttaatgccttggaggggcccccactcaagaaaccccattttacgtgggacttgggggggaaaa

SEQ ID NO: 7656 - DNA, 307 bp, Zea mays
  Clone ID: MRT4577_106980C.1
aattaatgccggttatgaattattgttagagcggacaagtcacaacacatcatttattggttgacggtatggaactcaggctaccaaaccgaatacaaacacaggtaataacagcacacctttcaagatcatggcacgggttaaagtacagatagatacttggctaaagatcctggtaaaaggatgcagtctgcagtgtcaaattcagctgaggactcatgatacacaaaccttgatggttatgacacgttctccatggggctcagtctctgctaacgggcaaagcactctaaagtgcaccttacca

SEQ ID NO: 7657 - DNA, 315 bp, Zea mays
  Clone ID: MRT4577_106981C.1
tcctcctttttttttttttttaactatttttttgggggttttttttataggattttcggggaagcccccccctacttaatttatatccaaatattagcttttcaacagtgtaaaaaaaatccaaatacttaagggtccggcttttttaaagggttccaccaagacattaaatttttaccctttgttttccacaaaacttttttaatgtgttttttttttttcccattcccattttcaaaaaattaattccgaaaatttccacttatccattattattaaaacccccttatttgcaattttttgtccaaaaggaaa

SEQ ID NO: 7658 - DNA, 713 bp, Zea mays
  Clone ID: MRT4577_106982C.1
gcgaaccattctgatcctgcaacccgtggcgccgccgccgccgcatcgcattgcccggacgccaaaacctagctcctgaactctcctcggctcctcgcccacctctcgctagccgttcccgctctgcagtctccgtggccggacgccgcggcgacatggcatcgacctgtttccgcgccgccgcccgcgtggcctccgccgccggccgctcggcggcggccacccgatcggctccctccgcggcccgtgccgccgccgccgcccaccgcgcctcgtccttctccaggatgccggtggagctcgggtgctgcgcgggattgtcgctgctgccgctgcacagcgcggtggcggcggccaggctgacgtcgcggctgagcacggcgtcgagctgccgtgctctctctcaggagatgggtctatccgttcgaaggtgataaatcgctggaagacttgctcatgtcatgctgttggactcaaatcatttctatagattagtcatctaaatgaacatctggagcactacacttcatcaccccttcgacaatcgtggctatcttagatttttttcccccaaggttttgagttcatgccttgtgagatatcatttgatgaaaatatgcaaggacggtttgccgacgtctgggctgtattcagccagtacaattctgcgttaaaaggtggttgatgatacctgaggattgtcattttgcgtt

SEQ ID NO: 7659 - DNA, 437 bp, Zea mays
  Clone ID: MRT4577_106983C.1
tacaaactaaatgccgaggtttaaaaaaactcaagaagcatgtgctcttagctaaaactggttgtatgaaaactgatgtggctttaaacaccgtagaccagcttttgtctaaaccaacttatagaaactagatataaaaactggattcttaaaagactagtagattccaaccagggcctgatgagacttctaaacttgatagccaagctgaagaaagggtgcatcgaacctacaagcttagcaaatggcactacagctccaggatattctggtgcctccatctatagggagcgtcctatgctttatcttcaaataggtgtgtagcggagcagtgcaatcaacttctatgaactggacggctctgataggaccttcttgcttgacattactgactgtgagggataaacagatggatgctctaatttcctactgactgc

SEQ ID NO: 7660 - DNA, 1212 bp, Zea mays
  Clone ID: MRT4577_106984C.1
cccacgcgtctgcgtcttcctccaattgcagacgaacagtgggatatccccttaccaatggccttccaccccgccacgctgttcctcctccttgtcctcgccgccgtcgcgccgatcccctccaacgcgcgccacatcattactttcgccccctcacgcgcggtcaatcccgcgtccctcgcttgggaccctacggcgcagcactttgtcgtcgccggcggcggcgatgccgtcctttccgtctcagacgctggggtaaccgaatcgatcgtctcctctggcgcctcttgcgtcgccgtcgacgaccggcgacgccgcctcctcgtcgcttccccgggatccgtctccgcgttcgatctccgctccccgcggccgcaccgcctcatcctctcgacgcctgttgcggaccccgcccctccgggcggcatcgctgtggacccgcacaccgggaacgccttcctcactgtgggcgctcgaatctacaagctatccgtagagggcgagctcgccacgctcgcatccgcgccggcgctcggctccgtgcccctagcctcgctcaccgcacacgtgagccgaggcttcctgctcgtgggccagcccagctcgggcagcgtcctccgcgtggacatggaggacggcgccacgaggaccgtgtcctgcgccctcacgccgaccgccgtggcggtccggaccgatggggcggtggcggtgggcggggccgcggggctgcgcctcgtcgtgagcaacgacgggtgggcttcgtgcggggtgcgggacgaggccgcgcccgcgcccgacggccccgtggccgcggtggcggtgcgggagcggcgacgggtgtacgcgctggttggggcggcggcgatggacggggacaacaagtggcggatcgaggaggcctcgtggaaatcggagtcggagggggagatggtggtggtgctcgtctttgtcggcgtcgcccttgccatcttcatgttctggaggttccagatgcggcagctggccggcaacatgaacaagaagatcagatagtagtaacaacgcaatgtctccttccttatgctgccgtagttggtgtagctagatacttgtggattaggcacgttacttgtatctatatatttatgagatcttagttggatagttcttgataagtgaaggcaaaaatcaggagaaccattgctcctcgttagctactgtacctgcaaattt

SEQ ID NO: 7661 - DNA, 498 bp, Zea mays
  Clone ID: MRT4577_106985C.1
tttttttttttttttttccatgatattgctagtttattatcatcgccggtaacaaaagactgttcatatgaatgaatcttcttcgggcagtacatagtacggcgatctcagaccacagagcgggatcgatcaatcacccttgcctttactgaaacaacaggcaagcaggaaaacaagagagagagagagagagagagagagagagagagagagattgccactagaaccagccacacggtgtgctcatcctgtatgtacacagcaagagagcaactacgcctaaactctaccaaaacggcacccatggagtgatggagatcggtctagtcgctccagcgaagcagcatgacgacgcagcggcggaaaatgtagaacctagcccttttctccctcaaggctctgttgagcctcccttgtcgtcctccgagcttcatggtctgatcgagaggaggtttggtgcagggaagatgagcgcagagctgggctacttgcggtatg

SEQ ID NO: 7662 - DNA, 734 bp, Zea mays
  unsure (1)..(734): unsure at all n locations
  Clone ID: MRT4577_106986C.1
cctcgaagccggccggaaccatagtacacgagcgctccctgtgagttgctctctcagccgacgacaccgcctctatgtctctcttgcctcttctctcacccctcacatctctcctctctgaccggaccgagcaacagtggacaaacactcaagtgcaccccgctcgtcaatttgactacgacgattcctgacctagagaagacgcaaccacatggatgcacctgacacgcatagctctgatggcccactcaacggatgacgactacgcgaccagacacggaggacgtagcagcacacatggcagaaccagccgtgctgatccgaagtccacagagcaccctctaccctctggtctgtgatctgcagtagcggctgcttaagactcagctctgccatccacttcaagatgtgtactagcgaccaagtcaagtcgatgtatcaccttagcccatggacgatccccatgcctgagacagattgacctccgatggagacgaacgaagatgtactgttgcaccatcatactgaatatgtagacgatgctacgccatgctttgacaatgaactagccatcgtgttctacaaattgnaggatgagctaaccatgataatttgccaatgaaccagacgaagagatctcgtctaccgtggcagtgcgataaagaatgatgttgtcacggacactgtctacttcaatgagtcacagagacaggcaaataaaaaggagaattgat

SEQ ID NO: 7663 - DNA, 1096 bp, Zea mays
  Clone ID: MRT4577_106987C.1
aaaccgaaggcttgttggtaagtgcaattaatcctgtgaagtgtcagtctaatttgtcaactgacgttgagatcaattaccgaatacaaaaggatgcccaacaagagatctcaacctccatggtttcacagtcattcggtcagtctgatatagcttttaactcaattgattctgcaatcaacgatggtgtcatgttgaatagaaattcttgcccccctgcacctccgcagagaatgcggacattcacaaaggtctacaagcgtggagctgtaggccgatccattgacataggcaggttctccggatatgaagaattgaagcatgctgtggcccgcatgtttggtatagagggccaacttgaggaccgacagagaataggatggaagttagtctacacggatcatgaggatgacgtcctacttcttggtgacgacccatgggaggagtttgtgaattgtgtgaagtgcattaggatcctatccccccaagaagtgcagcagatgagcttagatggtgatttggggaacaatgtcctctccaaccaggcttgcagcagctcagatggtgggaatgcctggaagcctcgccgcgaccagaaccctggtaacccttccatcgggttctacgaccaatttgagtgacctgatcacggaaattcgagatgagaattatagctgcaaaaagcaaccagtgtccagccatctacagaattatcgccacggaaagggtaagcagatgcaggatgctgtagacgtcttggcttttatagttgggagaggaaatgctcctcagattagggtatgttctagatatatgtgtagttttctttgttttgaaacaatttaggcaagaagaatgaaacttacctagagctgttgctgagtcgaaacatcagacaagatggttaggcaaaacctgaacttcagacagagtaggcagatctgaagataaagtattttgattgagagtattttgtaattctgtattgaactgccgctggggtttgcttgagacccatgcggcactatatgagtctctcagttcagaaaatactgaagcagatctaagaggtcctactgattattactatttgttt

SEQ ID NO: 7664 - DNA, 354 bp, Zea mays
  Clone ID: MRT4577_106988C.1
gggtcgacccaagcctctacacagacgcctgccacgcgtccggtcgtcatcacactcagcccgccttcacgcctccctcaccaaatatagtcgcgccctttaccgacattcacaggggggacaggaaatcaaccgtcatgtcctcgattccagcgacgaccttcaccgtcatcttatacgtcatcatctgtgccacagcgggcacagccgtcaacttgtacctcctcgactacgtcatcaatagccccttcgactgcgacacctgccacgccccgttctcgaccaatgtcatcgaatatatcacggtctccaaagttcggctggacttcacacagttcggtaacgacaagctcg

SEQ ID NO: 7665 - DNA, 221 bp, Zea mays
  Clone ID: MRT4577_106989C.1
gtggccgtcggcctggcttccaattacaggcgaaagcggggccctgcggacaccaaagcgccaacaatggggtccggatggtgaacaaagttccagacaacaagaacgggaccaagcgcctgggatgcaaacatggggggggcggcaagggcaaaacacaaaatgggggggttttttaaaagccccccccccacaaaattccttttaaaaaaaaagggggc

SEQ ID NO: 7666 - DNA, 169 bp, Zea mays
  Clone ID: MRT4577_10698C.1
caaacacatttactgggcgttagagtacactgccttgattgtcaattctccattttttacacttgatcttactccgtaggaacaacgccggctaccggcgttttttccagcaaaaaaattcctgggcccgttaaatttttctgggaacgggggtaccgaaaaatagccc

SEQ ID NO: 7667 - DNA, 688 bp, Zea mays
  Clone ID: MRT4577_106990C.1
gccggccgggtctcgacagaaagacccatcaaccacttctgactgaccactgtgacgcggcgtgatcatcgaacgataaaacacaccaaaggatgatggacgcggcgtcactgtatcatatcaccacgttactcggtgaggccctgcgcgcacgcgcccgcgtctacgatgccggcgagcaaatcaccatgcgccgcaccgtccagatcgatccctacagcatatgaaactgcccataaccgccctaagtaccttggcccgtctctcccatcacatacctccagacctgatcgccgaggactacggctactatgcgtgggacaccgcggacctctcgggcgacccggagactcttcgagcgcaaccgggagctatatgtgatccactcccactggcgcatcctcatgctgctggcctgggtgttcatcgacatcctgattatcaacgacatgaagatcatccacccggagagcgtcctggccggcgcgcagatcttctcgatcgcggccgtggactaccagaagtactgcaaccagtcgtacacgctcatcatcctgaacatgtggctcatgcacttggtgcacatgcgcttcctccaggactaccacgacccgggctccatgctcaaggaatacttccacaaggtgtacaacgtcgtcgccttctacgcggtgccgctctacgacga

SEQ ID NO: 7668 - DNA, 236 bp, Zea mays
  Clone ID: MRT4577_106991C.1
gcccgcctccccatccgcggtaggtctcgtcctcctcgccgcgctcccggaggatgagggctagaagaagaagcgcgccgcggccggggtcggggtcggggtcggagcccccgcccgatccgccgcgcgccccgtcccggagaccgtcgcatcgtccgcgatggcgaggtccgcgcccgtgccgattccgtctgatcccgcgcggatggggagggtggcccacccccgggccggag

SEQ ID NO: 7669 - DNA, 230 bp, Zea mays
  Clone ID: MRT4577_106992C.1
acagctatctcctaaccctgtttatcttttggacaactctctagattccatcgctaatgtaacattttcacacctactaccaaatctaagttgaaacccttctcaacctcccaaagaagatacaaacattcaggaactaccctttccctaacctgattaatatactactgctttacccattactatactcatacacacttacatcacatatccacttcacactcaaccct

SEQ ID NO: 7670 - DNA, 254 bp, Zea mays
  Clone ID: MRT4577_106993C.1
ccagcggccgcccgggcaggtactgtattaataatgcactggagccgctgactagctacctatagctaggtcactcgtttagcggggatgagtaacggagtgtcacccatcaccatgggtggtagtgtgagcattgaccctgactgaaccatccaaatggaaaggaataatatctagggaaaaaaaaaaaaagagcgaggtgacattaattcggtaccagcctactggccggttacaacacactgaacgtggct

SEQ ID NO: 7671 - DNA, 360 bp, Zea mays
  unsure (1)..(360): unsure at all n locations
  Clone ID: MRT4577_106994C.1
ccgggctccgagcctgcccaaacgttgctgggcctgctgctgctccgcgcctncaccaaacagttgctgagcctgctgctgctgctccgtgcccgagacaaatagttgctgaatctgctgctgatgctgttgctgctccggcgcctgaaaccaaatcagatgccgagcctgctgctgctccgggggggggggacaaaccagttgctggaatctgctgctgatgctggtgcggctccagcgcctggaaaccaaatcagnatgccgagcctgctgctgccgctgnatccagcacctggaaatcaaatcagatgctggccgccgctgggatccagcacccgggnaccaagggcagnagcagtt

SEQ ID NO: 7672 - DNA, 223 bp, Zea mays
  Clone ID: MRT4577_106995C.1
attttgagatgaatattgtgtaagttatgaataaaatagttaaccactgtgccgttgtctagaaaatctgcatgacacgaataatccacgtacacggctgtactaaaaagatgatgaatctgtggtggctaaaaaaagggaaatagaaaagtctggtaataaaagttgtttctgaacaaaaaaaaaaaaaaaaaaaaaaaaaaaaaaaaaaaaaaaaataaat

SEQ ID NO: 7673 - DNA, 322 bp, Zea mays
  Clone ID: MRT4577_106996C.1
cgcgggcatacacacgcacacgagcacaccgccccggggggaactaaaagaaaaggacgggggaccacacccccaaccaaccagggacaggagaaagcagggccaccgggggcgcccacaggcagacaccagagagccagcgcagccggaccagacagccaccccaacacggaacccacagagggaagggaccgagaagacacccccccagccgccaaagaggaccgagcgggggggcacagcgcagcaaggggaccacggccaaggcgaaccacgggcgaaaccccgccagccgcaagagggcaggcaccaagggcaagga

SEQ ID NO: 7674 - DNA, 298 bp, Zea mays
  Clone ID: MRT4577_106997C.1
cacatgattgcgcgaatgcaattcctgatttgagcaagatgatcggggctgttaagggcctagttgcacagtgtgaagatttaaagttgaagtactatgaagagatggataagaggaagaaacttcataatattgttcaagagacaaaaggaaatatcagggttttttgtagatgccggcccttaagcaaagatgaggtgtcatcgggtccagaatgtgtagtggattttgatggatccagtgatggtgacattgtaattacaaatggcggaactaaaaagacctttaagttgataga

SEQ ID NO: 7675 - DNA, 413 bp, Zea mays
  Clone ID: MRT4577_106998C.1
atattttttttttttttttttttttttttttttttttttttttttttttttttttttttttttttggggaaaacccaacccctttttttaacccccaaaaacctccggttggcccccccccaacatggggcaaaccgggttttcaaaagggcccaaagggggtgtttattttgggaaacaaccagtttcccttacccaaaacgggaactgtttcaaggggggggggggggcccttaaaccccccaaaaagaaattaaactttttttcgggttaaaaaccccatggggaccaccctcccccaggttttttttgggtggcccaccggtacctcttggcaacaaaaagctttgggaaaaattaaaacccccgattaaaaaaccgtgctgtgcacaaaaacactttttctttggggt

SEQ ID NO: 7676 - DNA, 618 bp, Zea mays
  Clone ID: MRT4577_106999C.1
ggccgccccttttttttttttttttttccggccgagctattggcaattttgtcattattatttgtgggtttcgccaatatgttatcggacccataaattatagacacagatgatcctactagtcatagacactggatgatacactaacaacaatcaaaattgagaggggcaaaatcacatatttctctttccggccaagaaccctcgcgcggtgtgtgtgcgactgtgtctgcgtgtcgcgcacgctagtacgctacgctaccggctgcggtggctctcccgagtcgaagtggcagctcccagcctcccacgcgtgaccgtgagagggaagggggtatttaacagacggcgggccgtggatgcgagctctcgcggcagcagcaactgcagtggcggcgcctacccccacgcgcctccgcctcccgctcctctcccgcaccctgcgctctggtgagtttgcttccacttctccttcctccccgagcccgctgctccgaccgcctccgttcaccgcggagaaacaggggattttagtgtcggtctgggtgtgagtgcgacgcgcggttcggggtttagggtttggtggtccgggcggcgttagtttctgttcccggccgg

SEQ ID NO: 7677 - DNA, 198 bp, Zea mays
  Clone ID: MRT4577_10699C.1
cgtccgccctacgcgttcgcccgacgcgtccgaccacgcgtagcgaatcgtcatatcatagcggttgcgtagtggaatgacaatcatgtgtgtaatctgctggcaaataacaaacctttgttgctcccaaaaaaaaaaaaaagaaattcaaaaaactaaagaaaaaaagcaaaaaagagacaaacaaaataaaaacct

SEQ ID NO: 7678 - DNA, 446 bp, Zea mays
  Clone ID: MRT4577_1069C.1
ggacctttgggctgatttatgtgcttatttatgtgcttgtttatgtgcttggcgacctaaaccgagctttcgaataagaagcacggacgtaacgctttcccatcctcgacgaatctccctaatatttacgacgatatatagaagaccgccgagaagcaccttaatcttaatactgaaacctacatccctaactagagttagcacttctgtaccgccattgaggatcctccgttatcctttagtaaagggaaactcgggaaggacggtcggcacttcttcggctacggcgacgcgccctttctcccgaacaatagtggaaaatccgatactccaccggtctagggtaaggagcacgctcccgtcgtaaatctagataatccgggcgtcacagctgatactaagacttcaaattactcgactaacaattagaatgagcatcgtacgga

SEQ ID NO: 7679 - DNA, 355 bp, Zea mays
  Clone ID: MRT4577_106C.1
atcttaacctctacattatttaataactctacgctctgggctgctgagctacaaaaccaccccgcagacaacagaccaagacaagtggcaaggacagcactgtcatctaagcattcttattataaaacaaatgagacggtggtacggaacatcaagacacgccacgggaggggtggcataccacagtgcctgggctaggtgagcataagaccactttgctttgtaagctgaggtgtagtctgctttgactttatctacatatcatataaattaatcttagtctacttaagtgacacgatactattctgctatgacagcactgtaaccgtgatgtccatcacaccaatccgaaccc

SEQ ID NO: 7680 - DNA, 390 bp, Zea mays
  Clone ID: MRT4577_107000C.1
gaaaccccttagggtcggttgggtttaaagaagaaatgttttcccctcagaattgggtggttacccccccaaacaaaaaataactttcggatgtctgtccttttactgttgggccttcccaatggattgcctttaatgggcaatgcccggcccaaaaaaaaattttaccttgagggatgggtcaccccacggggggtctaaaaacatgccacctccttggggcaacctttggggcttcccttggggtttgggcataaaaccctggttttgttgtgggggcctcttttctcaacggttacctaattcattgggacccccgtgcatgggaccttttctaagaaaaaaaagttttcggccctccgggtggaagagggtgccgttattttttta

SEQ ID NO: 7681 - DNA, 777 bp, Zea mays
  unsure (1)..(777): unsure at all n locations
  Clone ID: MRT4577_107001C.1
aaattacagaatcccaacccacccccgcagccaatcccaccggacgccagccagccctcccggatcagccccaatctcgactcctccgccgcctgaatctggttccgagtccatatttgaggtgccactatgttcaacaggttnatttgggaagcccaaggagcaggccaacgccggcgcgttggccactttggataagttaaacgagactcttgatatgctggagaagaaagagaaagtgttagagaaaaaagcaggtgcggagcttgagagggccaaggagttctcaaaagcaaagaataaaagagcggctatccaatcattgaagaggaaaaaactttatgagcagcaaattgagcagcttgggaatttccagttgagaatccatgatcagatgatcatgttagaagctgctaaagctaccacagagactgttgatgcattgaggactggagctaaagctatgaaagctatgcaaaaagcaacaaatatcgatgatgtcgacaagactatggacgaaattaatgaacagacagaaaacatgaaacaaatacaagatgctctgtcagctcctcttggagcttctgctgattttgacgaggatgaactggaagcggagctggaagagttggagggagcagagttggaatctcaactactggagcctgttgtaactattcctattcatacgacacccgtcccaggcaaggcacaaccaactcgccctgctccacagaaagcatcggctgangaggatgagcttgctgcactgcaagc

SEQ ID NO: 7682 - DNA, 538 bp, Zea mays
  Clone ID: MRT4577_107002C.1
gccggccgggcctgcgaaccactacccaccgaacctgagaactaccagcatggcacccagaccgaacgctcgcatcaccaccctcctccgttaccataccaagccaacatggtctttttcgccggatttgcaacgatggtatttgctctaaggatgtctgcgaccagagaagtgtcacgaagatccactgcgacagagcagcgcggataacccaagaacgaagtcgtaatcctgaaggagcagatgaagagaagggcgtcaagccaacccctgctgtgctgggggtgacgaaagaagaaatcaaggagcatatccttaggctcgggaacgatgtattttacgcgagactagacactatacggcaacgacatactattccccaccaacagtcgcgatcgacgggtctagaagttgggacataccagcatgtagtttctgtgctttcgcttgttcattcgagcatgcaccccccgatatcagccattgatcggcataaaataaattctaatacaaaaaaaaaaaaagataatgcccctac

SEQ ID NO: 7683 - DNA, 487 bp, Zea mays
  Clone ID: MRT4577_107003C.1
ccgtgatgacatcggcgcgggcgcgggcgggacgccgcggcgcgcagcgaggtgtcggcgccggagccagacccgcctccgttcgcgcggttcttccggtacccgcagtacgcgcggcggcacgcggcggcgcgggaggacgccggcgcggaggagacgagccgcgcctccgcggtggcggacgtggaggtgggcgtggtggtggacgcgcacgccagcctgcgcgtgatggcgccgcggaggcccgggcagcttctgcggatggtggccgggatgcaggcgctgggcctcgccgtgctgcacctcaacgtggccaccgccgcggtcgacgcgacggcgctctacacgctcagcctcaaggtacgacggcggcgcacactaccggacggatgggtagctagcaaagcgacggtccctttctccttccgtccacggacacggaccaaccgtcgtcgtcaaagcctcgttgcttgtcacaccctggctc

SEQ ID NO: 7684 - DNA, 285 bp, Zea mays
  Clone ID: MRT4577_107004C.1
aaaaaggacccccttttttgaattggtttcgccaaaaaattttccccattttacccaaaatttcccatgattttggtggccacaaattttccccccctaaaaaattttttttcccccaaaccttttttttaaaatccttttacttaaaattcaaaggaattttttttccttcaccccaattttttaaaccttaaacctttttaaaaatatcccttttcctttaaatctggggcccctttaaaattcccccccccctatagcccccccagggttgttttttttttt

SEQ ID NO: 7685 - DNA, 228 bp, Zea mays
  Clone ID: MRT4577_107005C.1
cccaattatttggcctccgtcagagaggggagaaagacccgttcgaggcggcggcgatgtcggggcgcggcaagggcggcaagggtctgggcaagggtggagccaagcgcccacggaaggtgctccgcgacaacatccagggcatcaccaagcccggcgatccgcaggctggctcggatgagcgccgtgaagcgatctcggggatcatcctacgagagacccgcgcgt

SEQ ID NO: 7686 - DNA, 747 bp, Zea mays
  unsure (1)..(747): unsure at all n locations
  Clone ID: MRT4577_107006C.1
cattgggtacctcgaggccggccaggcaagccaaccgaaaccgatggcgtcgggctcccgcggcggcggcgggagcgacttctccgtggtcgtggtgggctccgacgccggcgccggcgcagcgctcctcgttccctccgaccgccactcgtggcacgactgcctcgccgaggcggacgcctgcttctccgacctcgaggagcgccaggtcgtgcgcgtccagggcaccgatcgggcccgccgaaccatcgtccgtgtcgtcggcaagttcttcccgggtgcgcgaatcggccacgtatttgctccccttacagctgcagttgctcggtcaggcgtggattgctatgaaaaaaaaaaatgaatagaatgagatttaatccctttcgatctatacgcaaccgaatggttttgtcgattcaatcattgggaatgattcatgcgcgtatagtgtaagtatttgatgatttaaaaaaaaaaaagcttgccggttgcaatcctacagtaacgatcgatgctgcagattgtggaatgcggaccaaccaacttctattcaatggatggtacaccatacgtgttctctaaaaaaaaatttggatacgtgggatcgtgagattgaatttatcagaaatctaggtttccagtgcaacatgcccaccttatttacatgtttcaagtacnagatccgacgtaggctgtagcttattttatgtattgaagctctataccagcaaagtgcatattttctta

SEQ ID NO: 7687 - DNA, 146 bp, Zea mays
  Clone ID: MRT4577_107007C.1
agtacgtcgcgacttcttcctgtcgtggtactcgcagatgctgctggagcacggggaccgcatcctgtcgggcgccacgttcgtgttcggtgcggggcccgtggaggtctccctgaaagtgggcggcattcactggcactactttt

SEQ ID NO: 7688 - DNA, 1570 bp, Zea mays
  Clone ID: MRT4577_107008C.1
ccggccgggactcctccctcccctcctctgctttccccccatttcgcgtctcggggtttggaccagccacccggcggaggcggccgggcagactgggccgagcgaccggagcgccgccgccatcggcaaagccacgggacggcccatggagtcgcgagcgctcctgcacgcccggcccgccgccctccctcaccgcgccggcctgcgcctccatctcccgctcctgcgcccgcgggcagtctcccgctcccccgccgccaagcccgcgctccagtccccgctcctcgcgtcgaggggccccttccttcaacggcacgatgcggttctgggcaacgggttcgtgaaacggagagcggccagcgctggcggtgatgtgtccttccgcgcccaggcggcggcctcggcggcggtgccggcgccgcagccggaggagtccacaaaaaagctccttggcatcgacgtgaagacgctcaagaagatcgtgccgttggggctcatgttcttctgcatcctcttcaactacaccatcctgcgggacaccaaggacgtgctggtggtcactgccaaggggagcagcgccgagatcatccctttcctcaagacctgggttaacctgcccatggccatcggtttcatgctcctgtacaccaagctttccaacgttctctcacgcggatgcgctcttctacaccgtcatcttcccgttcatcgccttcttcggcgccttcgcctttgtgctctacccgctcagggacgtcatccatcccaccgcgctcgcggacaagcttctcgccgcgctcggtccgagcttccttggtccggtggcgatactgaggatttggagcttctgcttgttctatgttatggctgagctctggggcagcgtcgtcatctctgtgctcttctgggggttcgctaatcagattaccacagttgatgaagcaaaggaattctacccgttatttggccttggggctaatattgctcttatcttttctgggcgtactgtgaagtatttctcaaatttgcgcaagacattgggtccaggaattgatggctgggaagtatctttgaaagggatgatgagcataggggtactccttggacttgtcataacttccatctattggggagtacgcgtgtttccattggttgatccttcacttccaaaggctgatcgtaagaagaaaaaggaaaagcctaaacttggcatgaaagagagtctgaaggttctgctctcctcgaggtatgtgagggatctagctaccctagtggttgcttatggcattagtatcaatcttgtcgaagtcacatggaaatcaaaactcaaggcacagttccctagtccaaatgaatattcatctttcatgggtgatttctcgactgcaactggaattgcaactttcacaatgatgctgttaggacgtattatactacggaaatttggctggggtgtggctgcaaagatcacccccaccgttctgttgctgactggtgttggattcttctctctgattttgtttggacagccactgactcctatgcttgccactatgggtatgacccccct

SEQ ID NO: 7689 - DNA, 278 bp, Zea mays
  Clone ID: MRT4577_107009C.1
ggggacaagaacaactttaatttgattaaaaggcgttaaaaaactcaaaacttaattccaattaagcgtaaagggcgtgggtgtttcaaaatattaatttgaaaaaaaaaatgttttcggaaaaaaactaaacagtccgacactaggacatgacatgatgcaaaacgcaaattggctttcgaatttttcgagcaggaacaggaaactttggaagataagacacaaagcccaacacaaaccaaaacagaccccagcaatccaaaatctgtcaaccatgg

SEQ ID NO: 7690 - DNA, 242 bp, Zea mays
  Clone ID: MRT4577_10700C.1
gtctcgcagcgatagagcaatgatcatcctcgttgatagacaacagcagcccacaggtaaaccgcagcctgctttaaatcaaaaaaatggtgtggcgatccttgtagggttattgcaacgccttgactactatcactgagattaccagttccttttgaatgccaggtgcaggtcccgcgttttccttgctttggggttaagatggttcgtgccactctgagcgatgcttgggtgccaagcgt

SEQ ID NO: 7691 - DNA, 550 bp, Zea mays
  Clone ID: MRT4577_107010C.1
ggcgcctcccatccccgcccctaaccccaccgatgactgggtggacggctcgtggacggtggactgttcctgcggcgtcacgttcgacgacggcgaggagatggtcagctgcgacgagtgcagcgtgtgggtgcacacgcggtgcgcacgctatgtccgcggcgttcacacatccttctcgtgccacaaatgccggaggtccaagcgtgtgccttcctccgccgacgaggccgaggttgctgagctcctcgccgagctgccaacccaccgcccgcctccgctgtaccgccgctgggccgaggtcccgctcccagcccgcgtccacgtccacgggcttcctggcgggggcgacggcgctcttttccgcggcgccccggccttttccgccgccctgtggcgctgcaccggctacgtccccaagagatttggcttccgctactgcgagttcccctcctgggccgacgataatgatggggctgatgctctttttgcgctggccagagagaagcccagggagatgacggatgatgttttgataggtactgaaccg

SEQ ID NO: 7692 - DNA, 496 bp, Zea mays
  Clone ID: MRT4577_107011C.1
gtgctctcttagaggtgggctggcttctcctccccctctgactaagccctcgtggtcgtgaggttctctctgagggttcgtgtgtcaggggcgatgcggatcgagaggtgggcatcagatgttgattaccggtgcttttgcctgggccatccactagagacacggatgaacactgccttcacatcgtattgagaaactacggagaggaactccattaccagaacgatacacgatcaggagacgcagatgtcccgtggttaccttttcctcacattactcaatgctgaaggctagcgaaaccacgtacggggcagaaacggacgggagctgcatcaccgctacataaccgcaaaccagggccagtcccgcggccgccgtggagtacgccgccgtgcgcaccgtggtggcctatgaggccgcgcgtacgtgacggcgcgtatgccgtgatggcgcggtacggtactgcgcgcgaggttgctaccggcgcctacggagg

SEQ ID NO: 7693 - DNA, 455 bp, Zea mays
  Clone ID: MRT4577_107012C.1
gggtacctcgaggccggccggggaccttcaaaaagggctgtctagctccggtatctccttaggcttccaaagtaagctaagatgagcgccaccatccatgtggcttgcgtcataggagacgcttaccttcgtcctacttatttcgatggacggtacacataggccagtgtgagtgacgcgcttccttgcatccaaaaccaccgaagctacagggaagctcctaacacttgcgcttgctaatatcggagctgcactgcccaccttgtggagggttaagaaagctctcgctgatgagcaaagaatctcttcctctaggatgtgttattcaaggttccttgagaaacttgacaagggcagaacgaagaaagttgatttatttggtaatggaacaattgctatcgtggaagccatttctcctgagatagccaaccgcgtgcagagagggcgggtgccgc

SEQ ID NO: 7694 - DNA, 207 bp, Zea mays
  Clone ID: MRT4577_107013C.1
ggcagatatggaccgagtgcttaattttagtcacagattagggggcagaagctcatgatttcaattggacacgggtacattacatcggagtaatcacagagggtcaaacttacgggccgtgcttaagttcaggggctaaacagtaacaatcctaagacgtcttatcacctaatgtaccttgccggaccactgcttgttttgttaaag

SEQ ID NO: 7695 - DNA, 119 bp, Zea mays
  Clone ID: MRT4577_107014C.1
agcacctgggttttaacagccgtttgtgtttttgcttgaccttgtaattttgactgataagaagattgtacagatagcttatattcatgtgagtatccaaagcacgcacgtgcttcgtg

SEQ ID NO: 7696 - DNA, 910 bp, Zea mays
  unsure (1)..(910): unsure at all n locations
  Clone ID: MRT4577_107015C.1
taccctcgggttcggccgggggtcgacgaggcagatgcccgtgtcaaccggctcttcgacaagctacagcagcccgcccaccttctggggtcattgccctccacgtcattcgatctcccagccaccccgctcagcgtcgaccacttctccgacgcatccgccagcgtgtcggccacccccgctgcggctgttgaggccgccgtcatcgtcgataatggggcgggtgcttcgatgacagagagcagtactgtacggcgccatccgtcgtcgccgacaactggggagggttcttcggtggcgaggatctcgatctgccaggaagcacttccttcccctgcaacagcgaatcgggtgccgtccctaccaaggcgctcgtcacctccaccgaccccgacgcgccgcttggctcgggcgccgacagcatccccacccatgtcggcgaagggcccctcgagccagcccatggcgatgtggccgtaggcggtctcgttgagttgggcgcagtcccagttccggtggaggccacaacccgacgccgaaccccgacgctcagcttcgctgggaactactcgcaacacgccctcaccatctggaggtcctccttcatgcagcagatccgcttcgacgcccacaccccgctcctggaggcctgggagatcgacgtgcacatgcagtccgcggtcaggggcccggacgccttcaatgtctacggccgagcaggcgagcaccctgctccctgnacggatccaccaggacctctcgatcgagctccagcagcaggcaccttccagatcgagcttcagcagcaggcgcaggcgcgcagcgaccaatcagcgagcaggacgagcggcaggggagaagcactcgagtcgagagcagatcaggatgtgtgtgaagatcgaccgcacga

SEQ ID NO: 7697 - DNA, 166 bp, Zea mays
  Clone ID: MRT4577_107016C.1
gacacttcgatgataatggggttatgttagattgctcagggtgcgacacacaagatagctcaacagaccgtctaccggaaccgttggagccctaatacaagccaaaccgtacgttcctgcgggatggccgaactaaacaataagccctaatagtgagaaggcaacc

SEQ ID NO: 7698 - DNA, 407 bp, Zea mays
  Clone ID: MRT4577_107017C.1
aaacggggaaccgttgtttttaaaaaacaaaaaaacatttccttaaacggaaaaatcccctttttcttaaaaaataaaaaattttcctttcttaaaagggaattcaaaaataaaaaaaatgccttcccaattccataaaattataggggctgtttttcctaaacctaaactacaaaaaagccccttccggcgggaaaaaaaacccttttcttttttggagcaatggttttttttacttccaaaaagcggtacaacctccttatttggcatatataaaactggaagggcataatttgttaacttttttttgccctcttttaaaaaaaaataggaacttctgccccccccaaaattgtaatttaaaaagcccaatttttttctaaaagttaaacgatcttttataaagg

SEQ ID NO: 7699 - DNA, 779 bp, Zea mays
  Clone ID: MRT4577_107018C.1
gccggccgggccgggaatatgaatccctatgtcgtcattacacgcctgcacaggccacacaccacacaagcccaatacagatcaacacttgctaaaacaaacaagctagacagagagtccatatggtggcacttgggaaaagatccagaattagcaagagaatggtgtcgcgaggcggcggcggccgttccagctcatggtgctgaggcggctccgggggctcaagaaggttattgtgccggaggggggcgctcgccgcaaggccgccgccgacgtggtgctccggcaagctgccgagtacatctgcgcgctggagctgaaggtggccgttctccggaggctctctgacatgtacggtgtgtagcattgcacatgtgagactgcactgcattccttgcccatgggcacctgcagcctgcgttcaactcaactcctctccctagcaccacccaccaaccaaagtagtagcgttttagctgtgcctccgctcccctatgcgattatattggctgtcggtcacacgtgcaagtgtgtctagtactagttagatctggctggctggaaaagtttctttctctggtgctttgtcaatagctaggcagctggaagcaagagctagcgtcggcacgcatggtggaaccacattcatctagcaagtagtaactacccccaaaaaaacatcgtgtgatgatccctacagatacaggatcatcatctgtcgtattattatgaatactgattgtgaaccgaaaaaaaaaaaaaaaaaaacccctacccta

SEQ ID NO: 7700 - DNA, 213 bp, Zea mays
  Clone ID: MRT4577_107019C.1
atgaactatatgggttggggtttttcaagtcggtggcaacagttgaaacacgaatcaagcagaggccccctggggttcacagatccacacgcaaaccggttaattaaactgcgggggctacattacaaactaagaccacccctcaaaacaccaccattttatttaaatccacagggacgggccctgggggggctatccaataacggggggggg

SEQ ID NO: 7701 - DNA, 1384 bp, Zea mays
  unsure (1)..(1384): unsure at all n locations
  Clone ID: MRT4577_10701C.1
atatctttttcgaaacaaataaaaaggaaaaaaaagagaaaacagaaatcatgatcaactaagccctctcgggggcttgcttaagaataagaaagaggaatcttatggaaatagcatggaataaggtttgatcctattcatggggattccgtaaatatcccattccaaaaatcgaaacaatcgggacttttcggagattggctgcagttactaattcatgatctggcatgagcgagccaaacatgcccgtccgcccagtctcactccaaaccaaagccatcggaggagcagctggacgaccatggcctcgccgctgctcaagtcgcactctcagctcgccgccgccgccgccctgcactccgtgaggagagccgaccgctgccctgcgacaatacacctgggcaagttccatgaccacgggctcaggtccggccgttctaagagatccggttcagcgaaggtgggcgccttcccgtcgctggacgtggtgccgctgatggtgacgatggtggagcacgtggacatgtcgcgggactacgtcgtgaccaagtccatctggcatctcagcgacgcagccctcaagagcgtctataccttctacgccatgttcaccgtctggggagtctgcttcttcgcgtccatgaaggatcccttctacgacagcgagacgtacaggagccagggtggcgacgggaccgtgcactggtactacgacaggcaagaggacctggaggcgtctgcgagggaggagctgctgcgggaggagctgctcgaggagattgagcagagggttgggggcctcagggagctggaggaagcgagcaaggaggagcagctcacaaagtgatcacgcgcgggcgaataccgaatgggatggatacgggctactcatcagctctctatctgagcttcgttagcaaataagttcagacttctctttactgccatgctcaagtctgtatatggccaaaacccaaaacgattgatcaactgcgctactgcagtgcaatagcaggatacgtatagttttcttttcaagggaaacaggaggggagtgcagtgcacccccgcccatactgcatgttattaataaaagaaagttatttacaaaaaaaaaaaaaaaaaaaagtgatctaaagaaaaaaaaaaaaaaaaaaaatggactcctgctgcccaccagccccatatctctacttcgtttgccatgggttccggctgcggtgcgccccggcccccgcccgtactgcgccttatccataaaacgagtgatcanctgcgctactgcagtgcaatagcaggatacgtatagttttttttcaagggaaacaggaggggaggcagtgcacccccgcccatactgcatgttattaataaagaagttttt

SEQ ID NO: 7702 - DNA, 470 bp, Zea mays
  Clone ID: MRT4577_107020C.1
ccggccgggatcaccccgcgagaccatattatcgagctctggtgagtccctctccggcgttcagcaacatgtcgccatcgatcgatccgcacgcaggcgaggtgggtgctgcgacgagagaccgaccacctagagggcgcgcaacatactgcgctgcccctagaaaccagctacttcggtcttttgctggatacgagattgacggacatgatgaacggtacgaaccaggacaggaacgtgctctacgacaccgatcggcgcttctgagcatagccgaagggcaatgtatccttctgacgcatctctcttttctctagaacagtcgatgtgctcaaagagacttatagatatgattcaggtggggtataaacgaacactatgactccatgactctcgacgaccttgtatacagccaccggatgatgtagctcttaatgatgaacaaggaattgaaacgtgacgcgccctcg

SEQ ID NO: 7703 - DNA, 221 bp, Zea mays
  Clone ID: MRT4577_107021C.1
caagggggggcaccacatttggcgatcaattgtgacacacaagaagatggtgacaccaatgaatgtgaagtttcaccggtcagtccaaatgacaagagaccgccaagggttaatcaaaataaaggccttatcagatgacgctggctggatggaggagaagccaagccaccaggtgctgatgaatgatgatatgcctgcgtgcctgcctgcacaacgcgacg

SEQ ID NO: 7704 - DNA, 2786 bp, Zea mays
  Clone ID: MRT4577_107022C.1
ctccactccacttgctctggagtatcccgcccggagtcctctccttgctttgccattgttctggtgaaccacaccaccttcccaacaaatccgagctattagctaaagcaatacccgcaccaccatcgccattgccgacccctcctcttcttaacctccatgcatgctgcatgccacggcttcacctcacctccaccgccatggccggcaccaatggcgcccctcgccttctccgcctccctaccactgccactaccagtaccagctcgacgccactgctgcgactactagcgctactacagctactatgcctcgcctcggcgcttaaccaagacggcatactgctgctgtccttcaagcaatccctcgcctccgaccccctcggctccctctccggctgggggtacgccgacgccacgccctgcgcgtggaacggcgtcgtctgctcgccggactcgcgagtcgtcagcgtcgtcctgcccaacgcgcagctcgtcggccccgtcgacagggagctcgccctcatcgagaacctccgccacctcgacctctccggcaacgcgctcagcgggaccatcccgcccgatctgctccgcgcgccggagctccgcgtgctctcgctcgctggcaacggcattaccggcggcctgccggagcaggtcggccagctgcgcagcctccgcgcgctcaacctagccggcaacgctctctccggggccgtcccgcagaacctcaccctgctgcccaacctcaccgctgtctcgctcgccaacaacttcttctccggcacgctcccccgcgggggcttcccggcgctgcaggtgctcgacgtcagcgccaacctgctgaacggcaccctgccgtcggacttcggcggcgccgcgcttcggtacgtcaacctgtcctccaacggcatcgccggcgccataccgtcggagatggcctcgcgtctgccggccaatgtcaccatcgacctgtcctacaacaacctcaccggcgccatcccgtcggtgccgccgttctcggcgcagaggcccacggcgttcgagggcaacgccgagctctgtggaaggcccctcgacagcctctgcggcttcacgtcctcctcctctgctgccgcggagcccccgaacgctaccgcgaagtcgccgccggccatcgcggcgatacccagggaccctaccgaggcgcttcctggcgatggttccagcagtgccgcaggcgcgtcggcgtccggggagcagcgcggcaggatgcggcttgctaccatcgtcgccatcgccgccggtgacgttgctggcatcgccgtcctgttcgttgtggtcatgtacgtttatcaggtgaggaggaagaggcagcgtcaggaggtggcggcaaagcagaggacggtcgtcgtgttcaagaagccggatcccgacgactctccggacgctgtcagccggagcctttcctgctgcctgcgcaagaaggccggcgacgacagcgactactcggaggaagtcacggacacgtcgccggcctccttcgcagatcacaagaacggcaaggcggccggagctgaagcggcgagcaataagaagatgggcggggacggcgcggtgctagtgacggtggacggcggcgcggagctggagctggagacgctgctgaaggcctcggcttacatccttggcgccgccggcagcagcatcgtgtacaaggccgttctggccgacggcgcggcgctggcggtgcgccggatcggcagcgagtgttcgggggtccggcgcttcggcgaactggacgcgcacatgcgcgccgtggcgaagctgcggcacgacaacatcctccgcctgcgcggcttctactggggccctgacgagatgctcatcatccacggcttcgccatcaacggcaatctcgccaaccactccgttaaaaggaagcaggggtcgtcgccgatcaacctcgggtggagcgcgcggctccgcatcgcgcgcggcgtggcgagaggcctggcgtacctccacgacaagaagtgggtgcacggcaacgtgaagccaagcaacatcctgctggacgcggacatggagccgctgctggcggacctcggcgtggaccggctggtccgcagcgcggacggcggcgggctgacgaagccgtcgtcggcggcgctggcgggtcggttcggcgggagcaaacgttcggccaagagcctccccgacctgtcgccgccgcccagccacgtaggcggcacggccgcgcaaccggcgagcccggccgtcgacacggcggcgcactaccgggcgccggaggccgtgaggagccccagggcgagcggcaagtgggacgtgtactcgttcggcgtgctcctgctggagctggtggccgggcgcgcgctgacgagcctggagctgtgccagtgcgctgcggcggaggggaaggcgcaggcgctcggggtggtggaccccctgctgcgccgcgaggtggaagggcgggaggaggaggaggcggtggcgagctgcctccggctgggcgccgcgtgctgcgccatggtgccgagcaagaggccgtccatcagggacgcgctgcaggccgtggagaggatgatacctgccgcggttgcttcgtcgtcaacatccacggcagcatcacaccgtcattgaaaaaaaaggacacgtcttgcgtcgaaaaaattgtttgccatggatgcttgcatgcttgtagcttctcgtctctctgtaccacaccatcgtcattcacggttttgtaagtcccagctccgatcctgaaaggaattggtttgc

SEQ ID NO: 7705 - DNA, 173 bp, Zea mays
  Clone ID: MRT4577_107023C.1
ttttaaaatctttaagacaaaacatgactgaaaagagcacctgtacttttcaagccactggagggagaaatggaaaacatgaaaacagcaatcttcttatgcttctgaataatcaaagactaatttgtgattttactacttaatagatatgactttgcttccaacatggaatg

SEQ ID NO: 7706 - DNA, 191 bp, Zea mays
  Clone ID: MRT4577_107024C.1
tcggtaccctaaccctagacctttgcgatgtgagacatcgccaccggaccatccccttcagttgccactcagttggcgcccccttctgcctacccggtcttgttaactgcctatatgtccatctccgcgtacgccgaggaggaagaggacctctaaggccgcctcaaatatgctccaacgccacatggagt

SEQ ID NO: 7707 - DNA, 320 bp, Zea mays
  Clone ID: MRT4577_107025C.1
cccacgcgtccggatgatatcaagtatgatgaggaatatgtattgaatgcacgaggaatgaatctcttcacatgccaatggagacctttgaactctgaaccaaaagctctgatctttctatgccatggatatgccatggaatgcagtatttcaatgagaggcacaggtacaaggttggcgcaggctggatttgtagtgcatggaatggactatgaaggccatggaaaatcttctggacttcaaggatatattaatagtttcgatgacattgtggttgattgctctaagtactttgcaagtgtctgtgagaaagaagagta

SEQ ID NO: 7708 - DNA, 254 bp, Zea mays
  Clone ID: MRT4577_107026C.1
ccgccctttttcttttgttttaatattccaaatatgcaccccctatttcggtatgattagaatccttcgaaaaacaaattcccggggccctgttaaatccgccaattttgcggcaattatccatgcaccaaggaccggctagcatttaatacccactttaaaaaaaaccaggccaaaaattggcccggttccaagatcaattcgcccgcctaacggttagcaggggcacattttgaccccatttccaaaagggc

SEQ ID NO: 7709 - DNA, 537 bp, Zea mays
  Clone ID: MRT4577_107027C.1
aaacaaaccacggtttttcaaccggggtgtaatttaataagtatagattgagtggcatagtcacctacatcaagctaacaaacgagcccgagggaacacaccgccccttgggtcagggtaacagcaacctgaccaggaaggacgcctcataaatatacgccccgcgggacatactataacccacacacaccatgtaaaggaaaggtcatctacgaatgcctggagaactctccatgggcttgccccggcccttagttgaacatgtcctggctgtggccctccatcaggtactgcgtcgatcggttcacgcccagtagacatctgttacacccgggtaatagtgctgcattttgggcaccttccccttgagcctctggtaaggtagcccagcagatgccataaggtggaaggaataccacaaagggtctccacaggaacccggtgagcacaaccttagggtcctcagacatgtgcacaccttcctggaggaaccggatatgcacgatctttcagatttcatcctgcgcctggggatgc

SEQ ID NO: 7710 - DNA, 312 bp, Zea mays
  Clone ID: MRT4577_107028C.1
ctgacagcgaacaatgatgccacaactgcgtagcctcgtcgcgctggtcatcgtggccacggccataaccgccgcgggcggcgtcgcgttaggcttcacccttagcatcgcctgcaagcaactgtcacacccggttagagagacacctatctcaagctaacgggcgctcgattgtgaacatcgagtgcgggaaattccagtcgtaacagtccataatcacgttgaagcaaataccggtttcggcagctggtataagatcgaaatggcccgcaaccatcaccattacatccgcgacctcagcctgaacaggaa

SEQ ID NO: 7711 - DNA, 278 bp, Zea mays
  Clone ID: MRT4577_107029C.1
aacccgaagcaaagccatggactggggattgaattgtttgacgaccaaaacatacaggccgtatggtttgtccaaaaattattgggccaaaatatttggcaagcttttaaacgcaggcccccgatggcggcgaaaaaaaaaacagcatggtgggtttatttttacacatcccggccattttatttacagaactggggcacgccttttaggaagctttgggggtcgaaaagggcattttagcaacagactctcgcggggagatggtttcacaggtgggt

SEQ ID NO: 7712 - DNA, 417 bp, Zea mays
  Clone ID: MRT4577_10702C.1
ggggggggggtgtttggatcaaagactaaaaagaaggtttaacacatcggcgaaacacaggctcttgagttgacagagcagctcggcgaccgtttgatcccgtgctaagactaaaaagaattctctattgtttttttttttgttcagccttgctggggggggggggggcttccttgatcaaccggtgtttgcaggtgctggtccgggcggcgaaccatgcttggctcgagtgaaaccttacccttctgggcttgtgttttctggaacggagtgtaccgccggtgccaggaggcgtggccctggtgctcaatccgcgtcaggaaggggctgtgcgggaggggggacaagttggcatgcaggagctggggcgcgtcgggaacgcagcgggggttcggggtctgggcagtggggcgggtg

SEQ ID NO: 7713 - DNA, 276 bp, Zea mays
  Clone ID: MRT4577_107030C.1
ttttgttttttcaaatgtttattttatatacaaagaattatcatggtttttcattgagtagatgccccggataatcctctgaaggaagagcatttagtccaacttaatgaaaccgatatccttcgcgtactgacggaaacactggcggcacatattgaggccatatttccggatcagaccgtgccggtttgaacagacacgacaagagcgagaaccctggccgaattttcgcgggtggctccagtacagctgctggtgacccatcttgctctcagc

SEQ ID NO: 7714 - DNA, 503 bp, Zea mays
  Clone ID: MRT4577_107031C.1
gccccccctcgagttttttttttttttttttttttttttttttttttttttttttttttttttttttttttttttcaaggcatggcacacatccaaaaaaaatttcccccttttttggacccccaaaaaacgtaaaaaaaacacccccccttttgggcgggttcccggacccggttaataaaaccccatatccgaaaagcatccaggggggcctggaaacaggcatcattggaacaaaacctaacaaaaggcagggtcgtcgtcgtcggccggcccatgcatgaaaaagtgggggcttcggggaagggcctcaactcaagcaacgggagtaaatatgacgtaccaaaggcgaccactaaagctgcaggaccaaccaggagggaaccagggagggtatttgcatgtcccccccgggaaaaaaaggggggccgacagaatcgtcaccttgggcgtgggggggagggacccatccggaacggttccgcgcgggaagggggcggcca

SEQ ID NO: 7715 - DNA, 184 bp, Zea mays
  Clone ID: MRT4577_107032C.1
cgtaaccccatatgcaacgtgcacactataaataatcctatctacaatctaaaagagttccgtgcttcacccatatcttaccactcccacttcaatgtaaaacggttcaatgatcaccgatatctggctactacaaacacctttaggactatactagtctcgcaaattatattatccataccgc

SEQ ID NO: 7716 - DNA, 771 bp, Zea mays
  unsure (1)..(771): unsure at all n locations
  Clone ID: MRT4577_107033C.1
ggtctatttttttttctcccgttccctagcgtgaggcgtgcgctctcgtggcgactttggacaccgccggcgcctaccctctgtctcgtggcgacgagccgccgccgccgacctaagcgaggtctctgtgggactctttgctggtgacgagcaaccatcaggtccgcccctgatgagcaggcccaacactcgcaacaagagcaagaggccacgatctgatgaatccattaatccgtctgcggctgttttcaagaagatacactccgccggtgatatctcgaaagacgatatctgccagctttacatggtgtggaaaccgccttgccatggctgccatggcaatactaaggattccccaaattgtttctgtgggttgatccctgctgccaatggggttcggaagactggcctctggcagaaaatgcaggaaatggttcgtggtctcggccccaatccatccaaggacctccgcgattccactgatacgcctgctggattgactaacctgggtgcaacctgttatgcaaatagcatacttcagtgcctttacatgaacattgcattccgctcaggcattttctctttggagctggacgttttggagaagcatcctgttctggatcagctagcacgggttgtttgcacagctacactcaagcaaaatgttattcattgattcagcgccttttattaagacactggaattagacatggtgtccagcaggacagccatgaatttctcancttgnttctgtctctgctcgagcaatc

SEQ ID NO: 7717 - DNA, 393 bp, Zea mays
  unsure (1)..(393): unsure at all n locations
  Clone ID: MRT4577_107034C.1
cgcgaggggccagncctacccatgtcctccatggcatttctcttgtaccaactacagcccgactccagaaacactatcaaacgacgatccggctgcatcaataacctactcgacccggacaagcgaaggtacacctttttttgctccagccgggcgctgaataaaaacggctgaatggtcactcgttccggaggaagagatgccccatccaatcccagtcacgaatgatagccggcgactatcgcctatgagaacaggaatggagcaaccacacagttcttcgtgttgacggatcgacagcaatcgtcgaacaccgcggggatcactagggggaagcccaaagacccgccatttgctttgagcgctgacaccgccatgggcttttcttcactt

SEQ ID NO: 7718 - DNA, 986 bp, Zea mays
  Clone ID: MRT4577_107035C.1
aaaaggccatcgctcaagctgagctgggccgacacaagggtcggtccacccacattcgtacgcgtgcttgttgtctctgtcagccatcaactctccagtgagctgcgagcctacaaggctgtgggcagtgccagcctcaacctcgacctcccccagtcccccaccgaccaccggcctccttttccgcaggcacgggtgcacggcacgcggtttccactcgcttcgtccgcgttcggatcgccctcagagtaacagtctagcagagcaagcatgtcgtcgtcggcggagaacgaccccacggtgtcggtgaccgagcgcggaggcaaggacaagcacgaggacggcggcgacaaggagcagggcggcggcggtgttatagctactctactgtctacgagcagaaggaagaggaagacagaattacggaggaaggagcagaggactgctggggcgctgctgttacctttcacgaaacgcagcgaagcagaggatgcggggatcgtcgtcgacctgatactcatacccttagcgctggttaagctcttgcctttagcttatggtgctctgttgttttgcattgtctgaacatcctctcacatcctgagtgtacgttcagtttgaggtttcctgtgttgtccatctgaattctttcaaactttgcggttggaactggatgaagaataaaattccaacccgccctggttcttttgtgggtctgtttggaatagatgctgcctgccaatgatcctgaaataagctttactgaaaggctttatccatccagattccagaagctcacggcctcgcgggctcaacctcaaaccaagagtgtaatccgcctgttgcatcacatcaacaagttaacacattggatgtcaaaaaaaaaaaaaaagggcggccggtcgcgatctagacccacgcgtccgcggacgcgtgggcggacgcgtgggcggacgcgtgggcggacgcgtgggcggacgcgtggg

SEQ ID NO: 7719 - DNA, 377 bp, Zea mays
  unsure (1)..(377): unsure at all n locations
  Clone ID: MRT4577_107036C.1
ctgctcccacctctatcccaacaggtgatgccgccaccgctgcactatccatagccaccgcaagatactgaaatggcgggttctgtcatcactcacaataccattgcacatctcaaccttttccagatgacattcaagagaaagccccctggcatcacacactatagggccaagataaggctgactagtcaacacacgttcatgtactctacacccatatagatatttgttgtgcgatttatcaccaacgacatcacatcacatatcatatctgctagtacagcangtgatatggttcttgcttctgcatactcgcatgagttgccacaatatggtctcgaatttggtctgaccaactatacagctgcctactgcac

SEQ ID NO: 7720 - DNA, 589 bp, Zea mays
  Clone ID: MRT4577_107037C.1
gggagcatctcgcgcttcagatctcgcccaccgatctggaactggaattccctcccgatctagcaagcatgtcgtcgtcggcggagaacgaccccacggtgacggtgaccgagcgcggaggcaaggacaagcacgaggacggcggcgacaaggagcagggcggcggcggcttcatcgacaaggtgaaggacttcatccacgacatcggcgagaagatcgaggaggtcgtcgggttcggcaagcccacggccgacgtgtgcggcatccacatcccgcacatcagcctccaccgcgccgacctcgtcgtggacgtgctcatcaagaacccgaacccggtcccgatcccgctcgtggacatcgactacctcatcgacagcgacggccgcaagctggtgtcgggcctcatcccggacgccggcaccatccacgcgcacggccaggagaccgtcaagatcccggtgtcgctcgtcttcgacgacatcaagagcacctacaaggacatccagccgggcagcatcatcccctacctcgtccgggtcgtgctcctcggtcgacgtccccattcatcggccgcgtcaagatccccgat

SEQ ID NO: 7721 - DNA, 377 bp, Zea mays
  unsure (1)..(377): unsure at all n locations
  Clone ID: MRT4577_107038C.1
nnnnnttcgtctcgagtcccccaccgaccaccggcctcctttcccgcaggcacgggtgcacggcacgcggtttccactcgcttcgtccgcgttcggagcagggcggcggcggcttcatcgacaaggtgaaggacttcatccacgacatcggcgagaagatcgaggaggtcgtcgggttcggcaagcccacggccgacgtgtgcggcattcacatcccgcacatcagcctccaccgcgccgacctcgtcgtggacgtgctcatcaagaacccggacccggtcccgatcccgctcgtggacatcgactacctcatcgacagcgactgccgcaagctggtgtcgggcctcatcccggacgccggcaccatccacgcgcac

SEQ ID NO: 7722 - DNA, 1041 bp, Zea mays
  unsure (1)..(1041): unsure at all n locations
  Clone ID: MRT4577_107039C.1
ggaccctcgggcctttcggggtctctgtcagccataactctcagggagctgcgagtcctacaaggctgtgggcaggggcagcctcaacctcgacctcccccagtcccccaccgaccaccggcctcctttcccgcaggcacgggtgcacggcacgcggtttccactcgcttcgtccgcgttcggatcgccctcaggtcaaccaccactcctcccctctgctcctctcagcatctcgcgcttcagatctcgcccaccgatctggaactggaattccctcccgatctgtatgtatctcacgcacgcttgctcgcgttcttggctttgctcccacctctctctagcagagtaacagtctagcagagcaagcatgtcgtcgtcggcggagaacgaccccacggtgacggtgaccgagcgcggaggcaaggacaagcacgaggacggcggcgacaaggagcagggcggcggcggcttcatcgacaaggtgaaggacttcatccacgacatcggcgagaagatcgaggaggccgtcgggttcggcaagcccacggccgacgtgtgcggcatccacatcccgcacatcagcctccaccgcgccgacctcgtcgtggacgtgctcatcaagaacccgaacccggtcccgatcccgctcgtggacatcgactacctcatcgacagcgacggccgcaagctggtgtcgggcctcatcccggacgccggcaccatccacgcgcacggccaggagaccgtcaagatcccggtgtctctcgtcttcgacgacatcaagagcacctacaaggacatccagccgggcagcatcatcccctacctcgtccgcgtcgtgctcctcgtcgacatccccatcatcggccgcgtcaagatcccgatccagaaggacggcgagatccccatcccttacaagcccgacgtcgacgtggagaagatcaagttccaccacttctccttcgaggagaccaccgccacgcttcacctcaagctcgagaacaagaacgacttcgacctcggnctcaacctgctcgagta

SEQ ID NO: 7723 - DNA, 426 bp, Zea mays
  Clone ID: MRT4577_10703C.1
gccggccgggctgggatccaactacaactccgaacactatcttcgccaaccgaacatccaaactccaacccactgaaccacccaaccaaatccttcacgatgaccgagcgccttccgcgaagacacccacaccaagctacgactagtgcccgcaaccccaatccactcaaatgcgcaggacacaagacgaagagtccctgacggagacggccgacgacgtagcccgcgaagcccaaccctactcgtccaagacgcacactcagtctaccatggacaagatgggccgctccatcgacaaccacgtgcacggctccacgtgagatatcatcgcgaataagacaaacactgtcttggccattgagacatcacgggaactatctcagaggcttgaacaagaaaatgactgagtcggtgaggaaagtgcaa

SEQ ID NO: 7724 - DNA, 661 bp, Zea mays
  unsure (1)..(661): unsure at all n locations
  Clone ID: MRT4577_107040C.1
ccggccgggactcacccggccaaaaccatggatgcacgggcgacgagacggatggacctcgaggcgccgaatcacggcagagtgaccttcccggaaaattcctaggaccggacggcggcgctgatgctggctcctacgtcctatggcgctcctctgtttggggatcggtgctgctgtggtcatcaatgcggtgaagctgaagccatgcgcagtcagcagcgagggccgccaagatccgctggtgcactcagggcaaatcagcagcagacgcagcgaaaccaatttcacagcggcggagccttcacgcccgccggtatcgcagacccggagcggcagcagattatctgggctccgcctcgtgccatgatgaacggggacacggcgtgatccggtccgccttcgtgcaacaatcggctggtcatcgcgtctgcgtgtccagacagcgcatcccgccacccgcatccgtgtgcgcgaccgccactcatgcgtagcctatctcgaagtgctatatctaccaccttctttaaaattctttactttatatcttctttctctccaatgttattttctatatcttgtcttctattcataaatatctatattacagagataatctactttatattttanaaagaaaaaaaaaaaaaaaaaatttgcggcc

SEQ ID NO: 7725 - DNA, 341 bp, Zea mays
  Clone ID: MRT4577_107041C.1
tacatacgatacatccatcctataattaaaaatcccattcttcaccataacaatcaatgcattttttcttatataaataaacctttatacacacatattatttaataacttccgaaccccaactgacaatctacctacacatacattaagacgtacacacattcgtcctttcaactccttcccttcatgattttctattcacaaacacaatttaccatctgtataacccatcctcaaactcatgttaaacattcattattgatgccaaacataccatttaacactttcttaattaccttaatccacaatttggtatgtatcacacctaactacaccttaca

SEQ ID NO: 7726 - DNA, 1512 bp, Zea mays
  Clone ID: MRT4577_107042C.1
gggacctcgagccggccgggaaaaaatatacaaaaaagcatcaactctccagtgagctgcgagcctacaaggctgtgggcagtggcagcctcgacctcgacctcgacctcccccagtcccccaccgaccaccgaccaccgacctcctttcccgcaggcacgggcgcaccggcacgcggtttccactcgcttcgtccccgttcggatcgccctcagagtaacagtctagcagagcaagcatgtcgtcgtcggcggagaacgaccccacggtgacggtgaccgagcgcggaggcaaggacaagcacgaggacggcggcggcttcatcgacaaggtgaaggacttcatccacgacatcggcgagaagatcgaggaggtcgtcgggttcggcaagcccacggccgacgtgtgcggcatccacatcccgcacatcagcctccaccgcgccgacctcgtcgtggacgtgctcatcaagaacccgaacccggtcccgatcccgctcgtggacatcgactacctcatcgacagcgacggccgcaagctggtgtcgggcctcatcccggacgccggcaccatccacgcgcacggccaggagaccgtcaagatcccggtgtcgctcgtcttcgacgacatcaagagcacctacaaggacatccagccgggcagcatcatcccttacctcgtccgcgtcgtgctcctcgttgacatccccatcatcggccgcgtcaagatcccgatccagaaggacggcgagatccccatcccttacaagcccgacgtcgacgtggagaagatcaagttccaccacttctccttcgaggagaccaccgccacgctccacctcaagctcgagaacaagaacgacttcgacctcggcctcaacctgctcgagtacgagatgtggctcggcgacgacagcatcgcctccgccgagctcacacagaccgccaagatcgagaagcaggggatcaccaggatgcaggtgcccttcagcttcaggcccaaggacttcggatccgctgtctgggacatgatcaggggaaggggcacgggatacaccatcaagggaaagatcgatgtcgacactcccttcggcaacatgaaactgcccataagcaaagagggtggaaccacccgcctcaagaaggaggacgacgatgacgacgacgatgacaactgaagtgaggactgctggggcgctgctgttacctttcacgaaacgcagcgaagcagaggatgcggggatcgtcgtcgacctgatactcatacccttagcgctggttaagctcttgcctttagcttatggtgctctgttgttttgcattgtctgaacatcctctcacatcctgagtgtacgttcagtttgaggtttcctgtgttgtccgtctgaattccttcaaactttgcggttggaactggatgaagaataaaattccaacccgtcctggttcttttgtgggtctgttaaaaaaaaaaaaaaaaaaaaaaaaagaaaaaaaaaaaaaaaaagcggcc

SEQ ID NO: 7727 - DNA, 728 bp, Zea mays
  Clone ID: MRT4577_107043C.1
ctacacgccgagtatctcaatttggtgcactggactaccctgcgctgccatcatataagatcatactcctgacttagactagagcgactcagagatctgcttgctccaataataaactcgataactatggtcgatgtcctgtctccaaccgcggcttctctctcgttcgcatcgcgctcgacaatgacatgctccaccatgcacagcatcgctgatgcactcgactgccatgctgccagatggtattcagccatgccaaccccaaggcaagagtctgacaactgcccaagcctggtggaaagagcacacatcacccccgatcgtcgcagcattccgaaaatgcatctctaatgccatgaaactggacaacaggatccacacctacatcaggcgattcgactggctggcgcatcaagggagaaatgttcctactttcactagatcagcaccaaatctagctgcaacatcaaatacattaattcgctgatttgtaccacgggcaattttaagcgattaagggatgctatcatatgataccatatgaataccaataaagcgactgttattaaaattgatatccatcggagcctgactatacgctattcatatgaagatgaggaatgatctaatctgataagactggtatatatggaatgtgtgcttgcagcatgcatatgaagaggtacgtgcctgagagtatcgcttcgtgtgggaactgtctactactg

SEQ ID NO: 7728 - DNA, 2438 bp, Zea mays
  Clone ID: MRT4577_107044C.1
attgggacctcgagccggccgggactcgcttcgtccgcgttcggatcgccctctggtcaaccaccactcctcccctctgttcctctcagcatctacgcgcttcagatctcgaccaccgatctgcaactggaattccctcccgatctgtatctcacgaacgctctcgctcgagttctctgactttgctcccacctctctctctaggagagtaacagtctaccagagaaatgaatgtccggcgacggctgaaaagcggcttcattgacagggggaaggacttcatccacgacatcggcgagaagacagcgggaagccgtcgggttcggcaagcccacggccgacgtgtgcggcatccacatcccgcacatcagcctccaccgcgccgacctcgtcgtggacgtgctcatcaagaacccgaacccggtcccgatcccgctcccggacatcgactacctcatcgacaacgacgtccgcaagctggtcataggcctcatcccggacgccgccaccatccacgcgcaacatcaggagacccatctgatcccgcgaacgcacgtcttcgtcgacatcaagagcacccagcgggacatccaggcggcgcacatcatcccttacgacaagcgcgccgtgctcctcgatgacatccccatcatgaaaaaaaaaaaaaaaaaaaaaaaaaatcgacctcccccagtcccccaccgaccaccggcctcctttcccgcaggcacgggtgcacggcacgcggtttccactcgcttcgtccgcgttcggatcgccctcagagtaacagtctagcagagcaagcatgtcgtcgtcggcggagaacgaccccacggtgacggtgaccgagcgcggaggcaaggacaagcacgaggacggcggcgacaaggagcagggcggcggcggcttcatcgacaaggtgaaggacttcatccacgacatcggcgagaagatcgaggaggtcgtcgggttcggcaagcccacggccgacgtgtgcggcatccacatcccgcacatcagcctccaccgcgccgacctcgtcgtggacgtgctcatcaagaacccgaacccggtcccgatcccgctcgtggacatcgactacctcatcgacagcgacggccgcaagctggtgtcgggcctcatcccggacgccggcaccatccacgcgcacggccaggagaccgtcaagatcccggtgtcgctcgtcttcgacgacatcaagagcacctacaaggacatccagccgggcagcatcatcccctacctcgtccgcgtcgtgctcctcgtcgacgtccccatcatcggccgcgtcaagatcccgatccagaaggacggcgagatccccatcccttacaagcccgacgtcgacgtggagaagatcaagttccaccacttctccttcgaggagaccaccgccacgctccacctcaagctcgagaacaagaacgacttcgacctcggcctcaacctgctcgagtacgagatgtggctcggcgacgacagcatcgcctccgccgagctcacacagaccgccaagatcgagaagcaggggatcaccaggatgcaggtgcccttcagcttcaggcccaaggacttcggatccgctgtctgggacatgatcagggggaggggcacgggatacaccatcaagggaaagatcgatgtcgacactcccttcggcaacatgaagctgcccataagcaaagagggtggaaccacccgcctcaagaaggaggaggaggaggacgacgacgatgacaactgaagtgaggactgctggggggcgctgctgttacctttcacgaaacgcagcgaagcagaagatgcggggatcgtcgtcgacctgatacccatacccttagcgctggttaagctcttgcctttagcttatggtgctctgttgttttgcattgtctgaacatcctctcacttcctgagtgtacgttcagtttgaggtttcctgtgttgtccatctgaattctttcaaactttgcggttggaactggatgaagaataaaattccaacccgccctggttcttttgtgggtctgtttggaataaaaaagatgctgcctgccaatgatcctgaaataagctttagtgaaaggctttatccatccagattccagaagctcacggcctcgcgggctcaacctcaaaccaagagtgtaatccgcctgttgcatcacgcaatgtacctcaaattgaagtccatagcagctagctaggacgttctgtcgggtggtacggtgtacttcctgtcagcgtgaacacattggatgtcattagatttgtatatgaactgtaggtcattttacctctgggcatctctatccaatagaggggcatatgctaggccctaaaaaaaaaaaaaaaaaaaaaaaaaaaaaaaaaaaaaaaaaaaaaaaaaaaatctcgagaaagtggccggtacc

SEQ ID NO: 7729 - DNA, 112 bp, Zea mays
  unsure (1)..(112): unsure at all n locations
  Clone ID: MRT4577_107045C.1
ttcggtggtgaggtatgttacnaaggttggggtttttccaagaaaccctccggttctcgatgtcggaagcgattcatggggcttttgcgtcgcaagggatgcaatttgtaaa

SEQ ID NO: 7730 - DNA, 1275 bp, Zea mays
  Clone ID: MRT4577_107046C.1
atgataaaagaagatgagaatttggcaaaaaagaaaaaatccagtcctgagccgaaggtggctgtgtcgaagaaaagaaaggctccagctctgaagccgaaagctgatttagaagaagttccctcaacaccttctgccactgacgcagaagaaattttaaaggtaatgactgaatctctacctaataatctaagtccgctggggccggaactgatgaagcttttacagaagaagaagaaggagctttcggctgccgagaagcctgctgaaccaaaaaagcgaagaattattactgtcattgaggctattgaagaaacaccgccatcgacctcagcgccgaaaacagcagcagccaaagctgctcctgccgaagcttctacttccgaagctacagcagccgaagccacagacttggaaaacacactcattgatattgatgaaatgattttgaatatggctgaggaagaaactgctgcagctactgaggaaaccccggccgcagtgcctgaaaaaggggagaagattcctggaaaagagaaggagcctgtcgaagatacttcagatgaagaaaatttcaactttcaaaacataattgggcaagaattgtcaaaggctgaaaatgaagagttgaaggactatgccatatcgtgcgggtaccagccaggggcactgctcttcggcggtgttgccaaagagagtttaggatgccttcgggaccgagttggggcgaaggttgtcagcactttatcgaaaagtgttggtttcccgaagctcgaaactgatctcagcagataccaacgacaacacatcgtcggtagcctgttttattctaactttaagagcttactgctaagcaaatccttgaggatgcaacaagacctcgaggacaagaaaaacgaatttataattgagggcttagagaagaagattaaagatcatgaagctgccctagaaaagaaagacttcgtgcttcaaacgatggaaggtgaaattgatgctctcgacgaagttatagctggacatggtgacttttgtgccttgctagcttctcgaggcacgactgccgctttcatgaaggctggctgcacacatggaaatattgtaaacagaccaaactttagcctgtcaccagcagacttggatgacatccctggcctgacccgaagcatcagaaacagattcattactcaaatctgggcaaagggcgcgcgaaacttggctggtgacaaagctcgaagtcaccttaaaccggatgacgaagccgaggagcattga

SEQ ID NO: 7731 - DNA, 449 bp, Zea mays
  Clone ID: MRT4577_107047C.1
atgcttacctgagtattcctatagctatcgttcagctcctggtggtgctacgggggtgactgcgggggcgactgcggctggtggctgttgtcctcatcgaccatctcggcgacgtcctactcgagcgagatctcgctgcagtccctcgagatctggaggagattgacaaggagattgaggacaagaagacagagctggagcccaaggtcgtggaggcctacgaagcatctcctcctgaggtcaaggctctgttcaaggataagaagccagtcaaggtcatcaagaagaactcggctgcggtcaccaagttcctcgatgagctggctaagattggccgcacttgaagaaatcttatatcagtttgaggaaaaactcccagctgaaaaagtggaagctgctcggaagccggaagagttgcaatctgtttgatgccttttcttgaacatatc

SEQ ID NO: 7732 - DNA, 231 bp, Zea mays
  Clone ID: MRT4577_107048C.1
agacgactacattattggtgaagtacggcgcctcctcggcctctagctcatactatgtccgtgcttcggagcgtgtgccatgcagggtccatgcggactgctgcctgaactgggcccgccggctgaaggccactggatactccagcggcaagcagaatgactgaaaaccgaagtagatcatgagctgacgcaataagcaccgtcaaccgcttgacagtcgctcctcttcta

SEQ ID NO: 7733 - DNA, 842 bp, Zea mays
  Clone ID: MRT4577_107049C.1
tttttatcgggaccatgtttcgatctcttcttaatataatactgagagggcatcttttcctcccggccgagtttttttgactacgaagagtgaagacatatttcttttgaattattgactccacacgcatgaatttgctacagtaacttgtctattgaaataatggaaactgtaccgtgacagcaagaatttcttataatctgttttgatctttagatgttgacaacttttatttataatattgaatattgcctactaatattatttgttgaagttgtatattagttaattttctgttcttcatggttgcaagggcagcagcaagcctcaaggagctagaggcccactactactcactgttgtgcggtcaccatcctgattgagggttatcccaggttatctgttaggcggtttgctcttcagggttatctcagggttttttatttcaccttgaatattgcctactgacattaccattacctttttgttgggactaaagtttagtagattcgtcttattgtttagtccttatctgtataattagtttataattagattatatgtaatacttctaaatatcattcaaatatttgatgttctaaatatcattcaaatatttgatgtgaaggaatcttcggaaatatggattaggcacaccgtcctgccatctggcaattcattagggtgccaattgatgtagctgtttggttcacatattgtaacgttgtaacgtgatgggtatattgtaacgttgtaacgtgatgggtgacaaataacattaaaccatatttatttaagtttaaccgtaatcagatactaaaaaaaaaaaaaaaaaagcggcc

SEQ ID NO: 7734 - DNA, 470 bp, Zea mays
  Clone ID: MRT4577_10704C.1
cggcccggaattaccggtgcgggcggcctgtctttttttttttttttttttttttttatattttttttttttaccacttcctaaaatcaaattaagaagggcaaaatggtaacataggggggttacagcattcttattttgcacaacgtgaaattacaagaagggcccaaataaatagataaaagtgcacaggctaacagagcttaacagttcacacaataacagcaacgaccacaaacaaaacttgtaatgatgaaaactaggtattgctaaagcaggcccatgatcgcattattttttcttggcagtagccttggtcaccttggcgccggttggttccttttttttcacacttttgataacttcaacaacaaccgtttttcttattgtacggacagcaaacctacctaggggaggattccctttgaatgtcttcaccaccatggtcttggtgggatttatttttacca

SEQ ID NO: 7735 - DNA, 1270 bp, Zea mays
  unsure (1)..(1270): unsure at all n locations
  Clone ID: MRT4577_107050C.1
ccggccgggaaattcggcatttttgttttctgaaacgaaccgcggaaaggggaaaggtggggaaagaccgaaataggcgacagaaatggcgacggagaagcgcagccgccggcgctcaccgtcggccgccacgccgagcgcctcgctgacgtcctcctcaaatccagaagccgctatattgcactcaccttccccatcgctggacctcatccccgacatcacctcccgcctgatctccctcgaggacttcttcgctctgcgcgcctcctgccgcgcttaccgcgccatccttccgccgtccagcgaggccctcgcctgccagtccccgctcctcctcgtctcccttttcccctccttctccgaggcgttattccacctctcgctccgccgcctccaccgcttccgcctcccctggggccatcacctgcccccctcccgccgcaccctccactacgcgcacggctacctcgtcaccgccaccaccgcgtcctcccactaccccccgaggctcatgctcctccacctcttctccggcgagcagctccgcctccccaaggtccccgcgccgttcacccgcgtcgtcatctccgacgacctggccgccgtcctcttcctgcccggcaggtccattgtccagcactgccaccctggggacgcgctctggcgcgtggccaccgcggatgcgccccacgttgttgaagatatgctcttcgtcgatgacaccctctacgccctggtaaatggcctccgtcttgccacagtcgaactgtctgatggtttgctggaactatcgtttctagtagaggaggtggatgacggcagcaagccagcaggagggcagttcaagctcggagagtgcggcggtgacgtgttgctcatcagtgaggatcacacgggggtgatgctgtaccgtgtttatcggtgggtgtttgaggcggggaagtgggtttcaatcacgagcttgggcaggcggacactgtttcttggtttcttcggatttgcagcctgtatcggtccagattacccaggaatccgagcggattgcttatatgcagctgggccgcgcttgggtgaatggcgcgagtactccttagctgatgggacttgcgatgttcgctatgctgattatccaggtgcaccaccgctgaacaacaattcacctaccagacctncagtctgggtcttccccagcctgtgttgatactggctgtgaattcttcccatcatgtagaacatctgacgctgacttgaaataagtatggaatgctga

SEQ ID NO: 7736 - DNA, 610 bp, Zea mays
  Clone ID: MRT4577_107051C.1
gacacgacaaaacagcgttagctggttttgatgcggcaacaagcgtagcaccagaagcaaatcaaaaaggtgacacaaatctctgaaaaagacgggaggagctgtatgctccaaaacgtcatacagcgatgcgatccctgtcagcgttgtggttcttcgtttcatccttaggggtgctagggctgtacaagaagattaacaaaaaagcaaggcctgaaaaagcattgcgcattatccttttggattaggtgcttccacggccactgttagcttcagttcgctctcacaagtaacttgcctagctgtccatatagctcacgctgctcctcaaaggtgagattacgtagtatctgctccaggattgtctcaacagataagtcctgtaccattacaaatgattggtaatagatgtacgcaaaaacagccatgaccatttggcagtccatcctatctgtaaatccaccatgaccaggtatgctgtccccaaaatccttaaatttgaatgccctcttgaatccacttgcaaaaaaccaccaaatggtgctattattgaagcaaacaagccaagagctaatgcatgccattgaacgggcataattgcaatttctcg

SEQ ID NO: 7737 - DNA, 1614 bp, Zea mays
  Clone ID: MRT4577_107052C.1
actgcgatgctgtttacctacgggcgcttccttagccatcagcttgttaacacgatgactgcagataagttgttgtacaagctggtgagcaggctcatcaagtaccagatgtttatttgctactttctttacatagcaggttcatcctcccagcttcgttaattgctatcaatgatgttgctgcatatttctttgggttcttctttgggaaaacaccactgatcaagctctctccaaagaaaacatgggaaggctttataggtgcatcagtgacaacattgctttctgcatttgtggttgctaatttcatgggccatttccagtggttaacatgcccaagaaaggatctatcaactggatggctttattgtgacccaggtcccatgtttacaccagaaggttatgatctaccgggatggataccacaatggtttccatggcgagaaattgcaattatgcccgttcaatggcatgcattagctcttggcttgtttgcttcaataatagcaccatttggtggcttttttgcaagtggattcaagagggcattcaaatttaaggattttggggacagcatacctggtcatggtggatttacagataggatggactgccaagtatgtacttttaacttgatttgtttccaattacacatttattggtggtggttttgaatgggttaaatcaatctctgaatgtacctgctagtttgtttctagtgtattctctgtaacatatttagtgtgaattggtgattaaaaaagaatgtgtctttatgcatggtcataaatattttttttattggagaatcaggctttgctgccaattccagaccttaggacaagtatgtagttatgctcattctctctgcatgcaggtcagacttcaactatgtttttttgttaaaaaaaattgtgtatgcaaacaatgtgaaacctggtagattacagtagcgtttttttttcttttttctgagaaactccaaaatatgtcttgcagatggtcatggctgtttttgcgtacatctattaccaatcatttgtaatggtacaggacttatctgttgagacaatcctggagcagatactacgtaatctcacctttgaggagcagcgtgagctatatggacagctaggcaagttacttgtgagagcgaactgaagctaacagtggccgtggaagcacctaatccaaaaggataatgcgcaatgctttttcaggccttgcttttttgttaatcttcttgtacagccctagcacccctaaggatgaaacgaagaaccacaacgctgacagggatcgcatcgctgtatgacgttttggagcatacagctcctcccgtctttttcagagatttgtgtcacctttttgatttgcttctggtgctacgcttgttgccgcatcaaaaccagctaacgctgttttgtcgtgtcagtggtttatttgacaatgtgtaggagatttccacctgtgagtctcttcgctagtactagtagccggtgatgcatccatgttttttgttactgtatctactacctctgttcacaaaatatatgaggttgttgactgtttttttagaaaatttaataattcatattattcaaaagaaaaaaa

SEQ ID NO: 7738 - DNA, 455 bp, Zea mays
  Clone ID: MRT4577_107053C.1
aaaaaaaaaatcgaagaacatccagcttaacccttaaggaagccgtccctttaaacagcataataaatgtatctggaataagatgcgtgggcaccattagggcttgttcggttgcgtcggattgcacccggaatcgttccggctaatcaaagtttatataaattagagaagcaatccgaccgggaattgttccgacctaccaatccgacacaaccgaacaaggccttaccttagtgtgctccaattggtatcatttggcccatgctcacgctatccttttgcctctatgcccggaactaatcaggcgtgtgagaaatatccatgactctcccaattgctttccattagcaaaatgattacacttctgaattgtctatacgattcaggctgatttgattggtaattgtaaacaacctgtccttgtatattttaacacaaaccaagtcagttggctg

SEQ ID NO: 7739 - DNA, 858 bp, Zea mays
  Clone ID: MRT4577_107054C.1
ctcgaggccggccgggccgggactcgcaacaaagcacacacagcaatagctagcccacagaaacacacttgagctgatcgagcagcactagctacagctagcaggctagcgctcattgttcgctagctgatcgatcgaccgaaggagccaagaagagacggtggtgccgcgccgtacgtgatggcggagagggtgtcgagactatcgacggagaaggcggtggtgatcttcacgacgagccagtgcccgatgtgccacacggtgtcgagcctcttctccgagctgggcgtgtgcgcggcggtgcacgagctggacaaggacccgcgcggccgcgacatggagcgcgacctcgcccgccgcctcggacgcgcgccgcccgtccccgccgtcttcatcggcggcaggctcgtcggctccaccgacaagatcatgtccctgcacctcgccggcaagctcgtgcccatgctcaagggcgccggcgccatatggctctgaattcgcgattattcgctggatcgaacgtaaacccccggaattttgcacctatatctatatattcccatgcatgcaactaattaaatactcctaatggggggtcttaatataaattattaagagctatatgtacgtacgtatactctcgtgggtatagcctagctatatatagagcgcgtccataaattaaatcgttaagatatatgaagcggcctatatatgtggaccgtccgatcacaacgggtgtatagttaggttgagagatgacttttcttgtttgatgagatacgttttttgccgctaccagtgctgaaaagggtgccaataaaggaactttgtaacattcctttttccagttttcaa

SEQ ID NO: 7740 - DNA, 233 bp, Zea mays
  Clone ID: MRT4577_107055C.1
ctgctcttggttcttgatccaaatctcctccaccttctatggaaactctgcttggaacccacgcaaggaaaatgtggtgcttggaagtcacaccgctagttgaatcggctgccagttgagagccatccaaccatcctctctcccttctgcatcaacgacaggccgaaggacgctcacacaaggacgactgaagctatgctccagtgtgagttgtagagagaactacaacagag

SEQ ID NO: 7741 - DNA, 402 bp, Zea mays
  Clone ID: MRT4577_107056C.1
attaaccaaggattgaaccggggggggaggacaaatatttcaggaaacaggggggaaaaaattcggagggaaacaaaaaaaaagattgcggataaattctgaacccaagtaactatgcaggactaaaatctatgcaaaaaattgactaaatgccaaaacaaatcttggacaaaaaaaaaacaaaaaaggccaattgggaagcactatagttacaaaaagggcaatagaaaaatcatggatatggtccattggaagaattataaaagaggcatgcaaaataacctaaaatatgggcttttaaggctaaagcttggaatttaaggctttcaaaccatcaggattggatcccagggtggctccaactccaagaaagaaaaaaaggccttaaaaaaaaaacctttt

SEQ ID NO: 7742 - DNA, 528 bp, Zea mays
  Clone ID: MRT4577_107057C.1
tggatactcgagaccaacctacagcccaaccatcctacccctgcggctcttcaacgccaaagaaaccacctgcctcagactcaccacgatcctgttcgtcaaaaattactgacatttctgaggccgtgacaagcacgtggtccacaaagttggacacagctacaagggccttgagttaagattcacccaagagttggagctcctctccctaaagttctgaatgaatgaactggaccgaaaactgaaccagatggcctgattactgacaagcactatatcgcatggctgccatgatacatatgcatctgacacatgatgaaaatctgcaggctctgcatgcaatgaggtatcggatacatagatcgaggtctgtctacaacacaattatccatgaattgactatgtgcagctaccattaccgcgctttcaaatatatgatagacttcctcagtgctgaacttgcacatgaatatgtgacaagcgtgtagtgtcgttaccagcctccgactcccataacgtcaaggatag

SEQ ID NO: 7743 - DNA, 408 bp, Zea mays
  Clone ID: MRT4577_107058C.1
atggcggcagcagacgagcggaagcagcggtcaagtctcctgcaggttcacgtcccctcctggagcggcaggggagccctctcccacggcgtgaagacgacgcgcccgtgttccgttcctcaaacgactcgagcacgcgcgacggctgcccagcgaaccgcctgtcccgtcgcattaactccgcggcaaggcaagcgacacctttggcaggcgaagcgggcgtcgtttcacctccgccatgatgaccgcgtcaaaaaagggaccgggaaaggggatatttcaaaagggatccttctccgcgaaggaagcgggccccgagccctcctactgatcaggggttcgaaggctggcccttcagaagggttcgacagccgccccagagcactcgggcttcaagctcattactga

SEQ ID NO: 7744 - DNA, 1257 bp, Zea mays
  Clone ID: MRT4577_107059C.1
atgcgggggaaggcgaactgctgctgcctagccagggtgcagcattccgtcctctgtctgggcgactgtggccggctacaccggggggtcgcacaacacgtcgtacgccgcgagggaggtactcgtgttctgggacggtcccgttctcgtgttcgtggcgaggacgggagtgaggacctgtcggtgcgctttggggcggccagcgctcgccggtgcggtgttggcgggcaggtggatgccgccgtcggtgctgaggtggtggcagccggagaaggtttctccgccgacgacaccgtcaacgccacccacgctccgggcctccagctcttgggctttaatggctggttcttgtcccccgtgagggacgtgaacgagggccttccagcggtaacattcgccctggggccattgctgctgctgcagaggttgccggcgagccacccggagtttgtcgtcccgcaggccctccgctggctgaggctacggagcgccggtcgaggtgtctgcctagggcgggacccttgcggagaccttggctatgatggcccaagcttggtgctggcgtcctccttcgaggtggaggacttgttcgtcggtagcagaatcgtttatccgagcgagagttacttatcacggaaggtgatgagtgaggatcccgctaccgaagcagtcgaaaagcgcgaaagatgttctggcagaaagactttttccgaggaaacttttgacgcagagggggtcccccccttctcaaccctgcgcatggcccaacagtgccaaccaagcacatcggtcacgcgtcggtcagccgagggagaaggtgcgacgatcgatatggccgaaagtgggccgacagtaatggtggcaacgggcgagcggaagcagcagtcaagtcgtctgcaggctcacgtcccctcctggagcagcaggggagccctctcccacggcgtgaagacgatgcgcccgtgttccgttcctcgaacggctcgcgcaacgaccgccccgcaaaccacccatcccgtcgcattaacttcgcggcagggcaagcgacacctttggcaggcgaagcgggcgacgtttcacctccgccatgatgaccgcatcaaaaaagggaccaggagaggggatatttcgaaagggatccttctccgcgaaggaagcgggccccgagccctcctactgatcaggggttcgaaggctggcccctcggaagggttcgacagccgccccaaagcactcgggcttcaggctcattactga

SEQ ID NO: 7745 - DNA, 135 bp, Zea mays
  Clone ID: MRT4577_10705C.1
accacgcgtccgatgaacactgtcctaccatgcagtcaacgctcatcgtcggggtatcagcttccgcgtaagacgacacccagtatcagctgggaaggtagtccgttgattgtgctagctgctagtgatgaccct

SEQ ID NO: 7746 - DNA, 338 bp, Zea mays
  Clone ID: MRT4577_107060C.1
cccggcctcatcctcatacacagttacacccttgctcgtgccaacagccgcatgcaagcccgtgccatgctgctgggaacctgcggcgttggcatcaccccgatcctgggccaacgcgtccagttcctgaggcatcaatgcagcccgacggctacaccctactgcttgcctcaaggccagtcgctgcggcagcagtgttgccagcagctcatagcaggtggagcctgagcaccggaaccagacgatcttcggcttggaccttcagtccatcctgcagcagcagccgcaaagcggccatgtcgcggggctggtggctgctcacatagcgcagcaactga

SEQ ID NO: 7747 - DNA, 350 bp, Zea mays
  unsure (1)..(350): unsure at all n locations
  Clone ID: MRT4577_107061C.1
cccacacgtncggttggctactcctccccctccagatcgcgttctggtacgtgaggctcaccggggtggggttccgggggggagcagaacgagacggccgcgtccgatgttgagtaccggtgcttcgacgggggcccagactgggccacggacgaccactccctaaacaacggcttcagcacctacagccaggtcctcgagtccaacatcatcctagatcgtgagacacacaggtcccgcgactttgggtccaccacctagtacacggaggaggcgatgcgacacgccatccagggcatgaactgaaaggagcaggacggccggaacatcaccgccaactaagcccattc

SEQ ID NO: 7748 - DNA, 840 bp, Zea mays
  unsure (1)..(840): unsure at all n locations
  Clone ID: MRT4577_107062C.1
tgggaccctcgaggccggccgggnctttcgaatccagttcaagaccaagcctcgtagctcgacgggtgcgtgcgcgccccacaagtcgagcacgtgagagatcacccgagtctggcgatgcagctccagatcctctcgtcgtcgtcgcacctgcagcttcctcctcctcctccagctgctagctcccctcgaagctctccgcgcacctggtggagccgcctccgcacttcctgttgccggctttgcgaagtggatgtacgcagcgccatggacggccttccaaagtgtctggtagactgtcgcttcggtgttccgctggaagtgatctaccgccctcggcagcacaatctcttccagttgctccagggtcacgccggtgtgctgttctcccccgtggacggacaccgtcgtcgaagaagctgtatctgccggtggtggtagcatgctttccgaggagccatgggggctgaagaggagcccagcttccagatcctgacgatcgcgcagagggtgtctgcctctgccttcagacgtcggcgacggcgacgtcgtccgatgtccattgttgtgctcggacggcagtagtgagatctggcactgcaaattcacttcgacaactgaacccagagcggcatccgccgtgcatcggctatgctggccatgctgctgctgcttgcagcataatgggtctgggcgaaaccatcgagtgctgaagctatggagatcgtcccagtgtcttttgtgccagtgaccagcgtacggcgcccatgagaagtcctgtgtcgtgggcagctgagtgagttctttcctgatggtgtcagcccgcggctgaaagtgagc

SEQ ID NO: 7749 - DNA, 220 bp, Zea mays
  Clone ID: MRT4577_107063C.1
cttcattccacttgcactaggatcgatcgatcgcatatggcggtactgtgcgagataacatcgggctgcttgctcatccggcttcgtagctgctgggctgccatgcctgactggggctcacgtcagctatgggaccaggcacatcagtaacagtggcggtgctagtggtattccagcagcagcaagagccacaagcaaggcggagggggacgagcccatg

SEQ ID NO: 7750 - DNA, 188 bp, Zea mays
  Clone ID: MRT4577_107064C.1
ccggccgggattctctggaggagaccacaccctgcgccacacgcgcgctttttcttttttcccgaagggaaagcgaaaagaggggaacccgcgcccatagagagtcgcggggaggggatatccgccgcgggagatatagaagagcgacaaactcttgtgcctgcccaaacttcccaaccagccggagc

SEQ ID NO: 7751 - DNA, 220 bp, Zea mays
  Clone ID: MRT4577_107065C.1
gcacgaggtgatgcaggaacccccaccaccaccgttgcgccgccgccgatgtgtacatacggccggctggtgtaggagagatctggcgatgcggcgggcggcgaccgcagaaggaagcaggcagcaacaccttcacattctgttagctccatcactctctctcaaaatttctctcctttctcctagcgtgctccacacctgccttgatattttgttggtg

SEQ ID NO: 7752 - DNA, 338 bp, Zea mays
  unsure (1)..(338): unsure at all n locations
  Clone ID: MRT4577_107066C.1
aaggaaaccggacaaccagaaccagcactttncaggttaaggcgcaacaacccnngaaaacgagacatagaacaaacaatccccanccaagcgcccnccccccacccatacaggcctaacgacgcttacctgaccgaaaaattacatgccccacctacaggacacaacaatgcaaagtagcaaaacgggccaaaatgacccccccaacagaacgccaattaccaaacaaccgaaacagaggcgcaaaaagcaaaaacagcaacccttcaaggaacacacgcacaaacaatatagcgactgtagacagcacaacgaccacacaggcacaagtcaacaac

SEQ ID NO: 7753 - DNA, 738 bp, Zea mays
  Clone ID: MRT4577_107067C.1
ctcgaggccggccggggtacattccagcaatcatctatgcagcgactagtgtttttttctctctgtgtcactcatttcttctaggcgtcttgactagtttctttggatcaacttcttcacttacatcctctgtggactcatcatgagcggagtactcatcaggatctttgcgcgccgggatgatgaagacatcagattcgtcaggtaacctgaagctaaccctcctgacaatgctgttctggcttctcagggacatccgatcaatggagaagctctccctgacgtttggagagttgttttcgtaagcgcagtccatgttaagtgggcagaccttcggagaatgcctccgaggagatggcgccccaggtgcatcgccatcgatgctctgtggagaatacaggatgtcttcaagagtgccttgccttgcttctgccctgctcctggtcctgaccgtgttggtctcacggcgacgcggcttcccttccaggcacctgggcttcatcctgtccacgatggatctcacatagcaagaaccacaactctgtgagcccatctttttcccctcctatcgtggatgctagatggaactgtatgccttgagcattcgtggcagtgctctcctaaatacatatttataggcaatgatgattagagcgaagactccaattggagacaggaaaatcagtaacttaactaggatttcgcgagtccattagtttttaaagtggaaaattcata

SEQ ID NO: 7754 - DNA, 2366 bp, Zea mays
  Clone ID: MRT4577_107068C.1
gtccagaagcaggatcatgatcgaggaaataacagtaggtctatctcaccgccactaagggaacaaaggtataattaccgtggacgtgattttggcaatcctccttacttgggcggacgcgtggtcaagggggaagtatgctgaagttgataaacaaagatcgtcggggagtggtggatacattggtgggttgcaccagagatatgaaagccggcttggtggatactcaccaaggaaaaagaaaacatcactgcaagctgagcaggcaactaccaagactccttccaaggtcattcagtccccagaaaaaaaatcagccacatgggatcagcctcctgttaaagcaaaccaatctaactttcctaccactttcctgccaactgttggccagatggctcctactccattcagtttcagcgtgataaaggacccttcaactacagctgtgacaatgttggcaggtaatagtttgactgcagattctgtccagcttacacaagcaacgcgcccactcaggaggttgcacattgaaaatttgcctgattcagctacagaggataagttgattgactgcttgaatgacttcttattgtctactggcagtaaactccagcggtctaaaccatgcctcagttgtacgataaacagagaaaaacgtcaggcttttgtggaatttcttacaccagaggatgctacagcagctatttcttttgatggaaggtctctaaatggatctgtgttgagaattcgacgccccaaagaatatgttgaaacggtgaatgttacccctaagaaggcagaagagactgctttgatatctgatgttgttgcagattcaccatacaagattttcatcgccccacgcgtccgcccacgcgtccgcccacgcgtccgggagattgttagtgcatttggcccattggctgcataccgctttctttttaacaatgagctcggtggaccctgtgcatttcttgagtacgccgaccgctccgttacttctaaggcatgtgctggcctcaatgggatgatgcttggtggacgtgtactgactgctgtgcatgtgtttcctaatcctcatgtggaggctgctaatgaggcttccccattttatggtattcctgacaatgctaaattgcttctgaaagaaccaacaaaggtcctgcagctaaaaaatgtgtttgaacgagaagagtatatgctactttcaaaatctgagctggaagaaacattggaagatgtacgtgttgaatgtttggagcagtcaaatctgtaaatgtagttgagtatcctgctgctggtgtcagtgctgcagaggagaacatagttgagctcaagattgaatgcactgaattttctgatacggaaaacattgcaaaggctgtatcagaatattctgtaccgattattccgagcatagatgttctaaatcattctgtcgcttcggatactaaagatgtggatcttattccagagagtcaggatcagaaggacaaacacctcccttcaaatgcagcactttgtgagagtgaggcacctgtagcagatgaggacgcagagcttgatgaaactcagtctagagctgctctccccacaccgcaacatgctgaagctgatcatacggaagcagctgtggatgagaataaacatacaggagcagggaaggttactgctactgcaacggacgacgatgcagtagaaaagagtcatggagacccaagaacctcagagacctgcaatcctgctggacctacagacaaagcggagaaacctggaaggtactccgaacaaggcgctggtgatgtgactgaagatcgtccagaaaaagaagcccaagctgttgggaccagcgacactggtttcgtgtttgaacctggttctgtgcttgtggagtttttgcgggaggaggctgcttgcatggccgcacattccttacatgggcgtcgcttcgggaacagaactgtgcatgctggatatgctccgtatgatctctacttgcagaaataccccaggtgattctgcgtttgcgactgcatgaggtgcgatacgagctttgcctatgtgccagtatttcacagaaacttcagacttgtagttttggcttttgagcctttggatggttcttccggtccagatagtggtaccattagttgaacgaaatatttggaaatgttgttccacagtagatatcggatggacaataggatataagtactggatagagacacaagttgtcgttaacatcgttctttacttcgctattaatgttttttatgacgtcagacattagtgtggatggatggatggatggatggaatggattttttgcaagattttggctgctataatctcatattttttttact

SEQ ID NO: 7755 - DNA, 1263 bp, Zea mays
  Clone ID: MRT4577_107069C.1
ctcatgactcacccttcctccccagctttccaccaccttgtatacagcgcacgctcggctcgctagctaccgccaagcgagctctcctcctccacttctgttccatgcaccgccgcccgctccaggttcctacttcctagctaggcgaggctggcattaaagactgaacgcgctccgcgtgtttcgtttctgcgtgtcggttcgccttgctgggatggagaggccgtggagggacaaggacaagggagcggcggctccggcggcggggagggcgcggcggtacggcgaccagccgtccttctcgtccacgctcctcgacgccatatacaggtccatggacgagcctgacgacggggtaacatcgtcctcctcaaccgccgccaagaagcagaaccaggacctgcgccacagctgctactactacaaggcgtcgctggcggcggggagctaccgcggcagcagcagggcggcggcgccccgggggccacaggccgccaccacgtcgagctcctccgatcagtgctccagctacggcgggttctcgtcgtcggaggcggagtcgtcgcagcaccggcgcctgcggcccatacgcacgagcctcgccaccaccgcggtggccgtggccgcgcccgcactcgcgccggagaagaagaaggccggcgtcagcatccgcgccaggctgagggacctccgccgcaagccggcgtcccccggccccggcgcgcggctggcggggttcctcaacgccatcttcagcggcaggcgcgcgccgccgtcggcgtcctcctgctcgcgctcctgcctcagcgagacgccgtccacgcggggccagccgaagcggaccgtgcggttcctggacagcgacggcggcggcgagcgccggaggacggtgccggtcggggtggcgccggagctggagcagatgctgctccaccggatggcggtggacagcggcgacgacgacgacgacgagagcagcgacgccagctccgatctgttcgacctcgagaatttcgcggccgttgacccggacggcggcgccgcgtacagtgacgagctgccagtgtacgagacgacgaggctggtgctgggccaccgcgccattggccacgggtacgcgcgcacgggaggagtacccaccagagtggtgtgaattgtgatcttgctgccggccgggatccattccggttcctgagcgccagggggtaactgtagaatacaagtgagcggtttgtgagggaaatggcaaagcgagttccaatc

SEQ ID NO: 7756 - DNA, 261 bp, Zea mays
  Clone ID: MRT4577_10706C.1
tggaacctttgggctgatttatgtgcttggttataatacatctattaaaatccagctccccctcctgccttcatcttcccatcttgaggcgcccacaaaacatgagtaagttttattattatttcaacaacaccgccgcatatcatactactacctctctatatccaattattaaaatgactcaacgaataatcccctcccacagatatttccccctccattatctactccaaatgtcgctcccatttactcgacaaacga

SEQ ID NO: 7757 - DNA, 195 bp, Zea mays
  Clone ID: MRT4577_107070C.1
gggggagaaaaaaccggggtggccggaaaaggccctcccattttgtccccaattaaccgggtgtttgggggaccaagtggatccccctttcctttttttttgggggtcaaaacaagggaatgccccccaagttgttttcttcttctggccccaggcccttaggtctttgggggtaaacccaccaaacttaacccc

SEQ ID NO: 7758 - DNA, 487 bp, Zea mays
  Clone ID: MRT4577_107071C.1
aaaaaaagcacccacattccttgttgcgtcgcacgtgatcgtcatctcttcgccgggccgatggcggacgccggcgacagcaacatggcgctggagcattacaagcctggcatgactccgtgctgacgtcaccgaggacgttgaggcaggggcagaagtgggaggaggagtatgcgcgctacttcactacgccggggcgggaccccacccgcgtctccagcatcatggctcctctacaatatgcggagcgtacacgggcaccagagaaactggatcctcgactcaagcaacactggtttttatgccagccaccctaacctccgctgggtcaaccatgcgcttaccaagtacagagtcaacgtggggtcctaggaggacatttgtggggactcttaagaactctaagactgaggttcatcacaagacagaggggaccatgataggaccgaagagatcttctgtatgcttctgagaaaagatgcaaaca

SEQ ID NO: 7759 - DNA, 714 bp, Zea mays
  Clone ID: MRT4577_107072C.1
gtgcggcgctcgaggcggccgggcacgataactctccacggaacgaacgacggacaacaactagttcacaccaaaccatagacaccacccatgacttacctggcggagagatacgatctccgtgatctgacgaagcgagccaccccgttgaggtgccgaatgtcatcctcagtccacgaccacgcctatgagacggtcttgcgggtagatagatgatctacctcgacgatcatgatctgcaccctcctgcgggcgtacaacctgtcgaagggccacctccacttcaatgagccgtcgccgtacccctatattcacatccggaacaaggacgtcccatggggccctgatgcgttgtttgagacgtacgacctccactgaatgctgattatcacaacttcaggaattggtgcacgcttaagagattatatgtatgtttcagccgattttccttttcccttgagacctatttgctgcaaccacagataagagtgaccaaaatcttgcatggtaaagggaagaatgtaactgtgtctaaatgaaagcgtcttgtctatcagaaaaaaacaaaaaaagagtacctaggcggcgcgcggcgctcgtaaaactacacggatccactgcaagtgcaagagttcgatactactgcttattcaactcgtccagctcttaggggtttgacagctaccgattggccctatagtgactgctattact

SEQ ID NO: 7760 - DNA, 106 bp, Zea mays
  Clone ID: MRT4577_107073C.1
cgacgcgtcggagcatctcaaactcaatcattatgagatccagatctatatacacctctaggtcaaagctatgtagatgctgctatgcgagcttctcttcagtctg

SEQ ID NO: 7761 - DNA, 772 bp, Zea mays
  Clone ID: MRT4577_107074C.1
cgttggtgtcttcgataatggtggcgtgcgtgggactaagaatgcgaattcgttatttcatagtggtacgatggtgcgtggtaatgcttttactcctaaggatggtaagggtcgcggtctacgtcatgaggcgagacgtaaggaaaaattcgagcgtctgggtaacttcgctatggcgcctactatagatacgaatcatgagttcactgtctttcattatcctgatccgagtggtaaggttcctggtctttcggtaaagtttgggtctaatgataagtcctgttatcgttggcttgcaacctttgggcttatttatgtgcttggtaagcattttgtcgggtagaagactgcgccttatactgagaagggtcgtaattttaatcattcggttgcgtcggcgaagcccgcggtggatgacggtgatactgcgtcgacggaaacttaggataagccgctggtcgagcggaagtttacgaagtctctccggggtgttactcggaggacggatatcgttaaggtgtctaagggttttcctctcacttgttctattagtgagcttggtaagaaggctactgtcaaagatactactttggtgaatcggagatttgacgttgctcatatccttaatgcttaacctcatcagatcccgaaccgttcctgacctacttggtgtggtgggtcacggattcgtagtagtaagtcaaccaagccggttgacacacacacaacacacaacggaagtttcgggtcccgaccaccggggaagttttta

SEQ ID NO: 7762 - DNA, 417 bp, Zea mays
  Clone ID: MRT4577_107075C.1
aggaaaacctcgtttccaaggctcgcttacaaaacgcgtaggaaaatggaatttggcaactttttttttggaactccctccctattccatgaaaacaaacgtgaggcccggttagcgaaacgccactgctgttttgctttttgatcaccctggcccttccttaacaaaaaaggctcttttgaaaggttggtgaaccacaggttgtcaaccccaataaaggtgatgctgggtgaaaaaggggcaaagagaaagaaaattgtctaaacccgtttcccttcctgggccgttttcccctactccgggcccaccaaagtggatacgtggcctatttctgggactcgtagctgctaacacttttgaaactctcaaccggttgctcagaaacgactgaaccttctgaaccttgagaccctccta

SEQ ID NO: 7763 - DNA, 303 bp, Zea mays
  Clone ID: MRT4577_107076C.1
gccgcacctagagggacgcatccgccgacgcgtccgctacgccgacgatcatcgctacgatacttgcttgtcactgtcgccggaattcttgccaacagtcaagagcagccttaaccctggctcctctcatgatgaacgttatgtgggtctcctctccataagcggtgagaccgagacactagacatgatgccatcatcaagcactgcacctactgctctatgacctgcacgtggtcagaaaccacctcctgtcaagactgatagtaccagcaagatggctactgacagatccagccgcaccaa

SEQ ID NO: 7764 - DNA, 438 bp, Zea mays
  Clone ID: MRT4577_107077C.1
actatcatttttttttttgttttttttatgccgcatgccaactgactttatatagtgaatcacagctaatcagtcgtttaaaatgagggaaccaccaatgaattgtcgttgactggaggccaatggctctgtctgatgatgttgcacaaaggacacccgttgtggtgcatgtagcaggctaaatggtataaccatttgctgctgcaaaaaagcaacgaactgcagttcggtcaatagggaaacacgaataagtggatgtagctgactaaatggaagaactatttgcttctgcaaataaacgtggtggttcagagcggccaattggttaaatggaaaaagttgttgttactgaaaatattcatgatctatctagctaaatgaaaagatttgctgctgcaaataagcagcaggattcagtgcaaacagctgcttgaatgg

SEQ ID NO: 7765 - DNA, 201 bp, Zea mays
  Clone ID: MRT4577_107078C.1
gatcctgtagagccacctcccttttcttatttttattatacttctctcagcccccccccaaccagagtcgatcttttttaaaatttaccacttaaccacctccctcattccaaacacaatatctatatacaacacaacctctcattgttaccaacaatctccaattattaaatcttcactctaaatctacacacacactat

SEQ ID NO: 7766 - DNA, 547 bp, Zea mays
  Clone ID: MRT4577_107079C.1
tgtagcagcacgaacgtccgaattccgggtcgaccatccaccgtacaggttagcacgagctcgtgccgtttttttatcgtaacaccaatattaaaaatgaaaaatagtgatgcaatggttggttataaccagacatacataaccatcgattcggcgctctgccgtaaatcagaaagcatacttcagttcctagatgaattataaactcctgtgctcccaacgaggcaccagatgctactgtaagtaaccatgaatgagaatgatgcaccagagcagtatctgataacatgatcaaccataatattacggttttcagaagatgcagtacgatgcatccgagctccccaggttgccagccgaagcatttacatcttctgcatgataacagagtttgcaagcccagcttgctccacggtctgcgttgggtcagccagctgcttgggagggaaacccgtctgcagctgataaggccttgcagctccaggccgagctgcgtctataaaggacctgatgtctcccacggtgtggtgcatgttgaaccgggcga

SEQ ID NO: 7767 - DNA, 824 bp, Zea mays
  unsure (1)..(824): unsure at all n locations
  Clone ID: MRT4577_10707C.1
gagccggccgggactcgctcttgctgcgccctagccgccggcctgccgctgtccgcccttgcctcgccagccgtcgcggtgctgccctgaggcctccgtggcgctccgccgcttgctcgctccctcactcaccccaccgttccgcgcagcgagacgagcacgtcgcgcctgcctagccgccgacgacgtacccgacccagctggggcggttgcggttgtggccactagtggacggcccgggcgcccgacgttgcgtagatgtacagccggtcagctctcgaaaagaccacgccacacggacgccgggacgcggccaggccatagcgggcgggcgctggagcagcttctggcatcctgatttgtagcagcggctaattacgtgaagccttgaaccagtgggtttctgctagtggtactgtgccatggcagtactagtggtaagcacggtacgcgggttttggattggcagtagcgccaacgcgggccgcagcatgacgccgaactagatcctctcaatcacagcatctatcatcaaagcaaaccaaattgagcaaactttgttcgtcgtatgcttgtttccagctccgacgtttaccacacgccttcatcctgagcaggttaacatgtcgctgatagtccatgagagcgatgtaaaggcactcgtagaagccctttatcaggcgttctttgaagacgatgtcctggcgcgcaagtcgaagcagagaaccttctcgtgggctgacccagtgtanggtttgctgcgtccaggagtgggtagttagtggtgcataagatcacgngacctttattnttattttctttgg

SEQ ID NO: 7768 - DNA, 406 bp, Zea mays
  Clone ID: MRT4577_107080C.1
gcagacgctagcgcatgcactacacacaccgtaccgagtgaacgaaatggcaggtgcgtgagcgaagacctcgaggttccgcatggagcgctccttgtgaaagattctcaacagtgtacacatgaacatagtcggacaaagggaaagaagaaatgaacagaagttccaggaccagcgtgaagcagggtgggagttctcttacgtgtattttcctttcactttgtagttccagtagtttaaaattcacttaacgttttgatcattgaatgccacatataatgccacaccagacgcgccgggattcgatgaccaaacgtcaacgaagtacatcgcgggcgccaaggtgaggctggagtgcaagcacttccgaaccggcaaactcaagcgcgcaatctacggggtcacc

SEQ ID NO: 7769 - DNA, 310 bp, Zea mays
  Clone ID: MRT4577_107081C.1
cctgcagtaccgtccgaatccctttcgacccactcttcctctttgttcgtctaactttcgatgatcctacactttcttgcagccattcaccggggaccagcattcatctggaggagagcatcacactcatctaactgatattaggataagtttatgtacattaacacacccactatttctttcaaaaccattccctaggaattgtctttcactaatttaggctacatttatacactaccacagtttctatggacacattttcttattattacaattacctcttatgtattaccaccccatatctttccta

SEQ ID NO: 7770 - DNA, 325 bp, Zea mays
  Clone ID: MRT4577_107082C.1
tgagatcgagtatcttccgacatctcatccctgatgaaagtgttgctagtgaggtgcgctgccacttgtcatgtcaaggtggccctgcacgcggctctattgcgatacaccgtatcatccgcgcccaataagtgcagtcttgccctcgcagagaaagacactggattccttaccgtattccaaaagaatgtgcctgccggaccactgtcactaagaacgcgggtagcgacgaccgcacctgttgccacgccaatttccaatacggccgccaccgatgggaagaagaccgtgcgacagggcttggtggatatcacgggctcatact

SEQ ID NO: 7771 - DNA, 1384 bp, Zea mays
  Clone ID: MRT4577_107083C.1
gagattttggctgagaagtacaaggataggcttgagagctcttataggggtctaatacatgaggtattctccaaggtccttcgtggcctgtctagtgctaaagtgacacggccaagtacattccgcagttgcctagatggatatgcagtcaaatcatcacttaaagctgaagatggtttgctttatccactcgaaaagggcttcttctttctgccaaagcccccaacactaattcctcatgaagagattgagtatgttgagttcgagcgtcatggtgctggaggtgcaagtatatcatctcattactttgaccttttggtcaagctgacaaatgatcaagaacttctcttcagaaacatccaaaggaatgaataccataacctcttcaacttcatcagcggtaagcatttgaaaattctgaatcttggagatggacaaggtagaactagtggtgttactgctgttcttcagagcactgatgatgattctgttgatccacatctggagcggataaaaaatcaggccggtaatgaggaaagtgatgaagaggatgaagattttgtggcagacaaggatgatagtggatctccaaccgatgattctgatgcagaaggctctgatgctagtatgagtggaggagaaaaggagaaaccttccaagaaggaagctagtagctcaaagccgcctgtgaagaagaagcagaagagtgggccagatgaaggttctcaaaaaaagaagccaaagaagaagaaagatcccaatgcccctaagagagctatagctccattcatgtacttctcaaaggctgagcgagctaatatcaagagcagcaatcctgaactggcgaccacagagattgcaaagaagctcggagaaaggtggcaaaagatgacagcggaggagaggcagccatatgtggagcagtctcaggtcgacaagcaacgctatgcagaagagtctgcagcctaccgtggtgcagccgctcagcagggctctggtgctggatcggaatgaaggtttaatcgtctcgacagttaacttgcaaggctggatgattgagtcgtcagaataaagctggaatacccaaaaacctaagctgaatgtcatcgtttgacctgttgggttgttccggaattcaaccaggattcattctagttcatcaatgcttatattaattaggcaagcaatctggtctggaatcgatcgaggccgttccctggaaccgaacatacccctaagcaaatcctgccaggtaggacaaaatgtagcagcaggtttaaacaaatttcagagaagtacaagtattttttgcataagaagtacacaattacaactgttttgacatgtatcatagaactacaattaattcccttttggcgccatg

SEQ ID NO: 7772 - DNA, 847 bp, Zea mays
  Clone ID: MRT4577_107084C.1
ggacctggcgacgccaaggccgagctcgagaaggcatgcccccgcacggtgtcatgcgcagacatcgtcgccttcgccgcacgcgacgccacgcgcaacctcagctacggcgccatcgacttccagatgccggcgggccgcctggacggccgcgtgtccctcaaggaggaggccgagaagaacctcccggggccgttcgacagcctcgacgacctccagaagagcttcgcggcccagggcctcggcttcaacgatatggtcacgctctccggtgcgcacagcatcggcgtggcccgctgcaggttcttcaccaaccgcctgccgcctaacccctcggacatggaccgcgacctcgccaggagcctaaaggcgacctgcgaccaaaacggactcgactccaaggtggtacaggaccccgtgacgccagttgccctggacaaccagtactataagaacgtgcacaacggcaaggtgctcttcacgtcggacgccgcgctcaactccacggacgacgcaaggaaggtggtggacggcttcgccaacaacgcggtagactggtaccgcgcgttcgccgatgccatggtgaagatgggcaacatcagggataggaccatcaacagacccaagcccgagatcagggagaagtgcttcatttacaatacctactgatcgacacgatatcaacattaagacgtaccacgagatcctggaggagtctgtttgttttgatattttcctcttgcattcattatcatgcgattgatttccttttatttgcatccaaatgtcaggcggttatttttgttgtaaaaggactttgaattcaagcaatacattttatttgttc

SEQ ID NO: 7773 - DNA, 1187 bp, Zea mays
  Clone ID: MRT4577_107085C.1
aaccattgtagccaacatgtttttatgaatctgatatagcatcttgtcccttcataatttttttaagcggtaagcatttgaaaattctgaatcttggagatggacaaggtagaactagtggtgttactgctgttcttcagagcactgatgatgattctgttgatccacatctggagcggataaaaaatcaggccggtaatgaggaaagtgatgaagaggtattgcttcccttagttaacgactcaatataagtttactttctgtcgattgcatgtacatttttgtgtaacccctcttcaaagtaggatgaagattttgtggcagacaaggatgatagtggatctccaaccgatgattctgatgcagaaggctctgatgctagtatgagtggaggagaaaaggagaaaccttccaagaaggaagctagtagctcaaagccgcctgtgaagaagaagcagaagagtgggccagatgaaggttctcaaaaaaagaagccaaagaagaagaaagatcccaatgcccctaagagagctatagctccattcatgtacttctcaaaggctgagcgagctaatatcaagagcagcaatcctgaactggcgaccacagagattgcaaagaagctcggagaaaggtggcaaaagatgacagcggaggagaggcagccatatgtggagcagtctcaggtcgacaagcaacgctatgcagaagagtctgcagcctaccgtggtgcagccgctcagcagggctctggtgctggatcggaatgaaggtttaatcgtctcgacagttaacttgcaaggctggatgattgagtcgtcagaataaagctggaatacccaaaaacctaagctgaatgtcatcgtttgacctgttgggttgttccggaattcaaccaggattcattctagttcatcaatgcttatattaattaggcaagcaatctggtctggaatcgatcgaggccgttccctggaaccgaacatacccctaagcaaatcctgccaggtaggacaaaatgtagcagcaggtttaaacaaatttcagagaagtacaagtattttttgcataagaagtacacaattacaactgttttgacatgtatcatagaactacaattaattcccttttggcgccatgaaaatacagcacctttgatacttgactaatactatgagaatagcttt

SEQ ID NO: 7774 - DNA, 347 bp, Zea mays
  Clone ID: MRT4577_107086C.1
gagctcataagtcggcggccgcccttatgttgttgttgggtttgtttgacatgtttggcgttgatattgtcagaggacaaaatgatgacccagggggcgcggacacggaagaccgcgcctagaaagtacgcgggaaaaggcccaagaccaccaggccccagagcaggaacgaatcggggggaaacgatccggatcgagggcaaacagacgacaggggaccaaccaaatcaacccagggaaaggggctgcccccacagaggatgcctgtgtacagggggagcggccgtgcatgggcagcaggggaggccttaaagccagtgaccaattacaagtcaaggggcccgtgg

SEQ ID NO: 7775 - DNA, 232 bp, Zea mays
  Clone ID: MRT4577_107087C.1
gcgtccggcggtctacagacggagcactcatacattactagtacttcactagtactagcgtgggctactcctaagtagggagactggaatccacatgagccagggcagccgagaggcggcagggcgaacagggcatgcacgcgcaggacaagcccgtaagttcgggacatgctcacgtctcagcaagctggcctaccagcccgtgtctccaggacacctggcggattgaggc

SEQ ID NO: 7776 - DNA, 602 bp, Zea mays
  unsure (1)..(602): unsure at all n locations
  Clone ID: MRT4577_107088C.1
cgcatccagcaaccgaatccaacaagaaanngaaantaccgttctttatattccttctcnactgcaatctncntccatccatccagcgagctcnnagcaagcgagaaatcagatgcacgtggagctctccataaaaagaaggaaaatcacagcgctccttgtgctaaatggatcnaggtccnaaacggataggtcgtggtccgggcgccaatgnagcgggaaacnagtcgggggggcaagcacaagnacggcaaccacttcgactacgtggaggggaccgggggggcggggggggcggaggggggggggggggggggaggggggcagggggggagggggagggagtaggggggggggggggggagggggggggggggggagggggggggagtagggggggggggggggggaggggagggggagggggggaaggggggcaggggggggtagtgagggggggagagggagggggtggggaggaagggggagggaagggggggggagggaggggggggagagggggtggggggggggggagagacggggaggggagggggggaggagggaggagggggggggggggagagggggagggggggggg

SEQ ID NO: 7777 - DNA, 361 bp, Zea mays
  unsure (1)..(361): unsure at all n locations
  Clone ID: MRT4577_107089C.1
gttnttttttttgtttttgttttttttttttgtgtgtgtttttgtnnaggaaaaaaacaacacatttttcatttaaaattggtggcattaagggggggccataataacacttggattcgctacgcagttttacgggttcaagacgaacacccccacatttttaacccgcagggttaatttaaaagcttccccacgggggttgcttccgacttgatcggcaaaagatcctcgtacacaaatttgatccccggccttttggagaccggcctgattcaccgcaaagcaatgcccagggccttttttatgcccttaacaggctgggggttgcttttaaagtccgaggccatgggggggttaaaac

SEQ ID NO: 7778 - DNA, 366 bp, Zea mays
  Clone ID: MRT4577_10708C.1
aagaaaaattccttcatttggtctaccaaaaaaaaccatcacctttatttggttgaacaccgtcgggcccaacacataaatggccaacaagaacttaatttttcgcttgggaagggtcctgggttaatcattaaaaacaaatccccagggggggaagccccaaaggggacataagctcctattattccctcacaaattttaagagttctcaaaataagaagaccccaaaagggctaaaacacgttaaaaacaggtctatgtcttccttcgggtcctccgacgggggcccggctcctccttttcatcctttttttacccttggcaccactggttcagcaccggccgttttacgggcttgggcttttt

SEQ ID NO: 7779 - DNA, 373 bp, Zea mays
  Clone ID: MRT4577_107090C.1
tgccgatctcgtggggagccacctgctataccgactgctggagcgcggcgactgcgcggttgaacaggataacttactcacgcgtctcaaggaccacctaccccaccatctacagaacacaagttacaagattatcccccacgacgctcaaggagcccatagctggtctacgtctacacagatctaccaccattgcctgaaacagacactctcaagcactacacttacaacgctatcaagaccatatagacacaaggtgtaataacactgtacatactagcatatgacataatgactggctcaaggcacctacttacaagcactatctatggctatggagaaccgctgcatcaccataaagtggaaacctaat

SEQ ID NO: 7780 - DNA, 429 bp, Zea mays
  Clone ID: MRT4577_107091C.1
cgacccacgcgtccgcccgctctttttcccacgcggagccgagggcacacgttgctcctcctaccgacgacatggacgagatgatcctgcacaatctagccggtggctatgggtgagcacgccggcgccggcgccgccgaccctaaagggaacgccgacgtagaatcccgagatttaatgctctaacctctctagcagcgtggggggaaggaagactgtcctgtagccaaaaagcactattccggggacggcagcgctgccgcctgctctgcgatgtcagcgaggaagagcgccgccttctccgctgttcctgccaacagcactgatagcactatggatcgcgatcctctctacgggacacgcaggcacagacgctaacagctcacgcatccgcagccgatggcgacctaagcagcatagagactacga

SEQ ID NO: 7781 - DNA, 1156 bp, Zea mays
  Clone ID: MRT4577_107092C.1
ggcaaggcttcctttcctctcccttcccgtccaaggtggaagcagagtaccttcacgggcaggcggccccctcttactccacgaccgccaccgtcttctggccgtacgcgactcgccgcagaaagagagccgaggacggcagcgacctctcgctggcgtcggatatggatctcgacgccgacgcgcagcgcgccgcagtacgttcttttctgacttggtcatctgaggaatggacgcatgcaatgaatgcttcggaggataagctgaaagcagtgtcagaggaacttggacatgagatccgggttttttcaagtgagaactttgctctacaaccgagcaagctgcctagtgcagatcatgaggaaggtgacgacttttatgagcttcagcctgctgattactacaacttgatttcaaacaggatgggagagctatctaaaatgctaaagactcgcaagatgcgggaagcagaacttgctgctcagcgagcaaagcgaacaaaggcagtaatgagggtgcgattccctgatggctacatacttgaggctgactttcttccatcagagaggattcatagtctagtggacctgctcatgaaagtacttgctagaccagatctgccattctatctctatacagtacctccaaagaagcgaatactggacacatcacaggacttctatacatctggttttgttcctggagctaatgttcatttttcttatgatctgcccgaaggtttgttgttaaatgcagatgatctaaaagcaggacccttcctccgtgaaggaattctaagtttggatggattgtcacttctgctgaaacctgctagtcaacctgatgattctagaatgaactcttctactcatcaatctggtgcatctcaatctgaccctgtaccaacaacaaataagaagcctggcagaccaaagtggctgaaaaggtgatcccactccaggcgtcagtacaaggattggaccctctgcccactgaagctgttgggggcattataattggggccccacctttttgtaggtgggagacaagtagcatgtaaacttgaatgtgttgctgactcaaacagaacagtgctctgctctggctaagcacctggccatcttacacatcgtgtaagccccatagtaacttgaat

SEQ ID NO: 7782 - DNA, 405 bp, Zea mays
  Clone ID: MRT4577_107093C.1
gttaaatagtcgattacttgaggaaattgaagaaagtaaagccttttttcaggtttatgaaggtgctgtttacatgcatcagggtgccaattacttggttgaggaacttgacttggcatcaaggacagccttctgtaggaaagccgatttgaaatattacacgaaaacacgagactacactgacatcaatgttctcggaggagaatttgcttatcttcctacaagtatatgtagaactaatcgggtgaagacaactgctcaagcaaatgactgcacggtgactactaaatggtttggtttttatcgcatatcaaaatctagcaatacaatatccgacagcttcgagcttaacctgcccccatacttctttacttcccaagctgtttgggtgcgaattccccactt

SEQ ID NO: 7783 - DNA, 267 bp, Zea mays
  Clone ID: MRT4577_107094C.1
gggggggctttttttttttgttccctggagaaagggctcctttctctcttgtcataatcatggacttaggtgttttctgagtgtaataaccacactctgagctgtccaaatgggggccgggggaaaaatgggcaccaatttcttccgggggacgggggttaaataaaagaagggttttttttttcatggaaaagggcccccggattttttattcctgtaaagcctaccggattagggaaccggcccccgctctttttgaggccaaaa

SEQ ID NO: 7784 - DNA, 1454 bp, Zea mays
  Clone ID: MRT4577_107095C.1
cgcccggctcccgttcctcccccctcccccccatctgcgaagcagagtacccccaccagcaggcggccccctcttactccacggccgccaccggcttctggccggacgcgactcgccgcagaaagagagccgaggacggcttcgtttcctcgcccgtcccggccaaggaggacgacggggacccccaccagcaggcggccccctcttactccacgaccgccaccgtcttctggccgtacgcgactcgccgcagaaagagagccgaggacggcagcgacctctcgctggcgtcggatatggatctcgacgccgacgcgcagcgcgccgcagacaagctgaaagcagtgtcagaggaacttggacatgagatccgggttttttcaagtgagaactttgctctacaacccagcaagctgcctagtgcagatcatgaggaaggtgacgacttttatgagcttcagcctgctgattactacaacttgatttcaaacaggatgggagagctatctaaaatgctaaagactcgcaagatgcgggaagcagaacttgctgctcagcgagcaaagcgaacaaaggcagtaatgagggtgcgattccctgatggctacatacttgaggctgactttcttccatcagagaggattcatagtctagtggacctgctcatgaaagtacttgctagaccagatctgccattctatctctatacagtacctccaaagaagcgaatactggacacatcacaggacttctatacatctggttttgttcctggagctaatgttcatttttcttatgatctgcccgaaggtttgttgttaaatgcagatgatctaaaagcaggacccttcctccgtgaaggaattctaagtttggatggattgtcacttctgctgaaacctgctagtcaacctgatgattctagaatgaactcttcttctcatcaatctgatgcatctcaatctgttcctgtaccaacaacaacaaataagaagcctggcagaccaaagtggctgaaaaggtgataccactccaggtgtcaagtgtgtgccatcaacacagaatcactctgttaggcttctaaacactattaatggccgaacaagctcaaatctgaacaggctacactgctgtagtacaagaattggatcctctgcttacagaagctgcaggggcattagaaatagaatcccaccttttttttctaggtgggagccaagtagcatgtaaatttgaatgtgtcgcgactcatcaagtcatcagaacagtgctccgctgtggctaagcactttgtcatcttacatttcgtgtgaaccccataggaagctagaaacggcggagataatagtccagtgctgttaacgcttcacggtgcaatgccatgcctgtcttcactattcagtcttgacaacaatatatttcagaaaactgaaagtgcccgaggtagctggaat

SEQ ID NO: 7785 - DNA, 1343 bp, Zea mays
  Clone ID: MRT4577_107096C.1
gcacgagagagtacccccaccagcaggcggccccctcttactccacgaccaccaccgtcttctggccgcacgcgactcgccgcagaaagagagccgaggacggcagcgacctctcgctggcgtcggatatggatctcgacgccgacgcgcagcgcgccgcagacaagctgaaagcagtgtcagaggaacttggacatgagatccgggttttttcaagtgagaactttgctctacaacccagcaagctgcctagtgcagatcatgaggaaggtgacgacttttatgagcttcagcctgctgattactacaacttgatttcaaacaggatgggagagctatccaaaatgctaaagactcgcaagatgcgggaagcagaacttgctgctcagcgagcaaagcgaacaaaggcagtaatgagggtgcgattccctgatggctacatacttgaggctgactttcttccatcagagaggattcatagtctagtggacctgctcatgaaagtacttgctagaccagatctgccattctatctctatacagtacctccaaagaagcgaatactggacacatcacaggacttctatacatctggttttgttcctggagctaatgttcatttttcttatgatctgcccgaaggtttgttgttaaatgcagatgatctaaaagcaggacccttcctccgtgaaggaattctaagtttggatggattgtcacttctgctgaaacctgctagtcaacctgatgattctagaatgaactcttctactcatcaatctggtgcatctcaatctgaccctgtaccaacaacaaataagaagcctggcagaccaaagtggctgaaaaggtgataccactccaggcgtcaggtgtgtgctttcaacacagaatcagtctgtaaacactattcatggttgaacaagtttaaagtttggacagactacactgctgcagtacaaggattggaccctgtgcccactgaagctgttgggggcattagaattggggccccacctttttgtaggtgggagacaagtagcatgtaaacttgaatgtgttgctgactcaaacaaaacagtgctctgctctggctaagcacctggccatcttacacatcgtgtaagccccatagtaacttgaatgtgttacacatcgtgtgcctgtctttgctatccagtctttacacaacatttcaggaaaaaaaaaaaaaaagtgtaccaagtgtggccgtgtggggtttcagttcgcccatgatattgtggcaagtcgctttcttgtgattgatggtgatggtgccctcaccagcgactaatttgttgtcaaccccaacaacccccccc

SEQ ID NO: 7786 - DNA, 124 bp, Zea mays
  Clone ID: MRT4577_107097C.1
gtaaaatgtatcatgacattggaagttcaattcgggaacaaaatgaatcatgtttcaatttcgtgcaacagtttaagagggttaaaagcgtttaacagtgacccattacacatttaacaaataa

SEQ ID NO: 7787 - DNA, 442 bp, Zea mays
  unsure (1)..(442): unsure at all n locations
  Clone ID: MRT4577_107098C.1
cggcgccccgaacaacccaggcgggagggncgacccccacgggcaggccgccgaacccgacgccgacgccgagcacaaggagaaggagcgcaagaacggccgccacgcccagggcaccacgnncggacacnncgnccaggccggggggggcggcaagggcccgcncgagaaccncgcngaccaccnggcngacccagncaacaacaacgccggggccaacgccaccaacngcgnccccggcaaccaaaagcngcncagggggcnangcaacgccaggggcnnnncggagagggcgnacgnnggaggagggangcngcaaagnnaannagcngcangngngncncnngttttttttgcattncagggggcaagtcgggatgatgagttggcgttggacactatgatgaatgatgcttgtgcaatagtaggtggggttttggtg

SEQ ID NO: 7788 - DNA, 1317 bp, Zea mays
  unsure (1)..(1317): unsure at all n locations
  Clone ID: MRT4577_107099C.1
ccggccgggggttcttggagccgtctgcagtttcttgggcagggttcttggataatttcgggttcgcgccggccctagggtccggagttccgaatttgtgtgtgacaagctgaaagcagtgtcagaggcacttgggcatgagatccgggttttttcaagtgagaactttgcttcacaaaccagcaagttgcctagtgcagatcatgaggaagatgacgacttttatgagcttcagcctgctgattactacaacttgatttcaaacaggatgggagagcactttaaaatgctgaagactcgcaagatgcgggaagcagaacttgctgctcagcgagcaaagagaacaaaaacagtaatgagggtgcgtttcccggatggctacatccttgaggctgactttattccatcagagaggatacatagtctagtggacctgctcttgaaagtacttgctagaccagatctgccattctatctttatacagtacctccaaagaagcgaatactggacacatcacaggacttctatacagctggttttgtccctggggctaatgttcatttttcttatgatctccctgaagattcgttgttagatgcagatgatctaaaagcaggaccctttctccgcgaagaaattctaagtttggatggattgtcacttctgctngaacctgctagtcaacctgatgattctagaatgaactcttcttctcatcaatctgatgcatctcaatctgaccctgtaccaacaacaaataagaagcctggcagaccaaagtggctgaaaaggtgataccactccaggcgtcaggtgtgtgctttcaacacagaatcagtctgtaaacactattcatggttgaacaagtttaaagtttggacagactacactgctgcagtacaaggattggaccctctgcccactgaagctgttgggggcattataattggggccccacctttttgtaggtgggagacaagtagcatgtaaacttgaatgtgttgctgactcaaacagaacagtgctctgctctggctaagcacctggccatcttacacatcgtgtaagccccatagtaacttgaatgtgttacacatcgtgtgcctgtctttgctatccagtctttacacagcatttcaggaaacagaaaccgccctcaaagtgtaccaagtgtggccgtgtggggtttcagttcgcccatgatattgtggcaagtcgctttcttgtgattgatggtgatggtgccctcaccagcgactaatttgtcgccaaatggcatgtgtttttttctaaaaaaaaaaaaaccccccccccac

SEQ ID NO: 7789 - DNA, 580 bp, Zea mays
  unsure (1)..(580): unsure at all n locations
  Clone ID: MRT4577_10709C.1
ggaaaaaaaaaaataacccgctaacccgttggggcgggggggaaaaaccaaagcattttttaacgcttccggggaccccagccgaattacaacgggcggttgtttttatttaaaaaaacccagtacaaaaattccaaacgggcggggatttttgatttgaaaccaaaaaaaaacccgggggtaccagggtttaaaaaaggagaaaaatttatgggcgggcacgggatccactttaaaaagcacagggaccttgaccaggggaaccaccttgaaaaaaattttggggaaaagaaaaccaaaaccgaacccccttgccaaggtttgtttccttttgatcgcccaaggcccggccagggcaagaaaaccccctggaacgggaaccttaggagcgggtcctgggctccccgggggggcccgccttgggggcggtttcctaaactgaccttttggggaacccggttttttgggccatgattttgcccagaaagccgccctttttttttttgccatccgggttggtaaagttttccccctgggggcccggncccggggcggggacgggcggagccggggcggaaag

SEQ ID NO: 7790 - DNA, 1417 bp, Zea mays
  Clone ID: MRT4577_1070C.1
ggaaatttgtcagtattgcatcaaacacacatctaaatgcagctctacaagtaattgaaagggcattggttggagtgaatcattgcagtcattcaatataccaaatttacactggaaatcctgatggtgggacagtttcttctgatgttgctgctgggatcgactgcctctatatgattcttgattttgtgccaggaaacaagcgcgtttttaagaggactgtccctggcctagttggtgctttattcaacattatactacaccttcagagtccacatattttctatagtcagaacctgccacctcaaggtagtgtgttccatccagatgctggagccactgttctaatgtgtgttgaggttatcacttcatttgtgggaagacattcttttcaaattgatgcatcccatgtttcccagtgtctgcttgttcctgtgacactcttcaaagagtttaaacatcttctagcaaagtactgcaaccaaagtgtacaacaccatggagatcatgctgaatatattcttgacagacaattttcagttggtatctatgctgcatgttgcaaattgttatgcactactcttcggcaccaacaacgtgagattgggtggtgtgtggccctcctggaggattcagtaagcatactgctcggttgtttggagtccacagattcgaagatgattaacgtagctggatattttgcttggaatatggaagaggcactaaaatgtgcttcctttttcagaaggatctatgaagagatgcgccagcagagagaaaccctaggaaaacatgccatgcactttcttgctggttatatttccatgttttctggacagggtccttttcagacagggataacacgagaaattgatgaggtcctgagacctggtgtgtattccctgattgatatatgcgaggaaagtgattttcaacagctccacacatacctgggtgagggtccatgccgaaccactcttgctgatctggtgcgtgattataaattacacttccagtatcagggcaagatctaagccggcctgttctttatttttgaacaactggcgtttatcctgtcacgtctggttagaaaatctatgaagtaccatcttttggatgatcttgcgttttgggtggactaattttggcctaatggctgcttaccgacttatcaaggagacatggtggctaataaagatttaaggcttgtgaaatcaacttcataggatctacagctgcctcgtgctgttctgcaagttgacctggacccctggttttcctggtacttaacaacagcaaaaataggacggttagtatcaagtggtgtttggctaccttgtaagagatttactgattaaaacattgtaatgctaaagcttgaatagatcataccagattttttggggaaagagaatta

SEQ ID NO: 7791 - DNA, 1354 bp, Zea mays
  Clone ID: MRT4577_107100C.1
ccggccgggaagatggagtacccccaccagcaggcgggcccttcctccacgaccatcaccctcatctgtccgtacgcgactcgccgcaggaagagggccgcgggcgacgacctctcgtcggcggtggacatggatgtcgacgccgacgcgcagcgcgccacggacaagctgaaagcagtgtcagaggcacttgggcatgagatccgggttttttcaagtgagaactttgcttcacaaaccagcaagttgcctagtgcagatcatgaggaagatgacgacttttatgagcttcagcctgctgattactacaacttgatttcaaacaggatgggaggtagaaaatattgtttcggactttagttatttagtgtcaacttagtttaatatattgaccaacctgaattattttgcattctgatttacttacggtagcactgttgaaaatggcaaatttgtgcagagcactttaaaatgctgaagactcgcaagatgcgggaagcagaacttgctgctcagcgagcaaagagaacaaaaacagtaatgagggtgcgtttcccggatggctacatccttgaggctgactttattccatcagagaggatacatagtctagtggacctgctcttgaaagtacttgctagaccagatctgccattctatctttatacagtacctccaaagaagcgaatactggacacatcacaggacttctatacagctggttttgtccctggggctaatgttcatttttcttatgatctccctgaagattcgttgttaaatgcagatgatctaaaagcaggaccctttctccgcgaagaaattctaagtttggatggattgtcacttctgctgaaacctgctagtcaacctgatgattctagaatgaactcttcttctcttcaatctgatgcatctcaatctgttcctgtaccaacaacaacaaataagaagcctggcagaccaaagtggccgaaaaggtgataccactccaggtgtcaagtgtatgccatcaacacagaatcactctgttaggcttctaaacactattaatggccgaacaagctcaaatctgaacagggtacactgctgtagtacaagaattggatcctctgcttacagaagctgcaggggcattagaaatagaatcccacctttttttctaggtgggagccaagtagcatgtaaatttgaatgtgttgcgactcatcaagtcatcagaacagtgctcccctgtggctaagcactttgtcatcttacatttcgtgtaaaccccataggaagttagaaacggcggagataatagtccagtgttgttaacgcttcacggtgcaatgccatgcctgtcttcacg

SEQ ID NO: 7792 - DNA, 1936 bp, Zea mays
  Clone ID: MRT4577_107101C.1
cggacgtgtgggcgcccacccaacacacatgcaaatacatgaaataatttgtcactggcgcctatgacaaattatttatttcacccctgttattatacagaagcatcatggttgtcactttgttagacattcagatacgagttcttgaaatgagtgggtaccaaatggtttgggcgtgcgcccaccagcaggcggccccctcttactccacgaccgccaccgtcttctggccgtacgcgactcgccgcagaaagagagccgaggacggcagcgacctctcgctggcgtcggatatggatctcgacgccgacgcgcagcgcgccgcagataagctgaaagcagtgtcagaggaacttggacatgagatccgggttttttcaagtgagaactttgctctacaaccgagcaagctgcctagtgcagatcatgaggaaggtgacgacttttatgagcttcagcctgctgattactacaacttgatttcaaacaggatgggagagctatctaaaatgctaaagactcgcaagatgcgggaagcagaacttgctgctcagcgagcaaagcgaacaaaggcagtaatgagggtgcgattccctgatggctacatacttgaggctgactttcttccatcagagaggattcatagtctagtggacctgctcatgaaagtacttgctagaccagatctgccattctatctctatacagtacctccaaagaagcgaatactggacacatcacaggacttctatacatctggttttgttcctggagctaatgttcatttttcttatgatctgcccgaaggtttgttgttaaatgcagatgatctaaaagcaggacccttcctccgtgaaggaattctaagtttggatggattgtcacttctgctgaaacctgctagtcaacctgatgattctagaatgaactcttctactcatcaatctggtgcatctcaatctgaccctgtaccaacaacaaataagaagcctggcagaccaaagtggctgaaaaggtaaaatccagaataatcttcttgccattgtggtacaatagttaaaaggagaaaaacttgtcaagtttctggggataattccaattccttatcaatcttcttaagcaatgatacacagctctcatgcgtatttgagaagaataattccttatcgtcttttggtgatatcgcatatgcccttgctatccactgtttcagaacattgttagaacttgcaaggagcttttaaattgcagtttcattttagtgcgtgcatctcatactatcttgattgttgaaccaaccccacccaccatagggttatgtctcgtgataattctgtttgcttgaactccatttcccatctagctattttgtttcggaacatcttttgcctttgcaagaccacgacaaaataactggtacccacttgttgcaggtgataccactccaggcgtcaggtgtgtgctttcaacacagaatcagtctgtaaacactattcatggttgaacaagtttaaagtttggacagactacactgctgcagtacaaggattggaccctctgcccactgaagctgttgggggcattataattggggccccacctttttgtaggtgggagacaagtagcatgtaaacttgaatgtgttgctgactcaaacagaacagtgctctgctctggctaagcacctggccatcttacacatcgtgtaagccccatagtaacttgaatgtgttacacatcgtgtgcctgtctttgctatccagtctttacacagcatttcagcaagaaatagtaagtacatgaaagaataccaagtgtggccgtgtggggtttcagttcgcccatgatattgtggcaggtcgctttcttgttattgatggtgatggagtcctcacccccgtccaatttgtcgcccactggcatgtgttttcttctt

SEQ ID NO: 7793 - DNA, 241 bp, Zea mays
  Clone ID: MRT4577_107102C.1
ctcttgcgctctcgatcctgtcgtacgcgagtcggatcgtgtatcatccatgctcctacgtcggatggtcatctctgtggtaatctacgggagtcctctcaggatcatcggcatggtctgagagtatgctagactcgagacagtagcctgcataatctacgctgatgcctgcgctctaagcgagatcgtgctaccgctatctgaagcagtcatgagtgatgtacacgatcgatgcatggtg

SEQ ID NO: 7794 - DNA, 534 bp, Zea mays
  Clone ID: MRT4577_107103C.1
gcgcggacgcatggggcatatcttggcaaaactcaagaatttacactttgatgaggagactctttaacagcagtgttgcgaagttaaccctagtgtatcggaatgtcactttatatatttcgtatcttatcttcttcgctacgaggtaaacaagccttcaattttgcatattcagtgcccattaactgcagtctgctggaaattctctctctggtatattgccttccaccgctcaagctcttccctgcagatgggtaacagcccaaacattagcatcaacttttttttttttgtttattgtaaagtaataggaagcacaagggttctcctgtgtcagtcaatcggttacacctttgctcttacacagttagtcaaatgctgaaaggctcttaagaaaaatctggttatttgttagtattctagtgctagaaacgtcggtcctataaaacagaatcctggtttcacaatttctgtgaggtatctggagatcaaaaccgtttgctcctgtcagatttgcaagtttcaaggttttct

SEQ ID NO: 7795 - DNA, 244 bp, Zea mays
  Clone ID: MRT4577_107104C.1
agaagaatgggaggaggatactgatgagtatatgcaaaagaatcttccttctgaacttgatgacatttctggatggactgaggatttgttcactgccagaaaaagtgcaatcaatttacttggtgttatagcgctatcaaagttatttcggtgttttgatggcatatggaggcctccaagattttctgactgaaaagaaagatttgacaattacattgatcaggaaccggattctcccattata

SEQ ID NO: 7796 - DNA, 622 bp, Zea mays
  Clone ID: MRT4577_107105C.1
ctgggaaacacgagtgcaacattctcaagaatcaaccatctgtcttgctgaaagtaccactgatgacaacattcatatgtaccactctatgcaaaaaaggctcaagacacaaatcaataagagtgaacacacaccattgtcgacaccaactgtacccaaggagaaaacactaactcaaattgagacgcagctagcaagtgccgagaaaaccgaaatgttcaggaatgaggaaaccccagcgctgaaaatgaaggctcggaagaaaaaacacagaccaaaggtaatcagagaaaataagccagccaaagtgccaaaacctgattcaacaccagatggaaaatctccgaaccaaaaggtcaagagaagttatgtccggaagaaaagaaacctcagctctctggagaattgggctggtcctgttagcgatcaatcaatctctggagcaacaggagttgcagctagaagcagaacatcatcaggtcgacgaagtctgcaatttgaatccaaagaacaaggattgcagggaggccattcgtcaatggccaacatacaccatcacaactatgagaaacctggccatgctcaaaagttatttctactcagagtcagaagtgcagactgg

SEQ ID NO: 7797 - DNA, 675 bp, Zea mays
  unsure (1)..(675): unsure at all n locations
  Clone ID: MRT4577_107106C.1
aattcggcacgagggccgatgcccctccctccatcttcctctctgcagcaaccctaccatggttgtgcccctgcttccatggtgagctcgccccagccccaacgtcagacgtgccgtcgccctcacgtccagctcctccatccccctggttccctcccagctccgaccaggtttgccaggtccgaccgttctgctcgtcgcgccctccctatgccagcacgcgagcgccccctcccgtccctgctcctctccatcgacgcccaggccgatgccgagctcccagcccctcccgatggcgtggtcaagcatctaggtattcgttgggacgcctgagccatgggattgacgtcgttcttgtgtattcggaattgattgaggttgatgagctctgggataacatcatgatccgtagcagtgcttgcgtgctagtccattgagttatacagggaaggattctttcctctcttttctttgtagatattgtggtggtattaagtatttgtagtgcttatattagatgatcgttgaagtgcctcgccataaagtgtttgtttagttgtcccattatttataatgatatgaccaagtctaggttttataggtttcgatgttatgattgggggngaactaaaattgcgtaggatgagttcagaatttttatcggctatctgacgg

SEQ ID NO: 7798 - DNA, 1942 bp, Zea mays
  Clone ID: MRT4577_107107C.1
gccaacttccctctcattcgtcttccacaaaccctataaccctagcaccgccgccaccatgtcctcgtctccatcttcaatgaaccgccgtcccccgggcccgctagcgttggggctggagtccttggcgaagaagaagacacatacagccggtgctcctcctctggatctggcggtcaactccatcacccgcagcttctatggcacctcccctagtccccctccatcgccgccttcacccaccgcttctatatcgccacctctctcattgtagaagaagacactgaggatctgggaacctatgccccacaggactgcacaacacgtgggataggtaatgcaggtattgcccccgctggctgtggctggccggtgtgcaattcaccaggctgccaaacgagccctaaaggccccagcatgggcgaccctctccagagtgattcttatcaatcttgcattggaaaaacacggagcctattattatcagggaagcatttgagccaaagtactatgtacatcaccatgcttttatgtgactatatatataaatataacaaataaagttttattggaccagttctttgaccatgccattggtatcaacgttccaaggtcccgcttcctaccagttaaggcgacatcagatttgcagctagtacagtctgatctatataccttggttgatggcttcgttacacgtaattcagccagaacaaatccatcaaatccctcaattgaacttggtcctgagttcaagaaggttgggagcttccttggtcgcttcaagtccatacctagcattgttgagcttgacatcttgaaggtttccggtgatgtttggttcggttctggaattgtactgaaggggaaagtgaccatcactgcaaaacctggcgtcaagctagaaatcccagacggagcagtgattgggaataaggataattttggaaaaggaaagagaaaacaataccagatgccttacaacctgaattagggatgaaactgctaattgcacatggaagtcaccaagaacttggtaaaggtgattcaatgacaaatctaatgattaacatgtgcgatgtggttcacatgttaatgcatgcaactgaagtgcattaccaatgtcccaagagggtaagggtacagtctgatgtatctgaaaggattgctaatggaactagtgttcatgtaaatactcatgttcaaaatttgaatctggatattgaagagcaatcacacaaacactcgatttcacacatcgaggagccaaacactaataattcagaaggatccctggctagtgctgctgtctgggatgtatttcgcaggcaggatcttccaaagcttaatgaatatctagctgttcatcgggaagaatgtgcagctagatgtcaagcagtgtcttctgttaaatattctatttatgatcaaacagtgtaccttaacgattatcataagaagatgttgaaggatcaatatgagggactgaagacaatcgagcagattacaatggactcagcttcggtcgagaccaatatgttcaagctctgcaaggtgaggtttgttcagtttggccaaaaaggcatcccctacctgaacacctacgacggtcgcgctatccgctacctcgacccgctcatcaaggccaacgacaccatcaagatcgatctgcagaccaacaagatcatggacttcatcaagtttgacgtcgacaacatggtcatggtgactggcgggaggaacaccaggcgtgtaggagtcatcaagaacagggagaagcacaagggcagctttgagaccatccacgtgctgcttggagctttttgctatgtctagttttctcctatttgttgtacaggaaaacttagaatagaattcaaatttggtggtcgcaaaagtgtggagactttaattcatataaagttaggcttaacattagtgc

SEQ ID NO: 7799 - DNA, 442 bp, Zea mays
  Clone ID: MRT4577_107108C.1
gtcgcaggtgtgcttgtgctccctcataaaacaaattccaactaatacttctacacatacaccaaccttaaagaccgggtatagaatatcttcggatacaaaaaagataataacatggatataaaaaaaatagatgcacataaaaaaaacagaaaatatataacatgcaatgaatatgtataaactctaaatgataaaatgcaaaaaaaaaaggcaaaaagcaaacaattaaaaaacaaataggaaaacatgagtatctaaacaagaaacatgcgggggcgccgttcttatgggaaaccctctctcgcgctcggtgcgcgagaatcgatgttgcttttgtagcggtgttctacacgcagagaccacgccgccggcttacaacgcgcgcgactcggaaaaacccgttggcctgtcaaggaaaagacccttggagaagaactgc

SEQ ID NO: 7800 - DNA, 411 bp, Zea mays
  Clone ID: MRT4577_107109C.1
ggccggaaaccattgaatttattagcggacttggcccctgtctgatttttccattgggggtaaacaaaaaaaagggtttgatgctggaaaccacccctggtttaaataagctggtggtctcaaaatttttggaacatgctttggcaatctacatgtccccttccggaaaaacccctcaacagacaggggggatctatttcaatgggattcccgggggcatacagtttgcaaaacccccccttaatttttttgctgaaggaagcgtttagagacaacccactccatttattggcggccttgattacttcgcataagtttgagggaaccagttttccaccaacatttgcttgagccttaaccccagggggaacattccgtaacatgggaggggcagcaatgcccccccccggt

SEQ ID NO: 7801 - DNA, 661 bp, Zea mays
  Clone ID: MRT4577_10710C.1
cattgggtacctcgaggccggccgggacgaggacactccaccaggcagcaggcaccaacttcgcttgactcgcttcgccccaaacggcgatagccaaccgcgatcgatagatgttcaagcgcaccggcggcagtcgacgaagggtgagcccatgtactcaagcagcacgccttagctgatcttcccatcgctgatttttcaggtcacccggtacgatcctttcagacttcgtctctcttttctccccatctcgatctcgtcctatcatccctacggcttacaccgacgtctacaccaatcaatggatctcatctgcaatgatctgttctctttggcgtcatccgatcttccctggcttgttgaatccatcgacccatcacaggatgccctttcacagatctggcttagacgcggactgtagacacgcaaatgtcagattaggaggcatcgttagatcctgtagtggccgtggttctttgcatagttgtgagttgtctcttcgctattgggatttgtggcctttttttaaaatgatttgggacttcgacgtctgatgtttgtgaatgctaatttggacgtcacattcgggatgctgagctgcctgtttgtggctggcttgcttagtctcatgggaggagcaaagctgtaactcatattggct

SEQ ID NO: 7802 - DNA, 545 bp, Zea mays
  Clone ID: MRT4577_107110C.1
tataatataaataagtacaactcaatatatcataaataagcattgtcaaacaacgcatacataagtgtactctaaatctaaactaaaatacaactgtttgcactaatgttaagcctaactttatatgaattcaagtctccacacttttgcggccaccaaatttgaattccatttttttttttcctgtacaacaaataggtgttcatgtaggggatgcctttctggccaaactgaacaacacctcaccttgcagagcttgaaccatgaacccagcagggtaggtcttgtcagtcctgaccttgccatcaacaagtacatggggttgcctcaggatagaaatgaccaagagaattggagatccaaaggggctgctgctctttcgtatcaccccctgggatagcatttccttaacttgagtttcaatttcatctttgagggttggagggtaacggtatggccttatgtggaacggctgggcaccggggatcaatgaaattgaatgatcacacgggcaggttggtgggagtcccactagatcgatgaaa

SEQ ID NO: 7803 - DNA, 193 bp, Zea mays
  Clone ID: MRT4577_107111C.1
cgcttgcacaccttgcgtctcgtctcccctctctctctgtcacacacacacacacacacgcgtcatgtcgggacgggaggggaggggaggtctagtgcgcgtacggatttcctatcctagccgcacgacgcgtgcgcggtcccggatcgacgatggccaatgcacgcaggccgccgctggcctgcgtcgagcg

SEQ ID NO: 7804 - DNA, 629 bp, Zea mays
  unsure (1)..(629): unsure at all n locations
  Clone ID: MRT4577_107112C.1
ttttatcgcgacggccgccctttttctttgttggggggtataaataagtaccattcaatatgtgataaataaacattgtcaaacaacgcatacataagtgtactctaaatctaaactaaaatacaactgtttgcactaatgttaagcctatctttatatgaattaaagtctccacactttgggggggctaatanaattgtctataattcatttataatcatctcagggggaggcaatgtgtatcgaagtgaggtaatacaaacaaacattggtgtccagatttggacagattcagagatactaactcaaacagctgtaacttaatttatagatcaccaaaaagggtgatccaaaatttgttggaaagcttaagaaaagtactacaattctcctataattactaagagctaattctcagtttaacttggacaaacaaggtcattttcgaaatcagtacagaatctggacagattctgaaactggacttggaaaaatcataactcctaaactactgaacctatggtcatgaaatttttacacaagcaagataaaaagattatctacaagttttatatataacatttctacagaaaacaccgtttactttacttaactagccacgtaataaa

SEQ ID NO: 7805 - DNA, 902 bp, Zea mays
  Clone ID: MRT4577_107113C.1
cacacttttccctgtttccccagccatcataggctacatagtatcgatttggttcagggaaaacttcatatatcaccctacttatctcataaagtcttcttgccttgtcacttccttaatacagtcaccaataacatgagcatcctcttctggagagaactcgtttttccccttttcataatcctgaattctgcgtttgacttcttcaacatcagcagactgacgcaggatgccctctacctttaccccatgatcttcaatgaacttcagggccttctccagaaatgatggactaccatcagcatgctgcagatctctcactgtgcaagaagtctatctgatgaaggactgcaacttcaactcctgcagcaccacgcattcgctcgcctgcgcgcccacgcactgccgcacactggtcatgcagcacactagatgcttgaccacgccatcgggaggggctgggagctcggcatcggcctgggcgtcgatggagaggagcagggacgggagggggcgctcgcgtgctggcatggggagggcgcggcgagcagaacggtcggacctggcaaacctggtcggagcagggagcgaaccagggggatggaggagctggacgtgagggcgacggcacgtccgacgttggggctggggcgagctcaccatggaagcaggggcacaaccatggtagggttgctgcagagaggaagatggagggaggggcatcggctggacacaacaacaggaaggggagctagttggacctgagtagggcgacgtcggccatggaaccattactgttcatcattactattcaccattactattcatcatcgttactattcatcgatgatatctatggcatccttttcgtcgtcgctattcatccccggccggcctcgagg

SEQ ID NO: 7806 - DNA, 214 bp, Zea mays
  Clone ID: MRT4577_107114C.1
aattcccattcgacccacgacctactcttaaccttccacaacaccacttccacaactttctcatccctgctttccaacatccatttccgtcgggttattattacctccggaatcatctacaatcacaatctccatcatccatacattatacacaccctattctaatcatccctaactctcctccacatacaactctttcatcacactcacacta

SEQ ID NO: 7807 - DNA, 602 bp, Zea mays
  Clone ID: MRT4577_107115C.1
gaacaacattataattaatatgatataaataagtatcattcaatatatcataaataagcattgtcaaacaacacatacataagtgtactctaaatctaaactaaaatacaactgtttgcactaatgttaagcctaactttatatgaaatcaagtctctacacttttgcagccaccaaagttgaattccattctatgttttttcctgtacaacaaataggagaaaactagacatagcaaaaagctccaagcagcacgtggatggtctcgaatctacccttgtgcttctccctgttcttgatcactcctacacgcccggtgttcctcccgccgatcaccatgaccacgttgccgacatcaaacttgatgaagtccatgatcttgttggtctccagatcgatcttgatggtgtcgttggccttgatgagcgggtcggggtagggctgacaatgggcacccttaggtcggggtagcggatggtgcagtcgtcgtaggtgttcagggtaggggatgtctttctgaccaaattgaacagacctcatcttgcagagcatgaaaaaagctctgccaagcttgtcgatcatccaatgcttgggcgcattga

SEQ ID NO: 7808 - DNA, 1649 bp, Zea mays
  Clone ID: MRT4577_107116C.1
aatataaataagtaccattcaatatatcataaataagcattgtcaaacaacgcatacataactgtactctaaatctaaactaaaatacaactgtttgcactaatgttaagcctaactttatatgaattaaagtctccacacttttgcgaccaccaaatttgaattctattctatgttttcctgtacaacaaataggagaaaactagacatagcaaaaagctccaagcagcacgtggatggtctcagctgcccttgtgcttcttcctgttcttgatgactcctacacgtccgatgttcctcccgccagtcaccatgaccacgttgccgatgtcaaacttgatgaagtctatgatcttgttggtctccagatcgatcttgatggtgtcgttggccttgatgagcgggtcggggtggcaggagataagtcattggtagaaaacttgatgaagaccatagcaaaaagctccaagaagttccatatgccacaaagtctttacaaatatgtaacaatgtagggacaaagggagataagtcatgcccaaaatattattttttgtaataaattacagaaatgaaacgctgccagaacaattttttcagaggggaaaacaacaaataataaagaattagctgcaatccctatctccaggcatgatgcccgtccctccaacaatacctgcagccgtgttagccaccaaattgccataaagattaggcgtaacctacaaaaaaaagattgaaacccacaggtaatcctaatccatggtgtatttgcaaagaagcattcgagaaaattaggaaaacagaaaagaaatgtgatgacgaatagaaaagacgttcagcaagcacatgctttatatattgcatcaataccaattttcgttccttaggaacaatgggattcggtcagcccaatatatgtttgattgttttcatatatgcctcagaacaagaaatgttatctttatcatatggcaagcatggtactcaagcggagcattcccataaaaatctctcacattctgaaggaagttcctcaaactcccaagagtgccgacgtcaaactttgaagtgaaaactgagtaagaccaaacttaccagtagcatcacaatcttcacaacccgtaagcctacccattttggagtaagaatcggcttgcaagctggcaactcctgctgtgtgaacttggaatcttattcccaatcactgctccgtctgggatttctagcttgacgccaggttttgcagtgatgatcactttgccctaaagttctagctgaattacgtgtaacgaagccatcaaccaaggtatatagatcagacatgtcataaaccaaatcgatatgtgtaagggcgatgacgatttccggtttaagctttttgccaaacacctagagcgcgccgaatggactttcttcttccacggtaaaccggcagcaagacgggggagatcgacgctggggtttgagggctgaaaccagggggacagcgatagactccgggatcgagagggcagcatcgagcagtagctggaggggcatcagccatcaacagagaaacggttgggcgagctcggctagggaagaagaccaggcgccatggaaggggatcctgcagggggagctctaccatggagatccagggcagc

SEQ ID NO: 7809 - DNA, 458 bp, Zea mays
  Clone ID: MRT4577_107117C.1
atgtttgcactaatgttaagcctaactttatatgaattcaagtctccacacttttgcgaccaccaaatttgaattccattctatgttttcctgtacaacaaataggagaaaactagacatagcatgcaaaaaactccaagcagcacgtcgatgacctcgaagatgcccttgtgcttctcccagttcttgatcactcctacacgcccggtgttcctcccgccggtcaccatgaccacgttgccgacgtcaaaccaggtgaccacatcggtctgccagtttgaagatgtagtgtattgtaatcctccaaggaagataacaatgatcttttctttatgtccgtgtaaccaactgccttcgcaagtgctttggcaagcaagtcagctgcagacagactggaagagcttagcaactgctctgcttgctgcctgaagataggaataacactgtctgacacactc

SEQ ID NO: 7810 - DNA, 242 bp, Zea mays
  Clone ID: MRT4577_107118C.1
gcctcatccattccagaactgcgaagacagacagacagcgagaaagagggatcgaaggaccaacgcggggccgtgtccggtcacacacgagcgatccctctcagccgcgcgtttgtcaatggtgaacggcgagcggtgaccggacgcggagtgcacgcgggcatcgcttctggggaggtatgagatactctgggcactcggcgagggcaacttcagtaaggtgaactacgcgcgccacatcg

SEQ ID NO: 7811 - DNA, 584 bp, Zea mays
  Clone ID: MRT4577_107119C.1
gtgcgctgagctccctggtgttttctcctctccgtgccgcgccctggcttctctctccctccatctctctctagcgcgcgctcttcttcctccccgcgctgtgcgtccggttgagtttttccccagccgcagtcgagctcccagcctgtgcgctctgcttctccttgctgagcgccgctcgcccagccatctcccatggcgcttggcttcctccctccctccccaaagctccgagctcctccctcaccctggtcccggtcctcggcgcgcctgctccctggagctcgcccatgccgctcgctcctccgtgccggcgttctctgctcgaccatggcgtggacagccaccgagccccctccacccgtcttccctctgttcagagcgctgtcacctaaagtccttacgcgctccctctccgcccggccatggaactcgcccctggctcggattccagcgccccgctccctgtttgccccagctagcctggccgctgcgtagccccatcagcttctccttcctcagctcgtctctctgcccgcgcgcgtccttcccatgggtggctggtagagctggtccttgcgctc

SEQ ID NO: 7812 - DNA, 305 bp, Zea mays
  unsure (1)..(305): unsure at all n locations
  Clone ID: MRT4577_10711C.1
gagagcggggaccctcgagaggcggccgttcccnaaaccccacggggtgaaaaccagcgcacacacaagggaacacggggcggcattaagggagcaaaccccaaaaacgccgnagncaaaagagcataaaccaaccaacaaaccaaaccaggggacgaacaagcgagaggcaccccaaaagcgacaacgcagccagccgaccaaaaatcaaccacgcaaagacgccagcgaacccagccccgaccgctgacgcggaagcagccccgggaggaacggcacgccgagccgcgggagccagagccggc

SEQ ID NO: 7813 - DNA, 609 bp, Zea mays
  unsure (1)..(609): unsure at all n locations
  Clone ID: MRT4577_107120C.1
ttttttttttttnnnctagttctagctcccgcgccgcccccccggtctctttcgttgtgcgtgggtcccggcttggcgtacacgcgtctcctcgcttcggtgggtggcgtgttgttgcccggacatgcttgtcgctattgatatatttcaaatatggggctcagttctgagttttgcaccagctctcaattttttttaactcgggccctgcaatcatcacaataaagccgtgtacgcaaccgaaaccaaattgttgtgccccggcagccgtttgatcaatcgatcgagtggcagatctgctcgaacgcgtcgacgtggcactccgcgacggccatgaacaggtcgacgccgcccttggcagtgcgcgacggcacgaagaccatgagcccctcgatgggcaggtccggcggcaggaacgcgcacggcggcccggtgccgaggtccctcgggcggaactggaaccctagccagctgtccacctccatgtccgggctcagcatcgtgccgggcgccgcagccgtcgcgacgagcttctccccgctcgcgtccgccacggccccaaagtcgacgaaagactggatgtactcgccgttgacgcgcgccacgccg

SEQ ID NO: 7814 - DNA, 232 bp, Zea mays
  unsure (1)..(232): unsure at all n locations
  Clone ID: MRT4577_107121C.1
atgtaatcgccgtgtacgtgaatttctgatcctggcacgtacatggttcgcattcggtttaccttccaaaactgggtgtgacataagtggtatcaaagctgtgctgactgtaggaccgctggcctagagtagaattggccgtgttaaggacttattgactattacttcacctcatccttgattttgattcaaaatattagtcacctcgactaattttatgttgaaacaaann

SEQ ID NO: 7815 - DNA, 272 bp, Zea mays
  Clone ID: MRT4577_107122C.1
cgcacgcgtgcgatctttgtacacaactctgggaacagatgcccatcagattgcgctgacatgtgcgactagagtgacacgtggcctgactgcgctggctaccgtggtcgttatgtggacgcttctgatgactacgacatgatagtggggcgtgatctgcctctgatcactcttatctgtcatgactgccacgcacccgatacagcagtggaagaccttctggctcgtcatcgcgaactgcacacacaagatggccctctgtggaggcttca

SEQ ID NO: 7816 - DNA, 574 bp, Zea mays
  unsure (1)..(574): unsure at all n locations
  Clone ID: MRT4577_107123C.1
gccggccgggccgggcagaatccagtgatccccacaaccgcccgtccattctccaggccatgccgcgcacggcactgctccgcctcgctgctgcttcgacgacgcgcgcgtcctcggcttccgcggcggcgcggcgactgtgcccgtcctcagagtcagacgacggcggcgagcggcacgcggccgcccggaaggatgagctcctcccgccgccccgcacgccgcgccccgacgagcggcggctgtctcggcgtggagagcatcggtgagcatggagccatgggtagacatagtagtaaaagcttgcattcgggcacttctctgctcacgcgaataccccgtgtgtcggcgtgtgtgattggttttcctgtcgccgccgctgcggtcatcttcgtttccgcgtgcaagagcttcgtcgatcacgctcattattcaatggcggctctgcattcttttttctatgtttttctctcaaaaactactagcgaggacgtctgggagtattcttcttctaatcatgataccgtcgtcgtggcgtcgtnaaaacgagaaaaaaaaaaaaaaaaggccccta

SEQ ID NO: 7817 - DNA, 635 bp, Zea mays
  unsure (1)..(635): unsure at all n locations
  Clone ID: MRT4577_107124C.1
ccgggctccgctccgtggnaggggcgatagagaggagctacgcggccaagcaagccaccaatgtaccgctgtggaggcggctgctcgggaatgcgtccaagaagagcaagaatgactccgctgccttgacgaccgctcccccgtcgcctggagttctggtaggcacgcagcgagaagagcaggagcgcgctaaggagggtgccgacgtcgcgagttccgcgcccaggcatccgtcggaagcaggtgccgagggagacgacgtgcagcccgcggctcaggacaggtctgtccatgcggcgaccatgatgaagtccgcgttggcgagaatccagggaggccagaacagcggggcgtttgttgatatggagcttgctatgaagggcctcatggatgtctccttcaaagggagggagagagtccccgtgttgcctgccgagttcaggtccaaatggcctcatggtaatatatcacaactggagagagatattattgctgatccgctcatcctgacgtctggacataccattgacagattctcctaccagtggtcctctctgggggctgcaaaacgtttcctcacggttccaaatcacctcctccgtgacatcataacagcgtggtgccttgaccacgaa

SEQ ID NO: 7818 - DNA, 700 bp, Zea mays
  unsure (1)..(700): unsure at all n locations
  Clone ID: MRT4577_107125C.1
agcagtggtaacaacgcagagtacgcggtgcaaaaagcaacaagggatatcccttgtgacctcataaatcatcaatgaaaaaaagtaagtgctcaaagctgaccctagatgtagttctattctattcaggaagtcatccttgtctctatcactcgttcgaacttagtcacaacattgttttctatgtacttaatgagtacaacatgtttcgttagaactttatgtttatccaaagcccaccacataacattacttgttattttttatgagccttatataagtcaatgccaaccatgtgcaagttctttttctgctccatcatttgtgtgagattttattggtcacttacgtatcctttgtgttcagatttttttcgttttttttgttgtttcacattaggtgatgcgactgatgataccttccgcacaaaagtttgtattttacttgtaatatatctaagagattagcaatgcctgatagacagaattgggatctacttgtgcggatatcttcactttagtctggcaataccagtatactagagaatttgttatttgtgtattatattatttgataatatcttccattgtttgtgtaaataactttgtgtgngcttatttctcttttagttgcttcttgcctaagctcattgacacgtttcgacgatagtgcagtctgtatttgcaactgatctgcactc

SEQ ID NO: 7819 - DNA, 315 bp, Zea mays
  unsure (1)..(315): unsure at all n locations
  Clone ID: MRT4577_107126C.1
tttantttcttaagataaacttataataaagcgggacggtggtaacagaatccagtgatccgcaaaaacatgccgtttgatgcaagggactgctggacccgtggattcacacagttataacaaactgacacagagctggcctgcaatcaaaaacacagatgggcaacaacaaacacgagacgagcgattataaaccatttgaactagggtaaacatcaccgatgctaacaggataacttggcctctcgggccccaccgaatagttcctccagacaaagtcggaaacggggcaatcgaggtcacggctgtcaccgt

SEQ ID NO: 7820 - DNA, 173 bp, Zea mays
  Clone ID: MRT4577_107127C.1
aattcggcacgagggagagcctgcgggtgtacacaagagctggttcatggctccctccatgtgctcggtaccagccattacagtcttttacctgaagcaactgataggacgtagctggggaattagacgcgccacgagctcgtgcagctagtgccgtgcgccaccgggcactg

SEQ ID NO: 7821 - DNA, 515 bp, Zea mays
  Clone ID: MRT4577_107128C.1
aaaaaaaaaaaaaaaaaaaaaaaaaaaaaaaaaaaaaataaaaaaaaaaaaaaaaaaccaaaaaaaaaaaatttaaaccataagttgaaaccacacataaagggaaaataataaaaggttttgtccctcggccgggccccccttaggggcgttttttgggattttccttccccttggggggcgtttttccttccttttggggggcccttttccccctttgggggtgggtttaccattcccttgcccctctttttccacctgcggaattgggaaacccctgggtttccccaatttattggctttgcagcacttcccctttttcccatttggggtattaccaaaagggcccttcccgaccccctttcccaacatttgccccccctgattggggatgggcccccccttgtagcgcgcttttatgcccggggggggggggggttccccccaaggtgccctttcttttttccaggccctttccccccgttttttttgttttgttcctttccttttgcccc

SEQ ID NO: 7822 - DNA, 289 bp, Zea mays
  Clone ID: MRT4577_107129C.1
ccccacaaggcttctctggttttttttaccataaattccaaactcaaggggcaaaaaatgcggccccccctatgactgttttaaacatccccgttggcggccacaccccataaccaagccccacccctttccccccccatttgaatttgaaaaccccccgtttttttttgcaccggggcccccccccttattggcggcccgggtttaaatcttgggggcctcaataacccctgtcccacaaaaaaactgtccatggcccccacttttaaagccccccttcctaattttc

SEQ ID NO: 7823 - DNA, 547 bp, Zea mays
  Clone ID: MRT4577_10712C.1
gggaaaatccccaaactgtagtaaagacggggtggccgaccggcagatggacagcggcggcggcaagcacttcatcctgctgcacggcctggcgcacggtgcgtggtgctggtacaaggtggtggcgcagctgcgcgccgcgggacaccgggcgacggcgctcgacatggccacgtcgggggtgcacccggcgcgcctccacgaggtggcgtcgttcgaggactactcgcgaccgctgctggacgcggtggccgcgtcccccgacggcgacaggctcgtcctggtaggacacagcctcggcgggctcagcgtcgccctcgccatggagaggttcccgggcaaggtcgccgccgccgtgttcctggccgcgttcatgccccgcgtcggcagccacatgggcgtcaccatcgaagagttcaagaggacgatcaaaccggacttttttatggacagcacaacgacggtcgtgaacacagagcaggggccttgaactgcacttatgtttggccccaacttattggccttcacaattgtatgatcaatgccc

SEQ ID NO: 7824 - DNA, 429 bp, Zea mays
  Clone ID: MRT4577_107130C.1
aaaaacccggggcgacgcgcgcacatgtcggggggggcgcccttttttttctttggggtttttttttatgttatttttcgactattttcccattcctgacttcatgacccaagaccaccacgggagctccaaagcccccatttaattgagaggtccaatccataagcccgggacccggaccggggccaaccaattcagggaaaaagagggcgaaacgcccccggtggccaacacaagctgcacaaatggaagcgggagaaagggcacccggggggggggcaaccagggcagagaaaaccacaaagccaacccctcccaccggaaggcaaaaggaaaactcccccgccgcatgctataacaaaaagggggcccccccaacggccggtgcatggggtcccggcagccactcggagaccgggtcgcccaagg

SEQ ID NO: 7825 - DNA, 349 bp, Zea mays
  Clone ID: MRT4577_107131C.1
aaaaaaaaaaaaaaaaaaaaaaaaaaaaaaaaaaaaaaaagacaaacgaacataaaaagaaaaaaaattaaataaaagagaaatcaaaaaacaaaacacagcaaaaaaggcacagcaaattgagggcggcggccctaggggttccagcctcagttacgtgaaaaccctccgtttaaccactttaatcgggtctcagaatttccttcttgtggcactcgttttcaacatccatgattgggaaaccccgtcggttgccgacattaagcccctttcagcagatcccgcttcctcccgtgggtgtagctcctaagcggccccccccgtttacctttcccacaatttggccacc

SEQ ID NO: 7826 - DNA, 500 bp, Zea mays
  unsure (1)..(500): unsure at all n locations
  Clone ID: MRT4577_107132C.1
gctcgagcggcgggcgggaagctcaacccggtagtactagccgaccacggcacgcaccaaacctataancccctgtactcctccgccgccgccgccgccattcgccgccgaagtctgctcccgaccccccttgcccgcgccccccgccgccgccgctcccccgcgccccgtcgagctcgccaacatgctgcagagcaagtccttcgtcaagaagacgaagcagggccgcgtcgtcaaggtggtccgggagcactacctccgcgacgacatcccctgcggcgccttctcctgctcctcctgcgacgcggccgcgcgccgcctcaacgccgacgccgccgccatcctcgtcgtcgacaccaacgtcgtgctccaccagatcgatttgttggagaatccggcgattgaggatgtcgtggtgctgtcggcggtgctggacgaagtgaagaataagaacctctccgtgtacaacaggctcaagaccctgtgcaccaacacggctc

SEQ ID NO: 7827 - DNA, 282 bp, Zea mays
  Clone ID: MRT4577_107133C.1
ctgagagcgggcacagagtgccagccaccaggtacacacagacaggcgctgtctccaaaggagagagcgttcgttcgctgcttgctcccgggtccagcggcccttggaggctcgaaacccgatcgtggcgtctgcttcgctcgtgtgtgtgtgtgtggatgtgtttttggcgtcgatatgtgttgagaactacgttaccacggatcaccagatccgctccaaaaaaagcaataaataactagtcagactagacactagatcaccaatatctagcacctataa

SEQ ID NO: 7828 - DNA, 175 bp, Zea mays
  Clone ID: MRT4577_107134C.1
ccacctagtacttgtcttacatggagatacaactttggcagaaacttgcaagcaaattgttaaatgtaatccattctactataatgctatttgcaacgcaagaagttttatagagcgaaaacccttcgatggaacctatctaaagcgacacatatttcaatcaaatatatatcac

SEQ ID NO: 7829 - DNA, 902 bp, Zea mays
  Clone ID: MRT4577_107135C.1
gcacagcatgatttgcttttcttcagcatattgggagacatacaaaaggataacaatactaatgatcataaaggaaaaggaggaatgaagcagcaaaagatatgtccaagctcgtctttgactagtatacaaagtggaaatgaacaggtaggcatttcgttccattggcctggagtttgatgtgccacctcgactcctctattttgcaagcacaagatctggacttcaaacatacatgaaacagacacaccaggataaacaaaattgcaagccaaccttaagaaacgtcccatgccatgtctttcgaggcgtacaacacgtctccagtgtctagggcaaaagagttctgaacccggtacagaaaacttggtttgaccacgatcagcgcattcggcgggagccgtcctcgttccccagtccaagggacttctgggcattggcaattccttcttcatcccagaactgtgtgaagatccggaagaagaagtttatattgcgggatacactgtatgccattacaggagggagaggcttgacaagtgtgtccacgctaaaaactctcttcagaaacctgctgttccgctggaaggagtagcgcagctcggggtcgatctcgtcctcctcgaagtcgtcgacggtgaggtcgaggtcctggcgcttgctccggggcacgctcatggtgggcgtctccccggggttgctggtgacgctgaccttcccctctcggctcatccttgccgcgtcctcgtcctccgccgcctcccccgtcctccatggagccgacgacagcaactccttccgcttccgccccatcctcgccgcctctcctttcctcttcggctgcgtttggacgggaggaggaagaggatgagacgatgaggggccgcgccgccccggcctta

SEQ ID NO: 7830 - DNA, 800 bp, Zea mays
  Clone ID: MRT4577_107136C.1
atgcccaagctcgtctttgactagtatacaatgggaactggtgaaggggaaatgaacagggaggcatttcgttccattggcctggagttcgatgggccacctcgactcctttattttgcaagcacaagatctggacttcaaacatacatgaaacagacacactaggataagcaaaattgcaagccaaccttaaaaatggggaacaattggatctataccattaaaagatccaaactttagatatataccatggaccccacatgtcattgactcatggggaaccacatgtaagggatatagtaatgggatggatccaaaggggggatcttatggcaatgatgaagctcttatgcttctcaatgatccggcagtttgacgatggcaatgatgaagctcttatgcttctcaatgatccaacggccttcgggacgatgtcccaagcatcgacccagcttgcgatcggcttcgtacctaaccctgatctggaaccgggacagggagccacactgcataccacatttcctgcgactgtggttgaagtgttaatacaccgagcactctctttgcctccagagatcacgctgctaggttttgaaagcaacaagacaaatgatgaagacgaagaagatggaaggagtcagagtcaccatgaagctttactagacagaacaaaagcgaaacctggcattcatcctgttaatatccgtcagaggtgttgcccaggaatacagcttggaagccggcaaaaatttgtgattttggcaagtttcccccatcattatgagttactgattgcataa

SEQ ID NO: 7831 - DNA, 323 bp, Zea mays
  Clone ID: MRT4577_107137C.1
cggacgcgtgggttttttttttttcttttttttttttttttttttagaaaccaaacacaccttaaatataggctcaactaccattggttgagcttcaccatccacataatacaaattctttatacttatacccttctacaaacgcaacaccttgcatgaatcagaaacagaacttacttccgtatgaaactgcttgtgcagatgtaaagataaaataaatgcagatcccaaaacacttgttgctcaaagttctgaaaaagctaagtaagctactctaacttcagtccatgtttcatctcttctgtcctgatggcttggtttga

SEQ ID NO: 7832 - DNA, 721 bp, Zea mays
  Clone ID: MRT4577_107138C.1
atgcccaagctcgttttgactagtatacaatggaactgttgaaggggaaatgaacaggtaggcatttcgttccattggcctggagttcgatgggcctcctcgactcctttattttgcaagcacaagatctggacttcaaacatacatgaaaccgacacactaggataagcaaaattgcaagccaaccttaaaaatggggaatgcctggatctataccattaaaaacaccaaactttaaatatagaccatggaccccacaacccgttgactcatagggaaccacatgtaagtcagatcataatgggatggatccaaaggggggatcttttaatgggatggatccaaatttccctaaaaattgtcccatgccatgtctttcggggcgtataacacgtctccagtgtctagggcaaaagagttctgaacccggtacaaaaaacttggttgacccacgatcagcgcattcggcgggagccgtcctcgttccccagtccaagggacttctgggcattggcaattccttcttcatctgcgagagatgtacagcaagcagcacaggatttagcggtagaagtaaattgatggttcgttatttgaactagggcacaggttgaaggagcatcgcgtaagccattggctagatccattggtctaagagcaacgatccagctagatcagcaaggatcgatgcaatttctattttattagtacataaaaggac

SEQ ID NO: 7833 - DNA, 2778 bp, Zea mays
  Clone ID: MRT4577_107139C.1
aacaggcgggccgctgcccaagtgcccagcctcgcttctccagtcaattctcagcctcgtcctccgcctccgctcccgctctctcctctccttggcctccgcttccgctcctgcctggaggctgcatcaaaccctaccgctccggacctcccggctggccgcgagatgcgacgcctgtccggcccctaatccttctcctcgatactgcccctcgcccgcccgcccgccggcatgggccgctacgggcccttccctgccgccgccggtgatggcgggggctgcctgcccctgccgattgtagcggctgaaggcgcgctggctgtcctggacggcgccattgcgaccgcggccttcgtgcagttagcaaggattcataggcacaaccagctacaaggatggactcggcaaaagatattccattttatgattggtctatcaaacatagtattcctagtatatttcgtgtctaccatcattgctacttgtcagagatggatttgctgggtacatggatgtggatttgttctcatggctagtccacagatattgcttcttgcttctttcctcttgctactgtcattctgggttgacctgtgtcatcagacaaatgatgaagacgaagaagatggaaggagtcagagtcaccatgaagctttactagacagaacaaaagcgaaacctggcattcatcctgttaatatccgtcagaggtgttgcccaggaatacagcttggaagccggcaaaaatttgtgattttggtgcttctactgtcatttgttgttatgcttgcctttgccatcctcatatgggttggtagaggagacaatcctatcgattcttctctactgaaaagggtttatttggatgtattttcagtagtagttattgtacttggtggtgctctggcatgttacggtgcagtgttattctcgaagatgagcaaagttcgttctgaaactgtatcaactgagaagtggaaggttgccagtttagctgctgtctcgctgatctgtttctcgtcttctgctatacttgcacttgtgactaatgttccagtgcttttgtattggtactcaacagatgtggacatcatcaacaatgctgttattttgtttatatattacttcataggtatctttatttttctttaggaacaattggatctataccattaaaagatccaaactttagatatataccatggaccccacatgtcattgactcatgtggacccacatgtaagtgagatagtaatggtatggatccaaattggtgatcttttaatggtatggatccaaatttcccttttctttatgtctagcaacaacacaccagttgttatggtcgctagatcggtgagggattggagagggaattcaatggttggagctgctggtggaggtggttcggtactgttcacagggcgccggccgggggggggggggggccctctgcccacgggcgagcaagaggggttttatttctcatccattgattacataaataggccggctggccgcccttatttagctagagatccttatctccttaaaactctcaacaaactactaactgataactttcctagataatcttaactgatcttctaaataatctcaactaatcttctaatcttatctctaactatccttatctaattccccttggaggactcatggttgctgctgccgcagcccctccgtaggcctcctttggccctgacacctgttgtctcatctacagtccttcactaacgtagtttgtgtttccaatgccgtttatactcaaaagcgggtgttcttgttattaagcactgttttctatgcaagtatgcattttgccatcaggtatatgtacttacgcttctaggccagatccttttttccttgcatccatatccccagtcccacctgcaagcattcatgtgatttggtgttggacttggcactatttttctgtaagggcattacaattcactttcctttgtgtgtttgggtttatttgaatctctatccatgtctttgcagcttattgccaagctgtattttacgaagcaaatgacatgctgcttggtttgtagatgcaaattattgttgtgaatagatcttgaaaatttgtacttggtgcacttgcgctgtgcatgtcgaagtgcaatgtagaattattttaaatgaaaggatgaaggtagaaaccatggtgtatgttagcttgtttacacattaaaaatctagactagactacctcttgagttttctcttttccaactgtgcttatttactggatcattggtgtatatttcttgtaggctcgtcagtgccatcaggatttgttctatggatcatgagagagatgcctcatcggcaggtagttgaaagatccgtagaatcgagggtggttactttgttcagggaaagaccatcaactacgcaggatccacagtggaggacagctgtcacatcctcaaacaaggccctcaagtcaagcccaatttaacctgaagacaaaccatcgacagtgatacctcacgttctgcttaatgtgctgggactaataccaacacgtcagggtcacaactggcgtctgctggcattgcgctaactgatgcatttagaactgaaggttggggccatatttgaagaattaacaaaatgtaaatagctttggcagttactttacccttttagatgtaacaaactcatcccgttggttacatgtaccttgttttatttagcgcttcatctaatttaccgaaaaaaaaaaaaaaaaaacccgcggcc

SEQ ID NO: 7834 - DNA, 283 bp, Zea mays
  Clone ID: MRT4577_10713C.1
attcggctcgagggaggaggcgttatgatgcgcctactgaagctgctcctgctggagacccggcccaacaccgtcaccagatgcttgacctgctgagccacgacctgcctgtcgccgctccgccgtgcccggagctccatcatcccggtacgggcgagcgagtgactagtatcgagcataccaaaacacgcggctgtgtcggctgcccgcgcgcccaccgccggctgtagatctcgatagccgcgtacacagcgagcgtgaccagtgctcctggggggtgcta

SEQ ID NO: 7835 - DNA, 367 bp, Zea mays
  Clone ID: MRT4577_107140C.1
ccggccgggatccctccatacctacatccctcacctgactcattacgagagagaatccgacaacccactcaccctccttcgtctgcctatcatccacatctaaccatgaaggacctggtccgacgcctgggagcacctcaagagcgtgttccctcaatgtaagaccgttgtgcatcacagagaggcgcgtagtctgttcgagcctctcaaggacgtccaggaccccgagaacatgggtgcgcgcctgttccgactcccgcgtgtgcccgtcggtgaccctgggcctgcagcccgccgaggccatcaccgtgcgctccatcgccgccatggtcccggcctacgacaagaccaagtacaccggcatcgg

SEQ ID NO: 7836 - DNA, 1514 bp, Zea mays
  Clone ID: MRT4577_107141C.1
aaggaaaaaaaggtgaaaaaaataatatctatgaaaaattacactccataacactgctgaacttggttcgcactgaagcaatcccgtttagtctcgtcgaaccagtgggtatccccccccctacgatcaaagtaccggtggatctgtggtgtgttagtttcagtagtttagggatctgacatggaagaacgccgagacatcgttcctaagacagcttagatatggagtggtgttcattttaatcgtcaataatatttctgagaagcattgtctttgtgtagaagggaaggaaagaaggatgaaagtgatattggggactggctgtaaagtgtaaatacactaaaagctccctcctgtggaattactgcttgtaacattgtatacactgactgattaacctagtaaaaaacttccatgtttctttccttcccttctacacaaagacaatgcttctcagaaatattattgacgattaaaatgaacaccgctccatatctcagccgtcttaggaacgatgtcttggcgttcttccatgtcagatccctaaactactgaaactaacacaccacagatccaccggtactttgatcgtaggggggatagcaccactggttcacggctaaactcgtgggattgctgcagagggaaccaagttcagcagtggtatgtgttatacctattcatgagtgtttcttctccaccctctttctcctttcgaacaaggaacaattggatctataccattaaaagatccaaactttagatatataccatggaccccacatgtcattgactcatgtggaaccacatgtaagtgatatagtaatggtatggatccaaagtggtgatcttttaatggtatggatccaaatttccctaaaaatgtcccatgccatgtctttcgaggcgtataacacgtctccagtgtctagggcaaaagagttctgaacccggtacagaaaacttggtttgaccatgatcagcgcattcggcgggagccgtcctcgttccccagtccaagggacttctgggcattggcaattccttcttcatcccaaaactgtgtgaagatccggaagaagaagtttatattgcgggatacactgtatgccattacaggaggaagaggcttgacaagtgtgtccacgctaaaaactctcttcagaaacctgctgttccgctggaaggagtagcgcagctcggggtcgatctcgtcctcctcgaagtcgtcgacggtgaggtcgaggtcctggcgcttgctccggggcacgctcatggtgggcgtctccccggggttgctggtgacgctgaccttcccctctcggctcatccttgccgcgtcctcgtcctccgccgactcccccgtcctccatggagccgacgacagcaactccttccgcttccgccccatcctcgccgcctctctctctcctttcctcttcggctgcgtttgcacgccggccggaagaggatgagacgtggaggttatcggccgcctctgggccggaaggcgt

SEQ ID NO: 7837 - DNA, 537 bp, Zea mays
  Clone ID: MRT4577_107142C.1
aattcggcacgaggcttacacaccgcttgagtccagtgcatgtatgcacttttatggctacatgatcactctacatacaaggtgacacacacatatctaaaccctgttctgttatagtatatctgaaggatcgaacataactgatatcatgtacaaatacttggaaacatatgcatttgaattgcgacacgtagccctctgatgcaggagaaggcaaatatgcaggaccatggattcccacatgcatacgtaaagacgagaaaggaagtaccctaacgacactatgtttaccttttacaattgcatgccatagaccaattataagacacacgttggaatctaattacaactgaccctctccccacattcaagcacatgttaatcatccatgtcattgtgtggttctgactatgaaggacatttctatatgttgtgacaaccagtctcatagccatttacattaggatggtgaattgagcatcaagagaagatatgccttgatttctatgattgagcaaaggtgatgctgagcccttc

SEQ ID NO: 7838 - DNA, 495 bp, Zea mays
  Clone ID: MRT4577_107143C.1
cgctgatcaatccatttattcggtccccatcccgagaccagggccaggcacgcaccaggaaccacccacggcggccaccgcccccgcccacccgcgcgatcggtccgccccctgcgcattgcggcagacctacctacctcggtgagccgtgggcgaaccacccctcccaatcccaccacctccccaccggaccggcaattcggcggtgtccgagccgccccgtccgtccaccccgcgctgttggatcgggccaccgccgccgagaaaaaaaaagctgccttttttatctccttcggcccggcgggcgcgccgagctgtgatccggcgccgcacacctgggctctggtggttccggttcttatccggaaagggggggcggcatccgaggcgatgcgccacgggcgccacgtgacgagcggttggcgatggcgacggcgggcgcgggaaagcgcagcggtcaccgctactcgtcgatggaacctaatgggttcagcg

SEQ ID NO: 7839 - DNA, 355 bp, Zea mays
  Clone ID: MRT4577_107144C.1
cccacgcgtccgccgacgcgtggcttctttaggagcctagctcattgatcatcgggagggcttctttgcaaaaaatgccatcaagtatagctaagctgatgtagacaggctctgacactcgttgctagaaatgaactctggaaattaacttgagtcccccaatgattgcacactgtaaccccgctgggatatatatgtgacaactctcacgctaatgtaacgaatgctgctgccaagaataaatgatctatctggctggtgacaaatgctgctgacaaggggcgatcgtctaacaggctccaagcttacctagccggtcatgcaccttcatgactcttaaattgtgtcacctaaa

SEQ ID NO: 7840 - DNA, 1635 bp, Zea mays
  Clone ID: MRT4577_107145C.1
aaaaaaaaaaaaaaaaaaaaaaaaaaaaaaaaagcaatcgcaggcgacacatcactagcaccttccttcttctccgtctcgtcgtccctttccatttcctctccactccctggcggccggccggcatttatttcctccgcttcagctcccattctccgccaaataaacccccgaaaagcaggagaggcgagacccggaagtggaaggctagggttagggtcccagctccccgttgcctgggcgagccgagtgatggccgcccctgccccctccggcgcagctagtgccgccgcctcaccgtccccgctgatgcagctgccgtcgccgttcgcggagctcgtcaagggcccctccggcctcgagaaggtcgtgcttcgcggcgctcgcaactgctgtgccgagatttatctttatggaggtcaagtaacatcatggaagaatgacaatggggaagacttgcttttcctcagcagcaaggctattttcaaacctccaaaagctattcgtggtggtataccaatctgctttccccaatttggatcacatggaaatcttgaacaacatggattcgctaggaaccggttttggactattgacaacaatccacctcctttaccattaaaccctgctattaaagcttttgttgatctgattctgaagccttctgaagaggatttaaagatctggccccacagttttgaatttcgcttgagagtttctcttggaccttctggagatctgagtctcacatcccgaatcaggaataccaacacagatggaagacctttctcttatacatttgcatatcacacatacttctctgtctctgacataagcgaggtgcgtgtcgaagggctggaaacaatggactaccttgacaacttgaaggcaaaggagcgtttcacggagcaaggcgatgctattgtttttgaatcagaagttgataaagtttatcttgccgcaccctctaaaattgccatcattgatcatgagaagaaaagaacatttgtcgtgacaaaagaagggcttcctgatgctgttgtttggaacccttgggacaagaaggcaaaagcaatgcaagattttggggatgcagaatacaagagcatgctgtgtgtggagcctgcagctgttgagaggcctattactctgaaacctggggaagagtggaaaggaaggcttgtgctttcagctgttccttcgagttactgtagcggacagttagatccatcgaaggtccttcagggttgaaaatcctcactttctgcatcttgtacagaagttcattgcccttaatatttgatgctgggctggcgtcaacgccgcatgttccttttgccatttccaccccctatatttctggtcccttttgtatctagaatttgagtgataggttgattccgaataacagtctgtgatttgagcttaggattgggtcatctcatcgatgaatgataccgctggacaaaatgctggcgtacgtgtcagtttcataaatcattcttctcataaattctttagcatgtacttcgtagttgatcatgtttcaaacggtggacccttttgttactttcttgtctgataaggtttcgatcggtggtcaaaaaaaaaaaaaaaaaacccgctcgtgccgaa

SEQ ID NO: 7841 - DNA, 668 bp, Zea mays
  Clone ID: MRT4577_107146C.1
ccggccgggaaaaccctactcgagtcgccgccaccgtctcccctcctgatccaatccaatggcgcgcctccacctcgtggccgtggcaatgggcttgctcttggccttgacgacggcgcaggcaccgggcgcgtccacgatgcccgcgcccatggcgcagcctccggcgacctcggcgcctcctcgtcccgcgccatccccgacccagaagaccgctccagctccggcgcccaatgccacggtacccgcccccgcctcgccgccggcgccgagctctatcgggcagacgccgaccgaggcgccgtcctcccctccggcgtcccagcgccgcgtccagcgtcgcctccgccttgtacgtggccgccgctatggcggctgtcgtgtttttcttctgaggtcggtagtcggcgccgatggatccgccgcctatggtatggtacggtgcggtgtggatttgacacgatggctcccgctaccgctggtcgagtttgcttattaggatactagtagttaattaatagttgggttgatcagatcagatctagcgtttttgttgagtggggatattatttcttctacggatctgcacactagggatatgtcactatggttgccattgttattagggaaggtgcaaacttctaatttgaatcacatgatgttgatcc

SEQ ID NO: 7842 - DNA, 243 bp, Zea mays
  Clone ID: MRT4577_107147C.1
ctctcgagctggaacgggggccccagggtggccccggattggggccctttttttcaggggaaatagggtggggcttgggaaaaaaaaaaaaccgggtttggaattttttacaaatgccgcaggcttattcccctctaggatgggcggattttttgggcctttttttgggattcttagaaagaaaaatttgggcccgcatggccctcaagggggggaggccatcccccgggtttccccgtttcg

SEQ ID NO: 7843 - DNA, 253 bp, Zea mays
  Clone ID: MRT4577_107148C.1
cccacgcgtccgtaccatcccgacaaagatggagcatgtcttctacacttactccgacaaccttcccggcgtgctcatccaggtgttcgaaggtgagtgggccagtaccaaagacaacaatctgctcgtcaagttcgagctttctggcatcccttcggcgcccaagggcgtcccccagatcaccgtgttgttttacatggatgctaacggtattcttaacgtgttatctgaggacaagacctccggtcagaat

SEQ ID NO: 7844 - DNA, 351 bp, Zea mays
  Clone ID: MRT4577_107149C.1
ccattttattctactctcctgctactctcccctcggcttacactcccctttgtcggggaaccaaaccaatccacctttaccgatttactcgttttaggtttcttgacccttcccagctgaaagagtgttgaactcaccttagctaccggtctagtcgccagacatggagcctcatcaagatgccataaccatcatattcgacgcgcttctcctgccattcatggctaacctcttcttcgacatgtaacagatgaaactaggaagcacactcttctacatcatcatcctcctcttcaccatggccttctccagtcgcacgcccagtagcttatagctcttatagcaactggc

SEQ ID NO: 7845 - DNA, 491 bp, Zea mays
  Clone ID: MRT4577_10714C.1
gcctgagtggagggacggggctgcatatgtgggcgactagggaggacgtgacccggaggctgcgagagaggggatgaggcggacaaacctgtgatcagcgaggactttaaccagcttgactcatcacttcattgagagcagataccaaacatcaatactttctcatgattccattataagcccgcagaatcatacggaatccgagcgaaggctgttgctaggtctcgtagatgaactagtttgctgatacagatgcaaacagggctactaaaaagtctaccataaccatggtgtatgatgagtgcataaccttcatataaagctggaacttgttgtaatgtacaccgagaagcagctgtcgggtgaatgcctgcctgcaaagccagaccttgtatgcgaacagatgggtatggataatgcgatggtatctgtagaggaaccgggaataccgttccggactacactacctgtgtaactgacttccactacag

SEQ ID NO: 7846 - DNA, 204 bp, Zea mays
  Clone ID: MRT4577_107150C.1
aaggattggggaggattatgtaccatccacggataaaaaaaaaggctgttttttccaaaactggccaccaaaaaccatccagggcaaaacaaaccccaaggtggccaccggtttttaactttaacataaaaggggcttttaaacagaccaaaccatcctaagcctttactgtttaacctgcccgggcggccgttcaaaagggca

SEQ ID NO: 7847 - DNA, 232 bp, Zea mays
  Clone ID: MRT4577_107151C.1
ctcatcttttcctcaagcaacaacggaacaaggtgagctatcctattccctggcgtcaaaacctgcagcagccaccactagtgcactcctatcactacctgtcccatggcgaggaagccccctgccaagttcccagccccctcatggctgaccctctctgctccctgatttctccccatgccatcagcggaaagcagccattgcgtgcagacccagctcggctagcctctct

SEQ ID NO: 7848 - DNA, 485 bp, Zea mays
  Clone ID: MRT4577_107152C.1
accccctggcaaaacatgcttttggggaaaagattgttcagttcttcacataccaacttggcacttacttcttttttcttggggtggcgggacattttttactcactccataacatagggcaaattaaacgggggggacccccgccgaacaagaacaacaattcccaaacccaagttttttttttggggtgacttgcttttataaagcatgcgtgcgttttaaattaccccaagggcccgcaaacatgggctttttactttccattcattttgcccgatttaacggggggtgctcctggtcttgccgctttaaaaccaatcttaaaccgtgggggagtttggcttcggcccgtccaaaaagttggcccccattccctttgtggccaggtttcttccccggtggaaaacactttgccacacttttccggggccccgcggggttttttaaaacaacgaagaccacagggttaccggggtttttgggg

SEQ ID NO: 7849 - DNA, 571 bp, Zea mays
  unsure (1)..(571): unsure at all n locations
  Clone ID: MRT4577_107153C.1
cccacgcgtccgggaatccgtcagatttcgtcggtgctgccctgggagtatccgaatcccaaacaaagggcattctagccgcaactttaggaaaagtgctcgtaattgacgaagcatacggcttatatggtggaaagggttctacctctgacccgtacaaaacggccgtcatagacacgatagtcgcagatgtccaaaatgtccctggcgatgatcgctgcgtcattctaataggctatcaagagcagatggaagagatgttccaaaacgtcaatccaggcctcagccgtcggttttcagtggacacaccattcatttttgaagactttgacgacgatgccctcagacaggtactggagttcaaactgcaagcttctggctttaccacgactggagagggcaagaccgctgcgcttgatgttctcgtccgagaacgcancagggctaatttcggaaatggcggtgcgattgaaaatcttttgagcaaagccaaagcctcttatcaaaagcgcctctctgctggaaaactgnncaagaagaatcagattgaagcggaagactttgttgaaga

SEQ ID NO: 7850 - DNA, 817 bp, Zea mays
  unsure (1)..(817): unsure at all n locations
  Clone ID: MRT4577_107154C.1
gggtacctcgaggccggccgggtctaagtccaactttttttaatagagcatgagataatgagacagtagggtaggatgtttcctagtcattttcatgcgcatcattttggtatgtgatggacgcgatagaacggtcagttttaagtggctagcacctaaaaaagaacctctcaagtgctcttctagctcatagctcacggtgcattaatagattggatgtttctcgttcgattctttggcaacaagcagcattgttcttaattttgagtattttatctactgaccaaatcgcgggatggctaacaaccaaggttttaaatagcggccgacatatcacgatatagcctttttatcagcaaaaagttatgctacttagcccgatatatcatgatatatatcaatatttatatttttgagaagcctagggataactcccttatcccgctatttaaaacactgctaacagctgaatatgactgcttttcattcaggcgacaccgctgggtgaatggatcttcaagagcaagagcaagcaaaatagttgcggtctgcaaggggcatgcgagggcttcatgttcggactacaggtcacggagctgttggaaacctggcccgagcaggtcacccatggcaggagatgggtgagcgggcatgtcattccgcaacagcagcagctcgccgtttcgcaggttttgatctcatagcagtcgttctcttcttgcacatggtcattangtacccgtggaggnagcgtatggtctctgccggtacgactggatgcgggagctctggaagactcaggaccagctgctgctgt

SEQ ID NO: 7851 - DNA, 331 bp, Zea mays
  unsure (1)..(331): unsure at all n locations
  Clone ID: MRT4577_107155C.1
nnaggcgttttctgtgacagccacccgttgaggtacccgtcgctccagtccggcgccggggcgccgtgcctgtggcgacgcgccgggggctcgtcttcctgcaggcggctccgcgcccccatcgctccccggcgcacgcacctggtggaacagagatgggggggagagacccttcggcttaggattcttcttgcctgctgctactggtgctactactgtactacaaatgcgatgcgactgtagaggcaagagaagagaactggaggagaagcgaagggagctgcgtgcgtattcagggtgactttgttcggtgcgcgtagcattttctgtg

SEQ ID NO: 7852 - DNA, 254 bp, Zea mays
  unsure (1)..(254): unsure at all n locations
  Clone ID: MRT4577_107156C.1
cgcgtccgcactagcaacatagatagcactatagtgtaccaacaatggcagccaaaantatttgcctccttatgctctctaggtatttctgcaagtgctgctacggcgaccatttgggccagtgctcacaagctcctatagcttcccttcttcccccgtacctctcaccagcggtgtcttcggatgtgaaacccaatctcaacccacggtccacaggcttcctagcattaccttataccctgcctcacaatata

SEQ ID NO: 7853 - DNA, 367 bp, Zea mays
  Clone ID: MRT4577_107157C.1
gcggatcgagaaagatattgatgaagttgtgaaaattgctcgtcaagcgaatactaaggctgatgcattggatgatgactacttatcagataggctataacctggatgtggacaaggatctgccgtgggccgatcaatagagcaatctactgaactaactactgagatattgaaggagcggttggatgactttcagaccttgtgagaaaccttcagacaagagtttcggcaggatgatcaaagaatggtttttactgtgactggtactggtactgatgatcagactgttgatgactcgatagataccttgataggtgaccaaatattcgaagatgctatccaacatgctgtacaacgtcagatacta

SEQ ID NO: 7854 - DNA, 259 bp, Zea mays
  Clone ID: MRT4577_107158C.1
ggatgatgcttcttcaactgtgtattatgatggtttgcatagctctactcgataatatatttttcatcaattgcttgttgtttatgcagatcaggaaaatcagtgagtgagaatccacttctgacacatcttgtttttgttgttttataggttaaggctggagacttattacgaaaatatccagtccttgttatcaatatatgatgacattattgtcaaagtaggcaccatctcttttaaagcatatgctccatcactt

SEQ ID NO: 7855 - DNA, 242 bp, Zea mays
  Clone ID: MRT4577_107159C.1
ctcccgctccggcttccgcttccgttcctgttgctctcctgtgttcgggttcccgggtaagcggatcgtgatcgccgcataggagtgtgaggtaccgtgcttcctcgccgcctcaactgagccacggacgaccacttcctccacaacgccttcagcacctacggcgaggtcctcgagtccaacatcattctcgatcggtagacgcacaggttccgcaacttcagcttcctcaccttctccac

SEQ ID NO: 7856 - DNA, 285 bp, Zea mays
  Clone ID: MRT4577_10715C.1
agcattagagaagtattatttgttaaataagatactaagatatactaaacaaatgcacactagaatccatagtccgaactggtgagaaagaaacacagggcgacctgaagaacaagaagcatttgttttgtgttgagctaaaacgtacgacaagaacaccatccgacgaaacagagatctcgatgaaacaagaacacattgcccacacatcctatgaatttgcaaagcgaaagtaggaacagcatgctgaaatttgccctggaatttttggagcaaagaagcaga

SEQ ID NO: 7857 - DNA, 428 bp, Zea mays
  Clone ID: MRT4577_107160C.1
ttttttttttttttttttgtttttgaacattatttgccatgcattattagtttgctacgcatttgcatggagagatcgaaaaccttccacatgtgccttattttcttcttcgattcactattgttgtggtgcatccacccgcaccagggacgggcttgcgggttacgggttgtgcagcgcctcaatctccattagacctgctccatcatcgttatcgtcgtcgtcgtcgtcatcatcatcattatcataatcgtagcagctactgccatagcctcgcaatacctgtttgctctgggtaatggcgctgcctgcaagccccgtcttccttagcttatccgtgtacgaatagtcctgccgcagacagcgtgtgtacatgatcatcaggttcttggtaacctgcaagggcgcggcctgcagcccgggggatc

SEQ ID NO: 7858 - DNA, 146 bp, Zea mays
  Clone ID: MRT4577_107161C.1
cattgggtacctcgaggccggccggaattgtcatttgcatgcgatgagatgagtcatagaacgtagaatgctatgccacgaatccccttcgcctcgcttatatactgacgccgtactctctacatcaggggattcttaagtcgtga

SEQ ID NO: 7859 - DNA, 425 bp, Zea mays
  Clone ID: MRT4577_107162C.1
acaaaacataaaaacatctaacattatagcttagagagactaaatccccggaataggagccagaagaagggccaaactcttggccccggataactcccaaagctccttttcttctccagcccttctgatagctgcatccaggtttggggaaaggctgtcaaacacacaactgtttctgtggttccaaataatccaaagccccagaataattaaggagttaaaccctttcttggcaattccatgcagctgatcgctgcagcttttccaccactgcatggcgtttccctcttccatttgaggagtgagaccctcaagattaacctgtccaagcagcccttacccctagcgaaaacacaacctacaagcaggtggtttatggtttctggttcttggccacacaatgcggcaacaatcacgatggttga

SEQ ID NO: 7860 - DNA, 462 bp, Zea mays
  Clone ID: MRT4577_107163C.1
gggaaaaaacaaaaggggcccccctttttttaaaaaaaaccccggcggtaaaaatgggccatttgcaattaaaaccccaaaaaacgggtaaaaaaaaaaaaggattggcataatttttttttttaaaaaaaaaacaaaaaatgtttagttttggggaaaacctggcccaaaaaaaaaaacccggggggagccccatttgggtccaactttacttggggcaggggggggaaaaaatttttataaaactggttaaattttttgttctcccccccaaaattgtttgggccccaggggacccattaaaatttgggggtttcaaaaaaaaaaaaatttttggagcgggcccccctttgcaaggggggattccaaaaaactgcttttgcccaatttaaatttgcaaggggaattttgccccccaaaccattgcccaagatgagttcacttggggccccaagggaaacc

SEQ ID NO: 7861 - DNA, 601 bp, Zea mays
  Clone ID: MRT4577_107164C.1
gttacaccccttcaccgaatcgcgcgtatggcgggcggcgtgaccgcgtcgcgcgcgtgaatctcgctcgggtattccgtggtcacctcccgactcatccgtgaggaagataaataccttctccttctcggccgctgcacatccctccatctcgctgctattcccgtgaaccgagagagtcgtgtaagagtgagggtgccgccgccacgattctgcaccgataggggaagtagggcgccaattgtgccagcggaagggtggtctgtgatccatcgatgctgtgtgagggtttaatcgctggccgacctgctggtgctccgggaacttctcactggcgcgctcttcaccgagcaacaaccgtctcccgtggaccgccatcgattcgtcatccctgtcggtcaagaacaggtaccgcaggatgatgcacatggaggatgctgccatgagctcgtgagagagatctaggtcgtcgtctcccagtcaactttgggtagctgtaccgttgtctccttataaggtaattattcatttattttgtatagaactcctgttatgtagtatagctgagacgctcgatcctaaaaaagaacaaaatgaaggt

SEQ ID NO: 7862 - DNA, 177 bp, Zea mays
  Clone ID: MRT4577_107165C.1
ttcttcttatagagtaagcaaaacctccttaagcccttgctcccgatctagatggggaaccctctctttttcttagacaagaccctgggtattgccccgagggaccggatcttaattgagctactctccaacgaggctcccaaaaccagttttaacttccatgccgctttcacgggc

SEQ ID NO: 7863 - DNA, 330 bp, Zea mays
  Clone ID: MRT4577_107166C.1
ggtgtaatgctattgggattcattgttttcctatatacatgttttgctgtgaatagaagtgaggttacaacaaggaacctaaagcccaacatttagggaagcacctgagcagtttgatttccaagtaaaaggcaagttgtgtccttgatcaaattctttgacctaataatatttactctaagattctcatgatgcttgcattgttagggtaaattaattgggaactaataggttatctagtcttgtttatccttcaccttggatttaaatgaaatattgggtagtctttgctattgttctacccgggtttaggactaatgttacttatga

SEQ ID NO: 7864 - DNA, 615 bp, Zea mays
  unsure (1)..(615): unsure at all n locations
  Clone ID: MRT4577_107167C.1
tagtcggcacgagggccgatcgattcgaagagagctgagctgctgggccagccacccgttcccgcgctatctcccggcccaggccctcccctcccgcttcctgctctgctcaactcgatcccgccccaccatgccgcaccagggtagccaccgcccgggcgcgccggtccagggagacccggtgttcccgcgcgccacgtccacagtgctgcccgacccgtcccgcttcttcgcgccgccgctcctcgccgcgccgctgcccaccaactccttcttccagaacttcgtgctcaaggacggggacatgcccgagtacatccacccctactccgtccgctccccgggcggcggcgcgctcgacgtgtgctacccgtcgcgggtccactcgccgtcgtccgtcacccagacgttcgtcgccgacctcaccgtctccgacgccgccgccgggagcgcgcagcgccacgtcgtgtcggccttcgacgacctctccgtcacgctcgacgtgtccccgtccctccgcgcgcacctcgtncgcgggtgcccctacgtcaccgtcaccacgaccgccggaccgatcgacgtcttcgtctcttccgtccacgccttcgtcgagct

SEQ ID NO: 7865 - DNA, 350 bp, Zea mays
  Clone ID: MRT4577_107168C.1
cttcttttttttttttttttttttttttttttgtggtttttttttttttttttttgcgttttttttctttttttttttccgggaaaaaaatgccccccccccttaattcttacctcaaaaaccatcgaacaatagggaaggccagggccccgggccctccaaaaagaaaaaaccggggacaactcacccccaaatttccccccccccgggggaccccttacacaagaaagctttcttgccgattggaaagggcccgcctaacacaaatgtgggccataacatttaggggacggcctgttccatcaggccagcaggggaaccccctctggggggggggcagcaaccccccc

SEQ ID NO: 7866 - DNA, 1171 bp, Zea mays
  Clone ID: MRT4577_107169C.1
attcaaacatttctttatcgtaaatatatatatacatctatagaagtgattaaaatattttgtcatcacataggcctactcatattctactcggtacactaattccgctaattgaccgaaatagcgaaataactcgctataactgaatctggctcgataatcgcaagaactgtgaagtcgacgagagtttcgtgacttacgcaatttatcgagcaccttaatgagtatcgcacttagcatattaattcattcatcgatcaaactatgctgaataacttgtcagcttaccatgaccaattcgatttaacttcgcgagatcgtccacgctcttcggttcgaatagtccatcgaacaccacagggcttcgcattcttccttaataaacaccgccacgtgcactgcgacagcgaacgcgagggagatggcacgcggcgaggacgcagggcacggcaacaggggctggacttggcgagggaactcgacggcggcgacacagacgggatccgcgcacggtgagatgggcaggaccgagcgcgacgcagggggttgatcgccgagcaccaacgacgaagagagcggccatggacagaccaagatgttcctgtgcccaccaccgtgtgaccatggctaaacaaggacgacctatgtgaaggggatgaggaattttggcccagcagcagggaatcggacgccgaccaaggagaagcgttcagccatggatgaacacagggagctgcgcggcggtgcgagcagggaaggagcacgcgcgcgcaagggagctcgacggctgggcgagcgccatggaagaaggggaatccgagcgcagggactgaggaaatgacgccggagcaccacggcacacgaccatgggagataggtgcgcgcacacggagctggaaccgagccgagggaactccgagcaggggcaagctcgtgcggcagggaggagaaccgagctggagcacgagagcagggagtggatgcgagctggagcgttgcggcatgggcgagggaggagcgccggcgagcacatgggaagagcacgccatggcccatgggcgcggtttttttttttttttttttttttttttttttttttttttttttttttttttttttttttttttttttttttttttttttggaaaaaaggttaatccttttcccggcc

SEQ ID NO: 7867 - DNA, 802 bp, Zea mays
  Clone ID: MRT4577_10716C.1
gaaggcatttcacgtattacaacagttgttcctggtactgttgaatccattgggaagttagttcagcagctttacaagcttattgatgtgcatgaagttcatgacattacccactcaccttttgctgaaagggagctgatgcttattaaggtttctgtaaacactgctgctcggagggaaattctagatattgctgaaatcttccgagcaaaacctattgacgtttctgaccatacagtaacccttcagcttactggagatcttgacaagatggttgcactacaaaggttattagagccatatggcatctgcgaggtcgccagaactggacgagtggcactggtccgtgaatcgaaggtcgactccaagtacctccgcggttactctcttccattgtagcctggcatttgtgattggtggtggacccgataaagagcttggtttgttgttatagatcagaccatctcgcgctgggatgtgttgtgcaattacaggacttgtttctttcatgttgtgaactccctggcctgcgagttcaataatgcccctttttaatgcgcgttgaggttgcatatgtatcccatcgactgtccgaataagatgcatagcataattgtttacttcagcgaagagagattcgaaaaaaaaaggggcaatttaaaaaggtcaaaaaaaaaaataaaaaaaataaaaaattggcgggccgtttataagaatcaaacttacattaatcttgtatgcaacggaaaaagtttatatattgttgtacctaaatttaaaatttactgtaccctatattttt

SEQ ID NO: 7868 - DNA, 655 bp, Zea mays
  Clone ID: MRT4577_107170C.1
ggccgcttttttttttttttttttagcaaattcactaaattaattcaacacatgatggagacacataaattaacgggttggaggtggcttcaaccctgggttaatggaccacggcgaacgggctccagtgccccaaggcgaaggcttggcatggcgggatcggcgaggctttggaccgggttcgggcacctctcccgtgaggcccatgcacaaaataaaaaccaacaaggcgtgtgggccaagagcggcaatggcacctaccataccctgtggcgaggtgagaaatggcgtggctctgcgcaatcggcgaacgggttggtcgaccgcgccctccggaatggggaaagccaaagaaaactccgggaggaaaaaggaaaaaagtcccggtggctttatagagagaggaagggagagaaacaacggtaggggccttcaatcgggcatcaatggcgttcatggaggttgaatgaagggaattggggagagaaacggacaccataaactccattaacgcagaaaagaaacaggcgcagctgcgtcctggcgcttgagttccccggtcggccctctcgcgcgggttggctacgcagcttcgattggcgccaccgcgtgggtcgtgccagcgaaccggcctctgggcgcgcgccgcaaggcc

SEQ ID NO: 7869 - DNA, 470 bp, Zea mays
  Clone ID: MRT4577_107171C.1
acattagctagattcctcctccctccttcctcacgtgctgctgccctgccctgccctggagtaaggaagccgacaccacttggagttgctgccaactaccgggctcggctgtcaaattctctatctggcagccagcccgtgtccaattccaactccaccggtggtaaaccatcgacagcaggagcagggagggcaggctgcacaagaaaagagcatcattcctgctgatcggctcggctccactccaccccgaataaaatggcttccttctcgggacatctccaccgccccctgtccgcatggccgtggccgccttcgccgccgtctcctcccacgagcttcccgacaagctgtcccaccacaggcttcctgatgccagcacaggcacggacgcgctcgcctcgcttccattgaccaggtcagatgttcccgcagcgcctttcgcatctgccctttctggcgcgcagcta

SEQ ID NO: 7870 - DNA, 1074 bp, Zea mays
  Clone ID: MRT4577_107172C.1
ggtaccctcgggttcggccgggaaccatccaatctcttcccggccccctctgctctgcaatctccctcccgtgagggaggtggtggggttcctgctttcctggaacaagcaaatccttgcttgccggttcgtctcccgacgatggtgggagacgaaagcaaaagagaaagcgccgtcctttttccgcccgccgcctcgctttcaattccccaccgccctcccgtgcctactttcgttttccctttctttttttcttctcgcttttccccttctcctacgcctctgcaaattgccgtatgcatagtctgatttcttctttttctttactatgatagacttgctcaatgtttcttctccttctgaattctaatggcttgctcaatgttttctttaacttcttctaaattctggtttgtttttttcctacatacatgtgcgcgcgtggggaagccgacaccacttggagttgctgccaactaccgggctcggctgtcaaattctctatctggcagccagcccgtgtccaattccaactccaccggtggtaaaccatcgacagcaggagcagggagggcaggctgcacaagtttcctccttggactgccacaagaaaagagcatcattcctgctgatcggctcggctccactccaccccgaataaaatggcttccttctcgggacatctccaccgccccctgtccgccatggccgtggccgccttcgccgccgtctcctcccacgagcttcccgacaagctgtcccaccacaggcatcctgatgccagcacaggcacggacgcgctcgcctcgcttccattgaccaggtcagatgttcccgcagcgccttcggcatctgccctttctggcgcgcagctattgccacgggacctccacagcttgcgtctgctgaaggcgcccttcgcgtctgtgccggtcatgcagacggtttaccagtacgccaactttgccaaaacctcgggacaggccgatgcgatgcctgcaattccttcctcgccgtccgatgtgctgtaccgctggcacctgccagaccccagggtctatgccgacttccctg

SEQ ID NO: 7871 - DNA, 364 bp, Zea mays
  Clone ID: MRT4577_107173C.1
gcggctacctccaaatgattagtatttctccatacaaaaaaaaatgtttcagcgtgtttaccaaacagcggctgttggtagtttcttaaatttttctacttaggagttgacatggtaccacaccgacagaattattaaatgatacatacctcccaaacctaaagcttgatcttccctaaacttctatccatcccatggaggcaaacaaaacccccaacgaagagctcttgggtcattaagtcgaaaaccaacccttcagtcccctacctaccctgagggtgaggatgccaaacctgctgctgatgctgcgtcccccctattttgttacttattccaacttgaccgaacccacggacgcaatccc

SEQ ID NO: 7872 - DNA, 244 bp, Zea mays
  Clone ID: MRT4577_107174C.1
cctcaattccctgatcgacccagctcgtccgctaatgctggctatcatgcttcgacatcaatactcatcagagcttcgaagctttcaacccggtatcgttttctttcatgatctaccccacccacaccgtgaacatcaacgccattattgatgcattccacctcattaatcctcagaccatgattctctcccactacccacctcatacaacatcaaatgtatgccacctaaataatccatctat

SEQ ID NO: 7873 - DNA, 542 bp, Zea mays
  Clone ID: MRT4577_107175C.1
gatgttaatatatttttctcctatttgatagcaactcttttaaatatgtaaacacatgctccgaagactcgcgcatggtgacgagtaatttactattttttttttttttttttttttttttttttttttttttttttttttttttttttttttttttttttttttttttttttttttttttttttttttttttttttttttttttttttttttttttttttttttttttttttttttttttttttttttttttttttttttaaaaaaaaaaaaacgttttttttaaaaaaaaaaaaaactaaaacataaaaatatttttttttttttttttttttaaaatttttaaataacaacccttcttattttttttttgctactgccattcttgcttgctagagtgttttgattccgtccctgtctgcttttcttctatccacttgcccttgtaccttgcccccccccgcgatgttgttggcctcttatttccgaaaatggtgtgttccgccggcgcgggaactatcaatttttattatactaatttt

SEQ ID NO: 7874 - DNA, 1274 bp, Zea mays
  Clone ID: MRT4577_107176C.1
gatcgagaaagtcgccgggtttgcctcccacgagcctgccctgctgcctggggccgctggtgaagcggaagcacatgacgaaccaggacgtggtcgtgtcggagatgggcattgcggccgggaccgcgctgccgggctcaagcccggccctcctggcctgccggggcgcggcggcctggatgagaacacccgcggccggcgccatgtccctgcggtacctcgacctggcagcggcggcggcgcgctcggccagctgcacctgggtcgaggccatgcgcgcctcctcgcccacccgctcccgcgccgccgccgacgtcgacgagctcacggcctggatgaggaagcacccgtcggcgctcgggaagttcgagcagattgccagcgcgtcccaggggaagaaggtcgtcatgttcctagactacgacggcacgctcgcccccatcgtcgccgacccggacgccgcctacatgagcgacgtgatgagagcggcggtgcgcgacgtcgcgaagcacttcccgacggcgatcgtgagcgggcgctgccgcgacaaggtgcgcagcttcgtcgacctgtcggagctctactacgccggcagccatggcatggacatcgaaggaccaagctccaatcccgagtcagttctgtgccaacctgcgagcgagttcctccccgtgatcgacgaggtgtacaaggcgctggtggagaagacgaagtccacgcctggcgccaaggtggagaacaacaagttctgcctgtccgtgcacttcagatgtgtagatgaaaagagatggaacgcattggccgagcaggtcaaggcagtgatcaaggactaccccaagctaaagctcactcaaggcaggaaggttctggagatccgtccgagcatcatgtgggacaagggcaaggccttggagtttctgctcgaatcgctcggattcgccagctgcagcgacgccctcccggtgtacatcggtgacgaccgcaccgacgaggacgccttcaaggtgctgaggaagaggggccaaggcgtcgggatcctcgtgtccaagtgccccaaggagacgaacgcctcctactcgctgcaggaccccggcgaggtcatggacttcttgctccgcctggtggagtggaagcggaaatccacgacgactcggccgccggtgtagctcttgttcttggtcgactagtcaatcgatggaccgaccgatcgatcgaatgggcgtccaatcatgcgcgaaaacataccccaccactgcaagaccaatttttttttc

SEQ ID NO: 7875 - DNA, 263 bp, Zea mays
  Clone ID: MRT4577_107177C.1
ctcacgcgtcctttcagattatatatatactccacatctgaagccacaccatcaatctcaacactttccaaattggcctcaccccaaacccctctatcccttctcacaattgcacttctttccctaatccctttcttcatcttcttcctctttaaccgctccaaaggcaaacaacccaaagtaccaccaaccattcccggcgcatggtccatcctcgtgcacctttccctcctagcccgcttctcaaccacccacctccttct

SEQ ID NO: 7876 - DNA, 239 bp, Zea mays
  unsure (1)..(239): unsure at all n locations
  Clone ID: MRT4577_107178C.1
aacatatctatctactactcaagtatccaaccccccgccctacaaagttattctcatccacccaaaaaaagnngaaacancaaaggccgcagatccaactactaaaccaacaatccaagaacacggatccaaaagcaaggccagaatgactcatcaaaaaacgctgacccacaaatcccacctgcacacactaacaaaacagctacacaacaacaacgagcaaacgacgagccaagcta

SEQ ID NO: 7877 - DNA, 216 bp, Zea mays
  Clone ID: MRT4577_107179C.1
acgcccccgcggcaaactacaaatgtttggaatcagataaattctcgctgtagacacaggatttgacgtgacaaagagggaaggcgagccctccacccagcctgaagggctgcgcacggaattcatcaacgtacagggtgaagtagctgatctggcgccgtgcgcgaccgcagtgggtgctggccctcatgccctggaccacgaatgccacagctg

SEQ ID NO: 7878 - DNA, 311 bp, Zea mays
  unsure (1)..(311): unsure at all n locations
  Clone ID: MRT4577_10717C.1
atcnnaaacanncattatgcatcactcatactcgcctacactacatgagggcgccgaggaacctatttggtgtgccacccaaaaacttcangaccagcaacccagcccctcaaaaaccgccaataaaacaaaatgcttggatggactattaacattttaccccggagccccccaccaatatcaaaaaggggatgagtcatccgctctacgcaaatgaaaaatctttaactccagcggacgcaagaacttatgtcacagccagggnaaccaattgcaacaaaccaatcgctcggcacatcctaaaccataca

SEQ ID NO: 7879 - DNA, 611 bp, Zea mays
  unsure (1)..(611): unsure at all n locations
  Clone ID: MRT4577_107180C.1
atttttcctatcttcttctttgcgcaagnagcaatcattctaaaatttggtaactttttgcttaagggaagggtggtaggaatttcttgaattaaatgacctttttcatgaagtaggggtaatgggtattactttgtagttttgaataggttttgcatttttttctggtggtttattccattaataatctgaaaaaaaattatttgtccactgttgcactctttttggcttgcttatgatttaattgaaatatggctcaatatcaagttttatttgttcaacccaattaaaatgatgggctggggtgtttatcatttttttagtggtgtcctagtagttacaagtctactgaatttttcttaccaattttgaaattgttcttatatttttaataatggtctttctagttttattagtgcctaataaaatatttcaccttgaatttgttctggactagggttccttttatttttcctatgttcttcattacttaagtggactaggaaaaatatttgcatccactgtccattatctcctagtacctttctcattttcctaagttttgggcaattatggccttcaatagataaccctgtctaaatcttcatact

SEQ ID NO: 7880 - DNA, 313 bp, Zea mays
  Clone ID: MRT4577_107181C.1
ggaaaaggaacaggggtatcccttatttttcacaggtcccgacaaaatcaagggcggggatccccttaccaaggggtctttttttttgggaaaaagggaaaaattataccccccaaaaaagaattgtaaaggaaattttgagcccaaatcgtttagaagggtgagaaggcaacagcgctgctttgacctggcaggtaacaagaaccgttccaacaaggaccaaaaaagaaagagggttattcccaggaataggaaagactttcttaaggccccccaaaataaggggtaacctatttctccacccccttccaaa

SEQ ID NO: 7881 - DNA, 164 bp, Zea mays
  Clone ID: MRT4577_107182C.1
ctgtgaccattatttttaagattgctaccattggatagttctgtcatggtccaacttttggagatttaaaattgatccctgtgtggctaacagaattaatgtttccaaaaatgttgaaaattatatagttctcctaattccccacctctaactatatttttggg

SEQ ID NO: 7882 - DNA, 279 bp, Zea mays
  Clone ID: MRT4577_107183C.1
ttaggatgaccaatatttgttcgttcattatgtgttggaaggagatatgatatacatgaaggggtgctaagaataggatggaaattggaagaaataattgcaaaccgtaaaataaaagattatcaaaaagactagggaagggagagtgcctatagatagcctgatcatgtgtcacaaagttattatttttcatttatcggatgagaatgtcgtgcgatccaagaagcagctgatcaggagttatgacatcaatactagtgggtttgaaggagataactt

SEQ ID NO: 7883 - DNA, 141 bp, Zea mays
  Clone ID: MRT4577_107187C.1
cggcggcgagtctatggcgtcgacggcggggtacctggcgcggcgggcggcgcagaaggagcggatgcgcctgctctacctcaccaccctaaatgacactctaatattatccctccacatacacctattctaccagcaccc

SEQ ID NO: 7884 - DNA, 273 bp, Zea mays
  Clone ID: MRT4577_107188C.1
tactttggtaaggctggcgcctgcggggccgggccgcagttgaggggtcgaccacgcgttccgtatcttgtgcgttatgatcgcgggccaaaggggggcccattttcattcatttcacggcgtaacaaaccagtgcgagtggaaccgtattacacaagctggagcatgaactcagagatgtcgagaaaagggcacggaggaggacggggtgcgacggtctgtgaggttctgctgatccaagacgaggacatgggcatcccgtacgaaatcacc

SEQ ID NO: 7885 - DNA, 316 bp, Zea mays
  Clone ID: MRT4577_107189C.1
cactaacatagcacccagacaactaagagtatctctatccaggccccgttgtgatctttgaatgcatgcgtgggcaggcccttcttacaagccccacgacgtgggtggtggatgatgacgacgacggcgcacgaaggctaacaacaactcaaatgcaggggggtaatcctcaccaacaagttctaggtgatgcaaactaccttcacaactacaactagcactatattcttcgttggtttaactacaaaggtcctctttcaggttgcaaagaagggtatcaccgagtaggtccctattaacccttctagttgttcca

SEQ ID NO: 7886 - DNA, 382 bp, Zea mays
  Clone ID: MRT4577_10718C.1
ctgcgggtcgatcctatgggtttgctaacgagggcttgattggctatgcccctcctgcgtgggagtcacctgtgctatttactgagcctttgggtgggacacaactctctctgtcagagacttatcctgactcgcgttcactataatatgtgctacctggctgacgaaggtctactaaaatcttctggctttgagggcgtgatcttacccctgatcacgatcctatttgccgaagaattgctataccctcatctgaataacaaaaggatgaggtgtcctgcctatggaatgctcgtctccggtaccctggactacaagcgctccgtcacttctaacgccgacaatgtgcgcgatgagctctactgcgaggggaaagggggtg

SEQ ID NO: 7887 - DNA, 163 bp, Zea mays
  Clone ID: MRT4577_107190C.1
ctaccctcccagtacacctaagaaattatagcgctcataacaacacatctgatgtccatacaatatcatccaataacatcatagtatctacctcatattgtacaagaatccgacatcgcagaaattacaaaatgaaacactctgaagaattaatacaatcata

SEQ ID NO: 7888 - DNA, 269 bp, Zea mays
  Clone ID: MRT4577_107191C.1
cgcgttcgcgccaccgactcgctcgcgcacccgctccacctctgccggctccgcctcgccgacccgcgctcgcgctccccctccccacggcacgggcggcgcgccatgtcggtccgcagctgcctcatcgacccggacggcagcgcgctcgtcgagctcgtcgccccgtccgaccgcctcccggcgctgagcgcggaggccgaagcgctaccgtgggtgcgcctcgcccgcggcgacctgcagtgggcgcacgtgcttcgctaggggtg

SEQ ID NO: 7889 - DNA, 336 bp, Zea mays
  Clone ID: MRT4577_107192C.1
cgcgtaacgcaaagaccactgtcaaggcaattttactacgtcgcttttatttgaccacttcctcgcttgctacatggcgtggtaaaaagaacatagcggtcggccacttctatttttgatgtgcaaggcgtgggtttcaagaccttctaaaactctgccagggtattaatcacactattacagaacatctacaacgataactacccacagacattgtcccatatgtatataattaatgcgggccactgcttcaagatcttatgcagcacaatcaaatcattccttgacccaaaaactgcttccaacactcatgttcttgagaatacgtatcaacat

SEQ ID NO: 7890 - DNA, 351 bp, Zea mays
  Clone ID: MRT4577_107193C.1
gcagcacgcggacgcacgctcacaatagctctcgagacgaacaaagcgttctatggaatcaggactactggcctgccgcgaattctggacatactgagcaccttgcacctgctcaaaaggtgtcacaagacattgagaaggattcggttcttttgcgagctactgctgtagaagatagattgcaaaatggcgtccctgagcgtatttataaacttgcacaagctggaactaagatctagatcttaactggagacatgatgcagacagccgtaaacataggctacacttgtaacctactgacgaaagagatcgaggaaatctttatcacacaggagaactcaaggacaagtg

SEQ ID NO: 7891 - DNA, 584 bp, Zea mays
  Clone ID: MRT4577_107194C.1
gatgcaagagaccgagccccaaacgaaatcgaatcgagaggagagaagaaagagagaggagcacgcgccgccgccaggccaatcacatcgccatggccgcctcctgccgccgcgcgtcccagatgctgggctccgccgcctcccgcctcctccattcgcgtgcctacgcggccgccgccgccgcgccctctccggcggtgttcgtcgacaagagcacccgcgtgatctgccagggcatcaccgggaagaacggcaccttccacaccgagcaggccatcgagtacggcaccaatatggtaggtggagttactcccaagaaaggtggaactgagcacctaggccttccagttttcaactcggtagcagaagctaaggctgagacaaaggccaatgcatctgttatatatgttccaccaccatttgctgccgctgcaataatggaggcattggaagcagagcttgaccttgttgtctgcattactgaagggatacctcagcatgacatggtgaaagtgaaagctgctctgaacaggcaatcaaaaaccagattgatcgggccaaactgccctggtatcattaagcct

SEQ ID NO: 7892 - DNA, 483 bp, Zea mays
  Clone ID: MRT4577_107195C.1
aattcggcacgagggcgacaggctgcatatcgaagccgacctttcgttctaagtgccgtcgttgcccttctgcttgtgtctgtggccggatcagcaacgtgcccgaggtcgccaccctcatatagcagcgagaccctcgatgaccacaagagccttgtgctctgcaacaggtggatctgttgatctcatgcgcctttagaggaggccgcacttgtgcgttgtcggctactagagactggactaccatgccgcgctatgtagcgccgtgggcttaactcatgagcgcatgcctcactatgtgctgacagctcctactatgcgacgtacgcccaatctgcaggagtgctctattggaaagtgcaaatagcgatgaactatgtgccttacgtactagtgcctgtaagcggatcttagttacattctctgcgatgacaagtttatggaacaggaggagcctgtcaatcgtgacagcatggatgtcca

SEQ ID NO: 7893 - DNA, 194 bp, Zea mays
  Clone ID: MRT4577_107196C.1
atggaatagacctcattaaaaaaattggatcattgtgcggtaactcattacttagctcagagcggtctccaatagttatgggaagtaaatggaacgctggtggttttgttaaatcaagtacgctaaaaaaaagatatagtggctaaaagcaagaactctgcttctgatggggccacggggccttaagaagcttg

SEQ ID NO: 7894 - DNA, 515 bp, Zea mays
  Clone ID: MRT4577_107197C.1
gatcagctcggcgactacctcgcatggtgtaaggtatcataatatcctaggcatagatacttacctaggattcccttaatatcatggagcgaacagcatagcagccaatgtttagaatggtgctgactgtccggccaacttgtaatcaggagaggcatgcttagatacagaccaatcacaagttgtttagatagtgatgcttgtgatggtgagagatcagttcgtatttgtccatgcctcaccaagacgggccttttattagcctggttggttcagaatgcaaaggaaatcaagccgcaaaaggcgtgcaacagtaacctacaaagtcagagatcggcaatagagagctccagcaaggagcctactagaactacttatttaccagagttaaggattgcttgttattgctgttagtgaagttgcttgggtctttctactctcaccgctcgtgtgccaaacctgtactgctgagagcacaatatgttagtagaaagtactgctttctggagacactt

SEQ ID NO: 7895 - DNA, 304 bp, Zea mays
  Clone ID: MRT4577_107198C.1
acgcattggtggtggcctctctcccacactattattctcttattcttcctgtactatatatccttccgtctcagatcaacacttactagtgatgtcattccgcttgcttgattgtcacacatattcacacttcacccgatcctcttatcacgatatacctttctgcatcctacttgcttactgtcctcatctgaaactccaacccttccgctatcgatttgacttccattctggaatcttaccactttcaatcttacaactaaaacaatcaacttcctttttacaaaatttaccttaattacat

SEQ ID NO: 7896 - DNA, 212 bp, Zea mays
  Clone ID: MRT4577_107199C.1
gtcacgcgtgggccaacgcttgggttggtgtcgatagtgtaatcagaagggccggtacttgccccagaggcttaatatatataggtcatgcaagtatgaccagtatggacgacatttggcgcctgcgaggtacaagttaacggtttgacagtgcaaatcaggtagatagacaatcgccagtcgggacagcttctgggctcaggattaagaac

SEQ ID NO: 7897 - DNA, 716 bp, Zea mays
  unsure (1)..(716): unsure at all n locations
  Clone ID: MRT4577_10719C.1
aattcggcacgaggcaaagtgccaagtgccactgcccctgcctccagcccaccaccagacccgccaccttcgcgctccacggcagcggcatgtccgtcgcctcctcccaccgcctgcgaccgtcgccgtcgggcccggcgcggcgcccgggatccgcggcgccgcgcgtagcgttctggccagccggtgcctcgcccccgtatcgcggccgctgcaccgtcgtggcggcggcggctgccgctggcgccggcggcgaggcatcttcggcccccgtggctgtgtcggctgtcgcccccgcgggcgctgccagggacaaggtgcggcgccacacgatttcggtgttcgtcggggacgagagcggcatgatcaaccggatcgcaggggtgttcgccaggagaggctacaacatcgagtcgctcgccgtggggctcaacaaggacaaggccctcttcaccattgtcgtctccgggaccgacagggtgctcaaccaagtcatcgagcagctcaataagcttgtcaacgtcctgagtgtggaagatctatctaaagaacctcaggttgaaagagagctgatgcttataaaactaaatgttgaacctgatcagcgtcctgaggtcatggttttagttgatattttcagagcanaagttgttgatatatctgagaaaacacttaccatggaggtagctggagatcctggcaaattgctgcagtgc

SEQ ID NO: 7898 - DNA, 528 bp, Zea mays
  unsure (1)..(528): unsure at all n locations
  Clone ID: MRT4577_1071C.1
cagtatcagggcaagatctaangccagcctgttctttatttttgaacaactggcgtttatcctgtcacgtctggttagaaaatctatgaagtaccatcttctggatgatcttgtgttttgggtggactaattttggcctaatggctgcttaccgacttatcaaggagacatggtggctaataaagatttaaggcttgtgaaatcaacttcataggatctacagctgcctcgtgctgttctgcaagttgacctggacacctggtaatatcaagtagatatcgacatttaattccagggtaatgtagaacatgcatgcttacccttgaataagtgatatttgaagccttatcacttgaatataattccttttccaggttttcctggtacttaacaacagcaaaaataggacggttagtatcaagtggtgtttggctaccttgtaagagatttactgattaaaacattgtaatgctaaagcttgaatgggtcataattgaggaaagagaatcaataaatgtcctggtgatt

SEQ ID NO: 7899 - DNA, 1451 bp, Zea mays
  Clone ID: MRT4577_107200C.1
cactcttctctgtgtaacgacttcctccctttcctgccgcaccacgcaatcaccggggcggaggcggctgccggcgagcacttgggcgtctccggccaccgcctgcctcgttgtgatccaactaggaactcacccagcgctatctcccggcaggctccccgttgactcccgcgatttgttacccgctggcgctgccgcacacagctcaaaaggagtagcagcgcccctggttgccggttggagcgtcaaggatgagcgggaggaagaatgcgggcaaggtttccccctggttgctcgtcctcatctgtttagggtgcttctttgtgacctacaacctcctgacgatgcccagccggggacgggatgggccgcgcaagttcctcggcggcggcggggatcgccactcaactgcctcgttggggtcaggccctgattcggaccccgcgaagcggttccacgtcgcgcttacggcgacggacgcactgtacagtcagtggcagtcgcggataatgcactactggtataaggagatgagggaccgacctggttccgacatgggtggcttcactaggatccttcactcgggcaagcctgatggattgatggatgagatacccaccatggtggttgatccccttcctgaaggcaaggatcagggatatattgtcttaaataggccttgggcttttgtccagtggatccagaaagcaaagatcgtagaagagtatatattaatggcagagccagatcatgtctttgtgaagcctttgccaaacttatctcatggtgatgagccagcggcatttccatttttctacatcaaaccgactgagaatgagaagatattgaggaagtttttcccagaagaaaaagggcctatttcaaatattgatcctattggctctccggttataatcaagaaggctcagcttgagaagattgctccaacctggatgaatgtttcattaaaaatgaaagaggatcaggagacagacaaagcattcggatgggtcttggaaatgtacgcatacgctgttgctagtgcactgcacggtgtgcaccatagtctccataaagattttatgattcagcctccttgggacctgaaaacggacaacacattcatcatccattatacgtatggatgcgattattcaatgaagggtcagcttacttatgggaaaatcggtgaatggcgttttgacaaaagatcttaccttcaatctcctccaccaagaaatctttcactgccccctccaggagttcctgaaagtgtggtcacccttgtgaagatggtcaatgaggccaccgcaaacattccggggtgggaggacgatagatgattgatggtctggctgagttgtagtttattccagcacccagctggtatggcttttgttcaaaaacatggaagaatatcattggtcaataaaagaaaagcatttgattaa

SEQ ID NO: 7900 - DNA, 600 bp, Zea mays
  unsure (1)..(600): unsure at all n locations
  Clone ID: MRT4577_107201C.1
ccggccggggcctttctctgtgtacgacttctcccttnctgctgcacacgcatcaccggggcggaggcggctgccggcgagcacttgggcgtctccggtcaccgcctgcctcgttgtggctccccgttgactcccgcgatttgttacccgctggcgctgccgcacacagctcaaaaggagtagcagcgcccctggttgccggttggagcgtcaaggatgagcgggaggaagaatgcgggcaagccggggacgggatgggccgcgcaagttcctcggcggcggcggggatcgccactcaactgcctcgttggggtcaggctctgattcggaccccgcgaagcggttcctcgnctcgctcacgccgacggacgcactgtacagtcaatggcagtcgcggataatgcactactggtataaggagatgagggaccgacctggttccgacatgggtggcttcactaggatccttcactcgggcaagcctgatggattgatggatgagatacccaccatggtggctgatccccttcctgaaggccaggatcatggatatattgtcctaaataagccttgagtttttgtccagtggatccagaaagc

SEQ ID NO: 7901 - DNA, 298 bp, Zea mays
  Clone ID: MRT4577_107202C.1
gatttccgggtcggcccaacccgtccgttcggaaccggccccctttttttttttttttttttttttttggcggtttcactttggggcggtccacccttaaaaagctcctttcgttaaaaaaaatttgtttgggaccgtccacattttgaaaattccctttacttggaattcccctttttatgtattgggccataaaagggctgggggcctttgatatttttcctttggacaaatttttccaggccaaagttttggttcttctatagtaaaacttttttttttttacaaaccttttccc

SEQ ID NO: 7902 - DNA, 400 bp, Zea mays
  Clone ID: MRT4577_107203C.1
caaatattgtttctattggcaactctccggttataatcaagaaggctcagcttgagaagattgctccaacctggatgaatgtttcattaaaaatgaaagaggatcaggagacagacaaagcattcggatgggtcttggaaaatgtacgcatacgctgttgctagtgcactgcacggtgtgcaccatagtctccataaagattttatgattcaggtgctgagaagtcttgcactagatagatcatctcatacctggggtgatgacaatttgtttcacttaagatgtgcttgatgatgattgcagcctccttgggacctgaaaacggacaacacattcatcatccattatacgtatggatgcgattattcaatgaagggtcagcttactttatgggaaaatc

SEQ ID NO: 7903 - DNA, 1578 bp, Zea mays
  Clone ID: MRT4577_107204C.1
ctttgtcactcttctctgtgtaacgacttcctccctttcctgccgcaccacgcaatcaccggggcggaggcggctgccggcgagcacttgggcgtctccggccaccgcctgcctcgttgtggttagtttccctcaccttccccttacctcactgccatattccttctcccgatccgtcagtttcgccagctgaagacgatcccaatctcagatccaactaggaactcacccagcgctatctcccggcaggctccccgttgactcccgcgatttgttacccgctggcgctgccgcacacagctcaaaaggagtagcagcgcccctggttgccggttggagcgtcaaggatgagcgggaggaagaatgcgggcaaggtttccccctggttgctcgtcctcatctgtttagggtgcttctttgtgacctacaacctcctgacgatgcccagccggggacgggatgggccgcgcaagttcctcggcggcggcggggatcgccactcaactgcctcgttggggtcaggctctgattcggaccccgcgaagcggttccacgtcgcgcttacggcgacggacgcactgtacagtcagtggcagtcgcggataatgcactactggtataaggagatgagggaccgacctggttccgacatgggtggcttcactaggatccttcactcgggcaagcctgatggattgatggatgagatacccaccatggtggttgatccccttcctgaaggcaaggatcagggatatattgtcttaaataggccttgggcttttgtccagtggatccagaaagcaaagatcgtagaagagtatatattaatggcagagccagatcatgtctttgtgaagcctttgccaaacttatctcatggtgatgagccagcggcatttccatttttctacatcaaaccgactgagaatgagaagatattgaggaagtttttcccagaagaaaaagggcctatttcaaatattgatcctattggcaactctccggttataatcaagaaggctcagcttgagaagattgctccaacctggatgaatgtttcattaaaaatgaaagaggatcaggagacagacaaagcattcggatgggtcttggaaatgtacgcatacgctgttgctagtgcactgcacggtgtgcaccatagtctccataaagattttatgattcagcctccttgggacctgaaaacggacaacacattcatcatccattatacgtatggatgcgattattcaatgaagggtcagcttacttatgggaaaatcggtgaatggcgttttgacaaaagatcttaccttcaatctcctccaccaagaaatctttcactgccccctccaggagttcctgaaagtgtggtcacccttgtgaagatggtcaatgaggccaccgcaaacattccggggtgggaggacgatagatgattgatggtctggctgagttgtagtttattccagcacccagctggtatggcttttgttcaaaaacatggaagaatatcattggtcaataaaagaaaagcatttgattaatatcaaaaaaaaaaaaaaaaaagcggcc

SEQ ID NO: 7904 - DNA, 384 bp, Zea mays
  Clone ID: MRT4577_107205C.1
attcggctcgagccggaccagctcctttaggaatgaggctggtgccaagggtgcttgctgatggccgccttggctatatgctgcgacaacctggtggaatgtcggcttcgtcctcactgccggggggtactgaccgaagagacagtggccgtggtggcaatgggcacatccggggatgtcgcccttactagctcatccctaatgggctttactcctataatatggaatgaaacggctaacttatgagaccagataggagcctgtgacttggtcccagtgtcagatcttctatggcctgatgcttgtaccatatgtgtaattatatctatcatgcaacgcatgtgacttgaaactgtgatggacttgtattgatttctgacttat

SEQ ID NO: 7905 - DNA, 237 bp, Zea mays
  unsure (1)..(237): unsure at all n locations
  Clone ID: MRT4577_107206C.1
gcgtccgctttcacccagacacaggccaggcgggcccattggtgcccaagaccctgtaatccggagggggagttncctttgggtgtgactctttactgagggggaggaggaggaggaggaggcatttgctcaagagcaaccaccaagcaccatagcgcgaggcgacacggggtcggagccctggaggtttttcgcgagtccagaggcggacgacggagtagcgaatcgtttcccagt

SEQ ID NO: 7906 - DNA, 435 bp, Zea mays
  Clone ID: MRT4577_107207C.1
gaataaatgatatgtacattcctattgagcccatccaatgatgaggcatgggtattttctacacatcttatagtacaagatgccatgatcgaagttcgtttctataaatacaaaggaaatgggatagcaagcgaagagaagctattccttcttggcgccctccacaggcttatcctctttgcctgctggctcctctcccttacgagcacgatcgtcttgctccttgcgctcagcgcttccaccagtcatatcgccagtactagcctcagcctcgttgctttcttcgacagctttcgcttcctttgcctcctgtgcttcgacggcttgtttgggcttctcatcctcatcaatatcttcatgatccttcggggacgcggtggccttgttctcaaccgattctgtctgctcgttctcatcgttgatgagttcttgctg

SEQ ID NO: 7907 - DNA, 490 bp, Zea mays
  Clone ID: MRT4577_107208C.1
tccgcgctcgtctctctccttgcagatgccaagcgagtggtgcccgccgtattgcgcgaccaacgcctgtcaggtcggggccaccgagggctgagaaattgggtgcacaaaaatccgaggcaatactgcaagcggttagggaccttcttcgagaaaagagttccttctaaaaaccataccggaattgcgagttacatgtgtcttagatggtaacacaggaaggtgcatacgagtggaggttttaggaattattcgtgggtgatgtgagagtgttcatgaatttctcctgaatcgtgctcctgtattcacacttaagttcagcatcaagtaacaagtattacctttacctctacttttaagttactatcaattatctgttggggaacttgggaaagacttatgcagacacaggtggagtattcgatacttggtggtggatctgtacaaatggcatatgctattgcggagaaggatgcaaaaaaggctccta

SEQ ID NO: 7908 - DNA, 523 bp, Zea mays
  Clone ID: MRT4577_107209C.1
cacttccagtgctttatttcacattaatatctgaatatccaagtacaagcggcggctgaactaaattaggtaagatgaacctatgaatagactagtttccttattttctagcatagtccattttgactgaccatgggtttattatttcgtacaaatacagcaggtgatatacatattctgagaagatgacatgtcggatcagcatcggcagctgcagcctacataaccatccatccgccatttggggatgagtcctgatcatttgacaagccctaggttgatgatgccgaatgcagtatgaagccaatccttctcgctggccttggtcagcatcgccctgccccaagacacccaccccttccatgtcattctcttgtcccagctgctgccccactccagcaacagcttgagaactttctctgcctgcatctgcgcatcgccatacctctccatggtaaagtacacctgtgcaagcaccaagagtggttctcctacaaaagggtttcttgggaatgctctgctg

SEQ ID NO: 7909 - DNA, 307 bp, Zea mays
  unsure (1)..(307): unsure at all n locations
  Clone ID: MRT4577_10720C.1
cgcactcgtccgtggagagcgagtgttagagttggaactgatgtgttttattcttncggtgggtttcttctgttcatataacatccccnaaccctgctggtcagataagatttgtgaacacaccttgcgactgagagagaaggcgtcttataatttgatatgaacaagaatcaacaatgttcattattaaaaaatattaacaaacatatctatttattttttattattattatctaatattattctctctttaatttattttcttattatttttaattttttcttctatatttacttttttattttt

SEQ ID NO: 7910 - DNA, 511 bp, Zea mays
  Clone ID: MRT4577_107210C.1
tcattcagtgaaagctattacagcactgtagatcccagcatgtccttcgacacacaagatcttggagctgcactgaaaggcttcattgcaaccatatcgaagcctaaggcggcatatagaggatggagaacattgtcttatgtgctaggatggattttctataccaagagaattgttgcaaggagaaagaaacatgggaaataagtgaacacaagtctttgtgtagttaaatgcgaatataagcttagagaacgagagattatgtacattagtttgtttcttgtcacagctggtaggctctgctggtttcttcagctgtaaatgggcatgttgtcagctatggttcgctatgcggctgtaaataatcaaatgaagtttgtacagggtgagggatgcgcatagcatttctgatgttttggatggatgccggagcttgctttttgatgcggcccgtgtattatctatgtagtagtatgcagtatgctgcttaattctgcagtattttcgacat

SEQ ID NO: 7911 - DNA, 230 bp, Zea mays
  Clone ID: MRT4577_107211C.1
acgtaagctcggaatttggttcgagctcatctgacgctgcacgagtcgaccaaggtgtacggcccgctgctgaggctgcggttattgcagcatccaccgtggtgagatcacacaggtcgcaagaacgaacccacgcgaacgccaaagttcgctttgcttggttcgggccgctgcaccgccattgttgatctgttctccttctccttggaggagaaagaagagggggagag

SEQ ID NO: 7912 - DNA, 438 bp, Zea mays
  Clone ID: MRT4577_107212C.1
ctgggggggggggggtttttttttttttaacaaaaaaaggaagaggagcatttggccaaaaaccccgggcccccttccccttccccttcaagggggaaaaaaaaggggaaaaaaaccccccgtttttaacccggggccccggccagggaacccccaaagggggggggggggacccagttttttttggggcgccggggccgggtaaacccccccccccccccccacccaaaaacaaaacccccccgaaaaaccccaaaatcgttggcccggcccccccggggggagggcccgggaaaacacttttataacaggacccgaaagagggggggcgggggcttttttttgcccagcccccaaagggaggggccctcaacaaggggccccaaaagggggcccggggcctttaggggggaaaaggggctctgaaaaaaacccggg

SEQ ID NO: 7913 - DNA, 362 bp, Zea mays
  unsure (1)..(362): unsure at all n locations
  Clone ID: MRT4577_107213C.1
actatggacattatgatctgtcaggtccttcggagccaacaatgcctagcatttgcgatgctttttcttggagtaatggtactcctttctaagagaaggacttccagtgcagcgtacttggnactcgcagccttgtctgactgcctttattgatgaacaggtcggggggggtcatgttgcttgatgatggttcctctctttataccttcggcgcaaaggtgcgggatgatgtcttccctggagcaatgttatgcttaggggatagttgtttgtngggaggtgttatgtgcatatctttaatgctggtgccttgcatgcgattgcttaattcgtgtgtgtggtttgcagtgtttgtgataagc

SEQ ID NO: 7914 - DNA, 319 bp, Zea mays
  Clone ID: MRT4577_107214C.1
ggaaacaacaaaaaaaggggcaaaaccatggatttacttattttaaggggggggggatacaaagggttatacagccgttacaacagattttggggggccatatcctgatcgctttactggactggacatacaacttgggggaggaacaaaaaggttacactttatttaagctcactgggagagtttgcccttgcaaaaacggtgggctttccaatcgaaacaaatgcttatgatttggaggcccaagcgggagcgttcattgcgccctcctgcagatttcctcgctttgaacttgaagggtttagcccaagaaactttt

SEQ ID NO: 7915 - DNA, 864 bp, Zea mays
  unsure (1)..(864): unsure at all n locations
  Clone ID: MRT4577_107215C.1
cccatctccccacccggaaatcctcccacacccagaaatgaatcagcctctccttccccttctctgagatctcagcctgagcctgcgcgccgcgacttccaccggaatcctcctctcccagccgcagcgtcgccggattgattcaggaggcattcttgccggccggagaagcagtctttggtcatctgctcgagaagaatataacagaggctctagttcagatcatcatcagacatgtcgctgctatcgaagttacggttggtcactgtggatgtgactggtactctgcttgcttacaaaggacggcttggtgattactactgcatggctgctaagtctgccggaaagccatgccctgactatgatcgaatgcacgaaggcttcaagcttgcatacactgagatggcgaggaaatacccatgctttggatttgcggcaaagatgccaacgattgaatggtggaggatttgtgtcaaggattcatttgttaaggctggctatgattacgatgatgagacatttgacaaagtgttcaagcgtatttattccgccttcggctcctcagcaccatactcggtgtttcctgatgcacagcccttcatgagagggctgagggagaagggtatcacagttggcatcgtcagcaatgcagagtaccgttacaaagaggtcatcttgcctgcgttagggctgaatcagggctcggagtgggacttcggggtgttctcaggcatcgtcggcgtcgagaaacctgacccaaaatctacagatcgcgctggagatggcggngaacgtcgcaccggaagagcgctccacatcggcgacagctaccgcaggactacgtcccgcacggagcatcgggat

SEQ ID NO: 7916 - DNA, 904 bp, Zea mays
  Clone ID: MRT4577_107216C.1
cgttgcgatgaaacgctcttggaacttgggtcgccacatggtacatctgattcgtcaggtgaaaccgagcatgtctgaacctatctcccaacccggaaatcctcccactcccgggaatgaatcagcttccccttccccttctctgagatctcagcccgagcctgcgcgccgcgacttccaccggaatccttccctcctagccgcaacatcgccggatcgattcaggcattcttggtggccggagaagcagtctttggtcctctgcttgagatcatcatcagacatgtcgctgctatcgaaattgcggctggttactgtggatgtgactggtactctgcttgcttacaaaggacggcttggtgattactactgcatggctgctaaggctgctggaaagccatgccctgattatgatcgaatgcacgaaggcttcaagcttgcatacactgagatggcaaggaaatacccatgctttggatttgcggcaaagatgccaacgattgaatggtggaggatttgtgtcaaggattcatttgttaaggctgggtatgattacgatgatgagacatttgataaagtgttcaagcgaatttattccgcctttggctcctctgcgccatactctgtttttcctgatgcacagcccttcatgagagggctgagggaaaaggggatcacagttggaatcgtcagcaatgcagagtacgggtacaaagaggtcatcttgcctgcgttagggctgaatcagggctcagagtgggacttcggagtgttctcaggcatcgtcggtgtcgagaaactgacccaaaaatctacaagatcgcgctggagatggcggggaacgtcgcaccggaagaggcgctccacattggcgacagctaccgcaaggactacgtccctgcac

SEQ ID NO: 7917 - DNA, 858 bp, Zea mays
  Clone ID: MRT4577_107217C.1
attttctaacccagtgaatctgcttcccctttcccttgtctgagatctcagcccgagcctgcacgccgcaacttccaccgaaatcctcccctcctagccgcagcgtcgccggattgattcagaaggcattcttggtggccggagaagcagtctttggtcctctgctcgagaatataactgttattcagatcatcatcaaacatgtcgctgctatcgaagttacggttggtcactgtggatgtgactggtactctgcttgcttacaaaggacggcttggtgattactactgcatggctgctaaggctgccggaaagccatgccctgattatgatcgaatgcatgaaggcttcaagcttgcatacactgagatggcaaggaaatacccatgctttggatttgcggcaaagatgccaacgatcgaatggtggaggatttgcgttaaggattcatttgttaaggctggctatgattacgatgatgagacatttgagaaagtgttcaagcgtatttattctgccttcggctcctctgcgccatactcagtgtttcctgatgcacagcccttcatgagagggctgagggagaagggtatcacagttggcatcgtcagcaatgcagagtaccgttacaaagaggtcatcttgcctgcgttagggctgaatcagggctcggagtgggaacttcggggtgttctcaggcatcgtcggcgtcgagaagcccgacccaacgatctacaagatcgcgcctagagatgggcggggaacgtcgcaccagaagaggcgctccacattggcgacagctaccgcaaggactatgtccccgcacgaagcatcgggatgcacgcgctgctcctggac

SEQ ID NO: 7918 - DNA, 732 bp, Zea mays
  Clone ID: MRT4577_107218C.1
gatggggccctgcaaaaggcagtagcacttgtgctgcagaacagggaggattttgtcgctattcttttttatgcttcgtggtgccctttttctaaaattttcaggacagattttcaaaaactgtcatcctttttcccaacaattgctcattccttcttttgaagaatctaatatcaaaccaaggtgcgtctttctaagacagataaacactgctgttagatttaactatatttagtatgcaactcaaacttcaatatctgaattgcagagtattgtcaaggtatggagttcgtgcattcccgacgattttccttctgaactctacagtgcgtgtgcgttatcatggatctcgggccatgaattccgttgctatgttctataaagatgttacaggcctgaatcctgtgtcattggacgctacatgcctggagagaatggaggattcagttactatagttgatcatggcaaaaaggctgaaaaggatgattctctgttatcgtgggcaaggtcaccagaccgattacttcatcaagatacatgtcttgcattggctagctcctttgtcctcttgaggttgcttcatttccttcttcctaagcttaatgcatgtatgaagcaagcctggaggatgcgactgtatgaattgaataggttgtttcctagcttgtcttgaggaaggcaatatggaactagaaaacttgaactgactctcgaataaggcagcatactta

SEQ ID NO: 7919 - DNA, 903 bp, Zea mays
  Clone ID: MRT4577_107219C.1
gcaaaacaacagtactaggtatgtttggcaaagttaaaattacaattttagttaattatacattatgcgaatagcacagtaatggccatatacttctttctacatatgcccccccccccccctcctggcatgtcaaatggcaagaaacaaagactgccctggaaaaggcatgctcaagaactcagtcaggagtacccatatccccagactttgccgccggagaagagattgaggcagagcacgcacgcgaccagcagcacggctgggatccaccagctgccgccgctgtcggagaacatggcgcacagtagcaggcacagtagcagcagcatgtacaaccccagcccggtgcccgcgccgctgccccactcgccgccgccaaaaccaccgccgtacccgtagccgtaccctctgtccggcctgtagtagtatatgccggcgaagtagaccacgaccagcagcaggagagctgcgagcacgatgttctggatgaggaacatgaccagcaccagcgccgccggcaccagcaccacctcgctccggttgccggccacggccagggccagcagcagcaccccggcgccgaggaccaggagcacggcgttgtccgccaccgtctcctgcacctccgtcacctgctcgtaccaccccatcagggtctcctggcagatgacccatcccagcgccgccaccacgagcagcggcaccaccggcgacggcccccggctcgccgcccacgacggcgccccgcctgggcttccccagtagctcatggtcacctctgctacacttctaccgagatatatatatatctgaatatacttcttttgttctgctgttgttctaagtaccgtcagactgctcgttgcaaatggcgatccggccggcctcgaggtacccaat

SEQ ID NO: 7920 - DNA, 212 bp, Zea mays
  Clone ID: MRT4577_10721C.1
cgccactcaatcccctgctattcctatactctcgcctcctattctacctctaaggtgtacgcttagaagaatcataaagcaccccacctcatccaagttaacagaacccacccatcacattgagactttctgccaggcccacaagcctacccatcctctgcaataataactatcactttgttcatcagctctgaaaccatttacatctactc

SEQ ID NO: 7921 - DNA, 1648 bp, Zea mays
  Clone ID: MRT4577_107220C.1
cccacgcgtccgcggacgcgtgggttttttttctcgagcggtgccacacggccgcattgccacaagcccacaaccagacggggagagagcgaaaaacggggcgaccgagctagctcgccgtcgtttccggctcccctccctcctcccataccgttgccctacccccactaccgcgccccgcggccccgccgggtcctcctccctccgctcgctcggaaccagaggcctcgcgacgtctcgcgccatgcgggctcgcgatctgctagggtttcctccggcgggcgcggccatgtcgtcggcggcggcgctcctcctcctccccctcctcaccgttgctggccaggggccggtctgccagaggccgcccgtcgccgccgtcatcctgcagcaggcgtccacctgtcgagcggtggacgccccagggctccggggtcaccgcgccggcttcgtggagggggatgatggggccctgcaaaaggcagtagcacttgtgctgcagaacagggaggattttgtcgctattcttttttatgcttcgtggtgccctttttctaaaattttcaggacagattttcaaaaactgtcatcctttttcccaacaattgctcatttttcttttgaagaatctaatatcaaaccaagagtattgtcaaggtatggagttcgtgcattcccgacgattttccttctgaactctacagtgcgtgtgcgttatcatggatctcgggccatgaattccgttgctatgttctataaagatgttacaggcctgaatcctgtgtcattggacgctacatgcctggagagaatggaggattcagttactatagttgatcatggcaaaaaggctgaaaaggatgattctctgttatcgtgggcaaggtcaccagaccgattacttcatcaagatacatgtcttgcattggctagctcctttgtcctcttgaggttgcttcatttccttcttcctaagcttaatgcatgtatgaagcaagcctggaggatgcgactgtatgaattgaataggttgtttcctagcttgtcttgaggaaggcaatatggaactagaaaacttgaactgactctcgaataaggcagcatacttataagaagtgatgcagacaacaaaccggatcactaggaagccagtgtcaagttaatccacattggtgattcagtttgagtagtgaaaatataccgctaccaactctcaatatcctgaagttcaggaggtctcatcaatggtaacaacgcagagtacgcggggtattacatccatgtcgaactcattctgtgtcaactatgtttggtctttccttgggaaatatcttgatgcaagcataagtgacattcatggaaatgctgacttaatagtaagtcatctgtaccactgtaccattagccatctcagtctgagttcagatttgtatcttggtgttactcatgaacacaaaaggcatgtattataagaaagattgttcattcattttagtcataggcatgattgatatgtttgtgatccaaaaaaaaaaaaaaaaaaaaaaaaaaaaaaaaaaaaaaaaaaaaaaaaaaaaaaaaaaaaagtactctgcgttgttaccactgcttgcgttgttccctctgcttatgggcgtttttcctccccctg

SEQ ID NO: 7922 - DNA, 243 bp, Zea mays
  Clone ID: MRT4577_107221C.1
acaagctttttttttttttttttttggaacaaaaccttttttttttcatttcaaatggtcaatcaaggcaatggttaaaccggccctggcacccaaggggaaggcggacacaatattacctaataacctgggccggaacacccttagggccaaatctggaaaaattcaatacaatggggggccgttgaacctgcctttaaaggggcccaatccccctaaaaggaagcggaataaaaatcaatg

SEQ ID NO: 7923 - DNA, 284 bp, Zea mays
  Clone ID: MRT4577_107222C.1
ttcttaagcagtggtaacaacgcagagtacgcggggccaagtctggtgtcaagaagaagaacaggcagcctacgcactaagcctgtgttctgtcgttggtgcccatagtctcagcttatatttatccaatgtctccaacagttttgagacttgttagaactagagcaaatcgtgttaagatgttgccgtttgtcattctatagcaagaattccatgacaaagattgcttggcaaaaaaaaaaaaaaaaaaaaaaaaaaaagtactctgcgttgttaccactgct

SEQ ID NO: 7924 - DNA, 444 bp, Zea mays
  Clone ID: MRT4577_107223C.1
gaaaaacggccgacccacgcgttcgtcctgtctttctactcgtatgttttgttcccccctcatggttctcacggcaggttcgctactgccggttggattcctttcttctttcttgtttgtgcattatttattctcttggtaaagctggattgaagatggtttctccaggttgcacacaaaaaatggctcactgaagaggtaggttgacaatgattaggatcttgagaaaagaattcaacccttatattagtcagtcttctctttacaagtattttgttatcttgagctttactttaatgcatttaataactataatttttcccaagttttgctttatttttttatgaaatttgcattctcaaccctttgaagcttgttttgatttgttttggtttaaaattttatcacttttttttttgtcttttttatttttttatatttttc

SEQ ID NO: 7925 - DNA, 645 bp, Zea mays
  Clone ID: MRT4577_107224C.1
cgggttggcggcccgggcccggccaggcagcgtggaggtgagagagagaggggaaaggaaaggagaaaagcgcacgcgcagccgcgagcgacatgacccttccctccatctgctgctctctactagcgctagctttcctcgagttccgtgcctagtcattgcctcccccctctcgtcctcggtcgtggtcagtggtcaccttgcttgccatcatcatgctacacacagtagccccccaaccaaaaaaaaggcggtgcgtaccatccatccgtcatgtgtacagctcggctcggaaaatggatacagttacgatttcagccgggagttttgcagagtaattgctgcgagcaactccagtaattctttaaaagactccttaaattaataatttaagtaaataataatataagttcttttttctaacagatatctaaataaactttctaaatttaaatacttatcgtctaatttcgtttcctctccaacagttctctaaattatatatttatcgttggatatttaaattttacactaacaattgacaaataaaaaaaagattggaggaggtagtatttttttattaataatgtaccgttgtcgatacaaaattgatagatttcgtgacctgacataaccccctccccc

SEQ ID NO: 7926 - DNA, 2610 bp, Zea mays
  Clone ID: MRT4577_107225C.1
atgtcctccctgcgcgtcgtcacccgcggtgcgaacccaccttccttgggcaccgtgagcctaaaaacgaaggcgccgaagatggcggggatgccgatcatgtccctcgcgaaccaggacgccagcacccctgccactgtcaccgccacccacgcctcggtgctatctttcactgcatccacgcgctaccagatgcagggccccaccgagcatgtctgcccctacgagcttgagcaccagggaagtctcatcaggcccagcgagggcaagctgtggtgcactgagatcatggaggatagtgggaacggcaacctggatggtgcgggtaaaagcagcaacgaagatctggttctcccaggactgcttggaggtatgacccttcccatgtttgatgaaatgtctcctaacagcggtgaggaagaaattgccctattctctgaaggctttgattatccggtgtttgatgatatgccacttgagaaggtggtttgggatgaggaacctggatatgatgatttgttgaatcaactagcacagggtgcagatcatttggttgatgccacgatgcaaccaactatacatccgatcgctgtggacaagcagttacagcttggggtcaatcaaggttgtttcgagatgcctgtcaacactgatgataccgaagatctattccaaaactatgatgttgctgcctcagatgtccaggttattgatgaagatgaagtcgtactcattgaaggcaaatacactgtggattggaagatactacaggctagagaaaccagtgaagaagaggtggaagattaccttgctgaatctaaagaaggggctatggatgaggtgctgcaggttgagctgatcgatgatgaagttcaatgggatgaggagtcacctaaccagagtgtgcataaaggcttactgccacacacagtgaggaaaatggtatatctgaaggggttcagtcagggaggaggaatatcaaccatgacacaagtccagaggtgccatcctttagctccattatctactgctaaaatttcagttgctatagcaattgtaagggctgctggatgtgagtttgcagtcaagtattatccttcatttaatgaagctatacagagaattgatgtgaatgacatagctctagttatggtggatcattcgtgctctggctattgcagcgaagctgatgctcactattgcagaactggcaactctccgttatgttgcagaactgacagtgatagtttaatggagaatggttatgctcgtcctgtggaaggaatcggcgtggctgctctctatgctggtttttctgacacggttcttcttaagactaaacacaggcaatgcacttctggccttcaggacgttgcagatgttgctgttgcgattaaagcaggaccctatgacattggtattgttgctggtttacaatccaagacagtgaacaaagttagtcttgttgagcaaatgaattccaaagtccagctattttctcaagcacatggttgtttttttccaaatggtctcacatatgagaatattgcacactgctttggcactacacgactgcaaccagatcaagctgatgttgagtcacaccctggtaaatccaaagagggtttggttatctattctgttgcttatgttggtgatagttgtgaacatagattcataacacataggccgagttttgttgggatggttattctgtttggagacccagatgaactacattaccgccaaaatgcatttgatgctggagaagaggggcttgaaatcaaagtgcattctcgtgagaagggatgtgaatgcttggacaacttgctcgtttccaagaccagacatgagtacctgaacttgataagaaatgatgcattgctacttatgcaagcagaactccaagtgcttccatctgttcgcgtgcttcttctttggatgattagaccttggaatccaggcattttggctacactatgtgtcactgttgcttggggacaagcaacgtttcgatggggcgctcacgccgacgacgccgcgtcggccaagggctgtgacacagggagaggggcgcggtggaggaaaaccgagctggagcacgagcgcagggagacgggcggcctggcgcggttggggaaaaggcagggcgccggcaagctggaggagcagggagccagacgcggcaccagggagctcagcgagcgagttgagcgcgagctcgggaacgccaggctaggagccggcgcgcagaacagagaaccagggcgccgcagccatggggagagagaagctgggggagggagctgcatcgctggagcaggacgccgagcaggaagcggaaggaagcttcgggcgcgccagggagcgagatctcccagggagtcaagctgtcaattgaagaagaagatcgcgcgtgaagataaaggaaccagggggcggtggctggattttttcttccacgagcggcggccggagaggataagcgcgggaggtggacgacgcgcgtctcaggagctggcgtgggtgcggcagggatcaaaatggctagagattttttttctttgccaggagctaatcggcgcaggtccaggagaagaaaagatcagc

SEQ ID NO: 7927 - DNA, 555 bp, Zea mays
  Clone ID: MRT4577_107226C.1
ccggccgagaatgacgccctgcatcgaggcgagcacccaaaaataatatcacatactatacgcaacgccaacgtctcgcgctgcgccggatcgcgttcctcgaccgccgccgccgccggcatcacgggggtgacggcgtcagccacgacgctcaacgcggcggagaaggacctactccccaagtacggactcccgaaggggctcatcccggactccgtcgcctcctacagcttcgacgaggccacgggcgccttcaagatccacctcgccggcacctgctacaaccacttcggttcccacctcgtgtactacgggaggaccataaccggaaagctctccaagggcgccatctcggacctctccggagtccatgccaagaaactcttcctctgtaactacgtcacgttgcatgtgcgcgcaccgcccgcagtgcaccatcgagatccaggccggcttcttctctgaagacacatccaactcgatgttagacgaggtgtccacatggggtgccattccggttgctcacttgctgactccgtgtgctcggaccttcga

SEQ ID NO: 7928 - DNA, 265 bp, Zea mays
  unsure (1)..(265): unsure at all n locations
  Clone ID: MRT4577_107227C.1
gtttactccatacgacctttcctaccctttttttaatcttacaccanccaccaggcgggagcctttaacagtgatgcgaggacccaaccttccccactcaacaatccaatcaaactttcatctcccggacacaacctataacacccatcaatgccggctaattcaatgacctacggcaagccgaactctacccttgaactaacacacgcgtaccaagaaacactaccaagaccaagaagtgaacgacgcccattaccacacaaaa

SEQ ID NO: 7929 - DNA, 324 bp, Zea mays
  unsure (1)..(324): unsure at all n locations
  Clone ID: MRT4577_107228C.1
cgcttgccgtttccccacgcgcgcaacctgcgtacgagctcggccgactggttctctccactgctcgaacccccgtcgnttgccgtcgagtcgtcaaacacgttataccctgctcgactcccacctgaccagctcgatgcaaacacaatctcaggacgcgacccacgttgtgcccacgacttgctcgacaactttgatgatttgactaccaaatccgtgctgcctatgtggaccctaggaactactactcgtactcgaccccggaagagtgcatctcgccgtgaatacgagcgccagccagaaatatcaagaatcgggtgaaga

SEQ ID NO: 7930 - DNA, 336 bp, Zea mays
  unsure (1)..(336): unsure at all n locations
  Clone ID: MRT4577_107229C.1
tttttctctttcanccaacacatctctagtattacgggacattttcacatggaccggccttattacaaccctagtgagtacacattttatctaccccaaacacttttggaccattcccctctttgctctgtctatacgtgcttctatcttgttttagtatgcataataataattatacataataatcacaacctacataaaacacgagaccacagccctcaaaatgcaacggaaaaataaactgcctcctacctcttagccttttgagctctcggacaaaacgactctaaggccttggacgtcggccacccgttggaccccttatcgggaggccct

SEQ ID NO: 7931 - DNA, 1644 bp, Zea mays
  Clone ID: MRT4577_10722C.1
tgcaccgtcgtggcggcggcggctgccgctggcgcccggcggcgaggcatcttcggcccccgcccccgccgccgctgtgccggcggtcgcccccggtgccgccgccagggacaaggtgcggcgccacacgatttcggtgttcgtcggggacgagagcggcatgatcaaccggatcgcaggggtgttcgccaggagaggctaaaaaatcgagtcgctcgccgtggggctcaacaaggacaaggccctcttcaccattgtcgtctccgggaccgacatggtgctcaaccaagtcattgagcagctcaataagctcgtcaacgttcatagtgttgaagatctatctaaagaacctcaggttgaaagagagctgatgcttataaagctaaacgttgaacctgatcagcgtcctgaggtcatggttttagttgatattttcagagcaaaagttgttgatatatctgagaaaacacttaccatagaggtagctggagatcctggcaaaattgctgcagtgcagaggaatctaaggaaattcggcatcaaagaaatttgcaggacaggaaaaattgctttgagacgtgaaaagattggtgcaacagcccgtttctggcgattttctgctgcttcttatccagaccttatagaggcattaccaaaaaaaccgcttacatctgtaaataagacagtgaatggcagttttgttcgaccatccaatgctgggggtgatgtttatcctgtggaatcttacgagagctcagctaaccaagtacttgatgctcactggggtgttctggatgatgatgatgcaactggactttgctcgcataccctctccatccttgtgaatgattgtcctggtgttctcaacattgtaacaggagtctttgctcgcaggggctacaatatacagagccttgctgttggctcagctgagaaggaaggcatttcacgtattacaacagttgttcctggtactgttgaatccattgggaagttagttcagcagctttacaagcttattgatgtgcatgaagttcatgacattacccactcaccttttgctgaaagggaacttatgcttattaaggtttctgtcaacactgctgctcggaaggaaatcctagatattgctgaaatcttccgagcaaaacctgttgatgtttctgaccacacagtaacgcttcagcttactggagatcttgacaagatggttgcactacaaaggttattggagccatatggcatctgtgaggtcgccagaactggacgagtagcactggtccgcgaatcgaaggtggactccaagtacctccgcggctactctcttccactgtagccttgcagtcgtgatgatgatggcaccatgaagagctcggctggttgtttatagagcagaccatctcgcgctgggttgtgttgtgcaattacaggacttgtttctttcatgtcgtgaactcccccggcctgcgtgtccaataacgcgtgttgaggctgcatgtgtattccaacgactgtcagaataagatgcatatcgtatctgtttacttcagtgaagagatgcaggcatcgttcgaaaaaaaaacggtcgtttggatatgcccaaaaaaaaaatcctaataaaaaaaaaagggcggccgtcgcgat

SEQ ID NO: 7932 - DNA, 464 bp, Zea mays
  Clone ID: MRT4577_107230C.1
tagccagcgagccggcaactggtgtgcccctgtgctaagtggccccttcccttctgcaagactgcagagcaataggggtacaccgtacaccacacaagcacattaatacactacagcaggttgttctctaattcgattgatcgaagcctccaaccaaatatgaaataatccaatctcttgttccaattttccatggttccattgttcaatatttgtgtttttgtatgatgtagcaactagcagccaggttgtttactttgttttccttttgcattccgtaaacttacacaatggagaggacaaagacatcgaaaatctgtttttctcttggtcctagactcctacgcctattatacaacctagccaatcttgtgtttatgtataagtacaaatatgcaatgagaactagtaatggaaatgtcatgcaaccagaatcagtttgttgtacaattatatgtatgtat

SEQ ID NO: 7933 - DNA, 274 bp, Zea mays
  Clone ID: MRT4577_107231C.1
ggggaaacacaaaaacctttggcatttttgggcctgacgaacgaaactttggaattattaatttttccggaggtctccattttttttttttttttttcggggggacccccccctggggggccctccctagggggatgaaggggcgtccggttgcttgccagggagccctttttcaaacgcagggggggacatgtactccggggggggcctacccagagggggggagtttgccatgccaattttagggcgctcaaaggctgacaaaatctggggg

SEQ ID NO: 7934 - DNA, 276 bp, Zea mays
  Clone ID: MRT4577_107232C.1
cacaagcccattcgctctacttcacaagcattgcgcgccaagcaagtctttcggtcggccgggaccagcgcactcaagcacgacaagacggtgaacctctccttctgaagcgtccgcgactgcttcagcgccacctccatcaaggcctacatggccgaattcatcgccacccttctattcgtcttcgccgacgtcagttccgccatctcctacggtcaactgacgaatggctgcgcgctggacccggcggtcctcgtggcgatcgcgatcgcgcac

SEQ ID NO: 7935 - DNA, 883 bp, Zea mays
  unsure (1)..(883): unsure at all n locations
  Clone ID: MRT4577_107233C.1
cattgggtacctcgaggccggccggatcggatgcatccaccacgtgctcacctcgcagccgcaggccgccctacgtgacctggctcagaagcatggcccggtgatgtacctgaagctggggcaggtggacaccgtcgtcatctcctcgccgacggcggcgcaggaggcgctccgggagaaggacagaagcctggcgtcgcggccgagcttgctcggctcggagatcatctgctacggcaaccgcgacatcgccttcgcgccctacggcgactactggcgctcgctgcgcaagatgtgcacggtcgagctcctcaacgcttccaaggtgaggcggttcgcggccatcagggacagcgagaccatgtccctggtcagggagatacgccgcgcctgcgccgccgccagcggagagcccgtggacctcggcggcctgctcctgtcgtgcaccaactccgtaaccggaagggcagcgttcggcaaccgctgcagcagggagctcacggcggatttcctgtccgccatctccgtggtgataagcaacatctcggggctctgcgtctcggacctcttcccgtcgctgcggttcgtggacgccctcaccggcaccaaacgccgcctgcggagggcgcaccagcggctcgaagacgtgtttgccaggatcatctctgacggggaggcacggcgggcggaaaggaaggggactgatgctggtgcaggaggagacgacgacgacgacgaccttctaagcgtcatgctgaggattcgcgacgagggtgagtttgagatcccgatcaacaacacaaacatncaggcaatcatcctggatttattcacagggagggacggagacgacttcgtcggtgggcgagtggctcatggcgga

SEQ ID NO: 7936 - DNA, 120 bp, Zea mays
  Clone ID: MRT4577_107234C.1
gaccgaagttcaagaagccatctcctaacttcgcatcctgacaaaacaaaagggggttcttttgatttcccccttcctgattcaagccattgcctactaattctattatgacacaaaact

SEQ ID NO: 7937 - DNA, 2103 bp, Zea mays
  Clone ID: MRT4577_107235C.1
actcctatagggcgattgggtctcccgaggccggccgggaaaaattcctgtacactgtaatccattctaggactagtagatgcagagtcacttgctcatagcacctcacacctgccaatcaaaccaaacgaattgaggcctacagcagagcaaacaacccattgaatcctacagtaaaagagtaaagagtgagggtccctctcgtcccaaatctgcagacacatatatatccaacttatgtttctctatttcctccaggccgaatcatggatctaacaagcacaaccactgccttcttatccggtctgatactgatccttgtgtcacttgttgctcacaaagccagaacaagcagatccatgaagaggaggaggcctcctggtccacgggcgctccccttcatcggatgcatccaccacgtgctcacctcgcagccgcaggccgccctacgtgacctggctcagaagcatggcccggtgatgtacctgaagctggggcaggtggacaccgtggtcatctcctcgccgacggcggcgcaggaggcgctccgggagaaggacagaagcctggcgtcgcggccgagcttgctcggctcggagatcatctgctacggcaaccgcgacatcgccttcgcgccctacggcgactactggcgctcgctgcgcaagatgtgcacggtcgagctcctcaacgcttccaaggtgaggcggttcgcggccatcagggacagcgagaccatgtccctggtcagggagatacgctgcgcctgcgccgccgccagcggagagcccgtggacctcggcggcctgctcctgtcgtgcaccaactccgtaaccggaagggcagcgttcggcaaccgctgcagcagggagctcacggcggatttcctgtccgccatctccgtggtgataagcaacatctcggggctctgcgtctcggacctcttcccgtcgctgcggttcgtggacgccctcaccggcaccaaacgccgcctgcggagggcgcaccagcggctcgaagacgtgtttgccaggatcatctctgacggggaggcacggcgggcggaaaggaaggggactggtgctggtgcaggaggagacgacgacgacgacgacggcgacgacaaccttctaagcgtcatgctgaggattcgcgacgagggtgagtttgagatcccgatcaacaacacaaacatcaaggcaatcatcctggtaatactacataacgttgaatcgttgatacgtagcgtactgccatgatatgatacaacacgtaacctgaattttgtccagcgcaggatttattcacaggagggacggagacgacttcgtcggtggccgagtggctcatggcggactgatgaggaaccccgacgcaatgcacaaggcgcaagacgaggtgcggcaagcattcgagcacagcagccccgacgagcacgaagcccagatggacaagctgcgctacaccaagacggtgatcaaggagaccctgaggctgtacccgcccctcccgctgctcctccctcgccagtgccgagagacctgcgacatcggcgggttccaggtggccaagggcagcagggtgatcgtgaacgcatgggcgatcgcgaggagcccggcgcactgggacgacgccgacaggttcatgcctgaaagatttgagcgcgacgatagcgcggcaggttattccagggctactactgatggcactacacagtttgagtacctgccgtttgggcacgggaggaggatttgcccgggcatgggcttcggcttgtccaccttggagatcctagttgcgcggctcctctactactttgactggagccttccggaaggaatgcaggtggtggacctggacatggacatgactgtcggtgcgtcggccaggaggaccaacaaactgcacctagtggcctcgccgtatcaagtgcccacgtagatttcatatgatggttgcagttttgcaaccaaaaagttgtgcctctttttcttttcctggcttctttcctatcctgcggaaatcaaataaggccttgttcggttaaaaaaaaaaaaaaaaaaaaaaaaaaaaaaaaacaaaaaaaaaaaaaaaaaagcggcc

SEQ ID NO: 7938 - DNA, 493 bp, Zea mays
  Clone ID: MRT4577_107236C.1
gggggagttggggaattttgaaaatgtaagggataaaaaaaagggggaatttttataaagagggggaagaaaaatttgggaggaaatgcggaaaagggtggggggggagacttaacaggggcttaagggtaaagcgtgggggagggacaagagggggggtggatttggggaaaaaaaagcaggtcgggggtggggctcaattggtgcggggggttgttttttttacctggaagaggagtggttcggggggttgaaaaaaaaaagggggggggggggggtccaacccggaatttcgggggggggcttcgaacggggaaaaagtgtggttttagaggggggttttaggatgtgggtttattttggctattggagtcccgggggggaaaggaatttccaattataaagcccggacagggggggggggggaacttaataggtaaagtgggggggggaaaatggggggtttaacttaatggatggggggggggcaaaa

SEQ ID NO: 7939 - DNA, 265 bp, Zea mays
  Clone ID: MRT4577_107237C.1
aaacttgggcctgaaacttctttcattgtttcaaagcattaaaaaaaaagccgcaaaaccaaaaaaagtccccaaaagcccccctttttaggggagtaaaacaaaaacgaaaaacgcggggcaaaacaaaaaagaaccccaacatgggaaagccaaataaaaacctttttaagcccagcagacccccaaaagcttctttccgaaaaaaagggcccctttgggaaaaggttccccccattttggggggtttacaaccccccagggg

SEQ ID NO: 7940 - DNA, 110 bp, Zea mays
  Clone ID: MRT4577_107238C.1
actagcagttctggcggtagaccgagcacgcactagccatcttaagcggcgcatcacactaggcttctgtcctgttataaagaccaagacaggaagctagcattgccact

SEQ ID NO: 7941 - DNA, 301 bp, Zea mays
  Clone ID: MRT4577_107239C.1
ctccgcccggggccatcatgctaccacaaaagttggaccgacagtcttgccaacgccgccctacgagagggatggtgggctcgcgggctccggccgcaacgctcactcgtcctccgcgccctagcggcgcgcgagcgcgtggcagacgacggatgcgagaaccggtgcaagagtgaacagcccgtgccggtctacgccaacaaggccggaccataagacaatgccagcgaaacatattgatatgacgacctgcctgtctgatgtgatgacaaagtgaaagagaagagcgaggccctagcag

SEQ ID NO: 7942 - DNA, 368 bp, Zea mays
  Clone ID: MRT4577_10723C.1
acggttgaaggagcccaaaggcgaaaggttcaaagggggggtacacagacactctacaggaaaacagaaaaggaacacgggaaccaaacatgagagggaaaggcaatcgccgtaacaaagggctgggggaaataaacctgaacaaaaaaccgcaaaaaaaggccccaaaaccgggggacaacaacaaaggaccatgctaaaaaccgcaggacacaaccaaaggactaactaaaacaaaaaagaagtgtaaaaaaaaaaaaaaaggcctaaaaacaagctttaaaacctaggcaaaagcctcaaaccggcaaaccaaaccgcaatggcctctgcaaaatggaagatcaaactcaaaaagctgggacaag

SEQ ID NO: 7943 - DNA, 272 bp, Zea mays
  Clone ID: MRT4577_107240C.1
gtgccagaactgcgcgtagtccgcgccgatcgactgagaagcccggtttgcgctctcagaatgactgaatgggaaacagccaaacccgcagtggatgataacccggacatcaagctctttgggaaatggagcactgatgatctgcagatcaacgatatttctctacaagattacatcgctgtgaaggagacatatgccaagtacctgcaccacagtgcaggacagtatgctgccaagcgtgttcgcaaagtacaatggtccatcgtggagcg

SEQ ID NO: 7944 - DNA, 871 bp, Zea mays
  unsure (1)..(871): unsure at all n locations
  Clone ID: MRT4577_107241C.1
gcacgagcggcatgggaagctcgaggccggccggcgaccaataggcaatagcaacgcgccggcggctcggcggcgtcgaacgattcgggcaatcgacaagcagccccaccaaaccaggaaactgcaaacctacccccggtcgccgactcgccgacctcgactctccgcccagactacaaatggagctctgcacctgcgcggcccgcagttctgcgcccccctcttctagctgccgcgcggcgccattcccgcgagttctctcccatcgcatttggagccgatcgggatactgcactgtctgctttaccccgtcaagccctgttgctaggagtcgattctctactctaatgacgactgcacacaacacagggaccccagatctagttgacttcaattgggatgatcttgggtttcaactgatcccaacggacttcatgtatttaatgagctgttcttcagatggggtgtttatgaatggtaaattagtgccatatgggtcaattgagctgaatccagcagccgccgtgctgaattatggtcagggattgcttgaaggtctacgagcacatagaaaagaggatggatcaatccttctttttcgtccacatgaaaatgcacggcggatggaaattggtgcagaccggttatgcatgcctgcaccaagtgtagagcaattcctagaagctgtgaaactaactgttctggcaaacaagcattgggtgcctccttttggtaaaggttctttgtatatcagaccgcagctaattggaagtgggctatgcttgttgtggcacctgccccacagtacacattcattgtgtttgtttgccagntgggcattatttcaaggtggtctagctccatcagcttg

SEQ ID NO: 7945 - DNA, 1324 bp, Zea mays
  Clone ID: MRT4577_107242C.1
gcgatctaaaactagtcggcatggtaggttgagcgtgcacatgcagggagtgcgatccgagttagttggagtggtggcgcaggaatcccttaccgttgggcgcgtgcgggtcgtgcggacaaacgcgtcctgcgggcacgacgcagcgcacaggcgcggacatggtggggacccgggtggtggaagggagctctgccccggctatatgtaccacccctctctgctgtaatcgtgctcggggtgtccaggaaataaaggccaacatacaggcgagggagagcttctcgccggggcgttcgtcggccatatccactgttcatctccttcctctcagtgttctctgctttctagggtgtgagcgctctttcttgagtgagagggtccaacatttggtaccagagctaggatggagacgccgccggcaaaggatggcctcaagatgttcgacggcatgggctcgacgagtgccgcgatggagcgcgtcatcaacagcagctccgttgagctcccgctgctgaccaaggcgaattaccacgagtgggcgttggttatgcaggtctcgctggaggcgatggaactgtgggacgcggtggaggccgtgtgcaaggagcgtcccaaggatcggcgggcaatggccgccatcctgcgcggagtgccgccggagatgaaggcggggctcgccgtgaagaagacggcgaaagaagcgtgggaggcggtgaggtcgatgaggatcggcgatgaccgggtgaaggccgcgagcgtgcaacgcttgtggaaagagtacgagaacgtcggtttctgtgatggtgagagcgtcggcgacttcgcgttgcggatcaacggcctcgtcgcaagccttcgagagatgggcgagacgctggaggaccaccgcgtcgtgaagaagatcctccgcgtcgtccccaaacgtctcaagcaggtggccgtggcgatcgagatgctcaccgacctcaacacgacgacgattgaagagctcgtcggccgactacgcgttgcggaggacgccgacgcggacgacgccaaggcgaaggaggtctccacggagggcgtcgggcagctgttgctcactgaggcacagtgggaggcgcggcgtcgggaacggaacaagcagcgcaagccccgtgacggtgacaagaggcgcggcaatggcgatcgcggcaacaacggagacgatgagcacagcgacggcgacgacgatgcgagcagcatggcctcgggttcaagccggagaggctggagccgcaacaagggccagtgcttcgagtgcggcggctatggtcacatcgcccggttctgccgtgagaag

SEQ ID NO: 7946 - DNA, 289 bp, Zea mays
  Clone ID: MRT4577_107243C.1
ctatctcagctccgacactcgctagctagataggatctcgccgtacaaccacccttcttcacaagctctaggaggacctcatcaagagatatcgctgcgcgctgccaccgggctcaggtgctcctttcttcaaaagaatgcccaatgtggagacaacaggcaggccgatgcgaccacgccgcccagtgactcgatggatgtccgcgactaagactacgccgatgagctcgtgaagatcgtgataatgatcgatttagccggcgcctgggtcctcctggccgctggcacg

SEQ ID NO: 7947 - DNA, 640 bp, Zea mays
  Clone ID: MRT4577_107244C.1
gcacgaggccgtccgcgaggggcacgagcggcggccggggacgtttctcccggcggcggcgaaggctgccacgcggcggtgacggtgagcagcagcgtcgcgacgtccatcgagtcgctgagcttcattaacctggacctgcactggaagctgcagcagcagcggctggccacaatgttgctgggcgcgccgccgagctcggccgccgcggcccatgctgacgatgacgacggcgcggcaagagcagcagcgcacgtgggcggcggcgccttcttgcaggtggccccgggaccatcgcccggcatggaggccaccggcaccgtgccgccgccggtggcgacgtcgtcgtggttcatggacagctcctgctacgacgtgctcccgtcgtccccggccgcgcatgctaacacggccgcggccgcggccgccgtaggcgccagcgactgcaacgtcgtcaacagcggcggcggcgacaacgccacgtcgagaaacagcagcaactgctgcgggccggggagcgcaatcccgccgtggggcgacatgtccacgttcgctatgctgccttgatggcggcgcatgcatgcaccaacaagaagatggcccagttcggaagggctgatttcatctctaactgcgtatt

SEQ ID NO: 7948 - DNA, 422 bp, Zea mays
  Clone ID: MRT4577_107245C.1
agggaaaaaacggccaaaaccggaaaattggcaaaaaacaccccccaaaaacaaaaccaccacagcaaagcccaggcaggggaaacaggggacaggcggggaaggcccccccaggacaaggaccaagggcggcaagggacccgaggcaaaaaaaaaacccccccggaaaagacccccccgggggcaaggggaggggcccccccgggacccctttgggaatttcgaacaccgggcccctccccaagaagcggggacccaaggggcccagaggcccccaacactggggggccctttggatgtacaaacccaacccccaaaaaacgggggccaaaaccggccgaaagggacccggggccaccaaccgggaaaaccaccaaaaaaaaggcctcaaaaggctggggccaaaatccccaaacccaaaa

SEQ ID NO: 7949 - DNA, 293 bp, Zea mays
  Clone ID: MRT4577_107246C.1
gttgtttgtctcctccaaggttcacactatcttagagaacaccactcaatatgcaccgtgaactcaccagtattgccggtgcatcagtgccaccatttctaatgccactttaacaaacttcattcattcaattgcaccagcatcgcttcctctgccaggaccctagaccacaagtggggtgctgaaaacagatactctgggcctatgccaatttaactttaccacggatgatatcaacgctaacttctattcaaagacatgcacgcccacctatttatccctaaccaataaag

SEQ ID NO: 7950 - DNA, 201 bp, Zea mays
  Clone ID: MRT4577_107247C.1
aggggtaatttttaatttttggggtcttggtctctccccctcggaaaaacattaggccctttattgtgattgcagcccaaagggaaaattatagtggcctgctgagaattatccttcaataggggtaattcccgggggcctaacccaaattgccccctagtgaaacctttctccccctgtggccccctttaaacaaaacct

SEQ ID NO: 7951 - DNA, 286 bp, Zea mays
  Clone ID: MRT4577_107248C.1
ttcttttgttggatcaaactatctactgtgggcctatacacagcttatatacttaatcaaacccgctccagtctcctttgtagcatctattctactgtaccaacagcccaacaagctaaaagaatagactagttacggagatagaacaatatacaaaaaggagtaggccagtgcgcagacagataacaggatcacctagaggaggacgttgtctaaatccatctaaagttatccaaccattgcacgcaatcacatataatacttatggaatacacatcaaaaagca

SEQ ID NO: 7952 - DNA, 334 bp, Zea mays
  Clone ID: MRT4577_107249C.1
atcattttttctaggcggccagtcagggtacgcccctcctggatcctatggtcactctttccggaagtgttcatgaccagatgcctgacatcatggcgagcatgatgagcacattgttccccaactttggcaccatgtttattgtagaccaccagcaacatgtgaaagctaactgggacgccgagagtcaaaggtaaggtcaagatgatgctactgatcatggtagtgacgacatcgacgataacctgcagagcccacttatcactctaagacaacaaggtgtgagaaggaaaggagatcgctgcccctcatggtagcatatttgagcgctttg

SEQ ID NO: 7953 - DNA, 291 bp, Zea mays
  Clone ID: MRT4577_10724C.1
acgctctctatggatcgattggctcacccactggcgagggactgacggtctcgaaacgtataggcgcgtgattctgcaccacgacatactgtaccgcgtcatcatgacctccacggaaagcgaccaagtccacagctgcggtggcattgccggccgtcaccctcctgtcgatcaacgagaagccgataccgctcttcgacatcatcacggcgtccttcaccatgctgcacaacgccctctggcacaccgacctgtacttcatggaggtcaagttgcacaccttcgagaccg

SEQ ID NO: 7954 - DNA, 265 bp, Zea mays
  unsure (1)..(265): unsure at all n locations
  Clone ID: MRT4577_107250C.1
cgttcgaacaactatcaacaaacttggtgctaggttaactcttgctnnngcctactctcagncaacagcgagttgtcttccatttcataccatactgtgctgcnnattgaactctgtctgcttatttgggcaacaaccaactacncnnattcagtcatgcttagcttttgctgcctaccnnncccagcatatttctttccatttcatacccatactggcatnngcattgaacntnncttgcttgcttatttaccaacnnagcaac

SEQ ID NO: 7955 - DNA, 963 bp, Zea mays
  unsure (1)..(963): unsure at all n locations
  Clone ID: MRT4577_107251C.1
aattcggcacgaggggctcgcagtctggttgggctcggatggtcggtgccggacgccgggcgcggaaccctaaccctaggggccggctacattagatgctggggggcggcgccggaggcggtggcgcgggcgcgggcttgggactggacctttcggcggtgatccaagcggcggtcgtcgggctcgtgctcttctccgcggccgtcgttgccgtgcgccgcgccgcctcgcgctacttcgtcgtcgacgccgcggggtttgccgcctcctacgacgatcaccaccacagctcgcccgcctccccgatgtcgtccaaggggaaccggtcggagcagggggccgccgcagcggacctcacggggccctgcgccgcgtgcggtgtcgtcacctccaagaagtgctccgggtgcaagcgcgtgcggtactgttcccaagaatgccagacaaagcattggcaaattgatcacaaattcaagtgcaaacaaatgaaatcattggatcttgccgacaagttatcctgtggaggtgaggccaacagtaagaaaacatcaggtttcggtcgcatctcattggtgcctgcctgtaaaaagataagcaagggtcaggtcctctttccttatgatgagttcttaaagttgtacaactggaaagaccttgatgttgtaccttgtgggcttatgaactgtggcaacagttgctttgctaacgtggttttacaatgtctctcatgcacgagaccacttgtggcctatctgttaggaaaggaccatagcagggaatgttctgtgaggcatgaagattggtgtttttttgtgtgagctacaatgtcatattcagagagctagtggnaagtttgcacccatttgctcctacaaacattctttctcatctgccaaatattggtggcaatctttggcgttggtaggcaagaggatgctcatgaattcatgaggtttgcaattg

SEQ ID NO: 7956 - DNA, 359 bp, Zea mays
  Clone ID: MRT4577_107252C.1
acacgcctcgtcctcatactacattcacgtctgcatgcgccaactactcctagcctacggagggtccttccagaagcgcaggactctaaaagccctcgacttgccattatccctcgccgaggaggtctactgatatcacataaacaatgacaacaggctgttgctatgcttgctagcataccatcgtgtcaagggcaccatctttttcacccaatagggagatggccgtaccactgtcaccggaagtgtctttggcctgaagactcggcttcatggtgtccatgtacactcactctttgacaccaccaatggatgcatgataactggaccacactacattgatgcgagcaaggagcatg

SEQ ID NO: 7957 - DNA, 190 bp, Zea mays
  Clone ID: MRT4577_107253C.1
atagtgagtcgtattatatcgatctccacggagcttgcgcaggagctgggcgtttacgcgttgtccttcgatcgccccgggtatgccgacagcgacctgcgcccggccaggaccgaggagagcattgccctcggacgtcgcggaggtcgtggatagcctgcaggtgggtcgcatgttctaccttgctggc

SEQ ID NO: 7958 - DNA, 312 bp, Zea mays
  Clone ID: MRT4577_107254C.1
gaggccgattgattagaaggaagcaagggggatcaatactatggctatgtacacgaagtcgctagccacgcacgcttttagcagacgaacaggatcagccagttgttaatactctaacgacctatgtccataatgcaagggaaaggaggcttggtgggcgaccatgactacaagcgcgcatgagcacttccaggtctgaactcagatgttgaacccaaatggaccttcgtattaatgctggccggcaaacgcttaggttgttggagacacctagaccttgaggccaagcatcagctgcaggtccgtaaacac

SEQ ID NO: 7959 - DNA, 275 bp, Zea mays
  Clone ID: MRT4577_107255C.1
tccaggccgaccacgcgtccgcgacgattacggctcacatcttcttagtcttaatctgaggcaacgagcacccaaagatggtggtgcttcaaccagatctggccctgagcgagctgacgagcatgtactagcggagcacggagaatggctccgtctgggtcacgatgaagcgatcaactctcatgggcaaggcacatgtgcggtagatggataataaggggcaggatgtagagcacatgtgcctggtacgcgcctccaatggcgagaagaacatc

SEQ ID NO: 7960 - DNA, 358 bp, Zea mays
  Clone ID: MRT4577_107256C.1
caacggggaaagaaaaaaaatggcaaaaaaaaaaaacaggacttcaaaaaaaatttaaggggaaatccccccgggcgcaaaaaaaaaaaaggaaccggagaaccttaggggcccgaaaaaaaaaaaacttaattatccaaaaaaaaaaaaaaggccaaaggggactaaaaccattttaagagccccccggggctggaaaaaaggggcgtttccaatcaaacgggccattgttgtttttttcccaccccaaaaccgagggggtggcggggccctaaaaaaacccaaaggggaccatgtaaaaaaattgcccaaagcaaaaaaaaactttttttttccggggcaccttccggacccgggg

SEQ ID NO: 7961 - DNA, 936 bp, Zea mays
  Clone ID: MRT4577_107257C.1
ctttgacagcagatcgtaccgcgctcgcatctccatggtggcgagcaacccctggcagaaccgtctcccacttgcatagaacttgaacacgtcctgcccctccttcagcaggagtggcgtgtccttgccgtcgcctgtgccaagaaggctgaagttcttgtcgaagatagagtccctggtggcgaacttggtggcccaggccagcgcgatgttctcgttttgccgcttcccagtgaagtagttgagcacgtaacagaccaggaagctggcgcacgcgatctcgaaggagaacgcgcggaggagctcagccgggctcctcttcgcagccggcgccacctccaccggtgcctccgcggagggatctgatgggtcgacctcggccggcgcggcggagtcgtcagaggggatcgcttcgggcacggggatgccctcgaactcgtcttcgtcccagaggtcgagcgccggggtgggatcccgaggcgtaggcgtagccgggttagggttcggcgcgggtgtcgtcgtgacgggaggtgaaggagcggaggtggagagggagatgggcggagggggcgggaggtagacgccgtcgaggccctcgtcatcgtcagcatctaggccgccggccgcgacaggaaggtcgtcggagtcgaagccctcgaagttagcggcaaaggagggggagatatggagggcgaggagcagcaagatgagaatggcagcacggggcggccggagccggatccagctcagcgccgccatagccttaggatgcgggagtgaaggtgtgctggggaagacgaaggggattatggtccgcggcggtgctgggaaggatgcgactactgcggaagtggttgatcgttgggatctgagattcagttttttctctctctctcattttcccggccggccgcgaggcccccaatgaggtaccca

SEQ ID NO: 7962 - DNA, 868 bp, Zea mays
  Clone ID: MRT4577_107258C.1
aaatgagagagagagagaaaaaaaaaactgaatctcagatcccaacgatcaaccacttccgcagtagtcgcacggttcccccacggccccaccttccgtccttcccagcaccgccgcggaccataatccccttcgtcttccccagcacactgcacaccttcactcccgcatcctaaggctatggcggcgctgagctggatccggctccggccgccccgtgctgccattctcattttgctgctcctcgccctcaatatctccccctcctttgccgctaacttcgagggcttcgactccgacgaccttcctgtcgcggccggcggcctagatgctgacgatgacgagggcctcgacggcgtctacctcccgccccctccgcccatctccctctccacctccgctccttcacctcccgtcacgacgacaccggcgccgaaccctaacccggctacgcctacgcctcgggatcccaccccggcgctcgacctctgggacgaagacgagttcgagggcatccccgtgcccgaagcgatcccctctgacgactccgccgcgccggccgaggtcgacccatcagatccctccgcggaggcaccggtggaggtggcgccggctgcgaagaggagcccggctgagctcctccgcgcgttctccttcgagatcgcgtgcgccagcttcctggtctgttacgtgctcaactacttcactgggaagcggcaaaacgagaacatcgcgctggcctgggccaccaagttcgccaccagggactctatcttcgacaagaacttcagccttcttggcacaggcgacggcaaggacacgccactcctgctgaaagaggggcaggacgtgttcaagttctatgcaa

SEQ ID NO: 7963 - DNA, 506 bp, Zea mays
  unsure (1)..(506): unsure at all n locations
  Clone ID: MRT4577_107259C.1
ggccgcgacggcgagcgagccgncgccggggagaccagcgccgncgccgcgccgccgccacggccgccgccgccgccgcggcccaagaggccgagcccgacgacccggaggcnagacggggcancgccggggccggcggacaccgacancgccaacnccgncgagccgcncccaancgccgacancgcagcagagcccgggcnccggcccgagcacnacgaccccnacggcaagcacaaggccaaggccnccgcggccggncccggaggagcncaaggcgcaacaggacgggaacnacgccggggggggcggcaacacgccaacgccccacggggaggggaagncaaccaccaccgccgggcggagacaggcccacggcgccccccgggagaaaaaggcggacacaggccgccggcaaccaccgcaagggccaaccacgggaaccaagggaggcgcagcaggaggagggcacagcccaaacaacacccggggacgagcccaacccc

SEQ ID NO: 7964 - DNA, 1254 bp, Zea mays
  Clone ID: MRT4577_10725C.1
ctcccccttacttgacctagaacctggcctcgggccgacgcctcctgctccctctcgctgtcgcgtctcccggcgaccctctccgtcgacgccccggctatcggctgccgcccatcatttcccggcgaccagatcgacggcaatcccatcctccttgatctccctctcgggcgtcgggagatctacgcggggaccatgcataagctggggagaggaagccgcgacaaggtgcaacagttcatggccataactggtgcaagcgagaaggtcgcccttcaggcactgaaagctagtgattggcacttagaagggtcttttgattatttctacagccagccacagatttctgtgaccaattctcgacatcttgaagatctttacagcagatacaaagaacgtgacgctgatatgatcatggtggagggcacatctcaactgtgcaacgacctgttggtggatcctcaggatgttgtcatgcttgtcatatcatggcacatgaaagctgccacaatgtgtgaatttactcgccaggaattcattgatggtctgcagtcaattggggtagattcaattgagaagctccgtgagaaacttccatcactgcgagctgagataaaggacgataataagttccgtgagatatacaactttgcgtttgcttgggctagggaaaagggtcagaaatcccttccactggagacagctattggaatgtgggaggttgctgtttgctgaaaggcattggcccttaatcgatcattggtgtcagtttttacaggtcaggcataataaagccatctctagagacacatgggcccagctgctggaatttgtaaagacgatcgatccacagctatccaactatgacgacgaaggtgcctggccctacctcatagacgaatttgtggaatatctgactgagaatggattggtccagcgtaaaagatgaacaatgcggaggcttccttcaaacaatggttgggctgtacaaacatgattcatctcggtcggcactagcgacgcccagggcctgatgttggcactcctgctcaatccattcaccaaactgttggcatatcattgaatttgcttataaacgcggggaaacttaacttttagcctgggaagttgtggctgtcagcctgcgattgtgaactggaacttatcttgaactggaacttaccgacgatgcaatggagagtttgggactttggttaaccatatgatttgttgcatcatttgtcttatcgtttc

SEQ ID NO: 7965 - DNA, 411 bp, Zea mays
  Clone ID: MRT4577_107260C.1
gaacagatcttctttaacatgaacatcttatacggcactgcgctccagggggacgcatcttctcatcgtgattcaacttggacgcgccgagatcccaagcccacccagtggtgcttcgttgatattgtacaggagcagctgggactgggagtaatggagtaggcctccaagaacctctctctctctatacagatatatacgtttctttctctaatctagtgtggccgacctatttacacgcatgacctccagatcctgccctccaaggatattacaatgacagatacgtcgtcgtggtaccgccgccggtcgccgtgtgggatctcgatcagttcgtggaagtccatccctgctttgttcgcagctctgaaaagaacctcctccaccaggtgctgggcgcggacgcgtggt

SEQ ID NO: 7966 - DNA, 258 bp, Zea mays
  Clone ID: MRT4577_107261C.1
gtcgcttattcttcttaaacagactctggcgacgtcgatcaaactgtagactacgggtcgctgatcacccgctggtacagatgctggtcctctaacatacggcggcccaaacaacagactaaacggcttttgatttgtgctgcatgggcgctgcccagaccaccgccaagtctggcgggatcgttctcatctaagacttaaagcgtgcttttggacgcaatacaataacttgtatctaatgaacacaatgggaccata

SEQ ID NO: 7967 - DNA, 159 bp, Zea mays
  Clone ID: MRT4577_107262C.1
ctgtggttagcggcatgctgcctcctcctcttgtacagcgttcgattcaggtccggctggtgccatggcaacggccccaggagctaccccgtgattgggtgcctggtcgacttctacaagaaccggtggcggctgctggactggtacactgagctgctg

SEQ ID NO: 7968 - DNA, 458 bp, Zea mays
  Clone ID: MRT4577_107263C.1
aattattaatgttttttttgttttataaataaattgtaaaacacacggatgagttgagtaaaaaaaaaacccgacggacaaactaccgacacagggggggagaaaaacaaagaggggaacaaaaaaaaaaaaggggaaaagaaaaaaaaaagggaaacagaagcccccccccggaaaaaccaaccccaaacaaaggggaaacccgcacagggggagccaaacacaccctgcaacaaaagagaagggactcaaaaaaaaaaagggtgggatgcacacccaagagccccgcgcaagaaaaaggccagtttcaacgggaaaaaacccaaaaaaaaccagggggggggccataaggaaaaaaggggcgaggacgccacaccacacccccccaccgtgggcagcagccagaaaagcgggagaaacacccaccggagcacaaacacaaaggaagggggggtaaa

SEQ ID NO: 7969 - DNA, 127 bp, Zea mays
  Clone ID: MRT4577_107264C.1
accaccggcaaggggcgccgaatcccccccgttaagtccaaccggattcaaaacaccttggacctggtgggaacttaaggcctcacccggccagtcaacggagtcaacaaggacacctttttgccca

SEQ ID NO: 7970 - DNA, 246 bp, Zea mays
  Clone ID: MRT4577_107265C.1
gcggtggaccggctggcctgggtcgcttggaacgtcagcgcgccgctcgccgcgttcgccggtggcgccaccgagttctgtctccaccggccgaactacttctgcatcatcagcggcgagccagggcaccacgaggaagaagggcagaggctcatccaacgcttgaggcactgcgtttgtagctgcactgcttggtttgttactacaaggcaaacatgagagcagacagggcatgcaaacttacac

SEQ ID NO: 7971 - DNA, 666 bp, Zea mays
  Clone ID: MRT4577_107266C.1
atgaaggacggggagcagagcgcggtgggggtggctgatgtccgggtggggacagacaaagggcgtgcaccgcggcggcgctgcctcagcaggcatggcgagcggaggtgggcggaggtgggacgcggcgggactgcggcttgggagcaggcgaggtttccggcgcgcgcaggcgtgcggaggtgggcggtggtgagcggatttggtggcgacggttccggcgtgcgcaggccgcgtccgtcaccgtcaggcacgaggccaggccagcggaggtgcaggaccactgggaccagcagtcttgcacgcggcggcagaggcagaggcagcaggtcgaagcagctacggctgcaaccaaccaatcacgtcgcctacgagttttcaatgcgcgacccgacccctccccgcggcaacgccggcaggcggcagtcgggctcgagcccatgggatgggatgggacgcccgctcgtgcgtggagccgtggacgagaccgggagcattgcgattgcgggcgcagctgccgaagggcgggcgcagcgcaggcaacagtgttccccggcgcggacggcagcgggggcagggttgctgtctggcttcagccatgcgagcacgagagcagacctggccactgcccagtccacactaacacaagggagtgatgattggtga

SEQ ID NO: 7972 - DNA, 609 bp, Zea mays
  unsure (1)..(609): unsure at all n locations
  Clone ID: MRT4577_107267C.1
gtcgtcgtccctccgaatcccgatcctatnntcctttcatnncgatcgatnncttctagctacgnnagtgtacccaacnnctaccatgggcnnaataatggctnngcctcctgctcgcgcccgcgcctnngcttcctgctnngtcgtgtcgnngcggcggaaggggcgcggctggtgcgttgtggggcggggaagacccggngcggcccggcaccggcaagctggcnggggcagngtgatgatgngacgtnggcgggcaccgtggtngtgccgnncgccgacgccttctacctggggncgcccggcgccnncgtgctggccatcgaggacaggctttcctgggcggcgccacctacctggtgctnccccgtgngacccgcctcccgcagggcttacgaacgcgctgaccgccgcgtccctggnccgcgnctctcctacggcagcagngcggcccggaggcgggtccccggctcggcgtcgtcgcccgtccatcgcggngaggnncgcccggagccccttncgagtaccgtcaagggccgacngacgggcgcacnncgtcatcaaggtcacgncccgagttccctcgtcgggagccatcaccggcgggcg

SEQ ID NO: 7973 - DNA, 381 bp, Zea mays
  Clone ID: MRT4577_107268C.1
actatctaatcatcacttggacagtcagtctcgatggagcaaagtaaaagacagggtagaaagtgatccaggttacaaagcagtggatagttcatccatgagagaagacctcttcaaacagtacattgaaaaaatagccaagaatttagactcagaaaaagaaaaggagcttgaaaggcaagcccgcattgaggcaagccttcgagaacgagagagagaggttcagaaggctcgttcagaacaaacaaaagaaatagatcgagagagagaacagcacaaacgagaagaagctatccagaatttcaaggctcttctgtctgatatggtacgttcttcagatgtgtcctggtctgatactcggagaactctactggaagatca

SEQ ID NO: 7974 - DNA, 679 bp, Zea mays
  Clone ID: MRT4577_107269C.1
gccggccgggaatcgacggatacctcacccccacagcccccggtcgatcgctcggcaatcggcatggacgccggctcggtcaccggtggcctcgccgcgggctcgcacatgcgggacgagctgcatgtcatgcgcgcccgcgaggagccgaacgccaaggtccggagcgccgacgtgaagacgtgccgcgtgtgcgccgacgaggtcgggacgcgggaggacgggcagcccttcgtggcgtgcgccgagtgcggcttccccgtctgccggccctgctacgagtacgagcgcagcgagggcacgcagtgctgcccgcagtgcaacacccgctacaagcgccagaaagggtgcccgagggtggaaggggacgaggaggagggcccggagatggacgacttcgaggacgagttccccgccaagagccccaagaagcctcacgagcctgtcgcgttcgacgtctactcggagaacggcgagcacccggcgcagaaatggcggacgggtggccagacgctgtcgtccttcaccggaagcgtcgccgggaaggacctggaggcggagagggagatggaggggagcatggagtggaaggaccggatcgacaagtggaagaccaagcaggagaagaggggcaagctcaaccacgacgacagcgacgacgacgacgaccagaacgaag

SEQ ID NO: 7975 - DNA, 149 bp, Zea mays
  Clone ID: MRT4577_10726C.1
ctggcttcccatgcttccccagatagagttcgctgcgcggtaccgcccccggtcccctgtcacacagacgcagcatgtcggcgatgaggtgaggtataagccacagtctagtatctgcagaacgtcgctgtagccatcgcaacgatcag

SEQ ID NO: 7976 - DNA, 335 bp, Zea mays
  Clone ID: MRT4577_107270C.1
gagcgcaataccaaagtttctttactgctttgattgagacaaaacagatctggatattaacatttcattactgcccagaaagatacatcatgatcttgccttaacagctctgatagaacacaagaatccagggacttactaagcaggtgagagatattacaatcagctgactctatacatcaagccaaccaaggcagagggccctgtcgtttcacccccgccagacgttgcacaccagggaagagatgcactcaaccacccaacccgtacagagtgcggacatctcgctcgagagcgtacacaacatttatggaagcgacagtcttgcggcgagc

SEQ ID NO: 7977 - DNA, 179 bp, Zea mays
  Clone ID: MRT4577_107271C.1
cgccagccagccatcgtcacactggtgagctctgcactctgcttagctccgagcttcagtgccttcgttgtttggtccacgcagtccacacacacacaccagtacgttcaagttgacttgtaccattggccgcctccaaggtcaaggtcccaattgcggttccctcgaggaggttgccc

SEQ ID NO: 7978 - DNA, 306 bp, Zea mays
  Clone ID: MRT4577_107272C.1
gccggacgcacgcgtccgcccgcgcacgccgccaagaaggcattccctaagaccaaagctaagccggcaaagggcgagactgccaagaccaccggccggagcgccggccaaggccagccgccgccaagtcaaagaaggcagccaccgccaagccaaagaaggccgctgccgccgggaccaagcgcaaagtgcccgagacgaaggtcggggcgaagccaaagacaggcgccaccggcaaggccaaggccaagccgacgaccgcgaaggccccagcctccaagaaggcacggaaggcctccacatgag

SEQ ID NO: 7979 - DNA, 470 bp, Zea mays
  Clone ID: MRT4577_107273C.1
tgtggacgagcagcgtgggcgagaggcgaggtacaagcagcagcagtgcgggcatgcaaagagccagggaggcagcagccatgcgagagcgcatttctacgagaaatcgagttttgaccagaatagatcagatgcaagaagatattgaaatgaaattgatggctaccagaattcacaggaagaagctgaggcaggagtgcctgcggaaggggacggaactggcgcatggggtggctgacgccctcttcgctgtatcacccaccgaggacctcgacggccctatcgtacacctcccaccgcccgctgttcgactcccgcgcgagaagcatcttggtgctgggacctcactgccaggattccaggattagtagctgcaaaggttggggcagatgtaacactaacagacatgtgcctaaaatctatccaatgacactgatgagcgctatgtattgtgtactcatcaggttact

SEQ ID NO: 7980 - DNA, 183 bp, Zea mays
  Clone ID: MRT4577_107274C.1
cgacgtgcagacaaaggcagcacactcagctatccagcacaagagatcgagcggcaggagtcatggccaccgtcagcgccgccgtggtgaccaccatcgttgcccgcaccgagatcgccaagcccagtgctctagggctgcctgcgataagggcgaggagcgggagggtgcagtacagctacg

SEQ ID NO: 7981 - DNA, 429 bp, Zea mays
  Clone ID: MRT4577_107275C.1
ctattctctctgcatttcaaccttctgatcctcctcttgactttcctctcgcggcagatatataatgatctatattcagaccaggacatctacatgacactaacggaacgaagcactggactcctgatgctatgcatcctatgcccataattgtcatttatactgcactaaccgattgtcgcccacctacacataagtcagcagtgcacaaacgttgctcaatctatactcgcctgcagcatatacatactccattgctacgttgtctacctgttgatgcacctcatgacccaccctcaattacattagccaacggacgtgtaccactaatacaaatcctaataggacaagcacgtcgttatcagattgctcaacggacacttctggctcgaatgctacatcattctaataggcatgctgtaccagtac

SEQ ID NO: 7982 - DNA, 248 bp, Zea mays
  Clone ID: MRT4577_107276C.1
ccctaccctaccctcctcctcgatccatccaacacagagaacgtcccaaggttttttttcgatcccgataagcatccaagtgagaagatatgtcaaggtatcatctgaagcagttcgagaaggagcgcatgaagatggccatgctaaggcaagaagagacgttcaggcatcaggtagcagaccagcctccagcctcctaactcacgcgtgcgtttattctcaagctgcgcgcccggctcccgatccct

SEQ ID NO: 7983 - DNA, 448 bp, Zea mays
  Clone ID: MRT4577_107277C.1
aaaaaaagggcccccaatagccctaaaacttgaaaacaactgttttgccttaacgggggcccccccgagggggcaaatccaaaaaccgccctcagggccacccttagaaaaaaaaaagggggcaatcctggcttgggccaaaaaaccttgggaaacatccctcaattgcaaacggaaaatagttggtttgggctttaaagtaaggaaaaaatgccttcggttagggaaaatgcaaaaagcttactgggcggggggtttgctttttgctgaggggccacattggggaaaaaatccatggcctaaaaaacctttgatttgggggctttaggggactcaagcgggggggggaccttagtttgatccatttccaaaagctttccagggacctttgccgtttggtttggttccagttgctcaaccagggggtttaggttttcaccaaggatcg

SEQ ID NO: 7984 - DNA, 664 bp, Zea mays
  Clone ID: MRT4577_107278C.1
cctcgaggccggccggggaagttccggacagaggagccgactcctcgcgactcgcaccggtcctggactggtgctcctctcgcctcgtctcgcctcctccggagaacaagaggacgacagcgatctgagcagcacccggccgacgcgggaatgctcgtcaagggcgttggcctacgacaaggaggtgctccgcaagctccagagcatgaacgcgtaccagctggagaacggcatacgcggcgaccacgcgcacagcccgcaccccgtcaacatgaaccacctctgcaacgtcatgcccttattcatcgccaacgacacgatggacaagctgtacacgctgttcacctcccccaacctgttggtgtacctgacgcaggtgatcctacagtgcggaacgagcacgcgaacacgctgctcaacgaggtcaaggtcaccaccaacctcgcccccatcggcagggtcttcctctccgacgactacctcccccgctacctcgcgctcgacatcgactacatcgtctccctcatacgggatgttcctgctgacgcttactcgcgtggcgcacggcctgcaaccgccgcaatgacaagtgcatctaggcctgccatgaatcccagtactaccacctcgcgaaggtgttccgcggcttcgcgcctctgtcgct

SEQ ID NO: 7985 - DNA, 282 bp, Zea mays
  Clone ID: MRT4577_107279C.1
gtctaaccaaagggcattggcctcaaaccctgcatttggtttaggggctaacagagcgggtcagataatcttcacacacatgtaactgctggagatcttattctattatgaataagacacgagaagtttttccaaagtgttagtcaggatctgaaggctgtcattcagatagcccagcttttccttttggcttttagcccattcagactttgccagagtcaagccaaggattgcttttttgctacagttttcagccaaatggcctagtcctgagtactggaa

SEQ ID NO: 7986 - DNA, 417 bp, Zea mays
  Clone ID: MRT4577_10727C.1
atgaacaattgaaatgaaaagaaaaaagtattgttcattgaacgcgtagaccaacgatgctgggccaatatattatagtgttcttacacattaccgctgtctctggatgtcttgcttactgctataattatccctcattgctgacacgcttctattgccagcattttaggcagatacgatcccataaatgttagacctacggatttcaaaactcgagttcttcaatccctatttgcttcaacaagcaatggcagccagacacataccttgattatcctagcattaacaatcgccagtcctatttttgcagcacatattggtacaaactatacagcaacatgagctggagaaccttgttctctctgttaacaaccaagaagctcttgcatacatttatctatattcttagaaccatca

SEQ ID NO: 7987 - DNA, 403 bp, Zea mays
  Clone ID: MRT4577_107280C.1
cccggctcgacccactcgtcctatggcagcatggacgctaaattctacatacgacccgcactccaaattcgcctgctcaggtatcaccatccatcccgctagctactgcctactctcatcaacaacaacttcttccatttaaccaattgtccgcacttaaccccgctgcttatttgcatcatcaaatactactaccatttatccagctagctgcatcaagccgttcttccttctttacacatcatcagttgctgcctttctaccatcagttttcggctaacccctcaaccctcttacaactacaacaattgtttccctttgtccaactttcttttacaatacccatattcttctaccaacaacacattattttttattcccttatttatatttcttattattt

SEQ ID NO: 7988 - DNA, 194 bp, Zea mays
  Clone ID: MRT4577_107281C.1
agttatctacttactgatgttgctgcaaatatagccattgaatgtttacatcgtctacatatatttacacagaagcaatccgtaccatatccagcataaaccgcgcctaggatgacaccttatgtccatcatgcactggacctctgtgcatcaagagaggactcctcgtgtatacactggatctgaaagaacat

SEQ ID NO: 7989 - DNA, 293 bp, Zea mays
  Clone ID: MRT4577_107282C.1
aatgtgagaggcactcacatggttaagcaaaattaaaggcgcagtttgtgttaccaaatgcaagaaagaaagtaaagaaagcgctggcaagtgatgatgagactaaaagtgctgataaaagtccactatatcaagagtctgccgattgtagtttagcgacatcttctaatgatggtggtaatggaagttctagtgtgaatatgctacataagactaagatcatgacgcacctgaaaagcgtaagaccacgttcatggagataggatacaaggcctacaacaagcgtattggac

SEQ ID NO: 7990 - DNA, 733 bp, Zea mays
  unsure (1)..(733): unsure at all n locations
  Clone ID: MRT4577_107283C.1
cattgggtacctcgaggccggccgggatcatcaaatacatccatccatcatcgcacctgcaagcatcatcttcgagcagatcgaacgaaccccaagacacaaccggccgtcgactaccgcatctcgcgttcgcgatccaaacaatggcgcatcacttcctcggcaacaagcaccatggaggagaggcggcgaaggtgaccgactggcgcaaggaggagaagcaccacaagcacatggagcagctcggccagctcggcgccatcactgcaggagcctacgctatgcacgagaagcacaaggcgaagaagcaaggaccccgagcacgcgcactcgcacaagatcaaggaaggggtcgccgctgcagccgccgtgggcagcgccggctttgccttccacgagcaccaccagaagaaagacgccaagaagcaccgccaccatggacaccaccactagctagttactgacggcttccattttcatttgcagggcgcgcctggcaatctcgttcatacatatgcaccgaccgtcgatataattatctagcacttttaatatacaaataaatgaggtctccaatatgtatgcatatatcantcgtaacgtcgtcatagtatatattacctcattatgtttactatgtgtgttgaacaccantatatgatatctgtgaaggtcaacggtcccggttatagggggtccgaattgtccaaaaaaaaaaaaaaaaaagcggccc

SEQ ID NO: 7991 - DNA, 179 bp, Zea mays
  Clone ID: MRT4577_107284C.1
ctcgcgggccgacacacgcctcaaaattaagtcgtattagtaacatattttttaatagaaggccagggaaggtttacttagtgagcgtcaactactactgtgacagactagtttattcttatagaggcgccacttattttttgtaccttgtgtaacagggaataatacgtaaggattag

SEQ ID NO: 7992 - DNA, 289 bp, Zea mays
  Clone ID: MRT4577_107285C.1
ggaggcacaagggagctgcattacaattcctagaaaccatccagttccccagatcccagaggaacctgcgcatctgttcgcttcagctagtgttaaatctcatgctggagtagagataatgaatgaatgctcagatatcaaagaaaagatagttcttggaggttataagcaactaccagagagcactgtgtcacacagattgactgcatcacagaatatgagcagcggaactcttcccagtaatctttctgcatcttatgccaaaactcaaggatctgctggatcacac

SEQ ID NO: 7993 - DNA, 1435 bp, Zea mays
  Clone ID: MRT4577_107286C.1
ggtctccttgccgccgcccgggggtttgactattttgcccccgccgcgtgagttgccaaacgatttccgagtcttctgacactccttgccgccgccgccgccgcctgccgcctgctgccgacggcaatagatttggggatggatttgggctcgtgctacctcggtgggaacgccgacgcggtggagttctgtccgcaccgcccgttccgccacgtgctggccgccgccacctacacgctgcaggagcaggagcgcgaccgggcgggcagcatatccctcttctcagttgacgttgcctcggaggacgcgtcccggaggctccagctgctgcatactgtggagaccgccggcatcttcgatatgaagtggagccccaagtcgccgctgctcgcgcaggccgacgcccacggccgcctcgcgctccggcgcttggagcaggaggacgtgccggacacaggcattctcctcacagatgtctctgctgaagatatttttcagtgaatgagcttatattgggaactggaaccaaactgactgcacatcatctgttggattatcagatggctcactgtctctggtttcagtgagagaggaccggctggagatatcacaacagtggactgcacatcagttcgaagtctggacatgctattttgatcgtacaagtccacacttgctgtacagtggatcagatgactgttgtttcagttgctgggacttgagagaaagcccaccaaacattgtttttcaaaacaaaaaatctcataagatgggtgtctgttgtattacacagaatccgttggagtggaacatgctacttactgggagttatgatgaatttctcagagtttgggacatgagatttatggcaaaacctgtcaatgaaaagttgataaatctaggaggtggtgtgtggaggatgaagtatcatcctagtattgcagatgttgtattggctgcgtgcatgcacaatgggtttgccattgtaaaagtaggttctggagatgctacgataatggaaacatattgcaagcatgagtccttagcatacggtgcagattggcagaaaagtgaagaggtggagcaaaatggaaattcttcagttgttgctacttgttcgttttatgatcgcctcctccgcgtgtggcaaccagagaacctagctgagctttaaagacctaaagcttttttgaattgaattcaagcatgactaggccatgaatctatttcctgaatgaaccagtataatttcattcaggtagttctttgaacttatgcttacatattcaagacttcaagtcatgcatgagcttatagggactttatgtttattttcaattagtctcattgatatatttgttaccgacttccttaccgcaaaaccttgagttttccttttgatgccaagctattagaagatcttttgtgttggtct

SEQ ID NO: 7994 - DNA, 176 bp, Zea mays
  Clone ID: MRT4577_107287C.1
cgaaatgattaacctaactttcccttcaaaaactacataaaagggtgcttatacaatctatgccccttttctttttagagcttaagttttacgaggataaacagatatcgggggaagaatcaccccgggagattacctaaagggtggggtcaatcccttgcggacagctgaaaaag

SEQ ID NO: 7995 - DNA, 437 bp, Zea mays
  Clone ID: MRT4577_107288C.1
ggaaccgatgattcacacaattggtcatcacgctcggttcaaaagccagtgccgggaaactaccgcgcgcgggattatcactgaactcctctaagtcataatacaagctagcaaccacatcatgtgctcgccgcccgccccgacccacatcagggcgttcgcgccccacagtcacaagccattggctcaccccgcccggaacgaccacctcggcaaggctactgaatactcccttcccatctggcagggtgctgaatcctatgtagacgacttacaacacgactacacattagccagtggactagtgatcaacttatcaccattcactgtgattcagacatacatggctctgattcgcagatatagagtttctttccccttcttttttgttttcatacaaaataaaataaagctgctctaaagcaacgtgcggtttt

SEQ ID NO: 7996 - DNA, 133 bp, Zea mays
  Clone ID: MRT4577_107289C.1
cagacgcatgggcaacggacaccggagctcactcgaagacgctgtacgagcagcagcagcatacataatgcaatgcagctgagctggatcctccacctttctgtccataaatcagggcgtcgggactcgtcct

SEQ ID NO: 7997 - DNA, 763 bp, Zea mays
  Clone ID: MRT4577_10728C.1
cctgttcctttccttcccagggcccagcagcgtgaagtgaggccagctagccttatcagcctatggcggctcggattggagcggacgggaaggcgatggcacgccgcggccgcgtggagctgcggcggatcgaggaccgggtgagccggcaggtgcgcttctccaagcgccgctcggggctcttcaagaaggccttcgagctctccctgctctgcgacgccgaggtcgccctcatcgtcttctcccccgccggcaagctctacccgcgtggagctgcggcggatcgaggaccgggtgagccggcaggtgcgcttctccaagcgccgctcggggctcttcaagaaggccttcgagctctccctgctctgcgacgccgaggtcgccctcatcgtcttctcccccgccggcaagctctacgagtacgcctccaccaggcaaaaggcgtggtgcgtcacttatccattcaaacacaggaatttgttgcaatcacgggattgtagaagaaaactacaagatgtgatgatgctgatgctacataagtcatgctaaaatgtctcgtttattgaagtattgtatctcaaatatattattttttaatttctttatcttgtagtttatatttgagattttattattatatttagtcactgcacactctcattaaaagagtaacgacctttttggtgactaaagatgcttatgaagaagggagattgctattaaaaaaaaaaaaaagggcggccgcccgcgatctagaactagt

SEQ ID NO: 7998 - DNA, 341 bp, Zea mays
  Clone ID: MRT4577_107290C.1
gggtggtggttttttttgagcagaaaagctcaatcaaggagtgaaaccaagccattgtagaccttttcatccttctctcgggttgagtcgaagctacacctataaacagctggaaccaaaccaaaccaaaccaaaagttttcatgtgttattggagcggggggggttcactccatcccgcccagaactaaaaacatgcctagagaaacaaaaccaacgggggctaaatggtttattactatgatgggcaggggtcgggtacggaatcagggcgagggggggggggactggagacgatggcgtgaccgctgatggtgggggggggggggatgggaggggagg

SEQ ID NO: 7999 - DNA, 312 bp, Zea mays
  Clone ID: MRT4577_107291C.1
cggaccgcccggaatttcgggggccacacgccccgtctttggccgagaaccctcctggacgaggtcccttggcgaacgcccctagcgccatggtttaaagtcgaaatctcgtactgaagacctgggctccagcagggcacgtctgcgcccactggacccagcacaggatcaggaaagaggagcgcacttggacctgggacacgcacgctcgggacgacaaccggcaccagtggaggaagtacggcgagaagaatcgcttcaactcccacttcccaagggatctactacaggaggcacatacaagaacgacat

SEQ ID NO: 8000 - DNA, 1591 bp, Zea mays
  Clone ID: MRT4577_107292C.1
ggcgacatcttggttcccctcaaagatccaagctccccacccttcctcatggtcatggcggcacctcgtgttctagttctgccttaccccgcccagggccatgtcatccctatgatggagctctcccactgcctcatcgagcacggcgtcaaggtcaccttcgtcaacaccgaggtaaaccaccgtctcattcttggtgccttggcgaccggagacaaagaactcggcggggtcgacatggtgtccataccggacggcctgggctccggcgaagaccggaaggacctcggccgtctcaccgactcgttctccaaggtcatgcccggcgagctggagaagctcattacaagcatcaacgccgatggacgagagcgcgagaaggtcagctggttgatcgccgacgtgaacatggcgtgggccttccctgtggcgaagaagcacggcctccgaaccgccgggttctgcccatcgtcggcggcgatgttcgcgatgaggatcagaattcctgagatgataagcgacggcgttcttgacgagagaggctggcccaagcggcgcggcgcgttccagttggctccggcgatgccggccatcgacacttcggagttctcgtggaaccgcgccgccgacgccaaggggaagccgatcatctttcagctgatcctccggaacaacgcggccacgcacctcgccgagaccatcgtctgcaactccatccaggagctggagcccggagccttggcgctcgtccccgacgtcttccccgtgggcccgctctcctccgacaagccggtcggctgcttctgggccgaggacgcctcctgcgccgcgtggctggacgcgcagccggccagctccgtcgtgtacgtcgcgttcggcagcctcgccgcctacgacgccgcgcagctagtcgagctggccgaggggctgctgctgacctcccggccgttcctgtgggtggtcaggccggggtcggcgggcgagcagcaccttgagcagctccgccgccgcgccgcgccgcgcgggcgcgtggtgagctggtgcccgcagcagaacgtgctggcgcaccccgcggtcgcctgtttcctgacgcactgcggctggaactcgacgatggaggcggtgcggaacggcgtgccgctcctgtgctggccgtacttcaccgaccagtttctgaaccagagctacatctgcgacgtgtggaggacgggactgaaggttccattgccgccagggacggcgcacggaacgggactcgtggggagagacgttgttcgggacaagatcgaggagctgctccgtgacagtgagacgaaggcgagggcgctcgcgctgcgggacctcgccagtcgggcagtcggcgatggaggttcgtcgcgccggaatctcaggcagttcttgggccttgtgcgaggatcggagagctaaagctgcaattttggggctactgttgtgtttgcgaatcgcgatgccaggacaaaggtctgcaccctgcagtctgcaccgtgaaaaatcctgtttcgatgttctgaaaaattgaaaaacatgtacaatatatcctgattggaatcactacaagcatctttttttc

SEQ ID NO: 8001 - DNA, 278 bp, Zea mays
  Clone ID: MRT4577_107293C.1
atcagataagatttttcatctacacggcgtgactcgtttcattcaaagccaatgctgaagcctgaagctaagcacagccaaatcctaaactgttggtctctcatcttttaaacctatccttttttcttcgtgagatggtaatgactattatccatacggacaaaccacttcgacagatctggtatagtagtagacatagcgttaatagggcaaccattgatcgggttggttctctgaaacctttttagtcatcatgtgctgcttcacagtagctgaag

SEQ ID NO: 8002 - DNA, 854 bp, Zea mays
  Clone ID: MRT4577_107294C.1
cccgacgtccgcctcgcgtccgccagacctctcccccccatccgctcctctctctccatgcactcactctcgtcactgagacagtgagactagcaaggctatcgcctagctactagctagctcgtactggagcgagcactgtcagtaattgctcgtttcaaggaaccgacctgtgccaatcaagtagcagtgccagtacgtcgtacggttagctcttagctacctcctgcgtgtgtgttcgcgatggcgtcggagtgggaaatggccgccatgggggtggagctcggcatgggaatgggcggcacgtaccaccacaacgcctccagcatcaccacggcgccgacgagcagccaccacagcggcggcgccgggtactccgcggcgcaccaccaccattactacggcatgccgcccgtgggcggcgacgccacggccatgcgcgtggacgaccttctcgagaatctcgacctctccaccggcgctggcgcccacgagttcttccccaccgcggctgctgccaacaagggacaccaccactcggggggcgccatggtcggtgagccgtcgcccacggccaactcgtcggaccaccagacgtcgctcctctccttcgccgacgagttctacatacccagcgaggaagctgccgagctggagtggctgtccaagttcgtggacgactcctactcggacatgccgaattactcgtcggccacgcacgccgcaatggcagcagcggcagcggctgcgaacaccgccggcactggagcaggaggcacctcgggcggccaggacagctgcgccgccgcggcgcccggccgcggcgcgcgcagcaagcggtcgtcccgcgcggc

SEQ ID NO: 8003 - DNA, 129 bp, Zea mays
  Clone ID: MRT4577_107295C.1
tttttttttttttttagagtgagatcagcatgatgatagctatcgcataagcacgctacagagagggatggcagaggaggctctattcagatgcacctcccactcaagcaccacagacagagctactcc

SEQ ID NO: 8004 - DNA, 164 bp, Zea mays
  Clone ID: MRT4577_107296C.1
cgtgaattcggctcgagccgagtttgatcgctaacgttgcaaaacaggggggacagcacgatggaccgggaagtttaacggattctatcggagactttcttaggtgcatataaaataaacgtattgacttcagcggtcctctatttttaccaccctacagtcca

SEQ ID NO: 8005 - DNA, 263 bp, Zea mays
  Clone ID: MRT4577_107297C.1
ttttaatatttaaatgaacattaacctacagtggggggaatttttacataaaagagcattaagcttatcacatcacagagtgatggacatgcacagtacacctcaacttgacagcttaagtcaaaggacgattgcaaacgcacgcaagactagtgccttcacaagccgttcgccggggggttggccctaacccacacctgaaacttggcgaaggcttggaactcctggaagtttccatccaccagtccgtatactcctgagca

SEQ ID NO: 8006 - DNA, 160 bp, Zea mays
  Clone ID: MRT4577_107298C.1
acttttctttttgggaggagcgacaaaagggacaggtgtttaccaccacgccgcccctcacttgactaaaaaccctccatagcccctcatctcatctatgctctactaagcagataactttgcatggactacccaacctttttctacttctcctggacca

SEQ ID NO: 8007 - DNA, 536 bp, Zea mays
  unsure (1)..(536): unsure at all n locations
  Clone ID: MRT4577_107299C.1
actctggaccgagcgagtcgagtagcagccctcatgcacgttgctaggagcagcagccgcagcggggatggcctgctccatgatctcctgcgtcagcactggcggtggcgtcctcatgcgctggcagtgcctcctccgacgagcctatttcttccgcgtcctttgctacacgaacaagatcaacaagcgaagccctacggggatnggccggaggcactgacacgtctgacgtgtgacgcaccacgtggagaaagggcgaggccaacgcaacttactacgtcgctgacacggacgcggcgaacgctgacggatacaggccattgtacaaagagaatgactgggctcccagcgggcacgccaactgctgaggaccactgcactctcgatctggccatccgctctatgccatcctcggagaaggccctctccttgtatacaacacgaatgaaggctgcggctaaggatatccaatgcaagctgttcttgcgagagctcatgataaacagggtgatagagtatacatggagtctccatgg

SEQ ID NO: 8008 - DNA, 120 bp, Zea mays
  Clone ID: MRT4577_10729C.1
gagcaataatgctttcggatgcattattacttcgactacacaagagaacgggctaggtaagagaggaatgtgatgcagacccactgccaccctatgctacactaccaggcgcgtaccgac

SEQ ID NO: 8009 - DNA, 786 bp, Zea mays
  Clone ID: MRT4577_1072C.1
ggcgattgggactctcgaggccggccgggattttccatctctcaacaatcaaagactttaccacagaaattatacaacaacatccaacatggcctctgctactagcttttacgactttaagccgcttgacaagcgcggccaggaggttcccctcgccgactacaagggcaaggtcgtcctcatcgtcaacactgcctccaagtgcggcttcacccctcagtacgccggtcttgagaagctctggaccgacctcaagggcaaataccccgatgactttgtcatcctcggcttcccctgcaaccagttcggcggccaggagcccggcaccgacgatgacattcaggagttctgccagctcaactacggcgtgaccttccccatcatgcaaaagaccgaggtcaacggtgacggcaccaaccctctctgggtctggctcaaggaccagcagtccggtcttctcggcctcaagcgcatcaagtggaactttgagaaattcctcgtcggccgtgatggaaaggtcaagggtcgatgggccagcaccaccaagcctgagagtcttgagaagcctattctcgaggcccttgctgagaagcctgcggcttaaggatcatgatgaacgacgaaacaagaaaaatgcgtctttgtcaatccccaccaatctaaaacgagatacccagttggggaggaacaagggcgtagtgtgtaatgagaggcttccagactcatggaaaacagctaaataattaatacaatgatcagtcataatctggtcaatatttggtgccc

SEQ ID NO: 8010 - DNA, 123 bp, Zea mays
  Clone ID: MRT4577_107300C.1
gcaggcattacaagtaatctgttttgtacataaatgtgccaacagcttgatggtggcgtttttgaaatgtagaacaaagtgcttgcacaatgtaataaatactcttgtgtactttgtgtatct

SEQ ID NO: 8011 - DNA, 418 bp, Zea mays
  Clone ID: MRT4577_107301C.1
cgggcaccagcagactgattacgtctagaccgctttgtgcttagaactctgtttcttagttgatcagctcactcaccattcatcctgatgtctggtgactacccttatgaatccctttccttctaccatacgacagcatgaaactctcctgcttatttagctgcatcatcaactactaccatacagccagatacctgacgtgagccctgctacgcttgttgacacatccacagattgctgacgttctaccagcacgctgcgcctatcgctggcaccctcttacaactgcggcacttgctgcattcacaccactttgctgtgacaacacccaacatgatgtctagcaactacccattattggcgcgccctcttttagatttcttatgagttatagctcaataacagagtgatatgtctg

SEQ ID NO: 8012 - DNA, 218 bp, Zea mays
  Clone ID: MRT4577_107302C.1
ggacgtcatcttcatctccacgctacgctgtgggtgtggctggcactggcacacacagtacagcttcatcgccacttaccaccgtctaacgaaaaagcatcgacgagcgatcgtaaaagatgccgccagctctgctgcgaacgatcctgctggccgcggcggctgcgacgactgctgtgctgcggctgtgaccggccgtctgcatcgcggacgacgat

SEQ ID NO: 8013 - DNA, 403 bp, Zea mays
  Clone ID: MRT4577_107303C.1
gggatgcgttggccctaaacgtgggcatgggtttcagaaggtgctgccgacgggtcaacctggcggactccatcacgaatgctaaggccggcctaattgttctggagaatgtggaaacaaagaaaattgttcttgctcatggagaagggttcggcgcttggtgttggtacaagaccatctgacacttggaggtagctggtatagatcctgttgcctacgaactcacactgctctggcatagacgatgctgatacaaacaggatagctacggtagcagattactacaagccattgcttgattacgtcgacagacttgctgaagatgagaaggtgatgttggtcggccatagttgcagaggtgcgagtgtcttgtttgcactgaggcaggacccccctaagatct

SEQ ID NO: 8014 - DNA, 267 bp, Zea mays
  Clone ID: MRT4577_107304C.1
aaggattcctccgggagccgggctgctcctgacgcataggcaactttgtcccgacgctagctgtccggagtagaaggcttgaagaccaatgtggtggcgtggttgacggcggctagcgttagcttcaacagctacaagtccttccagatatgcttcctcgccggtgtgaagaagctgaggctgatggagtcttatgcacgctcctcggaacccgcctctgttggtgagcactgacctctattggtcttccttacaagggatgtcatt

SEQ ID NO: 8015 - DNA, 380 bp, Zea mays
  Clone ID: MRT4577_107305C.1
cggatttccggggggttcctaaaccatggttttgggcaccaaaattggcccccaaccggtattttgtccgtccatggccatagcgggggtggctgggtcctctaccattagggttaggatggaaggggggaaagggaaaaggggcgcttgcctgtggggaatattatattggggccctccttgggccccaccattgtggccattaacgccctactttattatctggtttggttttaatctggggccagccggtccattgtttgtccccagtttggtgttaaaaagtccgcaaatcctgttggtggattgggcggcgttccaaatttggtttttttaagtaaacccggttgccggtattttaatttcttcgtttacttttt

SEQ ID NO: 8016 - DNA, 1040 bp, Zea mays
  Clone ID: MRT4577_107306C.1
gccggccttcatgggatctgtatttcccacctccattcacgcatcacaagctggaaggcactgtgggcaataatggctctgctcacgctccagcagccagcgatacccttcctcctgctcctcctcctgctccccgccgcgtccgctgggctgcccggtggccggacactggtcttcatcctggctgggcagtgtcgggcccgcggccgcggcggcgccaccaacggcacctgggacggcatcgtcccgccggagtgcgcgccctcggaccgcatcgtccgtctctcccccgcgcttcgctgggagcaggcgcgcgagccgctgcacgccggcgtcgacgtgggcaacgttctcggcgtcgggcccggcatgcccttcgcgcacgccgtgctcgccagcgagggcgcagccgcagagccccccgtcgtcgtcgggctcgtgccgtgcgcgcagggcggcacgccgatcgccaactggtcccgggggacggagctgtacgagcggatggtgacgcgcgccagggcggccgtggccgagtgcagcggacgcggtcacctggccgccttgctttggtaccagggggaggcggacaccatgaggcgtcaggatgctgagctctaccagcggcggatggagactctcgtgcgtgacgtccgctgcgacctcggccggcctgacctcctcgtcatccaggtgggcattgcaactgcgcagtacaatggcaagttcctcggcgtggtgagggaagctcagaaggcagtgaagctcccaaatgtcaagtacgttgatgccatggggctgcccatcgcgagcgaccacacgcatctcaccacggaggctcaagtccagctcggcaacaaactagccaagtcgtatttggaaacgctgtaattttcaaataccggtatgcctaccaaaaacaaggcattcccccacgatttggaaacggacagagcaagcaatatgtacactcaaattacgatgctgcgttgagattaatattttccgtgctattgatttttttttaaaaaaaagcggcc

SEQ ID NO: 8017 - DNA, 287 bp, Zea mays
  unsure (1)..(287): unsure at all n locations
  Clone ID: MRT4577_107307C.1
gggggggggtgtggggggtttttttttttttttttgggtttttttttttttttttttttttttttttaaagaccctcattttttcaaaacattcccgacgaaccaggttccagaatcaaaccccttgcccccaccaccaaaggacctaagcgggtttgttgggggctttaaatttaaaaaaccttttcctccctacttncctaacacagataatcaccggtcgnttcaccnntgccggatggcggggggcggggggaataaaccccctggcaccggggggtttcccc

SEQ ID NO: 8018 - DNA, 572 bp, Zea mays
  Clone ID: MRT4577_107308C.1
gggggggtttttttttttttttttttttttttttttttttttttttttttttttttttttacccaattccaatcaacccctggttaaaaaacagggaaacaagggaaggaaccatggccttggggaagagaccaagggaaggacagatccggggggggggggggcccccaagacaaaaattcccaattcttcctacttaacgcaagggtggtcaacacctggtgcctgctggacggacacaattacagattacctggctggaactggtccatctggacgggggacgcctttagcgggacggagtcgccgagggaaaccccgaggggggcggagatgttggccttggcgaggctctcggggggggagctcttgcacacgagggaaaccacgggctgcgtgacgagcgcgagcatgacgacccagcaaagcgcggggagcatgaagaggcccaacaagagccttgacgacccggggccggatcccctgacgacccaggcgcggaagccgagctcgacgggggcgaaaacgacgttgagcgtgaagaaaaagcacccgcggtgacgagcttcccc

SEQ ID NO: 8019 - DNA, 269 bp, Zea mays
  Clone ID: MRT4577_107309C.1
cggacgcgtgggcggacgcgtgggcggacgcgtgggcggacgcgtgggaaattaaagtatgccaggttctcgaaaaggatgtcagtgtattatgggtctatttggtaggatggctagaaacccaggctggaaacgccctggctagaggaagcaccggaggtttgtttgattgtagctggctaaaggtgacgcacaactctaactgctatttggttttcctggctataaagtctggccaaaggtggtgcacaattctaacaattgtttgg

SEQ ID NO: 8020 - DNA, 129 bp, Zea mays
  Clone ID: MRT4577_10730C.1
tattaacgttggagccatcagagaagtaatttaagagaccgggattgatgcagtatttgtggaagtgctggccttcaggcactgccgcaaagctgtttttgattcatcatatctatcatcatagtgcct

SEQ ID NO: 8021 - DNA, 359 bp, Zea mays
  Clone ID: MRT4577_107310C.1
aaaaaaaaagaaaaaaaaaaaaaaacaaaaaaaacaattcaaaaatttaacaacaaaaaaaaacaataaggggggaagggggaaagtatacaccattgtgttggccccttttatgacaccagtttctttctttgtgtactgcgcgggctcctgtctattggggggattttaggttcttttccgggctccatcctttgaagctctggcctggctaatgacttggaccaccccttttgtctgtttggtgaaaattcctctttattgcggccttgttagaacctcctaggccctgtgcactgctctgccaaatggtgcccctttttgattggcttttgtagccccccttttggtgggttttt

SEQ ID NO: 8022 - DNA, 444 bp, Zea mays
  Clone ID: MRT4577_107311C.1
aaacccggccgaagcaaaggacacgggctgggaaaggggaaaaaccaaccggggcgcaagaaaaagaacaaaaacccacaaaaagggggagggggggggccaaaaacgacaccccggccccggggaaggggcgaaaaaaacggcccccaacaggaacaaaacaaaaagggacggggggagaaaaaaaacccagggggggggaaaaaccaaaccgccggggggccggacaggaacctccaagaggggcccgggggggaaaaaaaaaacaagggcactgggccatggacgcgggggggtcacgcccccgggggcacggaggaagccaacaagaccactgaaccaactggcaaaccaaccgaggggaaaagccccccacttaaccaaaggaaaaaaaaatgggaagcaaacccaggggacaaagcgccccccacaatcaccaaaacc

SEQ ID NO: 8023 - DNA, 441 bp, Zea mays
  unsure (1)..(441): unsure at all n locations
  Clone ID: MRT4577_107312C.1
ctgcagtacctntccttaattccctgggggacggcctctttcgnttattattttttactttctatgacatacttctttctttagatatcttaacctcctggggagtacctaaccagggatggaaggagctcattctcatgctcattttcatgctcactcatctctcttcttaccccttgcctttcactaacgcgctcatccacacctcttttatttctgacgccttctcaaccattctcctactcctcatctccgatcttcgccccatcacccacctgccttctctcactttcattcttctccactcccatattctctccctttacattttctctaacctatccctttttttattccgctccatttctctttttcttctttaccttcactcactttcttttcacgccctcctccctgaacccttccacctcatctttcctt

SEQ ID NO: 8024 - DNA, 512 bp, Zea mays
  unsure (1)..(512): unsure at all n locations
  Clone ID: MRT4577_107314C.1
ctggaatttatgcaaataacaaaactccaggtgacgttgaggaaaatcttttgacttgtttggccgacctttttatgcaggtaacatgtagataggattataccaaatgatataaatgactctagagtgtcataatttcttgttgaattttgacttttttgggtatcacttggactagaggttgaaacagtgggggcataggttaacagctgtagtgctatatctgagtttcatgtggtacaagtgtacaaagaatgtatattttgtcttgctttgaggtgatgatagtcatgtagagtttacccactgtaaatgaaataaatccttctcattttctctatatttttatatgagcttattanttctcgttattggcagatacttttttggcttaaatatattaagagtttcaaaatctncaattttttggccctttcctgatangatatatgctggattcctgcttactaactntnggnaagctgattcaagtnctaaatataacaagggca

SEQ ID NO: 8025 - DNA, 624 bp, Zea mays
  Clone ID: MRT4577_107315C.1
ggccgcttttttttttttttttttcttttttttttttttttttttttttttttttttttttttttttttttttttttttttttttttttctaaaccggccacaccgtttaaattcgggctcaaagggctaagggggggcccggcttttaaatagggggctcaaaactgggggaccaattataataacagggggcccgacccccggggcacattgccgcagaaattctgggcgataacaaaaccccaacccctccccacgaggacttaaaagccgccacccgactggggggggccaaccctcggaacccggttgttaacggcaaacccagccccgaaccgcggaaaaaccctggccttaaccagcccctttaaaaaggggacgttttcccccctctcgccttggccccaggcaaaaggggccgagggctctttgccccggttaaatgacggccaaaccggggggttaacccttcgaaaggaaatgccatggacccgagacaaaacggggctaaacccgggccatggggttggaatcacgggggccccaaagcgaaagatgccccccgcgccgggcaggtgggccactatgaccttaagaatcccaaaaaggcccacatgggtgcc

SEQ ID NO: 8026 - DNA, 329 bp, Zea mays
  Clone ID: MRT4577_107316C.1
agatcggcggcgcgggcggacaaggagcaggcggaggaggagttgagccaagccacaatgggtatctcgcgtgactcgatgcacaagcgccgagccaccggaggaaagcagaaggcctggaggaagaagcgaaaggatgagctcggtcgccagtcagtcaacaccaagtttggaagcaacaagacagtgaggagggagaccgaccggagaggaacctaacacggtaatagaaacagttccttcaatgtcaaacgctgctcccatcccacctattattaaagctaaaaccagcacctaatactccaattataccaccaattaagccctaa

SEQ ID NO: 8027 - DNA, 241 bp, Zea mays
  Clone ID: MRT4577_107317C.1
atatatatgtttattggttttcataacatgggaattgatttcccaagaacatgggacactatttcatgacaagaacctatatagtccatcgcctatttcaaacattacaaaaacaggaagacagagctccattcaggccctttcgccccttatgcggcacgctagctgaatttccttgggcatgatagggaccctcttagcgttgatggcccaaatgttggtgtcctcaaaaagacccacc

SEQ ID NO: 8028 - DNA, 334 bp, Zea mays
  Clone ID: MRT4577_107318C.1
caagttcttgaagaatgaaatcgacataatagagaacgttgccgtaagcgctactgacgaagcgcgctcgcatgctgctggtgaagcctgccccgcgagatctctggcgaagtctggccgaagccttttcgtgcatatacctggccaggcaagcggccagactaaagaaagcaacaaatcatgcctttgtagatccgagcggccaggttggaaagaaagccaccaatcacgactgtgtagacgagattccctccacacgttattgcctgccttatgtctatagtgcgaatgccatatttaccttcgtaattctagccgaggtggatccctttct

SEQ ID NO: 8029 - DNA, 327 bp, Zea mays
  Clone ID: MRT4577_107319C.1
gccttattttttttaagattacaggaagcaacctttggctctcaagggattggtgcggtaacactatacagcggacatgaatacccatgatccccatcatggtcaaggccttatcctcttactcttctacggctgctacagcagcatgtacttgaatgttgtcgatgttcaaccctttatcttatcctacacaactcacaattttctattgtggatcagaatgtttgtatgactcggtttcaccacaataggctaacgcatttattcttatatctccttttgcatcaagctgcttcagccaccatagccatttctgccacttttttt

SEQ ID NO: 8030 - DNA, 169 bp, Zea mays
  unsure (1)..(169): unsure at all n locations
  Clone ID: MRT4577_10731C.1
gtgcggcgctcgagggcggcgtactgtcatcctgcatcctatcnnttttaccaaaagaggcaggagagcttctccctctgggtgcttcttcctcactgtgccgcgagggaggcggctcccctccatgaaaagaacaaacgagagcgtctccattttcccctgatccatg

SEQ ID NO: 8031 - DNA, 339 bp, Zea mays
  Clone ID: MRT4577_107320C.1
ggctaacctccaatggacctggaaccagcacgggggggcctaaatattagggcgggccggtaaactccaagtttttttttaatttaaaccaatttgttaccgtacaaaagtggtttaatggaagtttaatggccaaaattggttttaaagtaagttttagaaaaaggccggatttaccaattgtgggggaaagggagaataccaaaggtttgaccatatttatattgcagaaaattatttatgggggcaaaacataagagataccccgggcctttacactaccaccaactttttaaaatttgggcctggtggacttttttaattttgcggtggtttttt

SEQ ID NO: 8032 - DNA, 476 bp, Zea mays
  Clone ID: MRT4577_107321C.1
cgtggttgaaagcggcgagcgaataacaagatgctggactatctgtgggacgacgggttggccacgcctcgcccggagacgggtctcgtgaagttccgaacggccaccaccggccgggcgctacgaattaacaaaagctctacagcgaccagaccaggagcaaccaccggtagatcgggcgagatggacggacagtgaagagggcatgttcgctggtccttgtgggaatagaaaacgcacgcacgctctattatagctagtgatcactatatatatacttgcgtttgcggaaggccgtactagttctgctggcgtctccgccggataatttgacctatgccgtggagtgagtgatataagtgccgacactgctagtatatagtagtgagtgactaggctggatgaggcacactgctctaccataactccatatgccatgcttgccaggtcggaaggaatgcaatgccagcactggt

SEQ ID NO: 8033 - DNA, 384 bp, Zea mays
  Clone ID: MRT4577_107322C.1
aacattgccctcaaaaggccaagaaaccctttttttttctgtcgcgaactcatcatttcatttcagaaaccttaggggggcgggctgacctcttgggaaatctaaagggggggcccccccatggtggagcggtttttaaaaaccggggggttggcaaaaaaaaaaaggggggggcgcccccacatttgtgggggggaaaaaggggcccgcgtttggcacaacagggttggaaaaaggcaacaacgggttttgtttcaaaaagaggaccggacaacacaccaaccgggggtataaagaaaaaaaattgtggtggctaaaaaaagaggggaggcacacccctcttgttgggggaaatgaaaaaaatcttttggcggacccaagggg

SEQ ID NO: 8034 - DNA, 672 bp, Zea mays
  unsure (1)..(672): unsure at all n locations
  Clone ID: MRT4577_107323C.1
gttttagttcaaaaatagtatattattaaaaaagaaagagaacttgtaccgagagaagtgaaaccaccaaagggcagagaaataaaagaagtaaggagaaaagaagaaagagagggggggggggggcgtagagagaacttagccataaggatatttgcagtttgagatcctggctaaatctatacatctgaagcttcagcgtgttgttgaagcagactttccaggacgaaaacgaaggggcctcctcctgaaagataaaagcatttctttgtttccagatttcccaagctgctatttgcacaacaagtttagtaatatgataggaggcaaataagttttgtctggaataaagctcctgttagccatgtaaggcctttcacttctccatgggacagctcatctgagctccctcatgcaaaggaaataagagaggtgtcaacgaaagttgggacaattactggacaggttcatttggataaatcttacgtgtccaacgctattccatcacttacccatggcaaagatgagccttggccaatgaaaggtccggacatgtctatagctgcttcaaaattcgatggagcaccggatcttcagcgtgctctctctcttctgtcagttggcgcctgcggattgcccgatcctgtacaccaaaatncttgcgttatccaa

SEQ ID NO: 8035 - DNA, 2256 bp, Zea mays
  Clone ID: MRT4577_107324C.1
ggctaaatctatacatctgaagcttcagcgcgttgttgaagcagactttccaggacgaaaacgaaggggcctcctccggaaagataaaagcatttctttgtttccagatttcccaagctgctatttgcacaacaagtttagtaatgtatgtatcttgtcggctccaactaggattatcgtgcttcagttgtattattattttaccttgttacctcttatttataaagttaaatgttcttatccctgaacttctctgccactgcagatgataggaggcaaataagttttgtctggaataaagctcctgttagccatcctttcacttctccatgggacagctcatctgagctccctcatgcaaaggaaataagagaggtgtcaacgaaagttgggacaattactggacaagttcatttggataaatcttacgtgtccaatgctgttccatcacttacccatggcaaagatgagccttggccaatgaaaggtttgatttcccaaacattattcttgcctgctgcagaaatgtgttcatcaaggaagtagctgttatttgctttgttaaggggttcaccgtatttgttgacaaagggttgcaaagaatctctggtgtagttgaaacttacctaaaacatcttggacagttgacacaaaaggaacctttaagccgttccctcatatctacaaagttttgcagacatggggaagctgattattattaaacgggtactttgaattttttgcagaagcttgtgaacttacaagtcaaaatatttttgtagttcatatgatttagcctacatagaatgtatggtggaacaaagaatgccgaactccttgccataactacattcatactgggcagctgtatgttttgttgtaggtggcatgattctttagtcagtaaatttactcccagaaaaagaagaatactacaagaattggaccatcggttgtaatcccgtattagtctaggatccaaacacttgattatgttagatttaagggagataaaatgctgcagggactgataccattttctccaaaatggtattcggactttgttattagcgatgatgaattttgagtgccaggaaaaacgtttttctatcaatgtcagatttagtagcttttgtttgtttgtttagtttcacctattctaggtttctgaagttctagaccactgttgagatagttactccatgacccgcttatggatgacatataaacttcatttttcttgctagaaattactaataaactgcaggtccatttgacactcatgcacacctacatttttctattctagtgaccaatgtaataattctgagcatcagagttagaaattgtaattgactgttgtacagtcctgcttgtttttcatgctagttcgttgaaccatgtgatttcgtttgccatgttgtgcctgcaacttctgcatattgatgttatttgttgtcccgacgggtgtataacatagtctgaacgattggttgtacaggtccggacatgtctatagctgcttcaaaattcgatggagcaccggatcttcagcgtgctctctctcttctgtcagttggcgcctgcggattgcccgatcctgtacaccaaacatcttgcgttatccaattcactggtgccagcgagaacagtggcgaccttcatctatcacatggagcgaactctggtctagcgtcatgcggtgatggacagcatatagcttctcagcctcaggctcagctggttcgttttaccatggataccagcaatagtgtctatgagcccagtttcttcagtgtaaaccagataaattaagcgttgaagacacacgccacttggtcatttggataaatagccctgaagatggcctgagcctgtgcaagaagttcttcaaccaaccaccggacataaggatctatctgttaatgttatctgtgtatttattagccatacctgaattaagttgaacccaatctaggccagcttatgtgcaatatgcagttccaacctgtgattgacccattttttctgttgtttctttgcccgtgatgtgactgctctggaacttaagtgtgatactgttgtagttacactttactgccctgacaatcatgtcaaacggctggatatctttgaaactgtccttgatgaatctggacgtgtattttgtgtgtgtgtatatggtttttgcttcttcaatgtttgtccatggaatatatatatataaaaagctgttgcatcaatactgaaaaaggt

SEQ ID NO: 8036 - DNA, 1958 bp, Zea mays
  Clone ID: MRT4577_107325C.1
tcttactgtatgaagtttttaggcatatatatctcctgtatgggagtgggacatggcaatgaaccatgagtaggacctatattgtttttgctttgcttgggttcttgtaacccagatttcatgccctgtcagagtttgatcagaagaagaggagctgcaggaggcgtctgtctgatcacaatgcccgccgccgggggcgggggccagatgcattcgcctttgcctctgcaaggctgccttcgtcgtcgttcgatgataggaggcaaataagttttgtctggaataaagctcctgttagccatcctttcacttctccatgggacagctcatctgagctccctcatgcaaaggaaataagagaggtgtcaacgaaagttgggacaattactggacaagttcatttggataaatcttacgtgtccaatgctgttccatcacttacccatggcaaagatgagccttggccaatgaaactcccccgcacctccctccgatcccccaaatcccgaattgaccaacccaaagccgtcgccccgcatggagtggacggccccgaagcgcgccgcctcgccgccctcgcctccgctcctctgggactggggaggagaccacgccggcgccacgggctcgggctcgggctcctccggcgacgccccggcgcggcgcggcgggagggagcgggaggcgaagcgcgccagggccgacgacggcgaggtgaggtgccaggtggaggggtgcgggctggacctcagcagggtcaaggagtaccaccggaagcaccgcgtctgcgaggcccacaccaagtccccccgcgtcgtcgtcgccggtcaggagcggcgcttctgccagcagtgcagccgatttcatgccctgtcagagtttgatcagaagaagaggagctgcaggaggcgtctgtctgatcacaatgcccgccgccggaagcctcagccagatgcattcgcctttgcctctgcaaggctgccttcgtcgtcgttcgatgataggaggcaaataagttttgtctggaataaagctcctgttagccatcctttcacttctccatgggacagctcatctgagctccctcatgcaaaggaaataagagaggtgtcaacgaaagttgggacaattactggacaagttcatttggataaatcttacgtgtccaatgctgttccatcacttacccatggcaaagatgagccttggccaatgaaaggtccggacatgtctatagctgcttcaaaattcgatggagcaccggatcttcagcgtgctctctctcttctgtcagttggcgcctgcggattgcccgatcctgtacaccaaacatcttgcgtcatccaattcactagtgccagcgagaacagtggcgaccttcatctatcacatggagcgaactctggtctagcgtcatgcggtgatggacagcatatagcttctcagcctcaggctcagctggttcggtttaccatggataccagcaacagtgtctatgagcccagtttcttcagtgtaaaccagataaattaagcgttgaagacacacgccacttggtcatttggataaatagccctgaagatggcctgagcttgtgcaagaagttcttcaaccaaccaccggacataaggatctatctgttaatgttatctgtgtatttattagccatacctgaattaagttgaacccaatctaggccagcttatgtgcaatatgcagttccaacctgtgattgacccattttttctgttgtttctttgcccgtgatgtgactgctctggaacttaagtgtgatactgttgtagttacactttactgccctgacaatcatgtcaaacggctggatatctttgaaactgtccttgatgaatctggacgtgtattttgtgtgcaaaaaaaaaaaaaaaaagcggtctgttgcttcaaaactgccatcattaaaaaatttgaaggacttc

SEQ ID NO: 8037 - DNA, 821 bp, Zea mays
  Clone ID: MRT4577_107326C.1
ctcgaggccggccgggacagtccacactgttcaccacctctcccatcctctcttcgatccccaaatcccgaattgaccagcccaaatcgtcgccccggcgcatggagtggacggccccgaagcccgcctcatcgcctcccctcctctgggaactggggagaccacgccgccacgggctcgggctcctccagcgacgccccggcgcggcgcggcgggaaggagcgggaggcgaagcgtgccagggccggcgaggaccgcgggggaggtgagctgaggtgccaggtcgaggggtgcggattggacctcagcagggtcaaggactaccaccgtaagcaccgcgtctgcgaggcccacactaagtctccccgcgtcatcgtcgccggccaggagcgccgcttctgccagcagtgcagccggtgggtcgccttcttgcttgctttcgcttgccccctccacgcctctgctctcgcttgctctgtgcgattgcttccgtcttccttcctttgattgctttctgcaacgatggtcgcgtgatttgttgattggtttggacaagcaggtgtttttacgtgttctctattagttttgtggctacatactgtgtgtgtacggcgcgtgagctgcgtgcgcggttgtgccgttttttttgggtacggaactgcatttttttcctgatctagcaatgaaagatgcttcctttccactattgggactgttgtacttgttgtggagatcgtacgcatgggtggaatgagaaatggctactatgcctgtttcccttttccaggtttggtatggctctcgatatatgtgtatgcttt

SEQ ID NO: 8038 - DNA, 791 bp, Zea mays
  Clone ID: MRT4577_107327C.1
cacttcgctgccgaagcggcggcgaggaatggcttcctcaaagaggcgccggacgagcacctcgccgtcggccaccgccaccaccaccaccacgacctcctccacaaacaccgcctcggcgtcgccgtacttcctgccggagctgatcccgtcggtcgcgagccgcctgacgaccctccaggacttcttcgccctccgcgccgcctgccgcgcctaccgggatctccttcggccgtcgccggccaacctcgcctcccaggctccgctcctcctcttcccccgcatggcctctgcctcgggggccctctttcacgtccccctccgccgcatcctccgcttccgcctcccctgcaccgaccacagcctcaccgagttctactcctccggctaccgcgtcgccatccaggaccgcgaccgctatgacacccaccgcgagctccgcatccgccacctcctcacaggcgagcgagcccgcctgcccgattccccggaaccgtgctactctgaagaagtcgtcttttctggcgacctcgttgtcaccttcaggaagctctgccgcgtcctctactactgccacattgaggatgatcactggcaggcagcgcgctgcgatgtaggccacctggtttacgatctgatgttcgtgaaaggcaccctctatgcgctgatttacaatcacccacattaccgcctcgctgtcgtcgagcttgacaagaactctgcggtattgtcgtttcttggagataaattgagtgtgccggacgataattgtccaaggttctggctagcgg

SEQ ID NO: 8039 - DNA, 819 bp, Zea mays
  Clone ID: MRT4577_107328C.1
gatttgaacagatgaaaccctaggacccgatggcctagccaccattcccagacacagcccgcccgccgccgccgccatgccgccgttccggcgctgggcggatctgccggcggacctcctctgccgcatcggcgacagcctcgacctcaagtgctacgccagcgcgcggggcgcctgcacggcctggcgatgcgcgctctcgccgccgtccccgtcgctcctcgtcgtcctcgacgacgccaggtgctgcccgtccgccgcgtcgctccccacccaccgctccttcgagctcaagaacatcctctcggggggccgatgcgtcggctccagcaacggctggctcgccctctccgtctgcctctacggcggccagagcatgttcagcctcttcaaccccatcaccgccacggagatccttctgccgccgctgatctacgagagccgctgggtctccaagctcgtcttcgcgcccaaccccgccagggacgacttcgccgccgccgccatctgcgacatcgacaggctcgcctacgtcaccgcgggggccaggaggtgggccatcctcgatcccgttcgcctctccagcggagatcagctcgccgatgtcgtctaccatgaaaaaggtagggtctactgcctcacccgctatggagatgtccacgtgctccgcctgccggagcgccgccgcaggaagcctatcgtcgtcgaggatccggctggcccatcagagccagagatgcctttaggacgtcccgcactcagtcttcagggagaagacagcgcaacttgcgtatgctctgctatgaacatcgtagatgg

SEQ ID NO: 8040 - DNA, 474 bp, Zea mays
  Clone ID: MRT4577_107329C.1
gccggccgggccgggaaattctttattcctcgtgtcctgaggtcttcgtccttgcccttcgcttcgaagaagagatagaggtgtgcgctggatatatctctcgccacttccgcctgcgtcgcccggtgcagataggatatgatctctgccttcctacaagatgctgtatgaaatgaaggaactgcataaggaacggttcacctcttgctcctcaagacctgccggtgaggacctgtgctcttggagagtgaacatgatggagaccttcaaacagcctatgtgcaagtgcggacattcgtgatggaacattcacttcaccacaggatatatcttttcagacagatgatgacgatttccgcagcatggcataccgccacattctcgacaacaccattaagaatcgtctagatactgatgaggagcatggcaagcctgatgtataatatttccaaaagtctcctagatatgaagctc

SEQ ID NO: 8041 - DNA, 493 bp, Zea mays
  Clone ID: MRT4577_10732C.1
cacgcctgcctaggctgggaattcggttcgtgcgattctgggggatggcttttttgttcgcagaaaatccttgtgagacacacaacgggctctgcatgtgcaggcgtggggccaacctcggtggacgtagttcatgggggcttggattatctgtgggttaattggtaccatcagttcattcgggccattgtatgctctagcttcctgtcctggtgtgcattcatggatgaggaggggattctgttgtattttctggttcaactgtatccatggcacatgtaaggtgcgcgtttagtcctagtgatctctgcaactggatatattttaatggatggtgtacaaggagatatgatcatgataacaaacattgaggcgagtgcactgtaccgaggatgtaacaagaaagcaccaaatgggttttggttcttttgtgttgtaccatgtaacttgtaaggcacttcaaataaaaaagaaaatagtaatagttacaact

SEQ ID NO: 8042 - DNA, 300 bp, Zea mays
  Clone ID: MRT4577_107330C.1
atccatactcccagagcgggcctacttatccatagtcacttgctcctcaagaccgaacaatctatcttgacctgattcgtcaagcattacctgttgacttattctatgtggctcatttgctctgcagattcttatccttcattaccacatattcttgttgcgccagaccaacctatataccccacaatctcagatacagataccctacgtgtcgctcctatccctattgataatcacacgtacagcatcacccttatcttataaaactaagggtccgaaactttttgccacttccaataa

SEQ ID NO: 8043 - DNA, 1211 bp, Zea mays
  unsure (1)..(1211): unsure at all n locations
  Clone ID: MRT4577_107331C.1
ccccccctngagttttttttttttttttttaaaaaaaactttgttctaatgtctttattccttcatgtgcaaataacgccaccactattgactatccaaatccagaataaggtattttacattcttttgacgccaattaagaataaaaggtgaccggcaacctctccgaaaaatgaactgcagccgacaaggattccgtccgttctcgaatatttgtagctcaagtcagttatactaaaacgcgataaataaatagaaaacagagggagtatttcagttacataagacatcgaaaacgaatttctttgaccctactatccagcactagattcaacgtctgaatggccgtcgctgaaattatattgctcgtaaacttggaacaggatctctctgcagggtacaactgccccaatcttgatgcaggcaaggaatgcacctgacagctttctatggaggctgtacacttcatccggtggtggggtcagcctgtgcttcaacatggtggccccaagattggaaacactatgcgtgatattattcgctcgaaaatcgtgaccgcctggctttgagaacggcacaccaacaatgaaggctgcttggacatgagcatccagcatgacttctggttcctccccagtaaggaatcctagtctgcgggacatctctaagacaccggtccgatctctatttgcacaggcaactaccattggtacaatacaatataaatcagaaaccaaccatcttgaaaacaataaatatggcaaaattctgataatggactctgagacactcagagtgtgcactgcaaaggcatgtaccattcgtagataatcatctacaaagtgttttgcaaaatcacgggctgctccaaaatctatcagattgaatttccttgtagcatcatcatacagaaaattactccaatttggatccgtctgcatgaatctgaagacaaacaactcctttattgtaagctcaagcagtttacaaccaacataattgcgggtttcctgacttaactgagccaccttatcgataggaatgcctggaaacaaactccgaggtcagcactttcctgctagacaattgatcaatgacctttgggacattataaccatcactatcacatagcaattctttgtaacgcttctggttacttgcttctagcacataatcacactcccttgccagctcctgctcggacgcgtggg

SEQ ID NO: 8044 - DNA, 331 bp, Zea mays
  Clone ID: MRT4577_107332C.1
gacccccgcgcgggccccggcccggaatcccgggggcgacaccacgcgcgcgttctcgctccacatggggaagcaggaggcggagctgacactgcggggcaacagcgccgcctcctatggcgaactgaccagctgtaaagcctgatccgggcagtggctgatggcaaagacaccggctacaacgaccgttccgctctgcatttcgcgggttgctgaaggtacgagggcgtcgcgcaggttctgataaaccaaggcgtggacatggaccataccgaccagttatggaacacgccattgctggaggcggcgaagcaagggcaccaacgggggg

SEQ ID NO: 8045 - DNA, 1081 bp, Zea mays
  Clone ID: MRT4577_107333C.1
gggtacctcgaggccggccggggtacctgtacgtcttctctatagagggaggaattggagagagagaaaagaaagaaagaaacaagaacggcgaaaaatggtcgatgccggcgacataacggccggagggccgccacgcgctcacgaggaggagcaagcgggaactccggcatacggttcggtggtcctcggcggcacttttgaccgcctccacgacggccaccgccgccttctcaaggcctccgcggatttggggagagaccggatcgtggtgggcgtctgcacgggacctatgctcgccaagaaggagtatgcggagcttattgagcccgtcgacaagcgcatcaagggtgtggaggattacatcaagtctataaagccagaactgatagtacaagtggagcctattgaggacccttatggcccatccataactgatgagaagttggatgccattattgtcagtaaggagacattaaatggtggactggctgtaaataggaaaagagaagagaaagggttcccactgttgaaggttgaggttgttgatctcctttccggcggtgtggagggggaaaaattgagttcttctgctttaaggaaacttgaggcagaacaagctcaacaaagtgaaacaaaatctggtagccttgaagcttcttagggaggaaattgaatactttgatctggttagctgaatgcacaaatacgggggtgatctgctccaagctcagtgtgaacaaaaaatatgatcagagctgacagtttggttacctttctagaggaataatcttcgaacactggcccatggccctgtaacagtattgctctaaccttctaaaatcaacctggcaacatagactctcccctactaaccaaatttacaaattttgtattggcaatgccatctgaatgttaaaaggaaatcttcttgggtttgtataaatatctacaattgtgacaaagctacaaacgaatatggttccccttcgcaagaacccatgcaatgtagcttgtcattataatctttgttctcttgaaacatattgtataattatgtgtatatacgcattggttgatc

SEQ ID NO: 8046 - DNA, 276 bp, Zea mays
  Clone ID: MRT4577_107334C.1
tttatttccctttttttttttttttggcccccccagattcaaaaattttttagaccagccgggcccggggattattcggggaaggcactggtttaccggggggttggaagttaagtttttaggaaggaaaaaccccccacataaatttttatgggggggtgggcgtccccggcctcacttggggaaagagaccccctttgggaaaccttccggggggtttttttttggcttttacaaaccaaaactttggaaccaatttaaggggccaaggggggg

SEQ ID NO: 8047 - DNA, 1156 bp, Zea mays
  unsure (1)..(1156): unsure at all n locations
  Clone ID: MRT4577_107335C.1
gcggtttctgctcctatgcnatagaagtatttggggatggatgccaatctgttttatatatgcaggggagaagtgcataagcatcagtagttcttttcatacggaaatttgtcagttttgcagatgaaatagaagtatattgttactgctatgtggctagagatttgtttttatctaacagaagtcgttaagcatagtttactttggatggagtttctgaaatggaaattagccctatgttctcaattttggagatacatggctttgaatgtgtaggagttatcagttccatatctccattgtgtatatccttgcattgggtaatttggggaaggaactacaaagaagaatatgcctatgtgtttgtgtatctgtgttttgtctaccatttgatgtgttgacaataatccatgattggtctgttgtcatatgcagtctataaagccagaactgatagtacaagtggagcctattgaggacccttatggcccatccataactgatgagaagttggatgccattattgtcagtaaggagacattaaatggtggactggctgtaaataggaaaagagaagagaaagggttcccactgttgaaggttcatttgtgcttgcttctatattttctttaattgattttattctactactcgatgcactatgtagctggctcaaatgtgaatgatttaaatttcaggttgaggttgttgatctcctttccggcggtgtggagggggaaaaattgagttcttctgctttaaggaaacttgaggcagaacaagctcaacaaagtgaaacaaaatctggtagccttgaagcttcttagggaggaaattgaatactttgatctggttagctgaatgcacaaatacgggggtgatctgctccaagctcagtgtgaacaaaaaatatgatcagagctgacagtttggttacctttctagaggaataatcttcgaacactggcccatggccctgtaacagtattgctctaaccttctaaaatcaacctggcaacatagactctcccctactaaccaaatttacaaattttgtattggcaatgccatctgaatgttaaaaggaaatcttcttgggtttgtataaatatctacaattgtgacaaagctacaaacgaatatggttccccttcgc

SEQ ID NO: 8048 - DNA, 513 bp, Zea mays
  Clone ID: MRT4577_107336C.1
cccgggttctacccacgcgtccgccgccgcgtgcgtactaatcttttcttcggcagtaacctataaaatataccccacagtcggcaagtcgcaccagcacctgtaccagactttgacgcactcgctaccaaagcctaccaaaaaaacgctatgatcatatcacacggaagaccataacatgaatatacactgtaacgagattcttggggggtatggaacaattctgctacggccacaactccttctacatgagaaaaagacagacctgtcaacaagcttattatgatataatatgccatctccaataattgttggacctactggggcacacagattagccaatcccaaagaacacgtggacacacaacgagatgacgcacattataacaccctactgactcttggctattcataaagacgaagaactcaggaagctgcttgccggtgcgaccctattgcattgtgtcattcttctcaacacaaaataagggctgctgcccaaaaatgcggacg

SEQ ID NO: 8049 - DNA, 583 bp, Zea mays
  Clone ID: MRT4577_107337C.1
actcctaagggcgattgggatcctcgaggccggccagcccagcccagcaaagagagaagaccacctctcctccaccaacgccgcagcaaccaccaaccagcaatggcgactccgacgccaccaccgctcgtccttatcctcctgctcctcgtcgcctccttcccatccccgcacacaccgccggatgtatcgccagagccgcttccagaaccttcgccggtgcctgcacctgcacccatgccgatgccgacccctcattcaccgccagcggacgattatgtaccgccaacaccacctgtacccggaaagtcaccgccagctacctcaccatcgcctcaggttcagcctccagctgcctccaccccacctccgtcactggtgaagttgtctcctccgcaggcaccagtggcatcaccaccgccacctgtgaagactacttctccaccggcccctattgcttcaccatctccaccaccaccagcgccagtggtctcaccaccaccgcccgtgaaatcacctcccccacccgcgccagtggcatcacctccaccacctgaaaaaaaaaaaaaaaaaatttgcggcc

SEQ ID NO: 8050 - DNA, 351 bp, Zea mays
  unsure (1)..(351): unsure at all n locations
  Clone ID: MRT4577_107338C.1
cccacgcgtccgaccaccggcccgtgcccaaaccacaacagggcgaaataaggggtggtaaccccagttacttccccaaaacacaagccgcgggggccaagatattccaaacacattttgcgcgcgtttacaccccaagatatatagtttgggggggggcgcccccncccgggctttggcgcttgttccctgtgaatcttggccacggcctccacgctaggggtttttgtcccccccttttattgtggctacaaaaagggcttttattcttcttccccctcgtccaccgcgggggcggtggtttttttcccgtggtgccctccttcatatgcgactgaccggcgccccttt

SEQ ID NO: 8051 - DNA, 419 bp, Zea mays
  Clone ID: MRT4577_107339C.1
tgtcaagctttttttttttttttttttttttttttttttgcggttttttttattattttttaaactttttttttttttttttattattttttttcataaaaatgggaaattcaagttattgtttatattgccacccaaggggaaggggggaaaatggggaaaaagggcaaaaaacgaccgaacgagagggggggaggtgggcagcgcctccacaacaaaaatactacagagccggcccgggggggccatcgaaagggcaaaatccagcccactgggggggggccgtgggggacccaaaaggggaaaaaactaggcgaaagcagggggatagagggaaccggggggaaaatgcaaaccccgcacaattccggacaagaggcggaaccggaagacaaaaagggaaaagcccgggggggcca

SEQ ID NO: 8052 - DNA, 1592 bp, Zea mays
  Clone ID: MRT4577_10733C.1
gtgtcgcggaggaggcggtggtgccggcgcccgcgagggaggtcgtggtggggtacgcgctcacgagtaagaaggccaagagcttcctccaacccaagctccgggggctcgccaggaaaaagggaatcttgtttgtcgctattgatcagaaacgcccattgtctgatcaaggtccatttgacattgttcttcataagttgactggaagggggtggcagcaattgctggaggaatatagggaggcacacccagaagttactgttcttgatccacctggcgcaatagcaaacttgcttgatcgccagtctatgcttcaagaagtatctgaattggacctcacagattgtcatggtaaagtacatgtgcctaagcagctattcgttaatactgatccctcatcaataccagctgcagttaggagggcaggtctctcgcgtcccatgctccctaatcatatcgatgttgaaccctcgccggacgctcgctctcgccggggacaactcaatcccgaggccaggatggcccgctacgatcgcgcgatcaccgtgttctcacccgacggccacctcttccaggtcgagtacgccctcgaggccgtccgcaagggcaacgccgctgtcggcgtccgcggcgtcgacaccgtcgtcctcggcgtcgagaagaagtccacccccaagctccaggactccaggtccgtgcgcaagatcgtgagcctggacacccacatcgcgctggcgtgcgcggggctcaaggccgacgcgcgcgtgctcatcaaccgcgctcgcgtggagtgccagagccaccgcctcacagtcgaggaccccgtcaccgtcgagtacatcacgcgctacatcgccggcctgcagcagaagtacacgcagagcggaggggtgcgccccttcggcctctccacgctcatcgtcggcttcgatccctacacccagaagcccgcgctgtaccagactgacccctcagggaccttctccgcttggaaggccaacgcaaccggccgcaactccaactccatgcgcgagtttctcgagaagaattacaaggagacgtccggtaaggagaccatcaagctcgccatcagagcactccttgaggttgttgagagtggtggcaagaacatagagattgcagtgatgacacacgaggacggccttcatgaactcgaagaggctgagattgatgagtatgttgccgaaattgaagcagagaaggccgctgccgaggctgcaaagaagggtgcaccaaaggggaactgactccgcacaagcttagattccgcctcttgttccagagcatgtcttatgattcacctcttagatggatgcccggatgtttggatacaggaatatttataaaaaaaaattaagatgaagccgcttggatgaaaacatgctatgtgatgcatagtattgcaataccatggtggtttgtggcttgtgtgacttgtcgcagtggtctcttgatctgtcagtattattttctggaacctgtcagtattattttctggaacctggatgctactcgattaagagtcttgtgttgttggtattgttgataaaaaaaaaaaaaaaaaagcggcc

SEQ ID NO: 8053 - DNA, 321 bp, Zea mays
  unsure (1)..(321): unsure at all n locations
  Clone ID: MRT4577_107340C.1
ttctgaccacgcttcctgtgacgaggcggagatggtcttgctgcacctcgtgccctataccggcttcatgtaccgcgatgtcctcctctgcccgctgctcgccgtccaattcacaaagctcaaggtcggtctggcggtggggtgcgccctcaaccacgctgtgctggacggcaccgccacgtggcacggcatggccacctgggccgatctctgccgcggcgtacccctggcgctgcagcccatccacgaccggtcccggtcccgctccgggcgcgttcggctggagcagccggcgnccgccgaggcccacgagaagacgga

SEQ ID NO: 8054 - DNA, 165 bp, Zea mays
  Clone ID: MRT4577_107341C.1
ctcaatcatccgcagacacgtaatttttaattttttcacttcattttaccaggcagcttacctttacgctggtgctggccgataacattttgcatcaaccgcttacctactgcaactctaatgccttggtcctattaactataagcttcaatctaatgtctcttc

SEQ ID NO: 8055 - DNA, 524 bp, Zea mays
  Clone ID: MRT4577_107342C.1
agacgccttcttgctctcgcttctggcgactcccgccactttctccccgactggatgacgaaacgatccaacaaggtaggaatcgtcggccaatatggtgccctccatggagcccgtctgcgcctacacaccccaatatgtcagggctcgcagcactccacatacttctgtgaaatatgcgaccagcttgccgtgaagaggaaagcaggtggtatctcgtactaggcaaggactgtgcgataggtaccggcggaggcgcctacacgatgaacactgctactgcggtcactgtgagaaggacaatcgcgtccgcctgctgcagcagacccaagtatgattgctgccagcttggctaggacagctgcatattttgatagatcaaccaacacccgagaaccattttgactttttagctattactgaactggacatgtgtatctatccgcactgcaccactctgtactcatgccctgacgtggtacattgatgatatgaactatggactgcaaacatattgatattac

SEQ ID NO: 8056 - DNA, 630 bp, Zea mays
  Clone ID: MRT4577_107343C.1
gttaccattgaagcgatcgaactacatagatacagcgcataagctatcatgactgatgaaaaaacgaaaagcacgttcgctccagatgaacatactgctgtcacagtagctcgtggcaggtcctccaacggactagacacgcccaactctcctcaccatatacttgacatcatggaatccctcgacactcaccaccaaggtgacttatgattgaccgccacactgtgtctacacacctctagacatgataatacatagccttgactcactcctgcgttgctcctgcatctataacgatcagtctatcgctgacatcatatttactcctatctgcttgaggccattcccttaagacacaactcttacatgcatgaatctgatcgacgaccacactgcctctcttgaacttctgcacaactgatgcattgtttccaagtatccaatggatcgtcgtatatgaatatgcatatagcgtgttattaattaaactggtcaggaaaccgccatatgaatggggtgttagtcttcacttctacatcgttcagactatctaataaaatagaaatatatgatggatgtgcgcataataacaacaaaaaaaatatgccgctatatatcctctagatccaa

SEQ ID NO: 8057 - DNA, 378 bp, Zea mays
  Clone ID: MRT4577_107344C.1
gcggagacaacgaaggcctcctgcacctaccaaatgacatagccctactatttcatccatcgtgtcatcgagcacttgacacatacgcaccgcacgaagatgactactctgctcactacgaccaaggcactacctgaagctttcagaatctgtgatatccatcaagccataaagtgagagagaacgaaccataatagtgtgctggtatgccgtccgccaacccgcctagatatcttcgcttgtctgctctcaaccttgaatgaaaatctgatgaactctgctgaaaatatcgtctgtatgttgacatggatcatgattctatggtatctatctataatatctgtctcataagctttgatatgaagcgtgatctggttc

SEQ ID NO: 8058 - DNA, 347 bp, Zea mays
  Clone ID: MRT4577_107345C.1
cccccccctccccccaggggcttttttggggttttccccaaaaattaaaactggggtcttttatagttggatttcaaagaaccatgggaaacacacacttacgcggggccagacaacaggggactataatcgacactcctccatagcaggaaaaggatacccacagcaccaggtcatacgcacacgctaacagttttatagatggggccgttcccgactcccaagccaaatccaactgggtaccttacataatgggatagggcacgaccatttgaaactgtaaacacaaaaactccaaaaagggaaggggggcaaagcttatattggggtttggcgctttgggggaa

SEQ ID NO: 8059 - DNA, 157 bp, Zea mays
  Clone ID: MRT4577_107346C.1
caactgagtggttaatctacacaaggcaaacaacagttggttcggatctgtcatgaccacccacacgacgaccagtccatatgaccaaaggggggaagaaaacgggattttttaaatccaacaagggagatgaggacctgtatagacaacggtaaaa

SEQ ID NO: 8060 - DNA, 195 bp, Zea mays
  Clone ID: MRT4577_107347C.1
caagttcaccgcaacattaaaagagatacacaacatgctacatagtttattatatatttgtggacttgtgaacttgtggattatacataaaagaggggatatgctgctgatttatttttaaaactgtgttgtttcttctataaaaaaaaaaaaaacgggggccccccgataagtaaccccgccaacccgggaata

SEQ ID NO: 8061 - DNA, 215 bp, Zea mays
  Clone ID: MRT4577_107348C.1
gtctaattcacttgcaattcattacctgggaaagcttacttctttacacacccacaaacctattagaaagctccagccgcaccaacacaactggacgaaacccgaagaaccaaaccgcaagggaaccgctcttcatactgacacacgggaacagagaggggtcttaatacccataaccctgagtgggcagatccccctcctcggagagcaagaaa

SEQ ID NO: 8062 - DNA, 380 bp, Zea mays
  Clone ID: MRT4577_107349C.1
ctccctgggccccaccttaaaggaacccaggaagaaaaggggggcccccccgcggaagatccccatctggtatgggcacggttaaaccccctgataaacggggaggccccccttgggggggaaaaaaaaaaacaagggttgaacagacctaaaaaaacccaaatgggcccttcctgtggggccccgggaaaaaggccaacctccgccccgggggaattaaatttgccaccaaaattggggggcccccaggaccaaaaaacgggggttcaccgagggccaaatgttatgccttgggccccccagaccccaccattttaaaccattggtggaaagggggaagaaaaaaaaacggggaaagttcaaagggggtcccccaaaaa

SEQ ID NO: 8063 - DNA, 1956 bp, Zea mays
  Clone ID: MRT4577_10734C.1
ggccctcccccttcccgcgctacggctgcctcgctccccccggccgggaactgggcatcgccgatttcctagccctgttgtgcgaagtgcgccagattgtatttatttcccccagttcttgctgcagttcagtttggctcacgttgcaccggcctttaaggtgttggtgtctggcgtcctcgtcttccatctgttggagcgagcttcgtagtgattttcgtggttaccgccgccaacagagaataggggagaggaaagtacgctgccaacgctgttcttcgctttccatggtcgttcgacgtctgcgaataattcgcggggtctgggcgcgtcgttagccggcgatttggtgcacctggaggtggggactcgtgcgggtgaccgggactttgtcgtccgactccggtgctcacgatcgagccgtcgcgccttggtgaacgagcttctacgttgactaaccatctcgcgaggtcacgaggatgtgaagaatcatcatggtattgggaatttcaagggtaaccaatgtctacgagatgcttgttctatatcgaccattccatattgtgattcttttatagactgtggacgtggcattgggagtggactgtacagacagcagtggttcaatgactcgggtgcagaagcttgttttaacactggaaatgatgctactttccaatatggaatttatgagcaggctgttttgctcactacagaagacagtgctgtaaaacgatatatatattcattattttgggggtttcagcaaataagtaccttagcaggaaaccttgtcccgagttactttatatgggaagttctgttcacgatggctattattggtctgggactgttgctttttgcattgcttattggaaacatgcaaaattttctgcaagctcttggaagaaggaggttggaaatgcaactcaggcgccgtgatgttgaaaagtggatgagccataggcgattgcctgaagatttgagaaggagggttagacgagccgaaaggttcacctgggcagctactcaaggagtgaatgaagaggagcttttgagtaatttacctgaagatatccaaagggacatacgtcgccacttctttagattccttaataaggtccgattattcaccttgatggattggcctatattggatgcaatatgtgacaaattaagacaaaacttgtatattagtggaagtgacattctttaccaaggtggtactgttgaaaagatggtcttcatagtgagagggaagctggaaagcatcagtgcagatggcagcaaggctccattacatgatggagatgtatgtggagaggagctcctcacgtggtacttggaacactcttcagcgaacagagatggtgggaaaattaaattccaaggtatgcggttggttgctatacgtacagtaagatgtttaacaaatgttgaagcttttgtactcagagcaagtgatctggaagaagtcacctcgcagtttgctcgattcctgcgtaatccacgagtgcagggagcgatcaggtatgaatccccctactggcgaaccattgctgcaactcgtattcaggttgcatggaggtatcgtaaaaggcggctgaagcgagctgagaagtcgaggttgagcgaagagacttatgcctcgcttggatcttgacacatgattcttttcagcgtagacggaggcagctgaagacttcttttctgctatgcttgattgatggggctgtgtcttcatccagttctgcctgtggcctaggctattttaccttccactgcgctttatgattttcggctcactctcgagcttgtatcccccggtattgtaataacattattcagactctgtaactatttgaagtaatgaatgtggttactagcctcctgggactagtaattgtatcccagagaaatagggatccaatcgtccggaacttatagctccggaag

SEQ ID NO: 8064 - DNA, 529 bp, Zea mays
  Clone ID: MRT4577_107350C.1
gcgttaagtccttgcctccccaaggccaaaaaatggtagcctggaaacatgacctaccctacctcagtttacagtcaccatcactcatcgacaacaggttccaaatcctacctggctccgattatcggggacgctgctcatttaacattgcgcttcacacagccaccgaaaatggtcctccatcaaacatctttcggggctcattctattaacgtgactgcaacgaccaatctgcactgaaccccaaccattttgcttttcacatctgatctgctcttacccaaacagccctgcttggaactccacaagacaaaaaatgggattgataaccaatcagggcttgagggccacagctataccaaccttcaacctcttctacatggtctttgtgtggacctcagacgctattgcgaccagcccattttggccttcactggtgctggatcagggcactggccttgccagatattttaatgctggcctgcaacactgttagtggttacagggcgggctgcccgccaaagtgaag

SEQ ID NO: 8065 - DNA, 322 bp, Zea mays
  Clone ID: MRT4577_107351C.1
atgaaataatagaactctccttctccgcccctgtacatgttcttctctactcttctatgttattccattgtactggttgttaacatttggtatgagatgtccacagatgtccaccgatcttcgactccattcatggcatccaccgcatctatcgactcccaactcacgcaagcgctcgaatcccagacacgggcgctgttgtccgaactggacaagcgtcttcgcgccatcgattccaagtgggaatctcgtgtagtcgtgttgcagtcctcgaagtccaggttgcagactccatgcgttgcctggactcgctccccaagga

SEQ ID NO: 8066 - DNA, 359 bp, Zea mays
  Clone ID: MRT4577_107352C.1
aaaagaaaaattcccccgccaaaattgggcctttttttggcaaccaaattttggcccgccaacattttttcccaggcaaggcaatttgggggggcccttttcaaaattaaccggttgcaaattttgggggtttttttttcacctcccagcaaaagacctttttcccggccgggtgtccctgattttcttttttgatgctttatcaacaaactttttgttttaaacaacaagggcctttttaattactttacaaacagataaaattttggagttgtttccaccccccaaggtgccaacacggtttttgacgtgtttgaaacccttctttccaaacaaaatatctgtttttgggccctttt

SEQ ID NO: 8067 - DNA, 421 bp, Zea mays
  Clone ID: MRT4577_107353C.1
gccggccgggctcgggaccaatgccttctacaaagcgagatcgccgtcaacttgccatctcgtcagatgcgaagggatcgcatcagcaggagcgtaaggcgatgatcatctccccagtatcccgcagaccctagtgtgctgcctctgacagctcgaggaggggaggactacccactcagaggacactgatgcgtggatcgccctcggtgcgtcggcacgacgcgcaatcatctcccctccagataaggaaacagggtcaaagtgagctccacccgatgaaaaaaagagcaccatggagaaaggtgacgagcctgggaacctggacaagctccctatgaagcgccttgaggccattttttttactgcccaccacccctacccaccggaaactaacaacgaggagcagcgggtccgggccaac

SEQ ID NO: 8068 - DNA, 565 bp, Zea mays
  unsure (1)..(565): unsure at all n locations
  Clone ID: MRT4577_107354C.1
tcnacggccgggggggggggggggctttttttttttttgtacaagcttttttttttttttttttttttttttttgtttttttattttttttttttttttttttttttttttttttttttttttttttttttttttttttttttttttttttttttggggggggggggggggaaaacccataccccaaccccctttaaaccaaatttcaaaaaaatttccccctttattaattaatcccaactctaaaccaaaattttcnaaataattaaaaaaactttttcctttataaaatttttatcccttaaaaattccccaaaaaatacaaacccgggggataaaaggtaaaacctggggtgcttaaagggggggctaaataaaattaattgggtgggggttattgccctttttccatgaggaaaacctttggggccactttttttaataaaacagccaacccccgggaaaagggggtttgaatattggggccttttcaactttctcattaaatgactaaatacactgaggcattcggctgggggaaggggtttaacttaaataaaagggg

SEQ ID NO: 8069 - DNA, 294 bp, Zea mays
  Clone ID: MRT4577_107355C.1
tcgcgtcgcccacgcgtccggagtcttctgtgctgttctactatcctgaatagggaaaaaaaaagacttacagatttatacagaggacccaagatgcagaaacctgaagatatgattcggcaagtccacggtgtcaggcattcaggccttcgtagaggattctggtgagcatgaagcggtcggtcccttctgagatgggaacgggcctcgattcccaattcaccatgggaaattctttcattagagacagtgaagtttcttttcccacgaggatataaacgtgtaaagagggac

SEQ ID NO: 8070 - DNA, 151 bp, Zea mays
  unsure (1)..(151): unsure at all n locations
  Clone ID: MRT4577_107356C.1
gcgaagaaatcttcaagtcattggcccgtgttacgacttttcatcgacccgccggctgtaggccttggcgtctctggagtctggaagctnttttcttctcgccttcgacttcgtcatggccggcggcaacctgttcgggcgggcgctgagc

SEQ ID NO: 8071 - DNA, 194 bp, Zea mays
  Clone ID: MRT4577_107357C.1
tcgtagttccggaaagcagctaccaaaaaagcacctcacagctatggaagttttttgattgggtgcatttacaaaactcggagctactttagtcacctatccattgctagtcgtgaagtcatagttgcaggcaaaacaaaaaattggcagctatgtgatgtccacatacacaggttcaataaattccataataa

SEQ ID NO: 8072 - DNA, 304 bp, Zea mays
  Clone ID: MRT4577_107358C.1
ggatggaagcagtttccttgccatggactgaacgaaaaaggtttaactgactcggggatgcgtgccaaagttgcctggcaaaaaaagattctatacattgcagtgtatcacagcccacatgtgcaggcttgtgtcattatgccggtggctccttgatgctcgtgtcgctaggatgctccaagttgagctgcatcctacgagggcgacaggtgactgacttgatgggggctatccgtgcacgctgaatgcacagcttactggacgtacgaatacacagattagcttctatgtcaccggcccctgt

SEQ ID NO: 8073 - DNA, 767 bp, Zea mays
  Clone ID: MRT4577_107359C.1
tggacgcgagtgagtgtcaccggccgaagtgtcccgaccccgggcgatgctcgcctggtggatcatggggagctccgcgacgctctctaccgccgcggatcgcacccagcgctgccggtgcaggagttcgctggcggagtgggagaaggggtttgccctgagaggaccgctagcgcgcccagaggagcattgcgggctaggcggcgactattatctccgctgaccggggccccgacatgatgaagtgccggctggtgaagctctcgcctcgctcttgcgatggtcatcgttgcaccatgcgtaggcgcatggttcgtcccctatgcgagtatgctatctttccgctggcctgctctgtatatctcagatacgtgcgtgcggacggtgaccgtaggcagaaaggactgagctagtggaaacgtacttgcacgtgaggaaggcgttggcatcaatcatgcatgcgtggccaatggaactaatacagctcagcgactagggaggcttcataaggagtgaaccccacacgatacggtcgcctggagtggagcgagggaccgatactagtgactaaccgtacgtggatcggacgtggatggagaactcacactcgagctgcatccgtgaccgtggaacggcgagggggagcaacggcatctgcccatgccaataatgcgaggacacaaaccaggtaagtgggcgcgtggaccggagcctctgtctgtggccctgtggcacgccgacgatcttaatacggcttgggtcctctt

SEQ ID NO: 8074 - DNA, 807 bp, Zea mays
  Clone ID: MRT4577_10735C.1
atggttcagcttgagagacatattgtgtttccactggtatatcgacttattgagttagcattgttgttaccggtggcgactgcaacagtggaaagggccttctcagctatgaacattattaagactgagttgcgcaacaagatgtccgatgtgtccatcttcacccgaaccagtcacggaggccaagcaggaggttcagacggggatcaaccagggcggtggccacgagcggacgtggaccgacacgaagggcgccgcgagcgcgtccaagaaccagaccccgtggaagccgtctcaccacagcggaccaccgattcggcgacgggagggaaggacgctggctgtggcattggatttcttggtgatggcttcaggaaggagcggcgtgggaggttgggtccgggatgcggtagcctattccctgcgcacggctcggcagcaaggagtggcaaggggaggatgcggcacacggcgaagtggtggaccaggtctgtgcatttatggccctcggggagcaagggaacgaccctggcgacttcccagccgagagaatcggtccaggcacaaccaaccagggaagaagaccggcctggcgaatgggccccacgcggcagtgtcacggcagagagacaggcgcgcgtgagtggagagttgggccgccctgcgggtttgcgtggctgccaggcggggccacttcgttggcgtaagcgttcgggtgcgagggacacaggccgctcgggcctgcctgccagagccgtagcgcgcagagcggcggctaggtgggccgaggcaagggtttgggcctag

SEQ ID NO: 8075 - DNA, 901 bp, Zea mays
  Clone ID: MRT4577_107360C.1
atgctctcagccattgagctgcagcctggagttgaagatagacatattttcagtattgccccagatggaatgtattctgcaaaatctgcttataatggactgttcatgggttcagtttcctttggacacttcacaagggtttggaaaacctgggccccgccaaagtgtcgttttttcatttggcttgctgcccataataaatgttggacagcagatcgtattagctaagaaaggcctaaaccaccatgagaaatgtctgctttgtgaccaagctgaagaaacccttgatcatcttctggtggcttgctccttctcgagagtcttttggtaccagcttttccggaaatttggccttcactccctagctccccagccggcggtcacctccttcttgaattggtgggaggaggtttcagaggtggtctcaggtgtcaccagaaaaggccttaactccctcattatactgggtgcttggactatttggattcatcgaaacaaatgtgtctttgatggattgtctccttgcctcacctatatccttgcttgggcagacgaggagagaagtcgttgggaggcagctggggcgaaggccctatgttctctggctgcttctgcagctgctccctagggtggtgtgttgtttgttcctttcacatgatgagttcttttttgtatgctattttctggcccccgtgaggaggcctgctgatgtttggtctactttagaccttttttcctatcttctaaatatataaaggggcgcagctctcctgcgcgttttcgaaaaaaaaagtttgtggttgtgatccgtcctctccggcgaggttatacccctcggtcgcaggctttgtttggagaatggagaggagagattagatggaaataacttgctcccggccgg

SEQ ID NO: 8076 - DNA, 1235 bp, Zea mays
  Clone ID: MRT4577_107361C.1
attgggaccctcgaggccggccggggcgagaataatcgtatcctcggaattcggctcaccaacagattcgtctcctcgcctccgccgggtttcgaccagaacgccgccgccagcccaccagtaattcctccgggcactggtctccgcctaggtcccaggaggccaggaccgcctccggccctccgcgactccgtcggtccaccgggactggcttgccgctgccaggggctccatcgcccagtaccggctccggtacacaagcggaaggcggccgagtaccaagacgcagcagcagcgcgaggcgcctggtctccacctcctctgggatcaccacccaagaaaagggtgcgcggcgcataggcgaccactgagattttattctctatataacatttggcttgcaaatatctcaatgtcaagtgtttcaaattctattgctgtgggtcttccaagctatgggctatatctagagacaaggtttctcacgcagacctataggaacttcgcacagaaatcctcttacaagtattccagaatccgtgcagtgcagggaaatggtgggcgtcgaaggctggttgacataatccgaatcattccagaactctcaagggactattttaaaagtcgatcgaggcgagctctttttggtggcatctcgttgcttggcggcttttacgttgcacagacaatctcgctctctttcggtaccttgggtgtgaatgatgttatagcagcggttgtttgtgtcctgctgacagagtatgtgacaaagttctattacagtcggcctaaggttaccttccccattgctctcctcaacaatttcaagatgggtttcacatatggcctgtttattgatgccttcaagcttgctagctgagctgcactatgtcctgcttggctacttctttgcacgctcttgatcaccacaaacatgactatatatgacatacatcatttttgtattgttgtatgtgaagattgaatccagtttacatagccttttagtttacatggaattcatctctgctgtgcaattttgcaaacttgaggttaatccaagctaattctgaactgagcggcagtaaagttcctaatgggttactaactgtaaatgttgcctgccaaatttataaagtccttcagtaatatcagtgtgtcttgatcggctgcagcaatgcgacaaacatggcagattccagtgatgctgtatcaaaatgtgtttgcctgtttgg

SEQ ID NO: 8077 - DNA, 121 bp, Zea mays
  Clone ID: MRT4577_107362C.1
agcagatctaagctccaggcagcgttgagacatagtgagctagtgagtatcacgacatcaacaatgggttccctgaaggccgcgaagcccatcggagttgcggcgcatggcaaggagccgg

SEQ ID NO: 8078 - DNA, 763 bp, Zea mays
  Clone ID: MRT4577_107363C.1
gctcttcaccacagattcgtctcctcgcctccgccgggtttcgaccagaacgccgccgccagcccaccagtaattcctccgggcactggtctccgcctaggtcccaggaggccaggaccgcctccggccctccgcgactccgtcggtccaccgggactggcttgccgctgccaggggctccatcgcccagtaccggctccggtacacaagcggaaggcggccgagtaccaagacgcagcagcagcgcgaggcgcctggtctccacctcctctgggatcaccacccaagaaaagggtgcgcggcgcataggcgaccactgagattttattctctatataacatttggctgtaagtggattataatctctataacttttaaataagtcccatgcaacgcgagattttgggagccgtggccgcacgcccgcacagacgccattgttcagccctagacatgcgccaccgagccctgtcgagccaacatagcagagaaagaagtgtatgtatccttgctggttatgtttagtgatgatgagacttccatcagctctttgtgcaacctcaaggctttctccagtctgccagccttggagaaactatcaatgagcaacccataaacaggagctattggcaccatgccattgcaaatatctcaatgtcaagtgtttcaaattctattgctgtgggtcttccaagctatgggctatatctagagacaggtttctcacgcagacctataggaacttcgcacagaaatcctctt

SEQ ID NO: 8079 - DNA, 583 bp, Zea mays
  unsure (1)..(583): unsure at all n locations
  Clone ID: MRT4577_107365C.1
ggtaccctcggagcctgccggggcgctctctggattctccagtacgtgtctttatccacgcctacacgagctcggctctggaagttcccagcgtccctcgcgttctaacctcaccggcgtcctcagcccacgcactcagcttctcttccccagcgcctctccctgctcggacctcgacgccgtcctgagccttgctccctgcgctcggctccccggtgccgagtccggacgcttgcctgccgccgtggctcctcctcgccattctagcccggcaagcccctccctgctacggcgcgcccgcctccacgccgtacgccgcgccggactctccttgctcaggcgtgcctctcctcagcactgttcctgctcgtcaacacattgctcgtcctcgccgtctactgccgcgccgcgccctcgacagagctcgccggtcacggacacctgggtcgctggccgcgcgccctcccatctcggcgtcctccctctgtgcgctcgtcgacgcccggctgacggtctcctccacgccggggncgccggagtcctcttactgaccaccgcgccggcggtcccttcaacttcgacg

SEQ ID NO: 8080 - DNA, 621 bp, Zea mays
  Clone ID: MRT4577_107367C.1
agtatcgtccgactcagcccaattctcaacatggacagagagagacacggagccagcgagcgagcgagggacaggatctgcgccacttccacggggccagtgagcgcactcgcggctccgagacggcacatcgacaatctgacgcggaacgacgccaactacaccgcgctcacgccgctctggatcctcgagcgcgcggcgctggcgcatgcgggcacgacctccgaagtgtacacccccgtgctctacacctggggtgacacctatcgccgctggcgccgcctcgcatccgacctcacgctcctatgcgtcggccacggaagcacagctgctgtgatagctgctaatgtcccagccgcctatgaagctcactttcgcgcaccaatgtcagcagctgttgtgagccgcggaaatattccagctaaacgccataacaatagcattcctccttgaacacggccgggcaaaagtcgagatgatggaccaagaattcttcaacctaaccaaaaatatcgtgaaactaattggccaaaaagaagaacttggcatttcgggctgccctccattcttggaaggacatcccaccacccgacccgcgcatccccaagtcctcttccccct

SEQ ID NO: 8081 - DNA, 255 bp, Zea mays
  Clone ID: MRT4577_107368C.1
ggggaactaaaaagcatgatgggccgttcaatccaacaacggtatattaacctatctgacatactatatcatccgaatggcttattgtcacctacacaattcaaatcaaactatggcttttcctatcctgtcataattatttatccggcttgtatacacccacaccaaccacaaaacgtattctttcgcaagccacataccggcttatgtcaccctatggcgtatctaactaagttgatcacgctcttgcaccat

SEQ ID NO: 8082 - DNA, 512 bp, Zea mays
  Clone ID: MRT4577_107369C.1
accgggatccgagggccggtatccgattcagcctaaggtggacccgcggtccggggctcactggtccctgttttgagtcgtcttggctgggaaagggggggggcgatttacaatgcccggcttgggggaactctgtcgttccccacctgggtcgctttttaacacgtccccctttggggaactggcggaatatcgaaaagtttcgctcgggtaggccttcccaatttttgaatagggtgaatggagaatggacaccgtaccggttaatcttttcataaatttcgcgttaagtttgggttaggtaatttcctttcttaaacaattgggccaaaatcggcgaaattctttgtaaatccaagcattttttttagatcggggtgggagagggtggaatttggttttaaagtcaaaaattaaaccccgtgggcttcaaggtgtattcccgattaaccgcctatcccccttttaaaaaccggggttcccactgccagggggaaaacccgttttttggg

SEQ ID NO: 8083 - DNA, 316 bp, Zea mays
  Clone ID: MRT4577_10736C.1
aactcttttttttttttttttttttttttttaggacagcgttgtggacattgttttttggttactgtgaccattggaaggtctgcctcttactgaagaaagcggggccagttgtcattgctaagcgcccaacgccccggtgccgtacggatcccgttacatgtgccttgggcgggacacgctaatagaagtattccagcacacctcttgcgcgttactaggggagccgtgctcggaaccaatcttggctttttgattgctttaaccccttcctttatgaaattggagccggtcatgtttccacacaacacactagc

SEQ ID NO: 8084 - DNA, 403 bp, Zea mays
  Clone ID: MRT4577_107371C.1
ttttttttttttttttttttttttttttttttgtttttttttttttttttttttttttttttttttttttttttttttttttttttttaaagggggacccttttttttaatggggtaaacttaggagaaaaaaggggtggggagacataaagggacaattaaaatggggacgaacgggtcccccatttagtttgatttctcaaaatggcccaaggaatggggaggattttgttgccataaaaaacattccctttatttggaataacgggcatagcattgaaatccctataattctttttattgggaaagacagttttttcctaaaaattcttatttttattggttggaccctggaattaaaaaagaaaaaaaatgtcacttggcgggattccagggtaatggg

SEQ ID NO: 8085 - DNA, 245 bp, Zea mays
  Clone ID: MRT4577_107372C.1
aacttaaattgtttttttttttttttttttttttttctgtttcttgtccaaaaaactacaggagaaaaacccaaacaaatttatggatttcttgaaggaaacacatcccacattgcaggaccccccttaggggcaactcttatttgagaatacaaacaccgcccccaccacttgggctttcttgcctaaacagggcggggtcaataaaaaaactccgttgcactgctaatacctgccacccctga

SEQ ID NO: 8086 - DNA, 270 bp, Zea mays
  Clone ID: MRT4577_107374C.1
accgagtgccgatcgcgcggttggggaggatttggtccgcaacgagaggaagaggatattggagcttgtccagaggcgagggatgcagcgcgggtcatacccgaagtttgatgttgcactgaaggaccagaaggtggttgataaattcaacatgccatctaattgcgatgtatcacagcttatcgttgatcttgtaacacatattggacttgaggcagaacaacatggtggtggctcagacgttttaatgcgtgcatgggaaagtccagc

SEQ ID NO: 8087 - DNA, 254 bp, Zea mays
  Clone ID: MRT4577_107375C.1
tcgcatcgcgacagcgatatcgggaaaagggaacttcgaagccccgggaggcgtatgggcaccggcgaagagcacgttgcggcgccggcgccggcggtctatgaaacgccggaaaaaaaacaaggcaacacaaccgagcttcccgcacccttaagcttgacgaaaaagcttgccccaactcgaggtggacgaagtggacgatttgaggttattttttgttccccaactggtgaggaaattaaaaagcagagaca

SEQ ID NO: 8088 - DNA, 371 bp, Zea mays
  Clone ID: MRT4577_107376C.1
ggcgagttcatgcacaaactgccgactccaccagattcatacagcgcacgctacaattgaactatatgtgcatgacctaagaagggatgtttgtacttcccgataacacaaaatagataattcattcatgaggagctaacacacataaataacatgtttttcgaagcgctccttgcactttctgccaatcctaagtgccatagcaactactgcatatatatgttctgcttgaccaaaaagaaagggagttgcgctgccagtcactttcaccaccctcctgcagcctacctgccgtcaaacgatgatccaagttcaccattgggtaacatctggttctttccattctgatcagaagactttgaaccctttgt

SEQ ID NO: 8089 - DNA, 205 bp, Zea mays
  Clone ID: MRT4577_107377C.1
ttacatcatgatagtcgtatgtccgtgcattgctacggtttatatatatgtatgacatagaataaattttgttttaataaagcacaaaatgtatgttttctattgattaggttggtgtaaatgtggagccaacaaccaaggttcaaacactcacttatacataatttcaacttttttttacataaactcttttattatagtagta

SEQ ID NO: 8090 - DNA, 424 bp, Zea mays
  Clone ID: MRT4577_107378C.1
aaattccctccttttttttattttttttttttttttttggtggttttttttggggggttttcgccgtttttccccttttttgcgaaaagaaaacaggggaggcccagccccctttataaagggaaccaagggggggaagggcccccctggggcaccccctggccaaaaaaaaccaggggcccaaaacctggggccaaaaccgggttcccccccaggcgggccaaacaaaatgggggggccggcctttatcctatcccaagaaaaggcccccagggcccccccctaaaacgggcccctttttatttaaaaggaacaaaccgccaaaccccggcccccaaaaaaaatttggcccctaaaaacaattaaagcaaaaccttttcccgccccctctccagaatatgcccagtgaaccccctcccaaagg

SEQ ID NO: 8091 - DNA, 239 bp, Zea mays
  unsure (1)..(239): unsure at all n locations
  Clone ID: MRT4577_107379C.1
ccggccngggaaaaaaaaaaaaaaaaaaaaaaaaaaaaaaaaaaagacattccagtggcgtggcctggcaagtggggcacactcgagctgggtctagtctcctcggttcggcagaatcttccacaagagngacagacggcaggggactcgctttcannagctcctctatctcgcgcaggnngggggtcgcctggagatcacnagagacaatgggtangaaggcagttgctgggtcctcg

SEQ ID NO: 8092 - DNA, 490 bp, Zea mays
  Clone ID: MRT4577_10737C.1
ccgggcgggtcgggcgcgaggcggcggcggtcaggatggcgccgaggagagcccgagccgctttcgcgcgagacgaggttggtatgcttgccctgccagccgatgccggcggcctgcgccagcggcttctccatcagcggcgcggtgtcgacgaacaccttgaccggggcgccggtgtggcgctcgatcaggcccgcgagctccttgagcttgcctttcatgacgtcgtggtagtcgctgcgcttggcgtaggtcgagacgacgccgcgcaacggatcgtcgagcgcgatcatcgggtccgtctcgggcgcgtagctcatggccagcatgacgacggcgcgtgcgtcgggccagaggtgacgcggatcgcggcggcggtcggcggtggtctccatccaatccatggtgcgcgtgacgtccttcggccaggaacgtcagcaggcgattgccggcgtcggggatggcatcgggacgggcgaagcgcatggtc

SEQ ID NO: 8093 - DNA, 295 bp, Zea mays
  Clone ID: MRT4577_107380C.1
ccgaatctcgttccctcaagtttcaagtcctgccgtcctggctccatcgctgccgccggatgatccgcagccgcagcctcctcccaaccttctcacaaatcaatggtctgctcagccgtaacctggctgccaacgaggcgctgcagtggctggacgacgaactcgcgtcgctcgcgctccccaagctcgactcctacgcgtgcgcaaggttccttcagcgctgcatcgctcgtggtgacgcccgcgccggtcgcgccgtgcacgcgcgcgtcgtgcagcgcggaggggtggcgca

SEQ ID NO: 8094 - DNA, 373 bp, Zea mays
  Clone ID: MRT4577_107381C.1
aaattcccaaccggcaaaggctaagcccggaagattaacttccgccaaggtgaccacggccaacaccccaaacttgggttcaacttacggaatccgcaccatcccaaccttgctcatcttcaaggccggcaaaaagaaggaaaccttcatcggcgccttcccaaattcaaggctcacaaccctcatcaacaattacatcggtagttcatgaccatgccatgccatgccatgcatacatgcatcgacgactaaccacatatgtgtatctctagtaccctttgcatacgggatatgatcaattcaagcagccagccgtctgctactgctgtgttatatataccatacctccatgtcgaatccagagtacattaat

SEQ ID NO: 8095 - DNA, 283 bp, Zea mays
  Clone ID: MRT4577_107382C.1
aaaattcatccgaataagatcaaaagataaaaaaagaagagaaaaaccctaaccactccgatcgaatcatccgagggccgcagcacccggcgaggctatgtctcacgcaaccgccgtctaccaggatcgcttcccctggtgatacaacttggggcgttaatttcgtctgtccgtggagatatgaaggccgctccaaccgatcacgccactggaccagataagtcgatgctgaggcggctggtctatcgccagctgctgcggatctctgcagcggagcggatac

SEQ ID NO: 8096 - DNA, 448 bp, Zea mays
  Clone ID: MRT4577_107383C.1
gcataatacccgtttccttcatctgtaacataaaagacataatgttttagaggattttttttcagtgagttattacctttgcaatattcgtctaatatagctatcggtttatcttatccttctataatcccgaaaaagtaaaaaaaacagcaaaagtctagcgtactattggcaatccttaacacgacgtatgcgattattctcaagatcagcgagagcaaccacaaacacagattcactaaaaaaatgtctaacatgggacaagaacagatgcccgctatagctgaaatcaaaatacgtggtttatggcagcagaacaggcttcctccagctgtggagctcaatcaattctttattcacaattggtctgctgcgcaaccaaaatgtttccgccgattgatggaacccacccacttttttctgcagctccgtcaggataccgctcatg

SEQ ID NO: 8097 - DNA, 315 bp, Zea mays
  Clone ID: MRT4577_107384C.1
aaaagggaggagctttaggtagatccataggaacatttccaacataaacaggaccaggttctgtttaaaaattgtaagggttgggcatgggaacactaataaagatggggacatttatgtagtactagaatatatgggcgggggatggatgatgattaaccggccattgatcgcttacgcagggggagaattaaccccatgaaagtacccccggatgcatgctgccgatgacgttaacacggttgggggggcgggcatgatgcttttgttggacgaggagttggtttgtaatgagaaccctaatggggattgtca

SEQ ID NO: 8098 - DNA, 599 bp, Zea mays
  unsure (1)..(599): unsure at all n locations
  Clone ID: MRT4577_107385C.1
ttttttttttttttttttttttttttttaagtaaactcctttttatttatatatctgtccatacaacttcattggcgaagcctttgggagggttcctgctgtatgctttcatgtctcattgatcctcttccaatccttcttggaaccaaaccaaactcttatttatgcagcatccgcagccgtcattttggaacagaaacacaaccatcctttgcccatcaaaggcatgcaaagattcactgccaaacaatccagaaagctctccatacaccgaaaacatttataggagcgcatacaatgatatcaagtttggtactatcattgttctagtcaaacacaccaatggaagatattagcaatatatttcacaatgacctgctcccatctctaggagcaaaagcaaacgagtcaatcaagttgaggaaattcatcatttctccttatgattcgtgttacaggtaaaattcatagtatttgctttcaaatactgcgaaagaaaatataagtatttaccttgcttgtttgtcatgccttatcagaacctgggagacgttcttgcttgngcttgttgtttactcagcatggatctgtccatttga

SEQ ID NO: 8099 - DNA, 669 bp, Zea mays
  Clone ID: MRT4577_107386C.1
gaaggcgtcggagagtgcgcccgtccggcggaggatatggcgctgcggcacctcgtcacgggccagaataactgcgtgccggacggcgcctcgtcgtccaaccccctcaacgccctcgccaacgccttcctcggccagtcctccaaggcgcaggtgagcctccgtggccgccctagagttgccagcaaagtttcgagcgtagagggctagagggttagccgatgccgcgggggcttggatcctgtcgcttaggttggacagctgttgtggatggacggagcaattgccctgattgttccggaagccgaaccgttcctaaagttggtagtttggttgctcccgtgatgtttaggttggtatgggtgtcatgcctagtataccaccactgccagtctactagatgcgcccaagaaaattactggtctctgcactgcgccaccatttggctctggctgtgatgtgtccgtttagctggaactgaaatttcccagtataggtcgttgaagcaacgacgttttttgtctacagtcgcagtgactgttcctgatacttgagtgccttccaagttccaaccttccaatgccagttagttcttagccttccagttccaaccttccaatgccagttagttcatatatcaaacacgaggtagttccctctcgggacacc

SEQ ID NO: 8100 - DNA, 185 bp, Zea mays
  Clone ID: MRT4577_107387C.1
gaatcacaagcacctcctgcatatctgctattagccgaaccacgcatactcccagttaccatctggcgaattgttcgtctaccctgctcgacgactaccctgaaggctcatcagaatgttttcatgtaccacattctatttggagtctttcacccgcttaatattctctagacgcagtaccacac

SEQ ID NO: 8101 - DNA, 307 bp, Zea mays
  unsure (1)..(307): unsure at all n locations
  Clone ID: MRT4577_107388C.1
aaatttgcccacagaaccctctaaatccccttgtaaatttaactgttagtccaaagaggaacagctctttggacactaggaaaaaaccttgtagagagagtaaaaaatttaacacccatagtaggcctaaaagcagccaccaattaagaaagcgttcaagctcaacacccactacctaaaanatcccaaacatataactgaactcctcacacccaattggaccaatctatcaccctatagaagaactaatgttagtataagtaacatgaaaacattctcctccgcataagcctgcgtcagattaaaa

SEQ ID NO: 8102 - DNA, 396 bp, Zea mays
  Clone ID: MRT4577_107389C.1
tttttagtctttatattctacgacgggaaccaatgatggatgaacataacaaattccacacccggcgcaaatttatcctggtgaatcatgaacccaacctcggggggggaaaatatgctagacatcgttgaaggcccgttaggtacatggagctgacagtcgacaatatatgtcccaccctatgccgatcctccaactgcctagaatccatgtgctattctccggctctagcaaccactgctcatgaggtgtcaccaccctatctttattttactggactcgcgcatgcccagacagccagtcagctttgctgcgcctgcttatccttcctggcctcctcgacatgctttttcttcgcctacaccgccgtcgtggtctcggcggcgggggcgacct

SEQ ID NO: 8103 - DNA, 678 bp, Zea mays
  Clone ID: MRT4577_10738C.1
tggcactgttgaaaagatggtcttcatagtgagagggaagctggaaagcatcagtgcagatggcagcaaggctccattacatgatggagatgtatgtggagaggagctcctcacgtggtacttggaacactcttcagcgaacagagatggtgggaaaattaaattccaaggtatgcggttggttgctatacgtacagtaagatgtttaacaaatgttgaagcttttgtactcagagcaagtgatctggaagaagtcacctcgcagtttgctcgattcctgcgtaatccacgagtgcagggagcgatcaggtatgaatccccctactggcgaaccattgctgcaactcgtattcaggttgcatggaggtatcgtaaaaggcggctgaagcgagctgagaagtcgaggttgagcgaagagacttatgcctcacttggatcttgacacatgattcttttcagcgtagacggaggggatgattgatcgctacctgactaggcactaacttttcagtttcagttcagcatctaaagcttctagagctgtgaaatttctccgaacatgtctacttggtggaacctaacggggcaaatattttggctttggtgttccgtgtacataaaagaaggaaagtttttttttccaaaaaaaaaaaaaaaaaaaaaaaaaaaaaggaaggg

SEQ ID NO: 8104 - DNA, 488 bp, Zea mays
  unsure (1)..(488): unsure at all n locations
  Clone ID: MRT4577_107390C.1
ccccggcncgtgttccttttggtggggggcgccttccgcgtgctcccgccgggggggcgggctttccttgcgtcgtccgtgttccgcttcctctgcggctgcgccgctctggtctcctgcgcgggggtctgcctctgtgatccttttgccaccttctccgccttcttggggggggggggggtctgctccacccttccttgtgcgcctccgtgctcgccgtgctgatgccggtgttcggcgcctccggttggctcgtctgctccggctggtcgttttgctggtgcggtgtggtcttgtggatctggcttgcctgcgcctggttgatcttcggcgccttccgctccggcttgctcctctccgtctgctgccgggcgaccgtcgtgttgggtcctgggtttccccgctgttggtcaacgtcgtgccgggcgttggtgctgggccctgtctgcacctgggcgggcgtgtggcggtgtacgtggtgtattctc

SEQ ID NO: 8105 - DNA, 285 bp, Zea mays
  Clone ID: MRT4577_107391C.1
ctcacctatgcgtgcggcttagccgcttactaccgctccggtacctcgctacgaggccggccgcattcttggatcccctggagtagggcccctcaaggagacctgaagtgtggactgaggcactttctctttttttttggagcaaccgatggagctgtggacatggctgtacctggccttgaacaagtcatgtgctcacagatggcctggggctgggatcttactcaggctgacaaacactttctgaagctttcaccagatctttgactcctctgccatgactgg

SEQ ID NO: 8106 - DNA, 300 bp, Zea mays
  Clone ID: MRT4577_107392C.1
gtctccttcaattgtctcaaagcggtactttagccagggaggagggctagcaaataacctcagatcgcggaataagcgacggccacccatgcgggggcctcagcgctactgatatgggcgctggcgctggcggatgaaccaaacaacgcacactcccattcgatttctacgcccacacactgtacctaagctctggccagatcacgcggcgagactcagctacatctgccggaacgtcgtaagaagccgccgacgaaacgctcagcgcagccacgcattggacgcgcagttcaccccccc

SEQ ID NO: 8107 - DNA, 1909 bp, Zea mays
  Clone ID: MRT4577_107393C.1
ccttcattccgtggcggcggcggcggctcgcctcctcaaggcctccagtgctgggcgtcgacgtgcgaatcatcgaccttcaacacgccggcgcttcgtttctcctgtctcctaattcctgatccgctgagcgctggcctgctctgcgcgcccggtcgtccccgtcctcctgcgcagggctttctatacctcgaggccggccgggacgaagcattgtcgaccccgcccgggcccgcacagagcaacgcccaggcacacacgacacgaaccaggcaaccagctgcggacggaggaaccctagcggaacactgtgccggtgacggcggcgcgctaccggtgacgggggatacggcggcatcggcccctcctccatccccggcgcggcggcgccagcagccggcctgcagcaaaggtagttgaatggcttcaagtgcacgggacattatgtttcggcgtctcaaaacattaactataagcccggcactggcatctggtgtgatcagacagcgttaccagcttcaacagcatgcaccagtgagtggcacatccaaaggaaaggctaagctcaaagcaggtcagcctttgaagcgttccaccattggagcaaagaaaggggcaccttccgctgctggtggcggcggtggtcgtggtcgtcgtgaggccattgagcgcattattcagatttccgagtcatgtctcaatgcatctactccgttgcggcacttgcccctcaaggagcgtcttcgtgaggccaaacgtgaggaactgggtcttgtctccaaggagaggcaacgagagcttgatatagccaaagccaaatctaaagccaaatctaaaggtcctgggtggagatgatggagaccgtgtgcttatgggtccaccgggccttgactatatcagtcttgggctagttgatgaggaggcaatccccaagtatgaactcacagtcgaggatggtcggcgacttgctaaagaatacagtcgtgtactaatgcggcggcaccgtgcaaggcaaacagcagagtcaatgcttctaaccctaaaaaaggaggccattgatgctctccctgagaagctacgagctgctgctatggtacctgacatgacaccgttccctgcaaaccggtacatggcgacactcacaccaccaattgaaggatatattgaaaaagtgcgggaagcggccaagaagcactctgtgaaggagaaacttcgctgagaattcaagagaggaaactgtttccgtaaggtgaataaatattcaacctaatgtacaagaacagctttggcacaaactgcaattgccatatttggtgatctagtcagacatcccaatttgccgagcagccattatctagtgaaatcctttttgccatttttatgcaactctacaggattgattttttttttttgcagttgtcgctagactgtcatttcattttctgtttttgctcatttaggatgtttgctgttgagaggcgtgcctgcgtgcaatggtgagagctgccttgctcgttatcatgtcgcagattcgatgcaggagcctctttgtctttgcggggaaaagacttcgatttatcccctatttacacctcatttatagtcatgtgggagcctctaggacgtttgttgttgacagcaacttccgcaataaagggttagcagtgagaccatgaaactaagaatctcccgattcctcacaaatgccccccgtactattttatactctaggattgctgatacagcaagggttatatgatgcagcattttgttcatatgtgctttcagtttttagttgcactgcatctttccatgaggtaatggtatattgtgtaccttatgtttctgcgagatgtcagtttcgacttttgagtagcccaaaaaaaaaaaaaaaaaggcccctagggcc

SEQ ID NO: 8108 - DNA, 388 bp, Zea mays
  Clone ID: MRT4577_107394C.1
gagctcactagttggcggccgcccttatcttttttgggaggtttaataaaaaccgtcgttacccccccttttaatatcatatctttttcaccctctccccaccaaaaaaaaggggaaaaatggctttggcccggcccaaaaaaaaaccaaaacgggacaactccgttccccaaaaaggggggggcgaaacccaaggtcccggttccgggcggaaaaacggggcgaaaccgggaagcaggggggcaaaaagcaaaagcaccccagggaaagggggccttcaaaggccagggcaaaacaggggggcccccaactttacggaacccggggagcccccgcaagcaaaaaaaactctcgcaggccgggaaaaaaaccgggaaaaaaccccccc

SEQ ID NO: 8109 - DNA, 232 bp, Zea mays
  Clone ID: MRT4577_107395C.1
aaaaaagaaggccgggtttaggatatatataggatcaaatcatatcatggggggccaattaatatatgggtacaggagatgcaatcgggtcaagcgagaggcagggggacacacgtacgtacatgagcacaaagactggcgccaaacatgcggaggggggtagcaaactggagaactctggttctttttttttaacacacaccacacaatacctatgtttgggagccaggtc

SEQ ID NO: 8110 - DNA, 178 bp, Zea mays
  Clone ID: MRT4577_107396C.1
cgtgaagctgacaccactgaagggagagtctagaggcagaaagagatcaagtccttggtgaaattgtttaagtacaggatcaagccttgcttgagattggccttacctctggactttttttgttatatgagctaataaattctgtttattgtttaaaaaaaaaaaaaaaggggggccg

SEQ ID NO: 8111 - DNA, 2066 bp, Zea mays
  Clone ID: MRT4577_107397C.1
gacgttgggagctattgttcagtagctgaagtgtcttggatgtatattggcaatgaacaacttgaatatgcatccggagctcttaaaaagttcaggtttcttgtggagcaactatcaaaggttgacccttcttgtatgaactgtgatgaacagatagcattttgggttaacttgtacaatgcattaataatgcatgcttatttggcaatcgctaacgcaaaaaatgacattaattgatttgcgcttatccaagacagctgttataccatataagggggcgctgatacttaaggcatctatgaagcttcctgacaaggcacacgagctattgattagcatatcctctctggaaaccgctatcacaaagcttgaagaggatctacataacctgcactgccagttttattctgtggcacttagcatggtgttctcttagcgctctgctgagtgatgttctcctcccctgtggtaaggatcttctctgctgaaaacgttcgagctgagcttcaggagtccatgagagactacatccgagcgtcagttggcataaacgacaagggagagctcgtagtccccaagctactgcagagctacgccaagggcatcgtggaggactcactgctcgccgactggatctgccgcgatctgacactagacaaagtcgccgcgatccaggagacgtcatcgtcgtcgtatagatgcattaacatttagtcagcccaatttcaagaaaagcgacatgagtggaaatttgtggaataatccaaaccagctctctgaagagatggtgcgctcgatgaaagatatcttccttcatttatctgcatctcccaagatatcacgagaggagccttttgctaattcatcttcatcagcagaacgtctatctggttcaacattgactactttgtcagattcatctataatcgcctcagtgctgcggagtccttcgattgactggaacaacggcgatggtattattgatgatgatagaaactttgacccgtacaacgttaaaggcaaggaagcacggagagacattggcagctattgttcagtagctgaagtgtcttggatgtatattggcaatgaacaacttgaatatgcatctggagctcttaaaaagttcaggtttcttgtggagcaactatcaaaggttgacacttcttgtatgaactgtgatgaacagatagcattttggattaacttgtacaatgcattaataatgcatgcttatttggcatacggtgtccctgaaaatgacattaagctgttcgcgctaatgcaaaaggcctgttacacgatcggcgggcagcctgtcagtgcagccgaaatagagtttgtgattctgaagatgaagacaccggtgcaccggccacagctctccttgatgctggcccttcacaagtttaaaacgtcagagaacctcaggagatattcaatcgatggcactgagcctcgcgtcctcttcgcgctctgctgtgggatgttctcttctcctgcggtaaggatcttctctgctgaaaacgttcgagctgagcttcaggagtccatgagagactacatccgagcgtcagttggcataaacgacaagggagagctcgtagtccccaagctactgcagagctacgccaagggcatcgtggaggactccctgctcgccgactggatctgccgccatctgacactagaccaagtcgccgcgatccaggacacgtcatcgtcgtcgtcgcataagcagcggcttcttggagtgcgcagcttcagcgtcatcccgttcgactcgaggttccggtacctgttcttgtccaacaacaccaggtgccagaattgaaacaagagtacaagactgcattgctatgcgcagaaagaaagccacaggagtgggtgcttgacaagttgacactttttttcgagagctgaaaatattagcttttgctgtacattctgtaatttttttccgtgactaggattcttctttgtacgtaacattcagctaactttttgtacatcaagcgaagccagaatacaagtgtagattcggtgaaaaaaaaaaaaaaaagggc

SEQ ID NO: 8112 - DNA, 1416 bp, Zea mays
  Clone ID: MRT4577_107398C.1
cctcgaggccggccggggaacaaatgataattcactctcgcactagtcccaactcccatccatatcccatcatccagcatccaagcaggacgagaagaggcccggtcgatcgaatcaaagatggcttgcgtggcggaccgtcaggccgcggtgagggaggtggcgcaggtgtacgagctcatcaaactccagcagcccctcctcctcctccattcctccacgtcgcagctggcgcagagcctcctcggcaaggcgctgcgagccctcaacgtcgccctctccgtcatgaaccagcagcagcctccccctcctcctcctcctcctcctcctgcagtggcaccagtgagcgttgtcgtcgtcaaagctgagcctcacctgtcgccgcccagcccggcgtctgccgattccgaagccacggcaccgccggccagaagaggcgccaaaagaacaagacgatcagcggcgccaatgggagagaagaagaagaactcgtcgtcatgggcgaccttaaccgccgtgccctacgacgacggctacgagtggaggaaatacggcgagaagaagatcaacgggacgctcttcaccaggagttacttcaggtgcacctacaaggacgacgccggctgcctcgccaccaagcacgtccagcagatggacagcgacgacaacagcagcccgcccatgttccacgtcacttaccacaacgaccacacctgcagcagcgccaaagctgcagccaaagccaacacaggaggcagcagcagcaacaacaacagccacctcgctgcattgctggcagactgctgcgacggcagcggctgcaacaagggactgacgaccaccaccaccaatgggcatgctgctgctgatgctgccgccatgaacatgaacatgaagcaagaaccgtcgctgctgccgccgccgcctcctctggccgaacctccttccgcctgctttccttatgaccaaatgccacagcagtgccatcagctgctatttcctgtaagcatggagcagcagttccccggcaatggcgaagaaatcccgtcggctgctggttcgtgcatctccggcgagaccagctgggatgggtattattattctggggacatggcggcagctgaagacgaccgtttccacgatctcgagcgtttcctcctgggcgatagcttcatggactaccagtactagctagctcgatcgatctgaaacagaattatgttaacagggggtttatgaaagtagaagaatggttttggtcttctttttttttttttttggattcttagggcagcagtgccaataataaagtgttctgtaggggaaaaaaataggcgtgcatgagatgtaaaaacaaacgatcgttttattgttatataaaaatgtccggcactttccaaaaaaaaaaaaaaaaaa

SEQ ID NO: 8113 - DNA, 884 bp, Zea mays
  Clone ID: MRT4577_107399C.1
ggcaacaatgctcaaatccttccaaagaagagataagacaaggttaaaacaggcccactgaaactgtctcgatctataaacatgtctagcaagtttctctcgagtgtaatgttgagaagagtcagaaaagagaaaattgctcccccaataaatagcagcaaaaaggtttctggaacagaaaattctagtcaacttttaaagcaatactatctacagtggcatagtaattgaggtcagaggaacaacgcagaaatttcgaagaagcagagcaacgaggacaaggcttcttagataccagcccagattcagtcacgccaggttcactgatgtggcgcttgctttgagaaatcacatgaatatccagaatgaggtcaccccatgtttttttttctttggatgaactggttccagatggctaagctagccgtgtacttgtatggattaaccaactccattctctggaccaagcaaaaatgtagggagtgagagggtgatgcttgacacattcctcaacgctttctcagaattattgcttcctcagtgaagtcaacgatctgcggaattgctttgcaagttcttggaagaacttgacatctgaaggttttgttctgccgaccgcagacttgaaatgtctcattgctacttcttgaatgtcaaacctctcatcaagtgcggcaacagcagcttccctgcagatgagctttatgtcggcgccagtgtagccttctgtgagtctagcgagttcatttagattcatgtcggcactgcatggcatactgcgtgtatggatccggaaaatatctgcacggtcagcttcatcaggtggttgcacatccagcaccctatcgaaacgacctggcctcagaagtgcgggatcaattttg

SEQ ID NO: 8114 - DNA, 606 bp, Zea mays
  Clone ID: MRT4577_10739C.1
agcaagtgatctggaagaagtcacctcgcagtttgctcgattcctgcgtaacccacgagtgcagggagcgatcaggtaggcacatattggtttacattattatattattatcacatccctgcccgccagaatagttagggctgttcttatcattgtttttgctaattcatggcaaaatacgatattttttttgataaccatgtatcactgcgatttaagacttgttaaattcagttccttccaactaacctctgtccataggtatgaatccccctactggcgaaccattgctgcaactcgtattcaggttgcatggaggtatcgtaaaaggcggctgaagcgagctgagaagtcgaggttgagcgaagagacttatgcctcacttggatcttgacacatgattcttttcagcgtagacggaggggatgattgatcgctacctgactaggcccccccctttcagtttcagttcagcatctaaagcttctagagctgtgaaatttctccgaacatgtctacttggtggaacctaacggggcaaaatttttggctttggtgttccgtgtacataataagaggaaattttttttttcccccccccccacc

SEQ ID NO: 8115 - DNA, 557 bp, Zea mays
  unsure (1)..(557): unsure at all n locations
  Clone ID: MRT4577_1073C.1
ctctgttgttcttcaagaactacncnncgaaggcgattccacttctccggtcagcactgttcttcaagactaactgaagcgattcattgatgatgcaaaggtactatgctcatcgaaaggttctactcttgcttgatttactcttgtatgatttactgaagcatttggagctgcattttctagaacaacattttttcttccgatcagtgagcttgcaccgtgatcctggtgtggagattggattggttttggacatcatcgacgagatcaacctcatcgacaccttcttctgctatctcggtggcaacgcacggtttcgatggaaccgactgtactgaaccgtgaaagaaatgcagcggaccgccaaaaaaggatgcctatttttaggttgttcgacgactatcgcgatgaagattattatgtgctaccacggaagttcagtattgtcgctcgagtagaagttaaattccctattgaaccacgttatcgtgacagacaacatttcattttgtctgacatcaatggatccaagatcgaggcaatgacaagttcgtacg

SEQ ID NO: 8116 - DNA, 430 bp, Zea mays
  unsure (1)..(430): unsure at all n locations
  Clone ID: MRT4577_107400C.1
acgcgtgngcggccgaacgtgggcgctcggggccgccgcgtgggaggaggcctctgcgttcgacggcgacgtcgactacatcgcctcccgcgacgtcgccggggagggcacggccaagtgcccaggctcgctcgcgctcggcgccggggagaccacggcgttcctgccgtgcgggctggccgccgggtcggcagttaccgtggttgggacagcgcggacggcgcggccggagtacgtcgaggcgctggagcggagcggcacgggcaacgggacggtgctggtggcgcanttcgcggtggagctgcgcggcctgcgcgctaccgacggcgaggagccgcctaggatactgcacctnaacccgcgcctgcgcggcgactggagcagccgccccgtgctagagatgaacacctgcttccgaatgcagtggggc

SEQ ID NO: 8117 - DNA, 185 bp, Zea mays
  Clone ID: MRT4577_107401C.1
tactctttcatctcttgcacccgtacgccagctcttattctctatagcgcacgctcttattattttttattttaacaccaaacaagcctacattttacatcaaaacttatcagcagatacactacctcacatatacacaattaaccctttttttctgattacctcatcttatcttttcctactcc

SEQ ID NO: 8118 - DNA, 772 bp, Zea mays
  Clone ID: MRT4577_107402C.1
ggtaccctcggagctggccggggacagacacccggaatagaatggatctctcgtgtgtctggaaaccctagccgccatatctcacgatccactcgagcaccaagccgagggaaggtgaggagcgatggcgcgcggcgtggtgtcggcgaagggcggcgcggtcgcgggcaagaagaaggggtcggtttccttcacgatcgactgcaccaagccagtggaggacaagatcatggaggtcgcctcgctcgagaagttcctgcaggagcgcatcaaggtcgccggcggcaaggctggcaacctcggcgactccgtcaccatctctcgcgagaagaccaaggtcaccgtcacctctgacggacccttctccaagaggtacctgaagtacttgaccaagaagtacttgaagaagcacaacgtgcgggattggctacgcgtggttgctgccaacaaggaccgcaacgtctatgagctccgctacttcaacattgctgagaacgagggcgaggaagaagattagattgcactacgcttatattttagtattgaactcgttgcattttgatacctgtacccgtagtttctcaaatgttccatgttatggtgtggtgaatcttggatgcttaatttgaagaatccttatgtactgaatctctgcaaaaagctatgttgtggacagagaagtgtaccgtgccggatttcttgcgtttcttaatggttttatgtatgctctgatgggggccgaaaaaaaaaaaaataaaaggcccctagggcc

SEQ ID NO: 8119 - DNA, 666 bp, Zea mays
  Clone ID: MRT4577_107403C.1
cattgggtacctcgaggccggccgggctcgtgtgtctggaaacctagccgcctatctccgatccctcgagcaccaagccgagggaaggtgaggagcgatggcgcgcggcgtggtgtcagagaagggcggcgcggtcgcgggcaagaagaaggggtcggattccttcacgatcgactgcaccaagccagtggaggacaatatcatggaggtcgcctcgctcgagaagttcctgcaggagcgcatcatggtcgccggtggcaaggctggcaacctcggcgactccgtcaccatctctcgcgagaagaccaaggtcaccgtcacctctgacggacccttctccaagagtttactctgattgtatctctataccttgccaccaggtacctgaagtacttgaccaagaagtacttgaagaagcacaacgtgcgggattggctacgcgtggttgctgccaacaaggaccgcaacgtctatgagctccgctacttcaacattgctgagcaacgagggcgaggaagaagattagattgcactacgcttatatttttagtattgaactcgttgcattttgatacctgtacccgtagtttctcaaatgtcccatgttatggtgtggtgaatcttggatgcttaatttgaagaatccttatgtactgaatctcttcc

SEQ ID NO: 8120 - DNA, 334 bp, Zea mays
  Clone ID: MRT4577_107404C.1
ggaccacactataaagttttccgggtccgaaagggttccccacaatgattgaaacaactttttcacagataagtcctttttggggtcctgcaccacctttttcaaagataaacttttttttaaccagccctgatgtccccgggcgtttggggtttttttttggggggccagggcctgggctgttttttgtttgaaagttgggatcctaggttttgggatgacaagacacccccttaagtttaagaaccccagcttttagttctagcgctgcatttcctctcaacaggaatgcccaagcttattcccccaattttgaaccgttccccaatgcacc

SEQ ID NO: 8121 - DNA, 2071 bp, Zea mays
  Clone ID: MRT4577_107405C.1
ggagaagggcccgtcgcaggtgacggtgaccttggtcttctcgcgggagatgatgacggattcgccgaggttgccggccttgccgccggcgaccttgatgcgctcctgcaggaacttctcgagcgaggcgatctccatgatcttgtcccccacgggcttggtgcagtcgatcgtaaagaaaaggaaccaccccgaccctcgaggcggggaaagttgcagtgacgctccgcagcagatagagtctgcaggtacgctagcgatctagctgccgctgtgctgcgtacagtacgtagtaccatggcgaagaaagtggccactctgctggccctcaacctcctcttcttcgccttcgccgacgcatgcggctgcaggtgcggcggatcctgccctagtccaggcggcggtggcggtggcggtggaggatctggtggtggtggtggtggaagcggtggggtggtaccctcccccgccatatctcacgatccactcgagcaccaagccgagggaaggggaggagcgatggcgcgcggcgtggtgtcggcgaaggccggcgcggtagcgggcaagaagaaggggtcagtttccttgacgatcgactgcacgaagccagtggaggacaagatcatggaggtcgcctcgctcgcagaagttcctgcaggagcgcagcaaggtcgccgagcggcgaggctggcaacctcggcgaactccgtcaacatctcgcgcgcgaagaccaagggcaccggcccctcggacgggcccaactacccttgcttaccagaagtacaggggattggattacttgtagcggcacaaagtactggattggcctatgcgtcgttgttggtaaggagaaaacgaatcgcactgtggcccagctccttctattatacgaagtggcaccaggcagcagaaggtttgcatagcactacgcttatatgttttgcaatgagctcgttgtattatgataacctgcatctgtagttttctactcgattgacccgaatgttctcgatgtggtgagatgttggatatatattttgaataagtttatttgtaatgcatgaaattaataaatcaatattggaaaacgaggttgttggcataaagatgatatcgtagtaagtatactagaactccaaagagatatttacctagacatggtggaaatggcggccggcggggctcgtgtgtctggaaaccctagccgccatatctcacgatccactcgagcaccaagccgagggaaggtgaggagcgatggcgcgcggcgtggtgtcggcgaagggcggcgcggtcgcgggcaagaagaaggggtcggtttccttcacgatcgactgcaccaagccagtggaggacaagatcatggaggtcgcctcgctcgagaagttcctgcaggagcgcatcaaggtcgccggcggcaaggctggcaacctcggcgactccgtcaccatctctcgcgagaagaccaaggtcaccgtcacctctgacggacccttctccaagaggtacctgaagtacttgaccaagaagtacttgaagaagcacaacgtgcgggattggctacgcgtggttgctgccaacaaggaccgaaacgtctatgagctccgctacttcaacattgctgagaacgagggcgaggaagaagattagattgcactacgcttatattttagtattgaactcgttgcattttgatacctgtacccgtagtttcgcaaatgtcccatgttatggtgtggtatggttaatttgaagaatccttatgtactgaatctctgcaaaaagctatgttgtggacagaagtgtaacgtgccggatttcttgcatttcttagggctattttgagaaccctattttcttaaggggtttttattttttaagtgaaattagtttagtttttctttgagaaaaaaaaaaaaaaaacggccgccaaaattaaaaaaaaaaaaaaaagaaaaaaaaaaaaattaccgtcaaaagccaaaatttcgatacaaaaaaaaaaaaaaaaaagcggccccttagggctgatttggtggatatggaattggagggaatcagagtccaattt

SEQ ID NO: 8122 - DNA, 630 bp, Zea mays
  Clone ID: MRT4577_107406C.1
tatcgctcaaaatctagcaaccgcgcctccacccatacccgattcccaatccaggttcgatcccccggtggcgaggacacccgacgccgattcgtccccgtagatcgaccggacaagctcctcctcgccatgggtgagtccgacctcgaggctgatccctgtatcagcgcccaaatcccacgcccggcgagatgagattgcttaggacggggcctcagcctcggcctcgacccggatctcccctcaacgtcaggtccgatcccccggtggcgaggacacccggcgccgattcgtccccgcagatcggcgggcaggacagattcagattggggttcggtgtccgctcgggtcgcctcgccaggttccaccgcggcgggagtagccgtcgtggcgccggggcgttcagaaccctctccgaagatcgccgcatcaccgtattctgcttcgcggcgcctctgcaacgccaacggcgctcgagcccccgccatcccgccttcaacgacgaccgaaccccatcctcgatccacgcctgccgcgccatcctcgcccttccatctcagcgcccccattcgtgctggaaggaaggcccattcgtgttggaacgaatcctcgctcaaaatccatgtgcat

SEQ ID NO: 8123 - DNA, 388 bp, Zea mays
  Clone ID: MRT4577_107407C.1
gttttggggggtttttttttatttttttttttttttttaatctcatccttttttggttatttctaggaaacccacctcggtttgggggcccccttttcgggtccatctcattttttttttttaagatggcccctccccccttgggttgggggctgggcctggccgggtttctctaagagaactggttatttggctgccattgttgctgctgttgggaggcggcttcccctgggtttgccccttcccatgggtttagtccctgttgccccttttgttggttcccccctctgttcgtccgtttccgtttggttgtttgggtgccgcttttgccctgtggcctccgggtttgccccctcttgttttttttgtgctggttcccttttttccc

SEQ ID NO: 8124 - DNA, 419 bp, Zea mays
  Clone ID: MRT4577_107408C.1
ctccatcgcatatccgtcagtccggcctccacactggggaacgcgatagcatagccagctcgactgcctcctgcatctgatgcactctgatagatacatgcccgccgacaaaaccatgggctgatgagaagaagcttgcaataccttattctctgaaactgaagctgacaagaatgtaccactgactggcgttgtcaaacttgagcccagtgtgatctataagatgatgactgggacttatttgcagctctgtcatactgcaccaatcatgagcgcctacgtgcttgcagtcaacaccattatgtcgaaggacctacaccatgtgacagaggaatcgctgacctaggccctgaccgcctcctgaaacttgcagacaattgcactgatctctagggctatctcgaatctgacgctgttgg

SEQ ID NO: 8125 - DNA, 1498 bp, Zea mays
  Clone ID: MRT4577_107409C.1
cgactctagagcctccactaaatatgcaacatctagtgatgatgatagctctagtgatgaagaagataacttgcttgctctttttgccaacctaaacatgcaacaaaaagaaaaattgaatgaattaattagtgctattcatgagaaggatgaactcttggatagctaagaggacttcctcattaaggaaaacaagaagcatgttaaggttaaaaatgcttatgctcaggagatagaaaaatgtgaaaaattgactagtgagcttagcatttgccatgatactatctccaaccttagaaatgagaatgctaaattaattgctaaggttgagaagttaagtgtttgtgatgattctcttgtcaatctcaaaaatgataatgctagtttgatttctaaaattgaagaattgaatatctctcttgttagccttagaaatgataatgaaaaattaattgctaaggctaaagatttagatgtttgcaatgcttccatttccgatcttagaaataagaatgatattttacgtgctaagattgttgaacttaattcttgcaaaccctctacatctaccattgagcatgtttccatttgtactagatgtagagatattaatgttgatgctattcatgatcacctagcattaattaagaaacaaaatgatcacatagctcaacttaatgctaagattaatgagcatgacttagaaaatgaaaaatttaaatttgctagaagcatgctctatggtgggagacgtcctggcatcaaggatggcattggcttccaaaagggggacaatgtcaaacttaatgcccctcctaaaagattgtataactttgttaaggacaaggctcccatgcctccccacaacgagggttacattttgtatcctgccggttatcccgagagcaaaattaggagaattcattctagaaagtctcattctggccctaatcatgcttttatgtataagggtgagacatctagttctaggcaatcaacccacgctagattgcctaaaaagaaaactcctactgcatcaaatgatcataacatttcatttaaaacttttgatgcatcttatgttttaactaacaaatccggcaaggtttgtgcatccgggggctcaagttggatcatcgatagcgggtgcacaaaccacatgacaggggagaagaagatgttctcctcctatgagaaaaaccaagatccccaacgagctatcacattcggggatggaaaccaaggtgttactgtctttagaagaagtgatgattcaatagcatttaagggagtattagagggtcagctatacctagtagattttgatagagctaaactcgacacttgcttaattgctaagactaacatggtctggctctggcatcgccgactagcacatgttggaatgaagaatcttcacaagcttctaaagggagaacacattttgggactaacaaatgttcattttgagaaagacaggatttgtagcgcatgttag

SEQ ID NO: 8126 - DNA, 1246 bp, Zea mays
  unsure (1)..(1246): unsure at all n locations
  Clone ID: MRT4577_10740C.1
gtaccctncggagctctccgggttgttgtgcttccactccctcaggtgatgatactgctagtagttcctaaagttgggttatctgctgcaaactatgctaagaatttattgcgtgtcactgttcttcttcaatatgtgccccgtatcatcagattcgtaccacttcttgatggtcagtccaccaatggattcatatttgagtcagcatgggctaattttgtgatcaaccttctaatgtttattttggcgggacatgtggttggttcatgttggtatctctttggcttacaggttagttgatttttttgtaagactgtttgcaaaaattggtaatgcacattggttcaaatgttccaatgtggataatcgtacaaacatatctagttttttgacgtgtttcaataatgagtaatatgctttacctacttaaattggaaaatgttcagatccaaatacctatgtactaagttaatatgtgacatgtaacatgttgaatttatatattcaatcacaaacctatcattttcttttgtttaccgttttgtcacagagggttaaccaatgtctacgagatgcttgttctatatcgaccattccatattgtgattcttttatagactgtggacgtggcattgggagtggactgtacagacagcagtggttcaatgactcgggtgcagaagcttgttgttaactggaaatgatgctactttccaatatgggaattatgagcaggctgtgttgctcactacagaagacagtgctgtgaaacgatatatatattcattattttgggggggtcagcaaataagtaccttancaggaaaccttgtgccgagttactttatatgggaagtgctgtgcacgatggctattattgggctgggactgtggctttttgcattgcttattgggaaacatgcgtaaaattttctgcaagcgtcttgggaagaagaatataaggcgtgctctctctatgcacacgtacatcgatgcagtggacagggggatagagataattaaatgtgtttcttgggctttgatccagagggggggacaccttatatactgngacagagggagtataatgaggtgggaaatgcaactcaggcgccgtgatgttgaaaagtggatgagccataggcgattgcctgaagatttgagaaggaggggtagacgagcccaaaggtgcacctgggcagctactcaaggagtgaatgaagaggagcttttgagtaatttacct

SEQ ID NO: 8127 - DNA, 563 bp, Zea mays
  unsure (1)..(563): unsure at all n locations
  Clone ID: MRT4577_107410C.1
gcagatgnncgnncaccagcgaacctgcagctgccgaatctacagagaccagaggtgagcaacaatgtagggaaatagggctggcgggggcacgtgggtaacttggtcttggagcagtggagaaggagcatnccacannggaaaccaacacggtcagtcaaaaccaaatctagataatcatgatgctacttctatgttttatgtctgtttttgtctgctatcaattgttcatgcaagtgttatcaagtgttcatccatgctaagaggggttgaatacgactcaaatattcttttcgcgttttctctcctggctgntcttttcctgcactttccatctgatatttatcagcttctcactctagcagagttccttgcttcctgaaaagcctcatagctcaggtggtgttaaggtttttatcctaaaatcttattgctctactcctacatttttgtttggtntagttgnngtccatatgaaatngttgactntttaaaacatgtgtngtgtgtgcttacagggnggcatatcattctttngtttggtcgncttgatgtcttagtgt

SEQ ID NO: 8128 - DNA, 240 bp, Zea mays
  unsure (1)..(240): unsure at all n locations
  Clone ID: MRT4577_107411C.1
ccaaaccaaaacacctatatcatgctaagtantttggtcctaccacacacgatagggggagttttttactgggcgggccctacatcgaaagagagggaagaataaagccgatttcccacatatcaggcatcattaggggggcggaatgacatcagcgacgccacatgggatgaaagcggtagctgggcagctggtactggtaccgctagagggcacccattgtcggcctgttttgaacca

SEQ ID NO: 8129 - DNA, 880 bp, Zea mays
  Clone ID: MRT4577_107412C.1
ccccgcgtccgccccgcgtccgcccacgcgtccggcgggcgcgggcgtcgcaggaggcgtaccggcagctcggcgaggccatgggctccctcgactgcatcttcgacgcggcgtccgcaggcccgggaacgtgccgggacggcgacgccacgtgccagggcctgcggctgctgatgcggcatttcgccgcgtgcgcgcgcaaggccgcgccgggcggctgcgcgcggtgcaagcgcatgctgcagctcttccgcctccacgcctccatctgcgaccgggcggagctgcaggaccagccgtgccgcgtgccgttctgcagccatttcacggtgaagatgcagactgagaaggcggacaagacatggcggctattggtgaagaaggtgaggagggctagagcgatggccagcttggccgacaggcaggtgccggaggttgtggctatatcgtgggtgaagtataacagcagcagcaaatgggcgcgaaactgagacgaagatacactccttgtctggcatgtatggtgtagccttctgcaatttttttttgcgctgttggactccttgtccggcatgtatggtgtagccttctgcaattttttttgcgctgttggattatgattatgaatgcaatccgacgctgccatgcaaacgtgaggcctatgtctgaaacaaaaatgtaggcagagtcgattcttaccagatagatttagtgtttatttttttggagagatataaggagaatatagtactgttgtaaatccctgtatattatgcaatcaacttggacttgtgtatcagaaaaaaaaaaaaaaaaaaaaaaaaaaaaaaaaaaaaaaaaaaaaaaaaaaaaaaaaaaaaaaaaaaaaaaaaagggcggc

SEQ ID NO: 8130 - DNA, 762 bp, Zea mays
  Clone ID: MRT4577_107413C.1
agcttctgtttggctgctgccttgcgggtgacggctgctttggtgcgctgcgcagtgcgctccgtccgtccgtcgagcggaaggccgtcccctggcccctgctcgtcgccttcctcgggcgctcgtcttcctccgaacgagcgcgggacgccgacctgtcgttgttctcctggaggagcgcgcccggcggacaggcgacgcagtccagcgactgcgctgaggaagaaagcgagcgaccggagtgtacccgtccagtcgacccctgtctcctcttcctcggagcgagtggtcgtcctcctgtcttcctctcaggccgccatctgatccccgtaccaccgtgaccctggctctgcaatgctggatgctcgaggtggtaaagcgactgggatcatgttgggcagcatgcatgcgcaaaggatactgtgctggagatatgctcaaattggagtgaactcgtaccagatgtactgaacggacgctcggattgctcaaggaaatgggcgtggacgcatataagttctctatctcttggcccataatactgccgaagggaaccgaagaaggaggtattaacccggatggcatcaagtactacagaaacctcatcaacttgttgctagaaaacggcatagagccatatgtaacaattttccactgagatgtacctcaagcactagaagagaagtacggcggcttcctagataagagtcataagagcattgtagaagattaacatactttgctaaggtgtgatttgataac

SEQ ID NO: 8131 - DNA, 530 bp, Zea mays
  unsure (1)..(530): unsure at all n locations
  Clone ID: MRT4577_107414C.1
cttccctgtctaaaccaggctttgtgtagctgcgtgttgctcttccctctagaggctgacttataaagtcctcgacactttgttttgtctctagtcgtcgacgtgcatagacaatctttcctatttttctttttcaatctgtgtcccttgtttgtgcctccttgagctgtttgggctatcgctgcttccaacggaagtcgctcgcaatccccttgctccctataatctttatagccacccatcctgtcctgttactgatccaataatatcgtggttttttttgaactcaattttttgaccattttgttgcgtgttgccgagactgttacttactgctacattatcctacttgattaggtccctcatccacctcgttccatatactccccattttctttctgacattttccccgatcctctattccttatctttatttcataggtgatgcagctcaatgaggaatatcaatcggattcgctctttaaaaaannnnnnnnnnnnnnnnnnnnnnnnnnnnnnnnnnnnnnng

SEQ ID NO: 8132 - DNA, 833 bp, Zea mays
  unsure (1)..(833): unsure at all n locations
  Clone ID: MRT4577_107415C.1
tcaggtggattccccaacaatttcatcttttgtggttacgggaccaattaaaggaatttctgcattggcggattttcctgcactcaaagcatagtagactggtattccaggaagaaatgcaacattggaggagtaaagaggtgtggttgcgcttcccgggacactatcttgtgcataaggaagaacagctggaatgtaataggatgacgggcctatttggcatgtggagttagcagggtcagcaacatactcctgaggcataaatgagccatcgggtacgaaagaaggatctgaaggataaggaatgtaggtaggatgcatagatccattgtctggggctgcatagtatacgcattgcatgccttcagccgaatagaaaatatcttggctagcatatcctgaagagttcgggtgactataccattccattggtgatccaacttctgtatagccatattggtagggatttgcagtagcaggaacgaaaacattttgtccatacattacttcaggagtcattcccatctccatgcaactaacaattttgaacaagcaccttgttctactccaacgttcagacttcagagtcagcttgctgccgaatggagtagcctccgatcctttgctttgcttgtgatacagaacaagacccgagacgtaacggaggtaggtcgccggatgagaacgattccttggcccgaggagatgggggaggacaagatcctggaggcgaggcgagggcgaggggcagaggcaaggccagcgcgtggggctcttgtggttgacggatggagcgtgcgtgccgaaccgtagcgcgaggtcggntcactccc

SEQ ID NO: 8133 - DNA, 359 bp, Zea mays
  Clone ID: MRT4577_107416C.1
ctcccccattcctttggaattgcatctcctccggggtcccaaaggaatcgctgggcactacacgccaccgccaagggcccaaggaagggaagcttggggccctaggtcttgtctacatcaccgccgcaccctgaacgaggcgctgcgaaacgatcacaaccgttaccatcagccacctggcgatcccaacggacgggcaggcccaattccacaacgttttactcttattaaactccccaacttcgtctaaagaagcaagagatttcattatcaaaaactggtctatgttctccaaacttgatcacactggaaggtaccttaccacgttgccaatggactctccaatatcttatgatatt

SEQ ID NO: 8134 - DNA, 188 bp, Zea mays
  unsure (1)..(188): unsure at all n locations
  Clone ID: MRT4577_107417C.1
taacattccaccccccccccccacnaccataaactcaaaatgtctaccttcaccttctactcaaacaaaactatcaccaaatctccccactcaatcattcatatccacattaccatcctatcctactaactgattttatcctaactcatcctctcttttcatcaaaacattcataacccctcttccct

SEQ ID NO: 8135 - DNA, 613 bp, Zea mays
  Clone ID: MRT4577_107418C.1
gatagaaggtcagatgattggtctatcaggctatcaaatttcaatcttaagaagagatactacattacgggtgagagaacttgcagagcagaatgtgtcatttcagagagaagttacttttcttggagcaactaaggatgaagctttaatgaaagctgcgagtttgtaaacgcaaaatagcaaactaaatgacgatctagagagactcggacacgtgggtgagaaactgcattattcctcaacagatttgcaggctcgctttgctgagattgtagaggaaagggaccacatccgagaatatttgaaggccaaggagggagagaacaaagcattgcacaaagtaattgcaagactacaaacaacatgtaatgagcaggaaagaacaatcacaggcatgagacaaggatgcatagacgaattaggtaggaaatttgttgagtacagcaccaatgataaaacgagaaaattacaaatggaacttattagactgactggggtggagcaaaagttgagaggtgaaattcgatcttgtaatcttgaagtaaaatctctcagacaagagaacattgcactcttaaatcgtttacaaggtgctggaaatggagcaagcttc

SEQ ID NO: 8136 - DNA, 442 bp, Zea mays
  Clone ID: MRT4577_107419C.1
tgtgacgcgtgggcggacgcgtgggcggacgcgtgggctcccaccgccgggccaactggcgccgccggtccacctgccaccgccggtccatgtgccgtcgtcggtgcatctgccgccgccgaccatgccactacccttctcaaccgccccggcctcagcctcattcgcagccacactcttgccggtgctgacagccgcattctattccgtgtctgctgccgctatcctgcggcgtggccgctccccgggcctgggcctgggcgctttgtccctcatgcctcatggtctgccatcggccgcggccttctttccgccttcttgctttgccgtctttggcctgttgtgcctgtccgcccccctttttttttctcttttttttggcctgcccatcctgctccgggggctgcctttttctttttttttttgctgtccgggcgcgggg

SEQ ID NO: 8137 - DNA, 634 bp, Zea mays
  Clone ID: MRT4577_10741C.1
tgggtacctcgagccggccgggacgactagcacaccagtcccgacgcccaggtttagcgcgcgcaatggcactcgtgtccgtctcctcgtcctccaccgccgcacgtcgcggcgctccccaccaatgggcagcagcgggcgtcgtcgtcgttgttctcctcctcctcctcttcctccttcctcgccggaaagactctgctgacgcaggacgaggcagctcgggcgtcgttcgccgtgcgcgccgcgggggattccgacagggcgatctggatacccggcaacacccctacgccgtgggtcgacggcaagcttcccggagacgtcgggtttgatccctggaggctcggatatgagccggacagactgcggtggaacgtgcacgcggagctgatgcgctgcccgtgggctatgctcggagccgccggaatcttcatcccggagttcctgaccaggatcggcgtgcgcaccacgcccttctgtgacaccgtcggagagcatgagtacttgcccgacaccaccaccctcttcatcatcgagcgcatcctcatcggctgtgccgagggtcctcggtgtgctgacattatcaagtccggaactgtacccacagatgccatctttaccagcaactagctca

SEQ ID NO: 8138 - DNA, 375 bp, Zea mays
  Clone ID: MRT4577_107420C.1
ttcgggaaccttactatgtgaacaataagttccggactaattcctgtgggaggccttttgtctaataggcagtcaagggcagatgggctttgtagccaagattgtgattagatcaacaattatgatttaatggcatccatggccagtagaggatactctaggataggttgagttattcactatcttgccaggttggttgtgtgcagtgcacttgacatgtgaatgaaagctgattcagttgtcaattatgatctagaatgtgaaatggggggccatcaaatgaattgcagttgcagtatgttggccagtcatttttattttgaatagaaaatgaactgtattttatttaagattgatggggccaccattgacacc

SEQ ID NO: 8139 - DNA, 244 bp, Zea mays
  Clone ID: MRT4577_107421C.1
acatattacctcactctatatcactatatcatctacgcatatgctccaattctaacacctatattctggtttactatttaatcgcactatccatactcttgtaatgccattgcctcaattatttccattcacaacatgatcatttacatacataatttaactcaattctttcatgaactatattacttttaaaaaagcctttgaaccaacaatattacaacaaagtcttcatacttaaacttca

SEQ ID NO: 8140 - DNA, 136 bp, Zea mays
  Clone ID: MRT4577_107422C.1
gaacaaagtccaataacctcatatactcctacgtgagaacaaaaaccggcccacgttgaggatgttgatcgggctcgggcgaaacactggaccaaagctgaacactgaaagtgagatcacgcaaatcgcatttaca

SEQ ID NO: 8141 - DNA, 629 bp, Zea mays
  Clone ID: MRT4577_107423C.1
ggcgattgggatcctcgaggccggccggggcgaccccgaggggtggacgcctggtttctctcaaacaccgttgagccccctctgtgcgtgcctacctgacgtccgatctagcgcgtgcggcccagatcgttgcatcgcaggagagagctctcgggacctccgctccgccgccagcccgttgcccggctcgtttctctgggtttcctctctggctggctcctgcagcacgcgccatgtccacaactcacgcgcgctacacctatctacgctctctcgagaggcggaacagacgaccccacgactgcgagcctgcaaggtacataacacatcgctggaaggggagagcgcgaacagtggtcacggagacgccgtgattttcctagggtgctttggccgtgcctgtcagagccacgtagcaggtgccggtgtgccgtgtaactggcgtgtactgggcagcgagcccgaggtgtttgcggaaatgccgcggccagtgagatccttcctctgcgctacctgcgcctctcagcttgcagtcctgtacgtaccttctttcacatttgcaaaaagaaaaaaagttatataagcacctattgaagatgtgcaaaaaaaaaaaaaaaaaatttgcggcc

SEQ ID NO: 8142 - DNA, 252 bp, Zea mays
  Clone ID: MRT4577_107424C.1
cccacgcgtccgtctatattgtatagaactaagatcatgcttaattgacatatcttgtgatcatatctctttcattttggtacaaatgcatatatcttattattctcgtaccatgactacggctaatatgtttccaagtatatttctatactaagtcgtagattgaaagggaaatggagtcttcgtagaagacaaggcttccactcaactctatgggtgttatctaccctttggcattacttcgtaatctat

SEQ ID NO: 8143 - DNA, 523 bp, Zea mays
  Clone ID: MRT4577_107425C.1
ctcttctgtcttcgctctcgggacctccgctccgccgcccgcccgttgcccggctcgtttctctgggtctcctctctcgctagctcctgcagcacgcgccatgtccacaactcacgcgcgctgcacctacctacgctctctcgagaggcggaacagacgaccccacgactgcgagcctgcaaggtacatagcacatcgctggaaggggagagcgcgaacagtggtcacggagacgccgtggccgcggcgtggtgctggcggaaagcgagcgcctgtagcagattttcctagggtgctttggccgtgcttgtcagagccacgtagcaggtgccggtgtgccgtgtaactggcgtgtactgggcagcgagcccaaggtgtttgcggaaatgccgcggccagtgagatccttcctctgcgctacctgcgcctctcagcttgcagtcctgtacgtaccatccttcacatttgcaaaaagaaaaaaagttatataagcacctattgaagatgtttattgcttgcgtcg

SEQ ID NO: 8144 - DNA, 610 bp, Zea mays
  Clone ID: MRT4577_107427C.1
agaacaattaagtcagtcacagcctacaacagggctgccagccaacgacagacagagagctgcggaggagcaagagctgcgatggacgccgcccaggtgacgaatccttctgccgccacggacgatggagcgccgaccaccagcgttagcgcgcccgcgcactacgcctacgccgacgacaatgcgtgccccggcgggccgaaggtctgggtcctcgtgctcctcttcgcgctgctcctgctgcccttgctgccctccgcgatgcggcgcggcggcggcatgcactgggcaggaggaggaagctaccgccgcggcgggatcaccttcaagagcggctgggacgtcgtcaacctctgcctcgtgctgctcgccatcctctgcggtctccttggccgcagcggcggcgacggggagtcctcttccgccgcgacttccacggcgcccaaggacggtcatcgagaggtggcctcggcgcccgccacggcggcggcgactacgacctcggcggattgggattgggagaaagaaggctacgactccatgtgcagcatctacgccaccctgccccgcaccgaccacgctcacgcctgcgggggggatccgccggatg

SEQ ID NO: 8145 - DNA, 2012 bp, Zea mays
  Clone ID: MRT4577_107428C.1
tgggtacctcgaggccggccgggcaacttaactgagagagacgttgtcttgaaccaggtcggcaaacgtgaaatactggggacacctactgagacagcgattctagagttcgggctgtcacttggtggagactttttggcggtgcgcaaagcaagcactcttgtaaaggtggagccgttcaactctgccaagaagagaatgggagtggtaatccagctcccagagggtgcactgcgagcacactgcaaaggtgcatcagagatcatactggcatcttgcagcaagtacctgaatgaagatggcaatgtcatccccctggatgcaggaaccattgatcacttgaaggccacgatcgatagcttcgcgaacgaggcacttcgcactctctgtcttgcctacatagaagttgaggatgggttctcagtcaatgatcagatcccaacggatgggtacacctgcattggcattgtggggatcaaagacccagtgcggcctgcagtgaagaatcagctgctatctgcaggtcggcagtgattacagtcaggatggtcacaggtgacaacatcaacaccgggcaggcaattgcccgggaatgcggcattttaactgaaggtggcattgccatagaaggcccagatttcagaaccaagagtgaagaagagcttactcaactgataccaaagatacaggtgatggcaagatcttcgccactggataagcatacccttgtcaagcatcttcgaactaaactctacgaagttgtggctgtgactggtgacggaacaaacgatgcacctgctcttcatgaggctgatattgggcttgcaatgggcattgctggaaccgaggtggccaaagagagtgctgacgtcatcattcttgatgacaacttctccactattgtcactgttgcaaaatggggtcgatcagtttacatcaacattcagaagtttgtgcagtttcagctcactgtcaatgtggttgctctggtggtaaacttctcctcagcttgcctgacagggagtgctcctctcactgctgtgcaattgctctgggtcaacatgatcatggatacattgggtgcgctggcattggcgacagaacccccaaacaatgaactgatgaagagaacacctgttggaaggaaaggaaacttcatcagtaacattatgtggagaaacatcctgggacaggccttgtaccagttccttgtaatttggtacctacagacagagggaaagtggctgtttggaatcaagggcgataactccgatctagtcttgaacacactgatcttcaattgcttcgtgttctgccaggtattcaatgaggtgagctcaagggagatggagaggataaatgtatttgaaggcattctaaacaacaacgtgttcattgctgtccttggcagcaccgtcatcttccagttcatcataatacagttcctcggcgatttcgcaaacactacccctcttacgctcaaccagtggatcgcatgtgtttttatcggtttcataggcatgcctatcgcagctattgtgaagatgatcccagttggatctacgtagtgaattagagctaatttcgtccagaaactgaagttgggcatggctacagtctgatcatggcaatggagttttctgggttgccatttgtgtacaagatagatctgtgctatgcttctattctggtcaatctttgcctcttttatcctgtagtatcttatcagccaaggttgtggactcgattgttagaaaatgccttgggctcttgtagctgttctttgctttatatttttttcttggagcttttgctaggaacattggaggctggagctgtatatgacaatcttgttcactcgaatgtgcttgttttgacacctatcattttgcttcatctgataagtaatgtttcagtcagaagttccaaagaagggtggaattttaaaaaaaaaaaaaaaaaaaaaaaaaaaaaaaaaaaaaaaaaaaaaaaaaactagttctagatcgcga

SEQ ID NO: 8146 - DNA, 261 bp, Zea mays
  Clone ID: MRT4577_107429C.1
gcgctacctaccccatgtgaggagctgagaacggacgctgcagaatgatacgactgaggctcctacctgcattctgccatccctcacacagccaaaccccagatcatctgaaactactaactttgtggttccagattttttttaatctcctacttctgctatctttgatcaattctgggcacttttaaaaatagagtaatgagtgaatgtggatgatctgctattatctaaatgcaataaggaagtgttctctgagaccca

SEQ ID NO: 8147 - DNA, 748 bp, Zea mays
  Clone ID: MRT4577_10742C.1
cttcgaatcacaggagagctgcgtatcattgaattaaaatagaggaaaaacggcctgaggcccaggacaaacagaacacacacaaaacaaaaacacacactcacacccacaaaacacacacaatacagacacatacaacccactaacaccccagtctttcaataggcttcaagactctcctttattcagggcttcaattcaagacgtggctttctttggaaaggtcgaaaggatgtgctcggtggccactgcttagttgcttggggcaaagtgacacgcccaaaggagcttggtgggcttggcatctcagatttacaaaagctgaattgggcccttcgggttagatggttgtggttggaaagaacagatccctcgaagtcttgggctgatttacctctccagagttccagcattctgaaatcgatcctctctacaactttgattacagaaattggtgatggtcgtaacaccttattttggaggggcagatggttgatggggttgaggattgaggatttaactcctcatattttcgccctcgtcccgaccaggattaccaataggcgaacggtggcagaaggtatcgtggagatggcttggattcgggacctgagaggcaccatcacttgggatgtcctctctgattttttaactcttagtgaagtcattgcagattactccattaatgttggagtgccagacaagcatatctggaaattctccccgacaggccaatactcttcaaagt

SEQ ID NO: 8148 - DNA, 859 bp, Zea mays
  Clone ID: MRT4577_107430C.1
cccacggacgcgtgagcggacgcgtggggtggcattgccatagaaggcccagatttcagaaccaagagtgaagaagagcttactcaactgataccaaagatacaggtgagttcattagttgtagtactcatctttgcacgctttttttgtatcctggtaggtcattcatcagtgatcactgtgatttgctacggatgcgtggggtgatggcaagatcttcgccactggataagcatacccttgtcaagcatcttcgaactaaactctacgaagttgtggctgtgactggtgacggaacaaacgatgcacctgctcttcatgaggctgatattgggcttgcaatgggcattgctggaaccgaggtaatttcgggattttccttatgtttctaaaaataactagccatgtcattccaattatcacactactgctgatatcttgtagtaatcaccgatatcaaacatcttggaaatttattttttagctatatttagtattgtgatttttgctctttcactcttttatatggctgtaacatctatgggatctagatacccatgaccatgagtaacaccatcaattgcatgatatctcgagttatttgctatttactcccattttgaatttgactctttaacatgttcttaaaggtggccaaagagagtgctgacgtcatcattcttgatgacaacttctccactattgtcactgttgcaaaatggggtcgatcagtttacatcaacattcagaagtttgtgcagtttcagctcactgtcaatgtggttgctctggtggtaaacttctcctcagcttgcctgacagggagtgctcctctcactgctgtgcaattgctctgggt

SEQ ID NO: 8149 - DNA, 2597 bp, Zea mays
  Clone ID: MRT4577_107431C.1
cgtcgccccggctctcgatcctcgcccacgctctccacggaaggcgattgcgcgatgctcgcatcatccctaaaccccgcctcgtctctcatgaaaacattagcagatgatgaggcggaatgttcttcttgggatagcgacgatgagtaccagaaattcatccaaaacatgaaccctccaagatatactaaccactcctccattcccacgcgtccgcaggctcactgctgaaataaagaggagagacatgtaatttcacagctagttttagcacatgaatctataaattttacgagaaagataagttcgattggtcatataatatcaataaagagctaaataacatatagatagactgaaagattgctgcagtacagctgtgatttgaggggcgtgttagttggggttggggcgcgtgtgcgctccatttcacttcaccgttcgagtgggcaaaaagcagaatcctgcctttccaactccaagggggagttgccattcctgtcatccggtgtggcctttgggagagggagagagaaggaaggggaggcttcttccgttccggcagcggctccctccgctttcggttctttgcaagatcgagcgagcgcaatcatcgatcgctgccatcatcaccaggcaagcatggcattagcggatggagaggcggattattcttcttgggacagtgacgacgagtaccagaaattcatccaaaacatgaaccctccaagggtcaccatcgacaacacatcatgtccaaatgctacagtcatccatgtggacagcgcgaacaagtatgggatactgttggaggtagtgcaggtcctcaccgacctcaagctcatagtcaagaaggcatacatatcctcagacgggggatggttcatggacgtcttcactgtgacgaaccaaagtgggcacaagataacggacgaatctgtgctgcaaggaataaaagactacatttacaagtctatcgggcctgactcctgcttccttccctcgcggaggagagccgtcggggtggagccgtcctccgaccacaccctgatagagctaacggggaccgacaggccgggcctcctctcggaggtgagcgcggtgctcacgagcctggagtgcaacgtggtgagcgcggagctgtggacgcacaacgggagagccgccgccgtgatgcaggtcaccgacagggagtccgggctggcggtctcggacgcggagagggtcggcaggatcaaggggcggctctacaacgtgttcagagggaggagccgggacgccaagaccgcggtcgcgacgacgggcgccacccacccggagcggaggctgcaccagatgatgttcgaggaccgggactacgagaggcgcggcaaggacgatggcagggcggcggcgagcggcagcaaccccggtccggtggtttcggtcgtgaactggcttcagaaatactactccgtggtgacggtccggtgcagggaccggcccaagctcctgttcgacacggtgtgcaccctgacggacatgcagtacgtggtgttccatggcagcgtggataccgagggccccgaagcttaccaggactactacatcaggcacatcgatgggtgtcccgtcaattcggaggccgagaggaagaggatcatccagtgccttgaagcagccatagaacggagagtgtccgagggcctgaagctagagctgtcgacaggcgacagggtgggtctgctgtcggacgtgacgcgcatcttccgcgagaacggcctgacggtgacgagagcggaggtctcgaccaggggcgacgaggcggtcaacaccttctacgtccgcgacgcggccgggagcgccgtcgagctgaggacgctggaggccatccgccaggagattggccagaccgttctccaggtgaaggggcaccccgagcagccgaagccgccggtagccgcgcaggactcgcccaccaggttcctcttcagcagcctgttgttcagaccgaggtcgctgtgcaacctcgggccctgatgatgagttccagctccagttccagctagcgcagcgcgtgcatgagaattgagaactgtctgttgtcgggagatgctgctgtaccccaagggcccaagggcaagagttgtacaacgcgatcaggagtgttcattcgtcagaagctcagaacaggtgaccagaagtcgtttaaagcgaagcccacacccaacagctggtgaatactgaatacaccctatagcatcgtccaccgttgagtagtgaaaggtgtagttctgtaaggctatctccagtcctgtcgacatggtggtgccccattgcaagtatgattcattcaagcttgctgtaaatactgcctcccacggccatctccatctatttattctctagacatcagcagcggtccctgatggcgttgcctcttggggatattcagaggctgggtctgtcatttgcgcagggcgcacatgtcggaaatggccgccagctctgcgcggggccctagccctactaccatggctggctgcaagttggtgcttggaggagttctgggcgtggagtagtttgctcacgggatgcatgcgaggctcatcaaagct

SEQ ID NO: 8150 - DNA, 2226 bp, Zea mays
  Clone ID: MRT4577_107432C.1
cctcgcgccgggccggggatcccgcggccagaccaggcaggcagccacccactcacctcgaagccatttattaagccccgttgtcgccgccggcaacacacacttctccgcgttcctcgccgccgcctgagcaatcccgcggcgcactgtctaactcaccaccatgctgcagagcaagtcattcgtgaagaagacgaagcaaggccgcatccaaaaggtcgtcagggagcactacctccgcgacgacatctactgcggcttcgtaccctgcaccgcctgcgccgcagccgcggagcgaaagcttggcgccgctgccgccgccatcctcgtcgtcgacaccaacgtcgtgctccaccagatcgatttgctggagaacccggcgattgaggatgtcgtcctgctgtcagtggtgctggacgaggtgaagaataagaacctttcagttttcaacaggatcaaggcactgtgtatcaacaaagcacgtagattctatgttttcgccaacgagcagcacagggatacttacgtcaaagacatggttggggagagctctaatgatcgtaatgacagagcaattcgtgttgctgcacgttggtaccaaagtcatcttggtgagagcgtgaaggttctactgatcacaaatgacagagataacaaaaggaaagcgattgaagaaggccttaacgctgagacagttgagtcatatgtaagatcgcttgcacagcctggtttgcttgatttggttgttgttccaactagcggagatgtttctatggaagatgtagacgatcatagaccatcaaagaagaaagtaatctacaatgagcacaaacctatgtcagaaattacatctggtttgcggtgtggaatctaccatcaagggaagcttcgagttaatcgttacaatccgtttgaagcttatgttggaagcgagagcattggtgatgagattgttatccgtggccgctcaaatatgaacagggcctttgatggtgatatagttgctgttgagctcttgccacaagatcaatggcacgagtcaaagtcttttatagcagatgatgatgaagaagaagaagaagatgttcatttaccgggtaatagtgctgatgatgctcctcggaacactaattccacacaatcaacagttggatcatcagctccttccatttctagtcgtccagttgggcgtgttatgggtataatcaagcgaaattggaattcgtactgtggatccttgcagccgatgcccatgcctgctggtagtgggggtgtcgctcatgctttatttgtttcaaaagatcgaagagttcctaagattcgaattcaaaccaggcagcttgagaatcttgtgaacaaaagaattgttgtcgcggttgattcatgggatgttttgtctcgatatccatcaggacactatgtacgaaccattggagatattggtgacaaagaaactgaaacagaggttgtcttaatagagaatgatatcaacaccaggcctttctctacacaagtccttgcttgtttgccacctttaccttggacattatcaccagaagatctggctaatcctaatagacagacttacgccaagtgagagtctttagtgtggatccaccaggttgtcgagacattgatgatgcactacattgcacactacttcgaaatgggaactttgaagttggagttcatatcgctgatgtcactaattttgttcaccctggtacccctcttgatgaggaagctgcgcaaaggggcacttctgtttatcttgttgggcagcggattgatatgcttccaaagcccctgactgaagatgtttgttcacttcgtgctgatgttgaacgggtggcattttctgtcatttgggaaatgactccggatgctgatgttatatcaacgagatatacaaagagtgttatcaaatcttgtgctgcaatgtcttatgttgaagcccaggcaagaatggatgacagccgcttagttgatccactaactgtagacttgcggaacttaaattcattggcaaagatcatgcgacaacgccgttgtgaaagaggggctttgactcttgcttctgcagaagtaaaatttgagattgatagtgaaactcatgatccttttgacataggaatttatcaaatcgtgaggcaaatcaaatgattgcagatttatgttggctgcgaatgttcttgtgccgagaagatttgaagcattcccctatgt

SEQ ID NO: 8151 - DNA, 613 bp, Zea mays
  Clone ID: MRT4577_107433C.1
ctcgtagccggccatgaccacctcgccgaggccccagccacgacttcatccagggccgtgcctgaggcagggcggcaggggcagccgacctgggcccccatctcccaggggccccaccctatataaagtccaataggatattagggttatagtcttataagaattagggtaggcagtaccacatgttttaattctttatgctttcttgccgccgccgccgcctgccttcctgcttttcctgccgctgcttgcttttccagttttcttgctggctgctgcacgccgcgcgcgcccgcagtccagttttcctgctgcacgccgcacgcacctgcctgctggcagctggctgctgcctgcttttcctaccgtcgcctgctggctgctagcctgctacccacgccgcgcgctgctagcctgctagcgctgagagcctgggagctcagccgaagacgacgcagacactgccttctgcgtgattaacagattgttgttgacatcatgcctcctagaaaatatgcatcaggtagccaaaaaagaaaaagaaggaagcacacggaggattttgtcttggcacagaaaggagccatggataaatttcttataagggatatgg

SEQ ID NO: 8152 - DNA, 712 bp, Zea mays
  Clone ID: MRT4577_107434C.1
tttttttttttttttttttgcctgagtacacctggaattaactggcatcctttggtgcatggtgtcatcaagaaagcagttatattctagccttgctctctggaagttctggaaggttgtaagggacccagcagtcttgcattgatgttgtaggaacgaaagttgtgaaagcatggcctctttccaaccaggtcgaacttaatatgattggagcatatagtttccacattaatttgttgtttgagaggaataaaacacagatgttaacctggagtatctgttctcaacctaattcttgctgtactgaaaacatctttcatttgaaaaattaagagtaggatgcgataatacaacctataaagtatgaggctgtctcaacattgcgcctccattgcagcagtcaacagaagttagatgccgaggctgaatccatatatatgactttcaaatcctgagcttaccacaacttttctgatcataggacagccaatccatgcactgatcaactaccaataatcgttacatgaacatgatccacctttgaaatggtggaacctactgcggtccctcacaatgatctcccgatcataaatcttcgatattagcttaattgcagtatggcaatcgccacacaccctcaaattcttcactatcctgataggagtgccagaaagagactttaacaaggcaaatgcaatggccaacctctcgc

SEQ ID NO: 8153 - DNA, 294 bp, Zea mays
  Clone ID: MRT4577_107435C.1
cgcactagcacacaacacacatcgcttgagctccataccaccatgactgcctactattctcttcgtgttgaccctcaccatcctgcttaggctcagctggatcattcgtcttattcttcccgctcatcgagatgcctgatgctcagctgcctgccaaactacacgtcgtcctctgtatctgcctcttgggagccaaggctctctacagcgcacggcacttaccaaggacggcaccgatacttcaactgtacctactgaaggctgcgcttctccttctttttcttgtcatacggt

SEQ ID NO: 8154 - DNA, 519 bp, Zea mays
  Clone ID: MRT4577_107436C.1
aattaaagctcgttgttgtaccacattgccaatttaactggatgcaactttgttgcaatcaggcaatctcaacaaaatgaataacctattgactaccgcgccaatgcctccacctccacttgccttgacctactgttgtcgtagccacgggtgatgcgccctccacgctcaccaaggacgggagcgggagcaccgggaggtcgagcgttcccatcaacgggagtatgcagcaagatgtggcggagcaacgactgccatggccggcgtcaatggtaggcggcggagcaacgactaccatggtcgacgtcgatggtaggctgcggagcaacgactgccatggccgacatcgatggtaggcgacagagcagtgctcacggtggcggcgcagagtcgcctgtggtgcgccctccatgctcactccggctccctcgtcgtgtgcttctccaactcgatcatcggttccaggcggagaaccacgacggtggctgagagttatccagtcgatggcgacgcttcgag

SEQ ID NO: 8155 - DNA, 228 bp, Zea mays
  Clone ID: MRT4577_107437C.1
ttcccgggtcgagccacgcgtccgcgtcaaagcatgttggctaaatggcagcaattgttgttgttgtaagaaggcaacatgctttgacgaatcctaccaccttattgcaaccgcccaccatcggtggtgccatcttctagatttattattacagtataaatcataaagttctcatgctgatatgtgtgacctctcagtaataaagtattagagatctatattttaaaa

SEQ ID NO: 8156 - DNA, 1770 bp, Zea mays
  Clone ID: MRT4577_107438C.1
caccttttaatgggggcaatcagatccagttgcttaaaaatatactcaggacatgtgaaatacgcttcccatctgattgtgacttgagccatggctgcattgacttgtgcagaaagttgctgcggctcaattcagtggagcggcttacagttgaagaatttgtgcaccacccatttctttctgaacatgctccagagaagactttgagccttacacaatctgacataagagatggctttccaagaaataatagcagtccaacaaggcattcaaaccatagttcacaagaagattgtatgccttttcctttagatgatgagtcaagtggacaggacgagggtccagttcctgacagtaagagtctgatgaaatcttatggatttcccatgggtaaaagattggataaaacttcaggccagaagagtccaccgaaacataacagtttgttctccaggtatgtcttgggcaataatcatgcacctagtagccaacaccatggccattctggtaaagtgaccaaggaaagcaagattcatgaagtacaaggtcaaaaggttgtttatccagaagattcccctatcattgattcattagagtttgtagatcaggaatacgtcttcgtgtctggaccacacctggagggatcatcatcttcaacaaatgcctctcagcagcttaatgtaccagcaaaatatgataattcgtctgtttcaccaccaaagttaactttcatgagtgcaccaatgccgataaatggtttgccgattaatagacaacaacttgctgggactggtagctttgacagccactgttctcctgcatctggcacttcacagggatctgcagatataagtgatgccatggatcagcccccatctgattatctgacgaggattagattgttggagcaatatgcatcagccatagcagggttggtcagagatgagatcaaaggtggcagacacttggaagcgttctctattcagctaattgttcttgcaacctggaagcaagcaattcatataggaaatacctttgtagcttcacctgcaagggagagtccctcacaggatatccctatgaaggggcatattgctggtgcttcccatttgcctgcgaactcaaagctagctgatgatgcctgcatgcagatagagaaacagtttctctctgaagttgaatatgctgaagaactagccagcattgtgggacagatagctgatggtacagagatgccagatgcaattgaaatgatatttcagtcggctttactcataggaaggcgaggcggtgttgatgaaatgtttgggaaagccgcggatgccatgactgggtatatgagggcggtatccatgctgcggtttctcctggtcgaggcaccatcactcgccctcaacccccctttgactctaacgagatccgatcggaatcgactgcgcacatacattgacgctctcaacaccaggctctgtcagatgcagagccagaggcattgactgctgccatgcgccctcaaatcttgtccaggtgttgtacaatattctttcatttgtaaatatatttgttggcccaaactagggcatatgtaacatgtcagaactgtggaactaggcagagcagcgaaaatctattgtaaatatatttgtagtgtggaattaggcagagtgtacgtggtaggttcattctgtgtcgattcaggcagaagcttgaaaaccgaataaccaataatagtcacgtgtggaaatgtaaacagaaaagactctacttcgt

SEQ ID NO: 8157 - DNA, 186 bp, Zea mays
  Clone ID: MRT4577_107439C.1
tacgcgcgcgatacgcccgaggcgaagcagtcagcctgagccttccgctgatgagcatcggaacaagacagcacgcctccggcgagtaaccagttttgactgacgatgccggtacgttaactccggcggctcagtaggtgcctgcaacaggtcgtagctgacagctgatccgcatcggtgtgccca

SEQ ID NO: 8158 - DNA, 208 bp, Zea mays
  unsure (1)..(208): unsure at all n locations
  Clone ID: MRT4577_10743C.1
agagannntttttttttttttttttgggaaaagggtcaaattttgttttccgggtttacaactgtaacaacaggggtcgggttacaannaanaaaaaaatatttcgggcaagggaaaaaaaatagaaaaagcccctcccaagttacaccagcttaggccgttttttttaagacagggacaaatagtcagtgcgggggcgctacaaaac

SEQ ID NO: 8159 - DNA, 2477 bp, Zea mays
  Clone ID: MRT4577_107440C.1
ggccaagcggcgccgggcgccgggggggcagggcccgctgcggcgtccgccgggtcgggtgcctgcccgcaggtgtgcctggccccgctccgggtgcgggccaccctggcggcggtgatggtgtccgccctgggtcgtcgcagcttccccctccgcgggtgcctccgcgccgggggcgacatccttcgtcgcatccgacacgataacgtcatcgcactccacgactccgtcaaggatcatgggagtatatatctcatactggagtattgtcgaggtggtgacttacatgcataccttcaacgtcataaaagagtttctgaaaaggttgctaagcacttcatccgtcagttagcatctggtctgaaaatgcttcgcgataataacgtggttcaccgagacctaaaacctcagaacattcttcttgttgaaaataatgaaaatactctgttgaagattgccgactttggatttgcaaaatttttgcaaccctttgccctagccgaaacactttgtggttcaccactttacatggctccagaagtcatgcaaggtcagaagtatgatgcaaaggcagatctgtggagtgttggtgtcattctatatcaacttgttactggaataccaccttttaatgggggcaatcagatacagttgcttaaaaatatactcaggacgcatgaaatacgattcccatctgattgtgacttgagccatggctgcattgacttgtgcagaaagttgctgcggctcaattcagtggagcggcttacagttgaagaatttgtgcaccacccatttctttctgaacatgctccagagaagaccttgagccggacattatctgaaataagagatggctttccaataaataatatcagtccaacaaggccttcaagccaaagttcacaagaagattgtatgccttttcctttggatgatgagtcaagtggacaggatgagggtccaattcctgacagtaagagtccgatgaaatcttatgggtttcccataggtaaaagattggataaaacttcaggccagagtccatcaaaacataccagtctgttctccaggtatgtcttgggaaataatcatgcacctagtagccaacaccatggccatactgataaaatgaccaaggaaagcaagattcatgaagtgcaaggtccaaaaggtgtttatccagaagattcccctatcattgattcattagagtttgtagatcaggaatatgtatttgtgtctggaccacacccagagggatcatcgtcttcaacaaatgcttctcagcagcttaacttaccggcaaaatatgataatttgtctgtttcaccaccgaagttaactttcttgagtgcaccaatgccgataaacggtttgccgattaatagacaacaatctgctgggactggtagcttcgacagccactattctcctgcatctgtcacttcacagggatctgcggatataagtgatgccatggatcagcccccatctgattatctgacgaggattagattgttggagcaatatgcatcagccatagcagggttggtcagggatgagatcaaaggtggcaggcacttggtggcgttctctattcagctaattgttcttgcaacctggaagcaagcaattcatttatgcaatacctttgtagcttcacttgcaagggagagtccctcacaggatatccatatgaaggggcttagtgctgatgcttcgcatttgcttgcgaactcaaagctagctgatgatgtctgcgtgcagatagagaaacagtttctctccgaagttgaatatgcggaagaactagccagcactgtgggacagatagctgatggtacagagatgccagatgcaatcgaaatgatatttcagtctgctttacttacaggaaggcgaggcggtgttgatgagatgtttgggaaagcagcggatgccatgactgggtatacgagggcggtatccatgctgcggtttctcctgatcgaggcaccatcacttgccctcaaccctcctttgactctgacaagatccgatcggcatcgacttcgcacatacattgaagctctcaacaccaggctctgtcagatgcagagccagaggcattgactgctgccatgtgtcctcaaatcttgttcaggttgagggacggtagacttgtgcaatattttttcatttgtaaatatatttgttggcccaagataggacatgtaagatgtcagaaatttggaactaggcagagcagcgaaaatctattataactcgaccagactactattatgatatggaattaggtggagtgtacgtgttaggttcattctgtgtgaattcaggcagaagcttgaaaacgaaatgaccaatcatggtcacttgtggaaatgtaaactacttcgtagattctttattaaaacaatattccgttctttttcatgatctagaactaggttaaaaaaagggcttagcgcccgccc

SEQ ID NO: 8160 - DNA, 2982 bp, Zea mays
  Clone ID: MRT4577_107441C.1
agtagttagcattggattttagttaaatacatcaaaatatacaattgcatcaacataatggattacacaggctcctacggcctcccaggaaaaaataccgagaaagaatggaatccaccaagctttattttttttaaaaaaaagaaccctcaaagggaaaaaggctgcacactggaagacgaaggcaaaccctagtcgctactccaccgcggcgccaaccacctcgatcgggctccgatggacttcgcggagctggaggccgtggagggcctccggtggccatggcactcgtggccgccgactacccccgccgccgcgtccctcgtcgtgcccacctccgtcctctgctcgccgctgcagcaccccacggcgccggacctcctcccgctgctaccctacgcgccgctccgctgcgcctccccgggttgtggcgccgcgctcaacccgttctcgcgcgtgcaccacggctccgcgcgctggtcctgcgccttctgtggcgccgccgccaacccgttcccccgcctactggcccccgacgcgctccccgccgaactcttccccacccactccagcgtcgagtacttgctgcccccggaccccgctgagcccgggggaccggggccacctgcgctcgtgttcgtgatcgatgcggccacggcggccgaggagctcaccgtgctcaaggacgaggtgcgcaggctcatgcaggggctgcctgaggggatcagggtggcgctcgtcactttcgctgcgtctgtgtgggtgcacgatcttggatttgagggttgcgctcgggtggttgtgcttaatggcgagcgtgagctcgagtctgacaagcattctagtttcacgagtatccacaatctgttcctgccgcagtcagccttgaaatttgaatacttgccactagcccagtaccagtggcaactgatacagaaacttttaggtattcaccgttcacagtacaagaacttggctatgccaaggtccactgaagtgcagcggtttttgctgcctgtttctgaatgtgaatttaacatcacatctgcaatagaggacctgagctccatgcctgcgtgtccacgtgggcatcgccctttaagagcaactggcgcagcgatttctactgctattgctcttctagagggttgctgctcacccagtaccggtggtcggattatgatctttacatctggtcctgcaacagttggtccagggtgtgtggtggaaactgatcttgggaaaacaattcgttctcatcgtgacatattcaatagcaacgcaccgctgactgacaaagcacgtgatttctataagaaagttgcaaagaggttgacagaccatgcattagttcttgatctattcgcctgctctcttgatcaggttggggctgcagagctgaggaatccaattgaagtgacagggggtttaatggtgcatacagagtcatttgagtatgagcagttcaaaagctgttttaggcatatgttccgtcgtgaaggcaccaattaccttaatatgaactttaatgcgacgattgaaatagtgacatcaaaggaggtgaagatttgtggtgcccttggtccctgcatttccctccgcaggaaaaataactcagttagtgataaggaaattggtgaaggtgggtcaaattattggaaaactagttcactgagcagcaaaaccagcattgctttccttttccgagttgattgcaatcataaagctgatccgccgactgtcttctttattcagtttatgacaaggtaccgacatggtgatggtagttatcgcctgagggtgacgactgttgcaagaaggtgggctgctcctcgatctcctgaaattgctgcagggtttgatcaggaagctgctgcagctgtaatggccaggcttgctgtttacagggcagagacataccatgttagagatgttatacggtggcttgacaagatgcttattcgctttactgctaagttcggaaactatgttcctgaagatccatctacatttcggctgtcaacaaacttctccttgtatccgcagttcatgtactacttgcggagatcacagttcattgatgttttcaacagctctcctgatgaaactgctttcttcaggttgatgctgaatagggaaggggttgtggggtctctaatcatgatccagcctactctattccagtactcatttgatgggccacctattcctgtactgttagatgtcagctccatctctcctgatgtcattttactatttgattcatacttctatattgtgattcattatggctcaaagattgctcaatggaggaagcttggctatcataaggacccaaaccatgaaaatttacggaagctccttgaagcaccagaagtagatgcagaggcactattggtagaccgtttccctgtgccaaaccggccggggtgtgatcatcatggtagtcaggccaggttcctgctcgctcgattgaatccatctgtgacacagaaaacacagttttcaaagggatctgaagtcattttcaccgacgatgttagtctgcaagtgtttattgaacacttgcaggagttggctgttcagggctagaaagtcatgaagcttgaccttgtctgctattccactttggtccattagatactgaagatatgactttgagagggaccagacttcatattcacagatgaagcttgcaagttttttattgaacacttgcagtaattggtgtgcaggattaactagttcatgtggaattatttaaatgcaattttctgctcacttgcaaatactggggagctctactgcctggagtgagatctccctgagttgtacattgctcaagctccagtttgatgtaagacaattacattttacccgttttgtatagcatgtggtattatccactggggaaaaaaaaaaaaaaaaaaaaaaaaaaaaaaaaaaaaaaaaaagaaaaaaaaaaaaaaaaaaggggcggcc

SEQ ID NO: 8161 - DNA, 977 bp, Zea mays
  Clone ID: MRT4577_107442C.1
ggcacgaggctcacacgaccatggccgcgacgatgaccggcagtactcgcgccagcggcggctccttcctcgtgcttctctttgtcgtgctggtcggcgtcgtcgacgtcgcgtccgctgccaccaccgtggcgagtgctactgttgccactaacagcggtgacagcgccgccgcggcccttctgacgatgccggcgtcggcgtccacggggcagctgaatggcatcatccagtgcctgctgggctgtttcacgcaggtgttcagctgctcgttcgggtgtatgggaaagcagggcgccgacctgccgctctgcatcatcggctgcgaccagaggagcgtcgtctgtatgatccgctgcgggctcgcgccgtcgccgcccacgccctcgccaccggcgcccaagccgccttcgcccaagccacccacgccgaaacctcccacgcccaagccgcccacgcccgcgccacccacgcccacgcccgcgcccacacctaagccgcccacacccaagcctcccacgccagcgccaccaacgcccgcgccgccgacgcccatgccaccaacgccagcgccgccggggccgccgtacactccaccgtacgccgtcaccggacgcaagaccgcgacatttgactaaacatgccgacatatgtgctagctctcgaccgatccatcgtaccaataatttatactccataaaccgagcatatatgtttataaccattaaaaaagaagcatatttcatgctatagctttttattaattaacacggtcaattctactgtcgcaatgtctattagtatgtccacagtgaaggccaaattatgtataatgagtaatatatgtacacaatttaatagatcaatgtattttgatcttttaatatgatgaatgtactttgttctttttattcacatgtaacgctatttgtaagtatataattcatgcaagaaccattacactatttgtgaaggct

SEQ ID NO: 8162 - DNA, 4507 bp, Zea mays
  Clone ID: MRT4577_107443C.1
tgtgggttagatgtcagctccatctctcctgatgtcattttactatttgattcatacttctatatcgtgattcattatggctcaaagattgctcaatggaggaagcttggctatcacaaggacccaaaccacgaaaatttgcggaagctccttgaagcaccagaagtagatgcagaggcactattggtagaccgtttccctgtgccaaaactcataaagtgtgaccagcatggtagtcaggccaggttcctgctcgctcgcttgaatccatctgtgacacagaaaacacagctttcagagggatctgaagtcattttcaccgacgatgttagtttgcaagtgtttattgaacacttgcaggagttggctgttcagggctagaaagtcatggagcttcaccatgtctctgctatttggtccacttgagatcctgaagatatggctttgagagggaccagacttcatatttgcagatgaagtttacttgcaagtttttattgaacacttgcagtaattggttgtgcaggattaacatgttcatgtggattatttatatgcaattttctgctcacatgcaaatactggggagctctactgcctggaggagtgagatctccctgagttgtacattgctcaagctccagtttgatgtaagccaattacattttactagttctgtatatcatgtggtattatccactgggaatgctggattttctcccaaaatgattgttgtgattccatccagttttggctgtaggtcaccaagcaccaaaaaagaaaatacggggtacattcaggccccggccgggagagctgcacactggtcactggaaaacgaaggcaaaccctagtcgctactccaccgcagcgcccattacaccgatcgggctccgatggacttcgcggagctggaggccgtggagggcctccggtggccgtggcactcgtggccgccgactacccccgccgccgcgtccctcgtcgtgcccacctccgtcctctgctcgccgctgcagcaccccacggcgccggacctcctcccgctgctaccctacgcgccgctccgctgcgcctccccgggttgcggcgccgcgctcaacccgttctcgcgcgtgcaccacggctccgcgcgctggtcctgcgccttctgtggcgccgccgccaacccgttcccccgcctactggcccccgacgcgctccccgccgaactcttccccacccactccagcgtcgagtacttgctgcccccggaccccgctgagcccggggggccggggccacctgcgctcgtgttcgtgatcgatgcggccacggcggccgaggagctcgccgtgctcaaggacgaggtgcgcaggctcatgcaggggctgcccgaggggatcagggtggcgctcgtcactttcgctgcgtcggtgtgggtgcacgatcttggatttgagggttgcgctcgggtggttgtgcttaatggcgagcgtgagctcgagtctgacaaggtttgtgaatttgtaatatgatccttaggacatcgaatttgtaatttggttctgcgccaatctatgtgacatgatcagcattctagtttcacgagtatccacaatctgttcctgccgcagtcagccttgaaatttgaatgtaagtatcttgttataatgctagttcaggggcatgtattaactttttgccattattagcatgactcatctaatccctctcacgctcacctgcttgtgcttcacacttgcaactagcccagtaccagtggcaactggtcaaatacagcaagtactatgtttccaatgaataaatgcaggggcaatgccgcaatgccatctttgaacttatgttacataacttttgtcttctgatagtattgcttatgttgagggccgttacatctactgaaatagtcaaatgtacattgtacatagcaacttgaaataattatgcttgtaaaattcttcgtggcctggacactttatcaatgcaatgtactcctctttttataagagctgtaggttcttcatgttctaaggtggtggttgttgttggatgtataacctgaatatctctgcactgtaggatagcactctcacaaatgcctatgtccatatataatgttagagaaaatgtggaaacttgaaactgcatagccagagaaaattttccctttgtctaaaactttgggtttggtttacagttcctgttgctatgatcctgttgtccaaacttgcgatataaaactgtctcactcatgttttgaatttcttgaggtttggtgatatgcttttgcaattcctggtattttgaaaattattgtggctactgtatatcacataaaccttcgtttatatttcagatacagaaacttttaggtattcaccgttcaccatacaagaagttggctatgccaaggtccactgaagcacagcggtttttgctgcctgtttctgaatgtgaatttaacatcacatctgcaatagaggacctgagctccatgtctgcatgtccacgtgggcaccgccctttaagagcaactggcgcagcgatttctactgctattgctcttctagagggttgctgctcacccagtactggtggtcggattatggtctttacatctggtcctgcaacagttggtccagggtgtgttgtggaaactgatcttgggaaagcaattcgttctcatcgtgacatattcaatagcaacgcacctttgactgacaaagcacgtgatttctataagaaagttgcaaagaggttgacagatcatgcattagttcttgatctattcgcctgctctcttgatcaggttggggctgcagagctgaggaatccaattgaagtgacagggggtttaatggtgcatacagagtcatttgagtatgagcagttcaaaatctgttttaggcatatgttccgtcgtgaaggcaccaattaccttaatatgaactttaatgcgacgattgaaatagtgacatcaaaggaggtgaagatttgtggtgcccttggtccctgcatttccctccgcaggaaaaataactcagttagtgataaggaaattggtgaaggtgggacaaattattggaaaactagttcactgagcagcaaaaccagcattgctttccttttccgagttgattgcaatcataaagctgatcccccgactgtcttctttattcagtttatgacaaggtaccgacatggtgatggtagttatcgcctgagggtgacgactgttgcaagaaggtgggctgctcctcgatctcctgaaattgctgcagggtttgatcaggaagctgctgcagctgtaatggccaggcttgctgtttacagggcagagacataccatgttagagatgttatacgatggcttgacaagatgcttattcgctttactgctaagttcggaaactatgttcctgaagatccatctacatttcggctgtcaacaaacttctccttgtatccgcagttcatgtactacttgcggagatcacagttcattgatgttttcaacagctctcccgatgaaactgctttcttcaggttgatgctgaatagggagggagttgtggggtctctaatcatgatccagcctactctattccagtactcatttgatgggccacctattcctgtactgttagatgtcagctccatctctcctgatgtcattttactatttgattcatacttctatattgtgattcattatggctcaaagattgctcaatggaggaagcttggctatcataaggacccaaaccatgaaaatttacggaagctccttgaagcaccagaagtagatgcagaggcactattggtagaccgtttccctgtgccaaaactcataaagtgtgatcatcatggtagtcaggccaggttcctgctcgctcgattgaatccatctgtgacacagaaaacacagttttcaaagggatctgaagtcattttcaccgacgatgttagtttgcaagtgtttattgaacacttgcaggagttggctgttcagggctagaaagtcatgaagcttgaccttgtctgctattccactttggtccattagatactgaagatatggctttgagagggactagacttcatattcacagatgaagcttgcaagtttttattgaacacttgcagtaattggtgtgcaggattaacgtgttcatgtggaattatttaaatgcaattttctgctcacttgcaaatactggggagctctactgccaggagtgagatctccctgagttgtacattgctcaagctccagtttgatgtaagacaattacattttacccgttttgtatagcatgtggtattatccactgggaacgtttgatttcttcagaaatgacttttgtcattccaccaaaaaaaaaaaaaaagcggcccccaaatgattgttgtgcattccatccagttctggctgtatggtaaccaatatgggggatacttgctgttttgtagactcattagtttgttatgcccctttacgccc

SEQ ID NO: 8163 - DNA, 309 bp, Zea mays
  unsure (1)..(309): unsure at all n locations
  Clone ID: MRT4577_107444C.1
ccagccnnncgacccatccacaccgccaccaccgcctacctccaccaccagtccatctcctccgcagcgtctaagccctaccggattccccctcgccgaagcccggacacatggccagcttcggcgtcgacacccgcccggccgccgcggcctccggcggcggcgtgggcgtggcggggacgagggagggcgcgctcncgntnctctcccgcgggctgngggaggaccnnngnntnatncgnncgcggnccggggngntnnngatcttttttannnnnnnnnngccggaacccgagctgttcgcgcgcc

SEQ ID NO: 8164 - DNA, 304 bp, Zea mays
  Clone ID: MRT4577_107445C.1
attcggcatacgagccggttcgttaagctcacatgttttccgccgccctttttttttttattgggggggttttctacaaaattacggtcggggtgcactctcatgcttcatgtttcggccataagaccaaaagtctgatccgatattgaagatcaactggtggggaattattctgaaagaatcagaacaagtgttaaacgggtggaacacaattaatccgaaccgtgccagagtagaactctggtccggaacaacgcaagtcgcgaccagtgcgcagattaccctttagcaggcaatgctttat

SEQ ID NO: 8165 - DNA, 267 bp, Zea mays
  Clone ID: MRT4577_107446C.1
attcgtctcgagcattattaaacaccctttttttacctggactaaatcacccagtcaacgtggggtttgattaaacctggaggtgggacaccggaaactaaaacttagtgtctaaccgtaaaggtgaaagaccagcaccttttgatcccatgcaacggaggacctaaataggaacacctttttccctagacggtaggatgaaaaaactttttctagatgctttcatcctaccgatgttcatccatagacataacacatgttaaattt

SEQ ID NO: 8166 - DNA, 335 bp, Zea mays
  unsure (1)..(335): unsure at all n locations
  Clone ID: MRT4577_107447C.1
cccgggccgaccaacccttccgaaaaaaaaaaaaaaaaaaataaaaattaaatttaaaaaaaaaaaaaaaaaaaaaaaaggaaaggtgggctttcctatttggagagtccaacctaacnaccccttccttccaacttaaaacttttttaatatttcacccaaaatcaaatcaactgcccgccttttaacaccttcgaacctgaaaaacccctgccttacccaaattaaatccctttcaaaaaaatccccttttccaaatttcccaattacaaaaaacccccaacccatccccctttccaaaaatttcccaacccaaaatccaaaatggacccccc

SEQ ID NO: 8167 - DNA, 158 bp, Zea mays
  unsure (1)..(158): unsure at all n locations
  Clone ID: MRT4577_107448C.1
gagatgacgacgaaagggaaaatcgagagatgaccaccagacagtccctcccgaggaacccctacgctgctgcaggacatgcatgatctcaggcgcactcttacncaccgccaccagatgtgacccgcctcccctcgtgccatggacatccaccacca

SEQ ID NO: 8168 - DNA, 961 bp, Zea mays
  Clone ID: MRT4577_107449C.1
cgccggccccggccgggaaaaccaagccccggccagctctctacggactcttcctgtctcctcgtcttgctggagccagtattaacagatccgggttcgagcgtccagtctcgccggacctccgactggcggtcgctgctatctctctggtaccgcggtctcttgcgcgcttctctccattcgctcccactcaccggcttgggggaatgaaggatgtggtagggagcccggggacctggagtggcatggcgctgcggttgtcgcaatgcgtgtccgctggcgcatccatgggcgctatggccacagcgtacggcttctccaactacactgctttctgctacttgattgcttcaatgggcctacaacttctttggagttttggccttgcttgtcttgatgtctactctttgaagactaaaagagatcttcacaaccctgtgcttgtaagcctttttgttgttggggactgggtcactgcaattctgtcgtttgctgccgcgtcggcgtccgcgggcgtgaccatcctgttcgagagggacgtccacttctgcaggatgtacccgcagttgtcgtgcggccggtacgcgctctcggtggtgctggcgttcatcacctggtccttcatcgcaacttctgctgtctccatgttctggttgctgccgtcgctctgatgtggcacggaaggagcctgccgtgtcgtcctgtttagatccgtttgcttcagcagctggttgatgccctgggtcgctctgggttgtgtgcttaagtaactatcaggatcctgatcttaaccggatgtactctgctggagacgagaaattatctagtgtatttgttaaaacaatgaggtggtttatcttcttatttctttttttaccatcgatgttgaatgtggtccatcatctttctctatctctaccccttaaacccaagttttgtgtgtcgagcgtcgttgtcgtgt

SEQ ID NO: 8169 - DNA, 232 bp, Zea mays
  Clone ID: MRT4577_10744C.1
cttctgaagaaacaataacagagcaaaacacacaaaaaagcgggtaacatgggaaggtgaacaagcccaagagaaaaagtctcccccactcctcactcgcacgcagaacgagtgcagccttgggcgacggagcacagcaccacaatccacaagaaagaagacagagaacaggagacggagcggaggatcggaggagctctgacctttgcgcgggcaggcgccgccgcaattc

SEQ ID NO: 8170 - DNA, 356 bp, Zea mays
  Clone ID: MRT4577_107450C.1
caaccacttactctcgtgcgctctcagggggagcgaggactcgcggtcggcggcagcaacaggttctcctagatctactggtaagcggggaaagaagaggaggcgttggacgaattaatacccactctttctccattacgattgtcgtggcgtccaacatcatcagtaacaaatggttgacgaggaggacattcatccccttgctggtgacaatggaacctgcatctacaatgctggttttgctggtgacgatgcgccaagggctcttttcccaagcattgtcgggcgcccccgtcacactggtgtgatggccggcatggggcaaaaagatgcgtatgttggtgacgacgcccacc

SEQ ID NO: 8171 - DNA, 211 bp, Zea mays
  unsure (1)..(211): unsure at all n locations
  Clone ID: MRT4577_107451C.1
ttggtactgacggacaaaagcnaganctggttgttcataatntacaggccttntnaangacagatcngcatcaaggcncgctgncatacntgcccgaaacctgccttccangctgncagtttgtgtcctntgngnnaaanagtcggaggtcaaggttacaaggttcctacatacatgncacatnantacnnaagaggttnttctgggntta

SEQ ID NO: 8172 - DNA, 1015 bp, Zea mays
  Clone ID: MRT4577_107452C.1
tgggaccctcgaggccggccgggctctcttctcgcctccaccaccaaaaggggtgagaggcacggggaccgcccgcctcgctcgctggcctgcacactggattcggcgccgcggcggtagttgcagcggcggcctggcagggagatgtcttcacgctcggggtctacgagcggcgggagcaccggtggcggcagcagcgcagggggaggcgccgcggtgccgctggccttgctgctgaggcgggaggtggccagcgagcgcaccgcatcggagcgaccggagctgcactcgggcctcttcagccaggccaagaaaggcgaggacttcacattcctcaagctcgaatgcgagcgcgtccccggcgtcccgtcctcctccttctccgccttcggcctgtttgatgggcacaatgggaacggggccgcaatttacaccaaagagaatctcttgaacaacatcttgaacgcggtccctgctgatctcaacagggaagactggcttgctgcactcccaagagcgctggttgctgcattcgttaaaacggataaagatttccagactaaagcacgttcttcagggacaaccgtgacatttgtcatgatagatagcttggcactgtttcttcagtaggtgcttcccgttgtgtactacaagctgaaggttcaatttaccatttatcctctgatcatcgatttgatgcaaaagaggggggtgatcgtctcttgttgaatccggctttaattcatgactagagactttagagtattatcagtccttgttgaggttcagcctttgctgacaccaatgtaattaacatctaaaaatattctttgaatcagcttgtgattcatcagcatgacgttagttgtcatgtacaatgtacaaaatcttgctaacaggacaggtctgtttcctcctctacgttttgtcattacatggatgaaaattaattggtgtgccaattggaggaaagaattgttctagtaaatgttgatggtagacgtgactttcactc

SEQ ID NO: 8173 - DNA, 330 bp, Zea mays
  Clone ID: MRT4577_107453C.1
cgtactataacgtcttaggattctctctagaagcggcgcgcgcctttattttttttttaattttaaaattaaaattgggggttttttgggtaatgtgggtatttattttttttttttttttagggtaaatttaaaccaaacaattctttaaaaaaacggattttaaatagctagggaaacaaaaagctttttttacagggagcttataaccaaattattggacaaatgcatttacagggtaagcaaccattacacattccaaaaaaaaaaacactagtttaaaaacgggcactaccaaatatttgggcgcaatcccaaaaccatgccaaa

SEQ ID NO: 8174 - DNA, 316 bp, Zea mays
  unsure (1)..(316): unsure at all n locations
  Clone ID: MRT4577_107454C.1
atcgtgcctataacatactggtggccacagcaagtcacgcctgctactctcacccttcttcaaccatacagtatctcctcaaggctccccacccaaatggggggctatnacctcaactcctcacccctccaccactaaaaagcctccatccaacctcccatccccaatccccacctccccaacttcacctctatcccctcttctcacctcaaaccctattcctcccctctccttatctttacctacatcttcctcattcccattaaagctgcgactatcctcaatcacacgtacagcatcatcgtgcctacctaca

SEQ ID NO: 8175 - DNA, 394 bp, Zea mays
  Clone ID: MRT4577_107455C.1
aaataaaaaaaaacgctacgagcgacgtgaagaaaaagggccaagtcactagagtgaaagattgcaagagaaggcgggggaagcagggatcacacaggtgagcttccttctccgcgcaatcagtaaaaaccaaatccggaaagcgccggcttctttatactcccacctttttcccgacgcttgttggatcacggaacgcacgccgggcaccggaacgcagctggtgagtggggggaccgacctaccgactatctcctaccagctgcaagctgtacgtggagcgccagccgagagagaaagagagagagagagagagaggaagataaagacacagagagagagagagagagaaaaagagttagagagagagagagagagagagagagagagggac

SEQ ID NO: 8176 - DNA, 560 bp, Zea mays
  Clone ID: MRT4577_107456C.1
cggcacgacggagaagatgaggtgggtccactggttgccagacatgtgggtccactggttgccagacatgtgagtataggccttctgtgaggaaaacaagctagaggaaccattgcagagccatttgcctctctgatcatgttgcggaagatttgccaataagtcttgtaaagcatgaaactgctcaaaagcttcaacagacagaggagtgtggaacatctcatgcgaggttgccgttcttgcttggtgaatagtgatgtctttgatggaagcgaaagaccaaagttctgggaatcttgcagacttgcacatgccatcccagttgtcatgacacagaagtgttgtttttctatctccaatctccacccaagctaactctttataagattcttgaattttaagaatgtctctccaccagaatgagcctaattaagggacgacgtaattcatgtgtcgaaagcctccaactagagtgtaaatggtagataattttcgtacatatccaatttcaaatatattgagaattctataaaaaaaaaaaaaaaaaaactcgagcccgg

SEQ ID NO: 8177 - DNA, 806 bp, Zea mays
  unsure (1)..(806): unsure at all n locations
  Clone ID: MRT4577_107457C.1
gggctccccctcctcctcctcgattgcggccctcactcgccatgtcggggctctacagccaggggttctcccctgcgcgaaacctctcccctcagattagaagcaatccggacgctgatagtcagtacctggccgagctgctcgccgaacaccacaaactgggacccttcatgcaggtgctgcccgtatgcaacaagctgctgagccaagagattacgaggaaaaccgggctatgagcacctgagtgatccgctgcatatcttggtagaggccgagttccctgccagtatcatcgatgcaaggctgagacaagcacaggagattatagaagaattgcttaaacctgtggacgagtcccaagatctctacaaaaggcagcagctcagggagctggcaatgctgaactcaaccctgagagaggacagccctcatcctgggggtgtctctccattcagcaacggtggcatgaagcgtgcgaaaacaggacagtagagaaaacaactatgctcccatatctggccccgtcgtcatgggaacgccatgggcatgccgcatgcgtgaaggaaggccatgcgccttcgctggcggagtccggtatcttctgctagctntcacctccggtcaggggaaaggtgagatgagatgagatagtcgcggacccttggttggatccggcgttggttgttgtatggtctagaacattcgttctatttgttattgacggttaaccctagtatgttggtgagctgcaacctgcaaactgcatggtaaactagctagagaggcctgctgagtatgtgagcttt

SEQ ID NO: 8178 - DNA, 800 bp, Zea mays
  Clone ID: MRT4577_107458C.1
gagtattccgttcctcctcctaccaccagcaccaggtctctgtttctccagtctccccaccgtcctccctcatcccaaatcgaaccgcctccccgtcgcatcgatcccaatctgaccacccccaaaaccctaaccctcactcgcctcctagcacggcggcgagtcacggcggcggaggcttgagatggctgcgcgggcgtaagcatttcggaggcgatcgcggaggtgggggcttcctgtgacccgccagcggtctagctggtgccggcccgtgcccgtgggtatggcgacgtcgtcgtcggctagcgggggcggtgccgccgggggcgcgcctggactcaagacttacttcaagacccccgagggccggcataagctgcagtacgagaagacccactccccctccgtgctgcactacaaccacagctctggtggcaagactgtctccgagatgacagtggcatatttgaaggagaagcccgtggggcagggctctacaccatcaacaccaagttccagcagtggcatgcgatctgcagctgcgagactgcttggtaccgggaatgggagccggacacttagctttgcaggcagcaacggtgtcagcagggctgtttcagggagcagccgtgtggggtggcggcgttggtatgtcaacggggcgtcggtggatctcaagctgtggcgaattacgatggcaaggggacatacatcatcttcaataccgcagatacactgttcattagtgatctcaactcacatgaataagatccagtaaagtccatccactttcagcactc

SEQ ID NO: 8179 - DNA, 619 bp, Zea mays
  Clone ID: MRT4577_107459C.1
cccccctcgagttttttttttttttttttttttttttttttttttttttttttttttttttttttttttttttttttttttttttttttttttttttttttggggcaaacggaacaacaacctccggaaacttcgacggggaggattcgggttttacagaaagctataaactcggggccaaaaacattacacgggggcttttggtatggaaaccttggggaggggacactgggccctgcatcaccccccctggacatggccaaaaaatttaacacaaaagccgagtggccccaccacctaaggtggttggttcctttttttttaacagaagggttaaaacccccggcaaccatgctgatttgatccataagggacccccggacgggtcccgggggggtttttgggatgccggccaaatacccggggggggaaagggcgaacttcaggggggccctggggggggggggccttttgaccaggtaatcctccagaagtttttcccccacccccaacattttgctgaatgctcccccgacaaaaacccttgagtaggcccccacgattgctttccccacggccacattggtttggacctttaaaacatctataaaagtggggg

SEQ ID NO: 8180 - DNA, 293 bp, Zea mays
  Clone ID: MRT4577_10745C.1
aataagtaccaacaatgtcaagcgaaatattttgcttcttatgcttcttggtctatcttcaagtgttgctaccgaaaccattttaccacaatgctcacaagctcctatagcttaccgtttttccccatacctgtcaccaacagtgactatcaatgtgtgaaaccccaattgttcaaccctacatgatccaacacgcaatctcaacatgcatttaaccattatcactcttgtgtctttaacaaccatcaaacctattacagtagttacccttttattcatttttttggacaaaa

SEQ ID NO: 8181 - DNA, 690 bp, Zea mays
  Clone ID: MRT4577_107460C.1
gagggtttccagagcggcagcggctgcggctgcctgccaacccctctacccccagctctgcaggctgcaccctaaagcagcgagcctttttaccactcttcctgctaccaccccacacggcgcacacaccaccatctctcgtcgcctcgcctccacttcctgggctacgtacccatctcaatcgcttcgactcctccgccgccgccgccatgtcggggctctacagccagggcttctcccctgcgcgaaacctctcccctcagattagaagcaacccggatgtcgatagccagtacttggcggagctgctcgctgaacaccagaagctggggccgttcatgcaggtgctgcccatatgcaacaagctgctgagccaagagattatgcgggtgtcaagcattgtccacaaccatggatttggcgatcatgacaggcatcggtttagaagtcctagtccgatgtcttctccgaaccctagagctaatctccctggcaatgggttcagtccttggagcggactacaagagagattaggtttttcctcaacgaactagcatggactggcaaggagcaccaccaagtcctagcacccaagttgtgaagaagattcttcgtctggaggttccggttgattcttatccgaatttcaattttgtggggcgcattttaggacctagaggtaattctcta

SEQ ID NO: 8182 - DNA, 156 bp, Zea mays
  unsure (1)..(156): unsure at all n locations
  Clone ID: MRT4577_107461C.1
ccgggccggaattttcggggcgacggaaaagcccggaccatccacncgagccggcggaggacagcggggatagaggaggaggagggcaagaggcgaggcaagagatgaagcgtctttccaagaaccgtaaggatgaccatggaggagaggaggcac

SEQ ID NO: 8183 - DNA, 844 bp, Zea mays
  Clone ID: MRT4577_107462C.1
tgggaccctcgaggccggccgcgacggcggccggatccatctcctccacttccttcctgggctctgggctacgtattatccatccgtctcagtcacctcgcctcctcctccccctcctcctcctcctcctcctcgattgcggccctcactcgccatgtcggggctctacagccaggggttctcccctgcgcgaaacctctcccctcagattagaagcaacccggacgctgataggtacggtagaggcgccgcgccgcgccgcgcgcatgtgtttctctagctcttccgcgctgtcgtatcgtatccagcgactactgatgccggccaagattgcttctttttacttctttatttgcgcccccccccccttctcttgcttggtctaatcgattcacgacaccgcgcgcgccgatagctttggcacttggcgattcccgacatcatcggcttcttccgttgtttctcttgtgcagtcagtacctggccaagctgctcgccgaacaccacaaactgggacccttcatgcaggtgctgcccgtatgcaacaagctgctgagccaagagattatgcgggtatcaagcattgtgcacaaccatggatttggcgatttcgacaggcatcggtttagaagtcctagtccaatgtcttctccaaaccctagagctaatctccctggcaatgggttcagtccttggagcggactacaagagagattaggttttcctcaaggaaccagcatggactggcaaggagcacccccaagtcctagctcccatgttgtaaagaagattcttcgtctggaggttccagttgatcctatccgaatttcatttgtgggcgcat

SEQ ID NO: 8184 - DNA, 192 bp, Zea mays
  Clone ID: MRT4577_107463C.1
tttgccgcccttttctatctgttattttttagaggtaactgaacataaaacaccacccaggggccacgccgggtcaggcaatgggcgtcccatcgttcttcacgggaccatggttgagccgagaggggaaaatcagcaccacctagcttaggcttcctgacgggtttgtcaagatttaaggttgaataacat

SEQ ID NO: 8185 - DNA, 1394 bp, Zea mays
  Clone ID: MRT4577_107464C.1
cactcttcctgctaccaccggaaccacgagggccggccgggacaccgcgcacaccatctcctccacttccttcctgggctctgggctacgtattatccatccgtctcagtcacctcgcctcctcctcctcctcccccagtccccctccctcatcctcgattgcgcccctcactcgccatgtcggggctctacagccaggggttctcccctgcgcgaaacctctcccctcagattagaagcaatccggacgctgatagtcagtacctggccgagctgctcgccgaacaccacaaactggggcccttcatgcaggtgctgcccgtatgcaacaagctgctgagccaagagattatgcgggtatcaagcattgtgcacaaccatggatttggcgatttcgacaggcatcggtttagaagtcctagtccgatgtcttctccaaaccctagagctaatctccctagcaatgggttcagtccttggagcggactacaagagagattaggttttcctcaaggaaccagcatggactggcaaggagcacccccaagtcctagctcccatgttgtaaagaagattcttcgtctggaggttccagttgattcttatccgaatttcaattttgtggggcgcattttaggacctagaggtaattctctaaagcgagtagaagcatccactgggtgtcgtgttttcattagaggaaagggttccatcaaagattcagggaaggaggacaaactacggggaaaaccgggctatgagcacctgagtgatccgctgcatatcttgatagaggccgagttccctgccagtatcatcgatgcaaggctgagacaagcacaggagattatagaagaattgcttaaaccagtggacgagtcccaagatctctacaaaaggcagcagctcagggagctggcaatgctgaactcaaccctgagagaggacagccctcatccggggagtgtctctccattcagcaacggtggcatgaagcgtgcgaaaacaggacagtagagaaaacaactatgctcccatatctggccccgtcgtcatgggaacgccatgggcatgcgtgaaggaaggccatgcgccttcgctggcggagtccggtatcttctgctagctttcacctccggacaggggaaagatgagatgagatgagatagtcgcggacccttggttggatccggcgttggttgttgtatggtctagaacattcgttctatttgttattgacggttaaccctagtatgttggtgagctgcaacctgcaaactgcatggtaaactagctagagaggcctgctgagtatgtgagctttaggtcttttattgacattgtattataacctttttaacattatggagttgcaaaaataaaaaataagggcc

SEQ ID NO: 8186 - DNA, 497 bp, Zea mays
  unsure (1)..(497): unsure at all n locations
  Clone ID: MRT4577_107465C.1
caggacaggccgaatttttggtgacccacgcgtaatagaggtaagctatgncagngngcatttttttttttagaaggtacctgcttcactcgctctcagaaccaaacagagattgaggatctaaatggacgatttgtgagttcaaggacagatgacagaatcaaacaagcttgtgcacttccattggacttctatgaggctatctccagcatcttactcatcttcatctcacatttcaaaatttactgtataaacagtgcagtctataacgcaaaacagtgttttgcacagccatatgcacgatctgctggctatagtctaagccctgtttgtttcctttcaggattatataatccagcttatagattatataagcacctaatgatctgcttatggattatcataatctagctatctagattatataatctacttaaatattgtgttgntttggttgccttttaacttatttaagctgaattatttatctagagggt

SEQ ID NO: 8187 - DNA, 1679 bp, Zea mays
  Clone ID: MRT4577_107466C.1
cgctcctactcctttgggtgacagccgtgcttgtggctcatggtagggctcaaggacccacaccggctcccagtacatctgcacctacgccagcaccaatgtgtgctccggctccaacactagcaccaacgcctgctacgacacctacaccgtcttcaactccgacacctgccccgacccctaccctagctccgacgtctgcccctacaccagcaccggcacctacacctacgccagcactagctccgactccggtgcctgctcccacgccagcaccaacacttgcccctatcttggctccgacacctacccctactcgcctgcgcccctcactcgcttgtcggggctctacagccagggcttctcccctgcgcgaaacctctcccctcagattagaagcaacccggatgtcgatagccagtacttggcggagctgctggcggaacaccagaagctggggccgttcatgcaggtgctgcccatatgcaacaagctgctgagccaagagattatgcgggtgtcaagcattgtccacaaccatggatttggcgatcatgacaggcatcggtttagaagtcctagtccgatgtcttctccgaaccctagagctaatctccctggcaatgggttcagtacttggagcggactacaagagagattaggttttcctcaacgaactagcatggactggcaaggagcaccaccaagtcctagcacccaagttgtgaagaagattcttcgtctggaggttccggttgattcttatccgaatttcaattttgtggggcgcattttaggacctagaggtaattctctaaagcgtgtagaagcatccactgggtgccgtgttttcattagaggaaatggttccattaaagatccagggaaggaggacaaactacggggaaaaccaggctatgagcacctgagtgatcctctgcatatcttgatagaggccgagttccctgccagtatcatcgatgcaaggttgagacatgcgcaggagattatagaagaattgcttaaaccagtggacgagtcccaagatttctacaagaggcaacagctcagggagctggcgctgctgaactcaaccctgagagaggacagccctcaccctgggagcgtttctccattcagcaacggcggtatgaaacgcgcgaaaacaggccagtagagaaacacccgtgctctcctacctggccctgtccaggtgtgttacgcggtcgtcgtcacgagagacgccatgcctgccttggggaggggcaatgttttgccatgggcatgcgtgaaggaagcaatgcgccttcactggcggagtccgtcgtccggtgccagctaggtttcacctccatacaggggaaactgctgctgggaaagatgagatagtcgcggtcgcggatcgttggttggatccggcgtggcgttggttgttgtatggtgtagaacattccttctatttgttattgatattgacggtttgaccctagtatgtggtggtacactgcgaagttgctaaactagaggcctgagctttatttaggtggttcattgaccttgtatcataaccttttgacattatcgagttgcaaaataaggaccgtcagctttgtacaaaaaaaaaaaaaaaaaaaaaaaaaaaaaaaaaaattgttgtatctgtgtgccataagtgcgac

SEQ ID NO: 8188 - DNA, 421 bp, Zea mays
  Clone ID: MRT4577_107467C.1
tcgttcagatgttagtgcgttatcacaaacactggaagttactgtttggcgtgctgggagggaccacagacaaagctgtttgtgggggataccagctgctaggctaactagtaatgcactcactggtgaaacaagctttagtaaagggtctcgcatcaaattttaggctgattaacatatatttaccaccaccatcgataaggacttcaatgcaatatacagtctcatacgggagcttgcctatctaaaatctgagctaacaataatcttgacacaggaagaagggcacacagttcaacgcaacgtatattgttatgctggcggtcttgtagaatatgttaagtgcttgaatactgacgaaaaacccctgaatgaccagattgggttcacataggacttgggtggtataacagaggatgtc

SEQ ID NO: 8189 - DNA, 655 bp, Zea mays
  unsure (1)..(655): unsure at all n locations
  Clone ID: MRT4577_107468C.1
ttctactctctgtgtctcgtttacacttattccaacacgttatcagcacgactcgcgagatcagagaagaagcgagagataaaatgagtcgtagacatcggcaagaagatgtccgttgctcgttggatcaaacaaaaatgtccttcgtcatgttctaggattgcgccgatgcttgaccacgcttgatccgcgctggtggccgcccgggccgccgcaggacagcgaaccagggccaccacgcccgggccgccatgccgagcacgcctcactgcggctggccgcgcaccgaggccggggccgcgtccccgtgccgccagagggccacgcccacgccgggccgtggggccagcgccgctgtgcccgcacgccgtggctgggcagccgctcccgcgctggcagccgccgctcctggccaggccgccgggggacgtgcccgcaccagacagcacgcgcaaccgggggcgccgcgcgtccgagcagccggggaggccccgctgcgagccgtgacccgcgctgctgtggctgggccaccgcgccccgggccgcagggagccgcccccgcaccgccgaggctgaggccgccggggcaaggcagcacgccgaggggctgccggngccgcactcccgtggagccgcgccctagagccgcgctgca

SEQ ID NO: 8190 - DNA, 310 bp, Zea mays
  Clone ID: MRT4577_107469C.1
ctcgaggccggccgggccgggctacactgctcgtagcttgcggtatagcgcctacatttctgtgtcagtcatcgtgcttctactatgtcatatccttgcttgggatgctagatgtcctctctcctccattgggaatgttcgtccatgacaaatcgggaaagtcaagcaatacataacacctcatctatatcattgcaggaaatgagtagcataagatacgagaggtaagtaaatgatactgctaggatgaatcaggggctcctcgagaaacaatgggtgatcgacaaggtctgggatgattgagagatat

SEQ ID NO: 8191 - DNA, 667 bp, Zea mays
  Clone ID: MRT4577_10746C.1
gtgcggcgctcaggcggcgtttcggaatcactattacacgctatggccgacacacttggacacatgagcaccttacggacgccgtcccggtcgacgaggacgcgggaagagcccgaccatcaacagacacttcactgcgccctgctcgcctccatgaactccgacctcctcggatatgacatctcgctgatgagcgatacgcaattgttcatgaaggaggacctcaagatcacagacacgcagatcgagatcctcgccggaggcatcaacatctactcgctcatcatctccctcgtcgcggacctcacctccgactgacacgggcgccgctatttcatggtgctggcgaccgtcatcattcttcacggacgcgctcctcatgtgcctcgacccggactacggtcatcctcatggcgggccgcttcctgaccgcgatcggcgtcgggttcacgctcatgatcgcccccgtctacaccgccgaggagtggtccacctccgcgcgcggcttcctcacctccttcccggaagtattcaacaacttcggaatcctcctcgtgtacgaatccaacttcgccttggcgcgcctgcccgataacctcatgtgacgcgccatgtgcctgtccttcgccgggccgtccgaattccatcaggactccgtcctcgccat

SEQ ID NO: 8192 - DNA, 448 bp, Zea mays
  Clone ID: MRT4577_107470C.1
aaacccaatgttcccctgcaataaagacttacaactggcatttcctttctactctctgggtctcgtttacacttattccaacacgttatcagcacgactcgcgagatcagagaagaagcgagagataaaatgagtcgtagacatcggcaagaagatgtccgttgctcgttggatcaaacaaaaatgtccttcgtcatgttctagtaaggatcatttgttctccaagcgacacttcatatcgatatgttctattttgcaactgcagtgatctgggccatcttcttactgttgccgaccgtgcatatcgtgcctgcgtataatcaatcggtcacgcccgcgcagggattgcgccgatgcttgaccacgcttgatccgcgctggtggccgcccgggccgccgcaggacagcgaaccagggccaccacgcccgggccgacatgccgagcacg

SEQ ID NO: 8193 - DNA, 466 bp, Zea mays
  Clone ID: MRT4577_107471C.1
cggcggggcgggatactataaatatggacggagcgaggtgtggtgaggtggaaactgatactacaatggagctcacgtgggacgaatgggatgtcattatactggctgcctgcagcttcctcatccctctcgtgttcctctgcaatgctacgaagcggcggcggcggcgcgcgccccctggcccggccaccgtacccatcatcgggaatctggcgtgggtaacgttgcgcgacgggatggccgagacggacatcccgccccgaccgccatctcgctccagaagagagcggccaacaccgcgaagatggcatccccgcccccccgagccagacaggagccgacactgaccgtgcccgcgcagagcgccgacaaggccaacatgcgcccaccaagcgcatcttcccgggccggacgggcagcacggcccccctcatccacccatacgaggcctgcaagatggcccctc

SEQ ID NO: 8194 - DNA, 190 bp, Zea mays
  Clone ID: MRT4577_107472C.1
ctctctatcaagctatttctaccgtttctcttgtactcgagcggggaaaacaaagaaacaaaaaagcaaggaagcagctgcacgcacgccgtctcctgtccggccatggagttcccgtcggtgtgctactgtgtgatcctgccgcagccgctaatacttgtgctgcaactgctggacttcccgcggcacg

SEQ ID NO: 8195 - DNA, 556 bp, Zea mays
  Clone ID: MRT4577_107473C.1
taggggccttttttttttttttttttcttttttttttttttttttttttttttttttttttttttttttttttttttttttttttaaattttcctgcaaaacccaaaaacagggggggctatatatatatcatcaatcctccctcccaattaccaatcgagttccagctgaacttaccccctgcctgatggaatcccggatgccagccccctaaactaccccctgcttctcggatcagggataggaaaaaaacccccgcaggggggggggcaaatctaatgcccaaattggataccaaacccaggaggttgctgcgggaatccccccccccccgaagcgaaaaaaaacaaggggggggtggtttgccccttccaacatggatggggggttggaaaaaaccaagcttccccgcagggcaggaggggttgttcagctaacccgcaggaattgaaagttccccagggccttctccccggcggggaagagaaacttctttcggagggccagaagctccccccccgcaccccaaatgtaggcccaccttcccccgccggaa

SEQ ID NO: 8196 - DNA, 358 bp, Zea mays
  Clone ID: MRT4577_107474C.1
ggccgcttttttttttttttttttggccagggcagaagagacccggcttacaacaaacatgtatatacaccgaacagagaggggctcccgctcacacattacagaagcatgcagggtgccagacaaccaacagccacttctcaaagtcgaaggacagagacaggtaaaaaaataaaaccatcaacacgcaggacagtaatcacccacctcatgagccaacaactctacaaaatggacgtcgcactaaacacacgctggcgacaaggatagctgaagcagctcgagcgagtacagaagccgccacaggcgactgtcttgcatctcaccaaggaatggcggaaccccatcccgtcaaaca

SEQ ID NO: 8197 - DNA, 584 bp, Zea mays
  Clone ID: MRT4577_107475C.1
ccggccgggggcctggcccgacttcagtcgcccagcgacgctagggtttcactctcctcagtcgcagcggttcccactctcgtctccagaagaagcgccgcgatgggttccccgccgctgacgccgtaccgccgatgggccactccactgcactccagcagaagcttgaggccaccacacagttcaggaagctgcgctccatagagcgaagtcccccaattgaagaggtgatcagcacaggagtcgtgccccgattctacgggcatgtgatgattttatatttaactgttgcctttacttgcctatgatgatatgttttataatgatgatcaatcaagggagtatgacttgtagcagtcttttcagtgaatcaaggatgagtttctgtttaatgcgtacagtgagaatacattaataattactagcagtcattcatagtcagtcaacataggccatctgctgctagtacctcttttcttctcatgagttgtagcaatttctgtttaattcatatgaatgtaattacaattatattttaagttgctactatagtttctgtttaattacaatcatagtttctgttt

SEQ ID NO: 8198 - DNA, 375 bp, Zea mays
  Clone ID: MRT4577_107476C.1
ccgtcaccctcctctccggctccggcgccgtctcctccaccaagaaagctgacattgcaggcgctctgcctaagctacaggacgctgcgtcttcttcttcttcctcctccccctcggcagctgcagggcccaagtgcctgtggcagagccgccgcgccgacagcgcacacaagtcgctgccgggcctcgtcctcgccatctgaagagacttgagaccgcaagatccatctgctaccctccagtataaccgtataataaaaatcctaaagttccaaactattatcgcagaaataatctggaacggcactagtcgtagtatgtactgtactgtactgtactcagagccagtcagtgaaaacgtaatgacgtttccgt

SEQ ID NO: 8199 - DNA, 1944 bp, Zea mays
  Clone ID: MRT4577_107477C.1
ggtgaaaaaatgtgaagtctcgcaggccaaaacccaaatggtcccccatgattttagaaaatatgaccataaaaccctccgaacccacgccaccgcaaaccactagctgctctggctcccccgaggcaatcgagtaatcgacgaaggccaccaccacctccacaccactttgcctcgagaaggttccaccaagcctctcggctagggtttggggactttgggggcgatcgcaatggagggccgcggcgcggaacaagcacccgaggcggcggcggaggtgaaaaatccgaggtgcttcatggacgtcaccatcggcggcgagatggaggggaggatcgttgtagagctctacgcttccgtggtaccgcggacggcggagaacttccgcgcgctctgcacaggggagaaaggcatcggcgccgccagcggcaagccgcttcactttaagggctcatgcttccaccgtgttattaaagggtttatgattcaagggggagacacaactgctggagacggaactgggggagagtcaatttatgggtccaaatttgaggacgagaattttgttttaaagcatgagaggaaaggaatgctttcaatggctaattctggtcccaacacaaatggttctcagtttttcatcactactacacggacacctcatttagacgggaaacatgttgtttttggtagagtgatgaaaggaatgggggtagttcgctctattgagcatgtttctgtcggagaagctgactgccccactcttgaagttaaaattgttgattgtggggagcttcctgaaggtgctgatgatggagttgtaaactttttcaaagatggtgatacgtacccagattggcccaatgatcttgaagagaagcctgctgaggtttcatggtggatggatgctgtggagtctgctaaagcttatgggaatgacaatttcaagaaacaggactacaaggcagctctcagaaagtacaggaaagctctgcgctacttggatctttgctgggagaaagaagagatagatgaagataagagcacagcactgcggaagaccaagtcaataatactcactaatagctccgcatgcaaattaaagttaggagattcaagtggggctttattagacgcagattttgcactgcgtgaaagggagggaaatgctaaagcttttttccgacaaggacaggcacacattgcacttaatgacattgatgcagccgtggagagctttaaacaggcattggagttggagccaaatgatgctggaatcaaaagagagctggctgctgcaaagaagaagattgctgacagaagagatcaggagcggaaggcatttgctaggattttccaatcttctggaaagtctgacaagagcaacgaagagaataattgatctacagttcctttcccccgtctgaaactttgcttagcttaaatctggggcacattggaacaggagtctcatgggagtctgctctgcaaaaaaacgcagattactgatctttagatagaaggaaacatagtggggggaaaggaagcttttgttttcttgtactacagaagtagcaattcgtgcttttgtcccggtcttagtttattcaggaaacggacattgaatttaaatgtgcaatttttagacccaacctgacgattcacatcttttgtgggtagttcgcccgtttcactttcgtggtgttttcttgtagccttttgtctgcttgttgccagactctaaggccatgtgtgccacacttcatctcacagctttacatattcaagcagtttctgcagcagctttttagtccagctgcttatctcaatgaactaaaagcaactgtcgttcgtcccggaatcaaaaaaaaaaaaaaaaaaggcggacggcggccaacggactaggtagcccggggaatcaattctggaccgggccgcggggcg

SEQ ID NO: 8200 - DNA, 207 bp, Zea mays
  Clone ID: MRT4577_107478C.1
agctttccatcggaggctggggttgttttttggttttttacttttatctgaagttctttcttgtgcctactggtgggaatctttttgggaatctgggggatgctggtatgggctcgatctgtggggaaaaaagctttggccctgggtctgaccacatcactccagaaagatggcttttgagctgtgctggcagggatttctattatt

SEQ ID NO: 8201 - DNA, 756 bp, Zea mays
  Clone ID: MRT4577_107479C.1
cgggaaacatgttgtttttggtagagtgatgaaaggaatgggggtagttcgctctattgagcatgtttctgtcggagaagctgactgccccactcttgaagttaaaattgttgattgtggggagcttcctgaaggtgctgatgatggagttgtaaactttttcaaagatggtgatacgtacccagattggcccaatgatcttgaagagaagcctgctgaggtttcatggtggatggatgctgtggagtctgctaaagcttatgggaatgacaatttcaagaaacaggactacaaggcagctctcagaaagtacaggaaagctctgcgctacttggatctttgctgggagaaagaagagatagatgaagataagagcacagcactgcggaagaccaagtcaataatactcactaatagctccgtatgttcgcttgcctagtctaattgccccttacctgggcatgcaaattaaagttaggagattcaagtggggctttattagacgcagattttgcactgcgtgaaagggagggaaatgctaaagcttttttccgacaaggacaggttggcaacttttgtcatataatttgttttgctgttgactacatgctgccggcgacattctagcttaagttcaaaacacttgcgttttatgattgatctttgcagaccctggatcattctcttgcataaaatactggttcatgtttgacttttagcgtgtctcatttaaagtgtgcaatattacttatttac

SEQ ID NO: 8202 - DNA, 427 bp, Zea mays
  Clone ID: MRT4577_10747C.1
cagaaacacaccaagcgaagcgctctaccttctaacctaacaacaatggcttcggggatatgatcccttcttgcgctattcgcccttttattgatcgcagcatatgcatccattatttcacagcgctcacttgctactagtgcctttattccacagttcctccctccatttacttaattgggctttgaacatgcaaacacgcaagccttcaagcttcaactatcgctcgcggcgagcgtcttacaacaaccaattgaccaaccgcgacatcaatactttggacatctatacctacaaaccatcgattcgcaccaacaacaacagcttatgacatgactgatccacctatacgaggtgtaccctgtcgcctacttgcaaaagctgctacttgcattcaacacaatcgctctggcgaacgtaactgaat

SEQ ID NO: 8203 - DNA, 111 bp, Zea mays
  Clone ID: MRT4577_107480C.1
acagcggataaggtgaatgaacaaatagggacgagcaaacagaagcatacgccaccgcgacaaaacacgaaacaactgacgaatagcgagccgctaccaggtagcagccca

SEQ ID NO: 8204 - DNA, 251 bp, Zea mays
  Clone ID: MRT4577_107481C.1
gtaactgcaagcagaacacattaagcctgctttccctcttccttgggcttgcacttatttttttacttggtgtagcagaagcatgaaccccaggggaacttaaaccaggacttcattgcgccataaatctccgaacctttttttgggaatgtgccccaagggattggcatcaatgaaaccttcacatatccgacgtgtaccccgtttcagaggacattatgatttatagggtctgtgcactatatatgggc

SEQ ID NO: 8205 - DNA, 381 bp, Zea mays
  Clone ID: MRT4577_107483C.1
atgtgcaaaagaccagaaacaaccttcgtctctaacccagtaaatacagccaacttgggcactgcaaaggcaataaccgttgataatggaactcaatttgatgctaaaacgttcaaagatttctatgaccgaattggtacaaaaattcattttgcatcagtaaggcatacagaatcaaatgggttggtagaaagagcaaacgaaattataatgacaggaataatgaagctaatcttcaaccagcccagaggaaagtggccagatgagttgatcaaagtggtgtggagccataacgcaactatatcaaggtcaacaggttttacacctttcaagctcctgtttggtgacgaagcaataacaccagaagaagcaaagacatga

SEQ ID NO: 8206 - DNA, 625 bp, Zea mays
  unsure (1)..(625): unsure at all n locations
  Clone ID: MRT4577_107484C.1
ctcgnagggccggccggggagtgcaccagagggccagcggcgcgcgcgccgcctctgttacgtctcctatgcggtggttactcgtcaaccgctgatgcccaccgccgcatccttctctgtctcctcgaccgagagatccggagttacctcccgatgctcttcggatggagatccaaacccgacccgaaatataacaggatgtcgcatcagcatctcgcgagagaactttggacgggacatgatgagacttgcactgtctgtgacgcttactgagggagagacagatgcctcctccggacccagtatctatgaggaggctgacccctttgcggaggcttttctgaagatgcatctgccgcgtcgccggctggtgcctatgagagagcagaagatgtgcgcttgtacgatcgtccccgcggccgaagtcgtggaactgttgtgctggtcccgggaatgctacaagagcaccatctccttcgaccgctacttccgctgaacgaagcaacacgagagctattgcttctacgtgagaaacctgctagtaaacatcgtctggaaggtcgacttgatccactctctgtgacaggacctctgctccatgatgcaggatggcatacgaagatac

SEQ ID NO: 8207 - DNA, 318 bp, Zea mays
  unsure (1)..(318): unsure at all n locations
  Clone ID: MRT4577_107485C.1
catgaggagagtcgattcggtcagttgctgagtcattaaaacttgggtaatttgcagacctggtggtgcttttatttggttagcgctgctctagtctgtatctttcagtatagatgtgttgatattctttctgttcttagcatttaacanaatatttcacttgtaatgtcatctgccatcttgctgctgatgcagagtagaggatgccccttctcggtataaatgctacaccaacctgagtcacaggagaacttttcttggcatggatgcagaagcgtgcagggtatctgaaatcttatgctcatgacgcagaagcgc

SEQ ID NO: 8208 - DNA, 455 bp, Zea mays
  Clone ID: MRT4577_107486C.1
tttccgagagcggagagataggcgtctttttactcgcctacctccgcggctcaaatctttcccccttctcccaattccttccgccggccgccgctccacccggacgacgacaccatgagggagtgcatttccatccacatcggcccggcgggcatccaggccggaaactcgcgcagagagctgaactgccttgagcatggaattcctgctgacggtcagatgcacggtgacaacaccattgagggaggagatgatgctcccaacacctccttcagtgagactggtgctgggaagcacgcgccccgggctgtctttgttgaccttgaacccactgacatcgatgaggtgagaactgaaacctaccgccagctcttcaatccctgaccagatcatcatcggagaaggaagatgcaaacaacaacaattgccagcggccactacaccattggcaaaga

SEQ ID NO: 8209 - DNA, 320 bp, Zea mays
  Clone ID: MRT4577_107487C.1
gttgcaaacacacaaaatggagtgctgtctgagaccaaggaagatgacaagaatcttctgctaaataatgaagaatccaagcttgaggtcactgatgcagctggaggagacaatgatggtgaatatgaggagggaatagtgtacaatgaatcgggtgaggatcagtattatgaaggtgatgatcagagagatgcggactatgagtatgaacaaggtgaagagggatactatgagtatgaacaaggtgaagagggtgaaaatcaagaggaagattacatggaagaagaagatggggatgattctgctaagaagattggtgt

SEQ ID NO: 8210 - DNA, 530 bp, Zea mays
  Clone ID: MRT4577_107488C.1
tcgcattcatggtgttcattttctcctctacggcacgcttcccgctctcttctctctcttcttgttcttgaagtctctctcctgccgctgatagttccagaccatcgctacagacgttctggatcaaactgcgacctacacagtagccctcacactatgcctgctatctgttccttcctttcctcgagaagaggcctgcttcctgatcatgccacgccagatggtttatatagctgttgcggagcatgtcatcagggaccctactccactgatattgaggcatttgccactcgagccacagcataccttgaacgtgatgttattctcttggattcgacttgcctggacattgagcatgcctcgcacgctgcttctctggcagacgatgctaatgaagaaaggcacgtgggcatatcgtacagaccgggattgctccacaatgtttgaacagtaatgctgaccactgcctttctgccttagcattatgtatttcttttgtccttggacacctgactcctttccacgtgccg

SEQ ID NO: 8211 - DNA, 215 bp, Zea mays
  Clone ID: MRT4577_107489C.1
ccgggaggctcgacgcgcgccgacccgcgtcgtcgccgagcccctcgccgtcccccaagagggtgtccccggcgtcgtccttgtccagggagacgctggccaaggcaagcgaggaggagtactacgccaaggccaagaggaggagcccgtacaggtgctcttccatctcctcctcgccgccggcgccgcacccggatccgcctccgttcctcgtc

SEQ ID NO: 8212 - DNA, 1264 bp, Zea mays
  unsure (1)..(1264): unsure at all n locations
  Clone ID: MRT4577_10748C.1
cctcgaggccggccccccggtgggggcgcctttgtgctgttctcctaatccaaaagtcgcgtgctgtgctctgctctcgcctcgcacggactcgtggtaaaggatggagaccatgtcggctctcgcgaggacggcgccgccccttgctgggaccattcgccggccgtcctgcgcgctgcggccgacggcgtccctctccttcgccgccgcttcaacgacgccccgcggccggctcgggctggggctgagcacggcgccggcggggagcgggagggcggccagggctcgcgccgtcccgcagcgcatcgtcgcctcctcggaggttgagcgaagctacattatgatcaaaccagatggtgttcagcgtggtctggttggagagattatttctcgctttgagaagaaagggtttttgttgaaaggcttaaaacttttccagtgccccaaggacttggcgcaggagcattacaaggatttgaaggataaacctttctttcctaagctgatcgattacataacttctggccctgttgtctgcatgctacaatcttgttattctattctgtaaaggcctgggagggtgctggtgttgttgcatcagctcgcaaattaataggagctactaacccccttcaagctgaaccagggactataaggggtgatcttgcagttcaaactggaaggaacgttgtccatggaagtgatagtcctgataatggcaagcgtgaaattgaactgtggttcaaagaaggcgagctctgccaaaatgggaatcagttcaagcaccgtggcttatagaataactcttgctaatcatttccagagttgtattcaatgtttttttttgtgttcgtcttgattcaaggagccatgcaagagtgtatgagtttagttcggctaagtaattagctcatgagggcttgaattatcggttctttttgaggattgaggatttgtgcaactgaaacctttgatcagttgctcatgttgagaagctaatttcttgtcatatttacatgtaataaagtccctctactacagtaataaattagtatttcctatggtccaattaaaaaaaaaaaaaaaaaaaaaaaaaaaaaaaaaaaaaaaaaaaaaaaaaaaaaaaaaaaaaaaaaaaaaaaaaaaaaaaaaaaaaaaaaaaaaaaaaaaaaaacaaaaggggaatcgaattttttgcaattgcaaacttttcctccgagaactggatcaacatgttggttttttttgagnttaattcgtnaaa

SEQ ID NO: 8213 - DNA, 284 bp, Zea mays
  unsure (1)..(284): unsure at all n locations
  Clone ID: MRT4577_107490C.1
tcccgggccgccgcccttntttttttttttttttttcttacctttcttttcaaacttatttttattgtntaacatatagagcccatagagcgggttcatttattcattacaccgcatagcatttttataatatccccatcacaactccacaagacccataaacaccattaaaggtttacatcttacaacaaaaagagtatctaattattaaccaaaattattgtgcatagctatcacaaccaccatccttcttcatgaaccgttatgcttcaactttatataaa

SEQ ID NO: 8214 - DNA, 259 bp, Zea mays
  Clone ID: MRT4577_107491C.1
cgttctcgagtgctataaacaaatatatttttcctttattgacccacacccataacactgggagccggcggtacataaaccatacaagatgtcgaccacccagcctgctgacgagatgctcatggtctacttaatcagtccatacatccaccgctccgacgttgtccttctcctcaaaagcataccctacgagcttatcctttatgaccttaccaacaacatctatctacttcttacacacaaccccatacacaaactc

SEQ ID NO: 8215 - DNA, 292 bp, Zea mays
  unsure (1)..(292): unsure at all n locations
  Clone ID: MRT4577_107492C.1
actacattcatcacttttaccaatttacatctatactttacacatttatttttcaactctcttccaaatttatccaatttaaactaatccatcttttcaacaccttccactacataaactcttcatcacacaacttctcaacatcaccaataaccaacattacataaacctcttcaattcttatccctatttcttataaaatcaatanctacaacatattttaacaatnccaaatcaacaattttccttcttcactatannccttttctttatactattacttttcccttac

SEQ ID NO: 8216 - DNA, 1258 bp, Zea mays
  Clone ID: MRT4577_107493C.1
ggccgggtgacccggctgggggcccgggggcgactccgctgccaccctacctgcatacggctccgcaaccagaaaacacccgagttccttccattcccacccaaaaatctagccaaaaaagcccaaccaaaatgctgcctgcccgccccctcctcgtggccgccgccgtcttcctcctcctcctccccgttcacgtcgccatcgtcgccgcacaggggtttcgcggcttctcttacctcctaaactgtggcgcggcgtcccccaccaccgacagccgcggcctccgctgggatcccgatggcgactatgtctctgccggtacccccggcgtggtctcgctctcgggcctcatcaaccccacgcttgccacccttcgcaccttcccgctccgctacggggccaagttctgctacgagctccccgtggatcggaaccgccgctacctcatccgccccacattcttctacggcgcgctcttcgcctcctcctctgcaccgccgccgcccgtcttcgacctgatcgtggacggtaccttctggaccgccgtcaacaccaccgatgacgcgctggccggcgccgcgtcgtcctacgagggcgtgttccctgcgagtggcaggaacatgagcttctgtctcggggtgaacccggactataccgacgccaggccattcatttccgcgctgcaggtgatccagctcgacgattccgtgtacaacgcaactgatttcccgaccagcgcgatgggcctcattgctcgcaccaagtttggctccactggcggcatcgagaggtaccctaatgacagttttgatcgctattggcagccatttccagacgacaagcatgctgtcagtagcacccaaaatgttacatcagccgacttctggaatcttccccctcctgatgtgtttaacacagctttcatagcagaacaagatgcaccgcttgtgttacaatggcctccagtgcctctccaaaatgatagctattatgtcgccctctactttgctgatacattgcctgataattcaaggacctttgacgtgtatataaatgattacctctttttcaaagatctaaatgtcacatcagctggtctttctgtctttgcaacacaatggattctctcaggcttgaccacaattatattgaaatctgcttctccttctgctcttcctccacttattaatgctggcgaggtttttgggctttttcctgttggaagattgacatatgcacgggatgtacttgccctggc

SEQ ID NO: 8217 - DNA, 106 bp, Zea mays
  Clone ID: MRT4577_107494C.1
cccacacgtccgactagagcgcgggcggccgttctagaggatcacaagcttacgtaggcgtgcatgctacaatataacctctctataggaggacctaagctcaatt

SEQ ID NO: 8218 - DNA, 2049 bp, Zea mays
  Clone ID: MRT4577_107495C.1
gaaatccttgatctctgatgggcttagaactttgaactcacggtcagctcgaataattccgatttcaatgttgttggaggaaatttgcccctcatatccttctttcaaagtcaaaattgcagtgtggatggcatcatcaagctccatatcctctgtgtatctcttttcaagaaatgtctttgcatttgacacattttttcccatggctgatgccttccaggagaagtatgatcctgagggatcaacctgatacaactgtgggccattgtcatcatacccagcaatcaacagcgatactccaaatggtcttacaccacctgactgtgtgaactcctgcatcacagcagcagtctcccgcacaagctgtgttacaggtatatgctccttgtacaaccgataatactgctgtgcctgctttcgactttttctcaccagaacacgaaaatctggacccatcccactatagacaactccaatatttggtgttagtgcctgaatcttttgcacagatgtttcatccaccaaaatagaaggcagtttcttctcggtggcaatcactaccccgttggcagctttgatccctagggaggtctgcccggatccgacagccgtgagcgcgtgctctatctgcacaagctttcccgacgggctgaaagtggtaagcgagaaggagtattggctgtcacccatgaccgaggcgcggagtcacctcgttgcctcttccgggttggagtgtcggcgattcgtggcaaggtttttgctctagcgagcccacgcgtccgcccacgcgtccgcccacgcgtccgcccacgcgtgggctgctccgtctcgtcgttgtcttcccctttttttcctcagccacttcgctccctccctagcagcaaaaaccttgccacgaatcgccgacactccaacccggaagaggcaacgaggtgactccgcgcctcggtaatgggtgacagccaatactccttctcgcttaccactttcagcccgtcgggaaagcttgtgcagatagagcacgcgctcacggctgtcggatccgggcagacctccctagggatcaaagctgccaacggtgtagtgattgccactgagaagaaactgccttctattttggtggatgaaacatctgtgcaaaagattcaggcactaacaccaaatattggagttgtctatagtgggatgggtccagattttcgtgttctggtgagaaaaagtcgaaagcaggcacagcagtattatcggttgtacaaggagcatatacctgtaacacagcttgtgcgggagactgctgctgtgatgcaggagttcacacagtcaggtggtgtaagaccatttggagtatcgctgttgattgctgggtatgatgacaatggcccacagttgtatcaggttgatccctcaggatcatacttctcctggaaggcatcagccatgggaaaaaatgtgtcaaatgcaaagacatttcttgaaaagagatacacagaggatatggagcttgatgatgccatccacactgcaattttgactttgaaagaaggatatgaggggcaaatttcctccaacaacattgaaatcggaattattcgagctgaccgtgagttcaaagttctaagcccatcagagatcaaggatttcttggaagaggtggagtaagttgtctgttgatgatttactgtttcaaacaagaatagcagcatcacttatgagcagccagcctgaagcttgtcttggttttatcactctgtaaactgatttgctccagcgacatgtcttggttttatcactctgtaaactgatttgctccagcgacatgtggttcttacatttgaaaccctcctgaacgcatactgtagacaaatgagatacgtaagatggatgttgtatttgacagtctctacagtttgtttatgtgattcacgttcttgtgtgctgtatcgatacccaggtgtttgttgtggtcgcattgcagattttctgtagtgcatggatttcgtggctgtaagaaatcaagttcgctaaaaaaaaaaaaaaaaaaaaaaaaaa

SEQ ID NO: 8219 - DNA, 264 bp, Zea mays
  Clone ID: MRT4577_107496C.1
atgtacattcatcaaaagggtgggcaattcatgctgggcatggcagacgcccggcattttacacaatgggaacaggttaatggccacactgggtatggatgaaagcagataggaacttttgaagaggactggaactgaccctaacatactgcggtatcatttgcaacaggcgagaagtcatccttttaataccgggcatattttatagaattagcttagggtgacctaagaccttactttggacgggatcgcccatatgatgac

SEQ ID NO: 8220 - DNA, 131 bp, Zea mays
  Clone ID: MRT4577_107497C.1
ccggccgtctcgatcccatcattccgaaaaagctccacaggccatgtccccatcgccgcgaggcgtgggcgagctctcccaaaccggtagtagcctcgctgccgctgccgatatggggttcgtcctccttg

SEQ ID NO: 8221 - DNA, 455 bp, Zea mays
  Clone ID: MRT4577_107498C.1
ggggagagaaaaaagggttgttttttgccaaaaaataacccacaaggaggggattccaaacccaaccgaacgaaatgaagaatatacccctatttaataacccccgctttttatatatacccctggttgggggggggactaacaagcaacccaaatcggggaaacaaaaaaagaatcatcgggttgcaaaaacaaaaattggggggaccccctttggtacacccccctcccccaacggagggaaaaaggtttggaaaaaaaatgcaaccccccccccaggtgaggacccaaaaaggcagggcccgcaggaaaaaaaaaccctccccccccttgaaagggggcccccaaaatttttttttgtagggggggaaaaggggaaccctggggtggggggtttcggaacaattgaacccccccagggggggggaaaaaaaacaaccctgggggaaacgggc

SEQ ID NO: 8222 - DNA, 247 bp, Zea mays
  unsure (1)..(247): unsure at all n locations
  Clone ID: MRT4577_107499C.1
ttcgtgaacggtgtcttcggcatcatgttcaagcagcttcagccgaagctgtttctttttgcaggaccttcggcgacgaagcatggncccaacactagtgtattgcgcacgctcatgcccacgttcttcatgtaattcacaacgatctaatggttatcgttttcagggtcagtaaaatctgattgaagtttgtgaagttggctagccttgatcctatatgtgctttgtgccacatactttttaggtg

SEQ ID NO: 8223 - DNA, 157 bp, Zea mays
  Clone ID: MRT4577_10749C.1
ctttatttctcatggttctcctatgcttccactggaacctcacaatcccactcgactctggcttactgaactaagcaagaccatcacaaagccaaaagcagtattggtgataagcgcccactgggaggagagagaagccaccgtaaccagttccaca

SEQ ID NO: 8224 - DNA, 442 bp, Zea mays
  Clone ID: MRT4577_1074C.1
ttttatatatgcgtgtatatagctggactgggccctatgccgagcgcctactgcccttctataacctgctgaccttatctgttggttatcgattggaataggggagatcttgtttggttatgcttttatataccatgattaaataatctactatttccatgcaacacctattgctttcatggtatcatgagtcttgggtcaatatatatgtgtctacatagcgagcatggacctgtgctgagcacctcctatttcttgctgggttatggttatatcaacagagaccttctcctctgttgctgatgattatgaataagaataagggagatcttgttgggttatgtttctataaacccaagatctgctccagactacatatacatgtacgcctgtaccttgattaatcaatctactatttccacgcattacacaatccctatta

SEQ ID NO: 8225 - DNA, 208 bp, Zea mays
  Clone ID: MRT4577_107500C.1
ggggcaaaatatatatatttaaaatcaataattgcattacaaaaaggtgatccatagtttcatatataattgcacacaacatggtgactgagactaacctggtaattagagggggcagacgagaagaaaaagggtggtcaactggggacattttttctagaaattgaccagagggaattatctagcgctggatgacattttaaggggg

SEQ ID NO: 8226 - DNA, 772 bp, Zea mays
  Clone ID: MRT4577_107501C.1
ccggccgggaggatcggtgaccctgacgatagtgaagtctgcactgcataccctccacccccgcgtccgagcgcgaccctggccccggcccgtctcgcctgaccgccgccacgccgacggctgaccagcacgcgggcccagcacccccgacctcgtcctcaccggctcaccctgaccgccgccgcccaccactcacctcgcctccccaacttctgccagctcgcatcccgccgcaagaaacgcccgtgccgccgctgccctagcccctaggccagcgcccaggtcccctctcttctcgcccttcgccagcgacgagcccccaataggtctgaaggatgagaaaggggctgcatcctcagatgcaatggatctcatatgtgacgcagagtggtaggctgatcaataccatgatgaccaaggtgaaccataccggcaaagtgtaccacatgagggccaagcgacaaatggctcaaagcctcggccagatcgcaaagttcaaacgtcgatacgagcaggaagcagtggaaagcaaggacaagtagttgggacggagctatggcctctgtaacctaagtcggttctgttgactgcacagttttcagctaaggacatgattttattttagatcacatcatcttttgttccacttcagaattgggtttgtaccccgtcgttagcaaactatggcacttgttccatcgtaaagccccaagaaaatagtctattgattgctttttttttatcaaaaaaaaaaaaaaaaaagcggccccta

SEQ ID NO: 8227 - DNA, 158 bp, Zea mays
  unsure (1)..(158): unsure at all n locations
  Clone ID: MRT4577_107502C.1
gacagtttcaggtggttttaaagaacacgtggaaatcccttgaatttaggacctggttaaccagaaagataagactgttcttaacgacctagatgattcaattcatctctgaacgggatcaggttttgtcctcactccaattanaagaaagcaatgtc

SEQ ID NO: 8228 - DNA, 111 bp, Zea mays
  Clone ID: MRT4577_107503C.1
ggcatgcagtatacttttataggtacctaatcaatcatggcgcgttacacgcggactggaaaacctgcgtaccactaatcgctgaacatcccttcgcagtgcgtatacaaa

SEQ ID NO: 8229 - DNA, 369 bp, Zea mays
  Clone ID: MRT4577_107504C.1
tgatttctacccaaaacacattctgcgatcctagaatcctccgccgagcatggatcatgtccgcctatctgccaaagaactcggttaagctcataaagaatgctgactacataaccgcccctggcatgggtatacttgctgctgatgagtcaaccggcacgataagcatgcgcctttacagaacaaacgttttgtactcaaaggagaaccgcactgctctgcttaagctgcagtattgatcatctggggcgctacatttcaccaagctcggggtcactataaaagtgattccttagcatgtgtctcgtaaagaggatgttttttcatttgagaaattacaagggtgcgacattctttttgttccagaga

SEQ ID NO: 8230 - DNA, 457 bp, Zea mays
  Clone ID: MRT4577_107505C.1
cgaggctgtacgcggaactagtgaaccgagacaaggccaccatgcgtatgtggtcgctctgctaagcgctcgcactactagcgctggttgccacggctaaccgaacctagtgagatgcttcgggtgtacgcggggagacgcaccagggactcgagtaacctacccacatgaaaggagaaggcgggcgctagtcctgaagggctggacacaaactctgagggagaccacagggaccctgaccgtacttgtaggaagagcttgatgagcttcggcgctaaggccgagggccaggctgaggggggcagcactgatgcgcatcatcttgagctgactatagacgagcgacggtaggcgcctgagggagctcgtatccgatgactgcggtgcatgatacatgatcaatctgctttggatggcagatgacggagttctggtagaacgggacgatgggtagctc

SEQ ID NO: 8231 - DNA, 255 bp, Zea mays
  Clone ID: MRT4577_107506C.1
ccgaaagtggaatccagtagcaacatcggagcaacaatagcgtgcaaggtattgtcccgccttatgctccttgcgcttgctgcatgggtcgctaacgcgacaattttccctcaatgctcacaaggtcctgtagcttcccttcttccgccataccttgcatcggtgatagcttcagtatgtgagaagccagctcttcagccctataggctccaacaagcaatcgcagcaagcaacatacctttatcacccttgttg

SEQ ID NO: 8232 - DNA, 318 bp, Zea mays
  Clone ID: MRT4577_107507C.1
gatttgtgtgagagtcacaagacactacctatcttctttcaattgtggtttgtggagatttgtggatcgttgctgttattaggtgtacatgtgtctacatgatgtgtaatttgtacatgagaccatgctccgtccagaagcgtatgccgtcgtctttttgttcattcatgtaggaggggcatgctcatctgtgctttcagagtttcccatatatgatgattaatataacaatcgatgtcattctctggaactttgggtgaaataaaaaaatggtacatgttaagggtttaaaaaaaaaaaataatttaaaattttatt

SEQ ID NO: 8233 - DNA, 728 bp, Zea mays
  unsure (1)..(728): unsure at all n locations
  Clone ID: MRT4577_107508C.1
ttcgttacaaggatcttcttgatgatgtttactctgatatatcaaatttgctgaaatcaagcgggaatgtttgctcaattatatattgccttgaacgggcagcttgtgatgatctaagcatgcatttgtcacagcagggtgtctcttgtgctgcttatcatgctggcctaaatagtaaagtgcgaagttctgttctcgatgactggctttcatcgagaactcaagttgttgttgcaactgtagcatttgggatgggtattgatagacaagatgttcgtattgtttgccacttcaacttgcctaagtcaatggaatccttctaccaggagtcaggtcgagctggtcgtgatcaacgaccttcaaggagtgttttgtattacggattagatgaccggaggagaatggaattcattttgagaaaccccaaaactaagaaatcacagccgtcttcctcttcaaatgagctttctgagaaggctctagctgacttcagtcagattattgactattgtgaaatttctagctgccggcggaaaaagatcattgagagctttggagagaaagtacaaccaactttatgccaacgctcatgtgatgcttgcaaacacccaaatttagtgttgtctcgtctggaggaactccgtcgtgtgcccaactgtcgctntaataagatctctccagtgtttcaaagctcagttaaacaagcacacttggacacagaattctgg

SEQ ID NO: 8234 - DNA, 2284 bp, Zea mays
  Clone ID: MRT4577_107509C.1
ctgagcttgttgcaacatcaagctttatggcaaagctaaagaagctctacaaccgcggtcttcttggtcttgttgccattgatgaggctcactgtatttcaacttggggccacgatttcagacctagctaccgaaaactttcatcattgaggaagcagttcccagatatccctttgttagctttaactgcaactgctgtcccgaaggtccagaaagatgtggtatcatcattgtgcttgcaaaatccagtaattcttagagcttcatttaatcgacccaatatattctatgaagttcgttacaaggatcttcttgatgatgtttactctgatatatcaaatttgctgaaatcaagcgggaatgtttgctcaattatatattgccttgaacgggcagcttgtgatgatctaagcatgcatttgtcacagcagggtgtctcttgtgctgcttatcatgctggcctaaatagtaaagtgcgaagttctgttctcgatgactggctttcatcgagaactcaagtttttgttgcaactgtagcatttgtatatttctgcttcgatatggcctttggctattggtttgtggatactgctccacaggatgggtattgatagacaagatgtccgtattgtttgccacttcaacttgcctaagtcaatggaatccttctaccaggagtcaggtcgagctggtcgtgatcaacgaccttcaaggagtgttttgtattacggattagatgaccggaggagaatggaattcattttgagaaaccccaaaactaagaaatcacagccgtcttcctcttcaaatgagctttctgagaaggctctagctgacttcagtccgattattgactactgtgaaatttctagcagacggcggaaaaacatcattgaaagctttggagagaaagtataaccaactttcttcaaacgctcatgcgaggcgtgcaaaccccccaattgtgagttgtgtggtccgcaggaactccgtcttgtgcccaactgtcgcttaaataagatctctccagtgtttcaaagctcagttaaagaagcacactagttgttgttgcaactgtagcatttgggatgggtattgatagacaagaaagacatatctgattctgatgatgggaatgaggtagtgagtaatatagccatttcaaaggttccggcaaaagctggtctggatgcaaaatttaaagcactggagcgtgctgaaaatgcttattaccaaggcaaaggtcaggcgaagcagcagggtggcggccttgctgacaagaaaagcatctctgagacgctaagagatgcatgccgaaaaagattgttggatgctcttggacaagcaaagttgcgactcgggaatattccgtgcggagacgaggcttctgctacacaccttgaaacagagtgcttcaaaaaatatgtgaaggcgggcaagacgttctacaactcacagatagccgccacagttcggtggctgtcatctgcaacactcagtcagatgcgtgaccgcctcgacactcttatcgaccgaaccaaagatgatggtgcgtcaggctgccccgacattgtcccagagtcacctccagcatctcctgaaatcgtcgtcggcgcaaggtcaggagaaaccagtaacgacaaaccgcagcatatttgtgagttgaagagttcagatgagtctgcaaagggtgctgcatcatcgactgggaacatggtgctccccgccataccgacgttcagagaattcttgagccaaaaaggaagggatcgggcgaagtgctattcaaattctaatgcgacgaaccagccatctggtattcgtaggaagtttagtggtcaccttgataaggaagaagccagcaagaggatgaaatcatgaatatctgtcgggcaacttgattttttttctgccttttcgttgtcactaatcaaacattgcaaatctacgttgtagtgaaacgttcctgaatcagaatctccatgatgattttcttattatatctagtttggtacagaaaaaaaaaaaaaaaaaagcgtacagtgaaaaggggtgttctacgcttctcgtgcaacatgaaggatctgcctcccaatccctatccaccctctataggttagtcatctcatgtggacacagccagaagggaagcggtaaacttaagcaagtatatacacatgtcggacctataacaccctatttgatcagctcttacaacggtcaactacacctgacgcaccctatttgatccgaggaatccttctcaagctccgcgatcagctgc

SEQ ID NO: 8235 - DNA, 396 bp, Zea mays
  unsure (1)..(396): unsure at all n locations
  Clone ID: MRT4577_10750C.1
aggacaggaggaatcgaacacagaatatcaccacggggaatcctaaacacttggtacaaaggaggggaagttaaaactgggttcaagacaaaatcttaggggtggacgaaaacacaaagccaaaacaactttataaggtcacggcataagcaacctcatggccaaactcgcctagatataaaactagcaaacaaactactcgggaggagaaacctcctgcccagcctcatttccctggacagggctttaaaggttaaaaccaacatcctttttggaggcgccgggaacccccatgagcttcccaaaaacgaacttgggggcccggagaatcttcaccttggggaagaaaacctttngaagggggaaaaagctggagggaaacttctaaatctcctt

SEQ ID NO: 8236 - DNA, 297 bp, Zea mays
  Clone ID: MRT4577_107510C.1
gacgacaaatttttaaaatttccactgaccatttttcagcccccatacggagcccaaaaaagtttcaaacatggggggtgttcaagcgaaaagtaacatacaaacgtttccgaatttccgatgaatcaaagacagccgtgattttgtacaaagtggtaccgccgagcagagagtctcaagacccactccatggccacaaagatcaattttgtcacggaccgtgttatattggggcctgaaccattcttaaggtgtttcacaccttcagcgccagctttttggaggcaaaagcctcct

SEQ ID NO: 8237 - DNA, 770 bp, Zea mays
  Clone ID: MRT4577_107511C.1
cattgggtacctcgaggccggccgggcttcttctactctgctggttttctcccctcgccttggtctcccctaactcaccgcaccggtcccatccacctttaccgatttctcgttttgttttcttggtccgtcccagctgagagagtgttgatctcacctttgctggtggtctggtcggcggcgatggagcctctggaggtggccataacgatcatattcgacgcgctgctgctggtgttcatggtgaagctcttcttcgccatgttccagatgaagctcgtcgtcatcctcttctacctcgtcatcctccccttcgccatggccttctccggccgggcgcccagtagcttctagctccgtagcagctggcagagaactttctttctcccccctccccccccccccctcttccgtttcttctcctttggagggtagatcggtggagtcgtgcagcagtagcactacgtcctgtgaaaagagtatcatctcgggtttttttgttgttgttgttgaagagatttttttttctctagaaaaaaaaggtgcgcatgatccgaggcgcaaattgcgtaagcgtgaagagagatcgtacgctcaaaacacgtgaactagtcaatcttgagcttcgatctccagcgtttcatacttctatttccatgtaattcgtgacgttccttgccattttgttacgatccaaacaaagcactgtaaaagtagtagaagttgatacggattaaagtcaaacaaacgacatgatggttttgtggatc

SEQ ID NO: 8238 - DNA, 514 bp, Zea mays
  Clone ID: MRT4577_107512C.1
cccacgcgtccgcccacgcgtccgcccacgcgtccgaaaaaaaaaaaaaaaaaaaaaaaaaaaaaaaaaaaaaaaaaaaaaaaaaaaaaaaaaaattaaaaaaagggggggccgatctaaaggaaccaagataaagggggggggcgggttcccctccagaggttgtatagggggaccaagaaaaattttagtggccgtaggggcgccaccgaagggaatggaaaagcccggggtttaccaaagttaagagggggaaaacccatggcggctcccaactgatggggttggaggaaaaaggccctttcggaagggggtgaaaaagagaagaggaccctgcagggggactggcacaccccttgtacagcctaattgagaaaggggacgggcccggttacgcgcaattaaaccggtagagtgggggggttcctagcgacgggtcctttaacttggtcagggccctagcgcgggaggtttggggtttttccccgttatgttctaaaaggggggcggcttt

SEQ ID NO: 8239 - DNA, 597 bp, Zea mays
  Clone ID: MRT4577_107513C.1
ccggccggggcaccggtcccatccacctttaccgatttctcgttttgttttcttggtccgtcccagctgagagagtgttgatctcacctttgctggtggtctggtcggcggcgatggagcctctggaggtggccataacgatcatattcgacgcgctgctgctggtgttcatggtgaagctcttcttcgccatgttccagatgaagctcgtcgtcatcctcttctacctcgtcatcctcctcttcgccatggccttctccggccgggcgcccagcagcttctagctcgtagcagctggcagagaactttcttctcccccctccccccccccccctcttccgtttcttctcctttggggcttgctcggttctaccccaatccatatggattgagggggattgaaggggttttaatccctagcaagtcaaaatctctctcaatccatatcaatcccctccaatccatatggattgaaaataaccgaacaagcccttggagggtagatcggaggagtcgtgcagcagtagcactacgtcctgtgaaaagagtatcatctcggtttttgttttgctgttgttgaagaagatttttttttcc

SEQ ID NO: 8240 - DNA, 442 bp, Zea mays
  Clone ID: MRT4577_107514C.1
ggccagaaaaaaaaatgggccggggaaaataaactttaaaaggaaaaacattccaaacaggaaaaaggggccccggggcttaagggcccactaaaaaaggggcttaggacggggggaacttgggaacgggcttggggccccccaaaaaggggggcttgggaaggcccccgggaaaaaaaagggggacggggggctggatcccccggggggggagggggggctttttggtgaaagggggaaacttggccccccccccggggaacttttaaaaaaaggcgttgaagaaggggttcaagagggacaaggccttggaggaaaagcccaagtccgggggcacccgtttaaacaccttgaaaaagaaaaatttggacgtctccaccctttttttggcctttttccccccctttttggaaaaacccccttccttgggggggggttttcc

SEQ ID NO: 8241 - DNA, 833 bp, Zea mays
  Clone ID: MRT4577_107515C.1
ataccctcgtcgcctcgcgcaatcagcgaccccagccaaactccaaacgaacagtgtcactgaacggaaacgcgtcgccttcaggggtcagctgacgggtcaggagagtgttgatctcacctttgctggtggtctggtcggcggcggcggcgatggagcctctggaggtggccataacgatcatattcgacgcgctgctgctggtgttcatggtgaagctcttcttcgccatgttccagatgaagctcgtcgtcatcctcttctacctcgtcatcctcctcttcgccatggccttctccggtcgggcgcccagtagcttctagctctcgtagcagctggcagagaactttcttctccgcctcttccgtttcttctcctttggagggtagatcggtggagtcgtgcagcagtagcactacgtcctgtgaaaagagtatcatctcgggtttttttttttttgttgttgttgaagagtatttttttttctctagaaaaaaaagtgcgcatgatccgaggcgcaaattgcgtaagcgtgaagagagatcgtacgctcaaaacacgtgaactagtcaatcttgagcttcgatctccagcgtttcatacttctatttccatgtaattcgtgacgtcccttgcctttttgttacgcgggtcagttgttcggactgctgcagctacaattcaatctaaacaaaacactgtaaaagtagtagaagttgatacggatcaaagtcaaacaaacgacatgatggttttgtggatcacacagtagtggtgcatattaaaggagatgaacacatttgttttcttggaaaaaaaaaaaaaaaaagcgg

SEQ ID NO: 8242 - DNA, 271 bp, Zea mays
  Clone ID: MRT4577_107516C.1
aaaaaaaagcggccgcccgaatttggtttaacagggccattacatacccgtttcctcctttggtttcaaaagttttccaggggttacaaaccccttcccaagatccatggggggggggggccccctagcaggtagacccttgaataactgggggggggggtcccaaacccccgggattttgacattcttgggccccttggccccgggggggggggggggcgggtgcccccttttaaaaaccccgatgacctcgccggtttccgggttgttt

SEQ ID NO: 8243 - DNA, 929 bp, Zea mays
  Clone ID: MRT4577_107517C.1
cgaagatactgacaacgggctatcagataagctaaatctgctcctacgaccgtaccagatcacgctgagtgacaagcgcccgaagctagtgctgtgcgacctcgaatctctgatgaaccaagcgatgtaccaggacttcgagaactgcacgttccagaagaacgggtcgcccaggtgcctggacccgaagcaggagcagcaggagagcttcgcctcgttcgtcgcgctgcgcaacctgagctggaacgaggtcctgaagaagggcaccaagcaccactgcgaggacctgggccgcttctgcgaccagaagatgagctgcgtcgtgtccatcctgaactggtcgtggccgtgggccgagcagctgctgcagtgcttcttcgtggcgtccaagtgtgtctggctgctccacctactggccttctccttcgtcccgccgctgaccatcctacgggtcgaggaggaccgggcgttcgaccagacgtacatggaggacgtgctgctggacaagcagcggtcacggaatggtccgccgccgtcgtcgtcgcaggtgaaactcatggtgacgcctgggttctatgtccaggacaggctgctcaaatgcagggtgctctgcaggtacagcggctagatctctatcgctgattggattggaggtgcttcgagtgttcttctttgactgattgttagttattagtgtgatgcagtagtatctgttctgctaggttgcaaagtgctatactgggacgccagaatatcattattttgacccttggcatgcccgtcagcatctctgtaacataagagagtcatgttgtgtaagaaagatgtgtgcaagattttagctcaacaggtttcctcttaacttttcgaagggaagaaaggggacctttttttttatgaacagatgcatcagccattgttcttgtttg

SEQ ID NO: 8244 - DNA, 483 bp, Zea mays
  Clone ID: MRT4577_107518C.1
aaagaacaaattttttcttaaaactagacgtcgagcgtacatgacacttattttaaactaaaggaagccgagcatagcacgatatacacgatgactagaactaaatacgtaactatagaaaagactcagggacacacgttcgggatggaccaaagcaccatagacactaggaccggggatcatatgatcattatcatggcttatacgggatagagaaagggatcggggtacgagcttagacctgaccaatacacacgtatcactactgaggggcggtggtttcgctgtggatggtcacccgacaatcacacactagtagcttgagagcaacatctcacttcttgggctaggagctctctgcgactgaggagtgcttgcacgagctgttcctatgagcagaacatggaacgcaggactaacccgaactgctccggcttgaactcgcacgacctggtctccttacgggctgaggaacgtgcatct

SEQ ID NO: 8245 - DNA, 293 bp, Zea mays
  Clone ID: MRT4577_107519C.1
tttattttttttttcccggacccaaccgcttgataaaaaagcaatggccgtttcctggttttttgaaaaaaaacctttcacaggggttttgttttaagcagaccaaagggcccccccctaaaccaaggggcggatccccggtacgcaaggattaaattccccatgccccccccgcccctggggggggttttttaaggggggggaccccccctggggtttaaagggaaattggggggaataagtgtgcccccttctctggggaatttggacattgggaaatttgtcataagata

SEQ ID NO: 8246 - DNA, 468 bp, Zea mays
  Clone ID: MRT4577_10751C.1
gctggttcctttttatcgacacaggattgcttgttaatctggcgcgcctcacatgtgtgcggcggcttgctcatatgatcggagaatcacgccttggaaggtgttcatcacttgagctcatatcatcgtcagaggcaggcagcagtaagcagattccgctgttgctgagcattgtcgtcgtgggcgtggcaggccagttcgcgtggagacggggagggaacatctggtgtgcgtttgctaaccggggggcggccggcgggtggaggcgaccaggcgaggactgctctgcggcggcaaagggtttcaaaatgctggcgtgcatcgcctgctcggccaaggacggcggggatcaggacggctcccgcgccgccacgccccacggaagggacgccggcaagtccctcacctcccagctcaaggacatggtgctcaagttctccggctccggcaggcagtacaaggccgcgg

SEQ ID NO: 8247 - DNA, 280 bp, Zea mays
  Clone ID: MRT4577_107520C.1
ttatttcattcgaccttcatctattcgaaccgtactctatcttaagttggaatttcaggatcgtgggacgattcactctcacccaattttttttttgtcctcctatacctcttcatatattgtagtaccctatttcaacctcagtcacacattctccacaccttgtcttatgcataaaccgtaccaatttataattgttataaatgaacctccaaaaacatataacacatttgatcttcttctcttctattctatatacctgccatttcaaacatacttc

SEQ ID NO: 8248 - DNA, 601 bp, Zea mays
  Clone ID: MRT4577_107521C.1
cagcgtccgctgcctatcgatgcaacttggctgtcgacccgttctatctttgcaactggaactggagggcgaccaagtaaatgacggcgatcgcatcggggcaaggagataaacatggcacacggggaagctggaggtcctcctcatctccaccaatggactataggacaccgattccctcaataacatgggcgggttggcgatccttacatgccgcaccgaatagcagaaaagcagagggtcaaatggagcaggaagagagctcgaatggaacgagactttcacattcaccgagtccgactacaccccgcagctgcacattaagaaatggacagcgacctgaccaacacacgatcagtactgcgaagcaaccatgctcttggaggccgagtttcaggaaggcaggcttccctctgcggatcacccggtcgtcaaggctggataaggactgctgagaggttaagctcgtgctcaccttgactccatcagttgaaactggtcgtccttatgacaactaggaggggtcgtcttacagcagctggagttgatctatctgccatgggatgcatgcatcatatatatccaccaagagaagagagga

SEQ ID NO: 8249 - DNA, 511 bp, Zea mays
  Clone ID: MRT4577_107522C.1
gagagcctgaccgaccatccacaagcagctagcgtagcgagcgatggccaccgaactccagtcgccgctgctccctccgccaccgctgccgccgcagcgacgactaagcccgcgggcagccgcatgggcggcgctcgccgtctcggcgacggtcctgctcctccccttcctgatcggcagcaccaccaggaccaccagcagcagcagcacgagacacccccggcctcgatcctccccaccatccaaccccgtggagctcacgctcctgaccgccgcccgcgacaagggcgcggtgtgcctggacgggagccccccgggctaccacctgcaggcggggtccggcgccgggtccggcagctggctcatccatctcatggggggcggctggtgcgacacccgtccgcagctggctccgaccggaggacgacctacctcggctcgtccctcttcatgcagaaagtcatggacttcactggcattctcagcaacgacccggcgcagaatcctgatt

SEQ ID NO: 8250 - DNA, 320 bp, Zea mays
  Clone ID: MRT4577_107523C.1
gtcgtgcggttgatcacaattccatctcatgccaccagctggcacatctcaaaggcagcatgcaagcaagcgagtagctccaccacaacaacagggaggaggaacagaacacaggcagagagagagagagagccatggcggcggtcttcttgagcgggggtgactggaggaggctgaggactctggggcgcggatcgtcaggcgccgtggtgtcgctggcgtgtgacgccgcgtcaggggatctggtcgggccaagtctgccggaacgagctgcgcggaagctctaaggcgggagcacgctgtgctggccgggctgctct

SEQ ID NO: 8251 - DNA, 239 bp, Zea mays
  Clone ID: MRT4577_107524C.1
cacggatctgtcgaattggcgggcgccggcggccggcactcgccgtcctgactcgagaaggaagatgctctacgaagttggtggcctggctagggacagcctgtgtaccgccgtgcgatcggtggaagagcgagaggcaagcatgtctgagctggcggcccgcacgggccgtctcctgcgtcgataccagatcggccatcgatttgtgggcgggtgcgtaccatccagatataggtata

SEQ ID NO: 8252 - DNA, 233 bp, Zea mays
  unsure (1)..(233): unsure at all n locations
  Clone ID: MRT4577_107525C.1
anacccaacnaaaccancanngggagcgagataacacaggattaccacaaacatagnncgcnncaannncnccaggggacaccgaaaacagagnncaaggagccnngaacaaagggagcaaaannaaacgaggcaacaaaaaaaccaaanaccancagagcangcangaggnaggnnccacagaagcagaacaacaagnnngaagngcccaacgggagcggcggagggaaagg

SEQ ID NO: 8253 - DNA, 266 bp, Zea mays
  Clone ID: MRT4577_107526C.1
ccgcgccgctggagaagacgcgagcgctagaggaccacaccggcccacaggctgcgcttgcaaagaagaaaagagcggcggagagcggctgggcttctggggcgcagaagatccaggacgacttctgctcgacgctgtgcgaggacaagaaggggacggacctggtcgagagcaaggagtcctgcgcgctctcccagcaagacaaccgggtgctgttccgcaggctccaaaacaagggcaagtgaacccagccgaaaggcatcacg

SEQ ID NO: 8254 - DNA, 343 bp, Zea mays
  unsure (1)..(343): unsure at all n locations
  Clone ID: MRT4577_107527C.1
cacgcgtacggttntagatcgcgagcggtcgctctatatgatttaatcttacatactcttgcatgcgacctggggggtattttatagtgggacctaaaaacaaatcattggtcgcctgctttcaatgccatcacattaaaatcattcattatttcccatcgttcacttcttccatgcaacattattacacacagttttcgatcaattactttaataaccatctaacacccaactttgcaatcctataggctacaacaagcaattgctgccagcgtgttacaacaaccaagtccctacttgcagcaacaattcttggcacatctatcagtacaaaccattgtaa

SEQ ID NO: 8255 - DNA, 276 bp, Zea mays
  Clone ID: MRT4577_107528C.1
ctactgagcggcctcagcatcaagctccccgaccctaccctactcgtaccccgccgccggcgcatccgtagccgaggtcacaccaaatcagaactagcagccatgccgcccaaattggaccgctctcaggtggtggtggtctttatccgcgtgacgctaggcgaggtcggtgcggcgtcggctgtgggcgcgaagatcggcccgctcggtgtgtgtccggataatattgggcaggacatgggctaggaaaccgccgaggcactgtcaggcccttcg

SEQ ID NO: 8256 - DNA, 385 bp, Zea mays
  unsure (1)..(385): unsure at all n locations
  Clone ID: MRT4577_107529C.1
aagaagttcgttattcaccatatttcttgggatgccacanatgcaaggcttcgcgggcgtgtacaaaggtgggtgcggttgtgtaatgggtttatctttgtggatttaaatggctggtcaaacgtgtatcatggttcagacaagggggattggtttcttggatcacccttaaaaaaaaaaaaatatagtgaaacatataaaaacaaaagaaataagctatggcgaaagagggtttaggggctaatgggccgacattcgacagacggaaaaatactcaataatacgggggggcgcgttttagggggccaagggttggttctcttggccttgccgatttaatcctttttttttggggcgcctaaattgaattctttgggcccggcgt

SEQ ID NO: 8257 - DNA, 421 bp, Zea mays
  Clone ID: MRT4577_10752C.1
tcttttttacataaaagaacctgggacattaaatttgactccaagttggaatgatagggtcattactatccatggaaatactgacatggagttgatctgcaatgctaaagatacactcagagtcagctatgttgacacaaatgagaacaacggcgtgcttagaacagatgataaccgctatgaagcgctaaaaaggctatcgcactctgacaaggccactatcgatcttcactgccacatggcacactgaggaagaaccacgacagctacgatacaggagaggagggggcgtaatcatgatcatgctgcctaaccacaactgatgcaatgctcacatgcattattgagacaatcgacactgcagccctttcaatatacacgctgccgagaccgatcagacaggcaccatcagggagcatga

SEQ ID NO: 8258 - DNA, 279 bp, Zea mays
  Clone ID: MRT4577_107530C.1
atgggcacgctgtatgtacttccaagatagcctgaaaaccagcgcgtcatggatacacaaggtttagagttgcgtgacgagaccaccacacccatgattcatgccttgcatgaaccggcgggtgtctaacgcgttaacatcccgattagagcgaacagagtgcagcacccggaacgttgataaataagtccgatccggaccatcatccccatagctgaggtatctcgagtcatgcgccagcggcattccgaacatatggctcagtgctcccccagtcct

SEQ ID NO: 8259 - DNA, 469 bp, Zea mays
  Clone ID: MRT4577_107531C.1
gacccaaccggaccttttttaaagggcaaaatatgggccaaacctccccagttttaaataaaaaaagggggcccccccccccgaaaaacaaaaaacaaagcccttttttttatacccggggggggggggggaaccaaccttttttttatcccccaaggttcccgttctggaaaagaacaaaatttcccaggaaaaaaggggcccggccccccttggccttttaaaaggggaacccaagggggggcccggcctttttttcccccctttaattaaaccgtgcccggggggggagggcattgtttcccaaaaggctttgcccaaggaacaaaaccaggacgggggcccaaaataatgggtttttaaatgggacggaacacttccccctggacccgaaaggggaaaccaaacttttaaggccccgaattttggggtgggagaaaaaaggggagtttttgggccccaaaatctt

SEQ ID NO: 8260 - DNA, 168 bp, Zea mays
  Clone ID: MRT4577_107532C.1
aaagaaaacatttccgccaattttaataccccattatcaaggcgggggaaaaaggtcttacaacggagggggaaacccccacaccgtcagaatgataaaaaccgacgggaaaataaccggttgggagccactgagggaaaaccccaggtataggtggggaaaacaagc

SEQ ID NO: 8261 - DNA, 318 bp, Zea mays
  Clone ID: MRT4577_107533C.1
aacctcatgttgttcgtagcgcacacaccacaaccagatgtccccacattcgtgcgggggccgctcggatttaacatgcctatctttgcgaataccctgactggcaagactatgacagcttgaggtggagtcgcgtgacaccattgacaacgttggagccgggaaccaggacggggagtgcataccccgacaccggcagcgtctcatctgtggtggggaccacgttgagcgccgtcgcgctcttgctcaggcgacattcataaggagagcaccctcgcatcttccctcgtccgctcaggggaggcatctaccactttg

SEQ ID NO: 8262 - DNA, 589 bp, Zea mays
  unsure (1)..(589): unsure at all n locations
  Clone ID: MRT4577_107534C.1
ggtggtgtccccgcccaggcggcgtttctggtgagctgaatacgctaactgctagttattccctccactagcacttgcggagtactaggtgttgtgcagagttggtaaatagacagtaattactaattacagtacatcgctaaacctgtttgtttagcctgttaaaccgatgtcctaaatggcaagtttctagttatcggctgttgaattcttttgccaataatattgtctaggcaccggataagtgtacaatctaatgaggccacaacagtataatgagaggtgaaacacttgcgttactgcgagcagaaaaagacagcaagagttgtaatcttgggtgtacggcctatcagcatttaagattcctatagtgtcaactgtcatatagtgtcataacacaacttacatgactaattaagtttaccatatggtatgagtaggacataactttacttgatacatgcttgtttcctcttcgtttgctatgctgccgtcgtgccatgatcattcatacatgtcgtttacccaaaacctcacacacatatnattgtgtggtgttccaagttccaactaggatgctgtgaatcat

SEQ ID NO: 8263 - DNA, 321 bp, Zea mays
  unsure (1)..(321): unsure at all n locations
  Clone ID: MRT4577_107535C.1
tctttcttctcctccccctcttacttatttctcttccggttacgcttacttanggagaagttttttacaataacctcccctcacctnaactaccccttcttcttcactgtctttcctctcccaccatcaacaattctctttaaaatcccttcacctcctacttttatatcctccactccaatttcatcacctaccttcatactactacatctcccttcttccacttctttaccttctcctcctacaactccattctccactctatctataacataaacctcaaataactctaccgccataacatcacccttaaccattccc

SEQ ID NO: 8264 - DNA, 331 bp, Zea mays
  Clone ID: MRT4577_107536C.1
ggtatcgggttattattattcaacaagcccaaaacaaccggaagacccacccaaaaaaacccgaatacccaacctaaaatatcaaaaatgacacacctcccaccaaaacggggcctacctaacgaacaatttcagtgcaacctaactcgggcacccaaaggatgggccggcccggccccaaggaaaaaactgggccgggcctaaagaaaaatgcaggaacccaatatggaaattatgaatacccctaaaaggaaactgtgactaatactaaattgctacgggtaacggaacgtagcacttggataggacccgaccgtggtttttaataaca

SEQ ID NO: 8265 - DNA, 261 bp, Zea mays
  Clone ID: MRT4577_107537C.1
ttctgggtatcgtctctatgatcctccttacagtcactgggtacatgactggtgcactggcatagctgcaccttgctgctgaacaccatgattcacactaccatgtcatacactttcggaggatcaactgaatccctccagtactgctactggctgatctactactacgcgcgatccgacatatctacctccatgcatacatgcctcttgattgagtacatcgtctggctctgctatgcattctgattaatgctagagata

SEQ ID NO: 8266 - DNA, 338 bp, Zea mays
  Clone ID: MRT4577_107538C.1
tggaagcgcacggccgcacgcagccctaatttttttccccacatccagtccccacctcttccctcagcgccgcactcaccaagtcaacatcgatccccatccccccgcatcatcgccgcccggtgccgtcgccttggatgttggatcccccacccgcaccatcgccgtccggccggtgccgtcgcccccagccccttcgtccagtaccgcgccgccccctctctctctcgtcactcctcctctcccccgatctggatcaggagggagagcgcctggtcgccgccctaccttctctacccgtcgctccccacttctcctccctcccactgtgcctgcct

SEQ ID NO: 8267 - DNA, 336 bp, Zea mays
  unsure (1)..(336): unsure at all n locations
  Clone ID: MRT4577_107539C.1
cgaggggaagctcacgctngacctgcatttcgtttttcagggagcaatacaatgnccagaagggggtaatttttcactccattctttacccatccccaacgaggcttccacatttacaactgaaacgagcatgcatattcacatgccatccctactctatgctccccgctccaatcctactgtcaacaatacacaacattaaaatcccacactatctaaacctcacgcacataaccatcaacagctaccttattcaacttcacatacagtttaaccctgaaccctctacaataacctaatctacaattcctgccaccaaatgatgtcgtcacccta

SEQ ID NO: 8268 - DNA, 363 bp, Zea mays
  unsure (1)..(363): unsure at all n locations
  Clone ID: MRT4577_10753C.1
gaccgacgcgtacgcctcgcgcctctgccgcatttcttttacaggttagaagganagaaagagggcgagagggttgtgcactttaacatggtccccaacggncacttcaagaagcactggcagaactatgtcaagacatggnncaaccagcccgcccgcaagcagatgcgccgcatttttctgtcattttttttttttatatanncttttacctactttttttttttttgtcccattgngcaattttttactctcaaattttttttttaggcaagggctgggagaggctttaccctttttttatttaaagctgcgggcattccaaaaaggcttgctccaaccattgtcatttctgtggatcac

SEQ ID NO: 8269 - DNA, 167 bp, Zea mays
  Clone ID: MRT4577_107540C.1
cgcccaggtcgccccctagatcgagctcctcacccttgacggtaagactcacaagagggaccgcggcgggaagatctgtcttaccccacacttcaagccgttgtgggccaagaactgtccgaggtttgggctggcgcacgcgctgtgcctctgtctcgcgccgtggc

SEQ ID NO: 8270 - DNA, 4938 bp, Zea mays
  Clone ID: MRT4577_107541C.1
atggcacccaagaaagctagctcaaaggctgatgaggctgcgaaggcagcactgctggccgcaaaaaagggcaaggccctcgcactcacccattccacccaccaagaggctactgacgacgacgttctccgcacctgcgaagacgacgttctccgcacctgcgaagacgacgctctccacacctgtggccctgaaggacaaccgcaacctcccccaggcttcgccccaccggagggcgtggacctcaccgaggatggcgaagtcctcggcgtctcagcggaagaacaactacagctgcgtgccctgcgcctcaagaactgcaatctccagaggcaaaaagagatactggaggccaagcgccagcgcgtgtccgcactagccaaggtcgccgttgcatcttccgaaggggacgacgccatgatggccaagtctttcatcatcgccctcgaaggcccagctctcacctggttcaccaggttgcccccgctgtccattgactcctggagaagcctccgggacaaattcctgctcaacttccaagggtaccgccccgacaccgacgccttggccgaactctcactctgcaagcagctggaaaaagagactctgcgggagtattaccgcaagtttctaacactcaagtcacagctgccctcagttgatgaccagatcgccatccactacgccattagtggccttcgcgccggtgtcctttacagccactgcatcagggacccgcccaagaacctccaggaattatatcagctctttgaaaaatatgacaaatccgaagagctccaccagcgcaaggttgagtctcagaggaaacccaaagatgctccacagtccagtcgcacgtggacgaggactccgcagagagactccggtcgagacggccgcagtcagcagcaagtgcacaacatcgccaaccagcaccccgctgctgacgcccctcgccgccaggagtatccccccagggccgcggaaacggaactcgcggtaggggtcgggggcgtgcgcagccgccgcgcctgttctactgtctttttcatggcgaagactgcgcccaccaaaccagagactgcccagaaacgaaggccaccaaagacaggatggcacgggcgtagccagccgacaaccccagagttgtcgcgcacacttatcagcaaccccctccaccatacatccacgcccccgccccgcatccaccgcaccacgcttaccaacaccaccaggaacaccgacttcgacacaaagcggcagaagcgggaccactaccgcaacatcaaccacgtcgccatcaccggcccagtcgtgcagacaaagtggtcccacgtaccgctaaccttcgacgcacgagacgtcgacctgcgcagcgccccccacatcgacgccatggttatcaactgcagcgtggcaggctgggacctgcacaaagtcctaatcgacaatggaagtcaagcagacatcattttcctccatgccttcgaccgcatgggcataagccacaacctgctcaagccttcggacaatccattgtatggtttcggcggcaagggcacttttcctgtcggcaaaatagaactgcctctctccttcggtgtagcacccaatgcccgaagtgagcaaataacctttgatatcgtcgatatggtgtatccgtacaatgccatcatgggtcggggctctatcaacaagtttgaagcagcaattcacggactgtacctgtgcatgaagataccaggtccgttaggcgccattgcggtctacggcaatcaacagactgcgcgcaacatagagcgggacttcgtccccggacaaagaaatgtgcactgcctcacggcccagcgcgaagtccctgcgtctgtcagcccaatcgacaaagagcacgacaaggcacagctgcagagcaacgacgggaccaagactgttcccctcgaccaggccacgcccaagcagacagtcactatcagcaaagacctcacttcgcatgaagaggagaaactcctctgctgcttgtccaagaacaaagaccggcttcgcaaaatgtccgacgagaagacagaggccgccaaggcagaggtacgccgcctcctggaagccaaatttatcgagccagtggcttaccccacgtggctctccaatgttgtgatggtgcagaaaaagagcggcaagtggcgaatgtgcatcgacttcaccagtctcaacaaggcctgcccaaaggacaacttcccgttgccgcggatcgacaaaatagtcgatagcgcgtccggatgcgaagtcatgtcactcctcgactgcttctccggttaccaccaaatatacatgaaggaggaagacaaggctagcaccagctttataacacccttcggcacatattgcttcatcagaatgccggagggactcaagaacgccgggtccactttctcccggcttaccaaaatagtgctcgagggtgcgtcttcggctttcgccaagggaaaatatttgggctacctggtatcacaccgcggcatcgaggccaacccaaccaaaattcaggccatcatcaacatgacgcctccgcagtccgccagagacgtccagcgcctgacgggcaggttggccgccctcaacagattcatctccaaatctgctgagcaaagtctccctttcctcaaaactctccgtggcgcaaaagacttcgcttggggaccagagcaggcagtggccttcgcctcattaaaacagtatctgtcggagttggcagtccttacaagccccaactcttcgctacccctgttgctctatgttgtggcttcgccacatgcggtcagcgcggcactggtgcaggagcagacagttgagggcgtgaccaggcagtgcccagtctattacgtctccgaagtgctaacaccatccaaatgtaacatgacagaactggagaagattgcctatgcagttgttatgtcttcgcgcaaattgcgccattattttgaagcattcaaggtccgagtcacctcagacaggggactaggtgaactgttccgaaacccggaggcatcggtcaggattgccaagtgggcggccgagctatccggctaccacatcaactttgagcccaggacaaccatcaagtcacaagtcctggcagacttcgtcgtcgactggactgggccaataacacagccggacccgtccgcagagaaggtttggacgattcactgcgacggcgcatggtgccacgcaggggcaggcgccgctgtagtcatcacctcacccaccggggtcaagcacagatacgcggcacgcctcagcttcgctctggaatctgacagatgcacaaacaacatagaagaatacgaagcagtcatcctcggcctccgcaagctgcgggcccttggtgtcaccacctgcattatcagaacagactccaagatagttgccggccaagtcgaaaaagactatgcagcaaaggaccccgcacttatgcaatacctcgcggccatccaaagtctcgagagacaattcaagggattcaccttgcagcatgtggaccgggctaagaatgaagaggccgacgcattggccaaggctgccgccagaggcgagtccctgccctccaacgtgttctaccatgtcatcggcacgccagccgtccggagccccgaagggctccaaataaccaatgacagcgagggccaccgcatagtcaaccttattatgaccgaagactggcgggcaccaataaccatgttcctacaggggtactaccacccaatcgacatcaacgaggccaagcgcctcaagcatcgaagctgggacttcgcactgattgagggccaactctacaagaaaggggtcagtcagccaatgcttaaatgcgtcagggagaccgaaggcatccaaatcctgcgcgaagtccacagtggtacttgcggctctcacgcagggccaagggccctagccgcaaaggtgatccaccaaggtttctactggcccacaatgatctgcgccgcaaatcgggttgcaaggtcctgcgaagcctgccagaagttttctcctcgatcagacagcccctcgcaattcacaaaactgatcgcccacacatggcctctccagcgctggggcctggacatcgttgggcccctgcccacggctcaggggaaccacaagttcaccttcgtcgctgtcgaatactttaccaaatggatcgaggcgagggctgtttccacaataacatcaaagactgcacagaaattcttctggcaaaacattgtttgccgcttcggagtaccgtccgaactaacagttgacaacgacaagcagtttgacagccaagacttcaaggatttttgcttctccgttggcaccaagcttgccttcgcctcagtatatcacccgcagtccaacggagttgtggaacgcgccaatggaaaaaattttcacagctgtcaaaaagatgctcctcgacgaaaaaagggcaggtgggccgatttgttacccgaggcggtctgggcactaaacacgactgagtgcagagcgaccgggttcacccctttccgccttctatatggatcggaggccatgaccccacaagaaataaaacatgggtccccgcgaacagttccgtcagccgtccccgacgtggacgagcccacttcgaaggatctcatcgatggagaccgagtcttcgccctacaggctctaaataaataccaagcccagacaaaagcatggcgcgaccacgcagtcatcccaagggaattcagcgaaggggacctcgtactcgtccgaacagctcggacagagtccaggggcaagctggagcccaagtgggagggccctttcattgtcaagacgaaggcttcccccaccgcttacaggctcgcaatgccaaacggcgaagacctggagcactcctggaacatcgacaatctccgcaaattttttgtttga

SEQ ID NO: 8271 - DNA, 3159 bp, Zea mays
  Clone ID: MRT4577_107542C.1
atggcacccaagagagctaacccgaaggctgacgaggctgcgaaggcagcactgcttgccgcaaggaagggcaaggccctcgccctcgctgccaggaatatcccccccaaggccgcggaaatggaactcgtggcaggggccaagggcgcgcgcagccgccgcgccgattctactgcctttttcacggtgaagactgcgcccaccaaaccaaagattgccccgaaacgaaggccaccagagacagaatggcacgggcgcagccagccgacaaccccagaattgtcacgcacaactaccagccaccccctccaccatatatccacgcccccgctccgcatccaccgcaccacgcttaccaacaccatcaggaagtacaaatcgtacctcctccaccccgaggtccctgcgcccgccagcccaaccgataagctgcatgacaaggcacagttgcagagccaagacgggaccaagattgtccccctcgatcaggccacgcccaagcagacagtcactgtcagcaaagaccttacctcatatgaagaagagaagcttctctgctgcttggccaagaataaagatgtcttcgcctggtccgccctcgacctggtcggagtcagccgatccataatcgagcacaacttgggaattgacccttcggtgcgaccaaaaaagcaaaggcttcgcaaaatgtccgacgaaaagacagaggccgccaaggcggaggtgcaccgcctcctagaagctaaattcatcgagccagtggcttaccccacgtggctctccaatgtcgtaatggtgcagaaaaaaagcgggaaatggcgaatgtgcatagacttcaccagtctcaacaaggcctgcccaaaggacaatttcccgttgccacggatcgacaaaatagtcgatagcgcggccggatgcgaggtcatgtcactcctcgacttcttctccgactatcaccagatatacatgaaggaggaagacaaggctagcaccagctttatcacacccttcggcacttattgcttcatcagaatgccggagggactcaagaatgtcgggtccacattctccagactcaccaagacagtactcgaagggcaggttggcagaaacatatttacatatgtggacgacatcatcgtcgccagcaagaataaggaggaccatctcgccgacctcgccgagacattcgcgaacatgcgagatgcacaactccgcctaaacccggaaaagtgcgtcttcggtgttcgccagggcaagatattgggctacctagtgtcacaccgcggcatcgaggccaacccaaccaagatccaggccatcgtcgacatgtcgcctccgcagtccgctagggacgtccagcgtctgacaagcagattggccgctctcaacagattcatctccaggtccgccgagcgaagcctccccttcctcaaaacactccgcggtgcaaaagacttcgcctggggaccggagcaagcagcggccttcgcctcactaaaacagtacctgtcggagctggccatcctcacgagccccgactcctcgctccccctattgctctatgtcgcggcttcgccgcacgcggtcagcgcggcactagtgcaggagcagacagttgaggccgcggtcagacagtgccctgtttactatgtctccgaggtcctgacaccgtccaaatgcaacatgacagagctggagaagatcgcctacgcagttgtcatgtcttcgcgcaaactgcgccattactttgaagcattcaaggtccgagtcacctcagacagggggctcggcgaactattcagaaacccggaggcatcggtaaggatcgccaagtgggcagccgaactctccggctaccacatcagcttcgagcccaggacagccatcaagtcacaagtcctggcagacttcgtcgtcgactggactgggccaataacccagccggacccgtccacagagaaggggtactatcatccaaccgacatcagtgaggccaagcgcctcagacatcgaagccgggacttcgcactgattgagggccaactctacaagaaaggggtcagtcagccaatgcttaagtgcgtcaccgaaaccgaaggcatgcagatcctacgtgaagtccacagcggcatgtgcggttcgcacgcagggccaagggccctagctgccaaggtgatccgccaagggttttactggcccgcaatgatctgcgccgcaaatcgggtcacaaggtcctgcgaagcctgccagaagttttctcctcggtcaggcagcccctcgcagtatacaaagctgattgcccatacatggcctctccagcgctggggcctggacatcgtcgggcccctgcccaccgctcaggggaacctcaagttcgccttcgtagccgtcgaatacttcaccaaatggatcgaagcgagggctgtttctacaataacatcaaagactgcccagaaattcttctggcaaaacattgtttgccgcttcggagtaccgtctgagctaacagttgacaacggcaagcagtttgacagccaagatttcaaggatttttgtttctccatcggcaccaagctcgccttcgcttcagtctatcatccgcaatccaacggggtcgtagagcgcgccaatgggaaaatcttcacagctgtcaagaagatgctcctcgatgaaaaaaaaggcagatggaccgaattgttaccggaggcagtctgggcgctaaacacaactgagtgcagagcgactgggttcactcctttccgtcttctatacggatcggaggccatgaccccgcaagaaataaagcacgggtccccgcgtacagttccgtcagccgtccccgacgtggacgagccaacttcaaaagatctcattgacggagaccgggtcttcgccctacaggccctaaacaaataccaagcccagaccaaagcatggcgcgaccacgcagtcatcccgagggagttcagcgagggggacctcgtactcgtccgaacagctcggacggagtccaggggcaagctggagcccaagtgggagggcccctttatagtcaagacaaaagcttcccccagcgcttacaggctcacaacgccgaacggcgaggacctggagcactcctggaacatcgacaacctccacaaattttttgtttga

SEQ ID NO: 8272 - DNA, 2213 bp, Zea mays
  Clone ID: MRT4577_107543C.1
tttcgccctattcacccccccctctaggcgactatcacgaggtacatcgcctcctggaggccaaatttatcgagccagtggcttaccccacgtggctcgccaacgttgtgatggtgcagaaaaagagcggcaagtggcgaatgtgcatcgacttcaccagtctcaacaaggcctgcctaaaggacaacttcccgcttcctcggatcgacaaaatagtcgatagcgcggccgggtgcgaagtcatgtcactcctctactgcttctccggttaccatcaaatatatatgaaggaggaggacaaggccagcaccatcttcataacaccctttggcacatattgtttcatcagaatgccggagggactcaagaacgccgggtccactttctcccggctcaccaaaacggtgctcgaggggcaagtcggcataaatgtattcacatatgtggacgacatcgtcgtcgccagcaggagcaaggaggaccatcttgctgacctcgccgagacatttgcgaacatgcgggacgcacgacttcgcctaaaccccgaaaagtgcgtcttcggcgttcgccaggggaaaatattgggttacctggtatcacaccgcgacatcgaggccaacccaaccaaaattcaggccatcatcaacatgacgcccccgcagtcagccagagacgtccagcgcctgacggtcgttatgtcctcgcgcaaattgcgccactattttgaagcattcaaggtccgagtcacctcagataggggactcagcgaactgttcagaaacccagaggcatcggtacggatcgccaaatgggcggccgaactctccggctaccacatcactttcgagcccaggacagccatcaagtcacaagttctagcagacttcgtcgtcgactggactgggccaataacacaaccggactcgtccgcagagaaagtttggacaatccactgcgacggcgcatggtgccatgcggggacaggcgctgcggcagtcatcacctcacccgccagggtcaagcacagatacgcggcacgcttaagcttcgctctagaatctgacagatgcacaaacaacatagcagaatacgaagccgtcatcctcggcctccgcaagctaagggcccttggtgtcaccacctgcattgtcagaacagactccaaggtagtcaccggccaagtcgagaaatactatgcagcaaaggaccccgcacttatgcaatacctcgcggccatccgaagtctcgagagacaattcaagggattcaccttacagcatgtggaccgggccaagaatgaagaagccgatgcattggccaaggctgccgccagaggcgagtctctgccctccgacgtgttctaccatgttatcggcacgccagccgtccggagccccgaagggctccaaataaccaatgacaacgagggtcaccgcatagtcaaccttattatgaccgaagactggcgggcaccaataaccctgttcctacaggggtactaccacccaaccgacatcaacgaggccaagtgcctcaaacatcgaagccgggacttcgcactgattgagggccagctctacaagaagggggtcagtcagccaatgcttaaatgtgtcaccgagaccgaaggcgtccaaatcatgcgcgaagtccacagtggtacttgcggctctcacgcagggccaagggccctagccgcaaaggtgatccgccaaggtttctactggcccgcaatgatctgcgccacgaatcgggtcacaaggttctgcgaagccagccagaagttttctcctcgatcaggcagcccctcgcaattcacaaaactgatcacccacacatggcctctccagcgctggggcctggacatcgtcgggcccctgcccacggctcaggggaacctcaagttcaccttcgtcgctgtcgagtatttcaccaaatggatcgaggcgatggctgtctccacaataacatcaaaggctgcacagaaattcttctggcaaaacattgtttgccgcttcggagtaccgtccgaactcagagttgacaacggcaagcaatttgacagccaagacttcaaggatttctgcttctccattggcaccaagcttgcctttgcctcagtatatcacccgcagtccaacggagttgtggaacgcgccaatggaaaaattttcacagctgtcaagaagattctcctcgacaaaaaagggtag

SEQ ID NO: 8273 - DNA, 2175 bp, Zea mays
  Clone ID: MRT4577_107544C.1
atgccggagggactcaagaatgccgggtccaccttctccagactcaccaaaacagtactcgaagggcaggttggcagaaatatatttacatatgtggacgacatcgtcgtcgccagcaagaataaggaggaccatctcgccgacctcgccgagacattcgcgaacatgcgagatgcacgactctgcctaaacccggaaaagtgcgtcttcggtgttcgccagggcaagatattgggctacctggtgtcacaccgcggcatcgaggccaacccaaccaagatccaggccatcgtcgacatgtcgcctccgcagtccgccagggacgtccagcgtctgacaggcagattggccgctctcaacagattcatctccaggtccgccgagcgaagtctccccttcctcaaaacactccgcggtgcgaaagacttcgcctggggaccggagcaagcagcggccttcgcctcactaaaacagtatctgtcggagctggccatcctcacaagccccgactcctcgctctccctattgctctatatcgcggcttcgccgcacgcggtcagcgcggcactagtgcaggagcaaacagttgagggcgcagtcagacagtgccctgtttactatgtctccgaggtcctgacactgtccaaatgcaacatgacagagctggagaagatcgcctacgcagttgttatgtcctcacgcaaactgtgccattactttgaagcattcaaggtccgagtcacctcagacagggggctcggcgaactattcagaaacccggaggcatcggtgaggattgccaagtgggcagccgaactctccggctaccacatcagcttcgagcccaggacagccatcaagtcacaagtcctggcagacttcgtcgtcgactggactgggccaataacacagccggacccgtccacagagaaggtttggaccatccattgcgacggcgcatggtgccatgcgggggcaggcgtcgctgcagtcgtcacctcaccagccggagtcaaacacagatatgcagcacgcctcagcttcgctctggaatccgacagatgcacaaacaatatagcagagtatgaagcggttatcctcggcctccgcaagctaagggccctcgtagtcaccacatgtatcatcaagacagactccaagatagttgccggccaggtcgagaaagactatgcagcaaaagaccccgcgctcatgcaatacctcgcggctatccgaagtctcgagagacagttcaagggattcaccttgcagcatgtggatagggccaagaacgaggaggccgatgcattggccaaggctgccgccaggggcgagcccttgccctccgacgtgttctttcacaccatcggcacgccagccgtccggagccccgaagggctccaaataactaatgatagcgagggccaccgcatagtcaacctaatcatgaccgaagactggcgggcaccaataaccctgttcctacaggggtactatcatccaaccgacgtcagcgaggccaagcgcctcagacatcgaagccgggacttcacactgatcgagggccaactctacaagaaaggggtcagtcagccaatgcttaagtgcgtcaccgaaaccgaaggcatgcagatcctacgtgaagtccacagtggcacgtgcggctcgcacgcagggccaagggccctagctgccaaggtgatccgccaagggttttactggcccgcaatgatctgcgccgcaaatcgggtcacaagggcgactgggttcactcctttccgccttctatacggatcggaggccatgaccccgcaagaaataaagcatgggtccccgcgtacagttccgtcagccgtccccgacgtggacgagccaacttcaaaagatctcattgacggagaccgggtcttcgccctacaggccctaaacaaataccaagcccagaccaaagcatggcgcgaccacgcagtcatcccgagggagttcagcgaagggggcctcgtactcgtccgaacagctcggacggagtccaggggaaagctggagcccaagtgggagggtcccttcatagtcaagacaaaagcatcccccagcgcctacaggctcacaacgccaaacggcgaggacctggagcactcctggaacatcgacaacctccgcaaattttttgtctga

SEQ ID NO: 8274 - DNA, 285 bp, Zea mays
  Clone ID: MRT4577_107545C.1
attcggctcgaggtttgtgcaacatttttttttgcaagactccagctggtcaagacaacatcaatcgctgagtggatgaatatgtattctccaactcccctgcacgtgatgcaggaactggaaatggacttctttggcaagcaacggctcagcactcgtactacccaaatttactcaatgacggacaattagcttcctgtcggaacgtggcttactactcaggttcacagacttgactggaacaaattacatggaaggcaactgctcacttgcaagaaacctcgc

SEQ ID NO: 8275 - DNA, 1746 bp, Zea mays
  Clone ID: MRT4577_107546C.1
atggcacccaagagagctaacccgaaggctgacgaggctgcgaaggcagcactgcttgccgcaagaaagggcaaggccctcgccctcacccaatccacccaccaagagcccactgaagacaatattccccgcacctgcaaagacgacaccttccgcacctgcgggctcgaaggacaatcgcagccgcccccaggcttcgccccactggagggcgcggatctcaccgaggacggcgaggtcctcggcgtctcaacagaagaacagttacagctgcgcgccctgcgcctcaagaaccacaatctccagaggcagaaagagatactggaggccaagcgccagcgtgtgtccgcactagccaaggtgcgacaaatgatacgcgacgaggagcagaaggcccaagacctcgagcgcgagatcgcgctgatgcagcgcgaaggccacctcggtctacaacaagagccacccctccagcagcgcgcacaaccggaagacacgcgcgaaggccacctcggcctgcagcatggcccacccctgcaacaccgggcgcagccggagaacccgcgtttcccccagcatgactacgccttccagcacggcgcgccattccaaggggtcaactacctcgacgagcgaagtcccctggcgccacacctgcaagtgacgccttggccagctaacttccgagcaggggcatatcccaagtacaacggcagcaccgacccggcgcaatacataatgagttatcaagtcgccgttgcatcggccggaggggacgacgccacaatggcgaagtctttcatcatcgccctagagggcccagcactcacctggttcaccagattgcctccgctgtccattgattcgtggagaagtctcagggacaagttccttctcaacttccaagggtaccgtctagacaccgacgctttggccgagctctcgctttgcaaacagctggaaaaggagactctgcgggagtattaccgcaaattcttaacactcaagtcacagctaccctccgtcgatgatcagatcgctatccactacgccatcagtggccttcgggccggcgtcctctacagccactgggggtccagcactgacttcgacaccaagcggcagaagcgggaccactaccgcagcatcaaccatgtcgcggtcaccggcccagtcgtacagacgaagtggtcccacataccgctaaccttcgatgcacgagacgtcgacctgcgcagcgccccccacatcgacgctatggtcatcaattgcagcgtggcaggctgggacttacacaaagtcctagtcgacaatggcagtcaggcggacatcatcttcctccacgccttcgaccgcatgggtataagccacagcctgctcaagccttcggacaatctgttgtatggcttcggcggcaaaggcacctttcccgttggcaaaatagagcttcccctctccttcggtgtagcacccaatgcccgaagtgagcaagtaaccttcgacattgtcgacatggtatatccgtacaatgccatcatgggccggggctccatcaataagttcgaagctgccatccacggactgtacctatgtatgaagataccaggtccgctaggcgctatcacgatctacggcaaccagcagacggcgcgcaacatagagcgggacttcgtgcctggtcagaggaacgtacactgtctcacgacccagcgcgaggtccctgcgcccgccagcccaactgataagtag

SEQ ID NO: 8276 - DNA, 397 bp, Zea mays
  Clone ID: MRT4577_107547C.1
cgcatacgtcctactaatgctgtgtatctgttatctggatgtctgttctcgaaagcggggcctgcatggacgaataagagataggatgcatgtgcggaatgcgaccatgtctgaatgacagatgaggatgctgacgaagctgctactgatacctaagccaatggtgttctaaatgaatctgatcagcctttatgaacgtatgacttacgagatagatgagacatggcaaagcaccgaaccaaacatacctggtgctcctcatacaaccggaatgtacctttgtcgtatggaaaggacacagctgctatcctcagagaccaacagtttgaagaaatcgaacactgctgcattacaagcccatatgacaacgattgttgggagattcatgaacagatgc

SEQ ID NO: 8277 - DNA, 2268 bp, Zea mays
  Clone ID: MRT4577_107548C.1
atggccaagtctttcatcatcgccctcgaaggcccagctctcacctggttcaccaggttgcctccgctatccattgattcctggagaagcctccgggacaagttcctgctcaacttccaagggtaccgcccagacaccgacgccttggtcgaactctcgctctgcaagcagctggaaaaggagactctgcgggagtattaccgcaaatttctaacactcaagtcacagctgccctcagtcgatgaccagatcgccatccactacgccatcagtggccttcgcgccggcgtcctctatagccactgcatcagagatccgcccaagaacctccaggaattatatcagctatttgaaaaatacgccaaatccgaagagctccaccagcgcaaggttgagtctcaaaggaagcccaaagatgctccacagtccagccgcaccaccgacttcgacacaaagcggcagaagcgggaccactaccgcagcatcaaccacgtcgccatcaccggcccagtcgtgcagacgaagtggtcccacgtaccgctaaccttcgacgcacgagacgtcgacctgcgcagcgccccccacatcgacgccatggttatcaactgcagcgtggcaggctgggatttgcacaaagtcctagtcgacaatggcagtcaagcagacatcattttcctccatgccttcgaccgcatgggcataagccacagcctgctcaagccttcagacaacctgttgtatggcttcggcggcaagggcacttttcctatcggcaaaatagagctgcctctctccttcggtgtagcacccaatgcccgaagtgagcaagtgacctttgatattgtggatatggtatatccgtacaacgccatcatgggccggggctccatcaacaagtttgaggtagctattcacggactgtacctgtgcatgaagataccaggtccgttaggcgccattgcggtctacggcaatcaacagaccgcgcgcaacatagagcgggacttcgtccccggacaaagaaacgtgcactgcctcatggcccagcgcgaggtccctacgtccgtcagtccaaccgacaaagagcacgacaaggcacagctgcagagcaacgacgggaccaagactgtccccctcgaccaggccacgcccaagcagacagtcaccatcagcgaagacctcacttcgcatgaagaggagaaactcctctgctgcctgtccaagaacaaagatgtcttcgcctggtcagccctcgacctggtcggggtcagccgatctataattgagcacagcttgggaatcgacccttcggtgagaccgaaaaaacagcggcttcgcaaaatgtccaacgagaagacagaggccgccaaggcagaggtgcaccgcctcctggaagccaaattcatcgagccggtggcttaccccacgtggctctccaatgttgtgatggtgcagaaaaagagcggcaagtggcgaatgtgcatcgacttcaccagtctcaacaaggcccgcccaaaggacaacttcccgttgccgcggatcgacaaaatagtcgatagcgcggccggatgcgaagtcatgtcactcctcgactgcttctccggttaccaccagatatacatgaaggaggaagacaatgctagcaccagctttataacacccttcggcacatattgcttcatcagaatgccggagggactcaagaacgtcgggtccaccttctccaggcttaccaaaacagtgctcgaagggcaagttggcagaaatatattcacatatgtggacgacatcgtcgtcgccagcaagagcaaggaggaccatctcgctgacttcgccgagacattcgcgaacatgcgagacgcacgactctgcctcaacccggaaaagtgcgtcttcggcgttcgtcaaggcaaaatattgggctacctggtatcacactgcggcatcgaggccaacccaacaaaaattcaggccatcataaacatgacgcctccgcagtccgccagagacgtccagcgcctgacgggcagattggccgccctcaacagattcatctccagatccgctgagcgaagtcttcctttcctcaaaactctccgtggcgcaaaagacttcgcttggggaccagaacaggcagcggccttcgcctcattaaaacagtacctgtcggagttggcagtccttacaagccccgactcttcgctacccctgttgctctatgttgcggcttcgccgcatgcggtcagcgcgacactggtgcaggagtag

SEQ ID NO: 8278 - DNA, 4974 bp, Zea mays
  Clone ID: MRT4577_107549C.1
atgccctttacatttgctaatgactctatagtgatccatcaaggtctaaatagccttttcccttttaagtcggttcccttttctgctatcatgccgaagctcccttgcgcacagcttcggctctgcgtcaaccttcgaattcttcgtgcttctcacactgtggttctgatccaagtccgaagaaagggcaaggccctcgccctcacccaatccacccaccaagaggccaccgaagacaacgttccccgtacctgcgaagacgacactctctgcacctgcggccctgaaggacaatcgcagccaccctcaggctttgcccctctggagggtgcggacctcaccgaggatggtgaagtcctcggcgtctcagcggaagaacagctacagctgcacgccctgcgcctcaagaaccgcaacctccagaggcagaaggagatactcgaggccaagcgccagcgcgtgtccgcactagccaaacaagggccacccctgcaacaccgcgcacaaccggaagacccgcgtttcccccagcgcgatcacaccttcccgcacgccgcgccattccaagggatcaactatctcgacgagcgaagtcccttggcaccacacctgcaagtgacgccttggccagctaacttccgggcagggacctatcccaagtacaatggcagcaccgacccggcgcaatacataatgagttatcaggtcgccgttgcatcttccggaggggacgacgccacaatggcgaagtctttcatcatcgccctagagggcccagctctcacctggttcaccaggttgcctccgctgtccattgattcctggagaagcctcagggacaagttcctgctcaacttccaagggtaccgcccagacaccgatgcattggccgaactctcgctctgcaagcagctggaaaaggagactctgcgggagtattaccgcaaatttttaacactcaagtcacagctgccctcagtcgatgatcagatcgctatccactacgctatcagtggccttcgcgccggcgtcctttacagccactgcatcagagatccgcccaagaacctccaggaattatatcagctgtttgaaaagtacaccaaatccgaagagctccaccagcgcaagccgcctcgccgattctactgcctcttccatggcgaagactgcgcccaccaaaccaaagactgcccagaaacgaaggccaccagagacatgatggcacgggcgcagcctgccgacaaccccagagttgtcgcacacacttaccagcaaccccctccaccatatatccacgcccccgtcccgcatccaccgcaccacgcttaccaacaccatccggaagtacaaatcgtacctccaccacctccaccaccacaccaacaacatcaaaacatcccccatgctccaaagcaggaagacttcgccgatcagccatatcgcggagtcattcacatgataactggggggtccagcactgacttcgacacaaagaggcagaagcgggaccactaccgcagcattaaccacgtcgccgtcactggcccagtcgtgcagataaggtggtcccacataccgctaaccttcgacgcatgggacgtcgacctgcgcagcgccccccactgcgacgccatggttatcaattgcagcgtggcaggctgggacctgcacaaagtcctagttgacaatggcagtcaggcgggcatcatctttctccatgccttcgatcgcatgggcataagccacagcctgcccaagccttcggacaacccgttgtatggcttcggcggcaagggcacctttcctgtcggcaaaatagagttgcccctctccttcggtgtagcacccaatgcacgaagtgagcaagtgacatttgatattgtggatatggtatatccatacaacgccatcatgggccggggctccatcaataagttcgaggccgccattcacggactgtacctatgtatgaagatcccaggtccgttaggcgttattacgatctacggcaaccaacagacggcgcgcaacatagaacgggacttcgtgcccggtcagagaaacgtgcactgcctaacggcccagcgcgaggtccccgcgcccgccagcccaaccgacaaacagcacgacaagacacagctgcagagcaacgacgggacaaagactgtccccctcgatcaggccacgcccaagcagacagtcattatcagcgaagacctcacttcgcatgaagaggagaagctcctctgctgcctttcaaagaacaaagatgtcttcgcctggtcagccctcgatctggtcggggtcagccgttccataattgagcacagcttgggaatagacccttcggtaaggccaaaaaaacagcggcttcgcaagatgtccgacgaaaagacagaagccgccaaggcagaagtgcaccgcctcctggaagccaaattcatcgagccggtggcttaccccacgtggctctccaatgtagtgatggtgcagaaaaagagcgggaagtggcgaatgtgcatcgacttcaccagtctcaataaggcatgcccaaaggacaatttcccgttgccgcggatcgacaaaatagttgatagcgcggtcggatgcgaagtcatgtcactcctcgattgcttctccggttaccaccagatatacatgaaggaggaagacaaggctagcaccagctttataacacccttcggcacatattgcttcatcaggatgccggagggactcaagaacgccgggtccactttctgcaggcttaccaagacagtgctcaacgggcaagttggcagaaatatattcacatatgtggacgacattgtcgtcgccagcaagagcaaggcggaccatctcactgacctcgccgagacgttcgcgaacatgcgagacgcacgactccgcctaaacccgaaaaagtgtgccttcggtgttcgccaaggcaaaatattgggctacctggtatcgcaccgcggcatcgaggccaacccaaccaagattcaggccatcataaacatgacgcctccgcagtccgccagagacgtccagcgcctaacaggcagattggccgctctcaacagattcatttccaggtccgccgagcgaagtctccccttccccaaaacacttcgtggtgcaaaagactttgcctggggaccagagcaggcggcggccttcacctcattaaaacagtacctgacagagttggccgtcctgacaagtcccgactcctcgctccccctgttgctctacgtcgcggcttcgccgcacgcggttagcgcggcactagtgcaggagcaaacagttgagggcgtggtcaggcagtgccccgtttactatgtctctgaagtgctgacaccgtccaagtgcaacatgacggagctggagaagattgcctacgcagtcgttatgtcttcgcgcaaattgcgccattacttcgaagcattcaaggtccgagtcacttcagacaggggactcggcgaattattcagaaacccggaggcatcggtgaggattgccaagtgggccgccgaactctccggctaccacatcagcttcgagcccaggacagccatcaagtcgcaagtcctggcagacttcgtcgtagactggaccgggccaacaacgcagccagacccgccagcagagaaggtttggacgatccattgcgatggcgcaaggtgccatgcgagggcaggcgccgctgcagtcatcacctcaccagtcggggtcaagcacagatatgcagcacgcctcagcttcgctctggaatccgacagatgcacaaataatatagcagaatacgaagcagtcatcctcggcctccgcaagctaagggccctcggagtcaccacctgcatcatcaaaacagactccaaggtagttgccggccaggtcgaaaaagactatgcagcaaaggaccccgcgcttatgcaatacctcgtggccatcctaagcctcgagagacaattcaagggattcaccctgcagcatgtggatcgggccaagaatgaagaggccgacgcattggccaaggccgccgccagaggcgagtccttgccctccgacgtattctttcatgtcatcggcacgccagccgtccggagccccgaagggctccaaataactaatgacagtgagggccaccacatagtcaaccttattatgaccgaggactggcgggcaccaataaccctgttcctacaggggtactatcatccaaccgacatcagcgaggccaagcgcctcagacatcgaagccgagacttcgcactgattgaaggccaactctacaagaaaggggtcagtcagccaatgcttaagtgtgtcaccgaaaccgaaggcgtccggatcctacgcgaagtccacagtggcacgtgcagctcacacgcagggccaagggccctagctggtaaagtgatccgccaaggcttttattggcccgcaatgatctgcgccgcaaatcgggtcacaaggtcctgcgaagcctgccagaagttttcacctcggtcaggcagcccctcgcagtatacaaagctgatcgcccacacatggcctctccagcgctggggcctggacattgtcgggcccctgcccaccgctcaggggaaccttaagttcgccttcgtcgttgtcgagtacttcaccaaatggatcgaggcaagggctgtttgcacaataacatcaaaaactgcccagaaattcttttggcaaaacatcgtttgccgcttcggagtaccgtccgaactaacagttgacaacggcaagcagtttgacagccaagacttcaaggatttttgcttctccattggcaccaagcttgccttcgcctcagtctatcatccgcagtccaacggggtcgtggagcgcgccaatgggaaaatcttcacagctgtcaaaaagatgctcctcgatgaaaaaaaggcagatggactgatttgttacccgaggcagtctgggctctaa

SEQ ID NO: 8279 - DNA, 393 bp, Zea mays
  Clone ID: MRT4577_10754C.1
cccacgcgtccgcccacgcgtccgcccacgcgtccgcgctcgacctctcgcacaaccacctcaccggcatcataccgccgggcctcttcctgctccgcaacctcacgaagctgctgctcctgtccaatgatctctccgggccgctgccgctggagatcggcaaggctgccagcctcgtgcgcttgcgcctcggtggcaaccgcattgcggggtcgatccccgcgtccgtgtctggcatgaagagcatcaacttcctcgacctcggaagcaatcggctagccggtccggtgccggccgagctgggcaactgctcgcagctccagatgcttgacctgagtaacaactcgctcacggggccgctgccggtgtcgctcgccgcggtgcacggcctgc

SEQ ID NO: 8280 - DNA, 396 bp, Zea mays
  Clone ID: MRT4577_107550C.1
ccctaaccccccgttgctactcacttccctcgtggtcaacccgaagcatatcatcgtgcagcgccatcgtgattcgtcgtccctccgcccccgcacgcctccataataccattatctcaaccctaatcgacgccgctacacactcccctcgcggtcaaccggagcatttgcccgtgcagcgccgctgcgattcgttgtcgagccgcccccgcacgcctccagaataccagcacgtcgtcacagctgctccatttccccacccgcgtctgggctgcttcctggtgcgtcatacgacttcaagaaatgaggaatttgctatcgttgatgacaaggaaaagtcagtactgcaggtaagaaggcgaagcgccaggatttttacaccaggcgggcacccgc

SEQ ID NO: 8281 - DNA, 1356 bp, Zea mays
  Clone ID: MRT4577_107551C.1
atggcacccaagaaagctagctcgaaggctgacgaggctgcgaaggcagcactacttgctgcgagaaagggcaaggccctcgccctcacccaatccacccaccaagaggccactgaagacgacgttctccgcacccgcgaagacgacactctccgcacctgcggccttgaaggacaatcgcagcctcccccaggcttcgccccaccggagggcgcggacctcaccgaggacggtgaagtcctcggcgtctcagcggaagaacagctacagctgcgcgccctgcgcctcaagaaccgcaatctccagaggcagaaagagatattggaggccaagcgccagcgcgtgtccgcactagccaaggtgcggcaaatgatacgcgacgaagagcagaaggcccaggacctcgagcgggagatcgcgctgatgcagcgcgaaggccaccttggcctgcagcacgggccacccctgcagcagcgcgcacaactgaaagacacgcgcgaaggccacctcggcctgcagcatgggccacccctgcaacagcgtgcacaaccggaagacccgcgtttcccccagcgcgaccacaccttcccgcacgccgcacctttccaaggggtcaactacctcgacgagcgaagtcccctggcgccacacctgcaagtgatgccttggcccgccaacttccgggcagggacctatcccaaatacaacggcagcaccgacccagcacaatacataatgagttatcagctggaaaaggagactctgcgggagtattaccgcaaatttttaacactcaagtcacagctgccctcagtcgatgaccagatcgctatccactacgctattagtggccttcgcgccggcgtcctctatagccactgcatcagagatccgcccaagaacctccaggaattatatcagctgttcgaaaaatacgccaaattcgaagagctccaccagcgcaaggttgagtcccaaaggaagcccaaagatgctccacagtccagccgcacgtggacgaggactccgcagcaagactccggtcgagacggccgcaaccaacagcaagtgcacaacatcgccaaccagcaccccgctgctgatgcccctcgtcgccaggaatatccccaccagggccgcggaaatggaactcgcggtaggggtcgggggcgtgcgcagccgccgcgccgattctactgcctcttccatggcgaagactgcgcccaccaaaccaaatactgcccagaaacgaaggccaccaaagacaggatgacacgggcgcaaccagccgacaaccccagagttgtcgcgcacacttaccagcaaccccctccaccatacatccacgccccctaa

SEQ ID NO: 8282 - DNA, 319 bp, Zea mays
  Clone ID: MRT4577_107552C.1
ccgggccgactcatacgtccaatccgactccacaggatgcacaagataaaccagctctctcctctccaccgccccatccatcagcagtcgcgcattcctgaacagcggtcatggcctcagagctgccgtcatcggagttccattgcactcctctcagcacacggcacgacagcacgcatagcgactcctcgcactatcacctcatgaaagcatctcggcagccaacggtgagagcagccgtccgcgtcaagagctcgcagtggagggcattaagaacgacggcggtggccgcggtcgcatgacctgcgcgccgcccacc

SEQ ID NO: 8283 - DNA, 5019 bp, Zea mays
  Clone ID: MRT4577_107553C.1
atggcacccaagagagctaacccgaagactgacgaggctgcgaaggcagcactgcttgccgcaagaaagggcaaggccctcgccctcacccaatccacccaccaagagaccactgaagaccacgttccccgcacctgcgaagacgacactctccgcacctgcggccctgaaggacaatcgcagccacccccaggcttcgccccactggagggcgcggacctcaccgaggatggtgaagtcctcggcgtctcagcggaagaacagctacagctgcgcgccctgcgcctcaagaaccgcaatctccaaaggcagaaagagatactggaggccaagcgccagcgtgtgtccgcactagccaaagtgcggcaaatgatacgggacgaagagcagaaggcccaagacctcgagcgggagatcgcgctgatgcagcgcgaaggccaccttggcctgcagcaagggccacccctccagcagcgcgcacaactggaagacacgcgcgaaggccacctcggcttgcagcatgggccacccccgcaacaccgcgcacaaccagaagacccgcgtttcccccaacgcgaccacaccttccagcacgccgcgccattccaaggggtcaactatctcgacgagcgaagtcccctggcgccacacctgcaagtgacgccttggccaactaacttccgagcagggacctatcccaagtacaacggcagcaccgacccggcgcaatacataatgagttatcaggtcgccgttgcatcttccggaggggacgacgccacaatggcgaagtctttcatcatcgccctagagggcccagctctcacctggttcaccagattacctccgctgtccattgattcctggagaagcctcagggacaagttcctgctcaacttccaagggtaccgcccagacaccgacgcattggccgaactctcgctctgcaagcagctggaaaaggagactctgcgggagtattaccgcaaatttttaacactcaagtcacagctgccctcagtcgatgatcagatcgctatccactacgctatcagtggccttcgcgccggcgtcctttacagccactgcatcagagatccgcccaagaacctccaggaattatatcagctgtttgaaaacactgacttcgacacaaagcggcagaagcgggaccactaccgcagcatcaaccacgtcgccgtcaccggcccagtcgtgcagacaaagtggtcccacataccgttaaccttcgacgcacgagacgtcgacctgcgcagcgccccccactgcgacgccatggttatcaattgcagcgtggcaggctgggacctgcacaaagtcctagttgacaacggcagtcaggcggacatcatcttcctccacgccttcgatcgcatgggcataagccacagcctgctcaagccttcggacaacccgttgtatggcttcggcggcaagggcacctttcccgtcggtaaaatagagctgcccctctccttcggtgtagcacccaatgcccgaagtgagcaagtaacctttgatatcgtggacatggtatatccatacaatgccatcatgggccggggctccatcaataagttcgaagcagccattcacggactgtacctatgtatgaagatatcaggtccgttaggcgtcattacggtccacggcaatcaacagactgcgcgcaacatagagcgggacttcgtgcccggtcagagaaacgtgcactgcctcacagcacagcgcgaggtccccgcgcccgccagcccaaccaataagcagaacgacaaggcacagctgcagagcaacgacgggaccaagactgtccccctcgatcaggcaacgcccaagcagacagtcactatcagcgaagacctcacttcgcatgaagaggagaaactcctctgctgcctaaccaagaataaggatgtcttcgcctggtctgccctcgatctggtcggagtcagccgatccataattgagcatagcttgggaattgacccttcggtgcgaccaaaaaagcagaagcttcgcaaaatgtccgacgagaagacagaggccgccaaggcggaggtgcaccgcctcctggaagccaaatttatcgagcccgtggcttatcctacgtggctctccaatgttgtaatggtacagaaaaaaagcgggaagtggcgaatgtgcatcgacttcaccagtctcaacaaggcctgcccaaaggacaatttcccgttgccgcggatcgacaaaatagtcgatagcgcggccggatgcgaggtcatgtctctcctcgactgcttctccggttaccaccagatatacatgaaagaggaagacaaggctagcaccagctttataacgcccttcggcacatattgcttcatcataatgccggagggactcaagaacgtcgggtccaccttctccaggcttaccaaaacagtgctcgaagggcaagttggcagaaatatattcacatatgtggacgacattgtcgtcgccagcaggagcaaggaggaccatctcgccgacctcgccgagacattcgcgaacatgcgagacgcacgactccgccttaacccggaaaagtgcgtcttcgacgttcgccaaggcaaaatattgggctaccttgtatcacaccgcggcatcgaggccaacccaaccaagattcaggccatcataagcatgacacctccgcagtccgccagagacgtccagcgcctgacaggcagattggccgctctcaacagattcatctccagatctgccgagcgaagtctccccttcctcaaaacacttagtggtgcaaaagacttcgcctggggaccagagcaggcggcggccttcgcctcattaaaacagtacctaacagagttggccgccctcacaagccctgactcctcgctccccctgttgctctacgtcgcggcttcgccgcatgcggtcagcgcggcactagtgcaggagcagacagttgagggcgtggtcaggcagtgccctgtttactatgtctccgaagtgctgacaccgtccaagtgcaacatgacagagctggagaagattgcctacgcagtcgtcatgtcttcacgcaaattgtgccattacttcgaagcattcaaggcatcggtgaggattgccaagtgggcggccgaactctccggctaccacatcagctttgagcccaggacagccatcaagtcacaagtcctggcagacttcgtcgtcgactggactgggccaacaacacagccagacccgtccgcagagaaggtttggacgatccattgcgacggcgcatggtgccatgtgggggcaggcgccgctgcagtcatcacctcaccagtcgggttcaagcacagatatgcagcacgcctcagcttcaatctagaatccgacagatgcacaaataatatagcagaatacgaagcagtcatcctcggcctccgcaagctaagggccctcggagtcaccacctgcatcatcaaaacagactccaaggtagttgccggccaagtcgagaaagactatgcagcaaaggagcccgcgctcatgcagtacctcgcggccatccgaagtctcgagagacagttcaagggattcaccttgcagcatgtggatcgggccaagaatgaagaggccgacgcattggccaaggctgtcgccaggggcgaatctttgccctccgacgtattctttcatgtcatcggcacgccggccgtccggagccccgaagggctccaaataaccaatgacagcgagggccaccgcatagtcaaccttatcatgagcgaagactggcgggcaccaataaccctgttcctacaggggtactatcatccagccgacatcagtgaggccaagcgcctcagacatcgaagccgagactttgcactgattgaaggccaactctacaaaaaaggggtcagtcagccaatgcttaagtgcgtcaccgaaaaggaaggcattcagatcctacgcgaagtccacagtggcacgtgcgactcacacgcagggccaagggccctagctgctaaggtgattcgccaaggcttttactggcccgcaatgatctgcgccgcaaatcgggtcacaaggtcctgcgaagcctgccagaagttttctcctcggtcaggcagcccctcgcagtatacaaagctgatcgcccacacatggcctctccagcgttggggcctggacattgtcgggcccctgcccaccgctcaggggaaccttaagttcgccttcgtcgctgtcgagtacttcaccaaatggatcgaggcaagggatgtttccacaataacatcaaaaactgcccaaaggttcttttggcaaaacattgtttgccgcttcggagtaccgtccgaactaacagttgacaacggcaagcagtttgacagccaagacttcaaggatttctgcttctccattggcaccaagattgccttcgcttcagtctatcatccacagtccaacggagttgtggaacgcgccaacggaaaaatcttcacagccgtcaaaaagatgctcctcgatgaaaaaaagggcagatggaccgatttgttacccgaggcggtctgggcactaaacacgactgagtgcagggcgaccgggttcactcctttccgccttctatacggatcggaggccatgaccccgcaagaaataaaacatgggtccccgcgaacagttccgtcagccgtccctgacgtggacgagccaacttcaaaggatctcattgacggagaccgagtcttcgctctacaggccctaaacaaataccaagctcagacaaaagcatggcgcgaccacgcagtcatcccgagggaatttagcgaaggggacctcgtactcgtccgaacggttcggacagagtctaggggcaagctggagcccaagtgggagggcccctttatagtcaagacgaaagcttcccccagcgcttacaggctcacaacgccaaacggcgaagacctggagcactcctggaacatcgacaacctccgcaaattttttgtttga

SEQ ID NO: 8284 - DNA, 528 bp, Zea mays
  Clone ID: MRT4577_107554C.1
agacgacgcgattcttgacttctcgacttctctaatctctttgcctccctccaccaccagtccaccaccactgctacccaaccctcgcttaccccaaaccctaggacaatgtacacgtgggccggcgatgtacgcagacggaagaggtgatgatgcgctgcaccatctcacgcaactcacccaagaatgtctaccgcgattacctcgcgggccaagacggcatccttcaggcggtcaccaacgatgaggagaatgtctatcaccagggtgattgagagaaagagaacttgcagtctttatgagttgccaaatgagactagcgaggacactcttccacttaacgaagaacctcctgagcttacagaagcagcactgaggataatctgtgaccgtgacgtaatgctgcaagaatactgcctatcgccatctgcaactgatactgaagcatgggtcctgtatgtcgcaatctattttgaatatcgcattgtgaatttgacaaatatgacactagaactgtcatcaccatga

SEQ ID NO: 8285 - DNA, 252 bp, Zea mays
  Clone ID: MRT4577_107555C.1
tctagccggtctggccggcgaccactggccccaaattcttttgaggccctagggaattctacttccgcccggctttatagaattcccgggccggcccccctttcccgacttccttttttttcttaaataggcattccggttttcccagaggcaccccttcttcccttggaatcgagaggccctaaggccggaaggccgtaaccataagttcttcttcttttttcgagggcccggcggccgggccccggacct

SEQ ID NO: 8286 - DNA, 282 bp, Zea mays
  unsure (1)..(282): unsure at all n locations
  Clone ID: MRT4577_107556C.1
agcagcacgcatcctctcgctcgccacgagaagcagccgccgttgcagcagccgcagtcacagaatgggagggttcgtgaagacccataagaccaatgcgtatttcaaacggttccaagtgaaattcaagagaaggcgagcaggcaagacagactacagggccacgataacgctgattaaccaagacaanaacaagtacaacacacccanatacagatttgttgtgcgatttaccaacaaggacatcacagcagcaatcatatctgctagtatagcgggtga

SEQ ID NO: 8287 - DNA, 234 bp, Zea mays
  Clone ID: MRT4577_107557C.1
atgtcgggagaacacacaaaaaaggagttgatgaccggggaaaacctggatctttggggaggaaaaaatgaagacaaggctctatcaaaggacggcggcgacaagcacaaggagcacaaagatgaatccgctgacgccatcaagtcacataaaaggggcgacaagaagaaaaataagatgaagaagaaggcaataatccaagtgtcgcgtgcaagtgattacgagattccgtga

SEQ ID NO: 8288 - DNA, 1973 bp, Zea mays
  Clone ID: MRT4577_107558C.1
ccacgcgtccgcgggaggagctcgcggaggagagggcaagagtcaggaaactatacgagaagttgaaagcggatatagaggcggccaagaatgacgagactatttctgggagctggtcaaaagacaaacgtcagaatcacgatgcttacgtggagatcatcgaagacggcgacggcgttgaggagattccggcgctggtgtacgtagcccgcgagaagcggagggcgtggcctcaccacttcaaggccggcgctctcaacgccctgctgcgagtgtcgggcgtggtgagcaacgcgccctacgtgctggtcctcgactgtgacatgacctgcaacagccgcgcctccgccctggacgccatgtgcttcctcctcgaccgcagaccgccgccggacagcctcgccttcgtgcagttcccgcagctgttccacaacctcagccacaaggacatctacgccaacgagctcagatacatcttcgggacccgatggttcggcctggacggcgtccggggccctcccctctccggctccggcttctacgtcaggagagacgcgctgtacggggccacaccgaccacagacttcatgcccgatgccgccgtcgtcgccgagctcaagacaaggttcggccactccgaccgtctcgtggcatccttacgcagccccggcgttccaccagaagcagaagcgatgatgtcccttgcggcgctggcctcctgcgcatacgaggccggcaccgcctggggcgccggcgtcggcttcatgtaccagtcggtggtggaggactacttcacggggttccagcgcttcttcgcccgggggtggacctccgcctactgctacccggagccgcgcccggcgttcctcggcagcgtgcccaccaacctcaacgacgtgctggtccagaacaagcgctggatgtccggcatgctcgccgtcggcgtctccaggcgccactccccgctcgcctgccgcccgctcctccgggcctccctgctccaggccatggcctacgcctacttcggcttcgccgcgctctgcgccgtccccgtgctctgctacgccaccctgccgcagctctgcctcctccggggcgtcccgctattcccctgccccgccgccaccgcggcggcgttcgcgtcctcgcttctgcagcacatggcggaggtgtgcgtgtccaggcggggtaggctggacctgcgcacgtggtggaacgagcagaggttctgggtgctcaacgccctcacagcccagctcttcggctgcgtcagcgccgcccaggagctgctcggcgcacgcgccttggacttcgacctcaccagcaaggccgccgtcgacgggagcctgtaccaggacggcgtgttcgacttcacgggctgctccgcgctgctgctccctgccaccacgctctccgtgctcaacgccgctgcgatcgtcgccggcacctggaagatgtcgtcgtcgtcgtcgtcatcgagcggcggcttccacttcgccccgcagctgttcctcatgtgctacggcgcggcgctcagctacccgctactggaggggatgttcctcaggcgggatcctgcgagggttccgccacgcatcaccgcactctcggtcgcattggcagccgtgctgcttgccgccatgcttggatgaacatcaaccgagagatgcacggcctgcttcaactcttgtctactgttctagatatactgtacttttaattactattcccactgtattcccaccgttgaagcacaaaagcttggccgttgcatttccccccgagaagaagcccggatacttataggttaattagaactaatttatgatatacattcagactaattattctacacatcaaaggtatttatgtaatgcggtacaatatatataatctgtttactaaaaaaaaaaaaaaaaaaaaaaaaaaaaaaaaagagaaaaaaaaaaaaaaaaaaaaagggcgacaaatat

SEQ ID NO: 8289 - DNA, 334 bp, Zea mays
  Clone ID: MRT4577_107559C.1
agccgaagatggcggaggtgcaggtcctggtgcttgatggtcgaggccatctcctgggccgcctggcggccatcgtggctaaacaggtactgctgggccggaaggtggtggtcgtacgctgtgaaggcatcaacatttctggcaatttctacagaaacaagttgaagtacctggctttcctccgcaagcggatgaacaccaacccttcccgaggcccctaccacttccgggcccccagccgcatcttctggcggaccgtgcgaggtatgctgccccacaaaaccaagcgaggccaggccgctctggaccgtctcaaagtgtctgacggcatcca

SEQ ID NO: 8290 - DNA, 532 bp, Zea mays
  Clone ID: MRT4577_10755C.1
cgcgtgcgtgtaccgggctgctattacacggcacgccctgcattttttttcacaccaagcgaagctacctacatcgtcttaactacttggatacacatgacttagtgcagtgcttgcgcttctgtgccctttttgtgagcgcaacaaatgcgggcattattacacattggttacttgctcctaatggcatggttcctcagatactactgcctgtttcttcaatggggttggtgcacctagatgggcaagcctacaggcttcagcacgcgcttggggttagcgtattgcagcaactaatgaaccaactgcaacaacaatcgcttgacacatctaaccatacggaccatcgtagcacaacagcaacaacaggttctaccacaactgatccaactagatggggtgaaccctgtcgactacttgcaacagcaggtgcttgcatgcaacccacttgctctgggaaacgtagctgcataccaacaacaacaacaattgcaacagtttctgccagcgctcattcaacttggcatggtga

SEQ ID NO: 8291 - DNA, 210 bp, Zea mays
  Clone ID: MRT4577_107560C.1
atggccggccttccacacattctctttttcagatctgtgtcagaacctttcactcaactccaactactaatatcaccttctcacatactcatctcccgccttactacctgctactccatgctcttttacactcagcacctcattaatttacaatttcccaagatgtctgcttgataactttacctctttcatgtatctattatttgttat

SEQ ID NO: 8292 - DNA, 307 bp, Zea mays
  Clone ID: MRT4577_107561C.1
aacaactaccaaacaagctctcctttcgctttcgatacatggagctcgacgccgacaacctctacgccaccaatctcctcctcagcctgcccgggaccagcaaaagcatcaccgaccaccacatgccagaagaaaccgcagcccttcgtctgggcacaaacaccctttggacgacggcaccaaaaactaggccttcgggaccaacccagccgccataaacctagacttcgaccactaacaccacacctacgcgcctgccaaagagcaaagtgtctagtggcctcccataaagacctacaagaaaaac

SEQ ID NO: 8293 - DNA, 1345 bp, Zea mays
  Clone ID: MRT4577_107562C.1
cccgggcgcttcctcccgccggctcctccccccgcctccgctctcaccgcgaccgaccagccatggagcaaggccaggggccgccgccgccgaagccgcctgcgacggagcgcgacatcggattcgccgagcgggccgtggcggcggcaggcgcggccgtcgtgtccgccgtcctcgtcaaccccctcgacgtcgccaagacgaggttgcaagcacaagctgctggagttgtttataacccgatatggtcagattttaggtgctatccatcatgcagcactggtggaatcaatggtttaggcccatgctcgtcctgcagtcctgaatgctttcagtacagaggaactatggatgtgttttctaaagtcactagacaggaaggaatttttagactatggagaggtactggtgcaagcctggcattggctgtaccaacggttggaatatatctgcctagttacgatttattgcgcaattggattgaagaatactcagaccgcaattgtcccaagcttagaccatatgctcctcttatttctggctctattgcacgatcattggcatgcataacttgttgccctattgagttagcaagaacacgtatgcaggccttcaaagaatcaaatgttggagggaagccccctggaatgtggaagactttgataggtgtgctttcatcaagacagagcatcaagagccctgaaaacgtgcgaggataccacctcctatggactggtctgggagcacaactagcacgcgatgcgccctactcagctatatgctggacagttcttgaaccaattagacgacatgtgacgcgactattcggtgatcaaagcaacgcgacagttatattgggggcgaacttttctgcaggctttattgctggggttatctctgcgggcgctacctgccctcttgatgttgccaagacacgcagacaaatagagaaggatcctgaaagggtattgagcatgaacacaaggcgcatattgcttgaggtttggaggaaggaaggtgtggaaggtctgttcagaggcgcaggccctcgaatggggcgcgcaggcccgtcggtgggcatcgtcgtctcctcctacgaagttgtgaagcacctcatgcacaagaacacgagcaatgcagcagacctatgattcgatgagctcgattagcacgccctaatggcacaagtaggattaggaatgtcgctattcaaagaaacacatttttttacggtagtccatgacagataaatgttatccctccattccattacaaactgttacttctaagatgggtttttatgcatctagtggctagcttataacctatgggttatatcgcaacg

SEQ ID NO: 8294 - DNA, 241 bp, Zea mays
  Clone ID: MRT4577_107563C.1
ttttttttttggtttttcttggtacaaatggggaatttatcaaataaatgtaatggtaagaatcgaaccaatagccctagaggactaactcccccgtccctaccaatcacaacacaaaaaactgcggcccgcgtagcttgaacaacaacaatggctgaacattctgattccctcacataaactcacagggccccaacgccctatgctaatgctacccaaaaaaagaagcatcacctccttg

SEQ ID NO: 8295 - DNA, 526 bp, Zea mays
  Clone ID: MRT4577_107564C.1
atgttaacgtttggatgcctttttttttttgttttttttgaaccaagcgcaccaacctggccctaaatcataaagggaaacgggggcaggccagatcatcctttttaatatggacccactcccctgaacatgccagaccaaaatacacgggcttttgcataaattttcgcacccaaataaaagaggactaccttctttgacaaggagagaccacaactgacagtgatggacactaaagcttcgccggggggagaccaatacgacccgtattaaccatgcatagaccaggcctgccagtggcgacataataaagctttgccaagggtacacctgattgttggtccttacacacaggttgccccttgaggttgcggagaacaattatagcgcacaagggggtcctccccttgggggttcccccacacagggaacccattggctttaccaaaaacgtggaaatcaaacaagggagcccatccctcacggaacccttatgctcatagaccacgaggccaacccacaacat

SEQ ID NO: 8296 - DNA, 465 bp, Zea mays
  Clone ID: MRT4577_107565C.1
aagcatcgacttcgatccaggtcatgttctgatccagctgtatatgaatacatgtagtatagtacgtatatatatatactggacagcacatgctatatatggggccactgggcggtcagtccagtcgggatctcatcgatccatcactttcacttggggggtggtgcagctcccctgcctttcgggatcctcctgagcacccccgagtccatgtcggcgatgggggtccgcaggtcgtgcacccccctggccaccagggggtccacctcgctttcgtaccgctcgtacagggcgggcagggtcatcgtgcccagcaccactgggcggacgggacagacagagcccgcagacgacgaaaacagacagacagacacacggcgtcggtcagtggcgcccgccgcccacgaagaggtagtatatatggttcaggagcttgaaggggggcgttatatatactaaccgggg

SEQ ID NO: 8297 - DNA, 412 bp, Zea mays
  Clone ID: MRT4577_107566C.1
gcacgcaacacacggcacgagcagctgagcgcccatggcaggtccccggcgtctactactactgctgctcccgctgctggtgctcctaggcgcgcacgccggcgtagagcgggtcctagggggaggggaacgaaggtctccctggagctctactaccagtggctgttcccgtactgattacgttcaatgtgcaaccacctacctgggatcttgaacggcaggcttatggactgcgcacacctggaggtctggcgctacggtagcgcgctcgctatgatacaacaaagatagctgttactgacctggtcggaaccacgtgtaatggtcaacactgaggtaatctcgagccatcgactgactgggcggatctggatgtgcatttcatgtacatttacttgacagaggacctgca

SEQ ID NO: 8298 - DNA, 386 bp, Zea mays
  Clone ID: MRT4577_107567C.1
tttttttttttttttttttttttttttttttttttttttaggagcaacttggtgccacatgaaattattggttgagtagcatttttcaaaaacaaactttatgatattggtgggcttcctatggctaggactttaccttgggccactacaccaccaactttttgtagaacatcataactttttagcagcggggtgcttccttggcttaccatcgggcaagccagactagcttgacttttcctggaaggtaaatattacattagtatttcttggtttagagaattacatccccctgggggcttgcccaataacattttttttgcacattaatatacattattggttttttttaactaggcaaaagggggtttacaattcttatggcc

SEQ ID NO: 8299 - DNA, 784 bp, Zea mays
  Clone ID: MRT4577_107568C.1
agcagtggtaacaacgcagagtactttttttttttttttttttttttttttttgttttgattatttataactcttatgtgtggttttccagcaacggcctggcactgatggtactccaaagtactcaaatagctggcatgtagtgaaggaaactgcaaagtaagacttcagtggtgatgttgaaatcttcaattatataatgtccagaataggaatagcattactatatttggcttgttcttagtcatatgtagatacttgatgcttctagtatgaagtggattgctcgctggattttcccaagtttgcacctacatttttgcttaccaattgacaagtcttcccttcagtaattagcatattgagaaccctgaaatatatttataattttataaaagagtggttaaagtctaaagtgcctttaaaacacgacaggaaagagttttgttgcaaattatttgccggccacatctgcacataatattggaaatttgaaaattgaatgaccttacatggcatcacaggggaattaattatgcttagggctagtttgggaacaccatttttccaagggattcctatttttctaacggggcgtttggatcccttcatttcagaggaattggaattcactcaataaagtaacttatttaatttggaattttacattccatcactttccaaagttcagatataagcatatctcaaattcacggggtggaggatggaaaatgattttatgtactaatagaattcccgcgtactctgcgttgttaccactgct

SEQ ID NO: 8300 - DNA, 382 bp, Zea mays
  unsure (1)..(382): unsure at all n locations
  Clone ID: MRT4577_107569C.1
gggggggggggggggacagaacaaagnnncacacggcgggnangaaaaccccccccaggacaaggacagagataaccgaagagcgaagnaccccncncacgcaaacanaacggacnnccccacaaacgacgggaaccaaacacaaacacacaggggggggggggggcaccaaatttttttttancgancgccaccaacnnnanncnancaacacggcgagcagnngcggaccacaggcggcnangccnncaaagcnccagaacanggngangaccagggcagccacagaacagcacannnaccaggggacgaacggccagcgcggggggncgcccccgcaccacnnccagagcacganggnggggccggcgcgcacgccgcc

SEQ ID NO: 8301 - DNA, 205 bp, Zea mays
  Clone ID: MRT4577_10756C.1
gatacattttcaaagtctgttgtgttaaaatcaggttttctgcataacaaactcacggcttattacataatctgatcagatacattacaaatcttggttctgatcaaaataactccctactttcaactatgaatgcaactactccttacttacatcgggatcacttgtaacaaacattaatccatgttttctataccacctgcat

SEQ ID NO: 8302 - DNA, 268 bp, Zea mays
  Clone ID: MRT4577_107570C.1
tgcagatcgagggggtgaacaccaaggaggacgtcgcgtggtactgcgggaagcggatgggctacatctgggaggccacgaccaagagcagcggcacccactaccgctgcatctggggcaaggtcgcccgcccgcatggcaactacggcgtcgtgcgcgccaagatcaagtccaacctgtcgccggaatccatgggccgcaacgtcaaggcgttcatgtaccccagcagcatctaatgataatctgaatgcgtggaggacacctactc

SEQ ID NO: 8303 - DNA, 621 bp, Zea mays
  Clone ID: MRT4577_107571C.1
tccacgcgtccggattactgataggcattgaagaggtatcaccagagaagcaggctcagttcttgaccgctcttctaaatcctctctgtcatcaggttgagtcacttgttatggatgccaaagcacgagggcttgaggaatcatcaccaatggctattagccttcaacaaatcattgttgcattgaatatggtcagcaagggctttaatgagcgccttgtgatggtaaataggccagctattggggtcatgttcaagaaaacccttgatgtagttttgcaagtccttgtttcatttcctagcgtgagacctctgcgatctaaggtgatatcgtttctgcatcgtatgatcgagatattaggtatctcagtgcttccatgtattccaatcgcactgagacaattgcttcttgataacgaggctaaagatatggtggaatttctcgtattggtaaatcaaataatctgcaaatttaaaatcgtcagctagcgccatattggaggaagtcttccctactattgcaagtcatttgtctgtgatattatcacaagatgcattttcagctggtcttgcaagcaatactgaggaaatgcgagaactacaagagttgcagaggacatta

SEQ ID NO: 8304 - DNA, 146 bp, Zea mays
  Clone ID: MRT4577_107572C.1
ccgagaacagctggcgatacatctgaagctgcagatgcagcttctctcgtcatggagtgtgagtttgatcaggcagcatatgcgattctcaggaaattcagctccagttcagagtcattcagcgatctggaatccgtcgacgcccg

SEQ ID NO: 8305 - DNA, 834 bp, Zea mays
  Clone ID: MRT4577_107573C.1
atgcctcgctcctcttgcgaccaccgcgccctttcgccttccgggcctccagatggggtgctccggtgttctctggagggatccgcgtcaaggtcatctcttctggcgacttcaccgtcggagagcgtgcgctcgtggtggtgtcgccgatcttgtcttcttcttgctgctgttggaggggtgcaaccccatgggagttgtcatccttccaccatcattcggcttcaaggattttcatcatgcagcctggctgcagtcccccgtcggtggtcatctagaaggatgactaccagccttgtggtggggagaagcaagccgggctatggcctccctcctgccctcagcttcaaggatgttcatcatccgtgctggggaggagggtgtgccgagttggggccccacctccgcgtgggtagcggcccgcttcttccctcagtgttcgggggagaagggcgtttgctattcatgcggaggaggcgaacttcgggtacgcggggttggctgactgcgggtgtcgctagccaccgcgttcccgatgccttggcatggatggcttcgacgctgcctccgacgctgccttctactgtgggtcggggcgcgactgcccgttcaccgcacaggcgacagtcgtgccatgtacaggtccgccacacccacggcttctgtcgcgtcgccggtcgtactggtgggtcgcacatggcgtcgtacattgcggaagcggcggccgtgttcttggatgtcctcactcccttagcaaagacgggagtgaggacctacaagcgcgttgaggcagccgtcgcccaccggtgcaggggtggttgtcgtcgccggtga

SEQ ID NO: 8306 - DNA, 388 bp, Zea mays
  unsure (1)..(388): unsure at all n locations
  Clone ID: MRT4577_107574C.1
gggacacccgcngagtttaagcanaanaaaaagcggaggagaagaaacgnacgagngaaccccaagnaacggcgagcgaaccgggagcagcccaggcggagaaacgggcggccgcgccgcccgaancgnagacnggagaggcgaccncagcgacggaccgggcccaagnncncaggaaagggacgccngggagggggagagccccgnccggcccggacccagacgcaccacgaggcgccgacaacgagacgggccggnggggaacgcagcccaaagcgggcggaaaacaacggccaagggccaaaacaggcgagagaccgacagcgaacaagaaccacgagggaaagaagaaaaggaccccggaaagagagccaaagaggggggggaa

SEQ ID NO: 8307 - DNA, 223 bp, Zea mays
  Clone ID: MRT4577_107575C.1
ggccgaccgacgcgtccggacgccattccctgttcaataagggaccattattattcggcataacacgcccgacaacatcggggtggtattcgatgcgctcggacttcactctctccatggcgagcgccatctgcactcacacaaacggcgactacgaccgccaaccaccgccccccattcatctacccgcgtcggtgcatctttcacattccgttacctgcca

SEQ ID NO: 8308 - DNA, 400 bp, Zea mays
  unsure (1)..(400): unsure at all n locations
  Clone ID: MRT4577_107576C.1
ccnacaatctttttttttttgtggggttttttttttttttttttcgttttttttccttttttttttttggggcgcaaacccatggaaaaaaggggggccaaacccaagcaactggaattggttttggggaagaccataaaaaagttttttggggggaaaggggcccccaggggccccactcccaacaattttttaaagaagcagttttgttttttgggaacccaaaatgccccgggggggtggggggttcatttgggggttttagatgtccctgggggcaggggccgcaacagcaccattttttgggccccttccctccccctggaggggggtgggctcctccgggggggcccccttggggacctctcggggggggaaaaggtcctggatccctgggggg

SEQ ID NO: 8309 - DNA, 1994 bp, Zea mays
  Clone ID: MRT4577_107577C.1
aattcggcacgaggcgtcggcacgaggtactcatcagcacagtcagaggtgcgcccgcgtcccccaatacccgccccggctcctcgtcgtaatcaccgcagcggccagatctgacctcgcccgacccatggcatgcgcccgagctgcccgcgtcccccaaaatccaccccggatcctctcccttccccacagcgcgcgtcgacatcctactgtgctttcccaaatttggagatcttccatcgccgatcttcaccacatcgcggtgattgcggacgcgcgcgccctcgacccatggcgcccgatctgcccgcggatagcgatgttgttgagaggtgcctggcagcagtaaatgctcttgcttcataccatttcagagaaagattaggagggagaggaggacagaactcgtagctcatggaatctgcaggaccaaatggcaaattgcaggaaagcataccaactcaattcttcagacttctattgtaaatacttctttttgaagatctcgggtgagctgtgtactggtaatttgttttttattttgattgttttcaatattaagcgaagtacttattaattttttattatcttgtttaatcacaccgccaattgtgtctgaagggaaccagaccatcaaagcatccattggtatttggacttgttcacatttaacttcagtctgctagattttttatataccgtgtattctctgcaacaattactctatacctatgtaccataatgtgaggttgataagatttatgttcacaactctatagatttgtaaagagtttcatgagaaaggtggttacctttctgccgagctcctcttagtggccttctttctatttcccacatctttgcactgttgctgactgaatttcatccacggatatttcaccaattcactgcttcctcactatgattcacctgctgctgctgcaatcaacattcagtcgacacaaactagacaattcacctggacacaaaactgcagcagcagcagtgaaccattgatttaaatttagacaaagcagcaacaatttcagtcaatcattctaactcaaaccaggcagcgacagtgtcgaccattcttacaaatttagagcaagcagcctcagtgccgaccattgtttccactttagaccaagaagcagcagtgtcaaggcttctttcaaattcagagcaatcaacctcagtgtcgaccattatttccaatttagaccaacatgcaacagtgtcaaccatttagtcaatcattctttccccaaggttcgcttcttttcttttattaatcgtttgattattgtttgtttcagctatttatgtggcaacaaactcactagacatatacccccaggactagggaacatgagtaaacttagctacttgtaaattattgttaactaaataattgtgtgatgttgttgtccgtaattttaatgaaggttaatatttgttccatccagacagctgaatgactagaggggcaattagcgggagcagaaggagcatgcgtcgctaatcatgttgttagccttttttattctttgctccagaaatttgttatcacctttcttttgccttaaaacttgaataaactttcttgtagcaattgctaatgctagaagctaatcctatttttgggtgctttttcctcctatgattggcatacagacatgcatatggatattgataatatgtattatgaggtactatcttttatcatgtcttatcctgcctggatgttagaggggttttgttataggattattttctttgtggaggattctgctaggcgtgtgaacctctgtctccgcgctctcgcttgactgttgatttgactaatttggttgcttagatgtggctcttattaaaaaccatatgtggataggcttgcactacatacacggtggcatggtaaacgttgtgaccacgctgtgataatgcatggattccatcagttcattttattcgtcaattgatcatgggtg

SEQ ID NO: 8310 - DNA, 1865 bp, Zea mays
  Clone ID: MRT4577_107578C.1
cattgggacctcctcgaggccggaaaaaaacattcttgtccgccccggctccaggctgcaagtctgcaaccccccatccacccgcgaagtctcccaccaccgcgccgatccgggggcgggcggcgggggggcctcttgctctctactccacccactcgcggcctcacccgtggatctacgcggtggccggcgggcgcgatggcggaggcggagcgggagcagcgcccgctgccggaggtagagcaatctgtcacgtccataccggaagatcatggagccacatgttggggctgtgggcttcggcttgtctttgcgagctactcacctatctacaagtgtggctggtgtggagccgtcacgcagagcaacaaccagactgcaaggaaacctgatagtatatggttttcccactggaggcgcctacgggacagactcttcgtggctgtgctcgtcctcttcatgctcttcgttatatgtggtggggtctgggcggtatatcctgttgttttctcagtcagcaagttctgtggcgtatttcactgcacggtagcagctgtgttggctgtatgcaccgtcacaagctattgcttggcctctttgaaatgtgcaggcgcaccaacagacataaggtggggcagctatcccgtggttgggaaaggggatcttgagaactataccttttgtacatactgtagcaaaccaaagccccccagagcacatcactgccggtcgtgtaaaatgtgcgtggtggacatggatcatcattgcccatttattggcaactgcgtgggagcatcaaaccatcaagtgtttgtggtttttctcatttctgtggttatcagttgctcttatgtcgctgggatgaccatatacgcgagctaccagatatggccctccattgaattcccagacctagcatcatcatctcgtcactcgatgagttcttggaaaacggtgctggagatgatcactacggttgcaggctccgccttcttcttgtcagccaggggtctagtcctggtgtatctggcgtttgctagctcgtcagtgaatgctggtatagctgtgttgctgtgccagcagctgagctatatctaccaagggaacacgtacctcagccgtctgagctcagcaccgaatgccttgcagcatggagagaggggtttgcagaacatcgttcggtttttcgggtgcccgtatccagtctccagagctgtgttgcgactgcggtactccaacgctgccaagttgcaggatgattcagggtcgaaacttctttagagagtgctatactctcgattaagacgccgtttcgagtcgagacagttctgttctgttactcggaattgtgatttgtgaacctcactcagttgaccaccggcagatttgtctgaataactgaagccgttttaggatgcagcactcatgacaacccgtgttcgatctggaggaaggattagttgttcatgaggacgccactcgcattgattaggtagagcaattttggcagatgctgaaatacggtgtggcctgcgcattcattgcctgcagacaataataaggtgctgatggtcttgcaacagactgcagcacctgaaattctgcatcaccatcactgccctttccaactcagcagagcttgaagatggcagcagcttcatccacagctggttgttgcagaagaaatgatcatcatgattaaatctgacagtagtggcttcgagagtgatgctaggatgttggagagaaaaaaaaatgtgtcccgccatacctctttgatgttaattcactgacatgtatatatacgatcggaaacgttgtaacgttcacttgatgtaaattattagtcgatcgacagcaacgga

SEQ ID NO: 8311 - DNA, 115 bp, Zea mays
  unsure (1)..(115): unsure at all n locations
  Clone ID: MRT4577_107579C.1
ttccgggtcgnaccagcgtccgngatatgcttttgcatgctgctggntagaacactgtgttcgacaaatgcccttgcccttcttggagaccttctgggtttgcccaaacatttgc

SEQ ID NO: 8312 - DNA, 608 bp, Zea mays
  Clone ID: MRT4577_10757C.1
ggccgcttttttttttttttttttcttttatttttttttttttttttttttttttttttttttttttttttttcatccaaaaaacttttttttggatttccaactaataagcattctaaaagagggcccccccaatgatgggttgtgggtaggaggccgttgggtctgccaaagcaggttggacagggggcaacatttgttgtagttgaaaaagggtgggggggttagccgcaaactgctggtaaaaaggcagcacctgttgctgggtaaaaaaggaagcacggtttgctgcagctagctggctaaagggaagaagtttttgctgctgcaaataagcaggggggttcagggcggccaattggttaaatgaaaaaagttgttgttgctgaaagtaggcagaacctagctggctaaagggaaatagtggttgctgcaaataaccagcagggttcagggtaaacagttggttgaatggaaaaaattgttgttgctgaaagtagggaaaaaggtttgccaaacctacttggttgatcaaaggtaccacgagttgctgcacttgttgtcccctgttggtttgtaccaatgactgccccaaaaatagggctggc

SEQ ID NO: 8313 - DNA, 2045 bp, Zea mays
  Clone ID: MRT4577_107580C.1
ttgggaccccctcgaggccggccggggtcgcacaaattcgcgtccgcttcgtggtgcccgcccagccccaaccctcgtggtcgttgaaacctattcgcaggaaaaaaaaaaaaaaacattcgtgtcctccccggctccaggctgcaagtctgcaaccccccatccagccgcgaagtctcccaccaccgcgccgatccggggggctggcggcgggggcctcgtgctctgctctctactccacccactcgcggcctcacccgtggatctacgcggtggccggcgggcgcgatggcggaggcggagcgggagcagcgtccgcttccggaggtggagcaatctgtcacgtccataccggaagatcatgaagcaacatgttggggctgtgggcttcggcttgtatttgcgagctactcacctatctacaagtgtggctggtgtggagccgtcacgcagagcaacagtcagactgcaaggaaacctgatagtatatggttttcccactggaggcgcctacgggacagactctttgtggctgtgctcgtcctcttcatgctcttcgttatatgtggtggggtccgggcagtatatcctgttgttttctcagtaagcaagttctgtggcgtatttcactgcacggtagcagctgtgttggctgtgtgcaccgtcacaagctattgcttggcctctttgaaatgtgcaggcgcgccaacagacataaggtggggcagctatcccgtggttgggaaaggggatcttgagaactataccttttgtacatactgtaacaaaccaaagccccccagagcacatcactgccggtcgtgtaaaatgtgcgtggtggacatggatcatcattgcccatttattggcaactgcgtgggagcatcaaaccatcaagtgtttgtggtttttctcatttctgtggttatcagttgctcttatgtcgctgggatgaccatatacgcgagctaccagatatggccctccattgaattcccagacctagcatcatcatctcgtcactcgatgagttcttggaaaacggtgctggagatgatcactacggttgcaggctccgccttcttcttgtcagccaggggtctagtcctggtgtatctggcgtttgctagctcgtcagtgaatgctggtatagctgtgttgctgtgccagcagctgagctatatctaccaagggaacacgtacctcaaccgtctgagctcagcaccgaatgccttgcagcatggagagaggggtttgcagaacatcgttcggtttttcgggtgcccgtatccagtctccagagttgtgttgcgactgcggtactccaacgctgccaagttgcaggatgattcagggtcgaaacttctttagagaggtatggatcaatagatcagtcaaaatcctctgtttttttatttatgttccttcttataaatcagtcatggtgtaacagacagtttcgtttacattacatgtcggtttcagtgctatactctcgattaagacgtcgtttcgagtcgctgagacagttctgttctgttactcggaattgtgatttgtgaacctcactcactcagttgaccaccggcggattagtctgaataactgaagccgttttaggatgcagcactcatgaggatgccactcccattgattaggtagagcaattttggcagacgctgaaataccgtgtgggtgtggcctgcgcatccattgcctgcagacaataataaggtgctgatggtcttgcaacaaactgcagcacctgaaattctgcatcaccatcactgccctttccaactcagcagagcttgaagatggcagcagcttcatccgacagtggttgttgcagaagaaatgatcatcattactaaatctgacagtgggttcgagatacacgacactgggttcgagacagtggttgttgcagaagaaatgatcatcatttccaactcagcagtgctctttgatgttaattcactgacatgtatatatacgatcggaaacgttgtgacgttcacttggtgtaaattagtcgattaatc

SEQ ID NO: 8314 - DNA, 555 bp, Zea mays
  Clone ID: MRT4577_107581C.1
tttttttttttttttttcctaatatcatgatttatttcttaaatggccttaaataatgctatttaagaaataaatcatgatattaggaaataaatggttggagattaagtggaaatgaggatagggctctagtatatgggtactatatttaggacccgagagaccgagccctataaccatttgatgaaattttataaaatagggccgctgttggaaggatgttttatagttttgagctctatatttaaaataggatcatgtttagagtctctcttggagatgctctaatgttaaaaaaaaaaacggtttcggctccaggactcctttgtacattttctaaattaagagaacgtgataacaaattttgtttcaaattattataagtttcatttatcctatatgcactgaacctttctgcagaaaagtaagaggagatatcttccttaagttttcatcttctgattgttcacccatgcttcctctgattggtgtttttctcttggctacctcggaagcaaaaaaatcgttttttccccagcgctcgatttcttgaat

SEQ ID NO: 8315 - DNA, 170 bp, Zea mays
  Clone ID: MRT4577_107582C.1
ggcggagcgatgagatcgatcgcccgacccccctcacgtccggggccgcattctctttccgtcccggggaaaaaagaaggaaaccgaaccttggcagcggcgtgccggcaggcatgtcagcgacggtagccggccacaggtccagattccggaaccgaaccaccgtcccc

SEQ ID NO: 8316 - DNA, 323 bp, Zea mays
  Clone ID: MRT4577_107583C.1
cctttctctcggaatgcttcggggttttttggctacttttttggttcttttctttccttatgtgtctctctagctgtcggcccacgcacacgaacaaacctgaggggcgcagccaatacaacgctcgcaatgacagaaccaatttctctccacgtaaacaaaaaaatggatccaaaggccaccgacctctacatgcttttcgagcccgcctaagaacacctggcccaatacaaaatgtaatcgctgaaaagccctgccggtgttaaaaaaacaaggggtagatcgtcgaacccactttttttcactaaacccacaagtacaac

SEQ ID NO: 8317 - DNA, 118 bp, Zea mays
  Clone ID: MRT4577_107584C.1
aagccgtcacggataacattggccaagtactaaaaacccgctggggacgtatctagcgaacagcagaagaaccctcctctcgaatatggtccaaatgctggccaaagattgtatgaaa

SEQ ID NO: 8318 - DNA, 1545 bp, Zea mays
  Clone ID: MRT4577_107585C.1
acctcgcctcccccactccttccctccctccctcgctcacccagtggggcagccaaagccgagccgcaaccgcaaagatcttgcgcggcctcctttccccagctcgtcactgtgccgctcgtgccatccaccctcggttcacccaaccaacaatccatccgccaccacaccccgctgcggcgatgtgcggcggcgccatcctctcgggtttcatcccgccgtccggggtgccggcggcggcagcggcggccaagaagaaacagcagcggcgaggctcgccttcgccgccgcggttggggcgccgcgcactgcagttgacggcgtgatgactccaaaggatggtgaaggagacatgcctactaccgctaacaactcagcagcaaataagcgcaggcggaagaaccagtacaggggaatccggcggcggccctggggcaagtgggcggccgagatcagagaccccagcaagggcgtccgcgtctggctcggcacatacagcaccgccgaggaggcggccagggcgtacgacgccgaggctcgcaggatacgcgggaagaaagccaaggtcaatttccgggacgaagcggcggcggcaggtgctcagaagccaccagccgcaactactccaactgcttgtgccagcgcagcgaggctagctcctccacctccaccgccgaagttccgtgctgacgaggttttcgggaacatggacggtggcagcaacgatctgttcgcgatgctggcgttcagtgacagtagtagtaaggtcgttcgtgtggagccaggtgagggcgccgccggtttcctccccgcagatctgttgcccggcagtaagaggtctgcggctaacatgctgctgctctccgaccagagcagcgactcgtatggctcttgtgacttggggtgggagtgggactgggacgatgacaccatgacctcagactacgcctcagtctttgctccagctgctcccagtaacgttgtgccagcatggtacacgcaaggtggaccggtgtcgaagagaacgaggagcagctacggctacggtgcggccatgccgggcggctttgaccctgagacgaactaccagtaccagccgttgccttatgtcgtcgagagcagcccgtcagacggcgcgtcgacggacgacatggactgccttcaaatgatgcgggctggtgatgttccacaggatggggcgagcagtggtggtggtggcggcgacggcggcgatatctggagccttgacgagctgctcatggccgctggcgcttactgagaaaagctatgtgcatcgcattcgcatgtgctagacggctacttgctgtgccgtgaatggagtgtttctcagcttcgttttgcttttaattttttgttatgccaggtctcctgcttgtgcttgtggtgatgatgcaggagagccatggtgggtactatgcttttgctgccagtggaactgtaagacaatgtttatatagtatctatactatgttggtgcgtcgatggttcatggttggttggaagcgagtttgagactgattcagt

SEQ ID NO: 8319 - DNA, 322 bp, Zea mays
  unsure (1)..(322): unsure at all n locations
  Clone ID: MRT4577_107586C.1
angggagcggggattctgatatcagaaatcatgtcatttnaacacgcagcttgttaaaagcatagccattctagactcgagttgtttacagcacctccctgtttcgggccgggacatantctttggtgcgggggcccagnttgctgttgaagacgtgggggcctaccttttgatagggataaacgatgctgaccgtttggggttttctttcaattctgactaaagggtatcatccggatgctgttttttgtggtgctctttgcttgtgattgtagagatgccggctttcctggtgttttggtgccgggggttgtttcccttt

SEQ ID NO: 8320 - DNA, 607 bp, Zea mays
  unsure (1)..(607): unsure at all n locations
  Clone ID: MRT4577_107587C.1
ccgggaacctcgcctccccccactccttccctccctccctcgctcacccagtggggcagccaaagccgagccgcaaccgcaaagatcttgcgcggcctcctttccccagctcgtcactgtgccgctcgtgccatccaccctcggttcaccctgagacgaactaccagtaccactaccagccgttgccttatgtcgtcgagagcagcccgtcagacggcgcgtcgacggacgacatggactgccttcaaatgatgcgggctggtgatgttccacaggatggggcgagcagtggtggtggtggcggcgacggcggcgatatctggagccttgacgagctgctcatggccgctggcgcttactgagaaaagctatgtgcatcgcattcgcatgtgctacacggttacttgttctgccgtgaatggagtgtttctcagcttcgttttgcttttaatttttttttatgccaggtctcctgcttgtggtgatgatgcaggagagccaagccagtcgtatgcgctacattttgtcgcggtggtttagtggttatgtatggtagattattacatacagaatgcggtactatgcttttgttgtgaaaaaaaanaaa

SEQ ID NO: 8321 - DNA, 750 bp, Zea mays
  Clone ID: MRT4577_107588C.1
tgcggcccgcgtgtacgacgaggtgcccgcagtgcggctaacatggcctccgacagcagcgactctatcttgtgacttggggtgggagtgggactgggacgatgacaccatgacctcagactacgcctcagtctttgctccagctgctcccagtaacgttgtgccagcatggtacacgcaaggtggaccggtgtcgaagagaacgaggagcagctacggtgtggccatgccgggcggctttgaccctgagacgaactaccagtaccggccgttgccttatgtcgtcgagagcagcccgtcgtcagacggcgcgtcgacggacgacatggactgccttcaaatgatgcgggctggcgatgttccacaggatggggcgagcggtggtggtggtggcggcgccggcgatatctggagccttgacgagctgctcatggccgctggcgcttactgagaaaagctatgtgcattcgcatgtactagacggttacttgctgtgccgtgaatggagtgtttctcagcttcgttttgcttttgattttttttattatgccaggtctcctgcttgtggtgatgatgcaggagagccaagccagtcgtatgcgctacattttgtcgcggtggtttagtggttatgtatggtagattattacatacagtatggggtactatgcttttgctgccggtggaactgtaagacaatgtttatagtagtatctatgttggcaaaaaaaaaaaaaaagcggccctcga

SEQ ID NO: 8322 - DNA, 808 bp, Zea mays
  Clone ID: MRT4577_107589C.1
ttgggaccctcgggccggccggaacctcgcctcctccgggctccggcccactccttccctccctcgctcaccgagagccagagccagtggggcagccaaagccgagccgcaaccgcaaagatcttgcgcggcctcctttccccagctcgcgtcactcactgtgccgctcgtgccatccaccctcggttcaccccaaccaacaatccatccgccaccacaccccgctgcggcgatgtgcggcggcgccatcctctcgggtttcatcccgccgtccggggtgccggcggcggcggccaagaagaaacagcagcggcgtgcgacggcggacctgctgtggccggggcccggcaagaagggagcgtcccgggaggaggacttcgaggccgacttccgcgagttcgagcgcggcctcggagaggatgacgtggacggggccggcgacgaggtccaggagcttgctctgccggagccggcgaggcttgccttcgccgccgcggttggggcgccgcgcactgcagttggtgagcaccgagcacagcattgaagtcgctattttttctctctcgtcatatatggcacgcacactgcttttgcggcgctgtttcacgaatcctttttggttgttgaggagacaatcggggttccattgaggtatggtgcatccagggcttctagctggaagacgaatttttttatcttttattcttttggttagccttagaccttagtcatggaatgggcaaggctgttcagagtgggagctgatggctgccttggtatcttgtatgcaatccgatagctttcgtat

SEQ ID NO: 8323 - DNA, 612 bp, Zea mays
  Clone ID: MRT4577_10758C.1
atgtcgggcatcgtctatggcgtgcgtgcaaattcctgggactcgacaagctgggcagagcagagagccaaccccgtgttgcatcaacagcagcgcgactctagtgagacccgagtccgtatgggccgacagcatggacgagcagacacgacacgaagggtgcgagtccgccaaggatgcgaacttgaaggatggcgcagtttagaacgaaaccttactgagcgaagaacgacgaccgacaaggcgaagctcgatgacgaggtcgagccagggatggccagcgcaaacgcacacaagggcttgccaacaacaccaagacgacagcgtggtgtgcacacgacgcaaagagaaacgaccacaactccacgacagcttcacggacacggcgaggacgcagagcgcggtgactgttcttcaatggctagaatactggaattggaggcaggtggttcgaacagaggagcgcacggcccgggaagtttcgacggcgcggacagcgagggagctcgatgcgcgcagggaaacttcatggcgcggtggagaactcgatggtggcccatgcgcaggaaggagcagaggccgagcaaagagtcggcgtgcgcagaggcttga

SEQ ID NO: 8324 - DNA, 1797 bp, Zea mays
  Clone ID: MRT4577_107590C.1
atcccgcccgcagcccgcaaatcacgccgcgaaccgccgcagactgaccccgactccctacgcccgcccccaatccagccgcaatccaccctgcgaatgcggcgaccgtcgcgttccggccggccgcccgtccgcccgccgctatggcactatccactaaccagacacagcgtccagccaagcttttgccgccgcccacttctctcccacctcccctccactcttttgcttgtcgcggggttagaatcccatggcgctatcggccgagatccgcttcggccaccagatcccctatcccactacgacactgactcctacgaggaggaggaagaagaggaagaggaagacgaggaggagttcgagggggtggagggcggaggagatggatgaggtgacggtttcgtctccgctgatgctgccggcaacggaggccaggggaggggtgtccgtggtcgagatggtgatgggggcgcttcggaggtcgctcatgttgtgcagcagcagcgccggcgccggcgccggcgtgcgcgagccggagcaggaggaggacggggtgactcccccgggtggtatgcaaataggggggccaacggatgtgcggcacgtctcacacgtcaccttcgaccgcttcattggcttcctcgacctccccgctgacctcgagcccgacgtgcctcgccccgtgccgagcgcaaggatacgcgggaagaaagccaaggtcaatttccgggatgaagcggcggcagcaggtgctcagaagccagccgcaaccgcaactactccaactgcttgtgccaccgcagcgaggctaggtcctccaccgccgaagttccgtgctgacgaggttttcgggaacatgaacggtggcagcaacgatctgttcgcgattatgttcgcgttcagtgacagtagtagtcaggtcgttcgtgtggagccaggtgagggcgccgccggtttcctccccgcagtggaagtgttggacgacgagcctctgttgcccggcagtaagaggtctgcggctaacatgctgctgctctccggccagagcagcgactcgtatggctcttgtgacttggggtgggactgggacgatgacaccatgacctcagactacgcctcagtctttgctcctgctgctcccagtaacgttgtgccagcatggtacacgcaaggtggaccggcgtcgaagagaacgaggagcagctatggctacggtgtggcgatgctccagcagggagatggcgcgcaggccatgccgggcggctttgaccctgagacgaactaccagtaccagctgttgccttacgtcgtcgagagcagcccgtcggacggcgcgtcgacgcacgacatggactgccttcaaatgatgcgagctggtgatgttccacaggatggggcgagcagtggtggtggtggtggtggcggcggcgatatctggagccttgacgagctgctcatggccgctggcgcttactgagaaaagctatgtgcatcacatgtactagacggttacttgttgtgccgtgaatggagtgtttctcagtttcgttttgcttttaaatttttttattattccaggtctcctgcttgtggtgatgatgcaggagagccatggtgggtaggtactatgcttttgctgccagtggaactgtaagacaatgtttatatagtatctactatgttggtgcgtcgcaaggtcagtgttccaacaccttttactccccaattgtttgatctgtctatgcgcataggttcctgcacgggatccggcggcggccctgggcaaatgggcggccg

SEQ ID NO: 8325 - DNA, 2378 bp, Zea mays
  Clone ID: MRT4577_107591C.1
cattgggtacctcgaggccggccgggtgtttttaaaaaaaaaaaaaaaaaaaaaaaaaaaaaattagttacctcgacgagggccgggaacctcgcctccccccactccttccctccctccctcgctcacccagtggggcagccaaagccgagccgcaaccgcaaagatcttgcgcggcctcctttccccagctcgtcactgtgccgctcgtgccatccaccctcggttcacccaaccaacaatccatccgccaccacaccccgctgcggcgatgtgcggcggcgccatcctctcgggtttcatcccgccgtccggggtgccggcggcggcagcggcggccaagaagaaacagcagcggcgtgcgacggcggacctgctgtggccggggcccggcaagaagggagcgccccgggaggaggacttcgaggccgacttccgcgagttcgagcgcggcctcggagaggatgacgacgtggacggggccggcgacgaggtccaggagcttcctctgccggagccggcgaggcttgccttcgccgccgcggttggggcgccgcgcactgcagttgacggcgtgatgactccaaaggatggtgaaggagacatgcctactaccgctaccaactcagcagcaaataagcgcaggcggaagaaccagtacaggggaatccggcggcggccctggggcaagtgggcggccgagatcagagaccccagcaagggcgtgcgcgtctggctcggcacatacagcaccgccgaggaggcggccagggcgtacgacgccgaggctcgcaggatacgcgggaagaaagccaggtcaatttccgggacgaagcggcggcagcagcgtgctcagaagccaccagccgcaactactccaactgcttgtcgccagcgcagcgaggctagctcctcgtccgcgcactgcagttgacggcgtgatgactccaaaggatggtgaaggagacatgcctactaccgctaacaactcagcagcaaataagcgcaggcggaagaaccagtacaggggaatccggcggcggccctggggcaagtgggcggccgagatcagagaccccagcaagggcgtccgcgtctggctcggcacatacagcaccgccgaggaggcggccagggcgtacgacgccgaggctcgcaggatacgcgggatccatgtcaaggtcaatttcgccgtctgacgggctgctctcgacgacataaggcaacggctggtactggtagttcgtctcagggtcaaagccgcccggcatggccgcaccgtagccgtagctgctcctcgttctcttcgacaccggtccaccttgcgtgtaccatgctggctcttgtgacttggggtgggagtgggactgggacgatgacaccatgacctcagactacgcctcagtctttgctccagctgctcccagtaacgttgtgccagcatggtacacgcaaggtggaccggtgtcgaagagaacgaggagcagctacggctacggtgcggccatgccgggcggctttgaccctgagacgaactaccagtaccagccgttgccttatgtcgtcgagagcagcccgtcagacggcgcgtcgacggacgacatggactgccttcaaatgatgcgggctggtgatgttccacaggatggggcgagcagtggtggtggtggcggcgacggcggcgatatctggagccttgacgagctgctcatggccgctggcgcttactgagaaaagctatgtgcatcgcattcgcatgtgctagacggctacttgctgtgccgtgaatggagtgtttctcagcttcgttttgcttttaattttttgttatgccaggtctcctgcttgtgcttgtggtgatgatgcaggagagccatggtgggtactatgcttttgctgccagtggaactgtaagacaatgtttatatagtatctatactatgttggtgcgtcgatggttcatggttggttggaagcgagtttgagactgattcagtaatttaccttgtctaaaaaaaaaaaaaaaaaactcgagactagttctctcctcgtgcggagcaagcatgtgtatagggcatgcctgtgcagtggataatattgacacacctgtatttctctgcagcttgtttactgtgtaggtcttcggctattctcctagattgtgtgcctagaaggcattggccccattattagtactgatttgggtgtatatgtgactatgtcagctgttcacttattgctgtcctaattgttaagaagctatcatgcactagtgatttttcttagtttgtcataaaacaaaaaaaaaaaaaaaaagggcggccgccgactagtgagctcgtcgacccgggaattaattccggaccggtacctgcagg

SEQ ID NO: 8326 - DNA, 519 bp, Zea mays
  Clone ID: MRT4577_107592C.1
gggcttttgtctgtactatgactgcctgcgacctacctgcgcgtgacggcaagcttctcacggcaaactgctcccattcctagcgagatgtgttgcatccatagtctgtccctctctgcgtcatggtcggttttttgaagggactggacagtggaggccctaacgtatgagtgggatcctacccccgcaactgaaggcaggtgggagaccggggtggccctaggcagcgggcgctgtagccttattagactggtacgttcagtcattgttcttggaaagacaatgatggtgatgaacataggatgtgacactggccctttctatggctcacactaattatataccgaatctatgcacgcaataaagacttgctgaacattttcttgcttggaacaagcagagagttcagcgatctacaggatacactgcttatatacgcatgaactcacatctttttgatcatatatgggatgatctaaattctatggactggacgtagatccacaactatcttgacat

SEQ ID NO: 8327 - DNA, 482 bp, Zea mays
  Clone ID: MRT4577_107593C.1
ccccaccgatgacatgtgagtatgaagatgaagaatgatgttcataacagccgtaacgcactaatctaccatctaacaggctacaaacagtagaattcaaccgcatgccagagaggatcataccttcagtgagccccgcatcatagacaggctctgctcaactgtctacttgcctgatgaggacacacaaacagatgctacgaacgtgcgcgtgacaaaaatggaccatgggatgacgaccaatcacccagcgaagtgcagtatatatataaatacaacagttcggagggtgaaagctttaatgcacagggtatatttgttgcacggcgacgctgcgtaaaaccggattgtgattgaatactaggcaagcaaacattaggaacaagcctgtgtatgatggggacttaccaggaggaatgatgatcctatcgcggacattaaacgcactgcgtgcaaaccgtagatcctaaatattaattatc

SEQ ID NO: 8328 - DNA, 692 bp, Zea mays
  unsure (1)..(692): unsure at all n locations
  Clone ID: MRT4577_107594C.1
gatcgagtcgaggcaccaccgctgcaccccagccatggactggtgcctctgctgcatccgcgtgtacacgctgtccatcgccaactcgttgtacctgggcgtcacggggattctcgtctacgtgctcgcgcgatcgcactcccgcaccacgtccggcatcgtcgtggcctccgtcttcctcgtcctctgggtgagcatcggcgccgtcatctacgcctccttgtgtttcgccttcttcccgtgggctgcgcttgagaacgcgcgcctctgctgcgtccgttgcaccgccgggtggctgcggcgcccaagtggcggcggaggcagcgccttgccgcagtatgcggcgaggagtcggagtcatgccatgaacgagcttccgggggagcccacggtgcgtgccggcgaggcgcgcgtagccgcagcggctgacatcccggcgtacgagctgcgcgacgacgcctggcaggggcagcctgatggctcgtctgattgcgcggtgtgccttggcgagatggtcaagcggctgccagtgtgcctccacatgttccaccagcaatgcgtcgacaaatggctgaacaacaactcgacctgtccggtgtgcangnntgcgtcgtgttcgcgccgctgccgtcgttaaaatggtggtggaccttgatctatttctcatttccnttctctgagttctgtcttct

SEQ ID NO: 8329 - DNA, 596 bp, Zea mays
  Clone ID: MRT4577_107595C.1
cacggcacgcgcacacactgagtccagcatcatggccgcgcggcctcagaggtccccgcattggcgctcaggtctctgcgtcgctcccgcgtgctcactgtggcctccctgcgggagatggccaggaacgcgcaggcagcctacacctatgggaggtcaagtcctccgatctatacggattcaggtatttggttggggttaacgccgttacagccgtctacgctgtatcctccggcttggcgttgtccttaaagccccttgacgcgcgctacgactaccactgggtggatgtagacatggatcatgcgtgagcgtacctgctagagacatccgtcttggtggtggccgacctgctgcagctgacgcggcacagcaaccgctgcgtgtcgtggggcgaggcgagctcctacttcggccggttctgaacgaaggccacagggtctgtggcgctgcacgccgccgcgctggactggttcggctcgctctcgcttgtctgcagcttcagggcgttcagcaccatgtgccacccgccacctgacactgacggccagtcgaccaacacgccacgaacaaggagcaacgggagtaccactact

SEQ ID NO: 8330 - DNA, 2359 bp, Zea mays
  Clone ID: MRT4577_107596C.1
cgggtctgatgggcttccagactaacagcagtggacaacgggtcgatctgctgaataatgggcagtttcatggggaaactgccagcatcatgccaaatttgctgccaaaccatctacaacgtccgaatacattcatgccccctcaattgttgacagtacgccaacagcatggcatgctcccaattcagcaatcttcaaagcagtcatcaagaacacagacacacatgtttggcccccagcatccaccacaaatgatgaataggtttgataattttgggatgcctgagttcagtgatccaagagcaagatcatcaatgcaccatggcaggcaaggtcaacattttcctctccatggctctgagtttggtattatgaagatgggtaatgggaggtcaaggtttagatccaagtatatgtccactgaagaacttgaaaacattttaagaatacagcatgccgccactcatataaatgatccatacatcgatgattattaccatcaagcttgtctggccagcagatatgtggatgcaaggtcgaagcaccgcttctgcccaaccttgattcgtgatccatcatcctgtacacggagtaaggatgagccacatgcataccttaaggttgatgcccttgggagactgccattttcttctgtacggagaccgcgtccactccttgacgttgagccagcttctgcaactgatgatgacaccgttatttcaaagcctcttgatcaggaacctctgctagctgctaggatcacgattgaggatggactctccctattacttgacatagacgatattgaccgcttgcttcagtttagccagcagcaagatggtggttttgaacttaaaaatagaaggcaatctctacttggtcagctggcagaatcgctgcagttggttgatccactaggtgcaaataaaaacacacatctgtccgcaaatgatgatttggtatttcttcgcattgtttctctacccaagggccggaaactactttcacgctatatcaacctcatggtacctggtagcgatcttgcaaggatagtttgcatggcagtattcaggcacctgaggtttgtgtttggaaatctgccctccgatgacggcgcagctgagacagtaactaaactggctagcgctgtagcatcatgcattcgtgggatggacttaagtggcctcagtgcttgtctcgcagcaattgtatgctcgtctgagcacccaccccttcggccccttggccatgctgctggcgatggtgccactgtcgtcataaagtctgtcctggatagagcaacagagctcctcaccgagcagcctgccgcgccagactatggcgctccaaaccgagccttgtggcaagcgtcgttcaatgccttctttgggctgctcactaagtactgcatgagtaagtttgatagcatggttcacacgatgcacaagctcggtgctgctgctgcaacagcgatacgcaaggaacttccggttgagcttctgcgcgccagccttcctcacacggatgagcagcagcgcagactactgctcgagttcgcccagcggaccgtgcccgtctctggccatggctccgacgggtgacggacgggggggcggctggtggaaccatggcatctgaaacaataccagcttaaggtggtcagcgaatattggtgcgctagatgcggtattttattctatcatacgcagacctgcccaatgaatcgagcgttccttgagctgcagttcagatgggcatgccggcgttaagtggatgtatgtcccaggtttggatccgtctgtttaggctaatagtattctctctgcacggttgcatcgcatcaccactggatagattagcatgattagcttccgtctgcagggctgtgtttcgttggctctgggtgggaacggaacccccctgcacgttccttgaaggcaattgcaagaaaatactgcgagctgttggtgtttcggtttgcagtgtttgtttgtagtggcgtcaaggcttccaaggttctcatctcatcactccggacgggtgccaggaagatgtggtttaacacatgtataaactagcaaatgcttggaaggttgatatttggttctgtagccagccattcgaagattgttgggtggggggttttgtttcctgttatattcgcaactgaatacattatcttgcgaagctgttcagtctgtaacgagttcattgggaattccactatatatccttgttatggatggtcaggagctttgtatttttgtgattctgggtattacccttgtgttccataaaggacgctttcttcctcgctcctgaatccattgcatcgtggcccgtccgaatgggtgtattt

SEQ ID NO: 8331 - DNA, 381 bp, Zea mays
  Clone ID: MRT4577_107597C.1
agcaggcacgcctgcaggagccgggccggcatatatagcccggtcggcgagctttcttttcggtggccgacgttcttcgaccaaaacttgtgacgatcagtggagcactgacatacactgaatacacatgtaccacatattcgtgatagtgcccgtgcaggatatgggcactattaaagtactcccggaactattcagtgtacactgtgctaaggaggggtccaatggacagcacacttgatcgacagaaacttggtaaaccagaatacctcacaagcctacaggcgaaggacacgctcaggtgggctgcgatgagagcttcaacaatacggagagagaggattgcattcaggccttgtgccacatgctcataaaacactg

SEQ ID NO: 8332 - DNA, 439 bp, Zea mays
  Clone ID: MRT4577_107598C.1
tgacatcgaggctcgcgtgctcacctcgtaatcccgctatagccattgtgctacaattctctcatttgacattaaggtgtaaggcggtttttcctggcatcgtcaaaagcacttctggcatgcatgctagatattctatttcccagaccgacgccaatagccataaccggtccattaacaagagatggaggcactttgaatacctacatcgacgtctaaaacagcatgctcaatacaatcttcatctacctccaaaacattactctctcatcaagtatagaggttacaggagatccagagagaagcaagctgctcaacatatatctgaaaaaccgattgcaaattcctatcgtctcaagctgcatataattctggcatttcccgagtgtggattcacagacatatatttttacagacactctctgtaccatccaaacat

SEQ ID NO: 8333 - DNA, 858 bp, Zea mays
  Clone ID: MRT4577_107599C.1
cattgggtacctcgaggccggccgggataaccgatacgacacctcacctcaccaccgccaccttccagcagccccccaccggtccaccgcgcgtccccatcggcggcggtagggcagaacagaacaccggagatggagcgggagcgcggcgcgtcggcggcgctgtgggggcacgcgcacctcccactgctggcgcgcgccgggtccaaggagtcggtcgagtacatcctgcaggcgctctggcgcacgcgccgcacgggcctcgacgccgccgaccgcaccgtcgcccgcgacgccctccagctctcctccgacgccgagctcgaccctctgctggtgtgcctgaggatactgatcagacggtgcgtcaacgaggacttcgccaaggacgacatccccaagctcttccccgaggaggtgccccccgagctgcagaagctgctcaccttgctgctgcagaagttccagccggagtggcaggcggatgccgccaaggatcaggaagccgcgctgcattccagcgcggcagagtgccaatcgaaccaaaatggagacacgtcagagcaccgagatgctgctaatgcagagcttcagaacggtgcagcacctgttaagggttctctagaatcaggacagaaagaagtgaagaagtctccgttagctaaggattctttggacaaaatgctgaaggacttgttctcaaccagggaccaaatggcaactgatggcaggaacaccggtcacgaactcacgatggggtagctggcagcacttagggcctgtatggctaatccattgctcatcagtaatttggcatatcaatgcttcgttgttttccttcgatctagatcactgaaa

SEQ ID NO: 8334 - DNA, 275 bp, Zea mays
  Clone ID: MRT4577_10759C.1
acaacaaatcaccttttcgctggtattaatgctaacccttgcgtactgacacagaatcaactctcataggtgatacaacatcttagaaaatcaccgtatctgtttgcttcaacccgtcatacacagatgcggatccctgtaagagtagtggtgcttcttttcaatacttcagagggcgaggctctgtacagtattataaccaataaccatggccggaaaaagcattgcacattatccttttgaactaggtgcaaaaattggcactggtaactttt

SEQ ID NO: 8335 - DNA, 275 bp, Zea mays
  Clone ID: MRT4577_1075C.1
aaaaatgtacttgcttatttctgggaagccacaaacatcagacaaaaaactttattagttgaactatagctcataagagatctaaaagagggcaccagcaatgatggatcgttggtagaatgctcatgggtttgtcaaaggatgtcggatgaatggcaaacttacgcgcaggagcgacagggggcccccattaggcgcagcgagctgcaaaagcggcaactgttgcgggctgtgcagtacggtccctgcactgatcacagcctgcgacaagaacg

SEQ ID NO: 8336 - DNA, 312 bp, Zea mays
  Clone ID: MRT4577_107600C.1
cccacgcgtccgcaacgtcctgccccctgcatgatattgattcgcaaaaagggaaacacgcgtgaggttggaaaacgttaaataacacagctctagttgtccttgtctccatttagagagacatgcaactgccaattctgtttgtatgcgtggcacttgtattttcagtaaacaaacacttatactgatcttgttataaagcaatctggacatcatttttttgtattctaattaacttctagataaaacggcctgtttattatactggcaggggctattaggaaatttaaatgcttcaaaaataaaaattaa

SEQ ID NO: 8337 - DNA, 318 bp, Zea mays
  Clone ID: MRT4577_107601C.1
ataaggagaggaagcttaaattcgaaaagggatgtttaaagggcaaccggatgccatgcgcacacatgtgaggagcgcaccatgaatggtgtgatatcaaggtggagaagagaggaagaacgggaaaaagttcatatacagacacacacatgggaacttgattaacaaaaacgcggaagagacaccaggcgggcacaagcttaggcactaaaaaggacatatgtgggggggaaatcatactgcagtggatgggcacggccttcatgcatgcgccttatggtactggagagcatcctacgtacgcaagtagattgatcg

SEQ ID NO: 8338 - DNA, 132 bp, Zea mays
  unsure (1)..(132): unsure at all n locations
  Clone ID: MRT4577_107602C.1
gttccctccgcgtcgtaactcggcatcggctcgagatantgacaatttcaggcaaatgacagataatgagacgcttaacatgatggataatgtgcaaggggaacttatagagagctcttgcctgttctcgac

SEQ ID NO: 8339 - DNA, 648 bp, Zea mays
  Clone ID: MRT4577_107603C.1
catcgcttctatactcttcaactcctacgttgtctgtgaagatgagctcatgcagaaatgaatacggatatacgctactccccgccgagctccacccgaggcgcctacgtcgccggtgtcgccgtcagaggcctactcgctgcctcctcactaccagtcgcacgatgatgactagtcccgtacataactcattgccgtgacacatcgatcatgtgcctgaacaagctaatccacacgcacggaatgccacatatccttcgtgatgacgagctcaatcatggtatccaccaggtaatgataaaccctaggcgcgcttcacgtttccccgacgatatgcttctgcgccattgacgacgaacattacgtgatctcgaatccgagcgatcatcatgacttgcatgagctctgctactccctgatgaccatgtgcatacccacgtgaacacttgaacgaatgtataagtgattcacgttctattgtcaactaccaatttgacactgccacgttgacttgcgtgcgctatcgacacatgatcttcttcatgcgcagatatgcgcgatagatcgatatccactgagcctagtgctggagcacacactgctgtggtttctttgtgtactactacgacaggcatccctgcacacgga

SEQ ID NO: 8340 - DNA, 270 bp, Zea mays
  Clone ID: MRT4577_107604C.1
cgctgctcatctcccggcgtggaacatccatccatcactctgcagcagcattagaggtaggaggcatcagcatcctggtacctaccagctggcccaacacctatggcatctattcagactgccgcccccacctgcgcactaaggactgctaagatgggggaggagaagctggtattgccgtcataaaaggtgcggactatatcactttttttggggggcttcctaaggcgcacaaggagcagcgacgcataaggggtctcctccgacccg

SEQ ID NO: 8341 - DNA, 281 bp, Zea mays
  Clone ID: MRT4577_107605C.1
tcgctcactcctgctccaacgcctcatcaaggacggccatatattaagcggggggggggtcattagacctcacccgctcatggacgggatccacaccactcaactgcatctcaagcttctcacctcagctcggcagcttgtaccataacacggacaacaaactgaggattacgatctactgactgcactattgtacggatgagctcatgactgatggtacccaactctatcatcatctgacgggactgtcagcagatcaacacaatgaacgaactaaaaga

SEQ ID NO: 8342 - DNA, 248 bp, Zea mays
  Clone ID: MRT4577_107606C.1
tttctcttttcttatcctcattttaacaccgagcggctcacattataaccaaaacggtactctacctaaacaataaattatttcaattaaataaacacaatactctcaacaatttcttccattcaaagacaacaactacttcttcataatccattccccaactcatctttgctactctaccctacactcaaatactcattcctacttttaaacaaaactaaatttaccatatattattaatatcatca

SEQ ID NO: 8343 - DNA, 222 bp, Zea mays
  Clone ID: MRT4577_107607C.1
aaagaccgacgctgggcgtcatccgtgggcctgattgtaccaacgcggtcgggtctgacacataacgtcggcaggacgagcgactccgactcttgtggtatttcccacctccaccgaatacgtgtctttatcgcgttaccttcaggaggccgtccccatggggaactttatatttattgctttaatgaatgaccgttttcatcaatacattacaagatttgc

SEQ ID NO: 8344 - DNA, 368 bp, Zea mays
  unsure (1)..(368): unsure at all n locations
  Clone ID: MRT4577_107608C.1
cccacgcntccgtccactcatccgcccacttgtacctttacacatcctgtacttctcgcgggcctactgttatgctgcgggctacctacaggcatctgtatctcttcgtccaccgctttccatgggaaaaacatggctgaatgacttatctacaagaacaccctcaagatcatgcccttcaatctccgcccgttcgaccttaatatgaccccgtgcgcatcatcgtatctttcattggccgttccactagaacctacctatcttagatccccttacagcgcttcttcattaactagccttgttttcaagcttccttccgatgctaatagttgtgctgaatgtcgacttgctaactatatcagtcccat

SEQ ID NO: 8345 - DNA, 854 bp, Zea mays
  unsure (1)..(854): unsure at all n locations
  Clone ID: MRT4577_107609C.1
ttcccggggttnctagtgatctaattgtgaaaaagtttgtgtggtaggccacgtgctgcatacttgcatatttgtgctatggtcaaattttttagttttcatagaataagtatgacttagtacatgatttaaattggttgaggcttattaaacagtgtatagttaaaataaatatgcaaaaaagaaaaaatgtaactaaggcttagtaaaaaaaatacgtatgtaaaaaaagaaaaaatatggttccgtacaaatattgatatgtcttataaatatttaacatgattatgttattatagaaagacttttagacttaaactcacatattttattgtaaagaaaatttattattctattgttataacccgttaatctatagcatgtcatatttgtagagtggctatgttttgttaatatctgtcaactatataatttcttatctaaaatgtaatgtttgttctgccatcaaatatataatctattaagtgcatgtttaatcttgtgttaccaaaatataagtatatggttatgtgagcatatttgatgcttgtgctactctatatacttcataattatatgttgctcagttacattaagattttagattatgtatatgtaatctcgattaaccaaacagttgatgaaccttattgctataaatggctacatttacagttttgattaagacattatgataaaaaaaaaattcatgccagtgccacgtatatacgcggacgttttggttcttgttagaaccaacctcttaagagcttacatgaccgtactggtgaaagcatgagagagtgatccatggcatttttattctgcaggtgttcacgtacctgatcctggcg

SEQ ID NO: 8346 - DNA, 254 bp, Zea mays
  Clone ID: MRT4577_10760C.1
ggaaaaaaaacaaatcaattcttgtgggcaatcaaatgtttcagtttacccaaaaacatccatttgtgaatacaacgaagtcttacccttccatttggtgcaccaggccccatggtttaaaaacaaaaatggggtttctttgcacaacctttgggggcagagttttgaaaaattccaacatttttcttggttgggggggcttattttaattatctaacataaactaaggagctattggtgttggataaaaattt

SEQ ID NO: 8347 - DNA, 848 bp, Zea mays
  Clone ID: MRT4577_107610C.1
taattcctattgtagcgacaacaaatactatcactttatcttgaagtctggtgcaactctcttatttagtatagtccttaattactatctttgagctttccaggtacggctcgtaactgacaaggatacaaataaacctagaggatatgcattcatagaatatatgcatactcgggatatgaaaaatgcttacaagcaagctgatgggagaaaagtggacaataagagggtactagttgatgtggaacgtggtagaactgttcctaattggcgtcctaggagattaggcggtggacttggatcaagcagaatttgtggtgcaagtgcagaccagaagtcgcctgccagggaaccatcgagtgttgggcgccccagatcagaagaacctaagaggggtgattcccgtgtagatagggatcgggagaagtctcatgaaagggtacgggagagagaccgcgatgaaaatccccgtgagggttctcatgacagaatgcgtgagcgtgattcaagggaagagaggcactaccatagagatcgggacaggactcgggacagggaccgagcaagggaccgggaaaaagaccatgggcgtgaccgtgaccgtgatcgccgggacagagatagggatagggaccgtggtagggatcatgatagggagaaggatcgtggcctctctcatgatcgtcaccgtgagagaggcagggatcgcgagagagatcatgagcgtgcaagttacgaacgtaaacgcgctcacttgaaggatagggatgctgaatacaatggtgagccaaagcatgacaggagcatggctgattatgggaagcattatggctctaaccagcacgagc

SEQ ID NO: 8348 - DNA, 198 bp, Zea mays
  Clone ID: MRT4577_107611C.1
ctggatagtggcgacatgggcaggttgtaggatggaccaggactcccctgccggcagaggcggtcctggccccaagagcgaggaggtggactaagcggtttgttgttagccttgagtgagctgcagatgttcgctggaccagttgctgcctagagtgatcgtcaattggtgcagagtgcccgcttaaacttctatccg

SEQ ID NO: 8349 - DNA, 402 bp, Zea mays
  Clone ID: MRT4577_107612C.1
taatgaacgcaaaccgcaccaagaaacccagggggaggccgaaaacagggggaggaaaggcaacgccgcctaacagcagacaccgacggcaaaaccacgaagccgccgcactgcacaccgagcccgcggctgccagagccagcgccgggaccaccagcaggccggggagggccaacccgcacaaccagcacccgagcagccgctggaacgagaccagccggacctgcggcaacgggccgcgccacccgaggccggagcagaagaggagacgctgccgggagctggcggacatcccggcgaacagccggagcacggcgcagagcacccacatggacggcgcgaacccgccgggcccggaaccgcagctggagggcccccaagaggacccgacgggcagcccgc

SEQ ID NO: 8350 - DNA, 220 bp, Zea mays
  Clone ID: MRT4577_107613C.1
ccgaatagtggccatctggatagctctctatctgatggacactggatctggtgccattctgactacctgcgattccgggataccatacgcattccactatcatggagggtatgccccgctgccgggcgcgacactggaatggaacagatatacacagaaccttctcgttcataagcaaggagttactcctagaccgatctatggatctctatacatgcac

SEQ ID NO: 8351 - DNA, 335 bp, Zea mays
  Clone ID: MRT4577_107614C.1
gttcatcatgaatatttgccgaatccacaccgaaaaggattacggttacaaggtcacggacggacggagggatgacaacaggaataacgcgaaggttgttactattggcagctacaaagatgtaccatcgaacgatgagaatagtctgcagaatgcagttgcgaaccaccatgacagagttgctaatgaggctggtgacacagcattgacatctgtacagatcggagatcttcactggaagctgtggaacaatcgctggacacatggggtcacggtcgaaagctacgggacatagaacggcaaggactactgtatcgtgaagaactcatggggca

SEQ ID NO: 8352 - DNA, 533 bp, Zea mays
  unsure (1)..(533): unsure at all n locations
  Clone ID: MRT4577_107615C.1
cggccctgtgcgtcgcgctgtccgngntctctctgtttgtgcagcccccccttgtttggngctgcctctccccgttgttcatcttttncgctggncgcgtccgttctccgtctgctcttcccctccttcgtctttgaggtcgggcccggccccttcgtcgtcgtngttggctttctgtgggtcggtggtcttgcccttttccagcggctgggaccgtgtgtctcttgctctggctttcttgtgcctgtcctgttnngcctgccnccattgctccgggcgaggcctgttcctttctgcngntcgccgctgccactttccacttgctgtctcccgtgcgcgagacttccgacccttttcccttgccgcttgtgttgcccggttgtttctctcccggggttttttgtcttctttttgctctgctcttgttggtggttttctttccccgnnccttctcgtttggctctccccctttttgctgtcgcccccccttggtttcctgtcgggttcctcctctctttgtggcggtttttatg

SEQ ID NO: 8353 - DNA, 348 bp, Zea mays
  Clone ID: MRT4577_107616C.1
ataatttagggcactgctgaacatgtatatatatatatttagatccgtttaataaagagtatgaactttaattaataagctgacagcccaaatgcacgcgaagacgtacaaattaatgactgcatgtagtgtacgtgccttttaccacttgtatataccatgcatatctgaattgtctataccaacccttgtgaacatgagccatatatttgatcatgcttgccgtagctggcatcaataatactcgccttgtttttatccttgggctttttgatgcgctccttgatctcacgaagagcattttttttagctggattaagtaccttaagcttcttaaattattttttt

SEQ ID NO: 8354 - DNA, 806 bp, Zea mays
  unsure (1)..(806): unsure at all n locations
  Clone ID: MRT4577_107617C.1
cattgggaccctcgaggccggccgggctagccgccgccgccccaccatccaccacccttcccctcgcagtcaccagagtgggctgccgaagaacgtgcgggccctaggatggtggcggatgggtctctttgcctgttgacgttgtttgcgcttggatctaggcgggagaagggtgcggcggccatgggtttgctcggagggtcgacagcgtgctagtgcgggttcaggcgacgtgatggcctgagattcggtggcagacttggtgccgccgctgctctcgtcccgcttcctcgatgcagcttcctgcgtgctctatgtcgtcgtgcgcgcggggctggctgtgggtgtgctccaggacgccaccgccgctccctcctcccctacattcccctcatcatcaccggagggccccaatggcgacgacagtgcgtgttcttctctgcggggttgggtgcccctggatccggtcagagccggtgtgtggaggccgacaatagcggggttacgtggcgggagatacggctgtgtggaggcttgcttgtggaggaggcggcggtgtggaggccccggctcaggcttcgtcgatggtgtcccctccctccctggtcgttgctcggtgcctgtcgggctggtggcaacgtgcaagtgctcagtcttttgggcggtttgttgttacggcagtttgcggtggcggttaccagcttctccctaaggaccgtaacttctccttgtagcttgggnctttattgtttgctaatggtgtccatacctnatttttgtcgattaaggtcaccttaacattgact

SEQ ID NO: 8355 - DNA, 294 bp, Zea mays
  Clone ID: MRT4577_107618C.1
cctcttttttttttcattcaccacccaacacacccgccattataactattttcacacccacaaactgaaaaaaaatcccccacaaacctcacctttgacaaaacccaaacaaaacaaaatactccacctaatctactcttgccaaaacacatctcaccttatctcaaccaaaaaccacccacatgagcacatactctacacttcaacaaccaccgacaaaaccaaaaaacattcctacaatgatcacaagctcaacacacacgacaacccataaacatcagctcctaatcacca

SEQ ID NO: 8356 - DNA, 811 bp, Zea mays
  Clone ID: MRT4577_107619C.1
ctgtcgcttctccttgacgcacgccaccgctctcctcccacccccttctatatcatcgccgctcccccggcggcagacacagcggagcgcatctcgacggcggccatggcgacgaacgggaggaccgtcgcgtccgtcgaccccgacgtcgcgctcgcctacaagttccccgaggtctccttcgcctacgacgagagggacgtggcgctctacgcgctcggcgtgggggcctgcggcgcggacgccgtcgacgacaaggagctccacctcgtgcaccacagggacggccagcgccacatcaaggcgcttcctacctttgcgtctttatttcctaacaagaacagcaatgggcgtggaattgttaatgtgcctggcattcacttcgatgcaagccttctattgcacggtcaacaatacatagagatctacaagccaattccttcatgtgccagtgttgtaaacaaggttaaggtagctggtttgcacgacaaagggaaagcaactattctcgagatcgaaacgaccaccagtctcaaagattctggcgaagtgttatgtatgaacaggagtactattttcttgcgtggcgctgggggtttttcggactcttcccggccgtactcgtatacgacttatcctgccaaccagatttctcgcatttctattccaaattccgcaccttctgcagtgtatgaagaccagacacaacaatcccaggcactcttatacaggttatctggggattataatcctttgcattcagaccctatggttgcacaggttgcagggttcacccgtccaatactgcacg

SEQ ID NO: 8357 - DNA, 307 bp, Zea mays
  Clone ID: MRT4577_10761C.1
ggaaaaaccgccgaaaacagttttataaaaaacaactttgctttttaacaccacccccccatggatagatccttggggttttaccccaatttacccccaggtcaggtcaaaagctgcatgattttgataacatgtaaccccctttaaaaatgaaaatgaagccccggggagaacttcccacagtttttgccttgaaaaaaaaacttcgacaacaagttccagcgatcaaatttgaggccactcccccccggaagagccaaattgtccaaacgggtcctgttgttcacccaaggagcttttggatctt

SEQ ID NO: 8358 - DNA, 931 bp, Zea mays
  unsure (1)..(931): unsure at all n locations
  Clone ID: MRT4577_107620C.1
agcgcggccgcgtgggctgngagaggcggtggagccggctcccccgccggccaatggttccggctccggcgagaaggaccgcggctcgcgtcgccgcgagggcgacgagggccgcatatcgaagcgctcccgctcgggggaggaccgcgagcggggccggcaccgcagcgttcgggagcaccgggatcgggataaggatgacgggaaggagaaggagaggagccgcgatagccgcgggaaggacaggcaccggcccagagagagggaggtggaacgggagcggaggagcctgagccgttcggagcggcgccgtatcgaggaagaggagatggtgagggagctggagaaattccgcgcgcgcagcgagcgacaccactatcgcgaccgtgacgtcaggcgtaggaaagatgacggggcagagccagaagttgatccagaaagggaccagaggactgtatttgctttccagctatctctgaaggcagacgaaagagatgtttatgagttcttctcaagggctgggaaggttcgtgatgttcgtcttatcatggaccgaaactcaagacgttctaaaggagttgggattacacactgaaattttatagtttgctctacatgctgggattatcggcaatttacaagttctaggcaataaagggggcacccaagaaccaagttcgaaacctctacaatttttgatcaaaatgcctgaagttttctgtgaaaaattgaaatgtcttaacatatgatgccccacttattggtcttcttttcttttttacaggaagacatcttttcttggacgcttcgatgtttgtactaaacatatatctaaatttgcaggtacattgagttttacgatgttatgtctgttccaatgggcattgctttgtctggtcaaccgctgcttggacaagcagtgatgggtaag

SEQ ID NO: 8359 - DNA, 650 bp, Zea mays
  Clone ID: MRT4577_107621C.1
atcttttcttggacgcttcgatgtttgtactaaacatatatctaaatttgcaggtggtgcggcttcaggtggagcaagaaagttgtatgttggcaatcttcactcaaatattactgaagaccaattaagacaggtatttgaaccatttgggcaagtggagcttgtacagcttcctctagatgcaatgactggactgtgcaaaggttatggctttattcagtttgcccggcttgaagatgcaaaagctgcacagagtttgaatgggcggcttgatatcgctggcagagttattaaggtttcagctgttactgatcatgtgggagtgcaagctagtggagcaactactggagatctagatgatgatgaaggtggaggcttggtgggtcaacttatttggttcaacatgttggataaccttataaactgggatttctatgcctcttctaagtttttgtacttcgatttttgggcaaactggcaaaacagaggatttaaccttgcacatatattacaaacagaaccttcacaattttgggaggttccgttacacatacaataatcttacaaaaaatatgttgatatgattcattttttctgaagcattatgcaactatcaagatatgtaatgttcttaaccctttggatagaag

SEQ ID NO: 8360 - DNA, 459 bp, Zea mays
  Clone ID: MRT4577_107622C.1
agagagatttgtgtgcacagccgctgccatcgatccttctctgggatgaccacctggccgaggtgccatttagaagctccgttgaatcaccagaaacgggatcgtgggagtcttgagctgggaaacctagctggttgcccggaatttgtcgccggcgctgtcgggtcgccgtgatgccgcgcctcaatgtgaccccgtgttcccacacgaccatcctagcgcgaggacacgtgtcatctgaaaagcaagttggtacctggaatctcaagtgccaggtcaagaacaggtaccacaggatgaggcacatggaggatgctgcgatgtgttcatgagaggtctaggccgtcgtctcccagtcaactttgggttgctggaccgttgtctccttataatgtaattatttatttattttgtatagaactcctgctatgaagtaaagatgtgacattcaaaagaaac

SEQ ID NO: 8361 - DNA, 2014 bp, Zea mays
  Clone ID: MRT4577_107623C.1
ccacgcgtccggacagagacagggaagggagagaacgggagaaggagaggggggacaggcaccggcccagagagagggaggtggaacgggagcggaggagcctgagccgttcggagcggcgccgtatcgaggaagaggagatggtgagggagctggagatggagcgcgagcgcagcgagcgacaccactatcgcgaccgtgacgtcaggcgtaggaaagatgacggggcagagccagaagttgatccagaaagggaccagaggactgtatttgctttccagctatctctgaaggcagacgaaagagatgtttatgagttcttctcaagggctgggaaggttcgtgatgttcgtcttatcatggaccgaaactcaagacgttctaaaggagttgggattacacactgaaattttatagtttgctctacatgctgggattatcggcaatttacaagtaagatggaatattagatcattctgatgtcagtcagcagttgaggacagtttgattccagtgtatttgacaaacacttggtgcaggttctaggcaataaagggggcacccaagaaccaagttcgaaacctctacaatttttgatcaaaatgcctgaagttttctgtgaaaaattgaaatgtcttaacatatgatgccccacttattgttcttcttttcttttttacaggaagacatcttttcttggacgcttcgatgtttgtactaaacatatatctaaatttgcaggtacattgagttttacgatgttatgtctgttccaatggcaattgctttgtctggtcaaccgctgcttggacaagcagtgatggttaagccatctgaggctgaaaagaacttagttcagtcaaatgcgacatcaggtggtgcggcttcaggtggagcaagaaagttgtatgttggcaatcttcactcaaatattactgaagaccaattaagacaggtatttgaaccatttgggcaagtggagcttgtacagcttcctctagatgcaatgactggactgtgcaaaggttatggctttattcagtttgcccggcttgaagatgcaaaagctgcacagagtttgaatgggcagcttgatattgccggcagagttattaaggtttcagctgttactgatcatgtgggagtgcaagctagtggagctactactggagatctagatgatgatgaaggtggaggcttggcgctaaatgcaagctccagagctgctctaatgctcaaattggacaggagtggtacagcaaccagcttaactggtggtattggtgctgctggagtggctgtaccagctacttcagttattggggcagcaggagctgcttctcttctgtcaccaacagtttctgctgttggatcagttcctggggcacctgtgcttcctattaccgctcagaatgtgatcatgtccacacctacagaattcttgttgcttaaaaacatgtttgacccatcattggagacggatcctgattttgacttggatattagagatgatgtccaagatgaatgttccaagtttggtgcagtgaagcatatttttgttgacaaaaatactgcaggcttcgtgtatctgcagttcgatagtgtaactgcagcagggaaggcccaacaagcacttcatggaagatggttcgccggaaagatgattacagcgacatttatgtccgatcaggaatacagtactaagttcccaaacttgtgagcatatgcggggaagagttggtcagacccgcataattccttccggagagttggctagtgctgtatcgttggatggtagactagacgaacaccttattgattgtatgacaggatagtttcagttgcagcgctggtcgtgcgtacaatgtttgatgtactttatttacggcatcacacacagtgaccatcccttattttgtccaccgaatgaaatgccctatgatctccaggcacgttggcatatggtttatttatgtacaaaaaaaaaaaaaaaaaactcgagatactctcgtgc

SEQ ID NO: 8362 - DNA, 313 bp, Zea mays
  Clone ID: MRT4577_107624C.1
ggggcaagaatgcaaacatttaaaatgctggggctgcaaaaaggactggacaaaatggccctggaaaacccaacataacagataattctcctcacctttgacagggaaatcactttattttccatttcgattcccattctaagggggggttaacagcccctgggggccggaaggacctattttgttccaaagagaaacatataagggccgggggattgcaaagctttcactttttaggttttaactttggggacacagggcaaataactggaggtttacaggtggttacacatttgaaatcttgctcccgaat

SEQ ID NO: 8363 - DNA, 2029 bp, Zea mays
  Clone ID: MRT4577_107625C.1
cgtccctccccaagcgcgccgtctagggtttcacagccgtgccccgatccattcgagcgccccgcaccgccgccatggagtttgacgaatacgagtacttggagaaggcggtagagcccgctcccccacaggccaatggttccggctccggctccggcgagaaggaccgcggctcgcgccgccgcgagggcggcgaggaccgcatatcgaagcgctctcgctcgggggaggaccgcgaccgggacaggcaccgcagcggccgggagcaccgtgaccgggacaaggatgacgtgaaggaggagaggagccgcgaaagccgcgggaaggacagggacagggaagggagagaacgggagaaggagaggggtgacaggcaccggctgagagagagggaagtggaacgggagcggaggagccggagccgctcggagcggcgccgtgccgaggaagaggagatggttagggagctggagcgggagcgcgagcgcagcgagcgacatcactatcgcgaccgtgatgtcaggcgtaggaaagatgacggggcagagccagaagttgatccagaaagggaccagaggactgtatttgccttccagctatctttgaaggcagacgagagagatgtttatgagttcttctcaagggctgggaaggttcgtgatgttcgtcttatcatggaccggaactcaagacgttctaaaggagttgggtacattgagttttacgacgttatgtctgttccaatggcaattgctctgtctggtcaaccgctgcttggacaagcagtgatggttaaaccatctgaggctgaaaagaacttagttcagtcaaatgcgacatcaggtggtgcggcttcaggtggagcaagaaagttgtatgttggcaatcttcactcaaatattactgaagaccaattgagacaggtatttgaaccatttgggcaagtagagcttgtacagcttcctgtagatccaatgactggattgtgcaaaggttatggttttattcagtttgcacggcttgaagatgcaaaagctgcacagagcttgaatgggcagcttgatatcgctggcagagttattaaggtttcagctgttaccgatcatgtgggaatgcaagctagtggagcaactactggagatttagatgacgatgaaggtggaggcttggcactaaatgcaagttccagagctgctctaatgctcaaattggacaggagtggtactgcgaccagcttaactcgtggtattggtgctgctggtgtggctgtaccagctacttctgttattggggctccaggagctgcttctcttctaccaccaacagttgctgctgttggatcagttcctggggcacctgtgcttcctgttaccactcagaatgtgaccatgtctacacctacagaattcttgttgcttaaaaacatgtttgacccagcattggagacagatcctgattttgacttggatattcgagatgatgtccaagatgagtgttccaagtttggtgcagtgaagcatatttttgttgacaaaaatactgcaggctttgtgtatctgcagttcgatagcgtgactgcagcagcaaaggcccaaaatgcccttcacggaagatggttcgctgggaagatgattacagcgacatttatgtccgctctggagtacagtacgaagttcccaaacttgtgagcatatgccgggaagagttggccagacctgcatagttcgtttggagtattcgcaagtgctgtatcgttggatggtagacgaacaccttattgattgtatgacaggatagttgcagcaccgggcgtcactatcagtacaatgcttgatgtactttatttacggcgtcgcagtgaccaaaccttatttttgtccaccgaatgaaatgccctatcatctccaggcttgttggcatatggttgattttctggacgatcaccataacacatttttgtcagatttccaatgtgctttatttttttattctcttatgtttcaggatgttttgatatgttcttgctttc

SEQ ID NO: 8364 - DNA, 1602 bp, Zea mays
  Clone ID: MRT4577_107626C.1
tccggcattttcagacttggatggaaagatagggagcgtttgtctgagagctcttgcagttattgcttacagcctttgccaagtttacattaccggtcgcaaaagaggcagatatttttctatgttctgattgcttccatgatgcgatgaatatcactggacattcttgcttagatttccagagagttgatggggataatgatgaatcagaaaatgatagtgataaatggactgatgaagaaacattgttgctgttggaaggcattgagaagtacaatgacaactgggatgacattgcaggtcatgttggaacaaaatcaaaggcacaatgtatctaccattttattcggttgccagtggaagattgtttgctagagaatgttgagatacccaatgcacccattccatttcgaccacaaagcaatggttatcaatgtttagattccaatggcagcacatcaggagctccagttcaaaatatccaacaaggcaatgagcttccgttcataaattcttctaatccggtcatgtcactggttgcatttttggcctcttcaattggacccagagttgcagcatcatgcgcacatgcagcattatcttttttgactagagacgaggattccagggtgagttcagaaggctcacatgctggtggtctgggcaatggtgcaaatccaaattttcagaaccataatggtgcttcaccatccatttctccagaaaatgttaaatatgctgccatgcttggtctgtcagcagcagcaatgaagtctaagctctttgccgatcaagaagaacgcgaagtgcaaagactaactgctactgtaataaatcatcagttgaagagattggagttgaagctgaagcagtttgcggaagttgagaccttgctcttgaaggaatgtgagcaagtagaaagggttagacacaggatttcagctgaacgcgtcaggatgaggtcagccctattaggtcccaccggaagcggtctaccagggggcagttgtagcactatgccatcaaatccagcaggcatgagccccagaccagtcggtgtgccaggctacatgccacagaccagcatgccagccacatatgccaacaacctgcaggggcatgggaatcctcagatgccgttcttacatcagcggcctcagatgctttcgttcggccctcgcctaccactctcagccatccagactcaaccatcaccacaatcatcaaacatgttcaactctggcatgcccaattcgattgctcctaaccaccatcagttgctgagatcatcctccggaaacaattctagtgcaggataggggaattgtccataagattttttttttctcagcttaggtttgtcaggtgtagcattatgtcatttataaacacatcactgtaattcatttatgtgatgtatgtgtttgtcatataagttttttattaggtcctataaattgtccccatattgctgcgcccttgtgtacctttgttaccaggtcacctcttcccagtgcagggagattcaaatgaacagaatatgttttcatatgtatcccttgagaactcttattgaatatatatgtatgtagttaattcaat

SEQ ID NO: 8365 - DNA, 559 bp, Zea mays
  Clone ID: MRT4577_107627C.1
cagaattcttgttgcttaaaaacatgtttgacccagcattggagacagatcctgattttgacttggatattcgagatgatgtccaagatgagtgttccaagtttggtgcagtgaagcatatttttgttgacaaaaatactgcaggctttgtgtatctgcagttcgatagcgtgactgcagcagcaaaggcccaaaatgcccttcacggaagatggttcgctgggaagatgattacagcgacatttatgtccgcactggagtacagtacgaagttcccaaacttgtgagcatatgccgggaagagttggccagtcctgcatagttcgtttggagtattcgcaagtgctgtttcgttggatggtagacgaacaccttattgattgtatgacaggatagttgcagcaccggacgtcactatcagtacaatgcttgatgtaccttatttttgtccaccgaatgaaatgccctatcatctccaggcttgttggcatatggttaattttctggacggtcaccataacgcatttttgtcagatttccaatgtgctttatttttttt

SEQ ID NO: 8366 - DNA, 2061 bp, Zea mays
  unsure (1)..(2061): unsure at all n locations
  Clone ID: MRT4577_107628C.1
aattgtttggactatacaattctcgtgtctcgccctcccccgacgcgccgtctagggtttcacagccgcaccccgatccactagagctatggagttcgacgaatacgagtacctggagaaggcggtggagccggctcccccgccggccaatggttccggctccggcgagaaggaccgcggctcgcgtcgccgcgagggcgacgagggccgcatatcgaagcgctcccgctcgggggaggaccgcgagcggggccggcaccgcagcgttcgggagcaccgggatcgggataaggatgacgggaaggagaaggagaggagccgcgatagccgcgggaaggacagagacagggaagggagagaacgggagaaggagaggggggacaggcaccggcccagagagagggaagtggaacgggagcggaggagccggagccgctcggagcggcgccgtaccgaggaagaggagatggtgagggagctggagatggagcgcgagcgcagcgagcgacaccactatcgcgaccgtgatgtcaggcgtaggaaagatgacggggcagagccagaagttgatccagaaagggaccagaggactgtatttgccttccagctatctttgaaggcagacgaaagagatgtttatgagttcttctcaagggctgggaaggttcgtgatgttcgtcttatcatggaccggaactcaagacgttctaaaggagttgggtacattgagttttacgacgttatgtctgttccaatggcaattgctctgtctggtcaaccgctgcttggacaagcagtgatggttaaaccatctgaggctgaaaagaacttagttcagtcaaatgcgacatcaggtggtgcggcttcaggtggagcaagaaagttgtatgttggcaatcttcactcaaatattactgaagaccaattgagacaggtatttgaaccatttgggcaagtggagcttgtacagcttcctgtagatccaatgactggattgtgcaaaggttatggttttattcagtttgcacggcttgaagatgcaaaagctgcacagagcttgaatgggcagcttgatatcgctggcagagttattaaggtttcagctgttaccgatcatgtgggaatgcaagctagtggagcaactactggagatttagatgacgatgaaggtggaggcttggcactaaatgcaagttccagagctgctctaatgctcaaattggacaggagtggtactgcaaccagcttaactggtggtattggtgctgctggtgtggctgtaccagctacttcagttattggggctgcaggagctgcttctcttctgccaccaacagtttctgctgttggatcagttcctggggcacctgtgcttcctgttaccactcagaatgtgatcatgtccacacctacagaattcttgttgcttaaaaacatgtttgacccatcattggagacggatcctgattttgacttggatattagagatgatgtccaagatgaatgttccaagtttggtgcagtgaagcatatttttgttgacaaaaatactgcaggcttcgtgtatctgcagttcgatagtgtaactgcagcagggaaggcccaacaagcacttcatggaagatggttcgccggaaagatgattacagcgacatttatgtccgatcaggaatacagtactaagttcccaaacttgtgagcatatgcggggaagagttggtcagacccgcatagttcgttcggagagtttgctagtgctgtatcgttggatggtagactagacgaacaccttattgattgtatgacaggatagtttcagttgcagcgctggtcgtgcgtacaatgtttgatgtactttatttacggcatcacacacagtgaccatcccttattttgtccaccgaatgaaatgccctatgatctccaggcacgttggcatatggtttatttatgtacgatctgttggcactggtacgtatttgtatactaagcaaaagcgttacataatcacaatggtacctttattagtcccctgtcgtgggatatnnnnnnnnnnaggct

SEQ ID NO: 8367 - DNA, 900 bp, Zea mays
  unsure (1)..(900): unsure at all n locations
  Clone ID: MRT4577_107629C.1
gnnnnnaagcaccgccctgagatcgctcaggggatcatagatgcaaaggattccatcgaccctggtcggtttgctgaggcatatgctgagatatcaatgttgccaacgacttcgggctcgtttgaaatggcttcgaacttgatgaagaaaacactggcaattcttgagagcgccaaggagatgcatcacatcgaaggcagcatctcagcaaggctagggtggctcctcctgtatattaaaaatgttgatgagtctgtccaatatctggagagagcggttgataaattgaagaattgctttggaccacgacactttgggttaggttttgcttataggaatctggggcaggcctatcttgaaatgaaccaacatcaatcagctgtggagttcttcaaacttgcgcttgatattattgaagctacatttggaccgctacatgatgataccattgacacaaaacagtgcattgcaaatgcatacggactgatgaaaagctacaaacttgctatggagtttcaagaacaagtcatggatgcctacagtaggtgtggccatggtgccttggatgatttcaaggaagctgaaaggcttttagagcagatcaagatgaaggctcaaggattgcgtcatgcagtatttcctgcaaattcattgcctgattcagctctagctctagctcaacgcaacaaagacgattagttcttctgtatcagtgccaacttagatgagttaatggtaaactgttattttacaagtgatccctcaagttttttatttagggtccttttcattcttattcttatatattttatgttaccctacaatagaaatgacgagttgaccatgccagaatttctatttgagaaacaaataggctatgcttatgatgtttgtactttc

SEQ ID NO: 8368 - DNA, 366 bp, Zea mays
  Clone ID: MRT4577_10762C.1
ctatatttcacccacgacccagctagcgggggggcgcgcgtgtaggcattctacgagcagctcggtcttgtcgttggagagatgaagaagaacaccatgagggatttcttgggtttcttgttcggagtagctgccgcggcggcctgcttcggcctgctcctgctgcatgttccatgcccccgtggcctcttgcccgcacagcaaggcctcatcatcttgggtaggagtactactaacggaacaaacgctgatcccactcccagcaccaagaaacctggcatcgcccctgctccagctccaggtgacgacaagctggaggcgctgctgaggcgagcgtccatggccgaccttgacaagaccgtcata

SEQ ID NO: 8369 - DNA, 383 bp, Zea mays
  unsure (1)..(383): unsure at all n locations
  Clone ID: MRT4577_107630C.1
aataattntactccttcctttacctgtaacccccgcagcaacttcctggggggagggaggattatataatacgaagagcctcaccattacctattataacgccaccaacatactcggactcagaccaaccgtcgttgctgacacggagcaacaccagtatctggcagctgaggacgccacgtaggcgcatgcgctgcccgtgaagacgctgcttcccgctgcaccgatgcaactctgcgcggacgccatgaccgacatgatcctgaacccgcagaacaacgaacacaataccctctactactcctacctgtgatacatcacatacctcaactacacctacaggctctgctctaactactccctggaatgcgcgttctacactg

SEQ ID NO: 8370 - DNA, 364 bp, Zea mays
  Clone ID: MRT4577_107631C.1
gtcgcgtgatttactgctcctttttctgttcacccatctgtttcttcccgtcccgttgacttgctctcctgttcgaccatcgtcgtcaactgtgaaggccctgagaccatgtttcttgggatccgtctactgcgttttttttttttttggaaagggaaaaattcgtcataccttcggtttggtcccagtatttcactttgcatatttgggctgcatttgcaagctgaaagattcgctaccgctctgcagtggcggaggccttgtggcgtacgcggattccgctgcagagagcgcgccggacccatctcaggatgctcccaggaagaaggtggtggttcttgagactggctgggcttggacgtcg

SEQ ID NO: 8371 - DNA, 329 bp, Zea mays
  Clone ID: MRT4577_107632C.1
ggttcatccccatccagcgaacatatcaacatatagaatcgacacacattacatggcacactgcgcctaacgttaaatggcaactcgatactgtcgcgacagcagcatgacccattgtttccgcaaggaaaggaccagtgtagctatacgcactaacttaaactatagactgccactcggcaacatgctgcttgatactcagactttttattcatagagtgccgcagccaactgacattcagactgaatggactcttagttcggagagccaccgttcacagacaccatcattgtagctacatgtccaaccagagatggatcatatggtc

SEQ ID NO: 8372 - DNA, 411 bp, Zea mays
  Clone ID: MRT4577_107633C.1
ttctggacacaagaaggtgatcttgccatcgactttaggctgcacgctcgcgtgccaggccgcactcgcgctcacgcgcttggccacgtgccatgtccgccagatcggctgcgcgcacgcctcagccgtcgggtcggctgcacccgcgccggatctatggcagcctcggccgcggggccgtgtaggggctgcgcgctcgcgcgtcgccaccggggccaaggctgggagcacgcgccgggactcacccccgcacgcatcggggcagcacgctcgcgctgccaacctcgactgggcaccatggcctagcagccgaccgcccgtgccctcgacgggtctgctcgcccgtgctgcagaggccggggctgcaacgttaggaccgcggcacccaagccaaggcgcgcgccctagccg

SEQ ID NO: 8373 - DNA, 386 bp, Zea mays
  unsure (1)..(386): unsure at all n locations
  Clone ID: MRT4577_107634C.1
atcaacagtacatagacaaaaaataaccaaaatgtctcataatgcttttaaatcaggttgcaagctgtataaatttatttctttggacttaaacgctgagaagtagtttgttttaagaccaaattcgtcaggtatctacccaagctacccgctattcgcccctatgtgcaggccccttgtgtgatactaactataactggatggttgagttcttttttttttttacttttgtcacaaccatccagcaaaaagcaacacaagtgtttagacttggactgactacagatcgtctcttcacaagaagttcatgatctaaaaatgctacataaataatttctagtanctctgcccngaaatgaaaaagaaaaaaaatcttacaaaacctt

SEQ ID NO: 8374 - DNA, 323 bp, Zea mays
  Clone ID: MRT4577_107635C.1
atgcgtttttcctttttttttttttttttcggttttttggtttttttttgacattccacttgattcacaaggggaatcatgggaggacaaaaaaaaccgggggtacccctttgtattttttcgagcgggtccacggccccagtttttttcccaccaaaaaaaaagggggggggttgttaaacgggattggctacccaattttatagggttcccaacccgggcaggccgggttttttccccacccaaaaccccttggaggggggggggggcccttagcagttaaaaaccagggggggggccccatggaaaatcgtttccccggg

SEQ ID NO: 8375 - DNA, 555 bp, Zea mays
  Clone ID: MRT4577_107636C.1
atctccaggaaccgatcacagatgagatatggactcgcatacaccatcatgaacgctgcaaagaagcaacggcccgccgccgtgtggggcatactgatggctctgcagtgcatgcgcatgtccaccgacggccatggccgcccgttctccgcacgtagccgagccgagatagtctccctcacctaggatcaccaaggtgaccatgatgtcggacacgatgtgatacacgctgcagacatgcaaatacatgtgcgtgcctcactcctgcttgctcctgcgactatagctgatcgcctatgtgtacatcatatttactgcctgttgcatgatcccattcctcgaagccactgctctgacatgcatgagcccggcgactaccaacttgcctctcaagagcttctgttcaagtgatgcatgtttcaagagatccatggatgctttatgtatatgatactgactattatctatgtagacagcgacatgcaaccgcttagacgggtactactgtcttatttacaacttctcgcgcatctgtaagagggaaatatatgctgg

SEQ ID NO: 8376 - DNA, 133 bp, Zea mays
  Clone ID: MRT4577_107637C.1
tcggactcgtgtggccctccctacctgctgtctgctgctggccatcctcatagcccccgatctctgtgtgctacatatgtactactcgtgcaccatggtgtcgcctcctgccgtgtcttggtggtcgatggat

SEQ ID NO: 8377 - DNA, 490 bp, Zea mays
  Clone ID: MRT4577_107638C.1
atcacatattaccaaatctaatcgccgacatacattgaactcaaatccgctcagaatctccgacggtgagttccaatccatggctcaaaatcaacaacctattttccagaccaaacctccagaacaatttgcgcaaatacctatcaacatcgagcgtgattcttcaaccacacgcatgaaccaaaccggaaacacaatccggaaaccaaaccactggccaaccatcaccatctcaatcatcttcgtcatcatcggtcaatccatagcgaaactcctcgaaaacttctactacgacaaaaccaaccgaagcgaatacaacgaacaccgtcaaaacgatggcgtttggactcaatctcttctccaaactggtggttgtcctctacttattctgccgttcctcatcttcatcaccaagaacaaacgcaaccaccatcaacaacctccgatcacttgcgattcaatccacttaaaatccttagctgtgatctac

SEQ ID NO: 8378 - DNA, 442 bp, Zea mays
  Clone ID: MRT4577_107639C.1
aaaaagcataacggcataactttttatagggttttgggaattcaagtccaaaaatagctttcaaggggttctatttatagctgcatcaggctgcaaaagtcccttgcaaaaaaaaaaaaaaccctagaaaaaaaatccaaaagcaaatccatagaaataaaagtttctgcagcataagagttttccacacaacgaactggaccatcatgcccccccaaaacattttccttggacgagcttaataccaacctccaaatggggggggcggctccggccctaaaccctgaggagtcgtcggggaaccaccaatcaaggatggccccagggggcataaactcccttttgagcacgttggcgtcagcgtcaaaaagcctcaccgttttgtcccataaaaccacggacggaatgcgggggaaatggggggagcgggggagggaaaccc

SEQ ID NO: 8379 - DNA, 400 bp, Zea mays
  Clone ID: MRT4577_10763C.1
gcaacccccggatcataaccattttacaaactggccaaaaaaacaataacatttggaagttccaaacagcttgcgttagcttttcttggaaaaagatctttccgggctcctacctttaatgatcacataacccaggggaaggcaaatccccattttcctaaatttaaacggggagggtgcctttctttttcaaacaaaaaaaaagcccacaaggcaacggggcggccttcccttttaaaaacggcccccgggatgaccacctccacaagagggggggtttaaaaaaaaaataacaaagtccgcctttatctttacatttttgcaaaaagggtgggttaaacccaaaacctttggctcaaaaaaagggtttttaccaccgggccaggcctattcacaaaaa

SEQ ID NO: 8380 - DNA, 227 bp, Zea mays
  Clone ID: MRT4577_107640C.1
actcgtgcgcttgagccagcgactatgggcgagtttttgatgggcgacatgattattacccacgggtagacggacctaatgacaacgaaggcggtagcattgcgtggcacagttataaaaaagacaaagggcgcgcctcgtgtggacgtgttgtaaaactgcggtcctgactacgctgtaccggagaacctgaaggcttgaaggcgtttgcctcgggcgttacaata

SEQ ID NO: 8381 - DNA, 238 bp, Zea mays
  Clone ID: MRT4577_107641C.1
gtatgttttacacggccgactgcttcacatataagggtaggttaatacatccaggaaacactgtaggagtaaacacgcgtaacggactgaaacctgctgccagagcacctgatctaggcatcgagctatgcagatctgcaaaaatgggaaaagctcgttgtgcttatagtcaaggacttacacgacaccgtgcgtactaaggtgtgtactgtaataaggtagctatgtacgctcaagc

SEQ ID NO: 8382 - DNA, 174 bp, Zea mays
  Clone ID: MRT4577_107642C.1
ggaggatgactattaatacacagattttgataaacttctcttcaaagaaaccaaaaaccataaaaccagcacccaaaaaaaaaacggaaattaaatgagtaaaaaatgtgagcaccctcaacaaaaaggggtgagtcttggtgaactcaaactaggaaataaacgggaggcccc

SEQ ID NO: 8383 - DNA, 204 bp, Zea mays
  Clone ID: MRT4577_107643C.1
atataattggttatttcttgcaattgcaaaccaccttcattatttttttgcctggttcgattccaggttaaaaaattacaattaatccgattcccctcccctaacttgtggggccatgtaaccaccaactagcccccgacccccggtcccggtgcaacctttaggcctagatggccgggtggcattaggccccctttacccatc

SEQ ID NO: 8384 - DNA, 591 bp, Zea mays
  Clone ID: MRT4577_107644C.1
cgcacacgtaatagcaaattgcccgccgcaccgcaggcacaaacacgacgggcggccgaacgaaaccgaggtacattacccagggcccgaggagaaacaacccgcccaggacccgggccaccacacgaaggacgaggaggaggacgggcaccgggccggccgccgggacgaacagcccgcggcagacacagaggcgacggagacagagggcgtgccgacgggcgacaaacaccaccagcagcaccagaaggaagacaagcccgcacccacaggccggaccccggggaggccggcgccatcgacgccggcgccgcagcacccgaccagaacgacgaagcagagaaagacccggagcacgcgcaccgccacaagaaccaggacgagggcgcgggcgagggcgacaacggctacagccggagcgcgttccacaagccccacgagacgaacacggaccacaacgacgccgaggaggacgggggggagaaaagcaacaccgccgccgctgacggacacgtcacgcacgagacccggcaccgtgggcaacgcaggcagatgagaaagagaaacccagaccgcgacgcgaggagcacg

SEQ ID NO: 8385 - DNA, 265 bp, Zea mays
  Clone ID: MRT4577_107645C.1
tatacacccttcttatacttgaatataggttacttcattggactttcaccttaacactggggactgtattgttctgaggaagaatggatatataaaaagggcatgtctcttttaataaaccaatcttacttactcatgcatcctactccatagctctactatatttgtcacctatactcaattcactgaccatcgttttacaacatttagactggtaaaacccttactttacctaacttattcgccttacaacacattccctttt

SEQ ID NO: 8386 - DNA, 116 bp, Zea mays
  unsure (1)..(116): unsure at all n locations
  Clone ID: MRT4577_107646C.1
ntccgcaattccagnccgcaagtggtccgtttagtatgnttgtgcattacgtgaaagggaaaaatccctgataccagagccaatctactgggtctctttagttcagattttattat

SEQ ID NO: 8387 - DNA, 281 bp, Zea mays
  Clone ID: MRT4577_107647C.1
accaaaggaaccaaaagggaaaaccccacttttagggccaccagggcccctgtggacccacccaaaaaggcaattgaaagggtggggcccatttaataaaacttgggaattttggtgggaaaccctttttccaagcttgagcttatttttaacctcccccaaggtggaggggtcatggcttaaactggacacttaaggggggttttccctttcaccttaaaaaaaaaaaattggcagaaaagggagggaatgggcccacttgtgctaacagaaaatttatg

SEQ ID NO: 8388 - DNA, 124 bp, Zea mays
  Clone ID: MRT4577_107648C.1
caaaaggaaatgggggtcccttcatacataatcaactttcacatgtagagtacctgggatgattcttgtctcctcggctttaggtccagaacctaaaggcaggcaggtattttccatggaagtc

SEQ ID NO: 8389 - DNA, 837 bp, Zea mays
  unsure (1)..(837): unsure at all n locations
  Clone ID: MRT4577_107649C.1
gccggccggtccgggatggttcctccccatctgacacagaccgtgtccttgagagcggagagtcccacaaagactgcccccacctccacgctcggccgctcgccagtcgacttgacgcgagcgcctctccatcatcctccgtccatcttcttcagtctggttcgtcgtcgtcctgcccctaggcagcttgtggctgtggctgcgtgctagttgtatcaatctctgtcaggaacggggtgctgatgtgacgagggtttgacgaagttgacgggcgccaagagccggtctcttggatcccaattggcccgggtttgctctggggagacacaccggtgaccggtgtgcggacggaccgaaccccattgctgggtcgatcttccatggcacgattcagctttggagcttcagctcggagttagagacgacttgatcgaaggagtgccagataacaggtcgccatcagagctgaagaaacctgttctgttaaaaaaacctactacatatgaaaggagaatcatgttcatctatgcgatcaagctagtaccaattgttgttgcaatttgcaaagcctgttttgcagcgaatgttgcgctgcagagggcatcttcgtcaacgttgcctccgcatgcacatgtatagggccagtttgcaaatattccttttctgatttatgagctttacttcttgatcttcccttcctagagtgtttctgacgagagagcctataagaattaatgtgtcaaatatatatacacccataagttagtagaggtttgtcattggcgactttgtgtagntgtagattttttaaaaataaatatttcttatagatgcaaa

SEQ ID NO: 8390 - DNA, 372 bp, Zea mays
  Clone ID: MRT4577_10764C.1
attgaggggagaataatgaaataggggctgcaaaaagcctaacacaacagatgttggaacgaaagacacattaacaatgtattcctaccgcaggaaagaaactcttacacaaacatgtgaaagtaagataaagattcccaaaatgagatgccccaaaaaattacaaaaagggaagggcctatcaacgccagataagccaaggggagaaatgaaagcccaccctaacaaaggcgggccatccaatgatggaaccaatttcacaggacaggaaaaagaccatcaggtgcacgctcttaaaaaaccacacccacctgctgtaaaaatggacacgaccgcccggtttaattggtgcatatgactaccttcccttag

SEQ ID NO: 8391 - DNA, 182 bp, Zea mays
  Clone ID: MRT4577_107650C.1
ggcgggaaatgccagcttttttattggccagctgaagatacgttgccacgttctttacagcatgcatgcagggagactgatctccggtcttcaaggggcgtgcccccgtacgtggggctaccactctttgtgcaatttcgtaacgccaaacaaacgtttgtgtgccccgaaacgaccgaaat

SEQ ID NO: 8392 - DNA, 192 bp, Zea mays
  Clone ID: MRT4577_107651C.1
aaaacacactataagaggtagagccacgcccggccccggacgtgcacacacggggccgcgcaccaacaagaggcaggccacagccggcggaatcccaagacgagcgagcgaaggaagctaagaccggagacaaagcccaagcgcatggacgggaaagtacacgcaggcgacgacaacgacagccagcactgc

SEQ ID NO: 8393 - DNA, 262 bp, Zea mays
  Clone ID: MRT4577_107652C.1
ccaacctaaaaacgtaacccgatttttaccatgattttacacatccctaaattgtacgctaatcgtatgaattaaaacccacagaaagccaccaaaaaacacacaatatccacttcctattcactccctcaaccccccctcaaactaaaccccatctccctttcaaacccactcgaatgtcaatgtaaacttatcaataggaccctacactccacttcatacatgcccaccactccaacttaccatccaaaccttctcctca

SEQ ID NO: 8394 - DNA, 123 bp, Zea mays
  Clone ID: MRT4577_107653C.1
aactaaatatagaatcgatagcgatcactatataagaaaccaagcttacatacacatgacgtgcagattaatgggcggtcgtatttagggatccaagttcacttacccgtgcatgcgattaca

SEQ ID NO: 8395 - DNA, 288 bp, Zea mays
  Clone ID: MRT4577_107654C.1
cccaaaaatttttttcccaaaaaacgaaaggggggccttctttaaaatttaaaatcttaaaaagggcccccaatctaataccctctaagggttttcaaaaaatcaaaggggctgggttttttggcccgggaattccaagggcccgccccccttggggggccccaaaaattggcccagggccttcatggggggaaaagcccggcccatgcccttttttaggtaatgggccactttttcctgggcccaaaagaaaccttgaagggtttaacccccggccccggggggcgc

SEQ ID NO: 8396 - DNA, 655 bp, Zea mays
  unsure (1)..(655): unsure at all n locations
  Clone ID: MRT4577_107655C.1
gggtacccgggncccttcctcgagttgttttttttttttttttttttttttttttttttttttttttttctttttttttttggggttgggttgttttggacaacaaagtcccatttttacatccttttggaaactaaaagcctaaaattttttggccccttagccaagaccaacaacaaaatcccccgaaaccttgaggcgaccaacccgcattttggtggggctccccaaacaaaaagatcccaaaggtttcctttttttgggtttcgacaacctccaaccccattaggggtgggggaacataattagcggggccccaagtcctaaggagaaaaaaccactttcccgtcttgccgccacacccaaaaccgtactttttttacaatgggggaggcagaccaaaacgaaaggaagccggaaaaaaacttacccaacccctttagagagaatgaacaaatttgattccccaacccgttaacgactccacacaaaccaaaaacaattggggccttttttattttttggggggcttcctttggaatcaacaagaaaaaaaatgctcggatgacctcaattatgggggcggggaaaaaggggcttttccctccacctaaaaccaattggtttgcgcatttcgagcaagggcacatgggcc

SEQ ID NO: 8397 - DNA, 669 bp, Zea mays
  unsure (1)..(669): unsure at all n locations
  Clone ID: MRT4577_107656C.1
cggaccggccttcccggtcgacccagcgttcggcattcaggcaacattattactcgatgacatgaccccctcctcatctgctcaggcaaagagacagcatgcgaggccctaacgctgctaccgcaacaagcaaaggcggcgccatggccggcttcaagcaagacctgctcaggaacctgctgctgggcatccgggcgtgccgcccctgggctccgctatcgcgggnagaccggaagcgtgccgtcaagcgatccgccgacgtcgccatggcggcagcgcgcgccgcggccggcggcgggcgcgcgaggtggcccaaggccatcttggccgccgccgcggcgtccggacacagccccggcggcatacgcaaggcgaggaagagtgcgtgcaagagggtagtgaggagaccgaggcgcgccactgcgagctgcgacgtcgtcgcacggaggctggtgcggagcaggacgatggcgctccggaaggtgatacccggagcggacgccaccgccgccatggacgacgaggccgtgctgctccgcgaaaccatcgactacgccgtacacctgcgcgcccaggtcgacgtgctccgccgcgtctcggcggcggtgcagagatccaccttcctccgggacggtcctgctcaaacatgggaggaggatcgtagtggtg

SEQ ID NO: 8398 - DNA, 681 bp, Zea mays
  unsure (1)..(681): unsure at all n locations
  Clone ID: MRT4577_107657C.1
cgtccgcgccacgttctggttttccccagttcgnnctcctcccatgggcgnngcgtcgcccccggctctcgtctcgctgnaccctcccgccgtnnctccaggcatnnccccannnctcctctnntctgcnntccccttngnnccccccgccccgcgcccacaatnnccgcctncnngccccnnnccaaccgnnccacacccnnngcctcggnaccggnaaacggcnnnctcggccccccggcccccggtnnngtcttcccctatcgccccgcgcgccgctnnnctcgcagnnctcgaccgaaagctcgcgnnngccttcccgcttaccgagccaccgccccttcnnccgcaccggncctcnnnctcactgtnngcgcgnnnccctctcngcgcccggcccccgnnacgacccgacgccgnnntggccgnaggccgnnctcgtcccgcctcnnnctcgccnntcctccccttctccgnagaaccgtngccgctnngggccccggnncccagccggtaccgcgccagcctcctncaccgttnncgtcatccccgcaggtacccttccacgnacnccgccgccggggcttcgcttnnccgcacgcccgcggttgcctcggtgggggtttcttacccgcnnncccgccgnaccgccgnaccgccnnggcgcccgacaaacggcca

SEQ ID NO: 8399 - DNA, 1278 bp, Zea mays
  Clone ID: MRT4577_107658C.1
cctcgctcctggccgggcctactccttccagactagagtactcccggtgccatctcctccatctccctattcctcctcagctcctggaccggccatggccgcaccttccggcacgatgcgcgccgtgcagtacgacagatacggcggaggagcacgggggctcaagcatgtggaggtgccgatcccgtcgccgaagaaaggcgaggtgctcatcaggatggaggccaccagcatcaacgtcgtcgactggaagttccagaacggcttcgcgcggcccttcatgcccaggaggttccctttcatctctggtttcgacctagcaggagaggtcgtagagttgggtgctggagtgagcagcttcaaaccaggggataaggtgatcgccatcaacttcccgaacggcggagggctcgccgagtacgcggtcgcgtcagcgtctcgtacagccgcaaggccgccggaggtgtcggccgtcgaaggtgtctgcgtgccgatcgccgcagtcaccgcgctcgggtcgctgcggacagccggggtcacagtcacactggacgacccggctcgcgcccccgccacgcccaagaacgtgctggtcaccgcggcctccggtgccgtcggccacttcgccgtgcagctcgccaggatgggcggccacaacgtcacggccacctgcggcgcgcgcaacctcggcctggtccggagcctcggcgccgacgaggcgctggactacaagacccccgagggcgccaagctgcggagcccctccggcaggaagtacgacgcggcggtgcactgcgccgcgaaggggctcccgtggtccgtgttcaggcccgtgctcgccgcctcgggcacggtcgtcgacatcacgccagggttcgtggccgtcgtcaccgcgatcctccaggtggcgaccttctccaagaagaggctggtgccgctcatggtgacgcccaagaaggaggagatggagctgctgctgggcatgctgaagcagggtaggctcaagacggtcatagattcccggcacccgctgggcagcgctcacgaaggctgggccaagagcatgagcggccacgccaccggcaaggtcgtcattgagatcggagccgcgcaaccataataatagtgcagcaatatattgattcaaaaaataattatgaattttgtaatttttagatctataatttctatattttttgttcatgaattatgtatttttatttaaaatttatgaatcatgtattttttttatttttatatgaattatgtatttttact

SEQ ID NO: 8400 - DNA, 303 bp, Zea mays
  Clone ID: MRT4577_107659C.1
tttggggtgtttttaaaaacttaccaacattaattttaaaatgaatttatttctctctaccacataatctaaaacatacaaaaaactctgtactgtgccatttgaatctaacctaatagaatccacactatacataatcacgcagacaacttggtttatccttccaaatacaaaaacccgctaaaacataggctacaataacagttaaatctaacatgtcactacgtaataattcttattcaactacaaactacttcaataaaattccctatctttgtcccttcctcttttgaacaacttttc

SEQ ID NO: 8401 - DNA, 665 bp, Zea mays
  unsure (1)..(665): unsure at all n locations
  Clone ID: MRT4577_10765C.1
gcctgcaggtaccggtccggaattaattcccgggtcgacgagctcactagtcggcggccgccctttttttttttttttttttttttttttttgctgggagatatgtcgccttcaatccagcaccaaattaaacttacataattgataatgtaaatgattaactaacgagataaacaaaaggaaaatacaaacttgtgcagctcaggaagaccataagccgatcacaacacatataacagtgtgtgtataagtatttgttcttagttccatctctaacagcatgcatgcaggatagctaaaagatgttccatggcggcagtacagcagattatggattatggtattgcatatgatacacaatccaacgggaaacgggaaaaacacaggaagctatatatttattcttacctaccagggtcagtttggctcatcggagaagcgtggttctaagaactctcttcttgtggtacttggagtggcgtggctcgaagagacaagggtggtggccagcctccttcccgtcccactccagcttcgcccacaaattcttctcgcagtccacgacaggggcgatcacctgnnngcgtcgcggtagcggggaggcgcttaaggctccagcatcctcttaaggtgatggtcctgagctccggagcaaacatcttggc

SEQ ID NO: 8402 - DNA, 724 bp, Zea mays
  Clone ID: MRT4577_107660C.1
tcctggaccggccatggccgcaccttccggcacgatgcgcgccgtgcagtacgacagatacggcggaggagcacgggggctcaagcatgtggagccgccgatcccgtcgccgaagaaaggcgaggtgctcatcaggatggaggccaccagcatcaacgtcgtcgactggaagttccagaacggcttcgcgcggcccttcatgcccaggaggttccctttcatctctggtactgtaacagcacgcagagcagagccatggcgtgctgctggcctcgtccccccactccttccctcttgtttaatcgatggccatttcagttttggcttttgacgtgccgtacgtcccgagtgcgcgtgaggacgggagatttgcacaggcgagtaatcgtgtttgctttctggaggacaggtttcgacctagcaggagaggtcgtagagttgggtgctggagtgagcagcttcaaaccaggggataaggtgatcgccatcaacttcccgaacggcggagggctcgccgagtacgcggtcgcgtcagcgtctcgtacagccgcaaggccgccggaggtgtcggccgtcgaaggtgtctgcgtgccgatcgccgcagtcaccgcgctcgggtcgctgcggacagccggggtcacagtcacactggacgacccggttcgcgcccccgccacgcccaagaacgtgctggtcaccgcggtctccggcgccgtcggccact

SEQ ID NO: 8403 - DNA, 436 bp, Zea mays
  Clone ID: MRT4577_107661C.1
cccgttctatttaaaaggatccattcattcgaaaccaatcggcttccagttcgacttttggaaatcaaatacaagcttttgggaggggtaaaagggcccctttaccaaattcttccaaatttggaatagaactaaaaacccccgggtttcgattatcaaaaaaatctttaaacaccccctttccaaaaaaaatcaataccccaaccactacaggtagattaattaaattgggggcaaaaatatcgggataaagcccaaaacccccagggaagggccagggagcaaaaaaaaaaaaaaaaggggtaacatttttaaaaggcccccctcttatagatgggacgaacaaaaaaaaaagtttttcgataactaacttggctcggcctttttggatcggtttttttaatgcaaaaagatccaaccaaaaaatttctttaaa

SEQ ID NO: 8404 - DNA, 549 bp, Zea mays
  Clone ID: MRT4577_107662C.1
ccggccggaaaaaaaaatctaaacgcagagagcatctgttccgaatgcctcaccacggtcagagagggcggagagaaaagaagtcgtcgccaccgtcaaaagccggagttctcctgggtcgctaggaacctgtacgcgaaggaatcaggcgcggtgaagactttgtacccagggaattgctcaacggagcaggatctccgcccaggtgccgcgattcgccgtgattcgaagcctccgcgccatcagacgagcaagcaaccaaggacccctgtacccagcaggtggaaaatactgagcaggtgctcgttgaaggtgaagagcaggtagtccaagaggaagtctacaacgaggagtacgagcttatctaggtggcatctccgagtcagcttgatggcgccaaggaataattattagttcgctttattgttatcatttatttttgtaagacacttcccctatgtaataatatttgtgacatttatctctatacacttggtcattatatgtgttgttcttctttggcacaaaaaaaaaaaaaaaaaagcggcc

SEQ ID NO: 8405 - DNA, 340 bp, Zea mays
  Clone ID: MRT4577_107663C.1
gggaaagcccccccccaagagctggttacctttccctttggacggggggggcacaacccccaaaaacctccaaaaggggggggcccctaggaccatttttaaaaactggacggggggggggaaaaaaatattgcaacacgttttttaacccccaggggtttttggtttttaaaagacaggggggaacccctttggcaaggagcttgtggggtttctgaaaataaacccctttttaccccggttttttgattttcgggccccaaaaaaaggggggggaaaagcactttttaaccattgccgaggggggggggtttccaaagggccccgcaacacttttttt

SEQ ID NO: 8406 - DNA, 364 bp, Zea mays
  Clone ID: MRT4577_107664C.1
aaattaaggagaaccttatgttttcttttttaatcatactatattttttgcttgggttggaagggggaacaaagacccaaccaaaaaaaaaaacgggggtttttttcttaagaaaacaaaaagtgcggctctttgcacactgaagggggggaaaaaaaaaaaagccattttgaaaaaaaaaaagggcaaaacccaaaaaaattttataaccccccgaaggctgaggcagcccgaagcctaaaaaaagcccggcaaggggatggaaagacgaaagaaacccattattgccgcgcccatcataagggcccctttgacaaggaaaagacagggcaggggtaggaaagggtttttaccacaaaaggcc

SEQ ID NO: 8407 - DNA, 693 bp, Zea mays
  Clone ID: MRT4577_107665C.1
cctcgaggccggccgggccgggaaaaatttcctcccaggctcgacctgtatatgtgtgtgcttctgccgctatcgccctattgcaccgcgcatctctctccgtgctccgcgtattagttcctgctcttcactcctcccgcttccttcaccgacactgcctcaactaagaccggcggcggcctcccgctccctggatctagagcgtgcgctgacgagcgctccttccgacgacaaacagcacctggagggaagttatcctgaaggcgtcttcctcctcgcctcctctcatggcgtgtggcgcatgtcggaatcacttgaaaatctatttgtgaggggattgatttcttcgtttgaggtggctagaggctcctggtatgcctattgccgaattccgcgatacatgcgaacagaatacgctgacgtctgctatgtgcttcttagccatgaccagtgacagcaaacacttgcagacctgtctatgaaatctcgcaatgacagaaagtaccagctgacactggatgcttctccaccagaggatatgtcaccgaagtgtgataatcacattggaccatcgatacaactgatcttgggtgtcgattcaatatgccatctggcatcgattctgagtaacgacgctgctctctatgctgtatcagtagttctaaagcaatagacccttgcatatggaattct

SEQ ID NO: 8408 - DNA, 1191 bp, Zea mays
  Clone ID: MRT4577_107666C.1
ctcgaggccggccgggccggagtatcccaatgctatatgctactcgactacatacctgctgagtacatcagtactcagatagcccgagtcggaccacactgcttgcacagtagaagatgataggcgatgaactggattccgatgtggttgtacgctacttcagaggcaagagcatcctgatcactggatcaacaggtttcctggggaaagtgctcgtggagaagatactgagggttcagccggacgtgaagaagctcttcctcctcgttcgagccgccgatgacgagtctgccaagcagagggtcgagaccgaggtgacaggaaaggagatctttcaggttctgaaagaaaagcacggtaacgggttcgaaggtttcgtccaagaaaaaatctgccctctgccaggagacgtcatgcacgagaacttgggcctaggccctgccaaactgagacaagtgtgcaaggaaatagacatcgttgtaaacggagctgcaactacgaatttctacgaaagatacgatgtggctttcgacacaaatgtcatgggagccaagcacatatgcgagttcgccaagaggtgcagcaaactcaagatgctgctacatgtttcaacagcttatgtagctggtgaacaggaaggggtggtgctggagaagccattccgtttgggcgaaaccctgagggaaggcacgcacctggacatcgagtccgaactaaacctgataaaagagacgaggagagaactgaaggccagccgttgttcagaaaaggctgagaggagaagcatgaaggagcttggcctcaagagggcaagggagttcgggtggcccaacacctatgtgttcaccaaggcaatgggggagatgctgctgggcgcccacctccggggagacgtgccggtcgtcatcgtccggcctagtatcataaccagcatcctcaaggagccattgcctggatggatggaagggatcaggacgattgactcgttcatcatcggctacgccaagcaggctctgtccatcttcttagttgacctcgacctgatcatggacgtgattcccggggacatggtggtgaacgccatgatggtggccatggcggcgcactcggaggagcgggggcagcagactagcatctaccacctgacgtcgtcggtgcggcacccggcgccctacgccgtcctcgcggagt

SEQ ID NO: 8409 - DNA, 1464 bp, Zea mays
  Clone ID: MRT4577_107667C.1
cattgggtacctcgaggccggccgggacgcacatccaactcctctccacctcctcgccccgccccgtcggttcgattcggtcgaagcgggcgggcgggcgggcaggctagggatccggatgggcgcggcggcgaggaggctctaggggcgccagccgaggtggtggtccgtggggactgggaggggagggcggcgatggaggagaaggcgtcgtcgccgctggttccgccgccgtcggagatcgacctcgaggcgggcggcggcggggagcagctccagtgccggatctgcctcgagaccggacgggagggacttcatcgcgccctgcaagtgcaaggggacgtccaagtacgtgcaccgcgactgcctcgaccactggagggcggtgaaggagggttttgcattttcccattgtactacctgcaaggctccatattatttgagggttcattcccacactgacaggaaatggcgaacactgaagtttcgtttctttgttactagagatatattattcatctttgctctagtccagattatcatctctgcattggcatacttggtacattttcttgatgggtaccagcaatattggttgaggacagcctggggttttgataatgaagttagtttttattatatctgtggtgcattattattttttgctttattgggactatcgggatgcttcataacctgttatgaccgaagagtacggaacgacctggctcagccttgtcgagaattatgtctttgttgctgtcagccagggatgtgtgcggattgccacctacctggcacgctgtgcatgtggactgactgcactacctgcttcgaaggctgtgctaccacagccggcgagtgcggtggttgcttgggaggggctggggaagccgggctaccgcttctcctcatcatgggggtcattgtgctggggcttttcacggtcatcggcatattctacagtgtcctggtcgcgaccatggttggccagcggatctggcagcgccactaccacattcttgccaaacggttgctaaccaaggagtatgttgtagaggacgtcgatggcgagcgcacagactggtgtccgccgccactgcccgcggagcacatcagccagctgaagtctctggggcttctgtaatatggaggctggtgaccctaagctaagaccggcgtggcgttacccagctccagctgtacaggagggaggctatactgtcaggcattctgcgttgaaatgtgtcaatattgatactttttctctttttttttcccttcttttttgtacattgtaatggcaaagctttctccctgacaaaacccaaaacttatatcaagtgaaaccgcctacatttttactggacaattcctttttaggccttgttcggctattcccattatacatgaattgtatgatattggaaacaatttagaagaattttgacttgcttgagattt

SEQ ID NO: 8410 - DNA, 161 bp, Zea mays
  Clone ID: MRT4577_107668C.1
gacacacgtccggatgaggtcatattcgaggaggaggaacatgattgacagacaacgagggcgcgcctcgaggacccgttaccgatcactagcagcatgcacagtgtcatggaatcctcattgacttaccgacagatccatatacatctagtactggttga

SEQ ID NO: 8411 - DNA, 822 bp, Zea mays
  unsure (1)..(822): unsure at all n locations
  Clone ID: MRT4577_107669C.1
ccggccgggaacaccactcctctccacctcctcgtcccgtccccgtcgattcgattcggtcgaagcgggcgggcggaggaggaggaggaggctagggattccggatgggcgcggcgccgaggaggctctagaggcgccagccgagttggtggtccggggggagagggagcggcgggagggcgggcggcgatggaggagaaggcgtcgtcgccgctgatcccgccgccgtcggagatcgacctggaggcgggcggcggcggagagcagctccagtgccggatctgcctcgagaccgacgggagggacttcatcgctccctgcaagtgcaaggggacgtccaagtacgtgcaccgcgactgcctcgaccactggagggcggtaaaggagggatttgcattttctcattgtactacctgcaaggctccatattacttgagggttcattcgcacactgacaggaaatggcgaacactgaagtttcgtttctttgttactagagatatattattcatctttgctctagtccagattatcatctctgcattggcatatttggtacattttattgatgggtgccaacaatattggttgaggacagcctgggcttttgataatgaagttagtttttattatatnctgtggtgcattaatgttttttgctttgttgggactatcgggatgcttcataacctgttatgaccgaagagtacggaacgacctggctcagccttgtcgagaattatgtctttgttgctgtcaccagggatgtgtgcggattgcacctacctggcacgctgtgcatgtggactgactgcactacct

SEQ ID NO: 8412 - DNA, 1548 bp, Zea mays
  Clone ID: MRT4577_10766C.1
atgggccggatcgcacgtgggcctccgagcaggacgaggccgcacgctacaagtgatgaactgcttgggccgtactccaaagcggaagataatgcgttatctgcggccttcaggagccggaaaaagaagaggctaaatagagtttttgatgctattggatttatgtatcctgactaccgttacccgccaagggggcagaagagaaagagtgcaacttccgggaaggatgctgcttcagctgctccaagcgagcccgcgccgaagaggaaaaagacctcttcggctactaaagccaaagaacctgcgcttacacaaaggattgaagagccgactgcaaagccgaaggtatccttggtcaaattagctgagccgaaggccaataaaattgaagagatagtggtcgaaggaacaaagatattagaggttacaagtccttcggcagaagtgacagtgccgaaggcacaaaaaggtcttacagcgacccctaagaggaaaagaatgatcaacgtactagatgcgctggagacaataaagacaagctctactccaaggaaaactgccgaagctccaaagacgcagtctgagacaagactaaccgaagccgaagctgcaaagagcaaggtcgagaccgaagatgggccttcagagcccgccaaggagaaatccttggaaatcggagaaaaagaaacggaaaaagaagctacagaacaaattttgcctgaaaaaattgccactcctactcccgaagcatcttccgaaggcctcattcttagcaacgccctcagggcgcaaaaaagtgccgaatatgaaggatgcactatagctttgaacaaccttcgttccgaactggctgaagcaaaattaaaatgtgctattgccaaagctgaccgagacgccagtgattactggaaaaattattgggaaaaaacagttgtagaacttcgctcttcaaaagaaagatgttatgaaaaatccatagaatgtgtgggaaaaataaaaactagattcgccaatgttggcgcatattcaagtgaagataacttcgtaagagacgaccctgagggcccaattgaatggatcagcagcgaaggcgaagcttttgaggaagttttgagtggctgtggggacgtctgcgccttctcaggtgcgaggggaattgcgactatcttggagaaatcaggttgcgatcatgtgaaagctttgacccaatccgaagctactttatctattgatgatacgaaggacccctcggccgaagcaagcttagttggcagaaaattctttactgacatatgggaaaatggcggccgagggatggctcacgagataataaagaagagcaaaaaagatactcacgatgctagggaagcaacgaaggcagctgaaaaagctgcagaactcgaaagactgatagccgaactatctcctcccccggagcccttcgagccactggccgaagcagaggcaaaagaatcatcagaaattattagcatggctgaaaccattatggatgaagctgcaaacaaagttttgagagaagaagaatag

SEQ ID NO: 8413 - DNA, 390 bp, Zea mays
  Clone ID: MRT4577_107670C.1
gggttggggggaacaaccccataacaatgtgttggataacagtttcacagcaacctaaacaaggtcacattagttatatactactggtacatagcatccattaacaaaacaggggtccaacacctagagtgctaattgctaaacaaaacaggttcaccaccatccatctccattagccggcaatgtaccagtgtagaagacgtgcaaaagaatgaaccatcacagacgccatccattttcgatcagtagagtacttgaatgagcccctccttttggaaccatgtaaaagaccatgctggcatcttgtcggggggatcgcttgaccctttccgttgttgacctaaaaaacaaaatttttacaacagttaacaattgggcgtatacctgatt

SEQ ID NO: 8414 - DNA, 536 bp, Zea mays
  unsure (1)..(536): unsure at all n locations
  Clone ID: MRT4577_107671C.1
ttaattcggcacgaggctccggccactgcgcgactccacgacgtcgtggtgctggcaagcgtgtcaggcctccgctcgcttgcgacatgaggcatgcagagtttggcaggtttgcaaatagtggagattgatggatgtgtaatcctccgtgttggcaataaattacccatcatcaccatgttgcgtgagaaagaatggttgaatacaaatcacgatgacatatcaaaaaggatcagtgcatcatgaatcttacagttcaatcttctgctccgcttttgtgatttggaaaaaccaaaataattgtattgctcttcctttcctccaacagtaaatctctctgttctcgctgagcagtgctgataacgtgttatagtatactcagtggtaacgagtcatgaaaatgtagagagaaagtgacagttgtattgatctcanaaaaaaaaaaaaaaaaaaaaaaaaaaaaaaaaaaaaaanaaaaaaaaaaaaaaaaaaaaaaaaaaaaaaaaaaaactcgagactagttctctcgaactagt

SEQ ID NO: 8415 - DNA, 620 bp, Zea mays
  Clone ID: MRT4577_107672C.1
aaccaaaatataagatttgctcccaaatactaaaaaataagatacattgggtttgtaaccggttaggagctcgtatgttgccttcttgaggaggcagtgaagatacatgtggtttatggcgtggcaagccgtgttcacggcttctaaccaaaaccgctctagcgtcttgtactctccaagcattgttctcgccatgtcaatgagcgtcctgttattcctctccgctacattgttttgttgtggagtgtaggggtggagaaaacatgcttgattccttcctccttaaggaattcctccatttgaaggttcttgaattcagatctgttatctctccttatcttcttgattcctagctcgaactcattttgagccctccttaggaagtgcttgatagtcccttgggtttcagatttatcctgcaaaaagaaaacccaagtgaagagggtataatcatcaaatataaaaagaccatacttacttccctcgatgctaagataagcaaagggtccaaagagatccatgtgaagcaactccagtggtcttgatgtcgtcattacattcttgctaggatgacttgttcccacctgcttccctgcttgacatgttgcacaaggtctgtc

SEQ ID NO: 8416 - DNA, 153 bp, Zea mays
  Clone ID: MRT4577_107673C.1
acgtaagctcggaattcggctcgagacggtttaagaagccatttgtactatggatgcttttcaacaccaccaagcggggtttttctactgccttcgccgccatagatggccctatccatatcgatgctaggtggggttgaaaagaatcaaaaa

SEQ ID NO: 8417 - DNA, 104 bp, Zea mays
  Clone ID: MRT4577_107674C.1
gcgataacacagcgggcaacatacgtatggcaacgagcggtggttctcacgagctaagcggctgagcgggaagatggtggaacaaggtgaacgccctgaaagaa

SEQ ID NO: 8418 - DNA, 170 bp, Zea mays
  Clone ID: MRT4577_107675C.1
gcaaggggtaggagttgtagaagtaatgggactgaaaaaaacgaattcattcgcctccctgcgctccatatgcagtcgtcgtcgtatctgtggaataagtagatagcagctccggaggcgagtgactgactggcgcaactgtgttgctcgatccatacgaagcagacgca

SEQ ID NO: 8419 - DNA, 183 bp, Zea mays
  Clone ID: MRT4577_107676C.1
actagactctcgaagagacagagcatacgggttaatcatgctaacgagaagaccggtggcttcagagagcatagagagctatggtggcgacgactatggcggtggtggaagctatggtggcgctgaggaaagcagcagatacagtggcggccactatggaagaggtggtggcagcgtttgata

SEQ ID NO: 8420 - DNA, 257 bp, Zea mays
  Clone ID: MRT4577_107677C.1
cccacgcgtccgcggactcgtgggctgactgtgtgaaaaaaaaaattaaataaggaaggtctaatttaaaaaattgaagtgatatataaaaaaatataaaataacattatacaaaaaaatagtgcactccattttaatattccaagctatcgtcccctagcttactacacataacatcatctattttttaacctaattttatttacttggctcattattcataacattatgatttgcaaaaatcattatttacctaa

SEQ ID NO: 8421 - DNA, 204 bp, Zea mays
  Clone ID: MRT4577_107678C.1
ctctttgtgttaaccatacgattacatgtacataaatcttgtcccaatcactcatgttagacattcatattgcaccatacagttgcgcgatcgataaccctggccattgttccctctcaggcatttgaacttatatagaaacatctgaggatctaccaaaaaatacctattatacactcagatataaagcggctgttaccttac

SEQ ID NO: 8422 - DNA, 227 bp, Zea mays
  Clone ID: MRT4577_107679C.1
ccgaccaggtacttatcggctattggcctgtacttcagccttgaaccgaggacagcgcgcccaccgtccgatgtgttctgaatctcccaaacatccctactcgctgacggcgcctcgagaggcgacaggccgcacgacgctctaagctttcaacctgccagtcgtcccttaccagagaacttggccccggcccgtcactcctgacgcctctacagactacaattgcg

SEQ ID NO: 8423 - DNA, 477 bp, Zea mays
  Clone ID: MRT4577_10767C.1
ggggggattggcgggataaaaggggaaaacgggaagcccaaaaaaaaaaattcaaagaagggcgggggggacacgaataaaacgttaaaaaaaaaaccgggaaaaaaatccttccaaaccccccaaaaaaaaaaaaaaaaaacttgcaaaacccaacaaaggggggccttatttcaaaggggaaaagcagggcaaaggcaaaaaaaacaaagcgaccgaaaaaaaacaggagcatgcttaacttgggccaccaggaaaggaaaaccctacccccggggaactttttttggagctaaaaaacccccaacaaaaaggcccaaaaaaggggggggcacccagggacctaaatgtccacagggacaatacgggcacatccacctacaaaaaaagaggagaaaggggaggatccaccaccgggggcacagctgcccattgaaaaacccacctagggccaggcatttgggaaaaaaccttggg

SEQ ID NO: 8424 - DNA, 574 bp, Zea mays
  Clone ID: MRT4577_107680C.1
gtaccggcgcccctttgcgagttttttttttttttttttttttttttttttttttttttttttttttttttttttcaagaaaattaccccaccaaaagtaccaacccgaagggagggttttataaaccagggaaaccccaaccttaaacagcaccaatcgaggaaagggcccacaaggggggattcctagggaaaaagaaaaccagggcaacaccccaaaggggaacataaaacctaaggggggcccctgcacccaccaggtttaaaattaaaaacccttccttaaaagccaataagggggttcctcctggccctaaaactgggcctcctaatggtaaaaagaagcccaatccgggaccggggggacccccaaaacaaggtctttaatattgctctggccctggggaaaccccatttggcccatcccctcccccgggacccagggaaaaaaacccttccccctaaacagggaagaaaacggttccctaaccctcggaaacatctccggaaggaaatttaatttcccaacaaaggggacccccatgaacagccccctggggggaatgccccaccc

SEQ ID NO: 8425 - DNA, 277 bp, Zea mays
  Clone ID: MRT4577_107681C.1
ttaataaccggttcgacccacacttccgcaaagagactctcctgatgcttgccttttctcttttataagaactaccatcttttctggggctgctttatttgatacgggaggaggccttcctactatatcctcttctcataccccaacttctgaacttaaacaatattttcccgattaataaaacttttttttacttttaaataatattattttaactacctaaataatatgtattatctatattccatatacatattcttactaactattatttatt

SEQ ID NO: 8426 - DNA, 328 bp, Zea mays
  Clone ID: MRT4577_107682C.1
tggcttggaaccgttgggctgatttatgtgcttgagattctagttagctgactgcctaagaaaaacattagtccattaataatagtaggagtaagtttatttgcctgatgatacggtttgttcgggtgttggtgttgcgccggtgtcttcagcggtggctgtggtggcggttgtgccttctgtggcgttggttcgggtgaagcttgaggagtcgagtgtgacggtgccgtcggtggtgaacggtggtagtcgtgtgggtttgtataagcgtctgggtgtggcgggtcagcgtcatgcggatgatgtggaggagtctggatcgagtggt

SEQ ID NO: 8427 - DNA, 288 bp, Zea mays
  Clone ID: MRT4577_107683C.1
actcatccgaaggattatactgctccgctctcctttactcccatttttcatccttgtcgacctgttccattttaagccttcttagaatattctccactctcactccttcctacttaatctcttatcctttaacctcaaactctccattaactattagctccacgtttttttccatctatctttatctattttatattaccacacttctacgatttctactctctacattctctatcaactatcaatattatttatcttacttttactaattatatcttttcaatttca

SEQ ID NO: 8428 - DNA, 226 bp, Zea mays
  unsure (1)..(226): unsure at all n locations
  Clone ID: MRT4577_107684C.1
cagctccccacccacccattcaccccaaatccccacgggggctcgccggggccagggacggcgccgacctgaggctctacctcccggaggacgtgctggcgctcatctcggagcacctgcgaccccgcgacctgctcgagctgtccgccgcggnccgtcgtctccgtcgggcgctgtcggacgacaaggttgtgggggggggggggcggacgcctgntgccctggc

SEQ ID NO: 8429 - DNA, 347 bp, Zea mays
  Clone ID: MRT4577_107685C.1
ccgcggacgcgtgtgaaaaaagaaaaaaaacaacaataaaaaaaatatataaattataaaaagcttaaaaaaataatcagggagggggattttataaaacaaaagattaaaacaatgcctctcttgtatgattaccttttatttaactatccttgcgcttttttaatatgttctatatggaaaaacccttccttatgccagctttactataataatgattccattgttggtaaatacgaagatttattagattctttgacatgcaacgattacctattataatgatcagttattataatagggatttgcaatcttgttcatttttagactcttttctcatttttttt

SEQ ID NO: 8430 - DNA, 656 bp, Zea mays
  Clone ID: MRT4577_107686C.1
aattcggcacgagggtccggcgcccccctatttcctctcgcagcctcttctccccaaaccctaatcttgctcctgcctatctctgctccaatccgtcggtggagcggcggcgatggaggggaaggaggaaggtcggatcttcgtgggcggcctgtcgtggcaaacggacgagcgcaagcttcaggacgcctttggtcgcttcggcaaggtcgtcgatgttcaggtacccgttcctccccgtccgtctccgttagtgctcatgcccgcccccgggtaattttgctagatctatcagtttcatgttgcccgcggcgcaaaattgttgggtacttgggtatgatggttggcgtgcggtgggtgaggtggaaagacggatctgtagattccttatgtttacagtcgaacggggatgtttgttttgcatatgaagaggattgcgatttctgttcacctttattccttccgttgttcagaaagaggcgtaacttggtgagagaaaaatacttttcttctttaggttctgtttggttacagtccctgtatttgtctctagattgccgtgggatctcccgtgggactgaaggaaggactaaactgcttcactctaaaccatattgattccaccggttgcccccttttttttttctgttgctgcg

SEQ ID NO: 8431 - DNA, 720 bp, Zea mays
  unsure (1)..(720): unsure at all n locations
  Clone ID: MRT4577_107687C.1
cagnagcgaaccgagcacctgaatctgaaggagagtgagctgtccaaagcctcctccacaatggcgcaccacctcgcgctgctcctgctcctgctggcctcgccggcggcgacgcgtctagcatccgccgcctgcgggagcgagaagttcccagcggggcgcgcgtacgcgtcgtgcgaggacctgccgaagctgggcgcgtcaatccactggacgtacgacgcgtccaagagctccctgtccgtggcgttcgtcgcggcccccgcggcggccggcgggtgggtggcgtggggcctgaacccgacgggggaaggcatggcggggacgcaggcgctggtggcgctggcggggtccgggtcggcggcgcccaccgtgcgcacgtacaacatcacggggtacgtcccgctgggcaaggcctcgacgccgctcgacttcccggccaccgacctcgccgcggacgccgcagccgggggaaagatccgggtgtacggcacgctgcagctgcgcgaggggatgagggccgtgaaccaggtgtggcaggtcggcgcgtcatccaccgccggcgcccccgacaagcacgcgttccagccggacaacctcggcgccaagagcaagctcgtcctcgccggcaagtcccccgcggcggcgtccccgtcgcccgcccccgcgcctcatgcgtccggcggcggcgcggcgtcgtccaagtcccccaacgccgcc

SEQ ID NO: 8432 - DNA, 270 bp, Zea mays
  Clone ID: MRT4577_107688C.1
gcgcggcggaatccggcgcccactcgtacctaaggggttcgtctttggtggcctctgtaatcgcgggttatctcaaaggtctgaacggatgatggtgcctgacagacccggtgggccctctgtaaaatcgaatgtgacatggggtcactatgcttggattccttctgtcttattgtttctctaatacattttgaaagctacgttggtcttttgggcaggggcatggttgctttatacatattggctgactgtggatggctggcaacgcct

SEQ ID NO: 8433 - DNA, 606 bp, Zea mays
  unsure (1)..(606): unsure at all n locations
  Clone ID: MRT4577_107689C.1
cttcacgactggaagaatggcctgatcgactactgtcccgccattctgtagagggaagcatagattgaacaagcagccagaattaaacagcatgatgctcgtttccctgcatcattgttacctgtctcctggcataatactatgtgaaaatgaacatgatttgtttttgagtcttttgaaattaaatatccttttgtaaggactcgatttggttggaaacaattttcacctatgaactgagatttggaagcccagctcttgtgatcatgcggctgctgagaaaactagagtaggtcgagaaggattgattatagattgtttagaaggtattgccgtctaaggaacgaagagtttggccagaagcaacatgctctgagacagctataaacatctggattgtaatgactactattcttccagacttcatagacattttcataggaattactctttccattccagaaaacaggacgtataaatttttcacgaatattagtgcaggtatcgatgctcagtgataaaataatgtataagttttgtgcaaatttttctcgatcaaaatannnnnnnnnnnnnnnnnnnnnnnnnnnnnnnnnnnnnnnnnnn

SEQ ID NO: 8434 - DNA, 199 bp, Zea mays
  Clone ID: MRT4577_10768C.1
ccttcttttttttttggggattttccataaccaataggcgtaaaaaccccagcacactggactagcactccaaagcaggcctactgcccgactcgctgccctagtagacctcgagttaaagaaaaagccacatggtcacaacccaccacgtgatgttatcccacaggaaaactcgggtctttacccaaaaaaccctggc

SEQ ID NO: 8435 - DNA, 323 bp, Zea mays
  unsure (1)..(323): unsure at all n locations
  Clone ID: MRT4577_107690C.1
ccggaacgcccgggacgacccacgcgaccgtanattaccaaccacaaagaaaaaacgncctgggagggtagaaagaggaaaagcaccccgcccaccaaacagaagaagcaggaagagcggaggcacaccgacgcgaccgcagaacgcaacaacaacgccgagaaagaaccgaaaggcgggacagatggaagacacgagcagaacctgaaagggccaacagcagaaacaccagaggtggcgcacgaccgaagaccaacggaggggcaccagatacaggaaccaccggcagccgaaccgccgcgcgggacaaagaacaaaagaca

SEQ ID NO: 8436 - DNA, 302 bp, Zea mays
  Clone ID: MRT4577_107691C.1
ccgagctgcttatctgagtcaaatgaaaataagcggggccgctgaacatgcaggttcaaataagattcagcgaatcacagggcacctgatgcctgcatttcatactgacaaactacaccagtccgacgctatgtctgtacatacagatcatgcagtcgatcgtacagcgttacaacttccaaggtcatccattttgtgagcaccgtccataaccataataaagaaagaaaagaatgtagactgtacattaggcacaagagggccagtgcgccatagagcaacgacggttggggagcctgcag

SEQ ID NO: 8437 - DNA, 331 bp, Zea mays
  Clone ID: MRT4577_107692C.1
gcgagggggctcttgtcgagcatgtcctcccgccgccaccgcgccaccaccgaatccaccacgccgccgccgcggcggacgcgggcgcccgtgccgccatctgcggtggaagcgccgttgtagggggcgtagtccggcttctcggcgtgcttcggcttctctgcggcggtggcggtgacggagtcggcgtcgacggtggcggtggcggcgtcggcggtggcggtggcggtggcggtggcggcgtcggcggtggcagtggcggtggcggcgtcggcgtcagtcatgaccatcgccatcgcttagcggcgcaaagcgtcgaggtggtggatga

SEQ ID NO: 8438 - DNA, 1607 bp, Zea mays
  Clone ID: MRT4577_107693C.1
cctcgaggccggccgggggtctcttcccttcgtcatcttcagatcggagctagcaccggcgacctcgtaacgaactcagcgcgccaaggaaatctcgcgtggtcgttacgtgccgagctcgcctcctcgcgcctatataacctggccatctgttcctcctccttgtctcatgaggtcgcgatcgaagccaccatctaccgggagcagagggtgtcgccgccgatgaacttgcgatgggccaacgcagggaccccggcgtgctgctcggggggttttccggttccgagggtcgagaagggtgtcttcatgaagccgatgcagtggagcgccctgtggtggcttgattcctcaccggacttggtgtccgccgcggaaccgcgctccgccccagtaaggttgtaggtttgcattcaacgattctgtgggttgaagcagctaagcaacttcttctgctggatccaccacacagtcgtcgaaagaaaggagcagaaacgagaaaacgctgaccatcgtttcttgcagaggaagcagttcgccttgccttcaatctgactacatatcctatagatctatatataaatacgaatggtctagcaagcaggaagccacgcccaaaccgcagaagaaacatgtctccgcccgtcaagatcctcggccactacgcgagcccgtactcgcaccgcgtcgaggccgctctgcagctcaagggcgtgccgtacgagctggtccaggaagacctgggcaacaagagcgagctgctgctcgccaagaaccctgtccacaagaaggtgcccgtgctcctccatggcgacagggccgtctgcgagtccctcctcatcgtcgagtacgtcgacgaggccttcgacgggccgtccatcctgccggccgacccccacgaccgtgccgtcgcccgtttctgggcgaacttcttggacaccaaagtacgtacgctgctgctgctggccacaggcccctcacccgttcttgtgacttcctgaacgttgtttcgcttggacgcacgtacgcagttctcccagccgttctggctggcgtactgggcggagggcgaggcgcagaaggccgtggtgaaggaggccaaggagaacctggcgctcctggaggcgcagctcggcgggaagagcttcttcggcggcgacacgcccgggtacctcgacatagccgcgtgcacgttgggtccttggatcggcgtgctcgaggaggtgactggagtggccttgctggacgccgacgagttccccgctctatgccagtgggccagggactacagctccagtgaagcgctcaggccatgcctgccggacagggaccgactcgttgcctacttcaccgagaacaaggagaagtacaagacatttgccaaggcaacgttgcatcagtagctgctagttgggtgcaaaccgcttgtttatctctgtgtggaataatgtatacgtacgtgctccctcgatatcaaataaatcagctaccggagttgactgtagtcaaattgctaaaaaaaaaaaggtttaaaagaaaagcattgatatttatggcaccagaataaaaaaaaaaaaaaaaaactcgagactagttctcctcgtgccact

SEQ ID NO: 8439 - DNA, 382 bp, Zea mays
  Clone ID: MRT4577_107694C.1
gacaagcctcagcctagccaacgatgcacgaacaagacgcagtatggctagagagtcgggtgatgtatccaccgatttttaggagtgcgctcaggttacgctaattgacgcacatggggtttctcgctaggagcgaactagacgaagctcctaaagatacagatcctcgggacaggagtcagtatagtggtgctatagtattggcttaggtaggcttattcggtctgagccccttgtgggtgctgctcaagcagctcacgacgcgtgatgctcaaagacataggtagaacgagtaccatgtgcggcgtccacatcaaggactactggtacgtcatgttcggatctaaaggaaagatgatcaacgttactcaaacagtgggga

SEQ ID NO: 8440 - DNA, 483 bp, Zea mays
  Clone ID: MRT4577_107695C.1
cccactgcctctttcggagatctcgccgcctccgccgtcgacttccgtcgcccccctatcccgcgtacggacttacccgatggcacggctgtactgccttagacgccgtcataacagagggatactctaatacaagctactaacgaaggatataaaacgaagaaatataccttaattactgaaggggaggtgttggaggaagaagagaaaaaggaggaagagaacctatcggatggacaataggagaatgaaaaatctatgataatggaatatatgatagaacagaccgccctcatatgcagatgaccttttattttactaagtgaagctgaactgtggccatagatcgtgaatgccgatcgagtactaactgtcttacgcttggtaagacagcccaactgttggaagaatgctcacgttgtactgatcgtaaaaaatctaatgctaaactgtatgaatgaataacatcagttataaggcacc

SEQ ID NO: 8441 - DNA, 421 bp, Zea mays
  Clone ID: MRT4577_107696C.1
ggctgaccccaccaacagcaagcgaaaatctcccgataccctctagtcttcgtggaaaagatgtcggctcgcgccaaaggcggtaagggcctgggcaagggcggatcgtaacgccaccgaaaggtgctccgcgacaacattcatgggatcacaaagcctgctatccgtgcgctagcgcacaggggcggcatgaagcgcatctgcggtctcatctactaggagacccgcagcgttctcaagatctatctgagagaacgtgatccgcgacacctgaacctacaccgagcacgcgcgccgtaagaccgtcacagccatggacgttgtctacgcactcaagcgccagggccgtacactctactgtttcagccgttaagataagccagtcacgcctccgtgtcatcactgcggttctattgttttt

SEQ ID NO: 8442 - DNA, 302 bp, Zea mays
  Clone ID: MRT4577_107697C.1
agttttatatactacatagcgcacaagaatcttatcgacaccatgagcgtgcttctcgcggccctggctctcctgactgtcgctgagagccccacctccacgcatacaagcagagcctgcggattgcaaccaccgccgccggatcatataccgtcgccggtgcatatatcacctccggttcacctgccaccttcggtgcatatcccaccaccgatccacctgccgacatcggtccacctgccaacgacgattcatgtgcccccgtcggttcatctgacaacgccaccatgccactaccttac

SEQ ID NO: 8443 - DNA, 362 bp, Zea mays
  Clone ID: MRT4577_107698C.1
gcgttcttctcctccgtcccaaccatgagggagatcctgcacatccagggcggacagtgcggtaaccagatcggtgccaagttctgggaggtgatctgtgacgagcacgtggatagccacacgggcaagtacgccggcgaatgcgacctccagctcgagcgcatgaacgtttactacaatgaggccagtgggtgccggttcgttccgcgcgctgtgctcatggaccttgagcccggtaccatggactccgtgcgctgcggcccatacggccagatctttcggccagacaactttgtgttatgccagtccggcgccggcaacaactgggccaagggccactacaccgagggcgccgagcttat

SEQ ID NO: 8444 - DNA, 381 bp, Zea mays
  Clone ID: MRT4577_107699C.1
acccacgcgtcaacgggcccctgtgggaagcagcaccatggccctctcctccacggccttcgccggcaaggccgtgaacgtgccgtcgtcgtccgccttcggcgaggcccgcgtgacgaggcgcaagacggcggcgaaagcctaatcaggagcagtgtccggaatcccatagtatcgacacgggcgcctgctgtacctgaggtcactgtctgagctagtcgctttggcgacgcagtcgggctacttcacaggcgactcctattgggacacaaacgggctgatcgctgtgatctgggaggtcaccactcagcgggagcaggaggttatccattcccgctgggccatgctgggcgcgctcggctgcctcttcccggaactgct

SEQ ID NO: 8445 - DNA, 1695 bp, Zea mays
  Clone ID: MRT4577_10769C.1
atgtctcaagacaagaaaacagttgctgaagcgaagctgaccgaagaggagaagcttcttaaggaaaaaactgttggattcatcgagtcaattgcaaagaccaacacagaaaagattacaaaagaaattctagaaggcttatctgaagataccgatgacagcgatagtaacgatgtggaaagtgggggtgaagactccgaagatcagccctggcgaccaagctcaagctgcccagtaccaacttttcggaaaaggtggtctggagactggatgaaagaatggttctatgtgaaaaatgatttaaaggcaagagaggatattaaagagatcatcatgcgccccatctggtcccggtttggccttcggaaaccgaagaaaagaaagagtgcaacttccgggaaggatgttgcttcagctgctccaagcgagcccgcgccgaagaggaaaaaggtgaaggttcttactcaccgatcgtgctatatcgaaccggccgtagtgcctgaatttggcggtgagacctcttcggctactgaagccaaagaacctacgcttacgcagaggactgaagagccggctgcaaagccgaagacatcctcagtcaaattagctgagccaaaggctgataatattgaagagataggggtcgaaggaacaaagatattagaagttacaagcccttcggcagaagtgacagtgccgaaggcacaaaaaggtcttacaacgacccctaagaggaaaagaatggtcaacgtactagatgcgctggagacaataaagacaagctctactccaaggaaaattgctgaagctccaaagacgcagactgagacaaaactaaccgaagccgaagctgcaaagagccagatcgagaccgaagctgggccttcagagcctgccaaggagaaatccttggaaactggagaaaaagaaacggaaaaagaaactgcagaacaaattttgcctgaaaaaattgtcactcctactccggaagcatcttctgaagtacctgattatattgtacgatatgcttcaggaaagagggtatctgaagaagaaaagcgagaagctcaatactatgcccagaaactgaaatatccaaagggggcattgatattcaacgacagcggagaagaagatttattgtattgtctcccagacagcaaggagatttctgtctgcggggagataagcagaagcttcggattcccgatactagaagacgggctttcggtgcaatcaaaagatgaattggccgacaacttagcatataatagtttgaagggcctcattcttagcaacgcccttagggcgcagaaaagtgccaaagacgaaggatgcactatagctttgaacaaccttcgttccgaagtaattgaactaaggaacgaaggtcttgaaaaagataagatattaaactcactggtgaacaaaataaaagaagacgaagctacttccaaagcccaagctgaagcccagaaatgcgaaattgaggatcttcggaaacagttggctgaagcaaaattaaaatgtgctattgccgaagctgaccgagacgccagtgattactggaaaaactattgggagaaaacagttgtagaacttcgctctttgaaagaaagatgttatgaaaaatccatagaatgtgtgggaaaaataaaaactgttgggggcttgttctcaaatgctatgagttaa

SEQ ID NO: 8446 - DNA, 493 bp, Zea mays
  Clone ID: MRT4577_1076C.1
tgtaaaaaattgagagcacgcaagatcccattcacaatcaggcgatatttaccagatggaagctacgaggactggagtgttgacgagcttatcgtggaggactcctggaaacgtcaagttggtggtgaatagcgctatggtgctcaggtccaagtcctatgtttacatgcaaatcttctactgggcggtgaaaattacaactagcggcttgcgcacaatagtggctgcagtggtgaactattctgcgtaatgcttgtgtgaccttgctcttgtactttcgattttggaatgatgcagccgtactgtatctccgtcatgtctgacatagcaaggttcatgagcttgttttgatcctatcaattggggctggaagcaataattggaaactgattccacctaattccgagcctgttcgtttgttttataatctgtattttttctgctagctaatagtgtttttctttcacgataaatcagcgaacatttttagacc

SEQ ID NO: 8447 - DNA, 284 bp, Zea mays
  Clone ID: MRT4577_107700C.1
agttggagctccagcctgacatcaaaaaagtcagttaccattaaaccatctccctggtgcttatgctcttatatgccacctctaacagcaccaaatcaaaatctctccactttcagctgtcttttggaggacgtacgtaataaggttttaatttagtaaaccaatcctatgcatggttcagcactagccacaacttcaccaactcctagttctagaaaaacaggcacttggcagccttgtgatgtcatacagagaagtcacagggcagtacctgagggtctgta

SEQ ID NO: 8448 - DNA, 322 bp, Zea mays
  Clone ID: MRT4577_107701C.1
tgcattctttggctcacattcacagccacatgggctatcttaggaccaaactgagtgccgaatggtgcatgtgaatggctcgtcagacgcaccatcacagcacacggtatgtgcgctcaaatgacgtacccctggaactccctcttgctgaagcgtggaacactctgctaatgaatattgttgctttaaaaggatctgaaccttgaggaatggaacgaacaatgctaagtctagcgtttctcactattgtgcaagcacttatggtgaatggacttatgatttgcaggtttctcaaaattgttaaagcactgttactgaaaat

SEQ ID NO: 8449 - DNA, 687 bp, Zea mays
  Clone ID: MRT4577_107702C.1
cattgggtacctcgggcccggccggggacaaccacagcgagaacttgtagattcagtctccggccacaagcggttaaatcgattgaactcctgttcctttccaccgaaaccaccaatttaccatcacaatgaagcacctcgctgcatacctcctcctcggccttggtggtaacacctcgccttccgccgaagatgtcaagtccgtcctcagcgccgttggtattgaggccgatgacgagcgcctcaacaagctgatctccgagcttgagggcaaggacatcaacgagctcatcgcctctggatccgagaagctcgcttccgttccctctggtggctccggtggtggcgctgctgccgctgctggtggtgctgccgctggcggtgccgctgccgccgaggaggctcccgccgccaaggaggaggagaaggaggagtctgacgaggacatgggtttcggtctcttcgactaagcgtgtcgccaatccatctctgtttacgatgtatgatctggccaatttctcaaaaatcacgagaatcatgcgcaacgagtccgagcatttggggcgtgtcgagcgcgcgatggatgggatatggagaaagattgtgcggcaatgctttcatagctgcctgctgagatacccacaatgaagccatgcacccccaaaaaaaaaaaaaaaaaagcgccta

SEQ ID NO: 8450 - DNA, 887 bp, Zea mays
  Clone ID: MRT4577_107703C.1
aagtttaatgacctacgtcagtttctgcgtactaaaaactattcgctagttgagtcgttgcggcatattcaaaattattagctacagttgttcctgcatgcgccagattctcatgtgagatgataaaaacgtcataattatttgctaagtttaatgacctacgtcagttcctgcgtactaaaaaatattcgctagtttagtcgttccggcatattcaaaattattagctacagttgttcctgcatgcgtctaatgtccttcggtgaacttgtctgtcattatcatttaaaaacgtatctagatgcattatgggagatttttagtttcctttgttatatttgagaagttatatattgtatataccgagagatgcacctgtgtattgtttgttgtagcttcgaatgcgagacgtatggttgtagtcattttattgtagttagtttatatgatacattgttgtcaccgcatgaaaattaactgctgtgccatatgaagacctcctgcctcatcacggtgtttgtatataagatcaactgcagtgcctacacggtggacttgagtatttgtatgatgtgaaggtccctgttcagcatggtcagcatgaaatggctatggccttcaaagctttctttcatgaaatggctatggccatcaacagggaagaaattttctgctcaagctcccaattagatcctagacataactcagataaaagcttgttcaagttgcactatagttcatttgaggacttacctattattgatcccccgagttgaatctaggtttcaagtatctcctaaggttttgtataggtgaaaaccagggattctctctttttttgcactccaatctgacgttttaaaatttgatgattagttgttcctgcc

SEQ ID NO: 8451 - DNA, 569 bp, Zea mays
  Clone ID: MRT4577_107704C.1
cccctcgagtttttttttttttttttttttttttttttttttttttttttttttttttttttttttttttttttttttttttttaaatcaaccggccacttgggtgatatcaaattcaaaagggggcataacacatgggagtggaacgatgggaatccataactacaaaactttggtttcacataaaactaggaccccacaaattgaactaggaaacaacagatgcctaatgcagcacttaaaaaaatccgattttgggggccacatcaaaagcattaaagccgggagttagcttaacggaagccttttttttcccatcaggcctgaacaagggggggaccttttttggcgggagggcaaacatttttttggggggggccttgatcttttttttggcggccttgggggcaacaatgaaaaccaaagggggggtattttcaatctttttcatcgctgattctgggggaagggggcacttgaaaatttgggactgaaaaagcttgttccttccgggggggccgattccggggtactgggggcccctaccctttttaaggggcggggggggg

SEQ ID NO: 8452 - DNA, 186 bp, Zea mays
  Clone ID: MRT4577_107705C.1
gaggagggcttttttatccttacgttcgcgcttttattctattgaaaaaagggaacccattgtgttactctaatcattaaattttactacgtttaaaaattctccctggcctatccgcttgaaagtggtattgctcgattacacccacaatattttttttcgaaaaacaaataagccctttatttt

SEQ ID NO: 8453 - DNA, 390 bp, Zea mays
  Clone ID: MRT4577_107706C.1
tcgtgtttgcagatgcccttgcaaaaaatgccgtggcgtccctactagtcagaggtaaagagaaaaatttacatgacggggatgctttagcacaggatacacaaaaggcctggaacgccattaatacacttgacaattggataaaaaaatcaaatgcctccagagactgtgagaagatgaatggccatagatcgatatgtgcgctaagacatcacgaatggtggcaaataagggctccgctgagatcatccatcatccgtgaatgattagcgtactaatccagttatggtcacgaaacgtgacagaaacctaggagctatgggaagattatacccatgagtaatgtgggagaatgaatgctcaaacattgttacaataacgtgctaaaga

SEQ ID NO: 8454 - DNA, 186 bp, Zea mays
  Clone ID: MRT4577_107707C.1
cacgcacgaaagagacactccggcctgaggtagagcgttaatccctgaaccccactagtagagattcggctgttggcatcctgtccggcccccgtcacaatgtcccaatcacagccgctgcctgcagaacgcgtaacgccacgccacctttccccagggtccggcgatgtcggcgccctccgacgc

SEQ ID NO: 8455 - DNA, 684 bp, Zea mays
  Clone ID: MRT4577_107708C.1
gcccgcacccgcacccgcagggcccgcacccgcccaccagagacacagagcaggcgacgcaccacccaggtccagctccggcgagatctccggcgacccttcgagatgagccgcggatcgggcgcgggctacgaccgccacatcaccatcttctcccccgagggtcgcctctaccaagtcgagtacgcgttcaaggcggtcaagtcggcgggggtcacctcgatcggcgtccgcggcaaggactccgtctgcgtcgtcacccagaagaaagtcccggacaagttgctggatgacaccagcatcacgcacctcttctcgattaccaagtacaccggcttgcttgccactggcctcacagctgatgcgaggtccttggtctcccaagcaagaaatgaagcagctgagttccgtaaaaaatggggatatgagatgcctgtggatgtattagcaaaatggatagcagacaaagcacaaatatacacgcagcatgcgtacatgagaccccttggtgttgttgccatggtcttgggttacgatgaagagaaaaaatgctcagctcttcaagtgtgaccccgcaggtcacttctttggacacaaggcaactagtgccggactgaaggagcaggaagcaataaattttctggagaagaaaatgaaggatagcccgcagttcacatatgacga

SEQ ID NO: 8456 - DNA, 311 bp, Zea mays
  Clone ID: MRT4577_107709C.1
ctcacacgtacagtttcacctttatgcaccgggcctcgaatcatcactcgaacctgccggtacactactgattccacacctcttcacacatcaaggcaatgtccgtgctgcttttattattgaccccctagctaggtctgtgtgtcattcacacactgattatccacacggctcccctgatactctcccttttactaccatgcgctccggatctgtcgctggaacgctagagttggacaccaagcccaaagaccgcctcactaaggagcctgaaatgcacaaggtattccacacactccccgctggtatct

SEQ ID NO: 8457 - DNA, 816 bp, Zea mays
  Clone ID: MRT4577_10770C.1
attgggtacctcgaggccggccgggacccttctactagccaactcgccaggcatcatggcagacacgctcgccgagtctgcggttgttcaagatactactttaccagagattccagctattgtcgaacccgatgtagatgcggacgagcgtgggcgcctgaagcgacgtaggcaatcctctcagcactcccctcgccgagcctcctccccctctcgcggccatgatcgcaacagcggctcgcgttaccgaacccactaccgcaagcatcaccgtccatcttcccccacattatccatctccccacccacttctgtagagaagaaactcagacggcgcagtgacgccgaacccgaccatacattcaggggccgagcacgcaacagaagcattgatcgaggaagaacccgaagtccgcttttcgaggacgaagatgcatgtgtagagagcgatgaagatgtcaagaggttcaggaagagaagtgcaccgcctagcaggcgccgagtggatgaagcagatttggcagcggagattaggcgacagaggagttatcctaacctttacaaagtggacaggagggactccaaggttgaggatgaacggcacatgcaagtgggggattgtgggttctacagaagttgcagcagcgccccacacgaataatgaccggcgacactagtacatacttctacatacgtctggcctagtcgcccggtattacggtgtgcactagcatagtctacgatggtgctgggggttgtatgttacattttctatccataagaggagagcgcagcacggagtagaatttggtcagc

SEQ ID NO: 8458 - DNA, 364 bp, Zea mays
  Clone ID: MRT4577_107710C.1
aagcccgaaaacctggcgggttattaaggggccgttttaaaaaagggggattaaaacccaagaggggggaaaggttaaaaaacgaaacaacgaacgcatacatagccggcggggaggggggaccttgtacaaaggggggggaaggggaaaatggccatttggacaaggccccctgtttatttggacggagaaaaggccaactttggtcgggtggtccctaaaccactcctggtgaaaaaaccggcacgggcaagggagcgttttttaaattttttggaaaaccggaatggggggttggaaccccccccgccccccctttttgggtgggaaccaaggccgcctcaacctttttcccccccccccc

SEQ ID NO: 8459 - DNA, 179 bp, Zea mays
  Clone ID: MRT4577_107711C.1
ggaatttttgctgccggaccggggaaaacatgcaccctggcccatgccgacccacacttgatttggattgagggggaaatgcatgcacccagaggccttgcctgccactgggggccattttggttgatgataataatgcacccaattgaatgaacttccatcttgggggggatcccccg

SEQ ID NO: 8460 - DNA, 265 bp, Zea mays
  Clone ID: MRT4577_107712C.1
atattaaagaacatggacatgtcatgacgtcaatgtctgccaatgtgcatgatcgagctcagcattgcacaaaaaatggttcatttgaaaaatgaactgtccctagggattacaggtgtgggttttacagggatggaagcttcacattttgagagctctaactttactttttctaaaaaccaatgttagcaaattttgtgctctaacatataccaggaaatgaattattgtaagggagaaatcccgggggtgaattaaaaggggg

SEQ ID NO: 8461 - DNA, 321 bp, Zea mays
  Clone ID: MRT4577_107713C.1
tcgcaaaaggagtaatctagcaaggtatcctggggctcgcctaggtactagacaccccactactaaaggcacactcagatgtacgtcgcgttagtcgccttgacgtcctgctctggcttcttgggcgtgcctggccagaagttaaacgctcatgttaagtaccggcaagtccatgttcgacaccggcaacctgtgcgtgaacggttccccctccggtctgacgctcacccagtcgtcctacggctagaccttctttggccgggccacctggcgttgatcggacagacgcctagtacgtgaactgcctggccaccaaattag

SEQ ID NO: 8462 - DNA, 642 bp, Zea mays
  Clone ID: MRT4577_107714C.1
atggctgacaaggcgaccgtcattccgccgtgcgacccgtggcctttctccaccgttattgtggaggatctggaggcccttgtcaccgatggtttgctccatcctctctccagcaggccgcagcctgagtggatggccccggggagcgaggccgacccgactccgtcgccggggtatgtggtcagtttcacccctttccatgagcgggggtttgggatgccggcgagccgcttcatgcgggcgctcccacattactacggggtggagctgcataacttcaaccccaactccatagtgcaagcggccattttcgtggcggtttgtgaggggtttctagggattgacccccattgggacctgtggacccatctcttctccgcggagttcttcgccgcgtcgacggacgtgaagaaggtccgtatggcggtgcgggctggcggctgcaccctccagctgaggtcggggcgggcagcgcagtacatccccgcctcccttgtatcttcgaacaaggggtggcagaatcggtggttttatctccggaacgacgacgggatgcttccgtcgttttctcaacgagtggtgactgccgccggtgatcactggcgctggggggccacatgcgagaaccaggagaagctctag

SEQ ID NO: 8463 - DNA, 1224 bp, Zea mays
  Clone ID: MRT4577_107715C.1
tctgtcccccgcgcgtccgctctaccgctccatggccggggtcgacgccggggcggggacgcacacttcactcacccatccaccgcaaacgccaaacggccggcacacaactacacaagccgctggcaaagatggcctcctccttggtcctcatcgcagcggccctgcttgcgctggcctcgtcgtggcagcaggccatcgcctacgatcctagccccctccaggacttctgtgtcgcagacaagaactcgcctgttcgcgtcaacgggttcccttgcaaggacccgatggcggtcaccccggacgacttcttcaacgcggcgatgatcatcgacaagcggagggacacgaacaacaaggtggggtccaacgtcaccaacgtgaacgtggagagcttcccggggctgaacacgctgggcatctcgctggcgcgcatcgactacgcgccgctcggggtgaacccgccgcacatccacccacgcgctaccgagctgctcaccgtgctcgagggcaccctctacctcggcttcgtcacgtccaaccccaaccgcctcttctccaaggtggtcaagaagggcgacgtcttcgtcttccccaaggccatgatccacttccagatgaacctcgaccacgacaagcccgccgcggcgctctcgtcgctcagcagccagaaccctggcgtcatcaccatcgccagcgccgtcttcggctccaagccgcccatctcggacgacgtcttggccaaggcgttccaggtggagaagaaactcatcgactggctccagtctcagttctgggataccaactactagctgcctagctagctagtaatatacttgcttgcttatttgttgcatgcatgcaccaccaacacaagccttatattaattacgtacgtacatctatgtataatattgaataaatggccggtatgcatgtggaggagtgaaacttattactgtgcgtgattaataatatttaatgtaaacttttcattattatctaatataaaaaaaagaatacgagttcaaaaaaaaaaaaaaaaaaaaacaagccttatattaattacgtacgtacatctatgtataatatcgaataaatggccggtatgcatttggaggagtgaacttattactgtgcggggtttattattatttaatgtaaacttttcattattatctaatataaaaaaagaatacgagttaaaaaaaaacgacagcaacg

SEQ ID NO: 8464 - DNA, 564 bp, Zea mays
  Clone ID: MRT4577_107716C.1
ctgttcaaaaccaaccctttaaatatatgaattgaacctgatccgacagggtgatggatgattaacaggctattcacttaacctgaagctatagacaacacataaggagagctacgcatgggtagcatatgaccgtggcatgaactacattaaataggcagaacaaaatctccagtttgatgatacagctcagggctggaacggttattcccaatacacatggataggataggattggaaaaaagccaaaagaagttggacttgggtgggattcaaacccatacaatctcactaaatgcacatggattgagagcataaccgaacaagcaataaagagatctttcaaccttctccgatgatccaacttttagggggacacaatatgtttattgcacgctgctgagaaaggaagcctacacggcgtgtgcgccctccttgccctccgcaagcacgggcagactggggcttgatggtcccgtctgcaatctaagcgaatctggcaaacggtgcagctctggcgaggaacaatgacacactgtgcccaggcatcacgaccagcacctt

SEQ ID NO: 8465 - DNA, 699 bp, Zea mays
  Clone ID: MRT4577_107717C.1
ttgggtacctcgaggccggccgggaaaatattctgcatctcctggcaatctgccatggcgccgccgctcgccgccgccctccgccctcacctctcccgcctcggccaaaccctctcgtctcgtcttcttcgcctctccacctcccattgtccctccgaccagagcgacttcgaaccagaccccgaccaccccatcctctctgcccctgacaatgacgacggtgagctcgcctccttcctccaccacctctccagcgcggcctccaatacctcatccccgaaggaggccctctccttcctcctttccatgtccacgggcccgttgccggcctcccacgctctcctagtccgcgcgctctgggatctgcgccgcgacccggacgctgccgcgttagcgctccggtacggagacgagtgcagcgccgtggatggggccgatggggcgggtctaccgccgccgcctgaagcgtggcacctggccgtctgggccgcgggtaaggcgaggcggttcgacctcgcatgggagatcgtgcggcggatgcggaaccgcggtgtgctcacctgccgggtcatggttatcctgatggagaggtatgcagctgccagtgaagtaaataaagcaatcaaaacatttgatgtcatggagaagtttaaaatcgagtcagatcaaagtgtattctactcccttcttcacgctctt

SEQ ID NO: 8466 - DNA, 408 bp, Zea mays
  Clone ID: MRT4577_107718C.1
caccggaaaaaccatgcattgcatactttcaaagggaccaaaccgcatcatccaagatgcccctctcgttaaccaccaacataccagaccaaccacaggttgcaaaaacaacttgcgctacagaccaccaccatcatcatcatcatcatctcaagtctcagattctgtggaagcagctaacaaggcaaaggaaaggctgttcggcgacatcggaaacttattatcatcatcatcatcatcgcgcaggtccatgtgcagtaaggaagtaaaaaaccagggcaggacaggccaatcagtcgacgacctcctccgtcttcttgggcttggacaggaggtaccagcccagggcactcaggccggcgagggtgccagccagcacggcgtagttcctgttcttgtcggttgacg

SEQ ID NO: 8467 - DNA, 115 bp, Zea mays
  unsure (1)..(115): unsure at all n locations
  Clone ID: MRT4577_107719C.1
gcggaacacggcgcgaggagggacaaacaccgccgttttgacgccgcccacacagggacagcacgcggggaaagaaaagagncagacccacgcagacccagaacnnaggagaccc

SEQ ID NO: 8468 - DNA, 1683 bp, Zea mays
  Clone ID: MRT4577_10771C.1
caggcacaaagcctcaaagatgactttttcagaaggttaaaggacattagaaacaaattgaaaaatacgggcagtgagctgctggagaaggttgtctctagctacaaacatgtcctgaatgctcctatggatgaggatactctgatgcgaaaatgccaagcagctcttatcaattttgatgaactcaataaaacgtatggaaacaactctgttttaggtagcagcaatcaatcggaatttatgcagggggtgcaggaacaacacaacattctcagaaactccattgaacaactcaaattgtcagaatcactcagggccactctgatttctcatttgaaggaagcgctgaatgagcaggagctcaaagtggaacaagtcagaagcctgcttcaggcagctcagcctcgattcaagagagctgctgagctctgcgtggggcttggaagcaacatggaaatgcatgagccatcaaatcaagggcttaagaggtctagcctctctgatccacttagtactgttgctccaggagctgagaagtctcttcaaaagggacagtcaagtgcagtgttgtattcacaggagggaaatggttttgagcacatcatgacagagacaaagcttgctgcaggtgatgcttcagacaatatacgtggtggtgatttgccttcacaagtgaacgggggcaacaccaagctgaaaatagaagagcacacttctggtaacaagaggcagaagctagaggatgacacagatatttctcagcctcaatcacagtcaccgccaccgccacccccattccctcatcctgacgcattcgaaccaccaccaccaccaccacctgaggttcctccatcaccagagcctagcccaccaccaccgccaacttcaccgccacccaatatgatccccccgccgccgccggcaatgccaccccaaatgatctcacatgtaccacctccagctggtacatttgtaccttttcctgctggaccacctggtccaatgtattccagctacccaccttttactcctgtggtcaacttccccataaccagcccaccagctggtttccctagtccaagcccgcctccgccttttcaaggattagtgggtacattctatggccctcagttccccaccgcacccccaccagcagacaggaaatgagtgtagtaacctaccagcagccccctcgtcatactagtttatttccccttttcaacagagaatatgactcggggggtgggggggggcgctccatcagcatgtgttgtggagctcagaagattgttgtattgttgtaaatttagccagtcagtgcgcagcagtgaattttctgaactagttgtggtcttggtcctggagtagaagtgtagaacctgtagatttcgactgctagagagaattaggaattctgagagccgagaacaaatgcctgcgacagattaataataagttgtggtcttgttggagtaaaaactgtagattccgacagcttagagagagagcatggaactcggtagcatgacatgttgtaactcatgtacaattgtgttcattgccagatcatccgagaacatgtacatgttcccgtgatgttttgagcgtgtaattctgttgttctgtgtaagatatggcttgagccgctgtcgatggttgaaactttttgctctcggttaaaaa

SEQ ID NO: 8469 - DNA, 501 bp, Zea mays
  Clone ID: MRT4577_107720C.1
ggccgctttttttttttttttttgaagacgttctgtacttcttttttgaccgattatcaaatcactatgctacctactaccttggtgtccagcttttctatttgcaattcccacagcacgctcggagaatgcttctagttcaagtgaaagtagctaccactagcagccaggacaaaccaaaatggggtcgcatcatgtactactctcgattggattcttggaaataagcaagtaaatctgcttgctttctcatgccctccggcgccgctgatgtggccgtcgtcgtcgttgtggagacgtcggccgacgggttacgcttacgccgattgcgctccagccgtcgacttgcagccgccggccccggtgacggacgcgcccccgaccagtctggacaggtcgtcgccgccgttgcgcgggtgcaagtacacgttcggtccttgggagcccaccatgacgttgtgtgtgagaccgacgaagttcggccggtcctgcacccttgtg

SEQ ID NO: 8470 - DNA, 185 bp, Zea mays
  unsure (1)..(185): unsure at all n locations
  Clone ID: MRT4577_107721C.1
ccgcccttttttttttttttttttataaanataaaaagaaacaatatttctttttttacatttcaaatgttcatgcaggatatttcttacactggcgctgccacccaatataattcttaacacattattactcaatcatcatctctatatgactaaactaacttactaaccaacaactatactac

SEQ ID NO: 8471 - DNA, 2068 bp, Zea mays
  Clone ID: MRT4577_107722C.1
cttttttaaagactgctactattaaaacttaacgatgcctgcaacatccactaagcccgaatataacgttgatagcatagatgacgagttagctaatggcccattggccaagagaagctgcagagatcccctctgctgcttgctttttgtcctttttatgggaggtatggttggtatagccatatggggttatactcaaggaaatccaaaccttattggaagaggctatgatactgatgggagaatgtgcggtgtcgatgatgctgtcaaagactatccttatctttactttcccacaccagttagtggtcagttaaacaaggcactttgtcttagctcttgtccaacatccgactccttgccagccaccttaggttgtaaaacaactactgaataccctgattgtgtggctgatggcaataaccaaactttggtcgcagactatgcatctaatagttatgttggcaatatatatatttactcaacaaaagaatacgtctcaaggttttgtattccctctgaagccggagaacttctcaaaactgccacagctactatgatgaactcaagtggtgctgatattttggaacaatggattggcgatatcagagaaacatggcctgttattgctgtttctattgctgttgcctttgtcattggatttacctatatggtgctcctaagatattgctctggtgttttgacttggttcgcaatattagctttcatcgcaggtacagctatcctgggttggagattctatgagtctgctaaaaagctggaaacccaaaacacagaagctggaaataccgatgatgacagtacgacctctaagactgttttaatggaaaaggttattgcctatatctgttggggcgttgccggtttcacattcctggcagtactttgcttgtatagcagaatcaaattagctattgctattatgaaagctgctgctgactatgttaaggacacaccctcagtcttccttgtaccacccgttactgtcgttattcttcttatcttctatgctttctgggccggtgctgctgtgttcttggtcagttctggtgaggctacccacaccgcaggatctgtttttggatcattcaccttcgataagactcttaaaagattgttgatttatcacttgtttggcctattgtggttcaacgcttttgttattgctgccactcaattcgttttggctagttcaactgctctctggtatttctcacaaggtactggtcaagctgctccaaaaactatcagaacaagtgtcaagagattcttcagatatcattttggatcaatcgcctttggatccttgatccttgctcttatccaacttgttagaattattctagcttatatggaagctcaagctaacagaatgaaaggaaaagataacaagatcgtcaaatttactctgaaatgtctccagtgctatgttggttgctttgaaagattcatcaagttccttaataagaacgcttacatacagattgccttgtcaggaaagagcttttgtggtgctgccaaagacgcattcgtgcttattgcaagcaatcctttgagaatgggagttgtctctagtattggaagcatctttgtgttcttcggaaagattttcattgctgccattaccgccctcattgctttcatcgttttgactaactgggacagatacagtcaaaatatctattcccctttcatcccaactttggtcatcttcatctttgcttatgtcgttggagctatattcatgaccgtttatggacttgctgcagatgccattttggcttgcttcatccttgatgaacagattaacaagaagaagaatgctccccctcgtcattgcccaagctctttgagagatttcttggacaaccataaaagaaattaaatattaatggtgcagtgaaaagattaatgaataataataaattttttttaatatattagtaagcttttatcccatcaaccgaataaagaaacttatatattgcataagactatgaaatagttttttatatatctatttgcacagtttttcagaaatcacaat

SEQ ID NO: 8472 - DNA, 343 bp, Zea mays
  Clone ID: MRT4577_107723C.1
gcctgcacgcctactctagatgatactctcgggtgaagctcaaatccacatttgcaagagaccatgaggcaaaaatgttcatatgtgaatcggaatcatttgttatcttattaggcctactctgaagccaaaggacctgacatcggacatcctgggtgaattacaaatgcacattgtcaacaaataagggggcaaaaatgagcatatctgaatggaaattatgtgcttttttattatgcctatcctgaagcctcatgagatgagatctgactcctcggggaattccaattccacattttcaagaaataaggaggcaaaaatgttcatatatgaattggaatta

SEQ ID NO: 8473 - DNA, 355 bp, Zea mays
  unsure (1)..(355): unsure at all n locations
  Clone ID: MRT4577_107724C.1
ctaacattttcgacttttagatgattataanccccgagcatgctagcgagaggagccttttcacaggtgtgggccgaacaccacacaccatggataatacaattttcctcagggggatgttgtaatacaagcacttccctgtgccgagaggcggactccaagagcatgagatggatagcgctgaatggagaccgatatttactggatttgtacccttggaagagagatcaagggtttgtcaactcttatcaactactgttttgactgacgtgtagggcttctgctctaacaaatcctggcggagcaaggatgccttcacaggtcaagctgaggacggatgcatatccacaccaaa

SEQ ID NO: 8474 - DNA, 233 bp, Zea mays
  Clone ID: MRT4577_107725C.1
gctctctcctctgcttgcgcgactgcgtggacgaccagcgccggtgacggcgctggaggagctccctccgcaaaaagacacggcgggggcattacggggtgcgctcctgtaggagagcgtgtaacacacgacgggcgctcagactcctccgggaggatgtcgtcgcgtctccgttgcttctggtatgccgcacaccagattcggaactagcttcctctctcccctgtgtaaga

SEQ ID NO: 8475 - DNA, 263 bp, Zea mays
  Clone ID: MRT4577_107726C.1
ggccgcccttttttttttttttttagtaaggaacaggcttcactttttcgcttcactgttgcgaaatttcgttttgaacaaaagaaattgactttcatatttttaaaatgtgataccgggccgagaaatgcttcccctagctgaccgggaacgagaaattggccgaggaaccagacttttcggtcggtaattcgaaccatggataggagtgaccaagatgcgtgtgtgccgccacgatatcactcatgcagtcgaagcagtac

SEQ ID NO: 8476 - DNA, 208 bp, Zea mays
  Clone ID: MRT4577_107727C.1
tacatttagctgcgtggagggaactgttaagttttgttgaagtgacggagacaaaaacctaaatggagtgggagagaaattggagacagaaagaacccttcagaggtctgttgtaaaaggatgcaaagaaacagggaactagaagggattgtggggtccaaaggagaaataccagcacgtttgtatgttgtcaataatgtttcagtag

SEQ ID NO: 8477 - DNA, 467 bp, Zea mays
  unsure (1)..(467): unsure at all n locations
  Clone ID: MRT4577_107728C.1
ggatccccggacagcaggaattcggcacgaggtgacttcctccagaactactatgtcaaccctctacttaaccatgcctatactccagaccagtacggctcattccttattgataccttcacaaacttcgtcaagaacctctatgggttgggagctaggaaaattggggttacctcacttccaccgttaggttgcgttccattagcaagaacattgttcggttaccacgagaaaggatgcatctccaggttcaataccgatgctcaacaattcaataaaaagctcaacgccgcagcagccaatctccagaagncagcatccctgggtcgttaaggattggttggtttttttttccgacatattcaaggcactttacgacattgttaaatctccctcgaactatggttttggttaagcaacaaaacggtgttgtggaactgtaacagtatagaaatcgcatttttgtg

SEQ ID NO: 8478 - DNA, 508 bp, Zea mays
  Clone ID: MRT4577_107729C.1
gatatcctgttaccatccataacttaacgcccgccggaggccggagagaccggatcagactccttctgcggctcacggtgaccatgtctctgcgaggtatcgtcctcttcctcctcgtgtccggtctgcaggtggtcaaccgctacgtcgacctctgcagaaagagcggaggacttagtgatgagcagatcaaagtgcgggttgaaatcaagcaacttctcaaggagggtgatcagttgctaacgccgaccagatttgacacaagctagctaactgatgctcctgcctgctgcccaggacaaggagctggtaaaaatgctcgaacatgaccttaagagggagcaatccttatactactaatacacaaaatttttgtcggatactaacgacgtaattcatgctgggctcgttctgggcttttgcgatagtcctgtaactgccgttccacaacatcttctacagaccttcggacaaatggttccctggagatgtgttgatactgccaccg

SEQ ID NO: 8479 - DNA, 958 bp, Zea mays
  Clone ID: MRT4577_10772C.1
cattgggtacctcgaggccccggccgggacaccgcgtcttcgtccagctcactcccccgccgcgcccccgctccgctcccctctcttcctcgccgcgggtcgcgcgcagccaggcaccgagccgccgaccagtaaccgacgtatatctcatccttccccctcccccctgcacagccccctctacaactccccgattaaaccctagaatctcccaactcccaaatgcgcgcccccacctaggcccccgaattcggcatccgctccgcggaaggtgtgcaagccagggtgcacacaatgagtgcgggtttcaacaagcagatactggctcagaagctttcgaagcttaatagctcacagcagagcatagaaactttatcacattggtgtgtctttcatcatcgttactgccaacaagttgtagaaacatgggattgcgagtttcatgcagctcctggagagaggagggtatctttgctgtaccttgcaaatgatattatgcagaatagcagaaaagaaggcaatggatatataactgaattcatgagggtcatccctgctgccttgaatgaagtgttgactatcagagatgattttgggcggaatgttccaaaaagactgattgacatatgggaagaccgtaaaatatttgatactcaggcacaaagcctcaaagatgactttttcagaaggttaaaggacattagaaacaaattgaaaaatacgggcagtgagctgctggagaaggttgtctctagctacaaacatgtcctgaatgctcctatggatgaggatactctgatgcgaaaatgccaagcagctcttatcaattttgatgaactcaataaaacgtattcagcctcagaattcagaattggtattggacagcttgattaccgttgtttggatgcacaagaatttggcactggaatttgagtccagtaccaactcgacattcact

SEQ ID NO: 8480 - DNA, 916 bp, Zea mays
  Clone ID: MRT4577_107730C.1
ttattgggtacctcgaggccggccgggatccgcccccgtcttttcccttttccctaccctctatctacccaccgttcccgtctctccgccgcttccttggaagacgaagaaaccctcctcctccaccaacccgatccagctacatccgttgaggcccgtgcgtttcttccctgttctcccatcaatcgacctagccttacgccgaccaggggcttcctctaatcgatctggtgtctgttctgtggtgttggtctgggtgcactccagggccaggagcagctagccgtcttcgttcgatccgttcgcatccccaacgcggttcgatttgcaggaaggagcgtgatggccaagacgagctcgttcaagctggagcaccccctcgagaagaggcaatctgaggctaaccgtatcagagagaagtaccctgacagaattccagtgattgttgagaaggctgagaggagtgatattcctgacatcgacaagaaaaagtacctcgtccctgctgatcttacagttggacaattcgtgtatgttgttaggaagagaatcaagctcagtgctgagaaggctatcttcatatttgtgaaaaacacccttccaccaacagctgctctgatgtcttcaatctatgaagagaacaaggacgaggatgggttcctctacatgacttacagtggtgagaacaccttcggactgctctagatggctcaccgcaatcggggacgccttgcccatgcatcctgtaaataagacctgccaagcaactgtgtatattctggtttcgtcgttgcaagtggttgcgctctactgctaaagcctacctatcagttgtggagttgtcgtcgatgttatggacacacttaatcaagtttattaattgactggacctgaatcttgggtcagtaatgtgccc

SEQ ID NO: 8481 - DNA, 741 bp, Zea mays
  Clone ID: MRT4577_107731C.1
ccaccgctccgtctctccgccgcttgcttggaagacgaagaaaccctccccccaccaacccaatccagccaaatccgggcccggagcagttcgccgccttcgttcgattcgttcgcatcccccaacgcggttcgatcccaccggaaggagcgtgatggccaagacgagctcgttcaagctggagcaccccctcgagaagaggcagtctgaggctaaccggatcagggagaagtaccctgacagaattccagtgattgttgagaaggctgagaggagtgacattcctgacatcgacaagaaaaagtacctcgtccctgctgatcttacagttggacaattcgtgtatgtcgttaggaagagaatcaagctcagtgctgagaaggctatcttcatctttgtgaagaacacccttccaccaacagctgctctgatgtcttcaatctatgaagagaataaggacgaggatgggttcctctacatgacttacagtggtgagaacaccttcggtctgctctagatggatggcgcaacaccacagctcaccgcaatcgggtcgccttgcccttgcttccctaccaatgccctgcccatgcggccatgcctcctgtaaataaggcctgccaagcaactgtgtatattctggtttcctcgttgcaagtgactgcactctactgctaaaacctacctatcagattgtcatcgatgtaatggacatcctttaaaccaaattgattggacctg

SEQ ID NO: 8482 - DNA, 964 bp, Zea mays
  Clone ID: MRT4577_107732C.1
cattgggtacctcgaggccggccgggaacccctatccgccccccgtctagttcctgtccgggaccctctatctacccaccgttcccgtctctccgccgcttccttggaagacgaagaaaccctcctccaccaccaacccgatccagctacatccgttgaggcccgtgcgtttcttccctgttctcccatcaatcgacctagccttacgccgaccaggggcttcctctaatcgatctggtgtctgttctgtggtattggtctgggtgcactccagggccaggagcagctagccgtcttcgttcgatccgttcgcaccccccaacgcggttcgatttgtaaggcaggaaggagcgtgatggccaagacgagctcgttcaagctggagcaccccctcgagaagaggcaatctgaggctaaccgtatcagagagaagtaccctgacagaattccagtgattgttgagaaggctgagaggagtgatattcctgacatcgacaagaaaaagtacctcgtccctgcagatcttacagtcgggcaattcgtgtatgttgttaggaagagaatcaagctcagtgctgagaaggctatcttcatatttgtgaaaaacacccttccaccaacagctgctctgatgtcttcaatctatgaagagaacaaggacgaggatgggttcctctacatgacttacagtggtgagaacaccttcggactgctctagatggcccgcaatggggtcgccttgcccttgcccatgcctcctgtaaataagacctgccaagcaactgtgtatattctggtttcgtcgtcgcaagtggttgcgctctactgctaaagcctacctatcagttgtggagttgtcgtcgatgttatggacacacttaatcaagtttattaattgactggacctgaatcttgggtcagtaatgtgacaaaaaaaaaaaaaaagcggccctcgagctccagc

SEQ ID NO: 8483 - DNA, 918 bp, Zea mays
  Clone ID: MRT4577_107733C.1
cattgggtacctcgaggccggccgggcccccgtcttttccctgttctctaccctctatctacccaccgttcccgtctctccgccgcttctccttggaagacgaagaaaccctcctccaccaccaacccgatccagctacatccgttgaggcccgtgcgtttcttccctgttctcccatcaatcgacctagccttacgccgaccaggggcttcctctaatcgatctggtgtctgttctgtggtcttttggtctgggtgcactccagggccaggagcagctagccgtcttcgttcgatccgttcgcaccccccaacgcggttcgatttgcaggaaggggcgtgatggccaagacgagctcgttcaagctggagcaccccctcgagaagaggcaatctgaggctaaccgtatcagagagaagtaccctgacagaattccagtgattgttgagaaggctgagaggagtgatattcctgacattgacaagaaaaagtacctcgtccctgcagatcttacagtcgggcagttcgtgtatgttgttaggaagagaatcaagctcagtgctgagaaggctatcttcatatttgtgaaaaacacccttccaccaacagctgctctgatgtcttcaatctatgaagagaacaaggacgaggatgggttcctctacatgacttacagtggtgagaacaccttcggactgctctaggtggctcaccgcaatcgggtcgggtcgccttgcccatgcctcctgttaataagacctgccaagcaactgtgtatattctggtttcgtcgttgcaagtggttgcgctctactgctaaagcctacctatcagttgtggagttgtcgtcgatgttatggacacacttaatcaagtttattaattgactggacctgaatcttgggtcagtaatgtgac

SEQ ID NO: 8484 - DNA, 1373 bp, Zea mays
  Clone ID: MRT4577_107734C.1
attcggctcgagggatagcgtctcgtcgtcctcccgcctcgctccctccgtcgccttctccaacgggaaatagccattaccgaaggaggcccgtcagcagcgtcggggcaaaaatttcaccgcgcgcgatcaagcgattgatgcccccgtcatggcgtccgtgccgctgtcctcgccgtcgcaggccggcctccttggccccccgttcccgctcctgccaccgcccttcggtgcatgcctccgctaccgcttgccgaggctgcctacaggcctctcgtcgagcgtgaggaagggagggctcctgccgctgccgctcctggtgcctccccgggccgcggggggcaaggacgggcgggccgtgaccaaggaggagttggaagaggaggaagaggagttcgaggtgaccaaggagggcgaggaggttaatcaggagacaggaggaggcagtggagccaccaaggaggcggcggcaaggggttcgggtcgattcgctgcggactacgtctcgctcggcgtcagggagcccgtctacgaggtgatagaagtgagatcaaatgggaggatgtccaccaagaaaataagcaggcggcagctactgaaatctagtggtctccgcctacgagatactagaagtgttgacccatcactatggttaatgaattcaatgccttccctgctggtacgtgagcaagctattttactcaatcttggttcgttgcgagcaattgctatgtatgcgcgtgttcttatattcaactataacagcccaggagggaaggcctttctagggttattactgtctaggttaaatccaagaaacatcaatggtgggcctgcaatgccttttcagcttgaggttgttgaagctgcacttctttctagaatacaaagattggagcagagactaatgaaaattgagcctcatgtggctacattgctagaagttctgccaaatcgcttgacagctgatgtgttggagcagcttcgtctaagtaaacaagcattggttgagctgggatcacgagcaggtgacctcaagcagatgcttatcgatctcctagatgatcctcatgaaatcagacgaatatgcataatggggagaaattgcacacttgatagattgagtgatattgtggagtgcactgttcctttagagaagcagattgctgaaggtacagctaaatttatcattgtaactttgcatatttctggagattatgacttgtatctatcttggtaaagcttgcatctttacttcgttagctggacacttaatatgccaaccgatggcatgttattagactagttttctagtaaaacccgtgacatatgcaaaaaaaaaagactgcagttagcaaggatttgaacaggtt

SEQ ID NO: 8485 - DNA, 550 bp, Zea mays
  Clone ID: MRT4577_107735C.1
aagaaaagctttatcacgtgcattatccaaagatcatgtcaatagtagtatagtacaacagataaacatcactaattcactacttggtgggctaaatttggtgtaaccattaactcgaaagctgcatagcccacaaaagtctacgaactctgtgctaacctctctcaagtgcaaggtgaccaaaagcaggacagtgaccatagcttacaacacttaaaacaatcatgaatacctggaatgcacatattaagggccttggcagtaaagaaagactccatatcaaataggtagaaataattcctatcgatcagatctgacaacagctggccagcaaggcgatatagtgttgccattatgggaagagatagatgccatttcctgtaactagggccatttatgagcttcgtcttcatcaaaggtttgtgatcatagaaccattcatagacagctgcatcttcctcctcatccaactccaactgtatagcttcaagtggttcaacatccaacaaattatcagcatagtccagtgggggttcccggacgcgtggga

SEQ ID NO: 8486 - DNA, 985 bp, Zea mays
  Clone ID: MRT4577_107736C.1
cctcgaggccggccgggccgggacctctatctacccaccgttcccgtctctccgccgcttccttggaagacgaagaaaccctcctcctccaccaacccgatccagctacatccgttgaggcccgtgcgtttcttccctgttctcccatcaatcgacctagccttacgccgaccaggggcttcctctaatcgatctggtgtctgttctgtggtcttggtctgggtgcactccagggccaggagcagctagccgtcttcgatcgatccgttcgcatccccaacgcagttcggtttgtaaggttttactcggttggctcttagtatttgctgctcgatcggctagattgttctgcggtttctcggcgatttaatttggggattggctggtgcatgtaggtaggaaggagcgtgatggccaagacaagctcgttcaagctggagcaccccctcgagaagaggcaatctgaggctaaccgtatcagagagaagtaccctgacagaattccagtgattgttgagaaggctgagaggagtgatattcctgacatcgacaagaaaaagtacctcgtccctgcagatcttacagtcgggcagttcgtgtatgttgttaggaagagaatcaagctcagtgctgagaaggctatcttcatatttgtgaaaaacacccttccaccaacagctgctctgatgtcttcaatctatgaagagaacaaggacgaggatgggttcctctacatgacttacagtggtgagaacaccttcggactgctctagatggctcaccgcaatcgggtcgggtagccttgcccatgcctcctgtaaataagacctgccaagcaactgtgtatattctggtttcgtcgttgcaagtggttgcgctctactgctaaagcctacctatcagttgtggagttgtcgtcgatgttatggacacacttaatcaagtttattaattgactggacctgaatcttgggtcagtaatgtg

SEQ ID NO: 8487 - DNA, 210 bp, Zea mays
  Clone ID: MRT4577_107737C.1
acggtctggtattgaaaaatattatagttcctccgaagtgttcggctaccttgtgggagctctggtttgaatactataatggggtagttctatggtgtagtatataccatggtatttatgtttggagtatttaaaactccactcgaatctaaaatttcattatctatgactgggttttggtatatatacattaagatatcatggtttaaa

SEQ ID NO: 8488 - DNA, 1627 bp, Zea mays
  Clone ID: MRT4577_107738C.1
cggccggggaaaaaaataaaaaaaaaaaaaaaaaaaaaaaactcccggttcgaggccgatcgagatctacccccaatcccttctccccctccaggcgacgggcgccggaggccgacggcgacggggcagcacattgcctctgattgattgatcgacagaagcctcgcgacccggcccccgcttcgccgtgatccggcgacccaacgagccgagccgagcagctcgtcgccgagcaccgaaatggggtcgttcaacggccacgtcctgccggggacgctgttcctggcggtgggcctgtggcgggtgtggtccgccgtcgcgcgcttcgccgccgacccgccggcgttccgcgtccgcacgtggaaccccctccccaaggggccccgcctgctggagctctacttggtggccggcggcgcgttcctggacatgtgcctggagctcggcggcggcatcctcgccggcggcgcccgggtcggcccggacagcctcatctacctcgagcacgccggcatgctgctcatgttcttcctcttcggcgcgctcgccctcctctcccagaagacaaggtacctgccgctgaccgacggcgagctgagcctagtggcagcgacggcattcacgtcagagctgcttctcttctcctaccactccgccacccacacgggggctagagggctactaccaccacctcctggtcctcctcatcggcctctgcatcctctccaccgtcctgggcgcgctctcgccggcgagcttccccgccgacctcgctgccggcgtgctcctcacgctgcaagggctgtggttctaccagacggcgctcacgctgtacgggcccatgctcccggccgagtgcggcgtggacgccgacggccacgtcgactgccgcagccgcgccgcggaggagcgcgccgagcagctggccaacctgcagctgttcggggtcgtgttcgtcgctttcgtctacgtgcttgggtgctacgccgtcgcggcagcgaggtacgggcacccggacctcgcggcgatgcatgacgagcacgccgcggcatacgagtgccgtggcggggttggcgccaggaccgaggtcgaatgtgtggctgtgtagtgttcgcttccgatcctgaaggccaggagatatatgcagattttgaggagccagatgatttaatatttgtgtatattttttaatttttagaatcattccgtttacctagaatcaatctaaacaataaaaaattaaaaaagagcgactttatgccaccatactctagaactactaaacgctatctaaatagcagctgcacgtacaactctgttcttgcttggtttcgttattttacttagagcttggtttcgtcaacaaagcttgaactctgttcatgctcggatggatatgggttctctctgtgtggcccagccagtgcctctgtgtgatctgttagactgtgtgtgtgagtgtacgtgggccggtaccaccgttggctgccggtccattagggttagaattgagtctatatattgtacacattttctatgcaatacaatggttcatccttctacatggtggatccgcgcactcttttctcgatggatcgatcgagttcccaaagttggtacagtttgt

SEQ ID NO: 8489 - DNA, 178 bp, Zea mays
  Clone ID: MRT4577_107739C.1
caccgggcacacgccccgagctcagcttagctccactccatctccaatcagagtcgtggcgactgcaccagagctagctacatcggccctcacaatgccgattaataggatcgccctggggaaccatcatgatgtgtaccatccaggcgcactcatggcagcattccctgagttcatc

SEQ ID NO: 8490 - DNA, 237 bp, Zea mays
  Clone ID: MRT4577_10773C.1
attcccgaccgacgcacgcattcatagatgtggctgcagctgttgcatgctttactcaaagtgtgcatggatcaaatagaagaagtgtttaaccatacattggtagcgctgcatatatacttgttaatttatggaatatcaattaagtcttcaacatgattgattgcatttgacattattttccaatttctttactaactgttttaaatttctcataactactcaccaaatgatttt

SEQ ID NO: 8491 - DNA, 392 bp, Zea mays
  Clone ID: MRT4577_107740C.1
ggaccattaacctaatctcctacagagcgcagaagaacccgatcgacaccatgggggtgttgctcgttgccctctctctcctggctctcgctgcgagcgccacctccacgcatacaaacggctgatgagagtgtcagccaccgccgcccggtcatctaccgccgccggtgcatctgccaactccgggttaactgacacctacggtgcatctaccaccgccggaccacatgccagcgccggaccaccctgtctcgtacgaccatgtgccgacgacggcaatctgccgtcgcaccatgccactaccctactaaacgcgaccaggactaaggccactcccaggcacaaccatgcccgtgccaacagtcgcatacaagcccgtgccagctgcaggg

SEQ ID NO: 8492 - DNA, 357 bp, Zea mays
  Clone ID: MRT4577_107741C.1
accgacgcgacccacgcattcgactggaaccacatttattcaactttatgcaccacacaaaggtaggcgcagacctagtttggggggtcaaatcaaatttgaccgaggcagtaacaaataacaagattaagcttagagacatggaggcagatacggtagatacgatcactctccaagccaagatgggcctgataatcagatgtttgatggtatccgtggacggcccattaacgctccttttgttgctgaataccccccttcaccgatattgaagccagtacctggagctggtcccctaggaccatgtatttctgcacctgcagagatagcaatgcatatgctgagagagcaaggtcc

SEQ ID NO: 8493 - DNA, 292 bp, Zea mays
  Clone ID: MRT4577_107742C.1
ctagttctagatcgcgagccgccgccctttttttttttttttggaaccattctatcgggttgcgattcgcacacggcacacatgtcaagctagcaactgcacactcccaccaaccctgctcctgcgaccacttatatatctgccatcgcccccttattaccaacatagttcaccagattcaccttacactccttgtacttcctccataccggcccaagcaccacgaagatgattcagccgcgtagaccttacgatgagctgtgcacaagactcaccaatgactacccggtgt

SEQ ID NO: 8494 - DNA, 751 bp, Zea mays
  Clone ID: MRT4577_107743C.1
agcgtctgcgagaagttcgcgcgcggccggagcgggctctgcgcggcgcacggcacgctggtggcctcgcggcagcgccgcagcggcggcggtggcatgattgggccaggcctcttccgcggcatcgttcggtccgccagcgcggcgaacatgtatagcgagtactcgtcgtcgggcgtgagcacggtgtcggactgcgacggctcgcctgaggcggcgacagggaggcatgagttgatccctccccaggttctggtcccccactcaacgccggcatcccaagaagtgcaggttcaaagggtgctccaagggcgcttgaggctcgaattctacttctacgcctacgcctctttttcttaaaaaaggacggaagatcttccttttttccagtcatagctgtcagattattgtctgtgtataaaaatgtttcttgtctgcagatcgatcttatatggtaaaatttagattaatttcgtttcccttgtgtcaacataataagggtgaagacatgaatttgtcggggcttgtatatggttgaattattcgtagcagatccgaaaagcttcccaggcatcctgtacttgtcgtgaataagatcaatgtgtaacaatcgaacttattgctaaactgtggtatcagatgatcattctgagtgcagccaccggcgaggagcatagagggaggggtggtcgctgtcccctaggggagggtgcacggcgggggtcttgtttacttgctttgcgggagcttt

SEQ ID NO: 8495 - DNA, 148 bp, Zea mays
  Clone ID: MRT4577_107744C.1
tcttcgtcgagacgtctgagagcaaggttactcacttgattcaagtaaacactatcgtaagtgtgacctaaactacagtagctgtcacgcgggtgctacgagtcgactgagagggcgatgacttcccagaggtacttgggctccaact

SEQ ID NO: 8496 - DNA, 174 bp, Zea mays
  Clone ID: MRT4577_107745C.1
taattcggcacgagggccagcgaggggggggggggcctggatggcctacactctcggtgtcgttaaggcctagctgacagggcgtaacgctccggggctgatcgtaggtcctgaagagaaactcctgaaccgttcggcaggaagggttcttgcccgggcacaacatgcacacct

SEQ ID NO: 8497 - DNA, 360 bp, Zea mays
  Clone ID: MRT4577_107746C.1
acgagagcagaaatctggtgagcaacaagagggcaaaagctctgctgatcgtgattgccagtacaattaccaacagcgaaagcgtcggctatcgatactttaaacattcggagtacgaaactagatgcgtcagagcagttaccacagacatgactgactagctgcatgcaatcctccataagaaccatgctctttgatccttgtatgtcggctctgggtattattgtgaaacagaattcaccaagtgttggattgctcacacagcaatagggaacgcgagcgggagttcgacacgctcgagacagagtagttgtaccttactgatgacctcgccgcgatagtgacttaacctagtacgag

SEQ ID NO: 8498 - DNA, 182 bp, Zea mays
  unsure (1)..(182): unsure at all n locations
  Clone ID: MRT4577_107747C.1
ttcgttctatttttttttataccaccggggatgttctacatgtaatttggagggacaaaaaacacggcacnacagtctcaggaactgagtcctcccagtcacaacatagtgaacaacaaatacatgttgctccatcttctaccaaaaaattatatacaaaattgaacttaaaccttttttaa

SEQ ID NO: 8499 - DNA, 299 bp, Zea mays
  Clone ID: MRT4577_107748C.1
tcatgctacatctctcagcactctccagactcttgaagctgttgtttggaaggacaatcttgacgtatcaacatcctgctcgctcaaacacaccgctgtggatcttgtgaatgaggctaagcttgacagcgttattaagtcatggatatctctcgctggccataatgagtatgaggttgatacgctgactaaggcattcgctagtcataacgatgatgcgtacaacgcagcagatgctgatgctctacgccgcgaggaaatactcacgccgtgtgtagcactgttgaagtccagaatgc

SEQ ID NO: 8500 - DNA, 963 bp, Zea mays
  Clone ID: MRT4577_107749C.1
aacagaaaaccacgcgccctgcaggggttcttgccctcgcctggcttatataaacccagcccctcctgcccccctactacgcagtgcatacatcctcaccacactgcaccatcattgcattagcaagcagtgaagcacaaagcacaaacaaagcaagccgatcgaattaataggtgcagcatagtgctcgatagcttgctcagcagcaagcaagcaagctaggtagccgtgtgaggttggtcgatcgacgagatgaagaagggagcaatggcctcattggtccctctggttgttgcgctcctcttgtgcccgtcgtcgtcgctggcaatggcatccggcgccggccctgcgcagtgggggaagaagctggacccgcacttctacgaccagtcgtgccctcacgcgcagcacatcgtggcgtccatcgtggggaaggcgcaccaccaggacccccgcatggccgcctccctcctccgcctccacttccacgactgcttcgtcaagggctgcgacgcttcgctgctgctggacagcagcgggtccatcgtgagcgaaaagcggtccaaccccaaccgggactccgccaggggcttcgaggtcatcgacgagatcaaggccgcgctcgaggctgcctgcccggccaccgtctcctgcgccgacatcctggcgcttgcagcccgcgactccaccgtcatgactggcggccctgggtggatcgtgccgctggggcggagggactcccgtggcgctagcgtgcagggctccaacaacgacatccctgctcccaacaacactctccccaccatcatcacaaagttcaagctccagggcctcgacatcgtcgacctcgtcgcactcctcggtagccacaccatcggcgactcccggtgcacaagcttccggcagcgcctgtacaaccagacggggaacggcctcccggacttcaccctggacgcgtcttac

SEQ ID NO: 8501 - DNA, 167 bp, Zea mays
  Clone ID: MRT4577_10774C.1
ctttctcttttgaagagatatttttggtctttggatagactttacccagacaagggcctgtcttttatgacaatgaggcttgctaccctaatagctttgccaaatgtgaatcgtgaaatttgacaggttaattcccatgaacgttatattcctttgaacttaaggcc

SEQ ID NO: 8502 - DNA, 462 bp, Zea mays
  Clone ID: MRT4577_107750C.1
ttggcaacctgtatgggctccaaagtagaataaatgctcatttgaatggtcaacctccacaacttcgctagcgtctgatgacgtgctatcgcgctgctctatatcttctctacaagagatctacctctatactacttgttctggattatatggggtcataccaagactgctgatgggcatcaacacggctcttacccgtatcaaggagcctaatctctgcgtgctaaaaattaacgcatgctgggttgcatctattgctgcattgatatccattatcggaagcatgaagatcacgactttctgtcgcacctcccacaatacgctgtcggcctggacctatctgtatctacctggggagcttgcaaaacacacttgagaccaccctgaatggcgatccatctgaggaggcctccaatgcaaccttctatcgtgaagccgccagagcatccatctacccaatag

SEQ ID NO: 8503 - DNA, 800 bp, Zea mays
  unsure (1)..(800): unsure at all n locations
  Clone ID: MRT4577_107751C.1
gtacgcctgcaggttccggtccggaattcccgggtcgacccacgcgtccgcactctcccgctggcccggctgctgtttcgagctgcccgctggtcatgggagtcccggcgttcttccgctggctcagccgcaagtacccgtccatcattgtcaactgcgtggaggagaagccaaaagaatgcaacggtgtaaagattccagttgatgccagtaaacctaatccaaatgatgtggagtttgataatctgtatttggatatgaatgggatcatccacccctgcactcatcctgaagacaaaccagcaccaaaaaatgaagatgaaatgatggttgcaatttttgagtacattgacagacttttcaatattgtaagaccaagaagacttctctacatggcaatagatggggtggcaccacgtgcaaaaatgaatcagcagcgttcaaggaggttcagagcatcaaaggaaggaatggaagcagcagttgagaagcagcgagtcagagaggaaatacttgcaaaaggtggctttcttcctccagaagaaataaaagaaagatttgacagcaactgtattaccccaggaactgagttcatggacaatcttgctaaatgccttcgctattacatagnctgatcgtttaaataatgaccctgngtggaaaaatttgacagttatattatctgatgctagtgcacctggtgaaggagaacacaaaatcatggattacattagaagacanagagcccagcctaaccatgacccanatactcatcattggtttgtgtggagctgatgctg

SEQ ID NO: 8504 - DNA, 323 bp, Zea mays
  Clone ID: MRT4577_107752C.1
atagtgagtcgtattaacacgtaggccgagcttcagctgcatgcagtactgccacaaccagttgtgtactgccaacagcgcctccaacgtcaccgtcaagggtgtcagcatcacgaccatcaccggcacctccgcgacaccggaggcccttagcctgctcagcactgccaaggtcccatgcaccggcatcacgatggctgacgtcaacgtcgagtagagcgggaccaacaacatgaccaaggatatatgcacgaacgccaacggcagcaccaagggttgcctcaaggagcttgcatgcgtctagaccctccatcgactgaacc

SEQ ID NO: 8505 - DNA, 496 bp, Zea mays
  Clone ID: MRT4577_107753C.1
aggtacacacatatccactttataaagcagcccatatatgtatagaacaaactttgtgtagacatggaagtactaggggacgcgcctactggcatatctaccacccactacactcttccaagccatggctgactatgggggggggggtgtgaacaataccacaacattacattaccagtgctggaaacaactatatcacatggggctagctgactcatcatctgcggctttaacaactgaggaaacgctcacactcatgaatccattcaatatctttataacctaagctcagcgagtgcattaacaggtgggcttaaggctccatgacctattttacaaaaagcttggccaattagattcttaatgttaattcaatactaaacactacttccttggttgtataaaggtcaggaaaagacaatttgaactttgcacatccgattgttacgacgaggcttagcaactgactttcttttacgaatgggtcaggtccttt

SEQ ID NO: 8506 - DNA, 777 bp, Zea mays
  Clone ID: MRT4577_107754C.1
cattgggtacctcgagtccggccgggattgcttctcctccccgctcgctctcccccgcgctgtactttctcttcggcgaaaaccccacaggccacaactaccgaccagagatggccgcggtgaaaccccaaccccatttctcgccgcacgccacctcccccgcgcccgatgccggacctgccgacaccggtttcgccgtcttccgcctcctcctgccctcgtccttctccgacgccgacaccatgcgcctctacgccgccgtcaacccgttgcgccgccgcactgccacgctgcaggtccgcgtcgagcccctcgaccccgcctccgcgggcggccgtgtcgtcgccgccatagttggccccaccgtccccgtccgccgcgtcgaggcctcgtcctcgtccgcggagcccctcgcgctctcgccggcgcaggaggcgctagtcgccgtgattgataccgagggcgcgctctgctgcgcagtcgagaaggaggctcgcggcaaggcccgtcccgggtgcatcacgtgcctgctcctggtcgatgctgaccggctcgaagcttcgaccgggagaggcgtcatggagaggatcgccctggaggccggcgccgacgtgcgcgtcgcgatgtgggaggagggcgcgcagccgccacgggggcagccgcttgaggaggttgtcgagataactggagatagaacagctgtaaggaaagctctagttgctttgtctagctttccttcaggtgaacttccaatcggtaactcaacaacttatgtta

SEQ ID NO: 8507 - DNA, 317 bp, Zea mays
  Clone ID: MRT4577_107755C.1
agggcccgggcgtcgtgcctcgtgggtcccacgcgccaccccgcggtccccgactgggcggggcgatccgacgggcatgagactcccgccgcggtgcgcatgggtcacggcgccggatcgggttcggctgcagtgggtacgaagttcggcacgccccggtctaccgaggagccgtggcaccacagggagctctggtctattcgtgcgggtaaagctgcccagacagcgacgtgcgactgggacattctgaggccagcagacggtggacgagcattggacgggacgcacggcactttgttgcgataacgatgaagctg

SEQ ID NO: 8508 - DNA, 654 bp, Zea mays
  Clone ID: MRT4577_107756C.1
ctgtgcggcgctcgaggcggccgtttccgaaatggaacagtgaaccgtcttctcgcatttcttcccatccgatccccccttctctatcgaaaccgccagctcgccccgcatcgatggtgaccaaggtcgagaagaaatccgcggtgaatataacggcgaaggaggagcccgcggccgagaaggcgcccgccgggaagaattcgaaggcggataatcgggtccccgctggcaagtccgctgtcaaggaaggcgtctaggttatgaggggcaagaagaagggtatgaatgagtgtggagacctacaagatctacatcttcaaggtgctgaagcatgtgcacccggacattggcatctcctcccaggccatgtccatcatgaactccttcattatcgatatcttcgagaagctcgctgctgatgacggcaagctcgtgcgctataacaagaaacctaccatcacctcacgtgagatacagacctccgtgcgcctcgtccttcccggggagctcgccgagcacgccgtctccgatggcacctgggccgactgcgagttcacctcggactatgctgcgcggtcgccgcttgtaggattctctcctgtgttcacgtatcttgctgcatttaggtgctgctgcctgctggcttctatgcat

SEQ ID NO: 8509 - DNA, 265 bp, Zea mays
  Clone ID: MRT4577_107757C.1
gtggatgagcaaaagagtgaatatccatgcatgatgcaacgctctgacacggcaaggacgtaacccgtcgtatgcgcgttgaagacgaggacgacaggaggctaatgagaaggccgtggaaacccgtcaccgcaccctaatactgcaggcatcacggataccgggccacgagggggccttgcggtgacaaggacacatgcacgggggacgtcggcacgcagacggggggtcctaccactgctgacatacttgacctcactagctc

SEQ ID NO: 8510 - DNA, 268 bp, Zea mays
  Clone ID: MRT4577_107758C.1
agccgtccgaataaggtgggggcttagggatggttacctttttagaccgctcctcccaccctgggtttttaattgtttaaagctggccagggggcttaatttggttgggggccgccccctaaggggggctagggtggcccgctcaactaaggagggcccttaaaggcgtcgggtcgggggtttaaggcgtgggggtttggtaaactggggatggggggccgggaggctaaaatatataataataaacctaaattggcaaggcaatggt

SEQ ID NO: 8511 - DNA, 501 bp, Zea mays
  Clone ID: MRT4577_107759C.1
ccaccccaaaaatagctgagtaaaagctgcaaaaaaaccctgacataataaacaggcccccctttttatggtttggtacccaaaacccaaattcctacgggttttacccaaccaaaaacaaattatccaatacttttagggaaccgggggggagggagggagggacccacccttataaaataacaggggaggcttaacatgggccactaaataatataaacagccgagggaccaaaatagaacccttcctactcaacccttagcgcgggggaaatgctccccagggggggatattttaccaccaccaccaccaaacaaccaaccaaccaaccaaaattggttttggagggggaaaaggagggggggcggaaggccggggtaagggaaacaatgggaaacccttttgtttggccccaggggaaaaacctggtttgaacggtcaaaaattccaacatcagcagttttgaccctggtttttttctcaccaagtaaaaggggttc

SEQ ID NO: 8512 - DNA, 3268 bp, Zea mays
  Clone ID: MRT4577_10775C.1
gcccaaagacagccagcgccgtggcggggcgttccataagcatgggctgtgaagctcagaagcttgttgtaaatttacccagacactgggaaccagtcaattttctcaactagctgtggcgtccgtcttggactcgaagtccagaacctcgctgtttcgagccgcagagagacgcgcgcaggcaggcgagcgacgagcaaatgacgtctctccttccttccccccctgctccggcccctctacaaatcctcgattaaaccctagacttccctccccagccaaatgcgcgccccctcctaggcggcgcccctcgaattcggcaccggctccgccgaatccacggtgcgtacaatgagtgcgggtttcgacaagtggatattggctcagaagctttcgaagcttaatagctcacagcagaccatagagactttatcacattggtgtgtctttcatcatcgttgctgccaacaagttgtagaaacatgggattctgagttccatgcagctcctggagagaggagggtgtctttgctgtaccttgcgaatgatattatgcagaatagcagaaaagaaggtaatggatatatagctgaattcatgagggtcatccctgctgccttgaatggagtgttgactgtaagagatgattttgggcggaatgtcccaaaaagactgattgacatatgggaagaccgtaaaatatttgatacccaggcacaaagcctgaaagatgattttttcaggaggttaaaggacattagaaaccagttgaaaaatacaggcagtgagcagctggagaaggttgtctctagctacaaacatgtcctgaatgctcctatggatgaggatactctgatgcgaaaatgccaagcagctcttatcaattttgatgaactcaataaaacatatggaaataactccattttaggtaagctatatgtattcaaaggatattctcacatgtgcagttattattattttctagttaatatgtagctaatagcatgcagaaactagtgattatgtggacttcacctctgagctgtccgtcaagctgtcgggagccgacaacgcgtgacaagctgagtgaggtgagaaaaacttcaatgttgatcgtgtgcaaattgtcgtgaagtttgccaagtactagcggttccatgcgtattagtcacaaatctctcaaggattctagcggcttgtgtggacaaccgtggatgagcctgcctacaatgcaattgttcggtgagatccaattgaggcatgttttcctatgtaatcttcttattttcaacagatacagcaattgcattcttccactgcttagtttcttcagccttaactagattcaggggttggtggtgtcatggtcctctgaaatatgggcagcaaaaggacctacgcttttgatgatccttgcatactcactgttggtttataagggcgataacaaacaacttcaagcttagctttgtgaccacaatgaattgtccccttggcttttgtgagcacacactaaataaaatctgaacaactgaaattgaatataatatgccacacgatatgcgatggagaattgattcatagccttataggctggcttggcagttggcacaaccaaattcttgtcccaacgtcagtgcaacctgcttacttgcttagatccagctaactttaacgaggttgcaagatgataactagattgtttgtcttctttgtcctgtagcttgaattttctgttgcatattgccaggtagttgcaatcgttcgggctttatgcaggagctgcaggaacaacataacattctcagaaactccatcgaacaacttaaagtgtcagaatcactcagggccaccctgatttttcatttgaaggaagcgttgaatgagcaggagttcaaagtggaacaagtcagaagccagcttcaggcagctcagccccgattcaagagagcttctgagctctgcgtggggcttggaagcaacatggaaaggcgtcagccatcaaatcaagggcttaagaggtccagcctctccgatccacttagcactgttgctccagaagctgtgaaatctcttcaaaagggacagtcaagtgcagtgttgtattcacaggagggaaatggttttgagcacagcgtgacagagacaaagcttgctgcaggtgatgcttcagacaatatacgtggtggtgatttgtcttcacaagtgaatgggggcaacaccatgctgaaaatagaagagcacacttctggtaacaagaggcagaagctagaggatgacacagatatttctcagcctcaatcacagtcaccgccgaccgccacccccattccctcatcctgacgcattccaaccaccaccaccaccacctgagtatcctcgatcaccagagcctagcccaccaccaccaccaacttcactgccacccaatatgatccccccgccgccgccgccaccaccgcaatgccactccaaatgatctcacatctaccacctccagctggtacatttgtaccttttcctgctggaccacctggcccaatgtattgcacttatccatcttttactcctgttgtcaactttcccatgaccagcccacctggtttccgtaatctaaccccgcctccatcttttcgtggattagctggtacattctatggccctcagttccccacggcgcccccaccagcagacaggaaataagagtagtaacttacctgcagacttacagtgccagcagctttggcaagtatcataccagtttttttctgtttcaacagaggatacaaactcgtggggatgcgtcaccatgtgttgtagagctcaggagactgttctattgttgtacattcagccagtcagcgtgcaacagtcaattttctgaactagttctggtcttggtcccagagtagaaagtgtagagcctgtacatgtcggctgctagaggggatttggaattccgagagcccggacccggagcaaatggctgcgtcagtttaatgatcgactgatccagtagttcctggtctaggcggtggagtaaaaactgtagattccgacagcttagggagaagatatggaacccaatagccgaagacagatgttgtagcatgacatgttgtaactcatcacagttgtgctcttcgctagatcatccgagaacacctagatgttcttgtgatgtctttgagcgtgtaatactgctgtttggtgtaagatatggcttcagctgctgtcgatggtcgaatctcttgctctgtttttaatt

SEQ ID NO: 8513 - DNA, 479 bp, Zea mays
  unsure (1)..(479): unsure at all n locations
  Clone ID: MRT4577_107760C.1
cgggnccgaaattccgggttggaccacacccttccggaacaaaggaccttcggcccccgttaagaatcaaaattttcccaagcaagttttgggtgggccttttctttttgggaccacttcaaaggtttttggggtagttggccattttaacaaataaagttttaatgtttgatttcaaaattaaaatccaaactgctttgaatcctttggttgaggccaatgttgggaactttggtgcggaagaagggtaaaaggactacttcaacgtccccatccagaagcgaaatggtcgaaggagcctgaccaccgtccagggattgaaaaaggagttaagttccagcaagatccttaaaaaatttaaagaaagagttttgttgaattggaccaggggtccaggaccaaaaacttgacaaggtaattaagttccagggggatcagaggaagaccgtttggaatttcttggtccaggccggtatggt

SEQ ID NO: 8514 - DNA, 459 bp, Zea mays
  Clone ID: MRT4577_107761C.1
cccacgcgtccgttctctttcactaaaggatagatgtggcctcacgaccagatgaagcggccgtgatgaagactatgcccgtcggagatcaagcgaagccactacgtccccggctcgctgatgaagactcttcggtcttcccctcagagatcaagagaagccactaggtgaactgtgctgagaagcaaagtcaaacaagaaataaggagaaactggctcattcacaagacatggagttctgtctatgaagactgtgtagacactacacagaaccatatagcatgaaatggaaagcaaataactgaaccacctttaaatggaaaaactattataatcaaactagtcaagggtgttttagactttgggtatgccattatgaaggtgacgacctctataaatatcccctaaatatattgctcatagatattgaatcaatacccaatagagcttattcttgca

SEQ ID NO: 8515 - DNA, 377 bp, Zea mays
  Clone ID: MRT4577_107762C.1
atctttgcaagttggttggatctgaagttctgtactgtcttaggatgttattatgtaacccgaggtggacaaaaaaaaaaaaaaaaaaaaaaaaaaaaaaaaaaaaaaaaaaaaaaaaaaaaaaaaaaaaaaaaaaaaaaaaaaaaaaaatatgaaaacaaaaacaaaaagagttcccaaaacaacattaatggctgcctcttaaaacattggcagcaacaaggacttgatattaattgctggtggaaaattgttggggctaaaaattaccaccaacctactgtgcgaaacattaaatgtgaaaacatgaaaaagactaataagcggaaaattaactaaaggcttatggaaaaaaaccggtttcaaaaataaaaact

SEQ ID NO: 8516 - DNA, 312 bp, Zea mays
  Clone ID: MRT4577_107763C.1
gcggacaggtcgagcacctgatatctaacacccggcccccatccgcggacttactactacgctctacatctcagttttgctggtgagcttcagggttgatctcagatcgcccccagcttctctgacacatgagcgggcgcgagcctatataggcgcgccgctacagagatgccgagagaatctctgggctaccggggtgtgaacataaactaggtgccacggtgctctgccttgtgtcccacactgtctacttccacttctagagcgaaaagggacgcgcactgctgatgggtactgcgctgttaggcagga

SEQ ID NO: 8517 - DNA, 461 bp, Zea mays
  unsure (1)..(461): unsure at all n locations
  Clone ID: MRT4577_107764C.1
ggtacccccgtggtcctggccggnngtatgttctacagnatcgngtttttcttgctangtttgtctctatacataannattcctcccttttccccccctttctttattgcaaaaaagcagcagagttctatcncatatcccatcttcaccaatgtncttgntagaggggtatctttttggtaatcactatggcattctgagtggaaagtanctatgataaaanctaatctattttatatacatagaattctgttnatctgttaatgggaccgtgggaccggtggtgcagtgccaacaacataaaacttaggttctcatgtgattcttgatatcattgcagcttattgtgagcatctacatccattattattgattattgcttccactggcttctctctcaaaacatgtaggcctcttgaagttatggaacttgccccagaaatagatctagttcatggagc

SEQ ID NO: 8518 - DNA, 830 bp, Zea mays
  Clone ID: MRT4577_107765C.1
accggtcacggccttcccgggcttaaaccccactggtgccttgccctgtggtcctcgctccttgatccactcctcctgcagctcctcctcgcacagcacgtctcctctccccggcctccctctctttctctgtccttggtcctctccccagcagcctccctctctctttctctatccctggtcctctccagataacctgacacagtggtcacgcttgacaaggagagagaaaggcgttgcagcagctgatccgcgcccgcccggccgggagcgcaggcgaaggatggaacaatacgacgggctctttcctcccgcctacgtggactcctcctcatccctcctcctggtgcccaacgccaacggcactgcgcaggaggagagaccgagagcgcggcgcaggaggcgtcgagcagcgaggtgcggcggcggcggtggcgagctggacggaggaggggaccacaagaagcggcggctgaccgacgagcaggtagagatgctggagctgagcttccgggaggagcggaagctggagaccggccggaaggtgcacctggccgccgagctcgggctcgacctgctctatgttcctgactatgcctacgctgacagcagcgtggtcgagtggtttagcctgtatggactgatgtaatcgatggtatggtatgccatcgtcgtcggcagattaattctagctagctactcatcgtagcgtgtcattgctgtgctgaattgctgatttctatgtgcgccctcttaatcatatgtacataaatcaagctatcaattactggcaaaatatagccagctagcagcaactagtactttaattc

SEQ ID NO: 8519 - DNA, 413 bp, Zea mays
  Clone ID: MRT4577_107766C.1
atataatcactgtgcatgctgcaacagtggtgtcagcaacatcaatagataagaacatataaccatcagatgacactaccatatagtttagttatacagtgacatatcaatagctgatactatatactctaaagcaacatttgatgggtgaacttggtggcccccatggcctctttggtggcccccatggccctgttggctgcttcttctgccttcttggtgttcttcttggtggccctaccactatccacgccagcggccccaccatcttcttcgctctcagccgcatcttccttactactggtttcactgttgtcgtcggctccagtcttaccactatcgcctctcccagcagctctcgtggtggcggcgtgggtcttctcggtttgcttaatgttacaattgtcctcctc

SEQ ID NO: 8520 - DNA, 1062 bp, Zea mays
  Clone ID: MRT4577_107767C.1
cccgggcttaacaccccagctggtgccttgccctgtggtcctcgctccttgatccactcctcctgcagctcctcctcgcacagcacgtctcctctccccagcctccctctctttctctgtccttggtcctctccccagcagcctccctctctctttctctatccctggtcctctccagataacctgacacagtggtcacgcttgacaaggagagagaaaggcgttgcagcagctgatccgcgcccgcccggccgggagcgcggcgcaggaggcgtcgagcagcgaggtgcggcggcggcggtggcgagctggacggaggaggggaccacaagaagcggcggctgaccgacgagcaggtagagatgctggagctgagcttccgggaggagcggaagctggagaccggccggaaggtgcacctggccgccgagctcgggctcgaccccaagcaggtcgccgtctggttccagaaccgccgcgcccgccacaagagcaagctgctcgaggaggagttcgccaagctcaagcaggcacacgacgccgccatcctccacaaatgccaccttgagaacgaggtgatgaggctgaaggacaagctggtgctcgccgaggaggagctgacgcgtttcagatccgcgggcaaccacgcggtctccggtgacggcggagacgtcatggcccgtgccgtctgcagcgggagcccgagctcatcgttctcgactggcacctgccagcagcccggaggaggcggcggcggcggcgatcacctgggggacgacgacctgctctatgttcctgactatgcctacgctgacagcagcgtggtcgagtggtttagcctgtatggactgatgtaatcgatggtatggtatgccatcgtcgtcggcagattaattctagctagctactcatcgtagcgtgtcattgctgtgctgaattgctgatttctatgtgcgccctcttaatcatatgtacataaatcaagctatcaattactggcaaaatatagccagctagcagcaactagtactttaattcagatgtgtgttcttactgctaccc

SEQ ID NO: 8521 - DNA, 173 bp, Zea mays
  Clone ID: MRT4577_107768C.1
gccttcctttttttttttagggcttttatcagaaagcgaacggagcacaaccaaatgccatttacatcatatttaaatgcaagcagagtataagccgatacatgctccaaccactcatttaaattcaagcaaaccgaccaacgctcatcaagccacatacactaccttaccac

SEQ ID NO: 8522 - DNA, 1185 bp, Zea mays
  Clone ID: MRT4577_107769C.1
ggcaccccagcttacttaacaccccagctggtgccttgccctgtggtcctcgctccttgatccactcctcctgcagctcctctccccagcctccctctctttctctgtccttggtcctctccccagcagcctcgcctccctctctttctctatccctggtcctctccagataacctgacgcagtggtcacgcttgacaaggagagagaaaggcgttgcagcagctgatccgcgcccgcccggccgggagcgcgcgcaggcgaaggatggaacaatacgacgggctctttcctcccgcctacgtggacgactcctcatccctcctcctggtgcccaacgccaacggcactgcgcaggaggagagaccgagagcgcggcgcaggaggcgtcgagcagcgaggtgcggcggcggcggtggcgagctggacggaggaggggaccacaagaagcggcggctgaccgacgagcaggtagagatgctggagctgagcttccgggaggagcggaagctggagaccggccggaaggtgcacctggccgccgagctcgggctcgaccccaagcaggtcgccgtctggttccagaaccgccgcgcccgccacaagagcaagctgctcgaggaggagttcgccaagctcaagcaggcacacgacgccgccatcctccacaaatgccaccttgagaacgaggtgatgaggctgaaggacaagctggtgctcgccgaggaggagctgacgcgtttcagatccgcgggcaaccacgcggtctccggtgacggcggagacgtcatggcccgtgccgtctgcagcgggagcccgagctcatcgttctcgactggcacctgccagcagcccggaggaggcggcggcggcggcgatcacctgggggacgacgacctgctctatgttcctgactatgcctacgctgacagcagcgtggtcgagtggtttagcctgtatggactgatgtaatcgatggtatggtatgccatcgtcgtcggcagattaattctagctagctactcatcgtagcgtgtcattgctgtgctgaattgctgatttctatgtgcgccctcttaatcatatgtacataaatcaagctatcaattactggcaaaatatagccagctagcagcaactagtactttaattcagatgtgtgttcttactgctaccccgatgatcag

SEQ ID NO: 8523 - DNA, 465 bp, Zea mays
  unsure (1)..(465): unsure at all n locations
  Clone ID: MRT4577_10776C.1
gcgtccgggcggtttgaccttctgnccggngggngnananananananagnagaatcagnactgctgcgttcgatttgcggagggctggaggggacgcgagacgagacaggacggatcttcgccggagcgttgcgcagttcccggacaagggaggaaggcgtgggaagagggaggacgcgcgttggtctccgatccaagaggggggaaaaaaagaaggttttccttggaggctaccgagcgctacttcggccgtgtgggttgattcgtactcgtgtggtttgtttgttttgctcgctcgctcgctcgcttgcttttaccgagtgatctgaatgatgttgactgtttatttgagaaggtagcggtttattgaggatttaataaggttacatttgtggatttggatttttntggtttttttttatggtggtgttgttttaatttgtttaggtgagttattgttttgg

SEQ ID NO: 8524 - DNA, 371 bp, Zea mays
  Clone ID: MRT4577_107770C.1
gggcttgttcttttttgtcctttgtttcaattggggtcaagtggcgacattttttccgcacccccccccacggggccgcgcggggggcggggggcgggggttcccacaagcagtcgtagaaaaggtgagaaacggctcccaaaaacccggacccgggggggggcggggggggccgcccgggccgtcccggccgggaccggccggggccccaccgcccccccttgtgggcctgcgtggggggcggggcggccctgggctccgggggcccccgggggaaacggggccccgttcgctgttgcccctgcctcccagccggcaacattatgtgaaaaaccggggaggggcctggcgggggctctggtagatcaact

SEQ ID NO: 8525 - DNA, 836 bp, Zea mays
  unsure (1)..(836): unsure at all n locations
  Clone ID: MRT4577_107771C.1
gcacccctcttacttaacaccccagctggtgccttgccctgtggtcctcgctccttgatccactcctcctgcagctcctcctcgcacagcacgtctcctctccccagcctccctctctttctctgtccttggtcctctccccagcagcctccctctctctttctctatccctggtcctctccagataacctgacacagtggtcacgcttgacaaggagagagaaaggcgttgcagcagctgatccgcgcccgcccggccgggagcgcaggcgaaggatggaacaatacgacgggctctttcctcccgcctacgtggactcctcctcatccctcctcctggtgcccaacgccaacggcactgcgcaggaggagagaccgagagcgcggcgcaggaggcgtcgagcagcgaggtgcggcggcggcggcggcgagctggacggaggaggggaccacaagaagcggcggctgaccgacgagcaggtagagatgctggagctgagcttccgggaggagcggaagctggagaccggccggaaggtgcacctggccgccgagctcgggctcgaccccaagcaggtcgccgtctggttccagaaccgccgcgctcgccacaagagcaagctgctcgaggaggagttcgccaagctcaagcaggcacacgacgccgccatcctccacaaatgccaccttgagaacgaggtgatgaggctgaaggacaagctggtgctcgccgaggaggagctgacgcgtttcagatccgcgggcaacccacgcgtctccggtgacggcggagacgtcatggnccgtgccgtctgcagcgggagcccgagctcatc

SEQ ID NO: 8526 - DNA, 243 bp, Zea mays
  Clone ID: MRT4577_107772C.1
catgctggagcggccgccgtcgaggtgaaggtttgcagaatacgtccttatcagcggccccgccggcggaactagtgtgaaactgccgggggctgcaaaatggatgccgtagctataccagaggaaacgacaagtgatgtgatcatcgtatgattgaagccatgtgactgaggtgaggcatggtttgacgtgagcgcgaggattgatggcgagcataatgcatatgccaaggatgatggtgca

SEQ ID NO: 8527 - DNA, 854 bp, Zea mays
  Clone ID: MRT4577_107773C.1
aagctagacctctcccccaagcaaacccaaatcggccgccgtcccctctcctcctccgtcctccgcccacccccgccgccggtgccgcctcctcgcgagatctcgaccatggagggcagcagcggcctcgacgcggcgatcgagtcgctcctgaacacggagaagcagtgccgcctcgccggagatgtggccggcacccggaaggccgccgtcgacatcgtcgagctctgcttcaaggacgccgcctggaagacgctcaatgaccagatcgtcgtcctctccaagcggaggggccagctcaagcaggctattactgctgtggttcagaaagcgatggagtacattgacgtgacaccagacgtggagacacgtattgagcttatcaaaacattgagcagcgtcgctgctggaaaaatatatgtggagatagagagagctagattgatcaaaaggcttgcaaaaatcaaagaggagcagggaaagattgatgaagctgctgaaatcatgcaggaagttgctgttgaaacatttggctcgatggcgaagacagagaaacttgcattcattctggagcaggttcggctgtgcctggatcgtcaagattatgtgcgtgcacaaattttatccaggaagattagccctagggtctttgatgctgatacatcaaaggacaaaaagaaaccaaaggaaggtgataatatggttcaggaagcccctgcagatgtaccttcactcttagaactgaagcgcatctactatgaactgatgattcgctattactcacataacaatgattacctggaaatctgccgttgctacaagtcgatctatgaattccatccataaaagaggat

SEQ ID NO: 8528 - DNA, 259 bp, Zea mays
  Clone ID: MRT4577_107774C.1
actgccgcgaccgagagagtcagagagagcaggcggtttcaatggctggcgctggggacaagtggtacttctgcgggccgggccagcgcggctcgccccactgtctgttgctggcggtggtggtgggccttttggtggcgggcccgctgttcctgggcggcggtcgctaggctcttactgaagcccttgcttatcttctgagccccgtggtggctgttcttcttcccgggtgcccggtgttccttattcgtcttttttt

SEQ ID NO: 8529 - DNA, 445 bp, Zea mays
  Clone ID: MRT4577_107775C.1
cgactctagattgacatttcttagctccaacatcctgcaaaggtcacatagaacatctccaaacataggaacaacccaaactaaaagtcaaggtgcacttagctctttttgggctgcttccagttctagttttgacactgcttcttcttctagtaaccttgatctccttcttagagcttggtcttgagccttatgacttacaccacattaatatagacatttcctcattggttgtaagtcacgtccttatgtagtgatccttgatgtgccgtagctgttctcaacttgatcacccttgacttcgcaagccttcttcttcacccttggctttgggttcctcagcctctttgaccttctcccgtgcacttggtacctcgaagcttttcttgcctccgtccttagcttgatcagttgtctccgagctacgcacctgagtctcacttta

SEQ ID NO: 8530 - DNA, 573 bp, Zea mays
  Clone ID: MRT4577_107776C.1
tacgtaagctcggaattcggctcgagttgctggggtcgcacttgctgccgctaccgcagctgcagccgtgggcggcctcgccggactccgccgcggcctcgacgaactcgggcgcggccttcttctccggggccaccccgaggacgacggtgggctgcgcggcggtgctcgtctcctccagcttgagccgcagccgcagcttgatccgcagctgcaagacatcctcgaccttgtggtgcaaaagaagctcgatctcttgaagaatcaatgaaacaagtcgtcttatttgcttggctgagcttgagcaccatggacacctctttttatagcaagtgaggatggatcatcgatggaggcatgatgtatgggcaacgcgccgtgtcaccacgccataggctcttgcttgcaagaaccggtccaatgccccacttgtctcctgatcgaacaattattcttgcctggaatattacgtccatttcgatttagtaataatccaccagttcgtcctagctttaatctttatttgtaagtaaaactttccctgtcctttttaaatataaaagacccggtttt

SEQ ID NO: 8531 - DNA, 227 bp, Zea mays
  Clone ID: MRT4577_107777C.1
agctcggaattcggctcgagccggtttgactactttattttgctatagccaacctgtgaaactcgcacggtgtggcccttctagagacgcgaaggagataaggctggttccgacagcacaaacaattgaagcttctggttatgctcgtccgataaccctaaatggtaacacacctgcagagggaaacgaggtcgtacagtttattgttgaggatggtttatcatcaa

SEQ ID NO: 8532 - DNA, 857 bp, Zea mays
  Clone ID: MRT4577_107778C.1
cattgggtacctcgaggccggccggaatatcctttgcacctgcgctgatccgttccaatcgatcttgcacctcctcacctcctcagctcggcgcctcagctgatcatggggggagcttctgattctaaccttcttccccctggcttccacttcttcccgtcagacgaagagctcgtcgtccacttcctccgccgcaaagcctcgctcctcccatgccagccggacatcgtgcccacggtgtgcatgaatcaccacgatccatgggaactgaatggcaaagcgcttgaggctggtagccagtggtacttcttcagccacgcgaagcaaagtagggccacgccgaacgggtactggagctctgtttgtgctgacgagacggtgctgagcggcggcggcggctgcagcgtcgtcgtcggcctgaagaagacgctcgtcttctccactggagagccctctgatggggccgaaacaaactggatcatgcatgagtatcacttgctggatgggaggacggggggtagcagcagcagcagtagcgcttcatcaatccatagttcgagcaagaaatcgcatcacccaaacacagagttcagtaactgggtgatatgccgagtgtttgattcgacgggcggcgggtcgcaggcgaactgccatgacgacgagggcatggagctttcatgcttggatgagttgttcctatccctcgacgactatgatgaagtcagcttgtcaagtaattagaagcctagtatcaccagaaccggcagtactagtaggcgctccctacgaattttacagaagatcaaatgattccataggtgtgtttagcccttaacactgcgtctaattaaacacag

SEQ ID NO: 8533 - DNA, 624 bp, Zea mays
  Clone ID: MRT4577_107779C.1
gaaaaaaaaaaaaaaaaaaaaaaaaaaaaaaaaacagcacagcagccgccctgctcggcgtaggagcagcccagagcgagcgagacagagggaaagagacacggccagccaggtaaggcaaaagagagagggcggaagcagcggcagagcggagagggagagagaagagcatatatgggcatggcgatgccctttgcctccctgtctccggcagccgaccaccgcccctcctccctcctccccttctgccgcgccgcccctctctccgcggtgggagaggacgccgccgcgcaggcgcagcagcagcagcagcagcacgcgatgagcggcaggtgggccgcgaggccggcgctcttcaccgcggcgcagtacgaggagctggagcaccaggcgctcatatacaagtacctcgtcgccggcgtgcccgtcccgccggacctcctcctccccctgcgccgaggcttcgtcttccaccagccacccgcccttgggtacggcccctacttcggcaagaaggtggacccggagcccgggcggtgccggcgtacggacggcaagaagtggcggtgctccaaggaggccgccccggactccaagtactgcgagcgccacatgcaccgcggg

SEQ ID NO: 8534 - DNA, 1075 bp, Zea mays
  Clone ID: MRT4577_10777C.1
gtacacctccgaggttctgccggggaggacgaagaagcgagacggacggaacggaacggaacggaagaagagaaccatttgcggggcccggcccgcccagccgacatgcttctgcttcccgcgcaggccacacgaggtggccacgggaattgttaacgcctgatccaaaaaagatgccaagaggagattactattcgtattccgggagggcgctggcgctgtgggatgagacgtgtgacgaaatttggaatcgacgctttagacgtgagacgattctgattggtctcgaggcggggtatcgctgacccgtgcccgcatgtcagcgaccgttcgtcgagcttgaggtaaaaggctcttttggtatacagtatttatgtagtagtatagttcctttttttcacgatttcttcctttttttcattttaagaaaaacaaactggagctggagaggagtattttattctatacaacggccgccgggcacatgccaaccaaccaaatcagcgagaccaagacctgaccaacgttatgctgatttactctagtattattctagcttagctgaagccgaaagcgcagtgattacagctaccgccatttactctagcagtttagttagctagtgtttggttgaggagccaagtagaacggagtcgttccatccctgattctaggaacggagccgctctgttctgtgtttggtaatctggaacagagtggctctgttttttgtttggttgcagagtgaacggaacgaagcgtgactgtgagagcgggatgagaacggagcggctccgtccggttgattttttggagcgaaatggttccggatctgaggagaatattccctaattggagcctccctaatcacggcaaagccggaaaacgacgaccgatacacgtaccccagcaagcgcaagctggatggagttacgcttacgcaagagagagagagagagagagagagagagagagagagagcatacgcaccgtgcgggtcggtcatgaggcgggagagcagcccggcgggggagctgctgtggcggaacagcggggaggccgagcccgggggtac

SEQ ID NO: 8535 - DNA, 366 bp, Zea mays
  Clone ID: MRT4577_107780C.1
aataagaagtccggttttagtatatatatagtatcaaatcatatcatcgtggaccaattaatatatggttacagcagatgcaatcggatcaaccaacatgcaggtagacacacgttcgtacatgagcacaaagactggcgccaaacatgcagagagagatagcaaactgaagaactctgtttctttgtctctcacacacaccacacaatacctatgtttggcagccagctcggccttgcttattattgttcaaccacccccccaagctagctaggtaattatcatatccatggtcgacgatcgatgtgatcagcaatttgcaggggtccaacctgcaggtgccaccgcagcttcagccggggggcg

SEQ ID NO: 8536 - DNA, 573 bp, Zea mays
  unsure (1)..(573): unsure at all n locations
  Clone ID: MRT4577_107782C.1
tttttnttttttttttttttttgtggggggggggggggataataaaaagtccgggtttagtatatatatatatatataggatcaaatcatatcatcggggaccaattaatatatgggtacaggagacgcaatcggatcaaccaacatgcatgtagacacacgtacatgagcacaaagacgggggccaaacatgcagagagagagatagcaaactgaaaaactctgtttctctctctttctcacacaccacacaatacctatgtatgggagccagctcggcctcgcttattattgttcaaccaccaccacaagctagatagataataatcatatccatgggcggcgatcgatgtgatcagcaattgcaggggtggcacttgcagctgctaccccagccgcaggcgtgggcgggctctccggactccgccgcgggctcgacgaactcgggcgcgggcttcttctccggggccacccccaggaccacgggggcctgcgcggcggtgctcgtctcctccaggggaggggacttcttgccccacttgcagcttgagccgccaccccagcttgatcccc

SEQ ID NO: 8537 - DNA, 468 bp, Zea mays
  Clone ID: MRT4577_107784C.1
aaacagtgaaatgcctgacttagacattgttcatgttgtagattccgtttcaatatccttaatgcattatatgtatatgaactttcatatttgacattatctatttgttcatcccttgatggtagtcccattatagtactccaatactctttttttaagaacaagaagggccaaagccctataatactctaatctgactatctgtagttgcaattaaatcattttagcacacaactagatacactgcaatatttattttggatgataacccaattagatatgacgtctaagactatatatattatcgctttgtaactaggtacaatacatgtatatatagttaacctttacatctatctgcttcctaaagataacttatcattacgatttacaacacatattttttatgatgtacaacttgaacaggtaccaaaattgtatatataccattaacaaaaaagaaacatc

SEQ ID NO: 8538 - DNA, 496 bp, Zea mays
  Clone ID: MRT4577_107785C.1
gctgggttgttttttttttaataagaagtgcgggtgtagtgtatatatagtatcaaagatatcatcggggaccaattaatatatggttacagcagatgcaatcgggtcaaccaacatgcaggtagacacacgtacgtacatgagcacaagagggggggggggaacatgcagagagagatagcaaactgaagaactctgtttctctctctgtcacacacaccacacaatacctatgtatgggagccagctcgggctcgcttattattgggcaaccaccgccacaagctagatagataataatcatatccatgggccgcgatcgatgtgatcagcagttgcaggggtcgcacttgcaagtgccaccgcggctgcaggcgtgggcgggctctgcggactccgccgggggctcggcgaactggggggcgggcttctttttcggggccacgccaaggacgacggaggcctgtgcgggggggcttgagttctacagggcagg

SEQ ID NO: 8539 - DNA, 437 bp, Zea mays
  Clone ID: MRT4577_107786C.1
ttcgcccttttaatacttttttataataagtccggttttagggtatatatataggatcaaagggtatcatcgtggaccaattaatatatggttacagcagacgcaatcggatcaaccaacatgcatgtagacacacgttcatgagcacaaagactgacgccaaacatgcagagagagatagcaaactgaagaactttgtttctctctttctcacacacacaccacacaatacctatgtatggcagccagctcggtctcgcttattatttgtcaaccaccaccacaagctagatagataaataattatatccctggtcggcgatcgatgtgaacagtctttgcaggggtcccactttgtgccgttaccgcaacttgagccgtgggtggcctttcctgacttcgccctggtctttacctaattttgccccggccttttt

SEQ ID NO: 8540 - DNA, 153 bp, Zea mays
  Clone ID: MRT4577_107787C.1
ttccttttcacctcttattccttgaactatgtgcacccctacaagctgtgctaccagttgtcttactcctatctttactcattcctctctcattaccccaacatcaattttgccttctatacctgcaccaaaaccaacattttgatgtttttc

SEQ ID NO: 8541 - DNA, 522 bp, Zea mays
  Clone ID: MRT4577_107788C.1
ataataagaagtccggttttagtatatatatatatatatagtatcaaatcatatcatcgtggaccaattaatatatggttacagcagacgcaatcggatcaaccaacatgcatgtagacacacgtacatgagcacaaagactgacgccaaacatgcagagagagagatagcaaactgaagaactctgtttctatctgtatctcacacaccacacaatgcctatgtatggcagccagatcggcctggtttattattgttcaaccaccaccacaagctagatagagaataatcatattcatggtcgtcgatcgatgtgatcagcagttgtaggggttgcacttgcagctgataccgaagtcgcaggcgtgggcagatttgacggactccgccacagtctaaaggaactagggtgcgctcttattgttcggggccacgctgaggacaatggtggactgcgcggcgaggctcgggtacttcagatgaggggactttttgcctgacttgctaggtggagcctaaagc

SEQ ID NO: 8542 - DNA, 618 bp, Zea mays
  Clone ID: MRT4577_107789C.1
cctctaccctcggccggatagtcgggactcaaaaccgccggcccgcctgcccgcggcacgcaacccgccacgcccaagcagcggagggccaaaaatgcgctcgcagttgccgtagcgccatcgcgtcgtccatccgctggggagccacgcgatggaggaggacaagcgggcggaggaggcgcggcgcgccaaggaggccggcaacgacgcataccgcaagtccttcctcgagacggccgtcgagcactacacccgcggcgcgctcctcgacccccgagatatctccttcctcactaaccgcgccgccgcctacttccacatgggcgagtataaggagtgcgtgagggactgcgagggggcggtggagcgtggcagggacctcagcgccgccaacaagctgatcgcgaaggcgctgttgcggaaggcgtcggcgctgctcgagctcgcgacatgctccggggattacgcaccggcgatcagggccctgcagcaatcgctcaccgagcattacagcgaggagacgcacgagaagctcaacaaggcggtggtagttaagaaggagtttgaggagcaagagcgattggatcaggagactgtttatcacaccgggagagaggc

SEQ ID NO: 8543 - DNA, 599 bp, Zea mays
  unsure (1)..(599): unsure at all n locations
  Clone ID: MRT4577_10778C.1
atgctgaattgctagaatgaagaaacanaatgcaaggtattaaccaacgagatccatactacttactacctcagcagtcagcacatcgggcaacaatacttcaaatagctatagtagcaggaatttgtatctttcacaaacaacgaaggttttaagtgaaattattgctgcatttacttagtgcggtaccaataaaggatatgatagtgcggtaccaataaaggatatgatagactcaaggcatcatcggagttttctaaaccgcaatcacatccttatattccactaaaataaacgagcctatatgcaataaggacactaatttaaatgtagaaaatgcccaaatctagtacccaaatttcagtgggtaacatataaaattcatggatttcctctccccctccccaccatatatctaacaacgtaaaaaaaaaactcaacctgcggggagtaagacatccccggacattatctatactagtttaaactttgcaaaactcacccaaccaaatcacctccatccctccaccaaataattggactcccacccaacacactataaaaaccaaccggacgcgtgggcggacgctgggtcgacc

SEQ ID NO: 8544 - DNA, 521 bp, Zea mays
  Clone ID: MRT4577_107790C.1
cccacgcgtccggaaaaatatacacagctgatcgatcgagcagcagaaacctgcacgtccaaccaaccaaaacccaagatgtcgagcttcttcccatttccgtccgcccctctcgccgttcttctcatcgtcacgctccacgcctccgccatccatgcgcagatacctgcctcggcaacgaccggcgccgcggtggccgccacaaacccgcagccaggaggcagtggcactggcggcggcgtagtgggcgcgggcgggccggacgcgcctctggaactctacatgcacgacatcctgggcgggtcgagcccgacggcgcggcccatcaccggtttgctgggcaacatctacaacgggcaggtccccttcgcgcggcccatcggcttcagcgcgcccaggaacggcgtggcgatccccaacgccaacgggcaggtgcccacgtacaacggcaacaccggcatcccgctggacaccggcttgtcccgcgccgggttcttgcagccagggactgggaacggcgg

SEQ ID NO: 8545 - DNA, 552 bp, Zea mays
  Clone ID: MRT4577_107791C.1
cacgcttgtagtcgcagcaccgtacccgccttgccactataaatatatgggaacaaaacccatcctcatggactaatggtgacccaaagcaatgggggtctaattctaccactaccctcctacttacactaaaaaataaatgaatggtgactaaatccgctcaataataataccggccaccgttttaagcccacagcatataaaacattggggctcagaacaactttgcacccccctcccaagataactgcccctcgcctgcgttttcttttagagcatctttgacctcatcaaaaccatcctccttgaggggggtatgtgccaaaggccaagatatacctcatgagatgcatgatcaaagagcttttcttgtatgactccccacccagggtgtttaactccaagatagatccatcaaacgcccgattttccctgctgaaagctttttgtggggagctcagaatatcctattagatcactgggaaaatatcagcatgttccaccactatctgatggggaggagccctctcaaaccgatcaatgtcctcagca

SEQ ID NO: 8546 - DNA, 820 bp, Zea mays
  Clone ID: MRT4577_107792C.1
cactccatagggcgattgggatcctcgaggccggccgggccattgggccaacatcgggcccattaaattgatatactcgagcacgcccgggacggcggcgctcggttccgtggcggggagtgttttccaggcggcggcgcggtagcgtgaaaccgggcgaccgagcaagcgacggccatggcgttctggcagacgcgcgattttctcttctgtggcatatgcggcaccctcctcaccttcgactccgtccgctccgcctcctgccctctatgcggcttcaagcgcgatgccaaagaaattgaagggaaagaaatacagtacacgatgaccgccgaggatattcgaagagggttaaagacacaaacggaggacgttgttgggcaaagaccagtgacaaataaagcctgtccaaaatgcgaccatccaaaagctgaattttacaacatacagatgcgttcagcagatgagggagagacgacgttctacatgtgtaaaggatgcggctgtaatttcaaagacgaatgaggagttatcctaccacttctacggatatatggcattggtgccgaagaaatttccagcgttgacagactagtactccctccgccctttttttatttatcatcgtctagttcaaaaatgaacggccgataaatattcgagaattgcaatctactccttgacattgttacattacatggatgcgcagatccatgcgttgtgcaaactttcttttgatggaacctgttttgtattttattcgagtgtgtagatgtctacttgcaacctttttacatctattccaaactataagacgttt

SEQ ID NO: 8547 - DNA, 257 bp, Zea mays
  unsure (1)..(257): unsure at all n locations
  Clone ID: MRT4577_107793C.1
tacccatttactgtgttcggtttatctttttttttttttgttttanttctttagcccacatccacaactctttaataaataacggggatccacccttattacctaagccgtcaatccatccctgacttaataaacaattgcaaatcccctacctagggacataccccctaatactaatacaacttaccaaacctttcacaataacatcaccccctatttttttacacatttgacgaattaacaccaaaaaataggcc

SEQ ID NO: 8548 - DNA, 389 bp, Zea mays
  Clone ID: MRT4577_107794C.1
ctttagaactgttgctaaaactgtccgtttctagagatggacagagagcacgagaacaacgacatctgcaccacccataacttcacatggaatcatatatgtgaaggaccctagcaggagctctgcaacccgttggtcacagaattggagagcagatttcagggtgctatacattaaattgaatcaccggagctttcacaacataattaaacggtctgataagtaacataaattaaactggcttagcactgggttacataggttaaaaggagcagtccctttggcaggcacagttccttatacctatattatctatacgggtaagggaccaagccaccatggttgccgccgctttgatacttagaaaccctgggccaaagcatactata

SEQ ID NO: 8549 - DNA, 401 bp, Zea mays
  Clone ID: MRT4577_107795C.1
gtcacgcgcagagcacagcaggagcgacgccagagatcgtgacgctcgacgcgaggcgaatggggtagctgtcgtgggtgttgctgtcatcatttgctgtccgcgcggcgacggcttcggccacggggttcttcctcctctacaatgaccacgtgttctcacgcactgcaatcatcagacagttggaggacatcacagaaacttctgaaaagcattatccagctcttaactaaaggatatcttcactggaaaccagtagagaagcaggatctatcactcaagcatcacattagttctgacttgcgcttacgtcatcgttacatctgcccatatgttattgattgctgcaggcagtagaaactgcagcattttaagccgtgctaatgtattgttgacattct

SEQ ID NO: 8550 - DNA, 250 bp, Zea mays
  Clone ID: MRT4577_107796C.1
ccgaagcgtcggactctatcgccttcgcgatcgcactcgagcctatcttgtccgcaactacatccactcgctttggttcgtcgacaacccactcaacggcgacgtgctcaaggtctctgacatcatgtacgcgcggccgagccatcgtccggcgatgacgcttcgtagctcaggcgaccgatcgagcgtagtcgttcctcgaaaactcgcgctatcagatgaactagaccgtcgagagcatggcattggt

SEQ ID NO: 8551 - DNA, 280 bp, Zea mays
  Clone ID: MRT4577_107797C.1
ttggacctttgggctgatttatgtgcttgaagaaaccgtcgccttcgtggacgaggagtaaatacttcgcgtaccacgctaagagtgacccgaagaccctcatagcgacgagatcgatgagcggacgcatagaggcgtagcccacacgaacgtattagacggcaacactgacggcccggaacggctatagccgggattcaccgcttacgtcaaacgctgactcgggtttggtaacatcctcccaggcgggtacagtcgggacgacccgacaggccccccc

SEQ ID NO: 8552 - DNA, 373 bp, Zea mays
  Clone ID: MRT4577_107798C.1
cccacgcgtccgcccacgcgtccggaggagcccagctgagctcctcgggccgttttcgggcgagcggggtgtgtaagtttcctgacctgcttcgggctcaactcctttacggggaagcggtaaaccaagacctttgtgctggcctgggccaccaagttcgccacgagggactctatcttcaacaggaacttaagccttcttggcacaggcgacggcaaggacacgccactcttgttcaaggaagggcaggacttgttcaaattctacgccagggggagacgcttttgccagggcatgctcgccaccatggagatgcgggcgcggcacgacctgctgtcaaggttcgtcgagctggtcttccttgggaaggaca

SEQ ID NO: 8553 - DNA, 230 bp, Zea mays
  Clone ID: MRT4577_107799C.1
tccttgtatccgggcggattctgaattacaggacccaccttatccaaagagccttgaactgttaaatgcacagaaaggtgtactgaattccagtgaagaggccctttttaagggcttaagttcttttcgtatgacttgagaaataggtgacagtcggttggctgcttttatggacggtccagatcccctatgtgccctagctaagagcagaacagtgccagttcatgaaa

SEQ ID NO: 8554 - DNA, 708 bp, Zea mays
  Clone ID: MRT4577_10779C.1
ccggccgggaagtcctgacgtaagcctgaaagggttagctccatgactcctaccgagcttacctagagtcggatcgagaagtgactgaaaagagcagcatggaatcatggaacgtactatagatgttacagcgcggtgtatgtgggcgcagcatcccctacgtcacgtagacccgcaagattagagcatctgaaacatgctgctggagtgacatacagaaaaaaaaacactgccaattctggtcgtatcactccccagtcaccaatgtaacgagcctggtcaggtgcaaggaagcgtgagatcttctcgcatgaatgcaagccgtgggtgtattttaggattgaaagcttgaatatgtgcagctagcactagggcatcaatttcgagcattcatgatactgctgtcaggaagtagtgcgactactcctacgtactgaatgagtgcgagcctgctatgcctgcagtatcatctgttccttggagaagaacccgcgcctcatcttgaactgctcgaggtcctgcacccctcctccttattgaagcgaagccccttgaaatgaatgaaccatgcatgcatgtgtgtatgcatgcgacctggtgtacggtcgatcagctcacgagctgagcgagtctatacttacgtggacaccgtgtggccacgcatgcgatgacatctgatatgaactgaactatatattgtgttcctat

SEQ ID NO: 8555 - DNA, 312 bp, Zea mays
  Clone ID: MRT4577_1077C.1
gtaccaccgtgacttatagagagccgcatcagagcttgccctactcacggtcatagctgatcactgtgacaaaaatgatcctaccacattttcccaccacatactaaccaaaagcttaatgtgaaaatcctggggagcctagtgagcgagctaacacacattattagcgaagcgctcagtgtgagcttatcagatggaaaacatgaggtgctgattaaattaatgaatctgccaacgcgcgagaacatgcggcaagcatattgggcacatatgtgggcattctgtacagaagtgagacaggcaaccgttcac

SEQ ID NO: 8556 - DNA, 810 bp, Zea mays
  Clone ID: MRT4577_107800C.1
ccttcccaagttatgggattgccttactgagttccttagacctgtaaaaacagaagatggtattccggaagatgatgcaagtattgcacagctgggcagatcgtatgaggataaggacccacagtcactcattaataatatccaggtcgttcgttccatttcacctcacttggctgagcccttaaggcctcaactgctaaatctccttccctctattcttgggtgtgttcgtcatcctcatgtggctgttagactagctgctgcaagatgcatcacatctatggcaaagtcattgaccgatgatgtgatggtactggtgatagaaaatgtcatcccaatgttgtccgatttatcttctgtctgtgcaagacaaggagctgggattctgttaagccttcttgttcagggtttggctgtggagttggttccttatgctcctttccttgtcgttcctcttctgaagtgtatgagtgacccagatggttctgttaggcagactgtgactcacagttttgctgctcttgttcctttgctgccattatcaaggggtgcttctttaccatgtggactaagtgaacgcttatctagcagtgctgaagatgtgcaatttctggaacagctccttgacaatacccaaattgatgatttcaagcttaatattgatcttaatgttgaactacgaaggtatcagcaagaagggattaactggcttgcattcctccgtcggtttaagttacatggaattttatgtgatgacatggggctcggtaagacgctccaagcatctgctattgtagcaagtgacattgc

SEQ ID NO: 8557 - DNA, 512 bp, Zea mays
  Clone ID: MRT4577_107801C.1
cccggctgaataccgggccgacccacgcgtcgatcatctctagccagtttcttctctctgttcagcctcggatccatctctccaggcagtcaggcacggtactgtaaaagcaatgcactatacgtgctacttcctcggccaggactagctacaccaggcacgttgtatttggaattattgaacagcgtatttcttatgcaattcaacttatgagtttcttaacatcaatcacacggttcaactatagcttggctagacaaattatgaagaaaagtaggtagctgatctgtttgatttatctgtcctgccaaatacagctactgtctagctatatatgcatgtttaccattgtttgcatctaacatatagagaggtcttgttaacaggtcactttataagttagatagatggaaacggtactaaacttatgtccagatttgtaggataaataaatcaagcaaacctactatacttatcctcataatttgtctcgcacaagttgtagttgagcc

SEQ ID NO: 8558 - DNA, 680 bp, Zea mays
  Clone ID: MRT4577_107802C.1
cttcctctccatgctgctgtctggccggttcttagatagataaggcatcgccttgctcgccttggcgtcgcctaggcatctaggaggtggttcaacgccttgtctcgccctaccgctttaagaaccatggttatttgaacttgtagatgatgttaatatatttttcttaagaaactttgtaaaagttagagaaaattgacttaggacaaagccaaagaaaagcataatttgaaacgggtggagtgggaataaaaagctacagataactaaaaccgcccatgaatatcaagggggtcaaatgctttcatagttcaccattagctagaaacacttcattccagcatgacccacatctgatctgactgaacaccattcagctcgtccaagtaccttgacttcatactcttaatctgttgataggcaattttccagccagtgagaccacaagcacattcgccctaaaatgttctaacacctgtattactcaagctaaaacagataaatccatctaacagatacaacaatagctagcaattcaagaatcctcattctcctcactctccacctagcaagcgtgggaaaatcataatcccacattcgccctgccaccatcgaacaaactgtggttgcccccatttctaaccctaaccccacgaaaaatcacctcgaatggaagaaag

SEQ ID NO: 8559 - DNA, 478 bp, Zea mays
  Clone ID: MRT4577_107803C.1
cctggtccggcgacaagaagctccgttctggtgggtggtccccacgattcaaacccttttgatggatatacttcgttccagataggaagtttgttctgttaatctatcgcatcaaggtttggcatctacaagaccacccctcagaacgctgcccggtggtacccgaaccaggcctcgtatcgccctctgatgcaggctgatccgttaactcccgggtctacaggcccggtacttgctgtcgtcccggcttaccgtatagggcgtcgattttaacctcatccttgctaagaagatcaaccttctcaacaactactgtgaaaagcgcgctccatctgccctcgcttctctcctgatatatatagtctgggaagtctttatttttactcatgctaaacatcttggtagtatatcacatgcttgtcctgtctgcgagtaagcttctatgatcctgcatctggtaatgaatatctcttattat

SEQ ID NO: 8560 - DNA, 430 bp, Zea mays
  Clone ID: MRT4577_107804C.1
ttaaaaaaaataataaataaaaaaaaaaatttttttttggacaatctataataaaaaaaaaaaagttaaaaaaacttacaatgataaatattaaatattgtgtcgtgttaaacaaaaattcaatttattaaatctatatggggccgccccttttaagggaccaagttttccgtccccttacttcctcggttttctttttttttttggtctcctaaaattaaattattgggccgcggttttcacccttttgtccttggaaaacctttggctttcccaattttattcgctttgcgccctttccctttttctcctgttgcgttttttgtgaaagggcccctccccgttcccctttccctagggttgcccctcctgatgggtaattgggcccccccttttttcgtccttttaacccgggtggggttgtggtttc

SEQ ID NO: 8561 - DNA, 503 bp, Zea mays
  Clone ID: MRT4577_107805C.1
cacaaacaatagttaatttaattcccaagcaaaattttttggaaaaaaaacaggactttttgaggtccaacaacaggccaggagtccctttccatccaatttttccggacccacacggcacacacaaaagttccgggccccataacgataccgaggcaacaccatatttcccccatttttaagaacagccttataagggccccttctaaccggaccctactatgctaacggaaccaaaacctttgtttcccgccaaagggaacacgtgggaggggagctcttaacctaactagcggggggtggccaaaaagggggaccggcccataccctgaagggaacatgttgggggggggccccggggaggcatacccatatccgccgaaaaagggggggccaaagaacaggtggtccctccggtggacggagccacccctaaactgcttatgtgagggcctgcggccccataaaaggcaaactgcctgttttccaaggggggacccatt

SEQ ID NO: 8562 - DNA, 332 bp, Zea mays
  Clone ID: MRT4577_107806C.1
ggggcagggaattttacatccatttattacccccttacattaactggagcacgttttttaaacaccattgttttttacccctccattaaacattatttttaccgggcaccccaattgggtaaacttttggggccacaagggtttttttgcatcggctaaggggcatgctgggttaacgtaattttttccggacttaaactttggaaacagcgggaaccccttgggtgggtccaaaacaaaaccctctaaaagcaggggtaacctctaaacaagggccatgcaaagggacttcgggtcccaaggatttggaaacacgggcttgggattaacaa

SEQ ID NO: 8563 - DNA, 224 bp, Zea mays
  Clone ID: MRT4577_107807C.1
gtcgttcgcatgctgtgagcagactcgtttgcaatgatcatctgtatgataacgagtgagaatcttcgtagtacttatcctgggcagtaggcaatcatcttgaggtcatgattaatgagcagcatgcagcctgtatccacctcaggctagtaagcagataaactgctagcagaggaacagcgctcgtcagtggtcatagtacatgctgggtccaggaagctgcg

SEQ ID NO: 8564 - DNA, 619 bp, Zea mays
  Clone ID: MRT4577_107808C.1
tcgagttttttttttttttttttttttttttttttttttttttttttttttttttttttttttttttttgggggccccaaaaattaaaggggaccaataaaaccgggggccaaaaaaccccgagggcaaaacaacggaccaacattttggttaaaaaacctcccccttaacaaaaccatttaaaccccaaccctttttttcataaaggccaacccaaaaggggaaaaaaacccagtttcaacccaggaggctcggttttaaaagtaaaaaccggggcactttactccggcaaccaagtctaaggccagggaggggggaaccttaaaaaaagcttttggttcccccactctccgccccctcaaaaaacaatgccccaaagggctccccaaaaaaaatcggggctcccccattagccatcgggggagaagaaggacccggccgacttcggtccccggcccttggaaaagcccaactggttaaaacggggccaaaagggggcggggcctcttcaaaaagaaaggccaaaaggcaaaaaaaatttattcatcccggaaacaaaaaacgggggggcatgggcaaaacagccaaaaaaaggccgcccctaaaaaacaaggacctt

SEQ ID NO: 8565 - DNA, 171 bp, Zea mays
  Clone ID: MRT4577_107809C.1
atcgggagcgcctctaccgcagcgccatcgagcgccgccagtggactaagtttgtaggacgccctcaaggaggacgccggctccaggctacacatggtctccaacgaggagatcctcctcgagcgcccccacgcccagggagcatagtgaggagtcagctgatctggtgat

SEQ ID NO: 8566 - DNA, 583 bp, Zea mays
  Clone ID: MRT4577_10780C.1
cactacagccctgttccaaaatatagggagggtagcctttttcctaaatcaaaattctctagctgtaaagttgtagaaaaaatggatcaacatctacaacatcaaaaaattctccatgaaatgtcttgatagtgcattcaatttgagcttgtagatgttaatgtattctaaaaagttggcgaaattagagatgtttgacttaggtcaaagctaaagtgacctataatttgggaattgggatggagggagtagcttttaagataatattacatttcacaattttggaatttactgtaacagatttctttacctttttgcagccacaacttgaggccggtgacaaaagtatgttctctgttccctgagttctgagctccatatctattttagttgccattggaagtttacaggattattattttgcttctttccagttataatgccaccatcagctcttgatcgtcttgcatctctgcatattgaataccctatgctatttgaagtccacaatgcagcagcagaacggacttcgcattgtggtggtctggagttcattgcagaagaaggcatgatctacatgcca

SEQ ID NO: 8567 - DNA, 199 bp, Zea mays
  Clone ID: MRT4577_107810C.1
cgccggcatcaacgtcctcatctcaaaggtccatccatccatatcgcctcctggtctttttctgcgcaaatatttgccattgccttgccacgttaataatgacttgttactacgcttaagtcttgactgcgtgtgctgcaccctgagtgagcactcagaagtaaagtactcctacggagacggagtgccgcaaatttgg

SEQ ID NO: 8568 - DNA, 1426 bp, Zea mays
  Clone ID: MRT4577_107811C.1
ataaaaccagtcgtgaactatattattaaacttgctctaaagttacatcaacaaaaatgatatcacacacccatagtcccacaccaacacatgttcttgatttcccaagccgcaagtaaactttttcttgcatccccactcgtgataaaaaaggtcctcccaccacatacagacagaggcagcagcaagcaagcagctaccaaccaacctctgcatcacttgatcctcctgcacaccactgcccgtcagtgcacagagctagctatcttccatggctcaagagctccaagaaacgtcctcttcctctgccaccaccaccacctcgtcgtgtaccacctcttgctgctcgtccactgtcacggactcgtcctcgtcgcccccgtcaccggcggcggccaatgccgcgcccgcgccacggaaggcggaggccgagactggcggggacgaggacggttgtgctggtaaggcggcgccggcgaagaagcgggagcggagcagcgaggggaagcacccgacgtaccgcggcgtgcggatgcgggcgtggggcaagtgggtgtcagagatccgcgagccgcgcaagaagtcgcgcatatggctcggcacgttcccgaccgccgagatggccgcgcgcgcccacgacgccgccgcgctcgccatcaagggccgcgccacgcgaagtgcccgccacaagagcggcagctgttcgacttgccggacctgctcctcgacgtccgggacgggttcgggcgcttcccgccgatgtgggccccgttccatgacgtgttggaggtcaatgcggaggaggagccgctgctttgggaatagcagtcttgcaattacaaagagggtctaaacaatagtaccagtggtatcccatttcctcatctttgttctccccctctctttctttcttttttctttggaaaagcagctagttttttttcttcttatctttaatttggttaaataagtataaacatatataaacaagagagatataagctgtgtacttataagtgtaagacgagtaagtaccgaacagttaattattaaaaaaaaaaaaaaaaaaaaaaaaaaaaaaaaaaaaaaaaaaaaccaaaaaaaaaaaaaaaaaaaaaaaaaaaaaaaaaaaaaaaaaaaagggggcgcccctttaaaggaaccaaacttacctaccccgtccttccaactaaaaactttttttatggggcccctaaattaaattcaatggcccgcgttttaaaacctccgaactggaaaaaccctggggttacccaaattaaatcccttggaaaaaaacccccttttccccagtggggtaaaaacaaaaaagccccacccgaatcccctttccaaaaattggccaaccctaatgggaaatgggaccccccctttaacgggccaataaaccccgcgggtggggggg

SEQ ID NO: 8569 - DNA, 616 bp, Zea mays
  Clone ID: MRT4577_107812C.1
ggccgccgccgtgctggccgccgcgttcacgtcgccgtcgtcggcaccatcggagcccgacgccggcgcgccggcgccacgcgaagtgcccgccacaaagaacggatccccgtccgaggacgaggcaggcgccgaggcgccggtaccaccagcggcggcctctcagccagggacgccgtcgagcggcgtggacgaagagcggcagctgttcgacttgccggacctgctcctcgacgtccgggacgggttcgggcgcttcccgccgatgtgggccccgttccatgacgtgttggaggtcaatgcggaggaggagccgctgctttgggattagcagtcttgcaattacaaagagggtctaaacactagtaccggtggtatcccatttcctcatcttcgttctccccctcaccctctctctctctttctttttttttttactttggaaaagcagctagttcttttcttcttatctttaattgggttaaataagtataaacatatataaacgagagatatataagctgtgtacttataagtgtaagacgagtaagtaccgaacagttaattattaaagatactagtagtaccagtagtaataatgttattacagcgtgtg

SEQ ID NO: 8570 - DNA, 478 bp, Zea mays
  Clone ID: MRT4577_107813C.1
gccggccgggcctgcgtcagaacagcaaatgattcgactcctctatctactcccgaacacacgagccacgaggtacccccgatcctccgcctcctcctctccttcataagcacacacgcacagattcccgaacaggacaccctttctacatgcctgctgaatcctgaacaggcacagacagatctggaccaacctgatatctcccgacttagccctaccacaagacgccaaagacattcccgaatgaccgctgaacgaaatgccagcagccttcaccttctgaaagcgcgtgtgcgagaccaataccagcgcccagcagctaagctaatcaggtgacgtcacaccctagattgtaagacccaacagccgacaacatcactaactatacgctctgacccgatcaccatgcgcgacgtggaatcacatgtgaatcaggatgacacccttgatagctaaatactcctggatgacccatatg

SEQ ID NO: 8571 - DNA, 167 bp, Zea mays
  Clone ID: MRT4577_107814C.1
gccacaccgtccaccgtcacgtccacctttttccatggcgctccacgccgtctcctgcgcggcggtcttctacccggggggcgcgctcttacacaaccttccccatcgcccatgctgtggtttgtttaccaaagcagtccttcttgtattacttcacaaaatttgca

SEQ ID NO: 8572 - DNA, 664 bp, Zea mays
  unsure (1)..(664): unsure at all n locations
  Clone ID: MRT4577_107815C.1
aattcggcacgagggtctcacgcacgcacaccaccaccaccaccaccaccccgaacccgaatatgctgcccccagccgcgccggccgcgccctgatcccctcacccgatgcgccatccccgccgcctccccctcctccgctgccacgccgccgccggatccgttcccgcccggccaccctgcgctctcggcggcgacgggtcccgctgaccgccctgggcccggcccgctgcccccatcgtgcttgccccacccacctccgcctcgcgccggcgcggggtgcggcgacggccgctagggtttccggggctgtcgcctcgcggtcccctccccccgcggattcgcgcccttcccctacgggcgcgcgtcgcgcttagggtgtgcgtgggtttggacttctcctcagcttggcttgcggtcgcgcggtcccgaggagctccacggaagcttgatttgtaggtggggggggggttccgaggcagagacgccgatctgcggctgccggcgccgcggcattgcgccgcttcctaagcccccgagtgtccggagcctccgattcggctggtctggggaccctggctgcgacgggtgctgccttcagctcctcttcggcctcactgtaagcgtttncaggggtctcgcttctggctggggctagctgatat

SEQ ID NO: 8573 - DNA, 260 bp, Zea mays
  unsure (1)..(260): unsure at all n locations
  Clone ID: MRT4577_107816C.1
gcggccgctcgaggccggccgggcctcccaaaaaccagaaccacagcagcnccnngatgacacaaaggggggcaagcacgcggaggccaaagaacggcgagaggccaagcaattcgccccaacgcgcgggcaagggcaaccaagggagagaggagagggagaacgaccccgccgcaggcacaccggaggagcgcgccgaggccgacaggccgcgccaggagaacacccgcaaccgccgcacgcgacggcaaagcagcgac

SEQ ID NO: 8574 - DNA, 521 bp, Zea mays
  Clone ID: MRT4577_107817C.1
ggagggcagccatgaccaggctattttccacataaacaacatgcggtcaaaccatggtaattaaactccctgcatccatatgcatgtaattcaagcaattgaagagttcaacatatgtttatgacaaacgactataacttttcgacaacagcagcacagattggttaccccccacttcatggcctgatatgcaacgtgcgctgaccataaatgtaccttgatcccacacatccctaggctgagttttcaatgtgggagaagccccagttggtctcaaaggaatatggcgggtacatgggtgatccttcagttaagatcttccccatatggaatttgctgattgatgacctgcaacggtccaggaaggccaggaatcactttttaaccagcttaacagctcatttaaaagttatattctggctccattaatcacggactatcgggatcgccacatgatttgccaatccagttgcgacatggttttcctcccagtgggtaccaatcatattaaccatgccaaa

SEQ ID NO: 8575 - DNA, 292 bp, Zea mays
  Clone ID: MRT4577_107818C.1
tcgtgtcaaacgaagcaccttgaaggcacgtgtgtaaggctttaagaccctattatcttttagatctgaggttgcaggttaagctgcttgaacccagagatgagttcatgtcactcgacaacttccggacatgtctgacaagatactggtgtgacgacttaagaaaataaaggtttcttgaatttcaacgtgcgttgcaaccacttgcgtacataaagatggactatggatacttctatgctgcatgaatcagtccgcaccagctggaatctttgtaaaggcaacaagaaat

SEQ ID NO: 8576 - DNA, 3723 bp, Zea mays
  Clone ID: MRT4577_107819C.1
tcagccagaaatacgccgatccctcgggcaccacccgaacgtcctgctcatcgcttcacttattatctttcggatgagttggcttccttggaccaccatctttttttccttctctttctgtcgaatggcccaagaatccaaccaaaagcaacaaagaaatattatgttagcaggatcaataaaactttttccaccaaaaaaccaatcatttctggttctccaaatagcccaaaacaaagccccacaaccaaaaatcagaagatttgacattttgtttttaggatttttcatccagctatcacaaacttcatcaatattttttggaatgtaatccaaattaagggcaatttgaaccactctccagacaaatctggcaacagagcatttaaaaaataaatgatcaattgattccatgccaccacagaagcaacactcatcagaacctttccaatttctttttttcagattgtcttttgtaagaattttgtttctaatcaccagccatagaaaaactttaattttttgtggcaatttagatttccatagaaatctgtaaggaactttgatctgatccaaagaatttctcttatacaaagaattgacagtgaaccctttattgcccaatctccaaataggtttatcttcatgacttgacaagttaaaatcagaacataaagccactaactcatcaaaaagcccctgaaggttgccagtcattcttcttctgaaagaaagagcctcaaaatccgaagacagaactttaaacactgtaatgtctttgtctgaagataaatcaaacagaatgggaaaactcaaagccagaggctcatcaccaatccagaaatttttccaaaaactagtacgacgaccattaccaacagccatcttaaaatgcttaaagaaactctccctgagatttaagagttttttccaaaaatgtgagtcagtctgtctttgattaacagaaataaggggttttcccttaatatatttttcagcaattattctctgccataagccattagcattttccaaattccaaagccatttggatagcagcgcatcattcatagaacccaaattcaacacacctaaaccacctaagcttttggaggagcaaactgtctgccagttaaccaaatgcatcttttttgcctgggaaccaccttgccaaaggagactttttctgagtaaatccaactttttaataaccgatttaggagccggataaatcgataacatgtacagaggtacattagaaagagaactgttcaaaagggtcaatctacctcccagactcaagaatctccctttccaaccagccagccttttgtccattttttccaacataggacaccaaagagatttactaatcttcttattgtcaattggcacaccaaggtatttcattggaaggctaccaacaggacaagggaaaatgtcagcatataattcagtgaattctttttgctgagcttgttggatgatactagccaaaccatctttatgagttgcaaaataaggaccaattaaatcatttgtcttgatagcaactttaccacctctgatagtcttcataacccaatcactccaaatgtcaccaaaaccctttttttgcatcatacaatacaagaattgccagttaactttatcataagctttttcaaaatcaattttaagaatcactccactgtgctttctttttttcacttcatgaagaatttcattcaaagaaaccaccccatccatgatatatctccctttaatgaaaccatattgattagaactaatcacagtagtgatacaagacgcaagtctatttgtcagcactttagtaatgattttataacagacatttaaaagacaaatcggtctaaaattcctcatatccgtaggattatcaattttaggaatcaaagttataagaccaaagttaagtcttttaatgtcaagaaccccatcataaaaatctttgaacaagttccacaaatcattatggatgatctcccaaaaatcttgaaaaaattcagcaggaataccatcagggcctggggcactattgtggtttaaacggtagggaccaacttttccaaacaatctctttgaaatccggtcgaagtttccagcacaactcatatctgaagtctcttttaggagacacactccaggcttgtttttatcagattcttttcttaaaatattgaaatcacctcctatcagcataggatgattgcaatttgaacaaaaggaagccagctcagttaaaattttttgcttgtaatcattttgggcagcaccgtagacattaataaaattccaaataaaaccactttctttatgaaccaagagaaccttaatcataaaatcccctttatcaacttgtctgatatcaaaaacatcagcatctaaaccaacaagcagcccaccagatctccccttggcttttgtcaggaaggcatccttagccatagctcttgctgtcgctttatctacaatcttcatgtcatcagtagtttcaagtctgctgctccttcttatgccatcaccatattcaacatccatgccaattgattttttcccttgcgaagaagggatgactccctcatcatctttagcaaattcttccaagtcttgagaacttagaaggcattcttcactttcatgaaattcttcatcctcattagcagggtcttcagaaattgggtttagatcctcattcacagtcataaagtcagacttctgaataacatttttgccatgagaggttatctcaccaaccttttccaatcccagctcttctttcattttgtctcccacatttctggcttttttgccagttttttcacaagaaggatcatccagaccttgcctatccactgaagctctcttaccaaggttaatagaatcatcattccaaccctcttcagttatatcatcaatcttaaagaaaatatcataaaggtaaggtttcacacccacctcaatgataggaggaatcatagccacactcttgacatggactttgaacctaaccatatctttagaatctaaagataggatatcaacttcttcaatagcccctatagtagagcctaattcacagatagcctgataattttgcaactcctctggtacattttcggccacaacccatactgtgtgacctccctcaccagcagacgaagcaccaatgtcttccttgacttcagcttttccaataatcggcttcaatctccagctgggattacgaatcttgttccacgactgggaaccttgaggattctctttctgattccaccgatcccagttagggtttcttcccttcggatccatcttttgcaacggcaccgcacgcgacagcgccggccactcctcgtccacaagcgggggacgaatcggagattcaatccacccaccgcggaagcttacacggaacgacgacggaagcgaccaaagacgcgagagcgaggaagcaaggtgcgggaaggagtgcgagccaataaagtccgaaggaaaccctaagacagaataagaagacttcacctcgccacgaagaggagaccacggaggaacctgggccgcggcaatcgacgtttgctttccaaccgcgagcgcaccactcggaatattgacgacgcgtggagaaagaggcccaggaaggccccgatccacgctgctacaggaagaagacgatcgccattttttcttttttcttggagccat

SEQ ID NO: 8577 - DNA, 161 bp, Zea mays
  Clone ID: MRT4577_10781C.1
ggcgattggagtacggagatgggcgtgtctggtggagaaaagcttgagtactcttgtggagagatcttgcacatgtatcgttattattggcgctcgtgctagcatagtgtgtgtgcaaagcgactggtggtgactacagcgggcttttcaacgaccccttc

SEQ ID NO: 8578 - DNA, 3351 bp, Zea mays
  Clone ID: MRT4577_107820C.1
atggctccaagaaaaaagaaaaaatggcgatcgtcttcttcctgtagcagcgtggatcggggccttcctgggcctctttctccacgcgtcgtcaatattccgagtggtgcgctcgcggttggaaagcaaacgtcgattgccgcggcccaggttcctccgtggtctcctcttcgtggcgaggtgaagtcttcttattctgtcttagggtttccttcggactttattggctcgcactccttcccgcaccttgcttcctcgctctcgcgtctttggtcgcttccgtcgtcgttccgtgtaagcttccgcggtgggtggattgaatctccgattcgtcccccgcttgtggacgaggagtggccggcgctgtcgcgtgcggtgccgttgcaaaagatggatccgaagggaagaaaccctaactgggatcggtggaatcagaaagagaatcctcaaggttcccagtcgtggaacaagattcgtaatcccagctggagattgaagccgattattggaaaagctgaagtcaaggaagacattggtgcttcgtctgctggtgagggaggtcacacagtatgggttgtggccgaaaatgtaccagaggagttgcaaaattatcaggctatctgtgaattaggctctactataggggctattgaagaagttgatatcctatctttagattctaaagatatggttaggttcaaagtccatgtcaagagtgtggctatgattcctcctatcattgaggtgggtgtgaaaccttacctttatgatattttctttaagattgatgatataactgaagagggttggaatgatgattctattaaccttggtaagagagcttcagtggataggcaaggtctggatgatccttcttgtgaaaaaactggcaaaaaagccagaaatgtgggagacaaaatgaaagaagagctgggattggaaaaggttggtgagataacctctcatggcaaaaatgttattcagaagtctgactttatgactgtgaatgaggatctaaacccaatttctgaagaccctgctaatgaggatgaagaatttcatgaaagtgaagaatgccttctaagttctcaagacttggaagaatttgctaaagatgatgagggagtcatcccttcttcgcaagggaaaaaatcaattggcatggatgttgaatatggtgatggcataagaaggagcagcagacttgaaactactgatgacatgaagattgtagataaagcgacagcaagagctatggctaaggatgccttcctgacaaaagacatggaacttggtaattctgttgatgaatctatatcaaatcttgaattaattaaatccttggaattgtctagaaataatttggggttgggcaaaggtataaaaattgaattcttgaaagagttaattagaaaagagagaattgactttattgggatccaagagaccaataaaaaatcctttgaagattcttggttgcagtctattagtagtaatagaaattttgcctggttatggtctccagccaaggggagatctggtgggctgcttgttggtttagatgctgatgtttttgatatcagacaagttgataaaggggattttatgattaaggttctcttggttcataaagaaagtggttttatttggaattttattaatgtctacggtgctgcccaaaatgattacaagcaaaaaattttaactgagctggcttccttttgttcaaattgcaatcatcctatgctgataggaggtgatttcaatattttaagaaaagaatctgataaaaacaagcctggaggtacgaattgctggagttctctgtttaattccatcattgatgttaatagtttgattgagcttgatttgagtggtagaatgtatacttggtctaataatagggagcctcccacttttgaaaaactggatagatttctggtgagcccagaatgggtccttcaattcaaaaatgtggtggtaactggtgttgatagaactttgtctgatcatgttcctctctatcttaaaactgattctagtgtgtctcctaaaagagacttcagatatgagttgtgctggaaacttcgaccggatttcaaagagattgtttggaaaagttggtccctaccggttagaagtcgttctaatatcaatatttggaaagaaaaaattaaaagactgaaaaaaactttgaaaggttggaatattaatgttgaaggcaaatattctaaacttaaaaaagagttaagccaaaaaattgatctcatcgacaaaaaaagtgaaagttttggtatctctcatgaggaaagacttgaaaaattagatttggaatggaacttaaagaatttgatgattgaagattgctgcaaaaaaaagcaaatggctagagaaaaattcattaataatggtgatgaaaactccaagtattttcaccttattgccaaaggaaaaaaaagaagagttagaattctgtccttagttcatgaggaaaatgatgttaaaactgatgttaatatcaacaaagtggctactgatttttacaaaaatctttttggtccttctcctgtgtcgagcattaatatgtctaattttcatatggatatgcttagtgaggaggatcgtattcggctcactgctccttttactattgatgaaattaaatcggtggtgtttagtttaaaacacaatagtgctccgggccctgatggtattcctgctgaattcttccaagatttttgggagatcatccataatgatttgtggaacttattcaaagatttttatgatggggctcttgacatcaaacgacttaactttggtcttgttactttgattcctaaaattgataatcctacggatatgaggaatttcagatcgatctgttttttaaaagtttgttataaaatcattactaaagttcttacaaatagactggcgacttgtatcactactgtgattagtcctaatcaatatggctttattaaaggaagatatatcatggatggtgtgatttctttgaatgaaattcttcatgaagtgaaaaaaagaaaacaaagtggagtaattctaaaaattgactttgaaaaagcgtatgataaagttaactggcaatttcttttttgcatgatgcaaaaaaagggttttggtgacatttggagtgattgggttatgaaaactgtcagaggtggtaaagtggctatcaggacaaatgatttaattggtccttattttgcaactcataaaggtgttcgccagggtgatcctttttcacccctgttgtttaatctggtggcagatggtttggctagcatcattcatcaagctcaggaaaaaagtctgattgtttag

SEQ ID NO: 8579 - DNA, 192 bp, Zea mays
  Clone ID: MRT4577_107821C.1
ggggttcccccactaacaccgggccgaaaaaacaaatcacccccccccccaataaaaccaggcccaccaaaattcccaaatataccctcccggggtaaccccagggagaacaaccttctcgggtaaaccattcccggggtatctaaaacaccaaaccaacgaggaaagccttaacggcccaaaggcggggtt

SEQ ID NO: 8580 - DNA, 389 bp, Zea mays
  Clone ID: MRT4577_107822C.1
gacggaacgcaacagcacaacaactgtccttatctgtgaagcgcaccatgccggcaaactcaatgacgacatcacacacatgctggcactgcagaacccaccgatggcgagcgtaatcaacggatgctcatgctgatgtctagactacagtaggtacacatgcaagatccactggcttgagggtatatttcgtgcacatccgacgggttatacatggacttatgtaagatgaaccttcccacgctgggcgcgctcctaaacgtgtgggcggacactgtggacatcatatgaggttgttctcgggaggtacgccaccacagaggtcgccgtgcgactagccgacgcccgctgcagcttgcaccttggtcacctggcgcgccgtgatgaag

SEQ ID NO: 8581 - DNA, 444 bp, Zea mays
  Clone ID: MRT4577_107823C.1
taatgaaattctatacaaaatagttaaataattacatcatacaaagacaacgatccagcaaccatagttgactgggagacgacggcctagaatctctcacgaactcatcgcgacaaccttcatgctccttatcttgtggtacctgttcttgaccgtgattcaagaagttacaaaccccactcacgacgtgcggcggatctcgtgcacggtgacgaattccggtcgccccagtggtcgattcttccttccccggccacgagcgccctctaagtaacgcagtgaagctcctaggccctccatggaacctcgaacgccggttggggacgaggtcggcattggcgggtactccctgctcttagttcttccccgcaatggcgttggcgctcggttccggcacaggtgcgatgaaacgaggaggcagggggtcgcgaggggctcgtgccg

SEQ ID NO: 8582 - DNA, 474 bp, Zea mays
  Clone ID: MRT4577_107824C.1
cgaaaaaccttcgacagaaagcgaagggggattagccgggtgggaggagggcttaattccatacagggcacaactaaaaggcggcgccgccgccgccgacgacgacgacgacgacgagcaaaacagcagagggggggggaagaaaaaaaaagagggggaaaaaggcaggggtttactactagcccgtccaatacaatacacagtcctatgggccaggcccagcagcagtcctagtctagcaggggtccatgtacaagtccaacccgggcgggcagggggcggaaaaggaaacaaggaccccccccgcgggccacgaggcaaaggcaggggcaacaacaacagcgcttcacttcacctaacttgggcccccaaagcagcaggggcatcaccttggccgttttgccggggccggggggggggtccttttgttcccgcccgggccaccccgccgtttccctcccggcccgggccgcc

SEQ ID NO: 8583 - DNA, 141 bp, Zea mays
  unsure (1)..(141): unsure at all n locations
  Clone ID: MRT4577_107825C.1
gggaccgaagcgcccgtacacaagagnagccggccacaaagacggagacggccacaaccacgacagaggcaggacgcggaaaggagggcgcaagccctccggagagaaggaccggcgagagcagcgcaaagaacacgagaa

SEQ ID NO: 8584 - DNA, 249 bp, Zea mays
  unsure (1)..(249): unsure at all n locations
  Clone ID: MRT4577_107826C.1
tgctttttcctaggcatagttctgatagttatattctggctgtatacatgaagcatcatagcttgttctggttgagaaaaatcttancctaaaaaaaaaaaaaaaaaaaaaaaaaaaaaaaaaaaaaaaaaaaaaaaaaaaaaaaaaaaaaaaaaaaaaaaaaaaaaaaaaaaaaaaaaaaaaaaaaaaatgggcgccccctttaaaaataccaatctttcttacccttgcatccaaactattaacttt

SEQ ID NO: 8585 - DNA, 267 bp, Zea mays
  Clone ID: MRT4577_107827C.1
ggctgtggcacggatcattcgtttggtggaatttcatcgcctatactggcgctattccctggccattggagaggtgctcctattagagctgacggtccttggggcccgtaacgagtgcaatacaggggatcgtgtcatcgcacgaccttgctaacaccaatgacattaaccacaccgggtctcatcgagtacaggctgaaaacaattgacgatgctggtcctgtcacacaggcgggaggtatctctgcctacgtcggcacgatatac

SEQ ID NO: 8586 - DNA, 1490 bp, Zea mays
  Clone ID: MRT4577_107828C.1
cattgggaccctcgaggccggccgggggcccattcgctcgaaccgggggagcctgttgacttctacggtctatctcgaagtcacagacgccgcgtcgccgcgaagcgcatccattcgtcgccgcagcacgccggcggccggcgggcaggttgcttcgatgggctctcctacgcgggttcggaggacgaccggtttcactctcctcctggtgcttctgttcctctcgccgcccgtgtcagctggacaaccaaaaggtgtgtgtgtttcaccaggtggacggttccctgccttttcatctgaaggcaagcctcctggaagagcacccaaggggcgcagagatctagcactgtgtaggatattccgtcagaaaacatgttgcgatgtgatgcagacatttcctgctctggtctcagtaagaaaccttgcattggctggtgaaggcagtcaagaatgtattcatttgtgggaattgcttgagtgctcaatatgcgatccacgagtgggtatcaggcctggacctcctgttgtatgtgcatcattctgtgatatggtcttcaaagcttgttcagagtcgtacttctctatagatacgaaaacacaggccttgtctccttgtggtttagatgacatcctttgtggcaaaacacataaatgggtctctaacggcacagagttgtgccgtcttgctggtttctctgttcaaatttctgagaccagctctggtggagttggtcacactttctgctatggtgggaaagcaagtttggattccatctctgattcatggacttcttcaaaagaccgtccaacattaagtggtgtggcttcatgggacgttcaagattttcagagatgggcacgagaaatgcctatcggtgaaagagtttcgtgggcgattggaggaatggttctcacagctggccttatttttatcagcaaaagaaagagctacagccatcaccagaagcaagctgctattgctcgcaatatgagattgagaaggctggattctagagccaacccacaacaaacaaagcggagctaggaaggcataggcaacttagtgttactcatagaggattcttggacttgtgcttctacttttgtggatcggtataatcaacaactgtgaacaatagattgtactgtgtgtgtgtccatcttgttgcttagatgcaccagctacgacctccttgtcatccttgtgtggaagaagagttctataagttgtcactgagtattcctggaatgcagaacttatgggctgtgaagagatcatgtacatattatttggaaatgacttttttgatgccatcgatatcgggcgacatgcctacatgatttgtgatctgtgagttcatctaaggcggtggagcatatgtatatgtatatctatggaaagaccatttctcacgaagcacgtctattttgttaaccaacttaatccagactcattatattctattatgtattcatttttcctttccaag

SEQ ID NO: 8587 - DNA, 1308 bp, Zea mays
  Clone ID: MRT4577_107829C.1
cctgccgggattattctgtctaaatcatagttccatgctattgtgttggagtgaattgagtgtgagttcgtcttcagagattgagtgctgttaacaattggtatcagaggcgttcgatccttggagttttctacctcgatctgtcttcctcaacttcactgcatcgacatgtcgctcgacacgaagctcatcctcgacgccatcggcaagctgttcgacgacttcgatgctcgttgggagcgtcgtatctctgagacccagtccacacgggagcaacgggttgtccccatcaagccctgcatcgacacctccgagcagatccctgctgcgcacttcgatacgggggtggtcaccgacaactggggtggattgtttgatgccgaggtggttgccgatgattggggtgggctgttcgagcagcctgcgtaccttgtggaggagcgcaacttcgatttctccgctgctcttccatacgtgcccgcgccccgcgctaccttctccagcaccaacgacgaggcttcctccaccgagccgagcttcgactccacggcggtccgaaccatgtccgacactgtggctactcttcgatgccacgctgacatgctcgccaaggccacccccacgatcttcgcttcgagggcaccgaggctgtcgttcaagtaccagctgccacaaggaaacctctactcgatcaccttcgatgacgacatcaacatcgaaggttgcttccccacgcgcacacggtacggcgacttccaggcgctcgcgtcgctggggaaccacaactcgcaggtctgctccgtcgggaacatgccctgcgaggacgacctcctcttctccgatgccgctgaccacctcttcagcgtggagctcgacaccgaccagaacacggagttccgcgatatcaatggcgaccatgtcgacatcaacatcgatattctcgtctccatctcctcggccaacgtcggctactacgacgacgaccacgccttccgcaacctgacgctcgcgagcggcacggcgttgcaggtgggggtggactacgacggcgaggggaagcgtgtcaacatggccagtgctttcctgagaatggccaagcccagcagaccactgctctccactgcgtacgacctctccactatgctcaccgacgtgccctgcatcggctccttggtgactacggcgagcaagatttcttctgcctcgtttgatgctcaagtggtgttcgatgaaatgcagcaaaggtttcgacccacgatactgatcgacgtctcctgtatcgacatgggcacaaacattctgggcttt

SEQ ID NO: 8588 - DNA, 828 bp, Zea mays
  unsure (1)..(828): unsure at all n locations
  Clone ID: MRT4577_10782C.1
cgggaaccttctaatgttatggtaacagaattgcatcctgcagcaaattctgtacatctaatgctagaataatcactacagccctgttccaaaataatagtcagtatagcctttttcctaaatcaaaattctctagctgtaaagtatgtagaaaaaatggatcaacatctacaacatcaaaaaactctccatgaaatgtcttgatagtgcattcatttgagcttgtagatgttaatgtattctaaaaagttggcaaaattagagatgtttgacttaggtcaaagctaaagtgacctataatttgggaattgggatggagggagtagcttttaagataatattacatttcacaattttggaatttactgtaaaatatctctttacctttttgcagccacaacttgaggccggtgacaaaagtatgttctctgttccctgagttctgagctccgtatctattttagttgccattggaagtttacaggattattattttgcttctttccagttataatgccaccatcagctcttgatcgtcttggtaagttaggcacattcgttacttctcatctttgacatgcacaatgataattcatctaacatgttgtttggcaaaattttccacacttattcctcaataagttctctattatgaaaaaataatttttgggtttctctgcagcatctctgcatattgaataccctatgctatntgaagtccacaatgcagcagcagaacggacttcgcattgnngggtgttctgggagtcattgcagaagaaggcatgatctacatgccatatttggatgatgcanaatcttcttttg

SEQ ID NO: 8589 - DNA, 144 bp, Zea mays
  Clone ID: MRT4577_107830C.1
ggaaaaaaattcaccaattcataaaagtttatgggttatccaaacccttgattcagcaattctgattcattggaataccatcaatcttgtttagaataaagattcccctgggatataaaatacacagtccccttgcggccccgg

SEQ ID NO: 8590 - DNA, 702 bp, Zea mays
  unsure (1)..(702): unsure at all n locations
  Clone ID: MRT4577_107831C.1
ccggccggggaaaccacctacggtgtgagaatcaaatcctgcgtggcacgccccagtcccctgctgacgtgactcccatctcacgctaccagaacattgcagatggatagaggtgacgcataccccatctggcatcagaacatttacttactcgcccaacggacacgtgatgcacctaggccaattgagagcaactcactcgcatgtgctctcgagcagagcacgagcactgttcacgcagagcaatcacctggacacagtgccaacgctagcgccgcaaggtgcatcgatatctcgctcgtgctcgctaaactatgctcatgcagcgcgggctccctcatccatgtcgacttcggacaacacctcggcgataacagactcaaacacatgaagctgtcttcgcagcaacgccaattggcactcgtgccaggctatgcatcacagggactgtgttgcctgagctgatgaagaccttccttgtgactgcatgcttgatatctcatacttgaggatcaactaactcactaggactctttaatttcctgttcactcgcatgtccagattctagtgtgtcctcgcgcggctgcttagcgcgacatctcttgaatgatcttcctggtagacatacatggactcctatatatagagtgcttccgcttactatatatactattgaccaataaaaaaaaaaaaaagcggnc

SEQ ID NO: 8591 - DNA, 195 bp, Zea mays
  Clone ID: MRT4577_107832C.1
atcatccaccactaccggatcgccctcaaattccagttcagggggatgctaactcaaagcgcagcctcgtgccctcctcttacatctgaagcaagaactccgcgctcggtgcggcaaccatgtgtggctgctggtacgactgctgcggcaagtcaaggattggctcatctttctcgcccatcgtcattggccctt

SEQ ID NO: 8592 - DNA, 460 bp, Zea mays
  Clone ID: MRT4577_107833C.1
gggaggggaacattctagtattaggaaacctacttaaaaggaatggggtccccaaggagtgcttaaacacaacaacagtatatgaccttaaaaaacgctgcccgccaccatgggatgcacccacgtgggccggggggagggcacagctccccaaaaaaaaaaagaggaacgccccacacgcacgcacacatacgggtggatcaatacaaccaaaaataaacaacgaaaaacgatcggcgacacacgatctggaaatacacgggtacagggtttattttttttcacggatttccccccctccctccttttttccttggggttttttacttgacgttgaagggcagggggttgccctcccactccttgaggcactcaagcatgggggccaaaagcttgccctggctgaagcccacaaacaccttggtgcactcctcgcggggggacttgagcctctcgccgg

SEQ ID NO: 8593 - DNA, 320 bp, Zea mays
  unsure (1)..(320): unsure at all n locations
  Clone ID: MRT4577_107834C.1
gggggggcggaccaaccacaacnacnaaactggttttaaggctaaaaacggtataagcaaggacaaaattatccaacaacatataccgataataaggaaaaccaaaccaaggcttcaaaaagaacaaacattaaaaactgatccaacccatgtggaaacaccacattcttctcttcatggaaaactaacaccaaaaactatatcagatggaatcacctaccaattacctgacgttaataatcaagttggacacacaaaacttttaaaaaattgaggaaactgctcctccaatgcaaacttcataaaaagcaggttctttg

SEQ ID NO: 8594 - DNA, 653 bp, Zea mays
  unsure (1)..(653): unsure at all n locations
  Clone ID: MRT4577_107835C.1
ctgacgaggtgngaaaaacctacatcatctttctctgccagnagggaatcaatcacatgaattggcagcgaattcaaggaagggtagaatatatggcctacaaaaaatggaatacgaaaaattcctgagcatgttcggtgccaccaaaagactgagctggagaaggctaaagcaaccctgttattggcaactctccctaagtcattaccttgcagggataaagaaatggaggagatatcgatatttgtaaaggatgcaatctgcaatgaccagtgcctaggacggtgcctttatatacatggtgtacctggtactggcaagactatgagtgtacttgctgttatgaggaggctgagatctgaatttgattctggaacactgaggccatattgttttattgaaattaatggtcttaaattagcatccccagagaatatctacaaggtggcactaaaattggaaagcaagcaaaccagccaattattttgctgatcgatgagctcgatcttcttttgacaagaaaccagtcggtgctgtataacatccttgattggcccaccaaaccatattcaaatctagttgtcataggtatagcaaacacaatggatcttccagaaaaatattgcctcgtatatcaagtcggatgggcattc

SEQ ID NO: 8595 - DNA, 271 bp, Zea mays
  Clone ID: MRT4577_107836C.1
acttaatgtgtaatcctcaaacattttttttatcaacattggagaccaagatagtggggcttttcttatgcttctggctctttctacatgcgttgctaacgctacaatttttcctcaatcgctcacaagcttctatagcttaccttctaactacataccattcatcaaattttgctacattacgttaaaaccctactctttaaccatatttgcttcatcatgttatcgctatacgcaacatacctttaatgcccttgttgagttaaacaat

SEQ ID NO: 8596 - DNA, 1093 bp, Zea mays
  Clone ID: MRT4577_107837C.1
ggagtgcgacgcgtgcctcggcggattccatctgcgatgcgtgcgaccgccgcttcggagggtgcgtgaaggtgattgggcgtgcccttactgctaggccgagcgcgccggtaaggtggtcgagcggcccatgccgcctgaggggaagcgcgtcgtgaggaccgccaaggaaaaactcctttccagcgacctgtgggctgcacgcatcgagagtttatggagggagcctgatgggacgttctgggcaaaggtcaggtggtacattatccctgaagagactgcagcaggaaggcagctgcataacttgagaagagagctgtatcgtaccaatgatcttgcagacattgagatggaaacaatccttagacattgttctataatgtgccccaaagactttagggatgctaacaacggaggggatgatgtattttattgtgaatatgagtatgatatacattggcataattttaagcgtttggcagatattgatgatgagccagagacaaaggaagatctcagtgacgagccctacaatgctggtgatgattataacagtgacactgatgaagattcagactatgacgaggaggaagaatccacatcatctttctctgtcagaaggaatcaatcacatgaatctgcggcgaattcaaggaaaggtagaatatatggcctgcaaaaaattgggatacaaaaaattcctgagcatgctcggtgccaccaaaagactgagctggagaaggctaaagcaaccctgttattggcaactcttcctaagtcattgccttgcagagataaagaaatggatgagatatcaatatttgtaaaggatgcaatctgcaacaaccaatgcctaggacgctgcctttatatacatggtgtacctggcactggcaagactatgagtgtacttgctgttatgaggaggctgagatctgaatttgattctggaactctgaggccatattgttctatcgaaattaatggtcttaaattagcatctccagagaatatctacaaggttgtatatgaacagctgagtgggcataagggtgggtggaaaaaggctcttcactatttaacagaacatttt

SEQ ID NO: 8597 - DNA, 202 bp, Zea mays
  Clone ID: MRT4577_107838C.1
gggaccgtgggcggacgcgtgggtcaactcaagcccagccgctgctagggttaaggtgccctccgcccctcgctcgtcgtgaccggagggttcgtcgccgcgtggatatgtcgggacgctatgcagcgtggggcagaaccgcctaccaacgtgctgtggcggatgacagcacgtcgtgttcgagaccctgcttccaaacaag

SEQ ID NO: 8598 - DNA, 367 bp, Zea mays
  Clone ID: MRT4577_107839C.1
gccggccgttccgggtgacttgagaggtgtaggaaacttacactaaaaaatggctgaaggacttaaggttgaccctgctattgagaaatgggcacatctccgtgaaaacacacacctttatttttcatttaataaaagaaacacaagaagatctttattctggggtatcgctattcctgtaggacttaccattcttgcttaccaaactgaccgtaaatggaacttttctggagcccaaactaaggaagatttgtctcccaagaaagattaaaaacaaattgtgtagaaagaatgtcaacaatgcagatttaaattataataaaaacaacgaatcgcaacgcaaaaaaaaaaaaaaaaaaggccccta

SEQ ID NO: 8599 - DNA, 361 bp, Zea mays
  Clone ID: MRT4577_10783C.1
aaacttcatgcagggagcctattaacataatctggttctcaaaaagggacaagttacaaaccggctgcatggcataatatagtgataccaggaaatagagacatgatattgggaaacccatacagggggcagaatcagcaaaaaggccatggagcaaacaaatggtcgatggccttaaactacgagcgccggaggagaaacatgcacagaacactggatctacaacggcaggcactgccacaggcagtaactactactacataagctgcccgacattagcaagacaatttacaagcgagggcacactagcacaaaatcctgcggactgcaaaccaattgccttatcagtttttttggaatt

SEQ ID NO: 8600 - DNA, 3012 bp, Zea mays
  Clone ID: MRT4577_107840C.1
cgcgtccatttctcagattgacattccacccgttttcctgtcactcttcaacgcaccccgtatccggggggtccaggatttgccaaactttggaacacccttacggttaacctttgatcctgagctgtccaaaagtgatctcggtgaaataatcttcgataagatggtagaaacagttttcccctggtgccatgccaacagagaactattgcctggatacgacactctcttgaaaatttgttgcaagcttggtgaaagcaagatcatcctctgtgaagagggtagtaagcacaagttgcagaaggttcagcttaactatccaagtgacgatgtgacatttgccctcaaggaatccccagatcttccttggctatccaagtacttgtgaggttcatattacattaaccattaattcctggcgttctgttgcatttctgttctctttggaagcaacgattcactttacctgcagaccttgcatacacacatgtcccatggtcgatctgcaaaggaaccatcgaaagatgtcggcatggcgctgcacccaagggatcacgcatatttaatcgcacaacaggaacataaaacgttaagaaatatgtacgtctgcaatttcgtctccttcaaactatggtgttgtttgtgttgtattgaactgccgcgtgtgagctgatccaattgttttctattgccatctttcagtaactatatacgaattgttcgttaaacattgacagttttgaataagaaacattgagatatcaaatttgtactttgccggcccctttatggagggagcctgatggcaccttctgggcaaaggtcaggtggtacattatccccgaagagactgcagcaggaaggcagctgcataacttgagaagagagctgtatcgtaccaatgatcttgcagacattgagatggaaacaatccttagacattgttctataatgtgccccaaagactttagggatgctaacgatggaggagatgatgtattttactgtgaatatgagtatgatattcattggcataattttaagcgtttggcagatattggtgatgaacccgagacaaaggaagatcccagtgacgagccttacaatgccagtgatgattataacatttaacagaacatttttcaggtggtactaaaattggaaggccagcaaaccagccacttgttttgcggatagctgtaatttatcttcgtagcgaattcaaggaagggtagaatatatggcctacaaaatggcctaccacgaaaaattcctgagcatgttcggtgccaccaaaagactgagctggagaaggctaaagcaaccctgttattggcaactctccctaagtcattaccttgcagggataaagaaatggaggagatatcgatatttgtaaaggatgcaatctgcaatgaccagtgcctaggacggtgcctttatatacatggtgtacctggtactggcaagactatgagtgtacttgctgttatgaggaggctgagatctgaatttgattctggaacactgaggccatattgttttattgaaattaatggtcttaaattagcatccccagagaatatctacaaggttgtatatgagcagttgagtgggcatagggttgggtggaaaaaggctcttcactatttaacagaacatttttcaggtggtactaaaattggaaagcaagcaaaccagccaattgttttgctgatcgatgaacttgatcttcttatgacaagaaaccaatcggtgttgtataacattcttgattggcctaccaaaccaaattcaaatctagttgttataggtatagcaaacacaatggatcttccagaaaagttattgcctcgtatatcaagtcggatgggtatccaacgactgtgttttggtccatacaattatagacaactgcaggaaattataacaagccgtttaaaggggattgatgcctttgaagaacaagctattgaatttgcttctagaaaggtagctgctatgtcaggtgatgctaggcgagctttagagatttgtagacgagcagcagagtttgcagactaccgtgttaaacagtctcgacagtctgcacagaatactgtttctgcaaataaaggtgatggtgttgtttccatgggtgacatagaagctgctattcaggaagtcttccaggcaccgcatattcaagtgatgaagaattgtccaaagtttggaaaagttatcttggttgccatagttcatgagctgtacaaaagtggactaggtgaaataatgtttgataagttagcaacaacagttttctcctggtgccatgcccacagagaactattgcctggatacgacactctcttgaaaatttgctgcaagcttggtgaaagcaagatcatcctctgtgaagagggtaccaagcacaagttgcagaaggtgcagctcaactatccaagtgatgatgtgacatttgccctcaaggaatctccagatcttccttggctatctaagtacttgtgaggctcttattgcattaaccattgattcctggcactctgttgcctttctgttctctttggaggctagacaattctacttcacccgcaaacctttcaaacacacatatcccatggtcgatctcctggtcactctagcctcgtatctgcaaaggaaccggcgaaggatgacggcatgtcgctgcacccaacggaacgcgtcacactaggaacgtaaaacgttagaaacatgtacgtctggaatttcgtccccttcatgactggatacgtatgtatccacttcaacccatgtagtttggagtggtttggtatgtattttaaactaaactctatattaaaccactctaatccatatcgattgaggtgaatatgcatgcgtccatatgttgtaactgaactgccgcgtagtgagatttagtaactatatatgaatggtttgttacaataacattgcgagttttgaataagaaacattgagatatcaatttgtaaaaaaaaaaaaaaaaaa

SEQ ID NO: 8601 - DNA, 377 bp, Zea mays
  unsure (1)..(377): unsure at all n locations
  Clone ID: MRT4577_107841C.1
caactctgcactttctacaaagnctatgatctgtcagaaaagcatgttgtcgactcttcgattaattatcaatcacccaaacaacatttacaatgcctccaaagaaagcttccaccagcgctgctgccagctctgcctccaagaaggccgctcccagccattcttcctatcgcgatatgatcaaggatgctattattaacttgaaagatcgcaacggtagcagccgtcaatccatcaagaaatatgttcagaacaacaacaagatcaccgtcgtgtcgcaagctgctttcgacgctcagttcaacaaggccatcaaagctggcgttgagaaaggagaattcagtcaacccaagggaccctctggccccgtgaagctc

SEQ ID NO: 8602 - DNA, 1099 bp, Zea mays
  Clone ID: MRT4577_107842C.1
acgcacaagcctaagagggctagcggggctatacttcgagttcatgaaccatgttggtgaggagtgaccagtgcctgcccatgattacaaattggtgtgccacacatgctatgtgctgggagcagatgatggataggtggtgttcaactgagtgggaccaggcgcacaacacttgccgggaatgacgtatgatgatgcaaggtcctttccaccagcagggcggccggagcctgggcgttttcttgcagtcggcgtcacatggtggccggccttgctccatcttctcggcctatgctatggcccataagggcaaggcgacgtctgatgtcacctacaacccggatgacgggcccgaggcgtatagcaaccctgccatctacagccgccttcatgactataccgccatggcgcaggaggtccatggcccagaatatgatccgagcaccgagcagatcgaccccgatgtgctcatgagggtcggaggaggcaagagacatgggcggtactggattgacgacggggcaatcgactcgtcctccactcccactttgtctcaggtgcgagcaaggagcacaggctcgggtccagccatacgacctcggcacgacagctcacagcatcgcatacagcaactcgagaaccagctagaagaagagaggagggaacgccaagagatggaggtgaggatggaggcagagcgggaagcccgcctagcagatcagcagaggatggcggagatgttttaatacatgcagaaccttggcgccacatagggtttcgctctgccacctccattgttccctacaattgaccctgctctgttcatactcctggtcaatctggggcggcatccaacaacccccatgaagcgcccagcccatcgcaacaccagtccaaccgcccacctcgatgagagttatgtttttagtgttcagacttcaaaacttatgttgaatacttatgtcagagcttgagacttatgcgttgatacttgtgaacttgtgttgatacttctgaacttgtgttgatactgtttgtattgagaacttgtatattaatgtttgtgttggatatttatgtttgtgatgatctgtgatgt

SEQ ID NO: 8603 - DNA, 213 bp, Zea mays
  Clone ID: MRT4577_107843C.1
ggcgggagaccgactggctctattattaaataagaaaagacatatcatcacacaaagacacaaacagaacgtaaccaattaagacgacccataccatacccaaactgccatgcgtagagaatagatagaaagggaggaacaggaactaaaccaaaaaaaaacacaacaagctgaaggcgcggcaggcatggggaaccgagcgcactgacaccg

SEQ ID NO: 8604 - DNA, 215 bp, Zea mays
  Clone ID: MRT4577_107844C.1
agcgcgcctgctccccgtctggtcctccggcatcgtctactacatcgtgctcaccaacctcggcaactacaacgtgctccaggccatgcagaccgaccgccgcgtccgccgcgggggcttccacatccccgcgggctccttcgtcgtcttcaacatgctggcgctcaccctctggctccccttctacgacgtcgtgtgcttgccggccaggcatc

SEQ ID NO: 8605 - DNA, 330 bp, Zea mays
  Clone ID: MRT4577_107845C.1
agcaatcaaatgatttctttgaagatataaggatacatgtgtctcagctcatgacacttatggagcagaatcaaatggaaaggtcctccaagcttgttaaatttgagaatgagtttaaggaaacttgtgttaaagacgagcaagctgctctgaataagattgctgcaattttatcagagttgaccgccaagaaaactacaatggtttcatcatatatgggacagcttaatgagaggtatagtgaagatcagaagaacctgaaactggagatatccaacctacaacaggtttcagataatggcaaaaatgagtctgtggcttgtgttggag

SEQ ID NO: 8606 - DNA, 345 bp, Zea mays
  Clone ID: MRT4577_107846C.1
ggggcccccaaaatttattaaccccttagataggtgtgttcgaaaacaaatacaaggttttaaaccgggggaccccaaaatatttggctgggttttttttccagcccccaaaaaaaaattggaacaagcccttggtgggaggggcattttgtttttactgaacaaaaaaaaacaggcttcaaagttgggggggccaaatacttggttaccttgggggaccaaaggggcacttttgggggggcacccaggggctttttgtgcttccggtactggaggagattgccataggccccaaacccctttattttaatttgggcctttacaaccttttcacgacggttttta

SEQ ID NO: 8607 - DNA, 520 bp, Zea mays
  Clone ID: MRT4577_107847C.1
ggggcggggaaaccctaggggaaatatttaaacaaacaaaacccaattccccaagcaatttatttaaaaaacattcctcaacattaggccggatatatagaaaacccgttaaaaaaaaaaaaaagcaacattttgggggaaacaaattggcaaaggctaaaaaaactgcattgttaaaaaaaattttttttggatttttaaaaaacgggttttcaccaagggacaaggctaaaatggatctacacaaaaaaagggttttaaaactccccaaaggggtcccctaaattgcaacgcggaaaacatggcccggaatttttggaaaaaaaaggggggaggttcttggaaacttaaacccctttttgaaaaggctagggaaactttaaaacaactcgcaattggttgagccaccgaactttttgggattggttccaaaaaaatcttggaaagcattacccccggatcggatgttgagtttgccgtaaaaaaactggagccttaaaggaattttaataacgggttc

SEQ ID NO: 8608 - DNA, 299 bp, Zea mays
  Clone ID: MRT4577_107848C.1
cgacccacgcgttcgatgaagatagattggtagtgaggaacattacacgattagtggcacaagattatatttgaatagaaggattgtattttggtgagacaattctcatgttgcaagattagaggcaatatgggttcttcttgcttatgcttgtgcttacaacattaaactctaccaaatggatgtaaatgacgttttttctaaatgctaagattagtgaactagtgtatgtggagcaacctctcggttctgaggacccccaaagcatttccacatgttcaagctttctaaaccttcta

SEQ ID NO: 8609 - DNA, 803 bp, Zea mays
  Clone ID: MRT4577_107849C.1
ccggccgggatgccccggacgacaaggaggagctcttctaaaccgaggctcttcacggagaactctttgcgaagaagatggcggcagcggtagtggagaaggtgttcgtcgcgctgccggcggaggtgaaggcggggcagtccacgctggcgtgggctctcgatcgtttcggcggcggcggcggaaccacggttgtgatcgcacatgtgcatgtcccgccacagatgattccagtgatgggggtcaagttccactctagtaaactgagcccggagcaagtgaaactgttcagaaggattgagcatgagagggtggacaaacagctagacggctatgttcgccagtgctcaaaaatgaaggtcaaatgtgagaaactagtttttgagaaggaagacgttgtggccggtctggttgaactcgtcgtcttgcataaagtcactaggctagttatttcagctgctgcagacaggcaatattcaagaaaaatggacaaacctaaatgtcggacagcaacagaaatcatgcagagagctgatccatcgtgcaagatctggtttgtttgcaagggacagctgatctgcacgaggggtgtggaagaggaggttgcgccatcagctacaccttttgtccctgatgatcttgatcaccaggctctgcagttagtagtgtctcaccagaaaaaggacgaagctaagtcggagctggggttatacgatgagctgaaagaggcatgcatagcagctgagaacctgatgaagagagccctaaacgaatcttcaggcgccaaaagccagatggagaag

SEQ ID NO: 8610 - DNA, 232 bp, Zea mays
  Clone ID: MRT4577_10784C.1
atagggttacgagactaaaacaagaggaacatacatacttcatttaagattaataaataaactacggcatcaatagataaataacgctacacaaatacccttgagggattaaaaaaaagtgcaaaaggaacaaaacactactgctcagaaagggattaaaataaatgaaaaaaccggatgtctaaaggaagataccaaaactggtcaaaacttcttactctttacacaaccc

SEQ ID NO: 8611 - DNA, 423 bp, Zea mays
  Clone ID: MRT4577_107850C.1
gacacccttttttttttttcttttaccgtcttgtggttcctagtaatatgacaattattgcctgggatatatgccgctcgtcgcacacgacgaacaagtatcctcagtcctttcgcaggagaccacgcccacgcaatgcctaatccaccgaccaacgcaagggtatgatcgacacaacaactggagggcctttacttggagatttatgcttgctacctagcgcagcacaactggaggctaccccatgttcccgatcatacaagccagcccatctccccatgtctgatggacactcagacccgaagcaatcattggtgatctctgacccacctatagactgccatggcgacagcacagcacccatacacgaaagctcccatctggcagacccgaacggggccccaacctggtgttcttctcttc

SEQ ID NO: 8612 - DNA, 353 bp, Zea mays
  Clone ID: MRT4577_107851C.1
aataaatttttttttttttttttttttttggggttattttaggaagaagagcggttttttacacaatgccaaacctttggagaagaagaccagaacctttgcatacacatctagccaagaaccataccaacagtgtgcttattgatacctgatcccactttctaatataaaaataccaactgaagacgccacttgcgggatctatcaaagggctggggcaccgacccaactgatccttttgttgagcttcattaccacccgttccacactatctgttagcctcccccattagcagcccgcacgggacatgttctcgctacagactgttcttgcttcgatcccgggctactttc

SEQ ID NO: 8613 - DNA, 318 bp, Zea mays
  Clone ID: MRT4577_107852C.1
ttttattttagcgcacacaaaaggaccgggcaagtagcatatttttataattggaagccttgagtccgccaaaacggaacaggcagatgtaacaacaccttgtggcctgctcgacgatgcaaacaatttcatgccagaggatagaaacttctctgactagggggagcatagatttacataaataagacgcaatcgagaactgagctaattcctcaaaacaaataaatgcctgtgaaaattcaacacaacatacgaacgccaaaagcaaaatacctaggaaattttgtataaaaagtgtgcaaaatcacatgcaatggg

SEQ ID NO: 8614 - DNA, 328 bp, Zea mays
  Clone ID: MRT4577_107853C.1
ctgacgcataatccacaaccgtaacgatttctacaacacggacgtacacataagcagaggcacctttaactaggcccagggcataaccaacatcaccttacactacatagaatactacagccaacgtatgaattctaccaccacatgttgctcatatactactaacatctacaattacaccgtacctaccatatgcatatactctactctgcaacaccagctcatgattaactagttcgattctgcccctaactttcagaaaaccataaagaaatgctcatacatctactagcttaaaaaattaaagacttatttaacaatctataac

SEQ ID NO: 8615 - DNA, 653 bp, Zea mays
  Clone ID: MRT4577_107854C.1
accctagcagcctcccactcggcgccatcccacccccgccgcagcctcctacccggcgccatcgcacccccgccgcagccgcagcagcagccgtagcccgatggaagtcgacagagccccgaccgctgccgcggcaggaggatcctcctctggcgcgatggcggtggacgcggccggcggcgtggagaagccgcggttcgacgccctgatgccaagcgagatgagcggcgggaggccacagtaccgcaaggtccaggtgccgccgcaccgctttgcgccgctgaagaaggcgtggctggagatctacacccccgtctacgagcacatgaaggtcgacatccgcatgaacctcaaggcaaaaagggttgagctgaaaacaaggcatgatacaccagatgtgagcaaccttcagaagtgtgcggacttcgtgcatgcttttatgcttggatttgacattgccgatgccgttgccttgcttcgtcttgatgacctgtatgtggactccttcgagatcaaggatgtgaagacacttcgaggggagcatctgtcgcgtgccattggccgcctatcagggaaaggaggcaagaccaagtatgccattgagaactctaccaggactcgcatagttatcgctgatacgaagatccacatac

SEQ ID NO: 8616 - DNA, 327 bp, Zea mays
  Clone ID: MRT4577_107855C.1
atccttttgttatttgctctccctccaacaaggtaatgaaggccgttttttattttttttttagctcgaagtaaaacacagggcgcgtagttttttccggcaccagcacctggttcatcataagaaggactggtacccagcagtgtacttcgcctggagtgcttcggcgcgcttattggggcctcagaggagccggttactgcggtcgcgcccacaaacgggaaggagctcgatttgtacttggaacacacaccccttaagcacggggagggcctccgctagggcggggccatatccgccggagaattgggactttttttgaagcac

SEQ ID NO: 8617 - DNA, 349 bp, Zea mays
  Clone ID: MRT4577_107856C.1
tcaagaccaagggcgggctcacggggacgggggcgaccaccaacgtgtaccgtcacagggacttcaaggcccacatgcggcacacccagtcggagtgctgcagccccagcgaggtgctcttctgcccggacttcgccgagtccctctactgccacctcctctgcggcctggtcctcgccgacgacgtccgcacggtgtccgccaccttcgcccacagcctcgtgctcgccttccggacattcgagcgggtgtgggaggagctgtgcgccgacatccgacacggcgctccgtcgccgacgcgggtcaccaacccggccgtccggcgggccgtgtcggcccttctcgtcgc

SEQ ID NO: 8618 - DNA, 353 bp, Zea mays
  Clone ID: MRT4577_107857C.1
attaccgcccgacccatcgtccgccttcccctaatctaaaacatttttttttattctgacctcaatatttcaaccccagacagctatctttcaatccaaacactgcccattataaaccataagactttccaaattccatatatctattcaaatgctaaccaaacttttcataactatctcctaaaatccatataacaccttatccacaatttcatacatctcaatatacttcaaccattccacattcctaccatatctgtcatcatatcactatctacttatctaacagtccatcatccctaatcataattcacttcatcaactcctacagaacatccagaattcatctactt

SEQ ID NO: 8619 - DNA, 196 bp, Zea mays
  Clone ID: MRT4577_107858C.1
ctcccgttctgctacgcgctcggagctcaaggatacaacgacggattaagtctccgtacatgtatatgaagcctccggggtgtactgaataatatgggggaacaagctgagctcttgtaatattactaaatatgaaactaccgtgatgtaaattgatgagactatggatttaaatattgttatgtgattgtgtgtg

SEQ ID NO: 8620 - DNA, 249 bp, Zea mays
  Clone ID: MRT4577_107859C.1
gaaggggatttgttaagaaaccaaacttgccctatgatggttgctcagatttaatttggtctgggcgtgttcccaacaacaattgcaccaggctgggtgtttttaataaaggccctttgatggggcccaatttaactttatatgcagcctaaccggaaccttgcattggaacttttttggggggtaggtgtggccatttttcaatgaacattggagcagtaaccattttccatatgccacaagaagggc

SEQ ID NO: 8621 - DNA, 474 bp, Zea mays
  Clone ID: MRT4577_10785C.1
gcgttctcccagcgttctcgctcaaacactcgagcccacagccaattatttctccactaaatcgcggtataagctgcactgcaaccatggacgccagcagagccaataacaaggcgaataaggggcggctggccgcaaggctaacaaccccaggaagaagtccgtgaagggctccctcaaggcccggctgcagctcctcgtccgccacatcaggaactacctcaacaaggagcggtacgcccaccgcgtgggcacctatgcccccgtctatcttgactacctgcttgactacctgctcgaccaggtgctgaacctggccaagaacaccacgaaggcacaacatgaagacgcgcatcttgctgctacacttgctcctggacattcataacgacattgagctcggtaagctgatgattggccacaccatcgtgcacggcagaatcctccccaacatcaaccccgatatcctgccca

SEQ ID NO: 8622 - DNA, 330 bp, Zea mays
  Clone ID: MRT4577_107860C.1
ggctcatgtagagggatagcgtgttggctttatcggatgaaactccagatcttggaccttaatggtatgctagccaatatcaatcaagattaccagtgtgcacacttgagtcatgcaaaggttcgaaccatattagttttcacaggaccatactgcgactattttttgagattctgctttcacaattttgggctcagaatatcgtcattgatgaaaagggaaaatgtcgtatcggcagtatatataccaatgagcgcgcttaagcaatggctactattttgatgggacatgttttactgcactgttacagggtgcaaaacagttgacaac

SEQ ID NO: 8623 - DNA, 240 bp, Zea mays
  Clone ID: MRT4577_107861C.1
caccggcggaaaattccgggcgagacacacgcgcgcgttgctgttgaaagatctcccattattagtgcaaacctgagtctcttcgaacgcggaggaccctgacctttcttctgagagcgaacatttgctatactaccattgcgaaccttgtaccacacaccgtaaacggagaatgtgactaagtcactgatgtttatgaccctgagagctactttattacgttcacgccctttgacatgc

SEQ ID NO: 8624 - DNA, 494 bp, Zea mays
  Clone ID: MRT4577_107862C.1
caggggtacaatctaggataacagagaaatatttggcctctttaacaatctttatgatagatcttgtaatattagaagacaaaagaactatcaactcattctgaatcttaggactgagataatggtaatgaatttctttgttctgaatacgcctaagatggtcttgcattaccaaatcaaactctgcaatcatctcaacacaggctaagaaatttccattactatcactataaagctgctcaatgcttcctctaaaagccaagttgcgtttaccaagaaatttcacaattgctattattcttagcaaaacttgtctcaaacgttctttctctttattgatttgcttttgcaagtctttatcaatagtttcctctttctgcattcgtgtcctcaattcattccacttgttcatgtttctgaaaatgctcaacactattttcatgttctctaagctttgtactaatattcctccaaaaaaaaaaccaaaggcggga

SEQ ID NO: 8625 - DNA, 318 bp, Zea mays
  Clone ID: MRT4577_107863C.1
cacactcgttcgcccacgcatgcgaccacgatttcgctctaaagcttccccacccgtggggtgacaatggatccctactctgatggaacccctacctttctggaccggagtggcaacgtactgttctctgtacttccagcagtaccaggacagatcgagaccctacactgaacagagtcgggggagcactctcatgctctatatggtaatggccccacatatatgtcacatatggtatctctacctttctattttggtgctggagaatctaacagttggagcaacttatatgacaggctattaaaaatagtggagcaa

SEQ ID NO: 8626 - DNA, 365 bp, Zea mays
  Clone ID: MRT4577_107864C.1
ctggaactggttatctttacactggtagcagagacaaaactattaaggcttggtcactgggggattattcacttcgctgcactattacaggtcataaaacaactgtgtcttgccttgcagtggccagaggtattctttacagtggaagttgggatggtaccattcgtttatggtggctcactgatcatacaccattgtctgtactggaagatgatgcagcaagaagcatagcccctgtattgtcgatttcagcagaaaccaattttgttgcctcatcatatgagaatggctattttaaggtctggaagaacgatgtgcttgtcaaattaagaaaagcttcaaaaatggggctgtttatgcagtta

SEQ ID NO: 8627 - DNA, 782 bp, Zea mays
  Clone ID: MRT4577_107865C.1
cctcgaggccggccgggcagccagtcggccgacgccgtccgccggccgccccggcgattctgacccgagatggcggtcgtccctgctgcggagaccctcgacgggctcaaggacaggttcgatctcggggtcttcgtaggcgacctcgccctcgatgaggaagtcaccagtgacgacgagtccttggaggggctgcagcaggagcttgacaactgcaagaatgaccaggaagtcgcaaacattctagccagtggcatcaaactgcgcgagtacacaaaaggcgtcgagaataacatacgccaaatcgagctggattctatccagacagaaattggttccataagttcagagataaaggtccttcaggagaaatctatggacatgggattaaagctgaaaaatcgtaaggctgcagaatctaaattgtcaaaatttgtcgaggatataatagtacctccaagaatgattgacataattgttgatggagaggtcaatgatgaatacatgaaaacacttgagactctaagcaaaaaaatcaaattcatcgatgctgaccccatggttaaatcatccaaggctctaaaagatgttcaacctgaggttgagagactacgacagaaagccgtctcaaagattttcgagtttgtcatccaaaagttctatgccttgagaaaacaaagactaatattcagattctacagcagagtggtctttcttaatacaagtacacgataaatttcctttagggacatgctaaggagatatatgcagaagttcgtacg

SEQ ID NO: 8628 - DNA, 679 bp, Zea mays
  Clone ID: MRT4577_107866C.1
agcagttacagacttatagtttacataatagcagttacagccttacaagcgcatactacatagtcacaaatagtgaaacagaccacaaagatttttcaccagtgaagacatagtagcagttacagttcacataatagcaattacagttccggtacaagcagcaacatgcctcaatagatgaccagtaccaccactagacttagcaaacaactctacattgcaaatcttacatatagcagcataccgaacttgcttatcgttcgtgattttgaagagaggcttccaatctttccaaaccctagtttttgacattctggttctcattctcttattggaaccatctatggtgctctcaacactccaccttcgccatccaaactgacaggacaggatagagttgaacccaactaagcatcatccccttctacgttggcattatcatctacctcagcacgcacgatggaagacatcccagcgctgccagtgaacgcgacatccccgggcacctcggctcctcagtgtccatgcctaaggcgccgatcgtcgtgccgagtgtccggtctttggagcctaagatggccagatctagatgggggtagtccctaaggcaccagatccagatgggcggagcctaggatggccgaaaccagatagcccggccggcctcgagggacccaat

SEQ ID NO: 8629 - DNA, 2765 bp, Zea mays
  Clone ID: MRT4577_107867C.1
cggaccccacgcgtcggccccacgcgtccggcgagagatccggagcagccgcagtcccaccgacctcgccgccggtcgccctccatctcctcgccgctgcctctcgatacgagcatagactacaggctcaaagttccaattccaacccacccgacgtccgacgacagctggtccgggtctcctccatttcccggggacccgtccgatccgatcccagtcctcaacgccaacggtgggagatctagatcggagctagccagccagccggccgacgctgtccgccggccgccccggcgattctgacccgagatggcggtcgtccctgctgcagagaccctcgacgggctcaaggacaggttcgatctcggggtcttcgtaggcgacctcgccctcgatgaggaagtcaccagtgacgacgagtccctggaggggctgcagcaggagcttgacaactgcaagaatgaccaggaagtcgcaaacattctagccagtggcatcaaactgcgcgagtacacaaaaggcgtcgagaataacatacgccaaatcgagctggattctatccaggattacattaaggaaagtgaaaatctagtttctctgcatgatcaaatttgtgattgtgacaatattttgttacaaatggaaacagttctgactggattccagacagaaattggttccataagttcagagataaaggtccttcaggagaaatctatggacatgggattaaagctgaaaaatcgtaaggctgcagaatctaaattgtcaaaatttgtcgaggatataatagtacctccaagaatgattgacataattgttgatggagaggtcaatgatgaatacatgaaaacacttgagactctaagcaaaaaaatcaaattcatcgatgctgaccccatggttaaatcatccaaggctctaaaagatgttcaacctgaggttgagagactacgacagaaagccgtctcaaagattttcgagtttgtcatccaaaagttctatgccttgagaaaaccaaagactaatattcagattctacagcagagtgttcttcttaaatacaagtacacgataaatttccttaaggaacatgctaaggagatatatgcagaagttcgtacggcgtatattgacaccatgaataaggtgctaagtgcacatttccgggcttacatacaagcattggagaaactacagatggacatagcaacttccactgatttgcttggtgttgaaaccagaagcacaggcttcattttctccattggaaaagaacctctgaaaacccgtccttcagtgtttgctctgggtgaacgaataaacattttgaaggaaatcgaccagccagcattgatacctcatatagctgaagcgaagtcacagaaatactcgtatgaagttcttttcagaagcttgcagaaacttcttattgatactgccacttcagaatacctgtttactgatgatttctttggcgaagaatccatattccatgatatatttgcaggaccgattcaagttgttgatgaacatttcaatactgtactcctgaactgttatgatgcaattggcataatgcttatgatcagaataattcatcagcaccagctcatcatgtttaagcggcgaatcccatgtttggactcttacctagacaaagttaatatgtcactctggcctcgcttcaagatggtgttcgacttgcatttgaacagcttgcgaaatgcaaatattaaaacactttgggaggatgatgtccatccacactatgttacaaggagatatgctgaatttacagcttctctagttcatctcaatgttgagcatggggacggtcagcttgatctaaatttggagcgattgcggatggccattgaggatttgcttgttaagttggccaagatgttttccaaaccgaagctacaaactgtctttctgataaacaactatgatttaacaatttccattttgaaggaagctggaactgagggtgggaaagcacaacaacacttcgaggaggttcttaagagcaacatcgcaatatatgtggaagagttgctcctggagcagttcagtagtttgatcagattcgtcaaatctcgtccagcggatgagacggctgcaaattccgagaaagccagcattgccgaagttgagccactggtaaaggatttcgcgagccggtataaggccgcgatcgagctgatgcactatgatgtgatcacatctttcagcaactttctttgcgggatggagatcttgagagcgacgctcgcacagctcctgctatactacaccaggctctccgagtgtgtcaagagaatcaacggcggctctgctctcaacaaggaccttgtctccatatcctccatcctgttcgaaatcaagaagtattctaggacgttttagttgtttcacccccttccatgtacactaggacggctagctgaggggtagctgtgtatccttactttgtaactggtatgtgcgactgcaggggaaacaagggcattttgtcgtggtttgtatcttcgtctgtgttacccgacttgacccctgcccctttccagcacagaactatgatctctaggctgtctccacagttatcctattctatcttctgtcctatcatctattttaaacttcattttgtaaacagtatcgattatagtgcaaatctacaattttataaaaacaaaaaaaaaaaccccggaaaaagaaaaagtggcgggccgactctagaaggatgccaaggacttacg

SEQ ID NO: 8630 - DNA, 617 bp, Zea mays
  Clone ID: MRT4577_107868C.1
ggccagacctagcgatctgaagtgccttagccttctataggatggtccttgattcattaagcatggacttgtagctagaggttatcctccaggcagagaatcctaagcgccgaccaaaggaccgccatcttattacaggatcgcataaaggcagcttcggtgaactcactactaatgcttcaaacgctagcattactcccttgttggcagaataccattccaaccatggctgtcttgcgaaccgcgacaaactatgcagatcacctgaatgactcaaatgtactctaagattgttggctgtgagaacggcccatctaaaagcacttcttcgaaggtggcgccactctgtcctttgatgttggtaagcaatctatgacgtgcccaatcattgctgaggatcttgatcggtctcactagatgctcgccgagatgctctgtgaggatagaggtgtcttctttgacatagcttactttattaaaggactcgacttaaccatcttattgctcgtcatggcagcacgccacgatgacatttggacacggctcactgtcgaggccaacacggatgtcactacaatggaaatcttgcttctactactacgcttgcttgaaccgag

SEQ ID NO: 8631 - DNA, 128 bp, Zea mays
  unsure (1)..(128): unsure at all n locations
  Clone ID: MRT4577_107869C.1
aggaagcacgagcagggtttgncacattgggccagcctcccacactcctcctgcatagccttagngctccattcccatctactggtctccagagagaagagccccaacatcctaaggcagcaatagct

SEQ ID NO: 8632 - DNA, 132 bp, Zea mays
  Clone ID: MRT4577_10786C.1
tccggatactccctaagcaccagctgcggcgtgcggtttatccatggctgtccgtaaagcaacaatgaggatgggtccaatgtgaaacgaatggtggctaagaataaagacccgtcgactcctgttctctaa

SEQ ID NO: 8633 - DNA, 1495 bp, Zea mays
  Clone ID: MRT4577_107870C.1
gcctcctcaatattcgatttgtccgccgcagcacagcccactcgcatcggagcgcgcgcggggagcggcatggccggcgacgacggcagcggcgggagcggaggcggcaacagggaggacgaggtccacgtgcagatcgcaggatcatccaaacctgaaacttcatctaccaacgaaacatctcctcaaaactctcataccaagcattggcattggtggctgatggtaactctgaacattttcttcctcgttgctggtcagacagcatcgacactccttggcaggttctactacaaccaaggtggaaatagcaagtggatgtccacatttgtccaaaccgctggctttccagtgctgttcgtcgccctatatctgttccgttcaaaatcgccttctacacaaacaaccaccagtaaccctgagacttctgtcaccaaaattactcttatatatgttgtcttgggcctcatcattgctgccgatgacttgatgtattcctatggcctgttgtaccttcctgtatcaacatattcgctcatttgcgctagtcagctggccttcaatgctgtcttctcatatgtcctaaatgctcaaaagttcaccccattcattttcaactcagtaatcctccttacgttttctgctgcgcttcttggagttgacgaagattctcagggtaccaatggtttatcgcgtgggaagtacatattgggtttcgcattgaccctaggagcctcggccacatactcactaattctctctctaatgcaagtcgcattcgagaaggttattaagaaggaaactttctcagtcgtgttgaatatgcagatatatacagcactagtggcaacagtagcttctcttatcggtttatttgcaagcggcgagtggaagactttagagggagagatgcatgccttcagctcagggagagtgtcctatgtgatgacacttctatggactgctgtatcttggcagatagcttccgtaggagtggtgggtttgatctttgttgtgtcatcactcttttcaaatgtgataagcacactggctctacccatcattccgatttttgctgtgattttcttccacgacaagatggatggagtgaagattattgctatgttgatggccatctggggattcgtttcatatggatatcaattatatatcagtgacaagaaggctaggaagacttcagtcagtgtggaggagaattcctaagcgcttgttggcctgttacattggtctttgtggctcctataccactttaagttgctggtattgaggaggtactagttattgacttattgtatccaaaaggagcacagttgataatctcaggtttacacaattcataggtatatacttctgttagtattgtcatatcatcatatgtaccgatgtacggttgtgttgtcctttaaaataaaaagattagcatttccagaggcatgctctctagatttcatattgcagaaaatattttcttgcc

SEQ ID NO: 8634 - DNA, 601 bp, Zea mays
  Clone ID: MRT4577_107871C.1
tgacatacatctgacatcgcattatttgactataacatttaatgttatgtcacttgttcaatactcatggcattgggaatccaagaagaatttctggcttttgtgacattgtttagcactgataattctatgctttctactgaaacacttctatttttgatacaggtatttgggcaggaatgcacacagtccgttactttgatggcaaaacatatgaatgggtcggactgagccgccaacgaagcatcatgggtaaggtatgtttactacaatacattaacagaagcatggtttcttcatttcatgaatggttactcttgtcataattttgtcactatatagatatgaccttcattcctgaacagccgttcttttagaatgcatcaaattaaacttccaaaaatttgacctctggtatgaggaagtagttacatctgcattgtcataatattcatgtattttcgctttgtcataatattcatgtattttcgctgcacgcatatgactagaaaaaatattttgaaaaaaaaattgcatgttttagacactgttgaagtatgaaacaagtaaaacagaacagggatagcatgatgtattacat

SEQ ID NO: 8635 - DNA, 775 bp, Zea mays
  Clone ID: MRT4577_107872C.1
tctcggagaatcacgaaaactgggttggagtctgctcaatggatcgtttctatcctcgttttcctccctctcctccatgtccggtgctcctctccgccgcctccctcccgcagctccggtatttttccgtcgctcgcgcgcccgatgcctccctcccgcgctcccggtgcttatgcgcgccaaatctcccgccagcatctccttctcccgcgcactcctctggctttcgttccagaccaggctccggccagataagaaatcaaagaagtcttctccaacctccagaaaatcaactgttgttccggccatggcatctgcaggtagtgcaggcgttgcagctccaagcacgggtggtggaagtagttctcatcctttttctgtggtttgggatgggatgacacttggaggctcattcgcgtctgaatcatctcccaccagctctgaatggagcttgatcggaaggtttttatatgcacatggagaggctggatctgtgcatggagaccgaacctgggtgtgctaatgttcatgtcgatcaaaagttgttgtccatctcagatctttgctatctatatattaagagaagtttgctataattatatattactatgtattatggactacattatatttatcaacatggatactgttttactatggattaatatattttaatctatgtgttgctattgaattgttggtcattgtatattgtggtgttcaggctgttgcaccagcagcacaaaggatacaaagttatttgtcacaactgacc

SEQ ID NO: 8636 - DNA, 937 bp, Zea mays
  Clone ID: MRT4577_107873C.1
cattgggaccctcgaggccggccgggggtcgtttctatcctcgttttcctccctctcctccagatccggtgctcctctccgccgcctccctcccgcagctcccatatttttccgtcgctcgcgcgcccgacgcctccctcccgcgctcccggagcttatgcgcgccaaatctcccgccagcatctccttctcccgcgcacgcctctggctttcgttccagaccaggctccggccagatgagaacgctccaccagtagctaggcttcattttcctttttaatggctcatttccatcccctgatctagcgctaaaatttagtccccaattcatctctaaggaaaatcgagtttcagatggatttgttagggaagggtggtgcgcaacaaaagaaatcaaagaagtcttctccaacctccagaaaatcaactgttgttccggccatggcatctgcaggcagtgcaggcgttgcagctccaagcacgggtggtcgaagtagttctcatccattttctgtggtttgggatgggatggcacttggaggctcattcgcgtctgaatcatctcccaccagctctgaatggctatatccaccaggcgggtttgtaaattctctaaggatgccatttccttatgctacctatccgaatggcagccaacttccagaaaactcccattttgttggttgtacaagcaacaaagggactccatcaccaactaatgataaagggactcctattgcagaagtacatgattcaattgacattgacgccgatgacaccctagagcctgctagaactgacaaacgattgaattggtcacatgaagaagatgttagattggttagttcttggctacaaaattcactagacccggtcgatggaaatgataagaagtcagattattactggacagatgttactaatacgtacaacagca

SEQ ID NO: 8637 - DNA, 273 bp, Zea mays
  Clone ID: MRT4577_107874C.1
gggcgaatgggtacctcgagggcggccgggaccagctttccccttctctacggtccgggaatcggaagctcacggcagaagtttagccatggggcagacgcatcttttgttgctcacttgtttctgggtcctgtcaaccatgactccttgctactctgatgcttcctacagatggactgttaagaatccacctgaacaacaacacactgcacaacgcacctttgactgctgaaacattgcccacaaaggacacccaccctccaacccctctgc

SEQ ID NO: 8638 - DNA, 446 bp, Zea mays
  Clone ID: MRT4577_107875C.1
gatcataaacaagaaataataattggcgggatgaaaaaacgactaagcaattaaaaagctaaaggaagagggccaagaggatcggaggaggagctggtgggggtgctagtagggctggtctgctgagctagctagctagccagagctcatgggtggaacaagtcatagctggagggacagggcaaaaaactcctccgcaacctctccgccgccccttgacgcaccggacgaggcttcggccccccccgccgggtccgggcgctgctgataaaggggggcgctgctgcggacgggggggggaggggggcctcccctccccgcaagcaccggggggccggggctccaccctggaacgggggggaggggcgctgtcgctgccggacgccccgcgcaagccctggtcggctaccggcggccgcggcgggggcgcgggtgggccccagggg

SEQ ID NO: 8639 - DNA, 197 bp, Zea mays
  Clone ID: MRT4577_107876C.1
acggaaaggtgttaaggaacaaaagtcaattgcatatattcttacagctctaatctatagacccattgtttctatctacgctttttcagattacagccttaccaaccggcgcaagcgacttatctttccattgatacaactggtctttgtcccagcaaggatggattgggttttttactaatctttctgaagctctg

SEQ ID NO: 8640 - DNA, 639 bp, Zea mays
  Clone ID: MRT4577_107877C.1
cccgggtacagtccttcctttgctaggcagaagtttgctcaccgcactctttcttgatccgatcttcgtttccatattcaggtctttctctttgtcctattgctagccataagctttctcggcggagaatcttgtgagataaacatctcctgctgctgccctggagcttctccctctccctgctgtgctcgtttggcggatgcttccttaggacaagtcttacacgcatacttgccttcaggcaacaagccgcctgtgtctgaacaacgcttcggcctccatctcagcttgctcccaccatgccaagctggccaagcagtgtcgactatatttcccagtctgcagagcaggattctgcacgcaccagatctagctgaccactactacctcaacctgcttgactgggggagcaacaccgtgctatccattgctgtgagcgacacggactacctgctggatgcctgcagcgtatccacgtttgaccttgtgaccattcaccaggacagtgctaccatcaccagcgtcaactgggctccaaatagccaccatatcaggtattgacgctcaactcatccaatgtccagctctgggacaccacctccaaccgactgatcgagaactttcatgagtgtgcatgat

SEQ ID NO: 8641 - DNA, 789 bp, Zea mays
  Clone ID: MRT4577_107878C.1
cggccgctcgagccggcgggcgggaaacctacctcattcccctcacgccgccgtctggcggccatggcggatcctcccaaccgaggcctcccggacgagatctccatctgggagatcctcgtccgcctccctcccaaagctctcctccgctgccgcgccgtgtgccgcgcctggcgcagcgccacctccacccgcgacttcctccttgctcaccacggacaccagctcacccttcccctcctctacggctgcaccaacgtcggcgtccaaggcgaggtcctagacatcatccccttcgaccaccgcccagggctagccgccgccgaccagcttcaatccgtcgcgcgacttgtacttggcctctcctatccttgtgtggaggcctcctgcaacggtctcctcctcctctccctaggccggagagacttctccgtctgcaatccggcaactcgtcagtatgctccactccgacaaatttatggctacgtgctgttggggatgtacccgcacagcccaaccggcgagtacagattattgctctactgggacgaggatttgatttatccagatctggcacctggcacacaagatggctcctatgtcttcacattaggctccggcgagccgcccaggtacacagggtaccctgattcaggcatattgatgtttagcaactccattttattccatggtagcttgcattggcacatagacaaggatgcgagcacaagcaacatgataatgttatttgacaccacctctgagtccttccggcagatgcgcgctccg

SEQ ID NO: 8642 - DNA, 752 bp, Zea mays
  Clone ID: MRT4577_107879C.1
aaaccttagacgcgaacgccctcctcctcccctcctgcccccgagcgccgccgccgccgccgccgccgactgcagccatgtcgctgatcgcgggtgaggagttccagcacatcctgcgtgtgctcaacaccaacgtcgacggtaagcagaagatcatgttcgcgctgacctccatcaagggtgtgggccgccgcttctccaacatcgtctgcaagaaggccgacatcgacatgaacaagagggccggagagctttcctcggaggagatggaccgcctgatggcggtggtgcacaacccgcgccagttcaaggtgccggactggttcctcaacaggaagaaggactacaaggacggcaggttctcccaggtcgtgtccaacgccgtggacatgaagctcagggatgaccttgagaggctcaagaagatcaggaaccatcgtggtctgcgtcactactggggcgtgcgtgtccgtggtcagcacaccaagactaccggcaggagaggaaagactgttggtgtctccaagaagcgataagctgcttcacaacgatcccccatagcttttctactactgtgttggtccatttccagaatcttaaggagtgttcttgtttagacgattaccttggatgatgttttgccctagataatgtctttgttctggaacctttaatatattgtatcttgaattccttgtcgaactcttgagagtttgttttgccatgggcttagagtcgtttcaatggttggt

SEQ ID NO: 8643 - DNA, 400 bp, Zea mays
  Clone ID: MRT4577_10787C.1
aaaaaggtgcaaggaacaaatttttaagtatttttctgatgcggtagggcatacaataccgaatcccccatcagtaaatttatggaatcaatgcaaacaacaaatgagctttagatccttacacaactctttggttaaaaaataaagggcataaagactttctttaatgataaacccacatgggggtgtcttatagagatcagggactttttgaaacttggaaccgggggctgtttccgcacaggttctaataaaatggggaacccgtttttccatgtttgggccaaaaattataaagagggctgaaacattactggtcataaggcattataacaaatttgcctcatggcttgtagaggtggcccaaagaaatatgaaaacaaatattatgttttcactg

SEQ ID NO: 8644 - DNA, 240 bp, Zea mays
  Clone ID: MRT4577_107880C.1
tccatctttccatctatctcagtcgctttcaaaactcagcacgcatcactataatctatatatcattactcaaatacttaatctatacatctatcttcatcccctttcttattcttcctctttatatatattttcacctaatctatttttgcaaaatatccttcatctcttacctctattcttatctcctcttccttcctttcacctccaccttcatatctatactatctatatattaaa

SEQ ID NO: 8645 - DNA, 426 bp, Zea mays
  Clone ID: MRT4577_107881C.1
aacaaaaccacttttttttttaaaaaaaagggtggccccaccccccaaaaaaaaaaagaaaaacggagggcgtgagatgataaaggggaggggggccttcttggctatggcggcctgctggggggatttttgcacaaagagagacggaggggacaacaccaccaaacgcgcgctggcggggaaagcatccacccttgttggttgggccggccctgggtctagggagcgttttcctcctcgaagggctgggggtacttgggggggtccaaaagggggtccgcctccccccgggggggtgggtttaaccttgataatccacccgccctcaaacgggctcgggttgataaggccgggcgtttttgacagttgggaattgacctcaacaacctccccggaaaacggggagttgacccccctgggggcctt

SEQ ID NO: 8646 - DNA, 539 bp, Zea mays
  Clone ID: MRT4577_107882C.1
ctcctcccctccaactgtcttcctcaacctcccgacccaccacggtcgttcccggcaagccgccaaccgcacagcataagctggggtgctgacgtgctgagggtggacctgaatgccatggcccggaagcatcagcatgttgccatatttaccacaagtgcctgccgtggatgactgccactgctgtaaacccactgtttagggctgcataccttgccagaggctggagattgggaggtcagactagtggtgccttgactggccaagtggggatcaggatctcgactatccaaacaagatgaggttcagttggccaaactagcaagaaaactatgtgcggtggtgacttgaggaacggactgaactgctgtcgtaaatagacataaagttctatactgggaagcttaaactgagaaaagaatatactacctgacggagacatcaaacatacaatatgttatgataaagcggcaattgcagggctagaatagccgaaacatcttacttggtaccaccatggtcggaagtggaaaaacaag

SEQ ID NO: 8647 - DNA, 1181 bp, Zea mays
  Clone ID: MRT4577_107883C.1
tttttttttttttttttagaaaaaaatatatgcatttttatgtaaaagctttttatataaaaattaatgaaaagttgggcatacagggaaagagttggaaaaaaaagatgattcgaacaaacagcagaattcaaaacttaagcactacaaccaaaattctaactcgtagcagtaacaacaaaaaataacatatatgataactgacaggctcatcaccagaaggggcaggtaggccaacccatcccagtcagcaattcggaaacaaatagtagacagtattgctcactccaccattccagtatgagtgttcccttccacagtttctttcccttcatcctcctcatcgtcaccaagggtcaagtcctcaatcagctcctcaattggcaccgtagggatatcatcaccaactgttgatgccatctcagacctatagtcctcatttttgtacagattcatcttggaccacatccctgagtccacctccaaatccctgaggaaagcctcgtactcatctagcctcttctcttcctcgcccttggccttatttgcagcatcttcctccaccggcaacctcttaagcttccatcgccgtgtgcgaggcctcttctcatagctcttcttgacaagaaccacctcaggtaagctgtaccgggtcatagccatgtccatgtcatcatcattcaggttggcaccatacagatcatacccaagggcgtgatcgccaggattcagcagatgcccaagatgcgtcctcacagtaaagatggcgtcattcttcccgaaatctgacatccgggcaacctgcgcataagccaactggtaccgagacccatcgatgcaaatttcaggcgattctggttcaatgtcaagcacaatgtactccacgagctgcttgctggtgagagctgctttaaaattataaaccctgtattttttctcctccaggtggtgcactcgcagcgttaggggatcaagaagagcaatggcatttgtgaccttgacacagagcacgagcgggccaaggccacccatgtcccgggacgcctgggggctgagcgcgatgaggtcctcgcggcagacggggcagatttcgactgaaaaggtgtacttgtaattgtagacgctgctcttggtgtcgtgcgagacgagctgcttcgctcgcgatccgagggtcgaccggg

SEQ ID NO: 8648 - DNA, 756 bp, Zea mays
  Clone ID: MRT4577_107884C.1
ccctgaaaatctatagatttatattgttcaattcagaattaccttctactctaaattttctatatctctagtttaatttagaattaccttctactctagattttctagacttttatcgtccatgcatattacaatatgtcatattcttatataatatatagttatcagttgtttaaaccaaacaaagctacgtagatgcgagatccaacctcctcccgcccgtttttttgttcagccttttccacggccgatgtctcccggccccgctcgatcccatttcttttcttttccacgcccaaaccttcctgcctttggtattgggctatcttccgctccgtgtagtccgtgttgtgcgtgaaggacatgcttctatagttttttttggtctgttatagattgcatccgtagtattctaagtgaagttaaaaatcaccagcatacagctgtggccgcattaacgcctgcctcgatcgctagctatggcctgtgtcagcgattgctgatgcatagagcgccgcgcgccgcagctcgccgccgctatggcctgtgtcctggtcctggctgctagctgctgcctctgacgacctccgttcagattttacacactgtaggctgtagctcagggggccgtagtactgtgcttgtccctttggtattacacggtattggtcacgaaggaactcgcaaacgcgcatattatcgcaccttgacatcagatttttctcgcattaacatcagatttattagatcatataa

SEQ ID NO: 8649 - DNA, 492 bp, Zea mays
  Clone ID: MRT4577_107885C.1
gttcgacacgcgggaccagcacatatgcaaaaaaacacatgatatcctgccacagttaccaaacaaagcgagcaagaggtaacaggcttatgtttgttactttgataccatgaatagccaaacagtgaaggctaataccatatctttaccgacacgggaagttgcccaactgcttgggaaaacccaaactgaacgggaaagacaaacgcggtccatcctcagagcgaatgggcctcttaatccaaagggcagggtacaattgactgttttattaacccaaatcccaaacaagataacaaactattacagacttaactacttctccatgcggatgatgcaatgaatgccctcccccttggcacatcaaggctaacaccttgtggatcttagctaacgggacactttgatggataaacttgttcacctccatttgcttttacatagacaggtacaccacattgggcagataagtgagtaagaattatacatgcc

SEQ ID NO: 8650 - DNA, 483 bp, Zea mays
  Clone ID: MRT4577_107886C.1
gcgtacaaaaggatgcagtacaaccgccgcttcgtcaccgccgtcgtcggcttcggcaagaagcgcgggcccaactcgtccgaaaagtaggcgcgacgccgttgggctcgcatgcctatgcctatgctcttgctcaaggttcagctaggcgctaggcggaatctaggcggtgacccattgcctagcgcctagtcgggagtactcggtcttaggcgcttctaggcgtttttctaggcgttttggcaatatagccataaattatatatatattatgtatataactaattaactactatatatgacgatatgagtcacagtaagtataaaaagaaggccagtaaaaaaaaaaaaaaaaaaaaaaaaaaaaaaaaaagggcggcgctcgcgatctagaactagcggacgcgtgggcggacgcgtgggcggacgcgtgggcggacgcgtgggcggacgcgggggggacgcggggcggacgcgggtggg

SEQ ID NO: 8651 - DNA, 312 bp, Zea mays
  Clone ID: MRT4577_107887C.1
cgccgggaccgccgcctctgcctcctcctcctcccctacctcttcagcgtcccacggagaaaccacgtgatgaggctgctgcggaggaggaggaggctgagctggcggtcctgtcccccggagtcctagaacgtgacgaccctgttgtccccgccgccttcgtcgttggctctgggaacagtgcaactgactacctgccgatgcctgagccttttgatcatgactccgccagttgcagtcttaactactgtaagctattgctctgcaagaaggtttcctgtcctatttacctgttctgcgactcttacatct

SEQ ID NO: 8652 - DNA, 326 bp, Zea mays
  Clone ID: MRT4577_107888C.1
ttattttttttctgtttaaacggaggttagtgaaagatggatatctatacatagccatgagacctggaaagatgcatatcttgtgtacaagacaagccattattgcaccgaggcagaacggaagagggaatcgtgccaacggacagcttgataacagcagcaagctttgctgtgcaaatcagattgatgcctgatccacgtactatgaccaaggcatatgccgtctatatacaggtaagcatctaccctcaaacaattgtttttacaaagagaccagaacaggaattgaaatccgtctttttctaggccacacgctctatttttta

SEQ ID NO: 8653 - DNA, 356 bp, Zea mays
  Clone ID: MRT4577_107889C.1
aaaccctatacagaactctcacactcgatttagatatatcacttacgggggaaaacttgcgtactttatcacactcaacggtctgactatacattaatgatatccagactcacattcaaagaatgcaataattagaaattgactggtttgttaaaccatttatatccctacactataatgacataacgcaaactataatttagatcatgctggacagatctcactatctagcaatcgacactaatgaacttcttatcatacgacatctggacatacgattacacgatatccttctattaatattcaaatgatgactcatctttcattcaaaatttacattgatactttgaatttac

SEQ ID NO: 8654 - DNA, 366 bp, Zea mays
  Clone ID: MRT4577_10788C.1
gtttggtttaatgtctcggaataatatgaattggctgcaaaaaaacagctttgcaaagccaccggatcggaatacccgtcaagtattggaagttataaaccacgacgctgtaacagggtatgttttttgtatactgaggtaatgctaagctactggtgggaagtaaaccttggcgctactgggaaatgcctgcttactgccagctgaataagcttgaataacagtgctgctgatgccagctgtctgactatctgaacggttcgaaccgaacgcgcttgtcctcactggagcactctaaatggaaattggtccgcgctctgtattggaggattattggcggagcttgtggagaattctctcaaattg

SEQ ID NO: 8655 - DNA, 463 bp, Zea mays
  Clone ID: MRT4577_107890C.1
gggggggggggtttttttttttttttttttttttttttttttttttttttttttttttttttttttttttttttttttttttcaaggaaacccccattaataagggaaaaaagttttgggaaaaaaaatggggcgggccacacaaagggggggggggggggggggcaaactggggggggccgcaaacaatttttaaaaaaaaaacccacccggccaacttaattttaatcggctcaagaacccaaaacccgaaaaagctttcccgggaaaggtccagccaggaaacaaaaaacaagtctaaagttgcccccaaaccaaaaaaacacccccggaggggggggcaatcttaaaaaggggcgggccctggaacagccaccaaagggcattaacaaaaccaaattcaccataaaaatattctgaccacccggccggggaagggacaacttgccacccacccctcccg

SEQ ID NO: 8656 - DNA, 701 bp, Zea mays
  Clone ID: MRT4577_107891C.1
aattcggcacgagggtgcgtgtgaggaagatgagcttcaacaagtttgttgttaatcttcttgtttgattgtaccatcttattttgtgtttgattctaacctgctattgtttagttagccttttaaatccatcgcttctgctgttgtgtttgccctcttttttttgtttgctctaaccatggacgcaggctctcactcgatctcctcggagaagagccacgtcgccgcgccccggccgccgccgcaggaggcgggcttccgcccctacatgccatcgctgagctcgggatcctgtaacccgtcggccaagtgctacgttcatccccgacagatcggcgatggacatggacatggcacactacctgctcacagagcccaggaaggatgaggagaacgcggcggacatggtggcatccccgtccaaggaggcatataggaggctgctcgtggggaagctgttcaacaaccggacacggatcctcgccttcaggaacaagctgccagaacccgagaacgtgtctttcaccaatgtcgcttcctccaacctgcaggccgagccgaccaagcagcggcgccacattccctagtctgccgagaggaccctaaacgcaccagaacttggtgatgactactacatcaacctgcttgactgggggagcaacaacgtgttgtccattgctttgggaaacaccgtgtaccta

SEQ ID NO: 8657 - DNA, 218 bp, Zea mays
  Clone ID: MRT4577_107892C.1
cccacgcgtccgctcgttgatccgtataaagtagcgtttgcccataagaacggggggaggtgtctttttcttccacctagctggccatggggcaaaaaaccataacccccgccctcttggtaaccacagccgccacctgtgtttatttgccggccacgcatcatctatgcttggtagcctcctcggaagaccgccggcccgctgtggctaagaaggtc

SEQ ID NO: 8658 - DNA, 368 bp, Zea mays
  Clone ID: MRT4577_107893C.1
cggccttagaagctaaaggggtacccgctggtgtttgtgttgtcttacatgaagggtagtcgcaccttgggttggaccagtggccagaagatgacagagctcgggaatgtaagaagcctggtaccacctatgtaaatactgttgattcacatgatcatttggctaccattggtactgccaaccagggccgcatcgaccgctgttgccaacagaccaactttctgtagggggaatgctgctgctcgccttgttggctcgtacaccactaaggacgcagctgttccagcctgtgagacagaaaaacgaatcagtgcactgtcgtacgctcctttcgctttgttagcttcctttgtaggcacgttcaacgg

SEQ ID NO: 8659 - DNA, 1489 bp, Zea mays
  Clone ID: MRT4577_107894C.1
gtgagagagacaaagcagtgcaggatctggctcggctgaagcagcatttgttagataaggatcttgaagaccaagaaaagatggatgaagatagtaaactcattgaagagttgcgggtagtatgcgagcagcaaagggctcatataatgcagttagagagggctttaaaggtcgagatggcaaagcaggaggagaacaaaaaggtcataagtgaagagcaccagaggtcaaatgaacaaatagaaaatttgaactacaagcttgcaagctgtatgagtgcacttgaatcaaaaaatgtggagctgctaaatcttcagactgcccttggacagtactatgctgagagttaggcacaggaccgacttggaggtgatttagctgttgctagggaagaactgtctaaattgtcagagtcattaaaggtggcaaatcaaaccattgagatttcaagaagggaaaaggaagatatggctaccaaactttcacaagcagagaggatgttagcagatgggaaacgatccatgcagaagcttgaggatgacaattcaagattgcgaagagcgctagaacaaagcatgacaactgtgaataggatgtcactagattcagataactccgttgacaggcgcattgtgataaaactgctagtcacctacttccaacgaaatcacagcaaagaggttctggatctcatggtgcgcatgcttggcttctccgaggaagacaagcaaaggattggctttgcacaaagtaatgctggtaggggtgtcgttcgtggtgttttgggtctcccgggacgcctagttggaggaatcgttggtggaggtccatctggcaaatctactcaatcgtcccaggatagccagtccttcgcggacctatgggtggacttcctgctcaaggagacggaagaaagggagaaacgggaagcctcagaagctgcaaggcaatcacagcaagagagccacaccaccaccggtccaagtacatcgtcgagtatccaacagccatcacagcacaacccctcaaacgttgcacctggcccatccacaatgccacacaccgcttgggtctcccagaatcggaatcctcaacagttccgctagcatcatcatgctcgtccgtgctggctccatccccaagaccacctctaagatgatactcgacgatgccaattttctttttatggagtagaaatcaagtgcacactgtacagtatcggatacctttttgttgtgctgggagtgatcccgcatgcggacgccaaggctatttgttccattcgttgacaatgcgatgatgatagtagtagattcaaaaattggcctccttcctggagcatgtaaagagatcgatatgtaaaatggattcctaccctcgacaacagatggaggtaaaatgggagttggttatacgtatgttttgaagtaaaaaaaaaaaaaaaaaaaaaaaaaaaaaaaaaaaaaaaaaaatattaaaaaaaataaaa

SEQ ID NO: 8660 - DNA, 689 bp, Zea mays
  unsure (1)..(689): unsure at all n locations
  Clone ID: MRT4577_107895C.1
ccacccggccggctgatcgcgacgccggcaatggcagcggcaatgccgcccccgtagcggccggaggcggcaatgaaggcctcaccagggacttcttggggctgagggccttctcccccggcgacatactcagcatggccggtttcgacccctgcatgtcgtcggcgtcgccggcggcgatttagcggtggccccaccagcccggcagcaagcagtggcatgtctagtctagacatcattacatcgtcatggcatcgtcgtcagtacaatacatcatcatggcagctcgccatatatggatgaatcattattatatatatattctgaatgagctgcagcacgtacgcatgcatggactttgctcgatcatattgggtaagtcggatcatcgatcgaatccacttcacttttttgcttggcacttattttgatgttcatttggggggtgtactacggttatggtcatttcagttcttatatataaacttcattcattcagaagtacggggcaatatatatatggatgttttgctattatttatatatcatagtcaccaatccatgttcttagccagaatatatngcatctgttgtagtcagtatgtagctactaaatctgtagccttcgagctaatttgtacgagaagcttactaccgactacgtacgtactcagtttcaagtttcctct

SEQ ID NO: 8661 - DNA, 962 bp, Zea mays
  Clone ID: MRT4577_107896C.1
gtactcttagtataaaatagtttgccgatgtttgctaacggcaggttctggatctcatggtgcgcatgcttggcttctccgaggaagacaagcaaaggattggctttgcacaaagtaatgctggtaggggtgtcgttcgtggtgttttgggtctcccgggacgcctagttggaggaatcgttggtggaggtccatctggcaaatctactcaatcgtcccaggatagccaggtgggatctttatgcctgacaccctttttttcttctcatgatcctattcctttcacctctgaagttgagcagacaacaagaagcactaagctgtgctttgcattatgctacaacctgacggttggtattggtttccctgtgccatcatgtgcagtccttcgcggacctttgggtggacttcctgctcaaggagacggaagaaagggagaaacgggaagcctcagaagctgcaaggcaatcacagcaagagagccacaccaccaccggtccaagtacatcgtcgagtatccaacagccatcacagcacaacccctcaaacgttgcacctggcccatccacaatgccacacaccgcttgggtcgcccagaatcggaatcctcaacagttccgctagcatcatcatactcgcccgtgctggctccatccccaagaccacctctaaaatgatagaaatcaagtgcacactgtacagtatcggatacctttttgttgttctgggagtgatcccgcatgcggacgccaaggctatttgttccattcgttgacaatgcgatgatgatagtagtagattcaaaaattggcctccttcctggagcatgtaaagagatcgatatgtaaaatggattcctaccctcgacaacagatggaggtaaaatgggagttggttatacgtatgttttgaagtaagaattttgatttgaaaaaaaaaaaaaaaaaaaaaaaactcgaggg

SEQ ID NO: 8662 - DNA, 754 bp, Zea mays
  Clone ID: MRT4577_107897C.1
aatgatgctagaaggacataccgaaggatggtattccttagatttgaaccaaataatcagacatacctctcactcatcaacggttatgtctcaactgagaaatactttagtgtgctcatactgtggacagaagtaaggaggagggggattgaattcaaccatgagttgattgatgcctttctttatgctttggtaaaaggagggttctttgatatggcgatgcaggtgattgaaaaggcgcaagagttcaaaatatttatcgataaatggaggtacaagcaagcattcatggaaacacacaaaaaactgaaagtggcaaagctaagaaagcggaacttcaggaaaatggaagccctagtggctttcagaaattgggctggtatcaacacataacatcgcaaccttgattttatcaacctgtcatgtgtcatgactgaatttatgatcttcagaaagctgtagcaagcgctatggatctttagagatggttaaagtaaagcagctgtttggctgtggtaaatttgcattttgcaacaaggttagataaaaattggctcgcttgtgttctctatgttatttataggactggatgtttactttgtactttatagctatactgacctgtctaggcactggtttgcagtaggaccccattcaaacttcagaccatgtgtagtactggaatgatcaatgacaagtttctcttgaaataaaaaaaaaaaaaaaaaaaaaaaaaaaaaaaaaaactcgaaga

SEQ ID NO: 8663 - DNA, 261 bp, Zea mays
  Clone ID: MRT4577_107898C.1
tatatttttatttaaatattaattttttgtggtgttacacgcgagctgaaaagagtattttcttaaatatcttattgcgatatcctaatttgtatcgacttttcctaaaggatgtcacgtacaaataaaccaaccaaatatacctcgatacattatattagctttaattttgtttctcattttttctttctattttaaatttaaaattcaagtctaatttagagctaagttcaaatttctatttcgagcataaattgcaac

SEQ ID NO: 8664 - DNA, 296 bp, Zea mays
  Clone ID: MRT4577_107899C.1
cgcgcgtgccgagactctgaggccttgcacccccacgatcccgtacgatggccgtcaagaagatcgcgatcttcggcgccactggccagaccgggctcaccaccctggcgcaggcggtgcaagcaggttacgaagtgacagtgctggtgcgggactcctccaggctgccatcagaggggccccggccggcccacgtggtgctgggagatgttctgcaggcagccgatgtggacaagaccgtggctgggcaggacgctgtcatcgtgctgctgggcacccgcaatgacctcagtccc

SEQ ID NO: 8665 - DNA, 532 bp, Zea mays
  unsure (1)..(532): unsure at all n locations
  Clone ID: MRT4577_10789C.1
aatttaaactgctgcttgcctaaggggtttccgagaacacttanaccatatgtgcataaattcttgtgcgtgtatgacaatccacagaaacatcctttacacaggagtcaatttatctagggggcgtttatcatatagggagggggagaaacaacatatatgcgtacatgtgagtatgaggaatgcggtcttcgtgcaatgggggggcaggggaggatcttgatgccaggacagatctactcactatgtgtgaagaaacagataagacactgggttgacctttttttttgcgattttagggagagcaaaggggagactgtgcccacttgcgggccggtaacaagggtgataatccaattcacttatctttagggggtgggctccctgctgagtgaaataatgcattgtgggagcatttctcgtactcttctcttcagagagcttggtttaacgccagaaagcatgctgcgggagaagatctctaaacgagtaagttcatcagtatctgcggcatccaaaatgtgctcaaatt

SEQ ID NO: 8666 - DNA, 870 bp, Zea mays
  Clone ID: MRT4577_1078C.1
gccggccgggaccccccccgcgtccgctagtagatagtaagtagatcacgcagcgcagtagctctggattaattaataataattgctcgtgcgtgtgtccagagccgccatggctgcccatgtggacccgctggttgtggggagggtgatcggcgacgtggtggacttgttcgtgccgacggtggccgtgtcggcgcgcttcggcgccaaggacctcaccaacggctgcgagatcaagccatccgtcgccgcggccgctcccgccgtcctcatcgccggcagggccaacgacctcttcaccctggttatgactgacccagatgctccgagccctagcgagccaacgatgagggagttgctccactggctggtggttaacataccaggtggagcagatgcttctcaaggcggtgagacggtggtgccgtacgtgggcccgcgcccgccggtgggtatccaccgctacgtgctggtggtgtaccagcagaaggcccgcgtcacggctccgccgtcgctggcgccggcgacggaggcgacgcgcgcacggttcagcaaccgcgccttcgccgaccgccatgacctaggcctccctgtcgccgccatgttcttcaacgcgcagaaggagacagctagtcgccgccgccactactgagacaggctgatcgtcgtccaacggcaattacgtacccagcaaaagcttaagccagccgctgcagtcactcatctcattgagaagaagacaatcttcctagtcgctgttcttgccaagtactagtaccttgttaattattatgtaagctaaacccgtgtgcctgtgattatattgggacgtgtctcgctttaatacaaccgctcaacttgtggcgtttt

SEQ ID NO: 8667 - DNA, 442 bp, Zea mays
  Clone ID: MRT4577_107900C.1
gtggtacggaccaagctttattgctgtcactagcttattgacgatcctcttacataaactgtgtgcgtgcactcttctcctggcgctggcccttggcaaccttattcgtccattcatacattacgcactatcggcggcgcgcgtggtacccaccagtcgggcttctgatgctgtagccgtggcgtggtagctatccttgctcttccagatgtgcccggttcctgtggtcaagttctacgcctccttgtttctgtgcgtcaaccctgcccctccggtgatgaccgttaccgtgtgctgtcttcgttgctgcccgacatcttgttttctttcttgtttggctgcgtggcgtggtgctgcatgctcgcctccgctgccgggctctaatctacctgctgtggccgtcgacctgatgccctccttgccccttgctccctccttgcct

SEQ ID NO: 8668 - DNA, 438 bp, Zea mays
  Clone ID: MRT4577_107901C.1
tttttttttttttttttttttttttttagagagaacgatactcgcttctcctgtgttccaagagtacttgttaggtgtagctgtaggcctgtagcagtgtagcctgtagagcaactaatacacatatttgttaactcaagatttcaaatgcgaaccttttcctttgggaactaacacatcaaagaatcattgcgcttctatcagacacacgactcgcttatcctgtgttcagcacacttcagactttgcatcgactacacaatatcctggatctttgggaagatccattccttccatcactctcctcagatgttgaacatcgctccatctctcagctgcagcatataccttcccaaggagcacataattcccaacgttatccggttcaagctcaaacagatgtttagcagcgacctcgccgaactcaacattctcctc

SEQ ID NO: 8669 - DNA, 136 bp, Zea mays
  Clone ID: MRT4577_107902C.1
agtggaatggccattatatatttaagcagatatgtatgtataaacatctggtgcatctgctataacttcttcgcttcttcaatgtcgcctcatttcttatacaacactaatcatacttgcaacactgcttgaatgc

SEQ ID NO: 8670 - DNA, 412 bp, Zea mays
  Clone ID: MRT4577_107903C.1
agcagtggtaacaacgcagagtacttttttttttttttttttttttttcgagatcgagttagatattgttgtaattgaaactgaatgaacgaagacaatagccagaaaaatcagatggagtttaagaccttcgaaaccatataaattctaacaccacaagctgtgcatgtctccattatctaaaacagcgtcattagtcgcagtagcacccctacaagatcacgcttgctttggcagccaaagaaaccggcagcggcctgggtcaggctcctgggcctttgagttggtgcagtgcagagcactatgcaacgcgacacaagaacgctgttggcacgggaagcatgctgggttccggcgtggcggcgacgaagcccagccctgcgcccgcgtactctgcgttgttaccactgct

SEQ ID NO: 8671 - DNA, 610 bp, Zea mays
  unsure (1)..(610): unsure at all n locations
  Clone ID: MRT4577_107904C.1
cgagggcggcggctgcgactgcaacacctgcaactgcggcactagctgcggctgctcctgctgcagctgcaactgagccacccgcgatgacgaaacaaccacccggcctcccccccacccatcgtactacaactatgtagcggcgtctaaataagatcccttcaccggccaccgccattgttccttcctgtcgctgcatggtcgcctgcctcgtgcccgggctaatatacatatactatgtgtttcagcattaaaaaaaaaaaaaaaaaaaatgactgcttggaggacccccgctgccgtgcggccgactcccggcgcccgtgtcccatcgctcgtgcgggcatcccgtgcctgctgcgttgagaagtgcttgcgtgctgctacccgtcccacgggaagccgtgctcgatacacgttgccttcgtcgagctcaccccccggngtgcggctcgtcggctcgagagcgcccgcggcgtttgcctcgtgcccgccgtcagcctatggccggcggcaccgaggacacctcgctggcgctttttggtctcgatgtggctcacgctgaaagccggagacgcgtttggcgtcacgcgcccaagaatcggtccgcccg

SEQ ID NO: 8672 - DNA, 2085 bp, Zea mays
  Clone ID: MRT4577_107905C.1
accgaacctagagcgcatgtcttgagtgaaggtaaaggtggaacggagggaaaacgggaggaggcgcgcggcgacgggcggcagggctgttcggccttgcgtatgggctgaaaacgaggagttcgccatggcgcgcgggccgaaaaaaacggttcggccacggccgcgaaaacgggctaagtccaagcgcgtggaaagacaccgaggctgctacgtaggtctcggttgaagggcacggtggaacggagggaaaacgggaggagacgcaaggcaacgggcggcagggctgttcggccttgcgtttcgggtgaaaacgaggggttcgccatggcgaacgggccaaaaacggattttcggccacggccgcgaaaacgggcacgtggaagggcacgggaccctcccgtggtccccccgcgtgagacgtggaagttcgggtgcacccgtgagggaaaacgggtcacgctagcgaaacccctgattctgagcaaaaacgctgtgtccagccatcttagatgggtttcgtggggtactgggaaaatgccctggttttctgaaggcagaactccccgaagtcctgggagggggtatgcccctcaggtatagtagggggtagggaactcgtgcagccgaaacccgggcgaaacgctgctgaaaccatagcgtttgcagcgtctcctccaggtctcctcggccgagccccgcaccccctcgcggcctagccgtggccggtcggaccatcgcaattcacaagcaaagcaatcagagccaagcacccaccgtcctcctttctttccttcgactcatcaaagcatgtcttgctgcggcggcaactgcgcgtgcacctccggctgcaactgcggcagcggatgcggcggctgcaagatgttccctgacgtggagaccgccggcgtcgccagcgtgaagcccacggtcctcgccgcccccgccaccaaggcgagcgccggcgggttcgaggcggccgccgagggcggcggctgcgactgcaacacctgcaactgcggcaccagctgcggctgctcctgctgcagctgcaactgagccacccgcgatgacgagacaaccacccggcctcccccccacccatcgtactacaactatgtagcggcgtctaaataagatccctccaccggccaccgccattgttccttcctgtcgctgcatggttgcctgcctcgtgcccgggctaatatacatatacatactatgtgtttcagcataaaaaaaaaaaaaaaaaaactcgaggcgccggccgggtcccgcgctcggtggaccttcggtcgccgtcctcgcaagcagacccgccgcgcccagcgcggagggatgctttggatggctcgaccgtagcggctacgctggcgcatgagttgtcttggacccgtgactgcttggaggacccccgctgccgtgcggccgactcccggcgcccgtgtcccatcgctcgtgcgggcatcccgtgcctgctgcgttgagaagtgcttgcgtgctgctacccgtcccacgggaagccgtgctcgatacacgttgccttcgtcgagctcaccccccggggtgcggctcgtcggctcgagagcgcccgcggcgtttgcctcgtgccgccgtcggcctatggccggcggcaccgaggacacctcgctggcgcttttggtctcggatgtggctcacgctgaaggccggagacgcgttggcgtcacgcgcccaagaatcggtccgcccgaacgaacgacggccagcccggcacgacgcctccgcgcggaggccggcgctggcccgtctgcgaggacgtgctacctggatgatcctgacaatagtcatatgcttctcctaagatccatccttctaagactgcgcctgcctgtgtctctcaaactctgtatgtgttcagttgtgtcactctggcggccccatgggtcagggtcactgcttgcttcttgctgggtctgactctgacgaaacgctgataaaaaacttagaacccctttgcagcgcttcagaattttagacgatgagcaatatcagtcttttaaaagatttagcagaatgcagagtatactgaaatctggcggg

SEQ ID NO: 8673 - DNA, 386 bp, Zea mays
  unsure (1)..(386): unsure at all n locations
  Clone ID: MRT4577_107906C.1
gtaccctcgnagggccggccgggaaccactcgtctcgcaccactcaacgtctcaacctgagaagctacatagctagtcagctgtgggcggtggcccggcagcatggcactaacatgcaccgtatcaatgctgccgcgctcctgctggcccctgccgctgctgctctttgttaagtcaggcctgacctgagcctgctcaattattccgtgccctaacctgcgggagtccagaaggctcccgaagcgcaagcagccaccaaaaagagccacagggcctgttacaagcnttcgaacagatgaaggaatgtgnntgaagtatcgtctttggaagttttggaaatgtaatcgctctcttcctcttcctggccccagagcctacgttctgga

SEQ ID NO: 8674 - DNA, 279 bp, Zea mays
  Clone ID: MRT4577_107907C.1
ctgacagcagcagaacaacttgccgcttaaaatggggatgactgtacttggaggatgggccgtgttctaggtccgggagagagagagagagttcctactagcttgggcacatggaagggctagggccggctgcattatattgggatcagaattgggggccacctatctagcctcagctgggagaagagagacggggccatttatcaagggggtgaagtccctggggggggttaagaaaaagaaccgggcccgtcccgtttttttttttaaaccccccct

SEQ ID NO: 8675 - DNA, 536 bp, Zea mays
  Clone ID: MRT4577_107908C.1
taccctcgaggctggccgggctcgatccccttgctgcccgcgagcccatcacaattccactctacacacgcgcctgggcactcgcgcgccgactgtccgacgcgcgacgaccgccggccatgtgcaagtacggtaccattcccacctcctccatgcgagggcggagggcccgagcccctcgggggcgcctccccgatcagatattgatctcccgcgccaaggctcggggcgcctcggagctggagacgcgccggacctggagcgagctcatggacgagcacaccgtcgtcctgcccccgagcctcgtcgacgtgtacctccgtgtgcgcgccaacctgggccacttcgacatgaactacgccatcgtcagcctagtggttaccttcctctaggtgctttggcacccggagtctatcatggtttatctcatcagcatgctggcctgagtcgcgctgtacttcatgcgggacaagtccctagggctgttaggccggggggaggtggacggctacgcgctgaccgtgatggagcacaca

SEQ ID NO: 8676 - DNA, 773 bp, Zea mays
  Clone ID: MRT4577_107909C.1
gggtcctcgagccggcgggaggccggtgcgcgcatcaactcggcacaaccggtgagtcttctgcatcttcgatggagaaccagggacccaaacccatccgatgcaaagcggccgtgtgcagggccgccggcgagccgctggccatcgaggaggtcgtcgttgacacgcccaaggcgcacgaggtcaggatacggatcatctgcacgtcgctctgccacagcgacgtcacgttctggcgcatgaaggatctccctgacaatatccccagaatatttggccacgaagccttcggggtggtggagagcgtgggtgaacaggtggacgagttcgcggcgggcgacgcggtggtgccgacgttcctggggcagtgcagcgagtgcgtggactgcaggtcggcgcggagcaacatgtgctccaagtaccggttcgcggtgcgcccggggatgccgcgcgacggcaccacccggttcaccgacggccaggggcgcccgctgcaccacttcttcggcgtgtccagcttcgccgagtacaccgtggtggacgtgaaccaggtcgtcaagctcaaccccgccgtgccgccggcactcgcctgcctgctcagctgcggcgcctccacgggggtcggagccgcatggaagcaggcgaaagttgagcctggatcttcggtcgctatcttcggcctcggcgctgtaggattggcggtggctgaaggagccaggatttgtggggcgtcgaagataatcggcgtggatataaaccctgagaaatggagc

SEQ ID NO: 8677 - DNA, 432 bp, Zea mays
  Clone ID: MRT4577_10790C.1
gggggcaaactttttcacggggtggaggcaccggagcaacatatttgggcgatttgaaccaaccaaaccccccaagtcctttatggggaatttttcggggagggttgaaattaccaatttttttaccattatttacgggcatattaaaggaggcctagggtcacccaatcccacaaccaatccacgttagggctacaggattaagggctgcaaaagtaattaaaaaaaaccctcctccatttctacttggacatttgctatgtacaaaaaccacgtgagggttccatggcaacggccttaaatctggggatgggccccaaaaaatgaaggggtgggtaggaatttaacatgaaacacaacagtttcctgcgcgggggcgggtaaaaacaagagcccgcccacttttttctctggaagcccccccacttgacc

SEQ ID NO: 8678 - DNA, 132 bp, Zea mays
  Clone ID: MRT4577_107910C.1
cagggacctccacggcgacatgatacagtctttgcaaatcattgcagtaatctacctgagaagagcctgcagatctttaaactattatgcagctcacttctaaccagagggcgggacctagtttagtattta

SEQ ID NO: 8679 - DNA, 155 bp, Zea mays
  Clone ID: MRT4577_107911C.1
cttccagggggcactttcataatcattcaatctggaaaacccctgcgttactcacagacgtcgcccgagggaaaattgcccctttgaagaatcggttttttttaagaagggtctggctcgttggcatccctcaaattttggcccccactatgggg

SEQ ID NO: 8680 - DNA, 209 bp, Zea mays
  unsure (1)..(209): unsure at all n locations
  Clone ID: MRT4577_107912C.1
tggactcgggggaccagcgaacacacacgaggcaccaggtgcatacgtgcgcggggtcgctctacactgaggtgctcctcctcctnntnctgctcccggggcgggcggcctacttttacacctcctgctggtgccagggccgggaggacgtatcggaggtggctcccattaagctcgccctacacggtacggcagacaccgtccaccta

SEQ ID NO: 8681 - DNA, 481 bp, Zea mays
  Clone ID: MRT4577_107913C.1
ctcactgtccccgccagcttacgcccgaactgccgctggttgcccaacaacggcgccagtctttgactccgcggctgtgttcaaccaggagcccatacaacgagaacctctctgattacatcgcagaagaaatcatcattctgctcttttaccacttggataacacacttcgtctgtccgaccgtatatcactgcgtatagcgacatatactacgaatccgagattactgacactgaggacataggcgatgacattgacaaggtgaactcccaccttgtatgggtgcacacagacaggaagtcctgcgaccttggatgatcttaaatcccaacttgattctgatgtgaccaaataaattacaaacgcctttggtgttcttatccctaaccaaagtatagatgcctagaggactgctcatcattgaccaggatgtagcgattaaaggatctaccattaacaaccttgacatagggattaatg

SEQ ID NO: 8682 - DNA, 252 bp, Zea mays
  Clone ID: MRT4577_107914C.1
ttggttttttttcacgaggcattaggttttaaaccattggatgactgcacactagtgaaagacacaaatccagatttgactgcacacggcccattacaccagagacagacactaggggactccggtcacaaaatcctgggggatttgcggggcctactacctgggaaaacctacttaatggacatggaccgggggactgtctattggctaagacctcagctgcagtggtacaagatactgtcactactgaac

SEQ ID NO: 8683 - DNA, 470 bp, Zea mays
  unsure (1)..(470): unsure at all n locations
  Clone ID: MRT4577_107915C.1
cgttgctgtcggcaggcaaatctaaagatgaaatgaatcgtcaaaaactacgctcattaagcaatcgaaaccctttcagggttggtaactacctgatcatcattcttgtcgttgggatctgcagaccaaaccaaaatatgtcaatgcttaccaatttcaggtaaaacaatgcattctgatagtgcaatgctgtaattcacaaaaaatatactcccttcgttccaaaatatatgtcattttagtttggtcctaagtcaaacatctttaagtttgacgaagttcagataaaaatatattaacatctaggacatcaaataaactaatttaatgtcgtcgattttgatgaatttttctataaacttggccaaggttacagaactttgactaagaagcaaactaaatcaaaatacattttggaagaggaggagtaatacattgntgnatatagatatactacatttcggccaaca

SEQ ID NO: 8684 - DNA, 390 bp, Zea mays
  Clone ID: MRT4577_107916C.1
ctcaagagtccggccacatgagagaaaaagcgtacgctatggacgccggggggatgaaagggataatctaggacatggacgccatggaggtggagaagctgatcttgtacatgctcaagatcgacgtcaagaagctgatctacctcaagctcaaggcgctcgtctaatagccgatctagctctacgtcggcgcgctggtctttcacgcgctcctggtcacgggcgtctactggctcgtttgcgcggtcccggacacgcggcgcttacagcgtcgtctgccgtgtcgtctacagctcaatccccatggtcatgcgcctcaaggaggacagggcaaacggcatgcgtcaagcgcagtaaggaggtcattggccacggggacaccgagctcat

SEQ ID NO: 8685 - DNA, 354 bp, Zea mays
  Clone ID: MRT4577_107917C.1
accacacgtccggtctggttctttttgctgtttggatgttattattggtcatgtatggctgcttgtatgcacgtcgttggccaccgtaaggaggcccttctttgttgtactggtcctctaagaccttcatcctttttcttcttaatatatcgacacacaattacactgcatcatccaaaaaaaaagaaactactagttcatgaccactcgaccatcttattcttgccagataatataactttaatatactgatgtcctgctctcaaaagcttgaagctcaagctgttcaagcgtggtcggttgatgatatatcttatacaaacatgtatcttacgttccaagaatggatttaat

SEQ ID NO: 8686 - DNA, 300 bp, Zea mays
  Clone ID: MRT4577_107918C.1
aatgttaagtgcaaaagcacacagcagctgacaaaaagaactgccggcgcacgccagcagcactaaaaaggaacagaaccaaaacaagccgcggcttattaccaaaaccaaaacagagctacaaccgagtgatgccaaacaccaaaattacgaaaccggcgcttggcggcgaagcgcaaccgatggccaaacacgcgccacggacagaggccaagaaccgctaggacgaggcagtgcaccaagggcaacagggaaagacggccaaggccccaacacacccgcaccggaagaataagaacc

SEQ ID NO: 8687 - DNA, 308 bp, Zea mays
  Clone ID: MRT4577_107919C.1
atgtcccacgataaaattatcttaagagaaataatttcttattaatgataacaaagtttggatccttaaatacttacacgctttatctcgaaatagagggagtagtgatttagatcgaacaatattttggttattgatatatttcaaatatggggctcagttttgagttttgcaccagctctcaattttttttaagtctggccctgcaatcatcacaatcaaaccgtgtacgcaaccgaaaccatgttatgcgccatcagccgtttgatcaatcgatcgagtggcagatctgctggaacgcgtcgact

SEQ ID NO: 8688 - DNA, 425 bp, Zea mays
  Clone ID: MRT4577_10791C.1
ccccaacccaaaaaatgaatatagagtccccaacatgcaagagcttcaaaggccccaccggccaccatggatcgggggggagtctgggccatcctagcggcttgatttaaaaaaagaaaatttgcaaaaatttctttcctccccaaaagcacgagggcatcgggccaaaacccaaaaaaacaccacgccgggaccttccgatccggggcccaagctggcaaataggggggcacccagccatttcaaacggggggaagggggatcaatggaaaaaccccggggccccccccttggggaaaatgaggggggcctaaaccctggaaaacccgtcccccttgggagggccgagaaatttgcgcctaccccagtacacttgccgcccgggtggggcccaaccctaatcatgtacccctgaaacaccccct

SEQ ID NO: 8689 - DNA, 306 bp, Zea mays
  Clone ID: MRT4577_107920C.1
ccggccgggctctcgctccgatgctcgcctcgcatcacaccctacgcagggagattgatcttatccgctgcagccatgaggaacgtgcagtcgtgagcctgtcaaggatgccatctcccacattgatggcgatgccacggagaagactagggaagctcactgctactgaggaactttacattgttctgaagagtatgatccacagacgacaagcgtgcacgtcttgtaagtgcccatatccctcgtcagatgaaggtgtgcatgcttgctgagcccactgacggaggcgaagatgactgactactg

SEQ ID NO: 8690 - DNA, 633 bp, Zea mays
  Clone ID: MRT4577_107921C.1
gaaaaatccacatccaaccgcttattgaaaatatcggcaatcgcctggcaggatggaaagggaatctactaaaccgagctggccagctcacactcgtgtcttctgttctatcctccatgcccacctaccagttatcgatttttcctctcacggcctggtcacacaaacgtattgataagatctgtcgcttctttctttggaaagggaagactgagtcaaatggtggtaactgcctcgtcgcatggccactagttagcaagcccaaagacctcgatgacttgggtgttatcaaccttgacaagttcggacatgccctttgccttcgctggctttggaaggaatgtacgagagagcatcacccatggaaaggtttggaagtgccttgtaaccaggtggatagattgctctttagcgcctccactactgtcactatcggcgacggtaatacggccatgttctggcacgatagttggctcgacggcatggctccgaggaatatagccccgcacctcttcgagctaatcccgagaaagaacaaatcagttgcctgttgttgggcctcatctgtaatagccttttctgtaatgacggtttgtaacctccccttgtgggaatattctggggatagtccgg

SEQ ID NO: 8691 - DNA, 484 bp, Zea mays
  unsure (1)..(484): unsure at all n locations
  Clone ID: MRT4577_107922C.1
gccggccgggccgggagagcagtgagccatcgactcgatcgcgagcgcaagcacgtacgttgtcgagaagctcaagttagaagaagcgccagagtctgatcggatggcgctccaggttctcctctccgagcggcaggtgctgggccgccccgtgcagtcgggcgtctctaggtcgtcagcgaggaaggcgcccttcgtcgtcagagacagctccagccctccagccaagcaaggagccgacaggcagctgtggttcgcgtgcaagcagtccctctcctacgtcgatgacacgctgcccggagactatggcttctacccgctgggactctcggacccggaggacacctgcgtcttcatcgataccaagtgggtgcgctatgcagagtcgatcaacggtcgctactccatgctgggncgcgatgatgtctgtcgtcccggagatcttcggcaagatgggaatcatctctccggagagcacgctgtc

SEQ ID NO: 8692 - DNA, 349 bp, Zea mays
  unsure (1)..(349): unsure at all n locations
  Clone ID: MRT4577_107923C.1
ggcctgggcaatttctattttttattgggcccgttgaaattacaactacatgcaagggacaatttgccttgaaagcgtaacaaaaaaagagagatttttttagagggggggtnnnnnnnnnnncnnngcggaactttgaaaaaaaacagacaaatcaccctctggaaaacgaaaaaaaaaaaaacaggagatcccaggagctaacactgtctggtcctaaggggtaaccccgtttttgcccaaagggcaacagtttggtgaacattcgcctcgggttcccgggggggaaggtggaaaaagccctgaaccgaaaagacccccttggggggtaaccctggccttgggccca

SEQ ID NO: 8693 - DNA, 142 bp, Zea mays
  Clone ID: MRT4577_107924C.1
taagatacgagggagcttcgtttttttctggcccccacacgttgaacgcctacattctggagccccagaacccagctacaaacatggtgtctaacaaagaggttccgacatattttcagcccccagacatttcggacatgca

SEQ ID NO: 8694 - DNA, 680 bp, Zea mays
  Clone ID: MRT4577_107925C.1
ccggccggggacagtggcacgcaacttcaaccaccaaaaaaagatgccatcggccattcctgataatggcactcgccaatataattcgctttgtgataggacgaatgaccactctgagtcaactcttcaaagtgactcaatccctccccatcctctaggactcaagcctctaggcaaccagtacctctttacaggccgtaatgctaggcggtcaatcggagcatggaggcttctcccagacgaagtcgtctcgcttgtgtttgagcagtttgacgctgaggccctgctgaagcttgggcacacatgcaagtttttctatgctttttgccactcagatgaattttggaagcccatattcttgcagtcaccaccaaaggatagcaaggatattcgatggcaagggtcatggaggtcaactgttctaggactcccaagtgaccaacaaatcaatatcgactgcagcaacgtcttctcagatgtactccaccgaccatttgcttgcagtcatgtcatcctgtcccagttcacctcaaatattcccaaggcaaaccagatccgccgcttggagaatttaacctacgaccagtatgccgaaaagtggactgaacagccattcatccttaccaagtgcatccaggaatggccagtattcagcgaatggactattgatagtttacttg

SEQ ID NO: 8695 - DNA, 258 bp, Zea mays
  Clone ID: MRT4577_107926C.1
gcgctcatgcagtggattactgggaagtctgagagcactcagcaggcatttatccgaggcagcgtgtcaacgcacgctaggggcagagagctgactagacgatggggacaggtcgaagctcggcgcggacattctgtggagtggcgaccgcgacgtacaactaaacagcatcgacatggtcaagctccgcatctagtagcgcttgttgaagtcgctaccgagcagtacgtaaacttaagctagtcgacatctgcagta

SEQ ID NO: 8696 - DNA, 440 bp, Zea mays
  Clone ID: MRT4577_107927C.1
ccgacctcgcccttaacgaaaaaaaaaaacaaaaaacaaaactataaaattaaatgaaaaaaaactctaaaaaaaacaccctaaataacacactaaggttttacacccctcccccctcccctgagtcccattcctagattttaccctcacccctctagagggtgctaccctacgctcgttggtgccctactccctcttatactcaagtttctctcgttaactgctcttcgtatgccattctctttgcaacttcaaaaggaggtcctttttaagttaaatccccaacttacactatccttgttatctaagtttttcttttaattgggtgcgaggggcacgtcgcggtggcgttttccggtttcgtacagactcttttgggctctctgtccggttagcctgagccttcccatttctttgtctcccctgtctcagcctctcct

SEQ ID NO: 8697 - DNA, 414 bp, Zea mays
  Clone ID: MRT4577_107928C.1
cgcttgttcggcggcgaatttgttgcagtgctctgaagccatctgctgctggacaggcggaggaggaggagctgtttcaacaatgatgcctcgcgcgctctggccagcctcgccgctggccgcccactctacctaggatttcaggttctcaccacaacaatcaacacctttcaccgcctgtatatatacatagatgggtgtcctaggggcctgtctcctgtaccgcccacttaactggttctctataggtgtcatggtgacaccgtgaaccctacggagaggatcgtgcgctgactccatccattgatggagacgagaggcctgcccacgggcctggtactcgggagctgcaccgtccttgaggctctcgtacagggcgcgcttggcccgctgctctgaactgctggagttgac

SEQ ID NO: 8698 - DNA, 227 bp, Zea mays
  Clone ID: MRT4577_107929C.1
cagtgttgtttgagatccatggaaattacgaacccgaggaggcgtcctttgatattgaatcaccagctatcgctccgttcttgtacgatggttcctgaggatgcaaaatggtgagttgaatttgattaccctgcgagctgtactgctgcatggtggtcgtggagaggaagatgcagccattgccgccgcctgagcgccggaaggtcgttcgttatcgtcgtcttcat

SEQ ID NO: 8699 - DNA, 174 bp, Zea mays
  Clone ID: MRT4577_10792C.1
gcaaagcaagaatgacaatttcaatgggggatttacatataaccatttcgaaatctacaagggcacgctgttatatgtttgcaaagcaaactgtgcatgaaaaggaccaaagagagcttggtaccaattaaagaatttaagagtacaaaattaactgggttgctaagacaaaat

SEQ ID NO: 8700 - DNA, 307 bp, Zea mays
  Clone ID: MRT4577_107930C.1
gttaaaggatgggtacaggagctcatctgggcaggcagtgaactagtgcattgactcaggttcaagacactttcttcttatacacggggctgttgcgacataagggaagatcatgcttgactggaacccgaatggcgacaggggaccgatcactgctgtttccaacctagtgaccatgcacaccccaagagaggatgacgagccgctcacttctgtcttagcacctgctgaggttgaaggaacaaactgcagtccttgaatgaggaggtgatcatggactacataggcttgtatggtacgatcatga

SEQ ID NO: 8701 - DNA, 294 bp, Zea mays
  Clone ID: MRT4577_107931C.1
ggccaaaaaacaattcggggacattaaaatttttggtgcttttggggggttccaaataacaaggggaacaaaagaccgggggcttataaaaggaattgtaacaccaaaaggggcagggacgccacacaggtttatttaaaacaaccaccatggagggtttgaacgcgcggggaagaattacaggcaaaaaaaaaaagcgagcaaaaaattgcattagggccatcgctggagggtggccctgcctaacaaaatccctttttttgaaggcatacgggggtttatgccaaaaggggg

SEQ ID NO: 8702 - DNA, 247 bp, Zea mays
  Clone ID: MRT4577_107932C.1
ggccgggaccggaccggaacacacggcccgccccaaataagataccggggccggcccgcaaacacggggaagggaaagaacaacgggcggagcgcccaccccggccggaggcggagcaaaggcacgcgcgccggccgaaagagcacgaggccgcacgggcccaagaaccacgagagcaacgacaagcccaggaccagcggcatgacggaggcccagcaaccacgccggagaagacgagggcccgcgg

SEQ ID NO: 8703 - DNA, 419 bp, Zea mays
  Clone ID: MRT4577_107933C.1
attcggctcgagacggagcggcctgattattttttagaggccggcgcacgccccacattgcctctgaatggcaccgtcgaggccacccattctttcttggccatggcatagatccgggttccagggcatgggatccattcgtccataggtgtgctgcagctatgcaggtcagcattgtgcttccactagagggaaaagcgtgaatgagcccagagaggggaggcatgggaggttatgggagtgagaggatgaggatcaactgctgcatcattaggcgcagcaaggcactgaggaggatgtgctatagagcaaggggtgctgagagcagcacacagagggtgctcaacattatatgcggccccggacactcttgacggacgaacatactttttgacgaattcagctgagcctaatgaatt

SEQ ID NO: 8704 - DNA, 649 bp, Zea mays
  Clone ID: MRT4577_107934C.1
cggccgcgtggggtaaaacactgggccagttggggggaaattcggcacgaggattgttctctatgatgttgataaagtcagccaaaataaccagcgtctgataaaatggataatagattcctcctctgatgcatgcaagataataatgacttgccaggatgaatctaatctcctagattctataaagagtcgttgcaagattatttcaattggtgtgcccagtacacgtgaggtggtagatatccttacctatacatcaagaaaagagagttttgatcttcctacaagttttgctactaccattgcgaatcaatccaggaagaacttgagggaggctatattggctctagaggcatgtaaagccaacaattatcccttcattgatggacaagctataccactaggatgggaggaggttctggaggaacttgcagtagaaattttggatgatcctgcccctaaaaggttatttctggcacgaggcaagctccaaaaactcctggtggaatttgtacctcctaaactaatactccagaagctcgtagagctcttcctaaagggaattcaaactggcgtgaagagggaagtttactattggcatgcctactatgacaagaggttgcctgttggtgcaagggctctgcttaaa

SEQ ID NO: 8705 - DNA, 450 bp, Zea mays
  unsure (1)..(450): unsure at all n locations
  Clone ID: MRT4577_107937C.1
ccctaaccctaatctcccctcccttctccgatggcccgcaccaagcagacggctcgcaagggcaccggcggcaaggccccccggaagcaactggcaaccaaggcggcccgcaaatccgcccctgccacaggcggcgtgaagaagccccatcgcttccgccccggcactgtggctctccgtgagatccggaagtaccagaagagcaccgagttgctgatccgcaagctccccttccagcgccttgtccgtgagattgctcaggatttcaaggcccgatctccgcttccagagctctgcctgtgtcggcgctgcaggaggcngtcggaggcctacttggtggnnnctgntcgaggataccaacctctgcgcgattcacgcaagagggtgactatcatcncgaaggacatccagctggccaggagatcccgggcgagagggcttgacatgtct

SEQ ID NO: 8706 - DNA, 417 bp, Zea mays
  Clone ID: MRT4577_107938C.1
aagcctctatcctgagtcgggctatctcataaaagaccacaacaagcaagaagtcaacatcgaaaaaatcacacgcccagacaaacgaggacagccgaggaggagcgatcagcacgcggtggatccgctggcgcaggagtcgtcgatcatgtcgctgacgctggatgatctgcacaactcgctgtgcgagccgggccgcaacttcaggtccatgaacatggacgacttcatggccaagatacggaacgccgatgagttaaaggccgtcactgccggctggaacacacagggcgcggatccggagattgtgcccgtggcaatgacgactggcacacgtgagaatggacgatgaggaagtgggaagggactggttcggcacgggtcattcgcgctgccgctgccactgtcccagaagac

SEQ ID NO: 8707 - DNA, 432 bp, Zea mays
  Clone ID: MRT4577_107939C.1
caaggacataactgtgtggtttacaacaagggccttttaagaatttatgaggaaaaacatgggctttgccccggccctgaaaaacacgtcttgaacccggagcccctccaaagcagcaaacaaaactgaggcggccatgaggccccttccaaaaaacctgttctgccgggcttttatgggtttgcggggaaacgttttacatcctttgataaactcctactaaaccagcacctttggtggaacaccctggccgccgtttcattacggggtttgggaaatccttgttaaatttggaagaaatttttaaaaaaatttaccttttttgcagggcaacaactcacattttttgggcaaaaggatcgtgactcaaatgccatatcgaggccgtgatcgatgataacgttcctaccaagacccggccatctttccaaa

SEQ ID NO: 8708 - DNA, 795 bp, Zea mays
  Clone ID: MRT4577_10793C.1
ccggaaagagagtaaaaagaaaaagaagagaaaaggttgaacagggtatttgatgctattggcttcgtataccctgattattgttaaccgctacgagggcaaggagtaaaaagaaagattgctgcttttggaaaggttgcctctttgaccatcacagctgagccgaagggcaagaagatgaaggttctgactcacaggccgcgttacattgaaccggctgagatacctgaatttggcgaaggggcctcttcagctgttgaaacaaaagaaactgttccctctgcgcagaacattgaagagccggctgtaatgccgaagttactgaagacactgaagagacgaaggctgataaggctgagaggccaaaattggagaaataacaaaaatgttagggattttgggccctccaacagaggcaacagtgccaaagatacaaaagggttctgccgcaactcctaaaaggagaaggatggcgaatgtgctggatgttgtgttagaaacaacaaaaaccttgagtcccgctcctacaaggaaagttgccgaagctgatactaagcaggctgaagtcgaagctgcatcaattcaggctgaaaccaaagctgggccttcagtgcccaccgagatggagcatgttgtccctaaggaaaaatcaacaaagcggactgcaactgaaaaaatcgaagctcctggtcccgaggcgtcgaacaaaagtatggactacattattcgtcatgcttcgggaaagtactatccccagaaaaatgttagaagcgcagcactatgccccaaaatttg

SEQ ID NO: 8709 - DNA, 979 bp, Zea mays
  unsure (1)..(979): unsure at all n locations
  Clone ID: MRT4577_107940C.1
cggcgagggcgggcggccggcggctacctgatccatctgaacaagcatcttggccttataaaatactactgaatttgccttctgcgagtcaccaggcccggctgactggctgagttgttgccgttattacagaccgccgtgatttacctgatcacatatactaataacttctttcttcctgtggcagatttgacttcatatacggcgtgcctttttaccagcgtgggttgacaggaaaagttgcgtgtccggtgttttccaaagaagctgaatgccttcaggattttcaattgaagtcaaattccagaggaacctgccgggagagcatagcagggtgactccgggactctctgctacctgcactgcagccaggcagattggagattggggtggaagcacgggacgacaggaggacgcagaagaagccacggggacccacggcaacggcatgcgcgtgtacgtccaaccccatgcgatcggtctcggtcagcgcgctcactgcgttgcacttgcacgactggatgaaaggatgcgcgtggagtggacaacgacggccttcccgaatcccgttccaaccttacccatgcgtcggtctcggtcagcgcgctcacgggcactgcacgactggatctaacgtggaggtgtggccacacacacacctgcctttgcccttgattcacaccggcctcctaggagaatttttaattctttaatccattttaaacatactttctttttgaaaccaatctctattaagataaactatagcccacatgtttcagtcaaggcatccagacagagctactcattacttctatgcgaacgttttaatgtaaacagttgttttgaaatgtatccggtgtaaacccacaaaggggggtgggggggggggcccctgctgctgcaggtgctccacctgcttanaacccacctgctgctaagcctgntggcnccngtctgtttgctgctggggttaccg

SEQ ID NO: 8710 - DNA, 169 bp, Zea mays
  Clone ID: MRT4577_107941C.1
gtaaaaggtccttgcgaaaacgcaagagtgcttgaactcccaaatggcacacacttacgagcgatgacatacggggacttatctgcagcagcaaggccacggacatacaatatgggctataaactactgtctggtgatccgccaccaaaaattaaacctttacttattg

SEQ ID NO: 8711 - DNA, 1324 bp, Zea mays
  Clone ID: MRT4577_107942C.1
cgggtcgacccacgcgttcgcccacgcgtccgcggacgcgtggggcattcagagtggcgtgctgctaagaaggctaacggaatgaaggttgtttctcttataagggagaagacaggatatattgtcagtccagatgcaatgtttgatgtgcaggtgaaaaggatacatgaatataagcggcagctgctaaatatccttggaattgtctaccgctacaagaagatgaaagaaatgagcacagaagaaagagcaaagagctttgttccaagggtatgcatattcggtgggaaagcatttgccacatatatacaggcaaaaaggatcgttaaatttattacagatgtggaagctagtgggaccagtaacatgaagtttgcattccagcagtactgatatgctgtgacaattcactggcaggaattagcgcctcggcaacactaacattatatcagtactgctggaatggaagctagtgggaccagtaacatgaagtttgcaatgaacggttgcattcttattggaactttagatggtgcaaatgtggaaatcagagaggaggttggagaggaaaactttttcctttttggtgcagaggcacatgaaattgctggtttgcggaaagaaagagccgagggaaagtttgtgcctgacccaagatttgaggaggttaaggaatttgtccgcagtggtgtctttgggacttacagctatgatgaattgatgggttctttggaaggaaatgaaggttacggacgtgcagattatttccttgttggcaaggacttccccagctatattgaatgccaagaaaaagttgatgaggcgtaccgagatcagaagttatggacaaggatgtctatcctcaacacggctggctcatccaagttcagcagcgataggacgattcatgagtacgccaaggatatctgggatatcagccctgccatccttccctagaccaggtggatatcaggttctttcgcctatatttctgtgaaccctcaggatcaaggaacagttggtgacgacattaatttgcctcagccccttagcaggaagcgctggtcacctcagttttgtgtagacaaaatctaggcatcgataaatgatgggggactatgcatggtgttttggcagcactgttcagtaccttgccttctaaatctggtttttggtgtgtgtgtgtaagctaataaatgtcgaggcaggattgtaggaacaccattgatcatttggctcgctggtgacctggtgacgtatggtgtaattagtagttgtttgcctcctggagcttgctggcttctgtaatggtattttcgtaacg

SEQ ID NO: 8712 - DNA, 2174 bp, Zea mays
  Clone ID: MRT4577_107943C.1
aagagtccgccacgcgtccgccacgcgtccggatgaatgacactcatccaacactatgcattcctgagttaatgagaatactgatggatgttaagggattaagctggagtgaggcatggagtattacagaaagaaccgtggcatacactaaccatacagtgcttcctgaagctctagagaagtggagcttggacataatgcagaaacttttacctcgacatgttgagataatagaaacaattgatgaagagctgataaacaacatagtctcaaagtatggaaccacagatactgaactgttgaaaaagaagctgaaagagatgaggattctggataatgttgaccttccagcttccatttcccaactatttgttaaacccaaagacaaaaaggaatctcctgctaaatcaaagcaaaagttacttgttaaatctttggagactattgttgatgttgaggagaaaactgagttggaagaggaggcggaggttctatcagagatagaggaggaaaaacttgaatctgaagaagtagaggcagaagaagagagttctgaggatgagttagatccatttgtaaagtctgatcctaagttaccaagagttgtccgaatggcaaacctctgtgttgttggtgggcattcagtaaatggtgtagctgaaattcacagtgaaattgtgaaacaggatgtgttcaacagcttctatgagatgtggccaactaaatttcagaataaaacaaatggagtgactcccaggcgttggatccggttttgtaatcctgcattaagtgcattaatttcaaagtggattggttctgatgactgggtgcttaatacagacaaactggcagaactgaagaagtttgctgataatgaagatctgcattcagagtggcgtgctgctaagaaggctaacaaaatgaaggttgtttctcttataagggagaagacaggatatattgtcagtccagatgcaatgtttgatgtgcaggtgaaaaggatacatgaatataagcggcagctgctaaatatccttggaattgtctaccgctacaagaagatgaaagaaatgagcacagaagaaagagcaaagagctttgttccaagggtatgcatattcggtgggaaagcatttgccacatatatacaggcaaaaaggatcgttaaatttattacagatgtggcagctaccgtgaaccatgattcagacattggagatttgttgaaggtcgtatttgttccagactataatgttagtgttgccgaggcgctaattcctgccagtgaattgtcacagcatatcagtactgctggaatggaagctagtgggaccagtaacatgaagtttgcaatgaacggttgcattcttattggaactttagatggtgcaaatgtggaaatcagagaggaggttggagaggaaaactttttcctttttggtgcagaggcacatgaaattgctggtttgcggaaagaaagagccgagggaaagtttgtgcctgacccaagatttgaggaggttaaggaatttgtccgcagtggtgtctttgggacttacagctatgatgaattgatgggttctttggaaggaaatgaaggttacggacgtgcagattatttccttgttggcaaggacttccccagctatattgaatgccaagaaaaagttgatgaggcgtaccgagatcagaagttatggacaaggatgtctatcctcaacacggctggctcatccaagttcagcagcgataggacgattcatgagtacgccaaggatatctgggatatcagccctgccatccttccctagaccaggtggatatcaggttctttcgcctatatttctgtgaaccctcaggatcaaggaacagttggtgacgacattaatttgcctcagccccttagcaggaagcgctggtcacctcagttttgtgtagacaaaatctaggcatcgataaatgatgggggactatgcatggtgttttggcagcactgttcagtaccttgccttctaaatctggtttttggtgtgtgtgtgtaagctaataaatgtcgaggcaggattgtaggaacaccattgatcatttggctcgctggtgacctggtgacgtatggtgtaattagtagttgtttgcctccaaaaaaaaaaaaaaaaaaataaaaaaaaattcgt

SEQ ID NO: 8713 - DNA, 1974 bp, Zea mays
  Clone ID: MRT4577_107944C.1
ttatgcttgaagatccatttccggtgaccacattggtgccagagagtcgtggcaccagatctcagatgtggttcgcctgtaaggccacgtactcctgcgtagcacactccagttggggtcggcgagcgcactatggacagaggacggctcggggaagagcgccgaagaagatgacgccgagagaaggttctggaagatgttgagggcaacaaggatgttgttgaggtacaaagggccaagaaggatcatgtcacctactgaggtgacaggcatagtcggtccattaccaatagtgaagaagaaagggaagatggggctgggaggatgaggtaaagagaccgctctggggtcacgaatggtgtggaaagagacgtcggagtcagcaacccaattagtgggaggtggtggtggcgatgatatggggaaagatgagagagacatcgggggcacccccatagaaccacaggaaggggtgctagggccggtagtggtgagcatgctgacgacaatcatgggtggggaaagaggtaagatctcgatcatcatggagacaatcgtgacgctagggaacacaaatgacccagtagcgtggcgacccgctcctgctccaagctcaacaagggaaacccaaccataccttaaacggaaaacagacgggctattcacagaaagaaacacatcagctactgcaacagtatctcttgttgtccacctctgatatgtagccaaatcctcttgattagcacaatatggaaaaagaataagctctccagatgcgatgtttgagttaccccattttcggtttagatgttctagcacagatgatattttctttctagagcttaatgtgagctctagatgaggattatggtcatccttctccaatgccttccgagtagcttcatttattggaaataactgtagcttcagcttcacaggtgcttgtgaatctgtttccttcatatgatttgtgctaatgccatcaccagtagaaagtctttctgataatgaagtcagtgttcttgcatcaacattacataacatgcctgggttaatcgtgttgcgctcgagctcctcagccgcatcagcaactaaagaaacaccagccatggccgctctctccttttatatgcggcagatgcaacagcaccacctgccttccttttctgtttcacggttcttgtggcagagaggtcccctttagttgttcctgacttgttagaaattggttctgcaatccgcttgaaaattgtcccttaggagatgctactctgctaccattttgggaatctactgacaagaactttacaggaggagtctcatccccaggagctttgctgataactggagatggagaagatatgcacatatccactcgtgaatgctttctcctggacttatttctgtcctttagcagttgtttccccagtgcttctacaaatgttttgaacctccgaggcttcaggtgcagctttgatgcactgcagctaaatttctcaagcagagaccaccagcgaagcatagcagcaatggtatccttggagttttttgcatcaagtgagaacctaggacccagtagcttcttcatgcgccgaacaagacgataatagtaatgcttttcctacttgccgcagcgcattgaaaaaaatctcctcctcttggtgtccacgcagcccattgtcgagtctgcttttttgcaggtttcctgttaggatcagaaggctcgggggcggacccagtgtaggacatgggtgtacacatgtacacccgataaatggtgggtgttgatcggcgaaggacccgacgaagaccagacggcggtggcggtcgtctagtagctacacgagagagcgcctcgcgcacggtggacgggcagaagaaaaggtaggcgctgaacggagcactgtatggtggcgtttggatgggagttggaacgggaaagagaaccgtttcatggttgaagactttttgtat

SEQ ID NO: 8714 - DNA, 2359 bp, Zea mays
  Clone ID: MRT4577_107945C.1
aaagatatgccacggcttggctcatctaaacgctaaaaagatatgccacatattgtatcctggggatgaatcactagaggggaaagttctccgcttgaagcaacaatatacattgtgttcagcctcactacaggacatcattgctcgttttgagagtagagctggcgagtctctcaactgggaggacttcccctccaaagttgcagtgcagatgaatgacactcatccaacactatgcattcctgagttaatgagaatactgatggatgttaagggattaagctggagtgaggcatggagtattacagaaagaaccgtggcatacactaaccatacagtgcttcctgaagctctagagaagtggagcttggacataatgcagaaacttttacctcgacatgttgagataatagaaacaattgatgaagagctgataaacaacatagtctcaaagtatggaaccacagatactgaactgttgaaaaagaagctgaaagagatgaggattctggataatgttgaccttccagcttccatttcccaactatttgttaaacccaaagacaaaaaggaatctcctgctaaatcaaagcaaaagttacttgttaaatctttggagactattgttgaggttgaggagaaaactgagttggaagaggaggcggaggttctatcagagatagaggaggaaaaacttgaatctgaagaagtagaggcagaagaagagagttctgaggatgagttagatccatttgtaaagtctgatcctaagttaccaagagttgtccgaatggcaaacctctgtgttgttggtgggcattcagtaaatggtgtagctgaaattcacagtgaaattgtgaaacaggatgtgttcaacagcttctatgagatgtggccaactaaatttcagaataaaacaaatggagtgactcccaggcgttggatccggttttgtaatcctgcattaagtgcattaatttcaaagtggattggttctgatgactgggtgcttaatacagacaaactggcagaactgaagaagtttgctgataatgaagatctgcattcagagtggcgtgctgctaagaaggctaacaaaatgaaggttgtttctcttataagggagaagacaggatatattgtcagtccagatgcaatgtttgatgtgcaggtgaaaaggatacatgaatataagcggcagctgctaaatatccttggaattgtctaccgctacaagaagatgaaagaaatgagcacagaagaaagagcaaagagctttgttccaagggtatgcatattcggtgggaaagcatttgccacatatatacaggcaaaaaggatcgttaaatttattacagatgtggcagctaccgtgaaccatgattcagacattggagatttgttgaaggtcgtatttgttccagactataatgttagtgttgccgaggcgctaattcctgccagtgaattgtcacagcatatcagtactgctggaatggaagctagtgggaccagtaacatgaagtttgcaatgaacggttgcatattacagatgtggcagctaccgtgaaccatgattcagacataggaggttggagaggaaaactttttccttttagatgcagaggcacgtgaagttgctggtttgcggaaagaaagagccgagggaaagtttgtgcctgacccaagatttgaggaggttaaggaatttgtccgcagtggtgtctttgggacttacagctatgatgaattgatgggttctttggaaggaaatgaaggttacggacgtgcagattatttccttgttggcaaggacttccccagctatattgaatgccaagaaaaagttgatgaggcgtaccgagatcagaagttatggacaaggatgtctatcctcaacacggctggctcatccaagttcagcagcgataggacgattcatgagtacgccaaggatatctgggatatcagccctgccatccttccctagaccagccccttagcaggaagcgctggtcacctcagttttgtgtagacaaaatctaggcatcgataaatgatggggactatgcatggtattttggcagcactgttcagtaccttgccttttaaatctggtttttggtgtgtgtaagctaataaatgtcgaggcaggattgtaggaacaccattgatcatttgtctcgctggtgacctggtgacgtatggtgtaattagtagttgtttgcctcctggagcttgctggcttctgtattctgtaatggtattttcgtaacgaaaatggcgggaacggcgctattgtttttcgctagaccaggtggatatcaggttctttcgcctatatttctgtgaaccctca

SEQ ID NO: 8715 - DNA, 474 bp, Zea mays
  Clone ID: MRT4577_107946C.1
acgccacgcgtacgtacacgcgtccgatatacagtagctcgtcagacactccaaggctacaagcgacatgtgtgggcagcaaaggcccatgcgagaacgacgccaatcaaacgagacaagcatagacctactgtccaaagtgtgctaatgcgatcagggtcctgagcgacagacatgactagtaaacgcactgctagagtgaaacatcttttaatggatccagccaacagcgagtacatcttccccctgaaccttttcaggggagcacaaggctactttacacatgtcagaactcttcatctgggatatgactgtctggacacaacctagactgaattcatgaactatgcaaatcttaagaagctcactctgcacaagatttcctttttgggagacctacagtgcctgatgctgccagaatgcaattcatctgagtgtctgagcatcagcatctggtccttgcctggcttaagc

SEQ ID NO: 8716 - DNA, 223 bp, Zea mays
  unsure (1)..(223): unsure at all n locations
  Clone ID: MRT4577_107947C.1
acccacgcgtncgaaaaaaacaacacaactaaacctttactttcaagaaccaaaattcatacctggtgttcctaaacatcttttttaacacattccaccaacacatacacacataccccaaaacgactctaaatcaaatccaccaacctcctacacaactatcaaaacactcctcaacatactacctatctctattgcctattcatgactgaaattcttacaa

SEQ ID NO: 8717 - DNA, 1039 bp, Zea mays
  unsure (1)..(1039): unsure at all n locations
  Clone ID: MRT4577_107948C.1
tttttatatgcggcagatgcaacagcaccacnntgcctctttttntgtttcacggttcttgtggcagagaggtcccctttagttgttcctgacttgttagaaattggttctgcaatccgcttgaaaaattgtccctttaggagatgctactctgctaccattttgagaatctattgacaagagctttacaggaggagtctcatccccaggagccttgctgataactggagatggagaagatatgcacatatccactcgtgaatgctttttcctggacttatttctgtccttcagcagttgttttcccaatgcttctacaaatgttttgaacctccgaggcttcaggtgcagctttgatgcactgcagctaaatttctcaagcagagaccaccagcgaagcatagcagcaatggtatccttggagttttttgcatcaagtgagaacctaggacccaatagcttcttcatgcgtcgaacaagacgataatagtaatgcctgacctgatccttgtttttactctgaacacggtgtgtaatcttgtcgaagtttttccctacttgccgcagtgcattgaagaaattctcctcctcttggtgtgtccacgctgcccattgtcgagtctgcttttttgcaggttgcttattgggatcggaagactcaggggcggacccggtgaaggacatgcgtgtgcacatgtacgccctataactggtaggtgttgatagccgaggaaggacccgagcacgtaggacggcggcggcggtcgcctagtagcggcaggagagcgctccccgcagcccgcacacggtggacgggagaagaaaaggcaggcggtgaatggattttggatgggagtcggaacgggaaagggaaacgttttgatggttcaagacgtgggttatgggttggaaaaatactcctatgtgggaatggggaatggctactatgcatcaggcaaaagaatgggtaatcgattgcaaaacgctactaccatttggtatggatcaggcaaacgaatgggtaataggagaccaaaat

SEQ ID NO: 8718 - DNA, 342 bp, Zea mays
  unsure (1)..(342): unsure at all n locations
  Clone ID: MRT4577_107949C.1
taggctccgcaaccgctgagtgagacgaagagagggtcggcaatggcgatggaccggctagcggcatcgaatctctgcacggacgtaacncgttgcagttgtcgtgtggcagaactaccgcgtcgatgatcattggccaacgaccatggtaaccgcaccacgccctcgtacgtcgccttcaccgactccgagcgcctcatcggagatgcggtcaagaaccaggtcgccatgaaccccatgcaacaccgtctgtgatgccaagcgtctcatcggcatgaggttcagtgatgcgtctgtccagagtgatatcaagtgtgcaccttcaaggtcatttctgggctg

SEQ ID NO: 8719 - DNA, 685 bp, Zea mays
  Clone ID: MRT4577_10794C.1
ggccgccccttttttttttttttttttgtaattgaattttattataataattgtaacttatacagaatacatttgtatattattgttgaccatatgaaagagataattatatgctacatttatactcaaagttgagctacagtgatacctaaatgttctaggtatttgcagaaaaaaatggagggtgtacttctttaatgacaacatcaatgcaagctatatgacttcgttgccctttaatctttacaacttcgttcaaccatggttggataactcagcacacacaatttcttccaccagtgtgatgcatacaatgcagtattctgcgagctggctagttcaccttccggcagttgcgccgcacctgtccgctgctcccggtcaggacaccaatggcgcccatcctgaccatggctgcggcgaagtcgctactgaaccgcgccgagctggccgcgtagctcctgaccagtgcgtccgtggagccaccgttgaagagctcttgatcggagtgcagcaggccctgctgcgcgcccagatcgccgtagtacgcgttgtcgaacgcgttcggcgtggacgcgtccagcggcgcgttggcgccgccccctccggacgccgggcagccggccctcagcgacgccgcgaaggccgcgttgatgttggcgtcgttgtagatcctggctcgtgc

SEQ ID NO: 8720 - DNA, 739 bp, Zea mays
  unsure (1)..(739): unsure at all n locations
  Clone ID: MRT4577_107950C.1
gagcatctactgacaggaactttacagnaggattctcattcccaggagctntgctgataattggagatgnagaaggtaggcacatatccactcgtgaacgctttctcctggacttatttctgtcctttagcagttgtttccccagtgcttctacaaatgttttgaacctccgaggtttgagatgcaactttgatgcagtgcagctaaatttctcaagcagagaccaccagcgaagcatagcagcaatggtatccttggagttttttgcatcaagtgagaacctaggacccagtagcttcttcatgcgccgaacaagacgataatagtaatgcctgacctgatccttgtttttactctgaacacggntgtgtaatcttgtcaaagttttttcctacttgccgcagcgcattgaaaaaaatctcctcctcttggtgtgtccacgcagcccattgtcgagtctgcttttttgcaggtttcctgttaggatcagaaggctcgggggcggacccagtgtaggacatgggtgtacacatgtacacccgataaatggtgggtgttgatcggcgaaggacccgacgaagaccagacggcggtggcggtcgtctagtagctacacgagagagcgcctcgcgcacggtggacgggcagaagaaaaggtaggcgctgaacggagcactgtatggtggcgtttggatgggagttggaacgggaaagatgccgatttcaggttcccggccgg

SEQ ID NO: 8721 - DNA, 362 bp, Zea mays
  Clone ID: MRT4577_107951C.1
ataaagtgcattaccgttttttaatttaaatgagaacaggggggtcaatttttaacatagaaagccaaatcgacaccctccaggcaaggtcgaacagggggaccggggagggggtcactgaaaaaccccaacaccgggggaatggcaaaaacaaaaacccgtgcactctacgtaaaaaaaaacagcagggccaggacccccaacaggccaagggcccccagcaccaacaggaactggggaacggaaagaacgaccaaaacggcgggaaggggaaagggtaaagaaagccaacgggaaggtcgggctaaaaaaacaaagacaaaggggggggggggtcacctaagcccgacgcggggggggga

SEQ ID NO: 8722 - DNA, 237 bp, Zea mays
  Clone ID: MRT4577_107952C.1
tcgaaaaaacaaaaacacaaaaaaaacaaaaaaaaaacaaaaaaagaacaaaaacagaaaaaaggaaagacaaaaacatataacaacaaacacaagacaactaatactaaaaggcggcgtcctgttttgcggtgcccagctgttgtcaccctcagctccgagaccttctgcctgccatggtggcccataattcaaatccacttcccgagctttcacatgctcgtgaccggaaaaacc

SEQ ID NO: 8723 - DNA, 281 bp, Zea mays
  Clone ID: MRT4577_107953C.1
ccaggaagcagcgtcatggaaataaataaagccgttggactcaaaataaaccaaacagccaaaaggcatggccggctctccgtttctttttctttcaacacacacccaaaccaggcccacctgcgcggaggggtttttattagttgtagtccacgttcttttttagacatgcactcgtgacgatcatccttggtgcttttttggacatcaccgtcctttccccgggcgtcctactcacgcgggttttattggtttgtttttggtgctcccccccccccccc

SEQ ID NO: 8724 - DNA, 291 bp, Zea mays
  Clone ID: MRT4577_107954C.1
ctacaaacccaatgtgcccactgggaggagttaaaaaagagaggcgattttttccctaagaacacaaacatctgtcagggacagctgaggagaaagcacccgtaaagccactggaggcattcaccaccaccaaacgcagagccgatgaccccaacaaaaacgagaactagctagcaacaggcctgggcatggggaaaacccccgggaggaggccgaacaacggtaggcactgccacgggcagggcagggccaccaggaaggccagggcccagacctgggccagccagggaa

SEQ ID NO: 8725 - DNA, 682 bp, Zea mays
  Clone ID: MRT4577_107955C.1
attcttccctcaattgctcgcgcggcctacagacaatacgaaccgtgcgtatacatcgaacaatggcgagagatgactcgtaccacaaacactggtcgcaaatccacgtgaggaaagtgtcccacaacatatcttgacaccaaagctgccaccaactctgcccccaccactgggggatggaacaagtctcaccgctaacgccctgcaactgctgccctacgtacacatccgcaatcatccgaaaaccactgaactgatgatatcgaatgtgaccttccagagggtcgtcacgaaaacttgacagtacttcaaaactgattcgaggttccagagtcatgcctggtttggactaaattaagctgctgcaggcttatcttgttgcgctgtttgagagacacctccactcgttgcgccttccatgttaacatcgagaccattctgtgaaaagacatttctatgtcaaggacgatcctggtggataccgcctaatccgcacctcgaacatcgagacccaaacatgaatgtctgatattattgccaatcaggagtccttgaaaggacatatgagcaaggattgatgtgtgtatctcaagaatctcttctgctaccgatgctgataccttcggtggtgctattgatatctcgcaatacttgagttagctatgcgctgatcctctggact

SEQ ID NO: 8726 - DNA, 385 bp, Zea mays
  Clone ID: MRT4577_107956C.1
gtcatttgtgcgcacacgcggtcgcagctgcggtgtgtggctcaacgtcgcggagatggagggcgacaccaccggagctgacggaggaggcggaggaggaagtggtgagcgttctagcttcgtgatcggcctcatcgagaaccgtgccaaggaggttagtcacgctctaaaacccctccgcattttccggttgctcgatcaatccgtgcggattttgttaatttctctagtgaccccgttatcctccgcccggcgtcctccgttttcgtcattcgcgtgcgggtcgaggcgctccaactgtgtgagctgttatttcgtcggattgcttgcttcgattggttcgctaatgcagtggcttcgttgaattgcttgctttgattggttc

SEQ ID NO: 8727 - DNA, 328 bp, Zea mays
  unsure (1)..(328): unsure at all n locations
  Clone ID: MRT4577_107957C.1
acgcgacgattggactagaacgtttaaaaacacattttaaaactgttcgaagaacccancccccgtgtcccgggggaacttctctacggccaaaccaaaatacggaggctaacgaggctgctctctaaagccgtctctcttcaggagggcctacgaggcggcgaagcccaacacnagccnccgcaagggaggaacctattttttcgctaaacttgtgttttatttttcaccggaggagcctaagaagaggaagcagaagctgcgggttttttttctttataagcacaacgatatccccaagagatagagcatcggctcatcataacag

SEQ ID NO: 8728 - DNA, 586 bp, Zea mays
  Clone ID: MRT4577_107958C.1
catttgtggcgaagcgctagttgtttggatggcctgggacagtggtgtgccgcgacgctgctgaaggtgaggcttttgacccacacatagctcacgtgggctaggagacatctacagactgacaggatcaaggtcgccgctcgcatgacctgcactgtgggcgtatctagtctcttgatcagggggacgcccctgatcgtaatgaccactccatgtcgtatggctccgacgatgggcttatgcacaggcgctcgccggagagaggacgaacgggctacatgtgatcagaactgtctcttatcactctctggagatctgccagccttccccttagcgcagagacttgctgcagatgaaccgtcctatccccccgtagtgcgctatgcactctactgatcctcattatgatgcccgctgatgcatgatattctgctagtacagagcctcagctgctgcctatactgctgcattactattaagaagatgggtgtcatggctgacctacatgtctaggcatgagaccgatacgacctatagagattgtgattattactctcagacggcgctcactagctctcttacatat

SEQ ID NO: 8729 - DNA, 1160 bp, Zea mays
  Clone ID: MRT4577_107959C.1
acctattaaagaaatgaaactcattatccagggtagggatatgaaaagaggaagaagtctagctagaagaaaaatccccgcagcaaccatagttgctgcgtgtataagagccgaaataggagtgggtccttccatagcatcaggtaaccatacgtgaagaggaaattgtgcagattttgcaactgcaccaaggaataataaaaaagcacacaaagtagtaagtaaggaattaatcccattattaggaatccagttattagctattttgaacaaatcccgaaactccaaactacccgttatccaaaaaaaacctaaaattcctaataacagaccaaaatcccctacacgattagttacaaaagctttttgacaagcactcgctgcaattggccgcgtaaaccaaaagcctatcaataaataggaacacattccgacaagttcccaaaaaaaataaatttgtatcaaattggaactagtaaccaatcctaacatggaagtattaaaaaaacttatataaacaaaaaatctcaaatatccttcatcgtgagacatataatcgtcactataaataagaactaagattcctacagtagtaattagtattaacataatagacgtaagggggtcgaccaagtatccaaattctaaggaaaaatcattattgatggtccaagaccatagatattgatagatagaacttccatttatttgttgaatagacaggtgaagtgagaataccatagctatacttaagagtaaaatactaggaaaagcccatatccgacgaagattttttgttgctgtaggaataagaaaaagtccaaatcccattgacataataactggaagtgggagaagaggaattacccaggcatattgatatgtatgttccataagaaaagaaatagcaatttttagtttaaatttatagttcaatttttctataaaataaaattgtttccgattcaccaaacctattcttatctctttctaaaggaattaaaaaaaaaaaaaaaaaaaaaaaaaaaatacctctgttctgaatttttctaatttctcgcattaaaatattccaaaatttcaaatggggttagttacttaaattcaaaaagtgaatcaaagaatttcggtatctagttattagtaaaaaaaaaaaaaaa

SEQ ID NO: 8730 - DNA, 478 bp, Zea mays
  Clone ID: MRT4577_10795C.1
ggcaccaaaaaagggcccccattttttttttaaaaaaaaaacgggacacccccccccccaagtttttgttcccaagcccaaccacctaaaaaaagggcaaataaaaaacctttaaaccaggggggttttataatagtagcccaaaaccacaatggacctcccgggggaaaaataaacataaccttcccaattttttaagggaagttggaaacatttttttttctacagaaaaattttttttcacccgaaaacttgggaacttcctaaaaacggcccttttatttttttccttgaccaaccctttggaacaaaaaagcttttttcctcatttaaatgccccggccttggtttttttttggcccggggttttcctaatggcaaaaaagggtgatccaccgggaattccttggaaaagtaaacggccccctttttgtttgaaagggattttgcccccaaagcggagggcaatccccggggt

SEQ ID NO: 8731 - DNA, 382 bp, Zea mays
  Clone ID: MRT4577_107960C.1
aaaaaaggaaggcatccatgcctgatcagttgttgcagggcaacggtgtgctttgcctggcactggcagccatccgtttttgaacaccccccccccccgggatgacttggaatcttgggtcaccagttcaccacccccagcttcttcgatttcagtccaacgatgaaacccaatggttttaactaacaactcaccttttttgatgacttggaaaaacatgaacatttaaaggatgaaaggggggagaaaaaaaagtgcttaaaccacagcagcttttaaaaaccatggatgataattcgcggataattgctttggaggagggctcaattaccaattcccataatggggttccaaatgggatacaaatgccccgttcttttaa

SEQ ID NO: 8732 - DNA, 390 bp, Zea mays
  Clone ID: MRT4577_107961C.1
aagggacaaaaatcccgccttccaaatttttttttttttttttaaaccaaaagggccaaatgggcatttaaaaaactccttttccctttcatgaaaaacagtccaatcaattccaaatgggtcaaaggaatgttgtccacccccccccaatctaagggaacatggggtcatttaaaacccaagggatcccaactttagttcattttaaacgggggggggtaaaaattgacattacttcccccccgaagagaacccatgaaaattgaaccccaaaatcaaatctcactgttctgaccaaaatttgggagggaaggaaccccttttgggttaaagggggcaaaaccccccacaaaattgggacccccaaaaccaaaaaaatttgcggccccc

SEQ ID NO: 8733 - DNA, 252 bp, Zea mays
  Clone ID: MRT4577_107962C.1
tttcttttctttttcaccattaataatattttctccgacgggctaacataacaaaacgttcctcaccccacaaagtttaacttcaacctctggaaacaaaaacacccccgtcttctacataaaccactaacttgaccccaaaaaaatacacgaataaccccatacgcaaattaggcagaaacaccccccccatggccctcgtccagcacatcttgatataacttcacattcgtgattcctctctcatccttt

SEQ ID NO: 8734 - DNA, 1536 bp, Zea mays
  Clone ID: MRT4577_107963C.1
ctcgaggcaggttggtgtgcgttgattcctgcgcgcgctgcgcctcaaggccaacgcccggcgaggacaggatgaggggacagcgggcaacgagagggaggaaaatcccagtccaactctaggcgcttcccttctcccttttcctttcttcttccccgaggcgctggccccgctcaggtcgggacctgccgccatttcagaactcctagcttcttctaggtcggggttgctgcgcgccttgcgtaccctgggttgagcatcattggagtggaagaaaggaatcatgttcaggagaaagcatgcttctcattccaactcaagtgatgctgagcagcaagaagcaaagataaatgaattaaaatctgcacttggtcctttgtctgcccatggcgagaagtactgcagtgacacatgtttgagaagatatcttgaagcccggaactggaatgtcactaagtcgagaaaaatgcttgaagaaagtctcaaatggagggcaacttataagccagaggatattcgctggcctgatgtttctgttgaagcggaaacgggaaaaatgtacaaggcaaattttcgagatagagaggggagaactgtaatcattatgaggcctacaaaggagaattcaacgtcccatgacggtcagattcggtttcttgtgtatgttttggagaatgcgatcctggaccaacgtgaaggtcaagagaaaatggtatggctgatagacttcacaggatggacaatggcccatgccacacccataaagactgcaagagaatgtacaagcatcctgcaaaatcattaccctgagaggctggccattgcatttctgttgaatcccccaaaagtattcgaagccttttacagggctgtcaaatatttccttgacccaagatcgatcgagaaactgaacttcgtgtacctgaaggatgaggagagcatgaaggtcctgtacaagtgcattgatcccgtggtccttcctgtggagttcgggggaaagaacagtgttgtgtacaaccatgaggactactccaagttgatgctgcaagaagatatcgaaacatcaagcttctgggaggatgatgcgaaaactgttaaccatgctatcaatgggaccttggttcctgatgttgcatctcagctgtcacggattgctgctaaagccagttaatgagctactacgatgggagctattcagaatgctttaatggagtaactagaaagtcgagcgccaataaaatgttcatagtaaacagaaatagagcaaataacagatgagatatcacttgtccatagtcgaaatagttgcacttatcgaacactttattcagtacacgatgagttacaggagactatcgtaatgatgtaagaggtagaagtgctacctgcttaatgtacctcaaaagcccttaaggctttacttgttttagccgtggctacggagaagctaattctgggttatggcttttaaaaaaaaaaaaaaaaaaaaaaaaaaaaaaagcggccctcgagctccactttggatccttagtaggg

SEQ ID NO: 8735 - DNA, 228 bp, Zea mays
  Clone ID: MRT4577_107964C.1
cacaccatgggacactttaaaaacctatgtcggtcaaagaataccctttacgcacttaagagctgtcaatacataaggttgaattgatcaaaagcggcccatatacaataaaaagtcctaaggccccttacatcaaaatcactcggaccaccacctgcttactgaacattttatgaaaatcaccctgcgggcataacatatacacgctcctcaaccgcatgtacgtat

SEQ ID NO: 8736 - DNA, 450 bp, Zea mays
  Clone ID: MRT4577_107965C.1
gcatcacaattttacttttctttcataacttagaacactaaaggaccaaaacactctagcaaaaggggaaaagccaagaactacatcactctagcccaagaatcacaaagaatagagggaaacaacagccggacacgggggaaaacccggggggtccgaaccggggcccgcgggggtacccccgggacctatgggggggcgcctgagagcccggcggaatcacggacaaagaggggccctgggggaaaggggaaaccgggcacaaggccacacccctgcgaagccggaagcccaaaacgaaaagcccggggagcctaatgggggagctaaagggcaaaaactggggggcgcaaacagggcggtttccaaccgggaaaccgggggggccaaaggccgtaaagaaacgggcaaaacgcggggagaggagggttgagagaagggcgccaaggg

SEQ ID NO: 8737 - DNA, 695 bp, Zea mays
  Clone ID: MRT4577_107966C.1
aattcggcacgaggctgatcgccaccactacctccacctggaacctggaagagagagagacaatggcgtgtaggccgccatgtccatgtggctgcttctgcttctacatggtgttcttcctcggcttgctgctcgtcgaggccgtccatggcacagggcggagcgaggtggccgcggccgctccgactccgagcctcgttccagctgaagcgagcgtccttcgccggatcgcggccaggcttggtgtgtccagctgggacttcaccgccggcgccggtccctgcgaccacggagactccggggtgcactgtgactgctccttctccaacggcaccgtctgccatgtcacagagatattcctcaaggggcagaacttctccggtgagctcccgcctgacttcgctgacctccactactttcacctgatcgtcaccagtgggccaggatgaagttacaaggactgtcactgatggcgaatagattgtcagggccttttcccatggttctcacaaagatcacaaccctgactaacctgagcattgaaggcaatgagttctatgggccaatccctcctggaattgggtatttaattagaatggaaaagctaatattatcaaccaatgaggtcactggaccccttccagctgctctttcgctattcagtaatttaactgatttgaggatttctagcacca

SEQ ID NO: 8738 - DNA, 287 bp, Zea mays
  Clone ID: MRT4577_107967C.1
ctaataggagtgggcacaatcgtctatagatcaaaatccaaccacagaaaatggcgatcggggtgtttcatagcgcttttaagacacagatattatcctaaggcccagcccaattggcaagaatcttatcgggcaggataaaaagtcaacacgaaacgaactctgactattggagggaatggctgatttacacacttgtggggctaggatcattcgacacgcgttgtatgaaccgctaacctaatttggtggagacgtggcttggtttctataaagaaacgataacg

SEQ ID NO: 8739 - DNA, 999 bp, Zea mays
  Clone ID: MRT4577_107968C.1
aattcggcacgaggctcctctccactccgtccactactttcacctgatcgccaccactacctccacctggaacctggaagagagagagacaatggcgtgtaggccgccatgtccatgtggctgcttctgcttctacatggtgttcttcctcggcttgctgctcgtcgaggccgtccatggcacagggcggagcgaggtggccgcggccgctccgactccgagcctcgttccagctgaagcgagcgtccttcgccggatcgcggccaggcttggtgtgtccagctgggacttcaccgccggcgccggtccctgcgaccacggagactccggggtgcactgtgactgctccttctccaacggcaccgtctgccatgtcacagagatattcctcaaggggcagaacttctccggtgagctcccgcctgacttcgctgacctcccctacctcctccagctagatctaagcaggagcttgttccatggcggagtgcctcaccagtgggccaggatgaagttacaaggactgtcactgatggcgaatagattgtcagggccttttcccatggttctcacaaagatcacaaccctgactaacctgagcattgaaggcaatgagttctatgggccaatccctcctgaaattgggtatttaattagaatggaaaagctaatattatcaaccaatgagttcactggaccccttccagctgctctttcgctattcagtaatttaactgatttgaggatttctagcaccaatttttccggaaggatacctgatttttggggaaacttgaaaaggcttgacaaattgcaaatagaaggatctttcttagaagggccaattccctcgagcctatctgaattgaaaaacctttctgatctgaggattagtgacctgagaggtagtggttcatctttccctgatttaagtggaatgacatacatgaacaaattggtactaaggaactgttccatcagtggaagcatacccccata

SEQ ID NO: 8740 - DNA, 115 bp, Zea mays
  Clone ID: MRT4577_107969C.1
aaagcaaaacagcaatgtgagacaaattatcatttgtcaaaggccaggcgccccacagccaaaagacggaatggtatcatgcgggccatggatacatcctaacatgaggaaacga

SEQ ID NO: 8741 - DNA, 236 bp, Zea mays
  Clone ID: MRT4577_10796C.1
ctcactcttcactacccacttactatattcatttaactaagctgatgataacaaactggctaggtttcccctattgacgggtatccaaccactagcacaccctctttacaattttacgtcttttcccccccaattataccctctagattcattctcttaaactctaccctcccatattctctataaatacacaccttttaatgttataacccctaacttcccggaccctttctcac

SEQ ID NO: 8742 - DNA, 475 bp, Zea mays
  Clone ID: MRT4577_107970C.1
gcgaagctcggaattcggctcgagatttaattaactcaaatttaattacaaccgcgaccaaacacactagggcatgggagccaacgaggggccttcggggattcatacacagggctcacgtaataaccaagcgcgagctgcctgccggacggagccagcgaacgggggaaagaacgaagagcgagacaatgggcagggacccgatcagagaggtcgctccaacaggctctgatgagacgcggaatactgttctggagacggatggcaaggacaagcgtgccctgaagcgggctgacagaaagttgggagctcacaagacggcaaagaagaagagagcggagaccgccggcctccccaggaagatgaggtcggagtggactcacactgtgcaaaagaaatggagatgcattgaagctcatggagatggctgccacgagacatgttccaagcgcatgacttccgtacatgtaaaacc

SEQ ID NO: 8743 - DNA, 460 bp, Zea mays
  Clone ID: MRT4577_107971C.1
ggattccaggagaggttcaatgtaagcgacctcccataaatataatgactgaccatatgactgctaacaacatactagccacaccaggccgcaaaacatatttgaagacaagtgcccccttccggaggggctataaccaacaacactattcggattcataggcaatttgatcacaaagatgcacggatgcgtcaagcattgactgatgctagctggacgattattactatacgggatacgactacccttagttgccaacataacacaagttttaggtcagttcgctggggtcatcaacttaagctatggctcaatgcacggtgaggaaataactacttctatacgccatttggtcaccactctttatgcatagaggtggttcatgattcatggagggaaaacctgatatgctgagatttggttacaacctgccaccgaggaagcataatgcttctgggcc

SEQ ID NO: 8744 - DNA, 292 bp, Zea mays
  Clone ID: MRT4577_107972C.1
tcagacatgtacacgtcggactggccggttccttggctgttttgatatgcgatgcagtattcctatggaagcatgctttgtactggagaccgggaaaatgaactgatagtacatatggcgtcaatatattctttatgttagggcagaaaataatatcatcatgacccctgccaatataaaagagatctgctcggctacaaaactgcaagacatgcacctaaccatcacctgtaatgctgaaatcaagtgatgctctgtttactgtacacggcgtttgagacctacatgaact

SEQ ID NO: 8745 - DNA, 565 bp, Zea mays
  Clone ID: MRT4577_107973C.1
actcctatgggcgattggtatcctcgaggccggccggggatatacatctcttctctcgatcatccctgccaattagctctcatgatgtcgcaagatctgagaaatatgtcgtgtgatcatcgttatctgccatatccgagaagaatctgatacgcacttgaatagggatactggatgcgtgtgtcgcactgaaccccacagatctccgactctacctaggatctccatgcaagagaccagaggcgatgagatgccaactgttgcagcttgtgacgctactggaacgatcacgactaacttgacagagtctttaggctgcgctgatcgcctataaggtgcacgtgaccaaggatacccgcaagcttgcctgttactttcaccccagcgagctgcacttgattgagatacgtatcgacaagatgctcacgttggtttccgttaataagaatgaaaactggaatgatgaactacatctggtgagactacggacacatgtacttcggggatctcggatacgcctgcgtgtccaatctctggaaggacaacaaagctggacctgcctctg

SEQ ID NO: 8746 - DNA, 256 bp, Zea mays
  Clone ID: MRT4577_107974C.1
actgtgcttacttaattaagggagggtggttttttttacattagggcagcccgaagaaactccacaccaaagggcaaaaaaagctgagacagggacgctcccacacccacccggtgccacagaaacgaagccccttttttaccggggcttaccccccggggggagaaacaaaacacggaccacacccgctccataccgtccattaaaagagggagcacggcccgagctttataataccccccctttcaagattcct

SEQ ID NO: 8747 - DNA, 310 bp, Zea mays
  Clone ID: MRT4577_107975C.1
ttttggtttttttataaagggcgctaaggatcatgatttgaacattaaaacgacacgcttatagatgctacaggtcacacatttgactaaggagactgctgacctaggaatcccgtttacatggggacgaccggcatcatggcataccacccaggcgtgccagatctcaaaatcctaagcaaccttaacaccgctacaaaactgtcatgcgtgcaacagaactttccccgtacaaatgctgtctgccaggtgccagctatggactcgaaaagcagccagcttgcatctaatagaccgtcactggggtcca

SEQ ID NO: 8748 - DNA, 999 bp, Zea mays
  Clone ID: MRT4577_107977C.1
atcctgtgtcgctcagccctgccatctccatggccgagtcctgttcggtcgcccagcccgcagcttgctctccttcctcccatggcggtccccagcttcctctgccggccgtcgtcgggctctctgcccacgcacccgcgccttccctgctcaccgtggccgagttcttccatcagccgagcttctcctgaaccgcgccccagttcctgctcgccggcgccgaggcccctgctccctctgcccgtcttcctgcacgcgtccgcccagctcggtctccctggcgctcgacacctagtcgcccagcccagccgtgctccctccagttctcaacgccgcgcgcccaagttcctgcgtgttcctccctgcttagctctcctgtgcgtgcgtgccctggcgtccgtgccgtggagctgtgtcctgcgcactcctctgcgtcgagtctctgctcgccctcagttcccatggctgtcgcgctctgcgtctccagcgctcgctcggcgctccctgctagccgcaagctccggccacctgcttctctccgctgctcgtcgcgccctgttttccctgcgtcgcgcgcgagttcggcgctcatctccctgtttatccatggcgcacgcctgactcccggttctcggtgccctgtcaggccgtcctggatttcgcgagctcctttcggttgccgtcgctcgccgtcgtctcttcgtgctggcagactagtttgccgtgatcgggcgtagttccctgctcggccgggatagtcgcgccgtcgattccgcttgagccccttcgcgttcgtcgatgccccctggctcgactcttccaagttcgcgtcctgcttgtctttgcgtcgcgcgcgtagcgttccgttgttcctgtgcgtgctgtcacgaagctccctgttcagttctccttcgtcgcgttgtcgtacgcgcgaaactactcgcagtcgacatcgagtccggtacgcgcgccggacacgatgaaatgctgcgtgtgctt

SEQ ID NO: 8749 - DNA, 401 bp, Zea mays
  Clone ID: MRT4577_107978C.1
ggacctttgggctgatttatgtgcttgtttatgtgcttgtttatgtgcttgcctatctgcttgtttatgtgcttgtggatgtgcgggctgcaaccccacacgacgaaaccacgcgtactcctagccgcccccgttctatcgtctcgcaaggatacacaaaaccggcacccgcatccctcaaggcctcttccggaacggcagagccccatagggaattccttactactagccgtcgatacagtctgaatctgatgccctcctcctgttagccgtggtctcggacaaatctgaagtcgattcacttaagcctgatgatgggtttcctccttcaggttaacctagtccggtggacgcagtgcataccatgacctcggaaagggcctagacacatcacctttact

SEQ ID NO: 8750 - DNA, 589 bp, Zea mays
  Clone ID: MRT4577_107979C.1
gcgcacccgcgcgccatggtgcacgggggcttcctgtcgctctacacgtccagcaacgccagctccaagtacaacaagctcagcgctagagaccaggttcttgaggaggtcaggaggctgatggagctctacaactacaaggacgaggagacgagcatcagcgtcaccgggcacagcctcggcgcgtcgctcgccacgctcaacgccgtggacatggtcgccaacggcgtgaacgcgcccggcgccgccaccgccaccggctcctcttcctctcccgcgcagccgcagccgcagccgcagccgcagcgggcgggctgcccggtaacggccatcgtgttcgcgagcccacgcgtggggggtcccttcttcaaggccgccttcgactcgttcgcggacctgagggcgctgcacgtgcggaacaagggcgacgtggtgccgctctacccgccgctggggtacgtggacgtggccgtgccgctgcggatccacacggcgcgctcgccgtggctgcgccagccgggcacgccgcagacgctccacaacctcgagtgctacctgcacggcgtggccggcgagcagggcgccgccg

SEQ ID NO: 8751 - DNA, 339 bp, Zea mays
  Clone ID: MRT4577_10797C.1
atggcaacacaagacgacaatcaattgagaacaagtgaccaacattggcgtccaccttcggtgaactcgtcaacgaccaccttcgtcatgccgccgaagaagacaacggtgccatggactattcttgctcctctggataccaatcaggacagaatcctcctaagagaagcccgaagccagaaaaggaaggcttctagcccaaccccacaagatgaggagctggatcaagagatcagcaaccttgcagccatacacgaacaagtggagaagagaagggagaagatgcttcacttgtctgagctacaaaagaaaattgacgaagcagctgaggaaatgtga

SEQ ID NO: 8752 - DNA, 978 bp, Zea mays
  unsure (1)..(978): unsure at all n locations
  Clone ID: MRT4577_107980C.1
nnnnnnnnnnnnnnnnnnnnnnnnnngtcccgatttttcgacgcccacttcgctacctcggaaccctagccgccgcccatggatatcgccggagaccggcgccggtagcgatacgcaaaaggagtggtacgttctttgaccttgtttattgctgcgcccgaggcgtgtggcgcggggggagcaggaaggagaggggaagaacagaaggggaaggcgggcggggccgcgatgtttttgcggatcaaggcggttgtagaccggttcgtaaaggagctgcaggaggcgctggacgcggacatccaagaccgcgtcatgaaggagcgcgagatgcagagctacatcgagatcgcacggcaagaagccaggctgaagatggaaaaggagaatttagagaaggaaaaaagcgtcctcatgggaacagcatcgagccaagacaaccaagatggagcccttgagatcactgtcagtggtgagaagtacaggtgcctccgcttctccaaggcgaagaaatgagaaatggactggcactgaactggaccaacacatgctctgtagtcagctaaatctagccacctagtcttgcaagacccttattttgattcaaattgcattctcttttcttgtacaggaaatcctggaatgccgttaatagaatagcggatacttatgccaggactgtcttgtttataaaaaaaccgggctgctagagcagctgcaatggggagttaatgatgacagaaggttgttgacaaaaaaaaaaaaaaaaaaaaaaaaaaaaaaaaaaaaaaaaaaaaaaaaaaaaaaaaaaaaaaaaaaaaaaaaaaaaaaaaaaaaaaaaaaaaaaaaaaaaaaaaaaaaaaaaaaaaaaaaaatggggggggccccttttaaaggatcaaattttacgtcccggggcttggaaaagaaaaagtttttttttggggcccccaaatttaatttccttggccggtttttaaa

SEQ ID NO: 8753 - DNA, 448 bp, Zea mays
  Clone ID: MRT4577_107981C.1
acgcgtccgatcgccgggagcccgggacccctctgctccgcgccgctgccaccaacagcgacggccgagagggcgagccgcctgtcgcggggccgcgacacgaccggcaaccggccgaggggcgaagcaacaggccagcgtggacgccgatcgtgccaagcgcccagtcccgattccgccctgacctgtttaacagtacgagactctaaaagtccgccctggtgagtgtgcttcactgcttctccggttcttcccctcgcactggtcccgatggaatccgatgccgaggaggcggcggcggcggtggacccaggcgctggacggctgaaggggagcccggagctgactgtggacgcggacatgcgggaggtggcgaagagggccgcgtggagcgtcagttccttcaaggacggcaacggcgtcgcatccctgcgcgacgacaacctcg

SEQ ID NO: 8754 - DNA, 956 bp, Zea mays
  Clone ID: MRT4577_107982C.1
gcgcgtctcacctcacacatgacacatgtaattgcttgaaaatctatggtttagaaagagggaatcagggaagtgaactagcggtccacgatactccgacgcccactttgctacctcggaaccctagccgccgcccatggatatcgccggagaccggcgccggtagcggcggttgtagaccggttcgtgaaatacgcaaaaggagtggtacgttctttgaccttgtttattgctgcgcccgaggcgtgtggcgcggggggagcaggaaggagaggggaagaacagaaggggaaggcgggcggggccgcgatgtcggtgcggatcaaggcggttgtagaccggttcgtgaaggagctgcaggaggcgctggacgcggacatccaagaccgcgtcatgaaggagcgcgagatgcagagctacatcgaggagcgcgagcgcgaggtcgccgagcgggaggccgcctggaaggccgagctatcccgccgcgaggccgagatcgcacggcaagaagccaggctgaagatggaaaaggagaatttagagaaggaaaaaagcgtcctcatgggaacagcatcgagccaagacaaccaagatggagcccttgagatcactgtcagtggtgagaagtacaggtgcctccgcttctccaaggcgaagaaatgagaaatggactggcactgaactggaccaacacatgctctgtagtcagctaaatctagccacctagtcttgcaagacccttattttgattcaaattgcattctcttttcttgtacaggaaatcctggaatgccgttaatagaatagcggatacttatgccaggactgtcttgtttataaaaaaaccgggctgctagagcagctgcaatggggagttaatgatgacagaaggttgttgacagttgtgatgtcctgttcttgctgatatgtttacagatcagctcaatgctggctct

SEQ ID NO: 8755 - DNA, 776 bp, Zea mays
  Clone ID: MRT4577_107983C.1
aattggcttcctcagtcgtgtcctgtacgcttctctcctaatccctctttcttcctcttcctcaggtcttctattttcgattctcttctcgtcaactatgcctaaccctaaggtcttcttcgacatgaccattggcggtcaacctgccggccgcatcgtgatggagctctacgccgacgtgactccgagcaccgccgagaacttccgcgcgctctgcaccggcgagaagggcgccgggcggagcggcaagcccctccactacaaaggctcgtccttccaccgcgtgatcccgaacttcatgtgccagggcggcgacttcaccgccggaaacggcaccggaggcgagtcgatctacggcgccaagttcgccgacgagaacttcgtgaagaagcacactggtcccggcatcctctccatggcgaacgccggtcccggaaccaacggatctcagttcttcatctgcacgacgaagacggagtggctcgacggaaagcacgtcgtgttcggacaggtcgtcgaggggatggacgtcgtcaaggagatagagaaggtcggatccagctccggcaggaccgccaagcctgtcgtcgtcgccgactgtggtcaactctcttagatagacgacgttgaccctaggcttttatctctgtgtcggtggctctgaatgtgtcgtttctttcggtgtcgtttttgccttttttttctctttccatgtcgtttaagggattgcggtgttatggatatcattccgaaaaaaaaaaaaaaaaaaagcggcc

SEQ ID NO: 8756 - DNA, 422 bp, Zea mays
  Clone ID: MRT4577_107984C.1
atcttgcggacccgacgatctctattccctacgtccacgtcgacctccgccagtctcggtctcttcgaagagcgcgcgggtgttgaaggagaggaggaaagagggatgaattccgccacatcgagcaagccggatccaagtcggaacgcgtgctgggaactttactgctcgagacggcatccagcctgatggcaagtgtctggagataagaccgcgggacatcacgatgatgccttcagcaccttcttcagacagactggagttggaaagcacgttccccgtgcaatcttcgatgatctagaatccactgggatcgatgaggtgcgcactggcacgtaccgacagctcttccaccctgagcagctcatcagtgaaaaggaggatgccgataacaattcccgcccgtggccactacccaattg

SEQ ID NO: 8757 - DNA, 232 bp, Zea mays
  Clone ID: MRT4577_107985C.1
ccggccgggaaaaactcaccctataatccactttcgtggtttccctcgcttccgacttagcagccacgttgcgttcgaggccgatcgagcgagcacctggtggcaatgaagtcgtcgtgccagggcgtgctgatggaattcagaccgagcccctgtgggaaggcctgcaggatcatgctggaggaaaagggcgagacctacgcgtaccccaagaaagacctcctgtacaagg

SEQ ID NO: 8758 - DNA, 1484 bp, Zea mays
  Clone ID: MRT4577_107986C.1
aattcggcacgaggtggaagcctacgaaaatggtggagctcacctccttatccccagggccaccacgtccttctcggctgactcctcgccgccggccgccgccgccgacacctcatgttcatacctcctcgcgtcgtcgcgggaggatcctcggcgccgcgaccgccacgcctggcgccgacgactaccactccaccatccgctccctcaactcccgcggccgccacgtcccccgaaaatccctcgggcagaactacacgctcaactccaaggtgaacgaggagctggtggcggcggcgggggtggaggagggtgacgtcgtgctcgagatcggcccaggcaccggctcgctcacttccgcgctgctccaggccggcgctaccgtctttgccgtcgagaaggacaagcatatggctactctcgttaaagataggtttggatctacagaacagttgaaggtcattgaagaagacatcacaaaatttcacatccgttcccattttcttcctttcatgaaggagaaatacggtgccaccaaaaaacttgcaaaggttgcatcaaacttaccattcaatgtcagcaccgaagttgtcaaactactactcccaatgggggatgttttctctgtcgtggtgcttatgcttcaggatgaaacagcagtacgccttgcagatgcttcaatacaaagtccagagtaccgatctatcaatgtgtttgtggatttttactcggaacctgaatacaagttcagagtagacagagagaattttttccctcggcctaaggttgatggtgctgttatcagcttcaaactaaagaatgcggaggagtatccgccagttagttccccaaaaagcttcttttcaatggtgaattccgctttcatggggaagcgcaagatgcttaggaaatctcttcagcacatatgctcttcttctgagattgaggctgctcttgacaacattggccttccagttacagctagaccttctgatttgattttggatgatttcgtgagattgcacaatcatttagcgaaagtatgactaagaagtgcctttcaaaatgcctaaggaattgcttgttggcatggtgttcaacagttggagtaacttacgcctgaccgctgagagttgctatgcagctacaggtgcattcagctcagctccggggcgaagccaggaattacatgtagggaggccggccgaaagagccatcttgtaaaaaaatgatcgcggttcaactggtttggttactcgcacttagcgtctgtctgagttaatacttgacaaaaaaaaaaaacaagcacagctcaactggttaggtttctcgtagtggtggtggtcgtttgggttaattcatcgacttgacacggttgctcctatttttttttctatatgtattctagatagtgagggtttattgtattttgatcgtagacgctaatcagaaactctactgaatggatgccttcgttctctctg

SEQ ID NO: 8759 - DNA, 440 bp, Zea mays
  Clone ID: MRT4577_107987C.1
acttttgacctgagactcaatgtactgtttagagatatataattctcatgtgatgtgcttatactgcagagagatacgctaaagacatatgacttgttcatgacacgcgcattggagatattgtatgtatgattgatggactgaagatggttgaatgaactgtgatatgtaggcgaaggctataagagtacttttgccagtggagattattaatgtatgtgctaaggcctatgagaagcggatactccaaggagataaataagtagtagtgaattgtgcgggtacctgagatcgatattttgatgaatacaggatttgtatattgagatcgtagtgagaataggatgaacccctgatgctactacagggggggataatgttatctttgataagagggagataaatactctgtgggggggggtgggaatttgatcgagggg

SEQ ID NO: 8760 - DNA, 2078 bp, Zea mays
  Clone ID: MRT4577_107988C.1
tctgttagtgggattcaacaagcggagacttggagttgacctaatcacggaagtttcctggcgctccaaattcccaatttcgcagcccgtttcagggaggaagtttgcggcgcacagcacattggcctcgagaacggccgccaattctcctcctactctactctccttcggcaaagaaagcaagtcagcctcaccctctcacaccaccgccactcactcagtgctccaccccaagaaccaagcagctcacccccatggcgtcctacgacaaggccttcgaatcctacaagaaggccctcaccaccgccgcgtccgtcgctgcgtccatgatgctggtgcgcagcgtcgtgaacgagttggtgccgcccgagttgcgcgatctggtcttctccggcttcggctacctgcgctcgcgcacgtcgtccgaccacaccatcatcgtcgagaagaagaacgacgggttcgctaacaactacgtctactgcgctgtgaagacttacctcgccacgcgcatgaacaccgacatccagcagcgcctgcgcgtcagcagcatggacgaggacgacaagatgatggtcagcatggatgagggcgacgagatgctcgatgtttatcaaggcacggagttcaagtggtgccttgtctgcaaagacaactcaaatgactccctcaacagcagccagaacgagtcccacttcttcgagttgaccttcaacaagaagcacaaggacaaagccctcagatcgtacctcccgttcattttggccacagccaaggccattaaagcccaggagagaaccctcatgatacacatgactgagtacggcaattggtccccgattgaactccaccacccatctacattcgacacgcttgccatggacaagaagctgaagcagtccatcatcgatgacctggacaggttcatgaagaggaaagattactacaggaagattggcaaggcatggaagcggggttaccttctgtatggtccacctgggactgggaagtcaagcctaatcgcagccatggccaaccatctcaggtttgacatatatgatctcgagctaactgcggtcacatccaactcagacctcaggaggcttcttgttaacatggacaaccgatccattctagtcattgaagatattgactgcaccatcgaactcaaacaacggcaggaggccgagggacatgatgagtcagattctacagaacaaaacaagggggaaggcaaggtaacgctgtctggactgctcaactttgttgatgggctgtggtcaacaagtggggaagaaaggatcatcgtcttcacaaccaattacaaggagcggcttgacccggcactgctgcggcctggaaggatggacatgcacatccacatggggtattgcaccccagagtctttccaaatccttgccaacaactaccactccatcgagtaccatgacacgtatccagagattgagaaactgatcaaggaggtgacggttacgcccgcagaggttgctgaggttctgatgaggaacgatgacactgatgttgtgctccatgatcttgtcgatttcctgaagtcaaaaatcaaggatgccaatgagatcaagactgaacacaaggaagcagacaaccagctagatgagaagaaaaatgacaaaaaataaaacccagtgcatttccttccaaaaaagaagatgaaagctaatggcggtttaagactgagcacaaggaagcaaataaccagctggatgaggagaaaggcaacgagatagtgagaaaaaaaaaacagtgcaattccttctagtagaggaaagaagatgaaagcaacacatcgtatttcatatagatagatcctacaggggatccattggcatatgtgagtgtttgcatattgttaacattatgtttttggtgatcaatgaggtgtaatggtacttgcagtgcatctgcagaattctgttagtgcttgtttaggagcatgtatgcagaactacagatatgtaaaatcccattacaacttacatgaaacaaaaaaaatgagggcggccgccgatggcaacctcgaaaaaaaaaaaaaaaaa

SEQ ID NO: 8761 - DNA, 607 bp, Zea mays
  Clone ID: MRT4577_107989C.1
ccggccgggatggctgccagataacggctgctgcttaaactactccggccgagctggccgtgctaatgccgctgcggctgcgtgcggtggcacagcgcggcctgcccctgtcgcgatgacacgccgccccgcctcctccgcgccttcggcggccccgctcctcctcctccttctgcttcttctgctgctgcactgtcagtgccaccgcgccggcgcggcgacggacgcggagcggcgggcgctgctggacttcaaggcggcggtgacggcggacccggggggcgtgctggcgtcgtggacgcccacgggggacccctgcggcttcgtcgggatcacctgcgacgcgtccacgggtgccgtgaagcggctgcgcgcccacggccgcgggggctgggcgggcgcgctcccgccctccctcgcgcgcctccccgcgctcgagtccgtctcgctcttcggcaacccctcaacgggcgggcgtcccgccgagcctccgcttgctggcgcccacgctccgcaagctcaacctcagccggaacgcgctgggccggcgaagatcccgccgatcctcggcgacttcccgaggctccgcctgctcgacctctcccac

SEQ ID NO: 8762 - DNA, 348 bp, Zea mays
  Clone ID: MRT4577_10798C.1
attatgtccaggcccgcaaaacggagatcactcgcggcgctgtatcgcattaccccacagacgctataccacacaacggacatcacattttgaatgcggcaagcacacattcgcggttaaataactatgattctcatcctcccaggctcccaccgtccactatgcatcttataatgactcaataacgtaccatccatgtggacgaaggggggatttaatatcacctctcgaatctgaatcttttttgggcggaacacaaacacagggacgcccatgtgaggccggaggggagaccacccatggcgctccctgcagcgtgcactctatgtggcgaggatggccaacagg

SEQ ID NO: 8763 - DNA, 335 bp, Zea mays
  Clone ID: MRT4577_107990C.1
cggctggacggacgcatgcgtccacgcattcagaccctcactgaccttaccgctagcccagcctgatctaatgttaagggagcgtttttcagaacgcctgtcggcacccgcaagatggcgaactatgcctgctctctgcgaaaccacaggaaactattgtatatgctcgaaccgatactgacgtgcaaatcgatcgtctcacttatgtatacgggcgaaagactaattgtaccatctattagctcgttccctacgaatgttccctcactatagctgtatcccacacaagttctattgtctaaagccaacgattataggcatcttaggcgcaatat

SEQ ID NO: 8764 - DNA, 501 bp, Zea mays
  Clone ID: MRT4577_107991C.1
cgggaataacggggggcacgcattccatccattataacggtaacggtactagtctaggtagtatgatactcgtcgatttgcaaagtaagtaagaacaactaagcgcaccactgataagtaagcaggaaggataacgcatgcacaatttacacagacatcggcaagcaatagcagtccgcagtcgtcaaggaggaagattctcacatcacatctccattgaagtaattaatgagctactcggttcggtttctagcataagcatattattaaggttaattattgcgacatcgatttagaattcatcatgtagatagatcacaaacagggcttggaaaagattttaattatcatttattattaaattgaacaattcaattacattttcctagagtaggagatggataaagttaaccaattccacaatttttaattcaacaacattcacatttaagtttacgtgaacaacattaaggtgcacaatctggataaggaaatcatggt

SEQ ID NO: 8765 - DNA, 399 bp, Zea mays
  Clone ID: MRT4577_107992C.1
atgaaggcctcgtcggcaaccgccgtcgccccgttccagggtctcaagtccgccgccagcctccccgtcgcgccgccgcagcaccaggagcctcggsvrcstcagcmacggcggaaggatccggtgcatgcraggggtagccggcctacggcaaacaagaagtccgagacgctgtcgtacstkccgccgctgtcgacggacgayctgcygaagcaggykgactaccttcbgcgcaacggctggatacyctgcctcgagtccagcaagctcgggttcgtgtacsgcgagaackccacckccccgtgctactacgacggccgcbacwggaccatgttgaagctgcscakgtkcggctgcaccgacgccacgcaggtgtacaaggagctgcaggaggscatc

SEQ ID NO: 8766 - DNA, 332 bp, Zea mays
  Clone ID: MRT4577_107993C.1
acgcggacgcgtgggcgcgagcgccgccctcattttgtttatctttgtcgtcttcgtcttgtcgggtcgtgctcgcgctttttttgtttacggtactgtcttgccgccatgtccgtttgtacagaattcatcggctcgacgtgtacgcgcaaattgagtttgacggagtgtcaaataaactgggattaattacccccaggtggatgcttccatacgggtgcgggctggccgagatgaccataactgttagtacatgcattaaggggaaaaccccaacctgggaggatcgatcctgccctagcaccagattatgtttaaagttgacttgcggt

SEQ ID NO: 8767 - DNA, 1334 bp, Zea mays
  Clone ID: MRT4577_107994C.1
ccgtccttcctgcctgctcctgagattacttgcaaaacattcttggtgtttgctctagctagctgctgcaccatatatagaactatcgatctgagccattatattgttggcatttgtgctcgatcgatcgtcgtcgtcgtcccatggcgactaataagccttttgcagttaataagctgctgccagttgtggccctcctgctcctcctcgcagcatgtagctcaccggtggtggtggctcagctggtcgccggctactacagcaaaacatgcccggacgtcgaggagatcgtccgcgacgagatggagaagatcatctcggctgcacccagccttgctggcccgctcctcaggctgcatttccacgactgcttcgtcaggggctgtgacgcctctgtgctgctcaactctacggagggcaacctggcggagagggacgcgaagccgaacaagagcctctggggattcggttccgtagagagggtgaaggccaggctggaggccgcctgccccggcaccgtttcctgcgcggacgtcctcaccctcatggcccgcgacgccgtcgtgcttgccaaggggccattctggccagtcgcgctggggaggagagacggccgtgcgtccagcgccacggaggcggccgaccatctgcctccagcttacggagacgtgcccctgctcaccaggatcttctcttccaagggcctcgccgtcaaggacctcgccgtcctctccggcgcccacacgctaggcacggcgcactgcccctcctacgccgaccgcttctacaacttcagcagcgcctacgactcggacccgtccctcgacaccgcgtacgccgaccggctcaggtcgcgctgcaagagcgtccaccacgacgacaaggcactgctgtccgagatggatcccggcagctacaagaccttcgacaccagctactaccgccacgtcgccaagcgccgggggctcttccagtccgacgccgcgctcctcgccgacgccaccactagggagtacgtccaccgtattgccaccggcaagtttgacgacgtgttcttcaaggacttcgccgagtccatgaccaagatggccaacgtcgccgtgctcaccggtgccgagggggagatcaggaagaaatgctacatcgtcaactaaagtatatatgtattatcagctagtagctaaatcattgttgttttaatgagtttaactccgtccactagatgatagggcgtgtgtctgcttgttattaatcaatgtaatgtatgtactcctattttgctgtaaattcattcttatcaatatgatcgtggcaatggtggcaaataaactcat

SEQ ID NO: 8768 - DNA, 169 bp, Zea mays
  Clone ID: MRT4577_107995C.1
tttttaccccaccccgtgtataaagatttttatggtgaaaaccaatggcaactccccaggccccacagcatgcaccggttgcccccacactatcctatatggaagcttcaacaaaacatcatttttcgaatagcaatagatctaccgacccaaatatcaccgctttgga

SEQ ID NO: 8769 - DNA, 285 bp, Zea mays
  Clone ID: MRT4577_107996C.1
gcgggggtggggctgcaccagtggattgggtcacccggcagacctagggaaggtgaggcgaggtggggagttggcagaatccccatacctcgcagatttgctgagtctgtcttgtgcagagggccagagaatggcttatgggggcccaggttggatggggaaaggctaatggggtcagaccccaccccgtctacccctccagtcagcccagcgcccatcctgcagctcagctgggagcatcattctcctgctttgtacatagggtgtggtccctggacagtggcc

SEQ ID NO: 8770 - DNA, 415 bp, Zea mays
  Clone ID: MRT4577_107997C.1
cctgcaattatgtgtgttgcagtctactagcgtgttataattagctcatggaacacacttcaagcttcactggaagtgggtgccataggacgtggcgatccatagctcataggctggatacatacatgttggcattgactgtaaaatgataatatttcaaggctcgacattaacatcaagtgtaatgctaattgctcaatcctctacactgatttattggataaggtcatgattaacgagtttggtgttgtaccgggactaataacaactgctgatgctataactattacaaacaaaactattgatatgccttgatgaaaggactgcaaaaaaggatgggctatttatacatacatgacacacagtaactctgagagctcataatgatcgtgtactagatctgtctcacctcaaa

SEQ ID NO: 8771 - DNA, 330 bp, Zea mays
  Clone ID: MRT4577_107998C.1
ggaaccaaattgagtatgaccttctcccttctttcgggtggcattccaggaaattacatttatttactgggggctcactactgcactttacatacattagttaattagaacttaaaaagcgggaaaatggaaaaccaaggcaagcacagtgcacaacatttaccgggccgggaccgggcgggccaaaaagcttgacaaaaaggaagggagatctaggaggctggcccaagcctactaagaacggcgagcaacaagtgtcatcgggtcgggaacggaaacggcgggtttaaggaccctaacccgtcggagttccgcacgtttaacgggggc

SEQ ID NO: 8772 - DNA, 317 bp, Zea mays
  unsure (1)..(317): unsure at all n locations
  Clone ID: MRT4577_107999C.1
gctgcacgcgtcgtaagcttttccntanacggncgcctgtgttgtgttgtttttttgctaaaaaatagggtggagcttggcttttttatgggaactataactatggttactgctgcaattggggcttgggtgggtcttgcatggacactggggggagacaggtctgaacaaaacagagaacgtgttgggagtgcggagccgcggggcagcggtgcggggagccctgagtgttgtgggaaggaacatgctgggcggggggtgtgggtggacgtgctggtgctgggggggatgaataaccgctgggggggggtggtggg

SEQ ID NO: 8773 - DNA, 645 bp, Zea mays
  Clone ID: MRT4577_10799C.1
cgcttcctgaagtctgcatcgatggccaaaataccattacctttcgatcgctcaacaattagaagcatacttattcagactgtgagtgcatcaaattgcacccaaggatcactcagatactggttgtctgctggacctggagacttccagttatcttcatctggctgtacaaacccagccctctatgctgttgttattgaaagcccatccttacaagtaccgtcctgctgcagagtggtcacatcatctataccgataaagtctcctcaatttgcagtcatgaaaagcgtgaattacttgcccaatgcactcaccaaggtggaaggagaagagaatggtgcatttactggcatttggctagacgatgagggcttcgttgcaaagggttcgaacatgaatgttggcttcgtgacaaagaacaaggagcttctcatgcctcgttttgacaagatcctgagtgggtgcacagcaagacgggttttgaccctcgctgagcatctagtagctcatggaaagctcagcagggtaatatcaaggaatgtgagtgttgaggaagggaagatggccgattaaataatgctcatcggtagtggcattcttgtcaaacctgttgttcagccggatgataagataattggtcccggt

SEQ ID NO: 8774 - DNA, 841 bp, Zea mays
  Clone ID: MRT4577_1079C.1
gcgattgggtccctcgaggccggccgggccgggattattaccggaagagaaaaaaaataactcggaaaagaaggagacgccgaaaattcgaaaggggaggggaaagcaaagctgatggcggaggcccaggggaaagcaaagcaaatggcggaggccccgagcaagatcgaatccatgaggaagtgggtcgtcgagcacaagctccgagccgtaggttgcctctggctaggtgggatcagcagttcgatcgcctacaactggtcgcggcccaatatgaagcctagcgtcaagatcatccacgcaaggttgcatgctcaagctctaaccctggctgcattagttggttctgcatgcgtggagtactatgaccagaagtatggttcttctgggccaaaggtggacaaatacacaagccaatacctggcccattcgcataaagattaaaggtcgccatgttggttcctgcatgccggattaattttgggctcatctcgggttgctcatgacccgcccatggatgctggatgtttattctttttttgtcttcataattacaaaatggtggtgtacttgccaggcaaatgttaatgagggtataatgcagatattgtcgtcataatttggcctcatgttgcattatctaacctcactttgttgactgtcagcgactcagcgtctctgatttttttatattttttgagaaaaggaaaagaaatcccggtttgtgcctaaaatttgagttctatgtgccccgtgtaacttctgtactaaattcctgtgcttgtatgaattcaagggaaatgcaaaaatgtttttaagtaaaaaaaaaagggccctaggg

SEQ ID NO: 8775 - DNA, 2338 bp, Zea mays
  Clone ID: MRT4577_107C.1
gcggtgataactggcctcactggtgctggggatctcgacaccgcgagtgagttgctagatgagatgcccgtgaaggacgccgtggcttgcaacgctgtgttgcataggtacgtacgctgtggccgagtggatgaggcctttgctctgctcaagagaattggttcgcagtgcgattcggatgggatcttaccatggaatgaccccttcgtgcttaccacagtggttggcgcctgtgctgatcggacgcagtatgagattgggaggcaagctcacacccggttggtggttgccaacaccgggattgattcgatattgggctgcgcgttgattgacatgtattgcaagtgtggggatttggactccgctcaccaagttcttgacaggttagaacatgtcgatgagatttcgctgtccgcattggtctatggctacgcatcttgcggacagttgcacaaggcgttatgtcttttcgacaagatggagagccccagcattgctctatggacgtctcttatcagtggttgtaaccctgcctatcatggagatggtgcttttgttctttttgtaaggatgttgcggtcagaaatgttgcctaattctactatttatgccattgttctgaacatgtgtggctttttaggcatgctgaagcctggtcagcagacgcaagcttgtgctttaaagagtggggctgtcaatgacttgatagcagcaagtgctctcattgacttctactcgaaatgcggcctctgggcagatgcctgccaagctttcagtgagcttaggcatcatgacaccattgtgctcaactcaatgatcactgtatactcaaactgtggccaaatagatgaggctagaagagtttttcgtttgatccctagcaagagtgtcatctcatggaattctatgattgttgggttcagtcaaaacgggcatgctcttgatgcattggagctgttctgtgagatgcaccggcttggtttgcagcttgacaatgtagctatatccagtgtccttagtgcatcaggcagcatctgctctgtaagttccggggagcagatttttggtcttgctattgcgcttggtctgcagtctgaccatattgtagcctcctcgctcattgacctatactgcaaatgtggtaacttggccaatggacgcaggatcttcagtggtattgctaatccagacgaagtcctgtggaactcaatgcttataggttatgcttctaacgggtatggactcgaggcactgaaacttctagatttaatgcaaagtaggggtctgaagccaagcgaacggacatttgttggtgtcctttctgcatgctgtcattctgggcttgtggaagagggattgagatggttttaccggatgaaggaagattttggcgtgagtccatcagctgagcattatgcatgtgtgactgacctgttggtccgagcaggtcgactggatgaagcagttgagttcatagagaacatgcctttcaaagctgatgcaattagttggacttctattattggaggatgcaaagcccagggcaatgaggttctgttggacaaggttgcaaacaaattgatggaaacaggattgtcaacacattcaagtttgtatgtgcagctgtcaagcacactcgcagctcatggggattgggacaaatcagctgagattaggagtatgatgcatgacagaagaatctcaaagaatgctgggcgcagttgggttgacagggcatagaggaaatgaccagtgtcacctcccacaggcgtctcggtccattttctcttgggccttccctattggctttggtttcttcgatgtgttcttccgctagttaggaagtggtaacaaacaacgatcctgctaaaatatgtgcttttgatcatttgcttagttgaaccatatgaggtgatttcttggatgtggattcctgaagcatgcacaggctaatgattcagtccatgatatcttcgacatcaaaattgaccataatgaaaatgtgtcaaccaccaaaaagaaaatctttagctctaaagaagagaaaggaagggctctgaagttgaataatgaacacggtctagcccaggtaagctgtaagagcaccctttgcattttggttgacccagcaaatgctagttacacatgcgcaaaggaggctcttttgtttactcaaccacagttctacaattctattcggttcatggatgctccagaagagttgcttttgtggaatatgttgtttgtgaataacatagaggtcgatcaactctccagaagagctgttttgtgaacaatacagacatttatgtgaacatggatccaagttttctctctc

SEQ ID NO: 8776 - DNA, 1202 bp, Zea mays
  Clone ID: MRT4577_108000C.1
ccccaaaattgatcatgaaaaataaatgactgatcacgaaaaaaacaatattcctcaccgatgtacaatggaattgatcctttttgggtgtactaattccatatgaaggatcaacacgttctgctgctagaacatgatcatgtacaggagcttccgcttgaacagaattatggataggagcatccgcttcaacaggatcatgggcaggttgtacgtgagcgtcggctttaagaccatcgaattcaacgtgagcatcgtcttgaagaccactagagccaggtatccctcgctcgtccatggcagtgaggagtgccatcaagctgccactagggcagagtggcggtggctcctccatgcccctacggacacgattttgccacggcggcggcggtacgcgatgaggccgagcgacggcgcgcgacgactgcggcggtggcggcacacgatggggctgaacaggggcacgcgatggggccgagcaggggcgcgcgacgactgtgacggtggcggtaggcgaggagtcgctggcgtacaagagaagcctcgatggcgcacgggtctgtttttgcaaaaaggaaggcgagcacgggatggttgcgcggggggttctttgaaaaaagaccagctgccgttggttgccggatgtgtggacttgatgcgctttgtgcatttgtgcacgggccgtcgtttgtgcacctgatacggagccggagtaaagagcctcgccacctgccctgcaattcggcacgaggctgctctgcttgctccaccagcaagtcaacaagagccagcgccgggcgcggacccggccggccctcgcgtcgtcgcttcggttcggtttcggctcagctgccgaggctcctcgccgtggaatcagcagcgccatgagcagggagcagccgtcgccggcgccggcgcagcggcggttcatcgccatcccctccttctcctcctccggctgccgctcccactccagcgtcgacgttgtcgacaccgcgcgccacgccggcaacggcaagaagccccacccgcaaggggctgaagcaggggcgggggcggtgccaggcggcgcgtggggcggggggaagggggagtcgctggtggcgcggctcctgcgcggtttcaagaacctgtcccagatcttcgcggtgtacgaggaccaggaggaggaggaggagccggagatggtgatccggctccca

SEQ ID NO: 8777 - DNA, 598 bp, Zea mays
  Clone ID: MRT4577_108001C.1
ctagtttcttcctccctgcactgcatccgacgagagcggtgcgtgtgtgtgctgtgtggccggacgacggggacactagtgcctactccctgctgcgtgcgcgcgtgcggacctaaaacgcgtcctttacgctggagtaaagagcctcgccacctgccctgctatctgctctgcttgctccaccagcaagtcaacaagagccagcgccgggcgcggacccggccggccctcgcgtcgtcgcttcgcttcggtttcggctcagctgccgaggctcctcgccgtggaatcagcagcgccatgagcagggagcagccggcgccggcgcagcggcggttcatcgccatcccctccttctcctcctccggctgccgctcccactccagcgtcgacgttgtcgacaccgcgcgccacgccggcaacggcaagaagccccacccgcaagggctgaacggtgccaggcggcgcgtcggcggggggcaagggggagtcgctggtggcgcggctcctgcgcggtttcaagaacctgtcccagatcttcgcggtgtacgaggactaggaggaggaggaggagcgggagatggtgatcgagctccccacg

SEQ ID NO: 8778 - DNA, 332 bp, Zea mays
  Clone ID: MRT4577_108002C.1
cgcacgcgtgccagagcccgctgatcacggtactgatccatccactctttatgatactgggggggtgcccatagctgatactgcccacaatttcgctctacctgtacatgaaaggggtgtgggactacaggtggctgcacgggcactcaccctacatgaacacccggactgtcccacactctgacgcgcccaaccggactagcttgacgaggagataaacacattacacactctctccacaacggaatggttgcagatgctatgtcgacaagttgctcatcgaagccaggaggatccaaattttgtactgcgaccttaacaaacaatgtgag

SEQ ID NO: 8779 - DNA, 793 bp, Zea mays
  Clone ID: MRT4577_108003C.1
actcctcgcatggcgcgccccttcgcagcaaagtcccgcgcatctcgtcggccgcaggatccggagcttccgacgggggacgagaacgacttcgccggcagcgaggttgccgcccccaccgagagcatcgacaagccgctggccgaggtgctaaaggagctcgggaagagggttccggactccctcgtgaagacccgcgtcgaggataatggcttcactatgaagtacatcccatggcacatcgtgaacaaaattctcaacatacatgctccagcgtggtcgggtgaggtccgcaacattgtgtactcatctgatgggaaatcagtatctgttgtttatcgagtgactcttcatgggattgatgcagagatctatagagaggccactggaactgcttctgttgatgatacaatctatggtgatcccgtacagaaggcagaatctatggcttttcgtcgcgcttgtgcgcgtcttggtcttggacttcatctctaccatgaagatatgtcatagatgactaatgttagtttttgtggcatgcttccagtttgttgcggaccattgtcccttaatggctactcattttcaccgggcatgcttctttttctttaatgtgatatggatgtgcaagtgtttgaaatttaggctgtcgtgctatatgtaagttaccaaagtaccaatgcaactactgttctgagctgtttgcttgttaagcagcagcttgttccaatgtctaaaaaaagaaaaactacccccattcatttaccgttaaaaaaaaaaaaaagcctcccac

SEQ ID NO: 8780 - DNA, 386 bp, Zea mays
  Clone ID: MRT4577_108004C.1
cccacgcgtccgcccacgcgtccgcccacgcgtacgcccacgcgtgcgcccacgcgtgcgcccacgcatccgggagaggagcgcggctgcaaccgtgactacgacgactgcgaggactactgcgacctgaaatgccagatgaaatgccgtcgccacacggatcggcagtggatgcagtggtgcgtgcatcgctgccagcgtgagacagatgaggacgccgtcgacgacgtcgactagaacagtgacagatgccagaagagatgccagtggctcaaagacttgatgaacatgctgcggtgcatgcaacagtacgagcgacaggatgacgacggcgcacgccatgacgctaaccacgaggccagccacagtaacaagtgcgagaagaa

SEQ ID NO: 8781 - DNA, 246 bp, Zea mays
  Clone ID: MRT4577_108005C.1
atgtcgcgccgcgcgtccctcgacgtcgcgcagcgcgtccgcccgtcgtctgtcccctggcctgtgtgcccaggttgcgccttgcctctacgtcgttgctgcatcccgccgccgtccgtcacaactcgccttgttgcgcagcggttcgccgcgtcgtcgccgttcaccacccgtcgtgagctcggcccgtcgtcacccacggcctcgccggagcccgtcgcaccgtccatgttcgtacctaggtga

SEQ ID NO: 8782 - DNA, 271 bp, Zea mays
  Clone ID: MRT4577_108006C.1
atactcagacccttcgaccaggagtcaaattgactttatcagctttaatcgatgggaagaacttcagtgcaggaggtcacaaggttggcttgggatttgaactggaagcttaatgtggtttgaggaaagcatcagatttgtccctggaagtgaagagaaatgaacccactatgttttggccttaaaattcttctgtgaaatttcagaagtgtgaactttttattcttccaaagaattgtaatcctgcccacactgaagtctagggttgcga

SEQ ID NO: 8783 - DNA, 321 bp, Zea mays
  Clone ID: MRT4577_108007C.1
ataaaaggcgggcccaacattttttttttcatttagggtccaagaacccccaatttggatattttggtggggggttagaaatttacctgtactgaatagggagtggtaggggccccatgttaaagaacaaataaaacatttaggtgcctttagtttgttacaagggaaaccccttggcggggggcttaaacagttttttaaaatttggattttggccggttgggcgcttaattttgggtggccaaaaaattccattttaggggttaaccggttccaggacaacatttttggggatgagggtttgccaaaaggggggtttct

SEQ ID NO: 8784 - DNA, 474 bp, Zea mays
  unsure (1)..(474): unsure at all n locations
  Clone ID: MRT4577_108008C.1
tacctcgaggccggccgggatccgatccgtagtggtatggtagcctacctgctgagcaaaccgaacggtagttggaaagccagcatgaaggtctgggtgggactccctgctgctgcagctgtcgtcgtcgtcttcctcatcttcgccggcgtggcggctctaccagcggccatggcagccgtcgtcgagcacaccttcgttgtgagccaagtaaatctgacgcgcttgtgcaaggagacgctggtcaccgtggtgaacgggcagctcccggggccggcgatcgaggtcacggagggagactcggtggtcgtccatgtcgtcaacaggtcgccgtacaacatgacgatccactggcatggagtgaagcagcggctcaactgctgggccgacggcgtgccgatggtcacccagtgccccatcttgccaggccgcagcttcacctacnncggttcaacggtcgcccggacaggaaag

SEQ ID NO: 8785 - DNA, 663 bp, Zea mays
  Clone ID: MRT4577_108009C.1
aaacatggaccattttttggcatgacaccgggaatacagtttttttgttaaaaataaactaatttacaaggggggggcccaaatgtggcagtaccccaagggatcaaaacaaccccccccccccccaaattttcccaaaacaaaaagagaaaagttttaaagggttaaaccttgcccccctgttttgggccaaaattttgtaccccaaaaagagggggggccctgtttaaaacaaagggcccccccctgatttcgttgggaaaaaaaccctgtcacaatttccccgtaatggaaacggaaaatttttttttttttccctggcaacaaaagggcaacaaaaggggccgggggggaaccaaaacaaaaaccgggggggacccctcagctcccaaaaaaaaatatccttttcaggggaggggccaacaactacttgccccaaagccctttgtcccccttgttcgggccccctttggttaatggggaccgggccccagttctaaaagggggggtcccaggggggaccattaagaaacttggtggggcattaccgaaggcttaggcggctcaaatcatttacaataggcaggggcccattcaaaccccctggttctccatcttttgattccagaggagggttggaagcaatcccattttgtggggggc

SEQ ID NO: 8786 - DNA, 1627 bp, Zea mays
  Clone ID: MRT4577_10800C.1
ggcgattgggtttctcgaggccggccgggatggggacgtcctcactcgattgtcgttagccttggaaatcgaaagctcttccggatgaagtgtgcttgtcgaagccttcggtcatgcctggtcctatgttcagacatgattagttttggcttaggggtgtaatcagcgaacaagaagtgggcaaccggaaggaaacaaaaagtgagagaaacgcgagggtagaaccgtcatttcgggcgagaagctccaaacgaccacaccgcacacgccgataaaaccgctccacccactccgaccactccccctccgccgtcgcctgtccacttttccccgtggcttctccgccgtcgaggccgcgtcgccagtggcgaagagaccacggactcagatggccagccgcctgggtccggcccgagcgcaggtgtacccgctgttcgcggcgacgggcgtggccgtcggcatctgcgggtttcagctcttccggaacatcactggcaaccccggacgtcagggtaaaccaggcaggcagggcagctggtgtgcttcgagaaccatgaggaggggaggcgttacgccatgcatggcctaaaaagctttgtgcacgacaagactactgagatcatgccttgcagttaacaggttcttcactgatcctaagtcgagcatgttgattggcatactactactactactacttgctactggtggattttacactttgctggcaactcaatatgttggggacatgcctgacctctaaaagtacttttgagtgcttggtgatgacttgctatatgtatgatggtggatgagtttgatcgtccatgcttttgatgttcatattcatctgtcatctggatttgccgcacttcagtgataaaattgtcatttggatactggtaaaaaaaaaaaaaaaaaaaaaagaaaaaaaaaaaaaaaaacccgcggccgcgggttttttttttttttttttatccaaatgacaattttatcactgaagtgcggcaaatccagatgacagatgaatatgaacatcaagcatggacgatcaaactcatccaccatcatacatataccaagtcatcaccaagcgctcaaagtacttttagaggtcatggatgtccccaacatattgagttgccagcaaagtgtaaaatccccagtagcaagtagtagtagtagtatgccaatcaacatgcttcacttagggtcagtgaagaacttgttaactgcaggcatgatctcaggagtcttgtcgtgcacaaagcttcttaggccatgcatggcgtaacgtctcccctcctcatggttctcaagcacaccagctgccctccctgccttgtttaccctgacttccgggttgccagtgatgttccggaagagctgaaacccgcagatgccgacggccacgcccgtcgccgcgaacagcgggtacacctgcgctgcaccaccatgagagagagagagagagagagagagagagagagagagagagagtgcaatcgaagagatcgaggaagctgacctcgggccggacccagcggctggccatctgagtcggagtctcttcgcactgggacgcggcctcgacggcggagaagcacggggaaagtggacgagcgacggc

SEQ ID NO: 8787 - DNA, 342 bp, Zea mays
  unsure (1)..(342): unsure at all n locations
  Clone ID: MRT4577_108010C.1
agagcggccgccccccccccccccccctgttacagtatgaaaacagcaaccccccaggggggaaggacaagacacgnanggncacaagaccccaccaaaacacggacagcagcagacgaacacagaagcccccacaacccacgaaggaacgggcgccaccaancgcggacacggaaaaaaaggaggaaaaaaaaccccangcccggaccacacccacagggagaaacccccacaacgggagacaggcaaacaaaacacggacgcgccggcccgggccccaaagacaaacccccagcacaagggccggaaaccacggcacggggggggggcaggaaagaaccc

SEQ ID NO: 8788 - DNA, 312 bp, Zea mays
  Clone ID: MRT4577_108011C.1
tgaaccaccttgtttttgtgggggaagtataaccttgattggtattactcggacatgggaaaaacaattttccgcataaaaagaatttagaatccccgacatgcaagagtttgacaagacgtacctaaaacatggcccccaaggatcaggggcagtttaggcccccccgggggcatgttttgaaaaaagaaaatttaccaaaagtctcttgtttccccgagagctaaataaaaccccccacggtttttttccttttccgggcccaaaaaggatgtccttttttggggggggggggggggcccggtatttttt

SEQ ID NO: 8789 - DNA, 121 bp, Zea mays
  Clone ID: MRT4577_108012C.1
cacaagcaatgagtgaataaggtgtgtcacgaaccgtgcgcgtaaacttccgcctgtcctgccgatcaacatgtctctatatgtccacctactactcatctgtcggtgctcgcttgaaata

SEQ ID NO: 8790 - DNA, 685 bp, Zea mays
  unsure (1)..(685): unsure at all n locations
  Clone ID: MRT4577_108013C.1
gcgtaagagaaagcagggacacaccatagttgagcccgtgtttccttagcgagacaccataagaatgctaaactaggccgttgctcccacgcctcgcgtccattgctgcccggtggacaaggagggatggggaggttctcctcaaacgtggatcgtgtgtgggcaagcactcgggcgtgagagtaatcagggtccggcgaattgctcaccggagattgttgagcactgcagagccacctcttctcgggcagagcacgtcatgtcaccatcgtaggtaagtagctttgggatcaattcgttttgactccttcattgcatagaccatagtagtagatggtttgggagcactgggtgtcggtgggtcttctccggtgagtgcctgccgctgtggtagggcacgccgccactgcctggttgagcgaggtagaggaatgaccgggtaccatggatcttgggactgatggtggagattggatccccaatcacccttcgagtattttaatgtaggacgatcgatcgagtttggatggcatagattcgtggatgacgtggttgagcgagggtcgttggtccatgatcggtcgggtgagcgtgagtaccagttcagcggagatcttatctaatnccgatcatatatttctaatcgaacgactaagggcattgggtaaccccttcgttactagac

SEQ ID NO: 8791 - DNA, 1000 bp, Zea mays
  Clone ID: MRT4577_108014C.1
ccggccgggactgacacgctcgcctaatataaccacaccgcctagcgccactccccacgtcactcgctgtctgttgtagcaccgcaccagtcttcgccgccggtccgcgggcagatcaagagatggccacggcgatttacctctcctcctcggtggcgccgtcgtcgtgtgcccgccagcggcggcagactaccagggcgaccgcgtcggcgacggaccgtccgcgcgaggtcgtgtccccgaagcgtcggctcccgctgcggaaggtgccgggcgactacgggccccttcgtggcgcgcgacccgcgcgtggtggcgctcctcgacgccgcctcgttcccggtgctcttcgacacctcgctcgtcgacaagacggacctcttcacgggaaccttcatgccgtccaccgagctcaccggcggctaccgcgtgctctcgtacctcgaccccgccgagcccaaccacgggccgctcaagacgctcctcttctacctcctgtcgcaccggcggcagcacgtgatccccaagttccgcgaggtgtacggcgacctcttcggcctcatggagaacgagctcgccagggtcggcaaggccgacttcggccactacaacgacgccgccgccttctccttcctctgccaggcgctgctggggcgcgaccccgccgagtccgcgctccagggcgacgggcccaagctgatcaccaagtgggtgctgttccagctcagcccgctgctcagcctcggcctgcccaagcacgtggaggactccctgctccactcgttccgcctcccgccggcgctggtcaagaaggactacgaccggctggccgacttcttccgcgacgcggccaggagggtggtcgacgagggagagcgcctcggggtcgcgcgggaggaggcggtgcacaacatcctcttcgccatgtgcttcaactccttcggcggcatgaagatcctgttcccgtcgctcgtcaagtggctgggccgcgccggcgggc

SEQ ID NO: 8792 - DNA, 387 bp, Zea mays
  Clone ID: MRT4577_108015C.1
gtcgtccccctccgtccctcccccggcgacccctgccgtgtccccgccgtcgccgtcttccaccccggcgactccctctgcgccctcgccctcctccccttcctctccggcgacgcccgccaccccgtcgccgccatctgacaccccgtcgccgccatcggacaccccttctccgccatcggacaccccgtcgccgccaggggggagcccttctccgccatcggacaccccttcgccgccgtcatccagtggagggggaaggtccccgccgtcgtccgggggtgagcgatccacgccgtcgtcccactcgccgcccaagtcacactcgcccgggggcgagggcggcggcagctccgggccgtccacgtcgctcgtcgtgggcgtggt

SEQ ID NO: 8793 - DNA, 826 bp, Zea mays
  Clone ID: MRT4577_108016C.1
tcgaggccggccgaattcggcacgaggcgctcgcctaattataaccacaccgcctagcgccactccccacgtcactcgctgtctgttgtagcaccgcaccagtcttcgccgccggtccgcgggcagatcaagagatggccacggcgatttacctctcctccccggcggcgccgtcgtcgtgtgcccgccagcggcggcagactaccagggcgaccgcgtcggcgacggaccgtccgcgcgaggtcgtgtccccgaagcgtcggctcccgctgcggaaggtgccgggcgactacgggccgccggtgctgggcgcgatccgcgaccggttcgagtacttctacgggcccggcggccgcgacgggttcttcacctcccgcgtgcgcgcgcacggctccaccgtggtgcggctcaacatgccgccgggccccttcgtggcgcgcgacccgcgcgtggtggcgctcctcgacgccgcctcgttcccggtgctcttcgacacctcgctcgtcgacaagacggacctcttcacgggaaccttcatgccgtccaccgagctcaccggcggctaccgcgtgctctcgtacctcgaccccgccgagcccaaccacgggccgctcaagacgctcctcttctacctcctgtcgcaccggcggcagcacgtgatccccaagttccgcgaggtgtacggcgacctcttcggcctcatggagaacgagctcgccagggtcggcaaggccgacttcggccactacaacgacgccgccgccttctccttcctctgccaggcgctgctggggcgcgaccccggcgagtccgcgctccagggcga

SEQ ID NO: 8794 - DNA, 437 bp, Zea mays
  Clone ID: MRT4577_108017C.1
gtgtgtgttttttttttttgcaaagaatgcacaactagcaccctttatcacaggatacacacgatgccactacaggcttcatgcgctactaactaagccctacataggtactgggtccaacactaaaaaacaaaacgcgaggcggtgaccaaaaaagaacgcaaacgtgaagaccagaaggcaacacaatgccacaactaacaaaccctatgtagacacctttgtgcagtctatacacatatacagctgcaggggacgcgggtcggctcactagaactacaggatcatgtggaaagctggggccaggccaacgcatgccctaatgatgacctgcagtatggccctctgctgaggcatgacatttaccaccaatgcaaccgagcggaaccagcggtgccctggggaggccgctacagatggtgggcaccggaaggaag

SEQ ID NO: 8795 - DNA, 264 bp, Zea mays
  Clone ID: MRT4577_108018C.1
acgcgtccggagatctcgcggggctctcaacgggcggctacgggcaaaatcctccgccggcgggtgatgtcggataggatccgcagctctcgaataatgcgaagaagagagaggagaagtgttagaagctttaagaggttcttttttttattgatgattttttttttatttttgctttatcttttttttgttattttctttatatttcttattttttatattttttttttttattttctttttttatatttttttctatttttt

SEQ ID NO: 8796 - DNA, 429 bp, Zea mays
  unsure (1)..(429): unsure at all n locations
  Clone ID: MRT4577_108019C.1
acaaaaaaaaagagaatatttgtacttaattgctgaaaacgattttaatcacagtgcatgcactccttagtgttgagggtacttatgacacgacgcgaggaacaagacaataatctggacagctaattgctgtctgttgacaaaaacaacgactaaagtagcatgacttctagcgcttagctccagaccaaaacggacttcctaacacctgaatagactgaatgaagaaagccacgccccctgtctcgccgcattaaacgcggcagctgatctagttattcccaccgttactgttacacttgtcagggtgctagagcccggtcctttctctttcttcctttactttttcggcacgttcgtcgtctttccctcgtaagctctaaattgggtgctccctttatgngtccaatttatgtctttactgcacct

SEQ ID NO: 8797 - DNA, 769 bp, Zea mays
  Clone ID: MRT4577_10801C.1
attgggtacctcgaggccggccggaattcgccttgtgaactgcgtcgcaggactttctcggtttcttctcgagtcggtcttgaactctcgcatcgcattcccccacactagacccggcaactgccctagagcaatatggcctcccgccgagcgctggcccgcctcccgacgctgaccgcccgttcgtccttggttcgagcaactcctctattcaccagaatgtcgactcccatcaatcaaagcaaggttgctgctcggcggctgcatgccacagctcagcacctgaagccagcatcgtctgcagcggccgagtcgtaccccatgaaccacgagccaatccaatcgccggcagacacacagaactttatcgacaaccagtttgtcgcctccaaggctacacaatggattgatctgcatgacccagcgaccaacaacctggtgacacgggttccgcaaagcatggatgaggagctcaaggcggccgtggacagcgccgagaaggccttcaagccatggaaggagacgagcttgcttcacagacagcaaatcttgttcaagtacacacacttgatccgcgaaaactgggacaggctggcagccagcatcacactcgaacagggcaagacgtttgcggatgcccgaggtgatgtgcttcgcggcctgcaggtggcggagacggcgtgcggtatcacaactcagatgacgggcgaagtgctcgaggtcgccaagacctggagacacgcagctacagggagccactgggtgttgt

SEQ ID NO: 8798 - DNA, 276 bp, Zea mays
  Clone ID: MRT4577_108020C.1
attcctccaagcggccgatataccaataagtgtacgaacgcggatttttcgggagctcgtaccttaaataaaaaatttgtatacaaagcattcttcttagcttaaaaaaaaaaaaaaatcaaggaacaaaaaaaaaagaaaaagaagaaaataaaaaaaaaaggtgttttaaacattaaaaatatatttaagtgtagattaaagaaaaatgaccaaaactcacttaaggtgctttacccccaaaaacttaacaattaaatttgagggcgcgctttt

SEQ ID NO: 8799 - DNA, 536 bp, Zea mays
  Clone ID: MRT4577_108021C.1
tcttccgggacagcgattcacaggctccctagcaatctctagcagcttatgctcgttcgaagccagcgctagccttcctactgtcccgatgggccgcacgaagcagacggtgaggaagtccactggcgggaaggcgccaaggaagcaagtggccacgaaggcggcgcgcaagtctgccccggcgaccggcggagtgaagaagccccaccgattacggcccggaacgtcgcgcttcgggagatacgcatggaccagaagaggacggagctgctgatccgcaagctgccgatccagcgcctggtgcgtgagatcgaccaggacattaagaccgaccttctctttcagagctacatcgtcgacgcgctgcatgaggcgtacgatggctacctcgtcgggctattggaggacaccaacctgtgtgccatttacgccgagcgcgtggccatcatgcccaaggacattcagctcgcccggcggatcccaggggagagggcctaggcgtcatcgctgaggacgaggaagtattagtcgcaggt

SEQ ID NO: 8800 - DNA, 845 bp, Zea mays
  unsure (1)..(845): unsure at all n locations
  Clone ID: MRT4577_108022C.1
cctcgaggccggccgggccggtacaccgtttcgacgccctcgcccgcctgatctgtttctgcagagtcataaatcccaggcacccagtgtgtgcaccgagcagtcaaccagcgtgaacaaacaggagacgcatccagcctccagcagagggctccagagatccagcaagatgaaggagggcacggcgaactgtgtggacatcctcatcgccatcatcctgcccccactcggcgtcttcctcaagttcggatgcaaggtcgagttctggctctgcctcttgctcaccttcctcgcctatcttccggggatcatctacgcgatctacgccatcaccaaggactagcgcggttccagttgggtgagagctgcaagctcctccttctcttctcagctgtgaagctactactactagtctactaccgattggtgaacctgaacctgtcgcttcgttcgtgtccttcgatcgctctctggttatattggtcgtggatcttgttaccgatttatttatcgtacagtaacttgtaccatgtgctgttctgtatttattcagtggtccgcgtaaaatctgcctccaacctgtgctatagtgtgatgcacgtgtctggaactcgtttcttggtggttggcgtgaaggttgagcgcttcagcacatgtcacagccggcggcctccagtattctacggctgctggcactagtggtagtaccatcagatcgcgtgctggttggtctgtctggttgaaatgcattgtgtcatgtccctgttatattataatgtgtttggtttgaggcataaaaaaaaaaagcggcctctcactcgaaaaaaaanaaaaaaaaagcggcc

SEQ ID NO: 8801 - DNA, 728 bp, Zea mays
  Clone ID: MRT4577_108023C.1
ttacgtttcgacgccctcgcccgcctgagctgtttctgcagagtcataaatcccagccacccactgtatcagtcaatgagtcaaccagcgtgaacaaacaggagacgcatccagcctccagcagagggctccagagatccagcaagatgaaggagggcacggcgaactgtgtggacatcctcatcgccatcatcctgcccccactcggcgtcttcctcaagttcggctgcaaggtcgagttctggctctgcctcttgctcaccttcctcgcctatcttccggggatcatctacgcgatctacgccatcaccaaggactagctagcgcggttccagttgggtgagagctgcaggctcctcctcttctcagctgtgaagctactactactagtctactaccgattggtgaacctgaacctgtcgcttcgttcgtgtccttcgatcgctctctggttacattggtcgtggatcttgttattaccgatttatttatcatacagtaaggggtgtatgggaacaaagtttttctacagtattgaagcaatactgtaatattgagcaatactatggtattatacaaaaaaaaaaaaaaaaaaatttgccggcaatctctgtatacaaaacacggacgcatctaaatactacacttcttttgcagttttacaaactttgatctccgacaaagcttttctctgaaaaaagagcgacacctggatcccactctggctg

SEQ ID NO: 8802 - DNA, 211 bp, Zea mays
  Clone ID: MRT4577_108024C.1
ttttcagaagagccactttattgccttgcgacacttaaccaagctagagaggtgaagccttgagactcaatggtctgcacgggtttcttaagctacatgtgacatgcttagacgatctgcagagtgaacttttgtatgacacctgaagccagtggacctcttgtatgacattctatagcttcttttctcgaacagcctatgcttgaaccag

SEQ ID NO: 8803 - DNA, 234 bp, Zea mays
  Clone ID: MRT4577_108025C.1
acaataacaatttttatacgattggctgtttacctgaggaaaagaacatacaataatccaaaccaaataatagtacgcactacaattaataaaacatttaatacaaacttgcgaaagattttgcacagaaaaatatatgaatttaataaacttcaacaacaattatacgagaataaaagctatttgcacactctgtttaaaaaaaatggaggaacaaatacctttaaaagtttt

SEQ ID NO: 8804 - DNA, 603 bp, Zea mays
  unsure (1)..(603): unsure at all n locations
  Clone ID: MRT4577_108026C.1
tcggctgggtcgtttccctaaagattaacgaacgaatgggaacagcctttatctacggaaagattgaacagtgatgccgacgaacggcccttgcgcactcgtggcactgaggcagctgccggctgcactcaaatctttttagtaaagtttgtggatttggcagccagagtctacggattaccatcagtactcactgggggctcgttttagtttgttatgggctgaaatatgaaatatttttaacgtgcctacaactctagttgtccatgtaaatcgaagatccttccacccaccctataaacccttctctgctccatcacgtatgaccgtagtttatccatatactcaactaaattctaaaacaccattttgcattgtagtttgtactgttcgcaaagtaaatatgagtataagaacgagtaacctgctagagatagtataaggtcattttttaaacacaatttctcatctatccattatatataattttagcatattgatttttcagactacgctgtagttgaaataaaaaattctcggtgaagatttgctcnnnnnaaaaaaaaaaaaaaaaaaaccananaaaaaaaaaaaaaagcggcc

SEQ ID NO: 8805 - DNA, 496 bp, Zea mays
  Clone ID: MRT4577_108027C.1
tttcttttttattttttattttttttgggttttaaaagatatttttgggtttttcccattttttaatgttttttgttttcaaaagaaaatttatttaacttgactaaacaaccaaggggaaaattccatttgtataaaaaaaaaaaaaaagggacagcgaaaaaacaaaaggggggcgcccttcaaggaaaaaaaaaaacccccaaacaaagaacaaaggggcgggaggcaaaagaaacataaagtataaaaagggggggaacaaaaaaacaactttctctgacggggccccacctagggtccctgccaaactctcagaaacgtccgggacccaggagaccccggggtgtcatccaagccccaagagtccaaaaatgggccccgcccccggggggaactaaaaaaaaaaaaaaaacggggaaaaaaaaggggaaaaaaggggcccccccaccagggggggagaaaggcccccccggggggaaaaaaaccccggggg

SEQ ID NO: 8806 - DNA, 391 bp, Zea mays
  Clone ID: MRT4577_108028C.1
gccatctaaatataagatttcatattgtaactgaaagttttaataatcctgctgaccagtatgcaagtgccgaccctgtgtatcctcctatcatttagggcctacactccaaaaaaattcccctaggctacagattagaatgcaactatgacaaaacatgatcagtatgtactgccaagtaaccaatgggcagcagcaaaaggtaaagaataaagtgcaaataataaaaaaggattctagtcgcgctttttctccaagtttgcaactgcctgtttctgacgcttctcccacgccggcatcttccctgggaacacccatcgcaggagccactcccatccgtagcaaccacaaaacattagaatagcccacaacatcaacttgccacgcattc

SEQ ID NO: 8807 - DNA, 153 bp, Zea mays
  Clone ID: MRT4577_108029C.1
tcggcttcgctcccagtatgcctcgcagacgtccaaacagaacccgggcgctaaccagcagctggagatcgagatgaccgctgagaaggctcgccgcctcatcacatctgattgtagaggcggaggtggctattccattttcatggcttttgg

SEQ ID NO: 8808 - DNA, 190 bp, Zea mays
  unsure (1)..(190): unsure at all n locations
  Clone ID: MRT4577_10802C.1
cccggggcgacccacncgaccggaggcgngagacgagggggagacgcggggccccaagcganncgcnggcaaccaagaaaggagcncagcnnngggcgggccnnngaaacaaccagagagcgcaacncggcacgcaggccggcccggaganncgcgancgagggcaanancanccccacgggnccagggg

SEQ ID NO: 8809 - DNA, 407 bp, Zea mays
  Clone ID: MRT4577_108030C.1
cggcggcatggcttccctctggctcctctcctgcttctcccttgtgggggccgcctttggctgcggggtccccgccatccaccctgtgctcagcggcctgtccaggatcgtgaatggggaggacgccgtccccggctcctggccctggcaggtgtccctgcaggacaaaaccggcttccacttctgcgggggctccctcatcagcgaggactgggtggtcaccgctgcccactgcggggtcaggacctccgacgtggtcgtggctggggagtttgaccagggctctgacgaggagaacatccaggtcctgaagatcgccaaggtcttcaagaaccccaagttcagcattctgaccgtgaacaatgacatcacccagctgaagctggccacacctgcccgcttctccc

SEQ ID NO: 8810 - DNA, 255 bp, Zea mays
  Clone ID: MRT4577_108031C.1
cccacgcgtccgactctagggtatatgcctctcgtatacgcaaattgcccactcaagtatggctttgatatttccaccgactaggccccccacttgggcccctcccaagggcgcttccatgcagggggaaccccgattttttgccccttacaaaaagtcctcttccgttaaccttgctggcccaacttccttcaaacaaaaaaagaccgggaaacatacccagcagaatttccgaacaagaatttcctggatgga

SEQ ID NO: 8811 - DNA, 328 bp, Zea mays
  Clone ID: MRT4577_108032C.1
tcgtcatttttgtagcctgatcttttttcaacccgtaccgtgccaggggcggggcccccaatttcattctcaagcttatggtagggattgaggataccgtgggtattggctagggcaccaccaatatatactccaccgttgatctggataatgcccgtatggggcgcacccagattgtcttctatcagcccgtgaacccgttctggtacaagtgcttttacatttactttacgcacatggccgtcgacgttgtattcaccgtcaagatcgtcaaccccatttggtgcctttcttattgggagggcttatctgcctgtctaggacattc

SEQ ID NO: 8812 - DNA, 278 bp, Zea mays
  Clone ID: MRT4577_108033C.1
gttcatcttcaaccaggcggaaaccgatattttcagggtcaaagatgcatcggtcgttgtataaatctaagcaatatctccctaacaagtgtggacattatggggatgattggaaaactttaacaccattttttttttagggggttggtttgtcttatataaagctggcgccgtgcccaaacatgggggcagtctgagtgggcctgctcacaatctcgcccaccgtttccgtctccaaagagcaacgcgaatcacgcaggggggtcttatggataacc

SEQ ID NO: 8813 - DNA, 654 bp, Zea mays
  unsure (1)..(654): unsure at all n locations
  Clone ID: MRT4577_108034C.1
ccggccgggaccgcagcagacccgccgtcgcgtctctggcgtgctgttctctgtcctcactcgcggagacgatgctgcgtccatccacgccgtcctcctctaaatcctcttcgccgatgtgtgccgcttcaccacacagatcgacaacgcagggagctaggtcccacacgcggttgcggctgcggctgcggctgtgtggtctgtgacgctccccgccgatctcgccgtcgtacggatccacgacagccggagccagttcctgacgcgcgctgagcccggtctccccctgctatggcgggccctgcttcggcgaggccccacccgcagttgctgctgctacgagaaaggaacgctcctcaccgacctccccgccgcacggatctacaggacgagcaggtcgccgccgtacggatccacgacagccggagccaattcctgacgcgcgctgaggccggtctncccctgctatggcgggccctgcttcggcgaggccccacccgcagttgctgctgctacgagaaaggaacgctcctcaccgacatccccgccgcaccggatctacaggacgaaacaggtctcggcactaatcgggttatgggccgtcgatagtgctcaccatttcacacggcagggtcttgaaccttctttcgattg

SEQ ID NO: 8814 - DNA, 393 bp, Zea mays
  Clone ID: MRT4577_108035C.1
cccacgcgtgcgctgtactcgcgttggcctgcaataatcctagtgagatatgccggaacagtcactgcgggcctgacatatctagctgcgtcagtcagctctactccagtgtatgtacactgaggcatctgtaatgttcatgtgtatagcctgcagcgtgatgaaccacttactgggatctgtacagggctaggtcgactagctctgaattcatgtggatagagcggaaccggatggacctgaatcacattcatgtcaaactacttgttaacattgctcaatcccactcaatccatgtgaaatgagaataaccgaccaagccctgagagggcacgttacttcattcacgaaggattgggcacttgaagttaaaagaatcatacacatcttgtt

SEQ ID NO: 8815 - DNA, 216 bp, Zea mays
  Clone ID: MRT4577_108036C.1
ctggccaggggggaaaagaaccaaaaaggggggacaagaacaggcccaaggaccctttttacacaaggcctgggaaaaaaaacgcgctccgttttgaaaagaacatcaaattcacaagctacagacaaccataccagaccgagaaaaaaaaaccaaggcaaaaccaatagttggacggttggaaacacttcattcgggggccggacccgggggaca

SEQ ID NO: 8816 - DNA, 698 bp, Zea mays
  Clone ID: MRT4577_108037C.1
ccggtgggtatatcctattccggaccggaaacgactagacccgctccgatctctgtgtgtcttcgtcttctgctgtcgctcgccgtccgcatgggatgaggttgaggagaggctgtccgacgacatccccccgagtagaccatctacctcatcaacctcagcgataaggactagagagaacagacgaaaagatcactttatgccttgcgttcacagaatggaaggatactggatgagttggccctgatgagctaaagctgagaggcaatggtgggcgacgtttacccaaattacatgctgctaccggtgctttccgtcggattgcaagatttcgatttctacagccaacaaatgccagcactagatgccttaacagaatcatactggattgctagagaagatggtagcttatgcaccgtatgcagagaggaagaggcatgaggacaaagctgctgagaaataacgacgaacagaagaggcgcgacaagctggcctcgatgctggtgctgcccaaagcaatgtaactggctatcaagcgccgcgcctgttcaaggcttcacaggagccacctgcgcctcctaaaagatcctcttcatcagaatctgacggaccataccactagcatgatgctccagatcctgctccagtgaacgctggcttccgtgagtacggatgatcgaagctaaccagcatccttg

SEQ ID NO: 8817 - DNA, 455 bp, Zea mays
  unsure (1)..(455): unsure at all n locations
  Clone ID: MRT4577_108038C.1
gcccggggataaaaaaactttgggggggggggggcggggggacaaatgggaattgggttgaacacaaattgggggagaacttggacgggggcgggcccccgcgggggggggccttaaaagggggaattccacccaaggggggggggttttttggggatcccggcttggtcccaaatttggggtaattatgggaaaaagtgtttcccggggaaaatttttttcccctcacaattccccacaaaatatgggccgggggtttaaagggtaaaaccgggggggcccaaagggggggctaacccccattaatcgggttgcccttccgggccctttttcgggcgggaaacctttggggcccgcttttttaaagaaacgggccaccccgcgggagagggggttttcgttttgggccctttttcctttttcgggtttatgaatnngtgggggtgggcggtttt

SEQ ID NO: 8818 - DNA, 348 bp, Zea mays
  Clone ID: MRT4577_108039C.1
ttctttcggtccgattcttattcttttatcggacggaatccttaacctatgggctgtcgaactaatgattctttgtaccctattttgcttttgcctttcatccaaagatgtgctacccagagttactaccgtgtccgtatccttgcatcatgggcattaacttgtttggtatctaacgagagattgctttacgttattagtgatatactggataattcaccttgtggaagttcacaaagcaatggctcacagtgtacaacatacttatcctgccatatcagctaatatggtaaaagcaaatgttcttttgctgcctaaagtcattcattttcaattacatttttcttt

SEQ ID NO: 8819 - DNA, 368 bp, Zea mays
  Clone ID: MRT4577_10803C.1
aagatttggaggcccatatttaggtaacaatatcatttgaaaaagggtacctaatacgaggtatattttaagtagaagtgtgaaatatgcttttagattctccgcgatagagcatgcctgctccgtggatgcttgtattttcttgtagttatcacattacaaggtttaatgattgttggagagtgagggcctaggcaaggggctctcaatctaacaattgaaacacaaagtcctggaaccaccaactccctactttgcttttaccaaagtctctaagtttttgtgagtgctaggtagacaaggcttcaccacgaacatggactaagggatgactctgaacaaaaaccacacccaaagataagaaaaag

SEQ ID NO: 8820 - DNA, 337 bp, Zea mays
  Clone ID: MRT4577_108040C.1
gcgaccgttggagtcgaccgttgcactttttagtcgttgctccgttggcacactggacagtccggtggcccaccggacagtccggtacattatagcggagcggctctccagaaacccgaagactattggctcccaagtggagcaagttgatcttgatgaactagatgatgaagaggctccgtgcgtcgtgctaaggaacatgtccattggggacgtgtatcctaaggaatccgaggagcccacacaagcacaagatcaaccatcatcttccatgcaagcatctccaccaactctagatgaggaccaggctcaaattgatgaagatgaagatcaatag

SEQ ID NO: 8821 - DNA, 476 bp, Zea mays
  Clone ID: MRT4577_108041C.1
actcaattcaactataaatgtcaagactatcagtcatccttcttatcggcctcctcgctatatgccacgcctttgagcacaagtgtacccatgatgaaatggaccacgaaaagcctgacttcgttgatatcgaagaagaattcaatcctgaaggtaatgaccattcaggaagaactcttgccagttattccaacttcagagcctacggttactatggactccttagtaagtccagtagctccgtaagaaactacatccaaaacgaacttatccctcccattatggattacttctcagctgctctcaagatcaagtaccccactactggatcattgaaagtcaccaccagctctgtctgcggttattccactccctccgtcctcaagtctggtgtcaatgctgattggttctacatggttgaaactaataccgccactgactatattgctcaaaccactacttgctccttagctact

SEQ ID NO: 8822 - DNA, 683 bp, Zea mays
  unsure (1)..(683): unsure at all n locations
  Clone ID: MRT4577_108042C.1
ggtaccctncgnggtctcggccgggnaaaaaaaaaaaaaaaaaaaaaaaaaaaaaaaaaactcttcgaaaccctagtccccctgtctccatttctcaggccggccgccaattccctttcccgtgctcccgcaaccggctgagtgaagaagaagagatggnccggcaaggggcgatggccccggcttatgggcattcgatcttcggcacagacgtacttcttgcgttcggcggtgtggacagcacagaccgcggtcagagatcatttgcacaacgacccaggggtaacccgcacacaccgcccttcgtacggtcgctctttcaccagactccgagccgcctcattcggagaatgcgggccaagaaacacaggtcgccattgaacccccatcaacaccggtcttttgatggccaagcgtctcatcggcaggagggttcaagtgatgncgtctgtccagaagtgatatcaagcttgtggccctttcaaggtcattttctgggccgtggtgagaagccaatgattggttgtccagcacaagggtgaggagaagcagtttgcagctgaagagatctcctctatggttcttatcnagatgcgtgagaatgctgaagcttaccttgntagcacgatcaaaaaggctgtggtcacaagccctgcctactttaatgactcacagaggcaggc

SEQ ID NO: 8823 - DNA, 464 bp, Zea mays
  Clone ID: MRT4577_108043C.1
ttctttctctagctctcttggttttttgctaaaaacagagcattttctctctagctctcagtgtttctttaccataagtttcgtcatattagtacatgcaagtgtaagggatggtgatggaggaaggaagaagcatagaagaagggcttttgcagctcaagaacaaaaacgacgattcagagtgtcgtattactgcttgtgttatccttagcacttttgtcgccgtttgtggctccttctcttttggtgttgctactggttacacttcaggtgctgagacaggagttatgaaggacttggatctttctatcgcgcaattttcagcttttggctcattcgccactttaggagctgcaattggtgcactgttctgcggtaatctggcaatggtcattggcagaagaaggacaatgtgggtctccgatttcctatgcatcactggttggctctccatcgcttttgct

SEQ ID NO: 8824 - DNA, 1193 bp, Zea mays
  Clone ID: MRT4577_108044C.1
aaaagttcatcctccactttcgcccgttgctgtagctgtaattgatcgactgataacgccctcaaaacgaccaattccttcccttataactgttgtttatttcccatcgttgttcaaaggccatggccatcatcaagccaaccgccagcactctcgtctcgccccttcgcacctctcatcacatctcacattgcgcccgatccgcctctgccttgcctctatgcgatcgattgcagccacgacgatacgccacggtaaacgagtccaacgaaaagaagtggtccgacgcaaaagcttcgtctggcgacaccatccccgaatggccgaaatcgccgcggcccacgccataccaggtcttgggcgtctccaaaagcgcaaagacctacgataagcgacacttctacgacctcgtcaagctctaccaccccgatacgcatgacagccaaggcaattcctcagcagcatcgccctcatcatcacacattagccaactcccccacgccactcgcctcgagcgataccacatgatcgtcgccgccaacgagctcctcagcaactcctccaagcggcgcatgtacgacgcctacggcctcggctggtcccacggcgacggcgtcacgacgctgcgcgacattgacagaaactggcgccaccagcagggcaccgccgcgaataatgccacgtgggaggactgggagcactggcgggacgctcaggcgggaaaggccggcgagcctgtcttcatgtcgcatggagcgtttgccactatagtcgtcatgttctgccttgttggggctattgcgcagacaaaccgcgccgaaaacagccacaccgtctacgctggatgggtggctgatcagaacaacaatgtcgggcgccggctgcagaggaacgaagtcatagtggcgggactcaacaaggatgagagggtcaaccacttcttgagagagcgggaaaacgtcaattaccagtttgtgcccgccaaattcgagtcgactgatccgtctagaccgtcataaactcttcgccttcgccggcaagaaggaggggcacgcccagtggccaatcctgtgtattactatagatgatgattttacgacaccttccctgcatctaatatgttatttctatataatgtactgatagttctatatatatacttgcataagaaaagtgacattacattaaatcgt

SEQ ID NO: 8825 - DNA, 692 bp, Zea mays
  Clone ID: MRT4577_108045C.1
gggtcgtcccacgcgtccgaatgttcatggttcctctgcaatataatctattacttctacaatattttgcaatggacttgtagcctggcttacctaacattcccttgccacgcataatttttgttctatctctatttgatcctgctgagcacacagatgttttattgctctgttttttcctattcatttcctgtttctgcttcattgcaacaacctttacctacgtggcttcatgatttttcaaggaggacaaactacggggaaaaccgggctatgagcacctgagtgatccgctgcatatcttgatagaggccgagttccctgccagtatcatcgatgcaaggctgagacaagcacaggagattatagaagaattgcttaaaccagtggtgagtgatttctgatttgtatgaattcaattactctgtatgcgcatcatcttcatatatctatatctgctagattattgtatgacaccccttcctgttgctcactggaacatgtttgtacctcaacttgggagatatttttgtacggctaggccttattctaagaaaacatcaatttaaatgtgggacagagagtttaaggtaaatgaaaatttgaatatcctgttgacttgacacatcattcatttgtgcctagataaaaaggaacgccttcgacttatctactactactacaaacacaaa

SEQ ID NO: 8826 - DNA, 143 bp, Zea mays
  Clone ID: MRT4577_108046C.1
ctgaattcggctcgagaactaaagtacgaattcttttccagcatagataaatacagcgtttgatacgaacactggtgctaatagcgcccatctctggctcgggttgcgctactaaatttctgtaggctatagccatacaatgt

SEQ ID NO: 8827 - DNA, 1028 bp, Zea mays
  Clone ID: MRT4577_108047C.1
ggcatggccgcgagcttatctctccacgtcactcccggctgcgggtccaagaagaagaagttcaagcaggcggggaagagcagagcagcagtgaccagtgagctgcttgtccaagaatcgctcccactcccggctgtcgggagagcgcaacccagctagccgcctccgcttcttggaggtcgatggccgcgaaggggttgagggaggtggggaggaggagggcagcggaggtcgggcggcgctgcttgtccggcgggagcgctgggccgccggcgccggcggcgaagcggaaggagggagggaaggcggtgaacctgttcacggccgtcaaccaggcgctccacatcgccctcgacaccgacccccgcgcctacgtcttcggagaggacgtcgggttcggcggcgtcttccgctgcacgacaggcctcgccgatcggttcggcaagagcagagtgttcaacacgccgttgtgtgagcagggtattgctggatttgccatcggcctagcagcgatgattgtcaatgaagcagctaagttcagatatcggagtggaaatgaatttaactgtggaggcttaacgattcgaactccctatggtgctgttgggcatggtggtcattaccattcacagtcaccagaggctttcttctgtcacgttcctggactcaagtggctgtatcgcttggctgttgaagaagttcccgaggaggattacatgctgccattatccgaggcagaagtgattagggaaggaagtgatataacacttgttggatggggagctcagcttgcggtgctgaaagaagcctgtgaagatgctgcaaaggttagccacgaggctccagtcaccgggggcttcggcgcggagatcgccgcgtccattgccgagcgctgcttccagaggttagaagcacccgtggcgagagtctgcggtctcgacacccctttccctctcgtgtacgagccattttacatgcccaccaagaacaaggtcctggacgcgataaaagccactgtagatttctga

SEQ ID NO: 8828 - DNA, 377 bp, Zea mays
  Clone ID: MRT4577_108048C.1
ctgtccactacttctcccacaacaaccttttgcatctggacgcccgcatctctcgtctgggcagggatgcattctaagatgtgctggcaatccctcgttcacctcctcaagtatgacaactcctacagactacggcactcctgaaaccgtgaagtttggacgcatttgccgaccactcctgaactctgaccgaccaatcttctactcgctttgccaatgctgcttcatggaatgtcccaaatggtgcggcatgtaccgcaacagctggaggaccaccgcccaacataactacacatggtcaaccatgctggacaacatctacctgaactactcctacgcccggtacgccaaaccccgctgctggaacgaccctgaca

SEQ ID NO: 8829 - DNA, 1606 bp, Zea mays
  Clone ID: MRT4577_108049C.1
cttttgtgggagggcttatctctccacgtcactcccggctgcgagtccaagaagaaggcatggcagcaggcttatctgtgcagggcaccagtggctgcgggtctgattagaagaagaggtacaagcaggcagggcagagcagagcagcagtgaccagtgagctgcttgtccaagaatcgctcccactcccggctgtcgggagagcgcagcccagctagccgcctccgcttcttggaggtcgatggccgcgaaggggttgagggaggtggggaggaggagggcggcggaggtcgggcggcgctgcttgtctggcgggagcgctgggccgccggcgccggcggcgaagcggaaggagggagggaaggcggtgaacctgttcacggccgtcaaccaggcgctccacatcgccctcgacaccgacccccgcgcctacgtcttcggagaggacgtcgggttcggcggcgtcttccgctgcacgacaggcctcgccgatcggttcggcaagagcagagtgttcaacacgccgctgtgtgagcagggtattgctggatttgccatcggcctagcagcgatgggcaatcgagctatcgcagaaatccagtttgcggactacatctttccagcctttgatcagattgtcaatgaagcagctaagttcagatatcggagtggaaatgaatttaactgtggaggcttaacgattcgaactccctatggtgctgttgggcatggtggtcattaccattcacagtcaccagaggctttcttctgtcacgttcctggactcaaggttgtcataccacggagtccacgcgaggctaaggggttgctgttggccagcatccgagatccaaacccagttgtattttttgagccaaagtggctgtatcgcttggctgttgaagaagttcctgaggaggattacatgctgccgttatccgaggcagaagtgattagggaaggaagtgatataacgcttgttggatggggagctcagcttgcggtgctgaaagaagcctgtgaagatgctgcaaaggatggggtgtcttgcgagctcatcgatctgaaaacactcgtaccatgggacaaggaaacggtagaggcctcggtgaagaagaccgggaagctcctcgtatgcagctcgtctcgctcgttagccacgaggctccagtcaccgggggcttcggcgcggagatcgccgcgtccattgccgagcgctgcttccagaggttagaagcacccgtggcgagagtctgcggtctcgacacccctttccctctcgtgtacgagccattttacatgcccaccaagaacaaggtcctggacgcgataaaagccactgtagatttctgaaacatgttgcttgatcgatacagagtactctagttagatgtgcacggtttgtgctggtctgggtctgtagcctgaggatgagcgatccacaaaccggcttatttgtattcaacaatacagcgataaataaagccgcaaggtgcaaaattgtaggatatcatgatgtatcgaagtgttccccgcgaaattcatacgtatgtaattatcacactaatcagtggtatgttatgtctgagcttgaagtcttgatgcc

SEQ ID NO: 8830 - DNA, 217 bp, Zea mays
  Clone ID: MRT4577_10804C.1
attcttataatttttgggggattggtgtttttttttttttttttaaaaaataatctaagagaaaaacccaaaatattagccaaattttccttgtaatacccccaccaacacaaaaaatggggcgttggaaaaacactgatttgcgctacacacttagaaaaatattaatttggaaaccgtaaacttcttaaaactttatgtccagtggaacccaatt

SEQ ID NO: 8831 - DNA, 579 bp, Zea mays
  Clone ID: MRT4577_108050C.1
ttttttttttttttttcccgatgaaaagagcgattatacgaagaagctaaatatgtacaatcttccaagaatggcccccaatctttccaccagaaaatcaccttccgagcagcgttccaccaaccctccgttgataattgttcttgcagaaacagggaaaaaactccgttatcttaagcaaagttgccgctggctgggtattcggtactaggcttagccccgacgttcttgacgatgatggtgctgccggtggagctggtgattctaacatccacggtatcaacctggaaaccgctggggttctcgaagaagttgtagtcacgtcgggtcgttccggtccaggtctttccgctgttggtgctaacttcgaggcttttgacggggaggttgctattgcggacttgcatgctgaaccagtaagcgctggtgccttctttgttacgtaggaccaagggcgtagtgatatcgcaagaaatcagtctccagctggtctgaacaaggccgtctgtaccgccaacggcagtaaaggcattttcaaagagatccaagtggcccttgttgcactcgttgcacttgtcg

SEQ ID NO: 8832 - DNA, 176 bp, Zea mays
  Clone ID: MRT4577_108051C.1
ggctaatattaacatgcttcgcagggtcgagccatatgttgcatatgagtaagttctcttagctaatttagttcatgtcttgctgcttaataggatgttccactgaaaatacagttgaaaacagattatgctgttgtacttgttgcttgattgaatttatggatttttccttgttt

SEQ ID NO: 8833 - DNA, 132 bp, Zea mays
  Clone ID: MRT4577_108052C.1
tatagtgaatcgtattacaagttggctcgccggcgctgatccttgggcgtgactctggccgcgttacaggagcttcactcggtccctcactgccgcgccggtcgaggcagcgcgcgtcgagggcgcaggggg

SEQ ID NO: 8834 - DNA, 470 bp, Zea mays
  Clone ID: MRT4577_108053C.1
caggcaatcgtcgcccttgtgcagctttgctccatggtgcttgtttctttgtgcgcgtacaccggataggatgggacattgctcgccctccccaagctcggtagttccatggaatgaacaaccaattagttaaagcaatgtcaagtcttattttcacacaaaagtgcaagatgttgattgtacatcatcaatgtgccatttgcttggaagactacatcagaaacgtcatatattttggaacagaggtagtagtcaataattagcttattcgttttttatatggttgtatatatcctagcaagagaccactctgtagtcatttccttagtttcttgagagctgggaccacacttatagtgaagaaaactatgttcaactaacagaattaacttggatgcacctttgcacaatcatatctgtacaagttttggcggcaaaaaaaaaaaaaaaaaaaaaaaaaaaaaaaaaaa

SEQ ID NO: 8835 - DNA, 545 bp, Zea mays
  unsure (1)..(545): unsure at all n locations
  Clone ID: MRT4577_108054C.1
cccacgcgtccgcgggcgcgtgggtacgcgccgcgcgtgcccaccctctgtcctcgccgccatgtcctcttcctgccggcgctcctccagggagcttcctagctcacccaggtcgccgccgttcgcctccagctcgcgacgccccctgcttttctctctctcccacacggccgcgccttgccaagatccgtgctgagctcccatcgccgcgcgcccccttctcctccatagccgtgcgagctgagctccctgctcgcgcccgtcgccctgcctgctcgagcgcgcgcccggccccagctccaaccttcctcccatggctctcgggcttctccaggtccgaccggagcttcctctatgcggcgctcctgctctccggcttgcccctctgcgcgccccatctcccaggtgctggccgcgagctcctcgtccggcccggccaccgacctgtctgtgctcgtcctggtctcggacgccaccgcgcctgaacctngccatgaccctggttgtgtctgtccgctgctccagctcggtggcggtcaatgccc

SEQ ID NO: 8836 - DNA, 136 bp, Zea mays
  Clone ID: MRT4577_108055C.1
gccacgcgaacgccggttgattgcacacaccgacccccgaaaacaggcctgggagaataaccaggatcacaagaatgggacccgcacacacgaggttgaaacttccacacccgatacgcgctgtcccgaggggccg

SEQ ID NO: 8837 - DNA, 470 bp, Zea mays
  unsure (1)..(470): unsure at all n locations
  Clone ID: MRT4577_108056C.1
ccggccgggatctcctgccggtgaccggccgctctcctttgtcccgtgagggcattcccacccctaaccctgtcccttgtttcctctcttgcactcttcgttctaacgcttcactggatacgcaaaattagggtctgcaagcggcggatgagcacgctggcgcatcccaggggctgcacggtaccagttccggctggtctcttacaacatcttggcccaggtttatgttaagagtacgctttttcctcattccccatctgcgtgcctcaagtggaaatctcgatcgggagctattcttacagaactaaagagctttgatgctgacttcatgtgcatacaggagttggatgaatatgataccttctataagaaaaacatggaaaactctggatattcaagtatttacattcagcgatctggagacaaacgangatggctgtggtatanttctatanaacctaaaagtgcag

SEQ ID NO: 8838 - DNA, 1763 bp, Zea mays
  unsure (1)..(1763): unsure at all n locations
  Clone ID: MRT4577_108057C.1
tagggtgtacttatacaatagtcagtgtacatgcaaaataaagaatacaaaaatattctctaacatcctgttcgtggagtcgtctcggcggcggcggaacaagccgggaacctaccgcaaagggcgccaccgatgctaaagccacagacgtcgtggacagcttccctccctctccttctcatccgccgctgctcgagaaccgcggccagtccatctcctgccggtgaccggccgctctcctttgtcccggtctgcaagcggcggatgagcacgctggcgcatcccaggtttgcccctctccctacggagcaaactgaatcccaaacagatggcggggctgcacggtaccagttccggctggtctcttacaacatcttggcccaggtttatgttaagagtacgctttttcctcattccccatctgcgtgcctcaagtggaaatctcgatcgggagctattcttacagaactaaagagctttgatgctgacttcatgtgcatacaggagttggatgaatatgataccttctataagaaaaacatggaaaactctggatattcaagtatttacattcagcgatctggagacaaacgagatggctgtggtatattctataaacctaaaagtgcagaactggtgcagaaagaagtaatactgtacaatgatttagtagaaaaatatgttcctagtgataatgtaaatagtgctctggaaaataattcttcagcagaagaagacaagaatgcaaagccagataatagcaagcgtggagatccaaatgatccacgcgttagattgaagcgggactgtgttggtttactcgcggctttcaagcttagtgatccttgtgatcaaattttgattgtggcaaacacacatatttattgggacccacaatggatcgatgtaaagttggctcaggcaaaatatcttctttcgagagtatctcagtttgagcaactcatctcaaataaatataattgtaaaccttcagtgatcattgctggtgacttcaattcgacacctggtgacaaggtatacaattaccttttatctgccaacctaggatctacggacgaagctccaatcaagttacgcagcctttatgctgcgaatggaggggagccagagtacacaaactacactcctggttttaccggaacactggactacatattcttgtcggatggtagttcgataaaacctactagcctacttcgtttgccgcgaggggattctgaggatgtgaaaggaggcttgcccaactttcgacatcctagcgatcatctcccaattggtgctgattttctggtagtcaacatctagtgcaggtgttgattgctttttcaacagaaatagtaaatgccgttgaataatttgtgttgttggctcaagtttcagagtttaaatgtaatatctcaaggaacaagcgtttcttttcttgtagagcaattaacaatgcgaattttattcatcaattttaatataataggagtattgtctatgggcnnnnnnnnnnnnnnnnnnnnnnnnnnnnnnnnnnnnnnnnnnnnnnnnnnnnnnnnnnnnnnnnnnnnnnntttnnnnnaaaannnnntcgtnnnnnnnnnnnnaaagggcgcnnnnnnnnnnnngcctggaggggnnnnncccggggtttacccaattaaannnnnttggnnnnnnnnnnnntttnnnnnnnnnnnnnnnnnnnnnnnnnnnnnnnnnnnnnnnnnnnnnnnnnnnnttgccacacccgaagg

SEQ ID NO: 8839 - DNA, 127 bp, Zea mays
  Clone ID: MRT4577_108058C.1
gttatagatcgcgacagtcgtccgttgactctttttatcataaattagataaggtacacgaggttgactaattacttttgaataacttcacaaatcatatggaagaaccatagcatttcgcgattca

SEQ ID NO: 8840 - DNA, 365 bp, Zea mays
  Clone ID: MRT4577_108059C.1
aaaggaacattcaataatttcactgactgggttgagaattttttgcacataggatgttaacatttgatgctaccaacctttagtccaaacgtgatacaagttatacattttttaaaaaggacaatttagtttgggtttacacaaacttaactttgagaccaatactgggtcaaaatccatgaaaactttcatgtgaaccatacaagtggaatgcttagattccaaaacaaattaataaggttcaagagccgtgggaaatgaaaagagatacctcaatttgttttttttttaaaaacgttggctttttccgttcaactaatgcccttacagcactagcgggttaaataacttccattgggaaaagg

SEQ ID NO: 8841 - DNA, 179 bp, Zea mays
  Clone ID: MRT4577_10805C.1
tctttcttctcctcctcctcctccccagaaagggccgcacttacaccaatcgtggtcggggcccaaactcccgaaatcccggcccgctttcacgaccgatcgccccgagccttggtccttcccggcctctgattctcggccccctttcccgtgcttcctgcgaaaaatactctacctca

SEQ ID NO: 8842 - DNA, 362 bp, Zea mays
  Clone ID: MRT4577_108060C.1
aaacaaagacaaacaggataaccaagcagcccatgagcgcattgaggggcctggtccgaccaacataaacaggggaacagggccacccatttaataaaaaaaaaccagggatatgcctgggaaagcagccaaaaaaggggggcctatcagggggggggagggacccaggggggcaaaattacatagctaaaagaaaaaagggaaacggacatagggccggggggctacatttaatttaattttgagaaaggcgaagctgcaatgggggccggggctggctcactgggggccagggggggtcctgatgatgcccgagccaccgggggcgatgatactggggcagcccaccctggagtactggc

SEQ ID NO: 8843 - DNA, 301 bp, Zea mays
  Clone ID: MRT4577_108061C.1
agttctagatcgcgagcagccgccctttttttttttttttttttttgacccatgaagaaattaaaggggttttaaacaacataatacatttaacttgtgtgttatcaagtcttttttgctcgtcacaaaagtacgtaagtgaagcatgatacgtacggtgtgatttaacttgtaacactaccatagctagagctgctcaattaatacatactctacataatgcgcatgcaatgcacaacgtgattgacagcttgctccttggattacagaatcagaaaacgagagatggattggctaagag

SEQ ID NO: 8844 - DNA, 581 bp, Zea mays
  Clone ID: MRT4577_108062C.1
cgcttttaacttttggttttttggcataccgccacatgaccgttccaggagccaaagatgctgctcgcaaaaaaaaaaaaaaaaaaaaaaaaaaaaaaaaaaaaaaatgcaacaggacaaaggggaacagatggaccgctgcttcagcggcatcgatcggacgggaaggcgtgactgcgtgagtgaggagccgggtggagagagagagagatagacattagaccgggccgcagcccgcagtgcacatggctggccgcttttaacttttggttttttggcatcaccgccacatgaccgttccaggagccaaagatgctgctcgcaaaaaaaaaaaaaaaaaaaaaaaaaaaaaaaaaaaaaaaaattgccccaggacaaaggggagcaaatggaccgttgttttagcggaattaatcggacggaaaggcgtgactgcttaagtgaggacccggttggaaagaaaaagaaatagacattaaaccgggccgcaccccgcagggcacatgggtggccgcttttaacttttggttttttggcataaccgccacatgaccgttccaggagccaaagatgctgctcgc

SEQ ID NO: 8845 - DNA, 397 bp, Zea mays
  Clone ID: MRT4577_108063C.1
ttttgcctggggtttaaaattggggtggaaaaattagttttaaaatccgacttcatttaaaacccgggacgggggttaaaaaattttatatggcaggggctaaattttagattggggtagaccaaacacccccttatttatttgaaagagaacccgggatatgggtataaaaatatgattttgccttttccaaaaaaccaaaggcctaaaacctggttttgggaaaacattcgggcatccctttgcaacgcgtgggacagatcacaatgtcacgttccctttctgctaaagactcccagatagaacattttcctggataagtagatagcgcgtagtaaaaaaccccctggggatgggttcataaaaagggggcctacactttttgtaagtttttttg

SEQ ID NO: 8846 - DNA, 231 bp, Zea mays
  unsure (1)..(231): unsure at all n locations
  Clone ID: MRT4577_108064C.1
acgcagttcctatcaacattcaccataaactcttcatccatactactcccacctactaacagtgtcatttacaagacatatggctctcaaaatantccacacctcacacaatcacaaataatctccattatcccctcactacaaaacctcccttacctccactctattattactatgctataaacaacctttacaattgctaactcgccaactcaactctaacaacccctt

SEQ ID NO: 8847 - DNA, 189 bp, Zea mays
  unsure (1)..(189): unsure at all n locations
  Clone ID: MRT4577_108065C.1
ttgaactaaaacccaancccgcatgattcacatgtgttcggagccaaaaagctatacattctnctcaatagatccaaggtttgatccctgagaacccacggttcgagtttttttttcttttccccgaacgccgaaaagcaaaacggcagactacctttaaccctctaaaaaagaagaaaaaattactac

SEQ ID NO: 8848 - DNA, 386 bp, Zea mays
  unsure (1)..(386): unsure at all n locations
  Clone ID: MRT4577_108066C.1
ggccgccgtgtggtggntatctgttgaaatcgccctttgcggcggccgggcgggggggcgctccttcttttttttttttgttgtgtccttgtttttcctcttcctcttgttggtgtgctccttgtggtcttttccggttgggttgttgttctggcttcgcggtcgtctcgttttttccgcccctctgggtgtgtgggcgtgggcggggcgtgtctcaggggtcctcggtggtgcggtccttgttcgtcgcgcgcgggctctctgtggcctgcgtgttgctcttgtgtatctgcccgctctcttttttntttctttttttccgtcgtgggtgttcctgctgactttgtccctcctcttgcgttgggggccgcttttttctcgctggt

SEQ ID NO: 8849 - DNA, 394 bp, Zea mays
  Clone ID: MRT4577_108067C.1
aaaagggccaacaaaaccaaattaggggaccaaaacatttttttttttttttgcaaaaacaaaagaacaaaagaacttcttcttttgctcatcataagagttttattagcttcgacaacaaaaaagtagccagttcgacaggaaggatcccacattcccccaacagttttgtccttaaatagtgaaccgctgcaaccaggaactgatgcaaagcaacccaaggttcccactgggacaaaacatgcattaatcccccattggcccaaaaagcttttacgggaatgggaaccacccaccaattttttggttttgggacggggggttgttggccacccacagcatcgaaatggggattgagaggaggcccccccaaacaaaaacaatgggggggggg

SEQ ID NO: 8850 - DNA, 211 bp, Zea mays
  Clone ID: MRT4577_108068C.1
gggagaagctaaaatcaggtcggagtattaaaaagcgaaactgtaaaatatggacatatagtgggaggcacaagtgttaatgatgcacagcttggatcggggcctacagacccaacggtaaattagatacgaactactgctcgtgattcactagattgactcgtctatgagatggaaggggggaacatccttactgggttttggacaaaaa

SEQ ID NO: 8851 - DNA, 1469 bp, Zea mays
  Clone ID: MRT4577_108069C.1
ggcaagggacctgatgaacctggctaggttgaccatcgatgagttctccgagatcccagcgagtgcgaaagacgaggtggttcaagatctcgtcgacggcctggagtcgatcttccaggagtacatcttctttgtggcgtcttgcggttcgaaacagaactacctccctccgctgccgccgctgacgaggtgcaaccaagactcgggcttcttccgactgtggaagaaggcggcgctgccgacgtgccaggcgccgccggatgccaccccgcgcggcggccgcggttcgcaccacgtcccgcggccgtccatcagccggggcacgcagcggctctacgtccgcctcaacacgctccactacgtgctgacccacctggaggccctcgacagctcgctgtcgtcctcgacctctcacctggaccgtgcacgcgccgcggcgcagtcgtcgatctccgccgtcgccgaggtcgccgcgcaccgcctcatcttcctggactcgcgccactccttgtaccagggcctgtacgcccgcagcgtggcggacgcccgcatccgccccgcgctccgcctgctgaagcagaacctgtcgttcctggtgtccgtgctcgcggaccgcgcgcagcccgtggcggtgcgggaggtgatgcgcgcctccttcgaggcgttcctgatggtgctcctggcgggcggcaacgagcggagcttcgtgcgcgccgaccacgccacggtggaggaggacttccggagcctgaggcgcgccttctccacgtgcggggaagggctggtccccgaggacgtggtggcgcgggaggcagagacggccgaggccgtcgtggagctcatggcacgctccacggactacctcatcgacgcgttcagcgtcgccacgtgcgactccatcagcgaggacggccgcgccggcgcaggcgggtgcacgccgctgccgcccacgacgcggaggtgggaccccgccgacccgaacaccatcctccgggtgctgtgccaccgcgacgacgaggccgccaaccagttcttgaagcgcacgttccagctggccaggaggcggtgaggccacggccatagcttgacttgaaggagcacgaaagatccttacgcgtcccgcgccccgcggcccgattgatgaaatgatgtgcgtggtgtttcgcatttttctcgctgaaaattgctcgcaagctgtgtcgctcgctcgcattacaggggagagaaagggaaaggggaagaaattctatatatctcgaatacaaatgacctcttttatagttcatcacatccaccacttggatgaccataaaaacaaaaacagatcaaaatttataacttaattatttagtaatttgttttttctatttatatagaccgggtggatgtgagaggtataaaagagtttctttgcatttcggatgtaaacaattttttttctgaaagggaaggcaggcacaatgagagga

SEQ ID NO: 8852 - DNA, 481 bp, Zea mays
  Clone ID: MRT4577_10806C.1
aaaaaaaaaaaaaaaaaaaaaaaaaaaaaaaaaaaaaaaaaaaaaaaaaaaaaacaaaaaaaaaaaaaacaaaggaaaaaagggaaaataacaaaaaaaataacttagcttgggggggccctttttaggggagcttccttcccgtccccggcgatccaaaggtaagacttttgcgttgggctagctaaattcaattttctggccgtgcttccccaattcgggggcgggtattcccctggcccggcccaacttattcgctttggcgcccctccccttttctccggtgggccttctgaagatgagcccgctgcagtcctcctttcccactcggggcctacgcggtttctggcaaggccccccccttgtggcggcgattcagccgggcgggggggggggtttccccccatcgggggcgctttgttttccttcccccaaccccccgtaccttggggtttttgcctttccttgccccccccggggg

SEQ ID NO: 8853 - DNA, 231 bp, Zea mays
  Clone ID: MRT4577_108070C.1
acgtccacgcgtgcgcgcaagtacaaccaggacatagattatctgccgcaaatgctattcacgagggcggcctaattctgtcagctgccgcaagaagaaatgtggtcacagcaaccagctgagggccaagaagaatatcaagatctgaagtgctgatcctagtcactttcatggacaatgttacgctttattgctgtgtggtttatgaacagggtttggttacccaacatt

SEQ ID NO: 8854 - DNA, 281 bp, Zea mays
  Clone ID: MRT4577_108071C.1
ctcgtgtgtctgggagcctagccgcctatctcacgatccactcgagcaccaagccgagggaaggtgaggagcgatggcgcgcggatgctggtgtcggcgaagggcggtgcggtaacaaccgacaagagatctgcgaatacctcttccatgagggggtcttgtacgcgaagaaggactacatgctggccaagtaccccaagcttgatgtgcccaacttgtaggtgatcaccctcatgcagagcttcaagttcaacgagtgtgggagcttatctctctcatgg

SEQ ID NO: 8855 - DNA, 460 bp, Zea mays
  Clone ID: MRT4577_108072C.1
tccggccacacgaacggtagaaatcatcaaacatgcgtatatatatatatccggccgatactcctctctagctggaccggatgtatgtggtgtggtcctcggttcattccactccaacgacgatcagcgacgcgaataaatgtgattactctgctctgcacatgaatggattgggatgtaacctgatcaacttctttttacctgattggatgcatcattcaaagctcaaaaagaaaaacagcaacacaagaaaaaagaaacaaaaaaaaaagaaagaaaaaattaaaacaatccgatggggggccctacaataggagccaacctaccataccgggggacgcgacgacaaacttcttttatagggttacctaaaataaaagcacgggccgaacaaatacaaccctctaactgggaaaaccatgtcgaaacccaacttaaacgccttgtaccaaaatcccct

SEQ ID NO: 8856 - DNA, 395 bp, Zea mays
  Clone ID: MRT4577_108073C.1
attctgctcgagaaatgaaccaaccactcttttctttcaccgatcatacatacaatgtggacttacagagacgaggatccccgtcttcatgacatcaaaactaagattcgcgttgtgcctaattttcccaaacctggaattgaagctcggggtttcatttttgggtctcccattgctctggcaataagagcaaagtttgtaccattgaggaaaccacaaaaaattgcctggcaaagttatttctcaagagtatattctggaatatggaagagactgtcttgagatgcatgttggagccgttgaacctggtgagcgtgctttagtgggtgatgatttgattgccactggtggaactctctgtgcagacatggacttactatagcgagtgggagcac

SEQ ID NO: 8857 - DNA, 259 bp, Zea mays
  Clone ID: MRT4577_108074C.1
gggtttcccgaacttccccgccatttacaaattttacagcaacggaatccccttgccggcggagaccggtttagaggccatggggaaccttcttcccccccatggtaaagctgtgggaggacacaaccgaccacgtcctccgttttaaggggccgaaaataataaaaaggaaccgttctttttggttaaaggtcaaggagtttttaaggcaaactatctctgggttaaaccctttgtgaatccatattttatctgtttt

SEQ ID NO: 8858 - DNA, 309 bp, Zea mays
  Clone ID: MRT4577_108075C.1
ggtgtatacggtaaatttgctgggggaagcctacaaccgttttacctttcacaatacatacacttatactacttgagcactccaccaagagcaaatgagcaaacgtcaagcccctaacatatcaaccgggggcatatctagggggaagggctagggatccctgtatacaccaactgcagcgactgcaagtaagaggggacgggcctatggctgatatgcactcaaaaaattacattaatcacctccactcactgaggtcgatcgagcagattaggaaacgcttcacacccaggaaaaggttacaggttt

SEQ ID NO: 8859 - DNA, 641 bp, Zea mays
  Clone ID: MRT4577_108076C.1
gtggatatagacctccacttcgtccgcgagcgtgtcgccgtcggcaatgtatgtgtcctcgtaccgaccacctcgcagttcgctgacatcttcaccaagggggctctgctctacggtgttctcggagtttcggtccagtctcaacatctataatgcctagagttgagactagggggagacatgtgtgtcttaaccgtaatgggcttaggcccaaccaatatactatttcatctattaatatagcagcacaaccctagttagggttagagtttttattttcccaacaataatgacgaacatcttttaacataattaaaacagttaaaacttgacaacaatacttttgagagaatccataaacagtaaaattggtaacagtagattgaccaaaacctgtgacgttttcagttactttctgtacagatgctcatttacaggtatgctacaaaattataatcaatcgcaagggatttgggctggtgcataatctatctacaaactgagagtgttgaggagagagtctctgctctggatcaatttcctgaacaaagtctcgactctgctcccaagatatacaatggccaactgtctcttgcaatttctccttgcaaacaacttttcttttcttaattgccttggag

SEQ ID NO: 8860 - DNA, 196 bp, Zea mays
  Clone ID: MRT4577_108077C.1
caaaaattatacacttgctggccagctctcaccgtgtcatcatcatcctcgtcttcagtgtctgagtaggtccaccattgttgccctctgccatttataattacgttcccttgcataaccattccatatagtttggtgaactcgagccactggagcaagcctgaaccccaggatttagcactggttggagctagga

SEQ ID NO: 8861 - DNA, 686 bp, Zea mays
  unsure (1)..(686): unsure at all n locations
  Clone ID: MRT4577_108078C.1
gggtacctcgaggccggccgggtgtgtgtttcctttgaaggataaaaatggtgttcgtgttgtgcnnnnnanaaaaaaaaaaaaaaaaaaaaaaaaaaaaaaaaaaaaaaaaaaaaaaaaaaaaaaaaaaaaaaaaaaaaaaaaacttccccgcccgccgcccgtcaccggggtttcgtcggggtttgtccctcccgttccaaggagaacgggtttctcgccgggccgttcgcccgccgccgccgccacgggttaatcgccagttatgttttctcaggtcaacagccgaagccagtccgccggaaagggcgggcgcaccgacggaagccggggggaggacaactggttttgccccagttgaaaaaacgttaatttcgcctttcgcaccatttgaaacatgggaaattgcaaccagtccaggccagaaaatcacacggccatgaaaaccccgcctcgttatcccacatcaggaggttacatgagcccagggacgccaccgccaatgaaccttggggggggggctcccccatatggctcttcaaggttaaacgggcctgcaatgacgcgctatggaatcacacagtctcccggggggttctgcgaatccatatggaatatgggggccgaatatcaagggggagcccctacgggccaaggcaaagggttgggccaccgcatactctggg

SEQ ID NO: 8862 - DNA, 316 bp, Zea mays
  Clone ID: MRT4577_108079C.1
atgccccgtcgtaagctcggaattcggctcgaggcggaggaagcgcttttttacatttgggcatgccaccaacgctggggggggtttttaaaattttggggggtgaacatccctatgtggtggtccaacttcacctaaagccacttggccctctcctacaccaaccggggtggggagactaacatccaggatgacatgcttggcctgaccgagcagacactatatgatgggacaactgtggttgaagtgaatgctggttacaggatcagcatcatggactacgggataaacttagagcatgtcgtattttgtcact

SEQ ID NO: 8863 - DNA, 535 bp, Zea mays
  Clone ID: MRT4577_10807C.1
gcagataactgacaccttactacattgtctgaacaccatatcgactcacaacaacaaggagaccagggtgacaaactccaagaaggtcgtcaaggtacactaaaagacccaggagaaggactagaagaaggaagaggaggagatgaagactgagacgacctaggactcaaagaaggttgttactctcacctaggaggtaaagacccagaaggtctagtcaaccactacgcagatgaccgttacgaccaacgtgcactccaagacgctaaaagaggaggactaggagaccttcctttttctggagaacagtaaggaggtagagacaactgtcgcgctgcgcgtgacggagtgaaagaaggacgaagttgacatgctgaaggtcttagttgactagacgacaacagaggttgttctgttgcgagactcctagattatcgaggttgaagtggagtatctgaagatgttcgtaacctaggtcttggaggttctccctaagatgccccaggtggtgctgaagaaggtggagactaccgag

SEQ ID NO: 8864 - DNA, 255 bp, Zea mays
  Clone ID: MRT4577_108080C.1
gtgcacattcgcttcaagctcttcgccttatctccagcagcagcagcagttccagggttctctcaattagcagggtcttatgaacgcccccctccaatgctatgttgtcaggtcactaccaagcttgtctactaaaccagcatcaagttcatcttgcgagctttggcgtttggggttctgttactgttactgttaggttcaggtgaagccttctttttttcctctacccttcatgatggatcatggatgcacaat

SEQ ID NO: 8865 - DNA, 406 bp, Zea mays
  Clone ID: MRT4577_108081C.1
ggacaaaaaacaaagcccctttattccttgcattattaaatcttggccccggccccgttagaaaaacccaagttttacaggggggggattatcaggaaccattcctgggaacaaggaaaagcttttccttccggggaaggggcaccccaaaggacttgtccagggccccccctggtggaaagcccggacccccccaataaaaaggggccatgaaatgggcccccatgatccccaggggcggaaacccaaagttcatcccggggcaaatcccccggccggggccaaacgggaaaaacctggggcccttgcccttaatggggacgtccacggggcccggtttctgaaaaaaccgctccggaaagaacccccccggtttttcccacggggggggggccctcccgagccc

SEQ ID NO: 8866 - DNA, 413 bp, Zea mays
  Clone ID: MRT4577_108082C.1
gttcatagtgactgtttgtgtgtgacgggtgatcacacgcgttgacgtatcccaggaggtcacaggcacaggacgaccaccgacgctcacgccggaactgcgggggagggaagaacaaccgtcaaaaaagctaagggctcaaaagccaaaaagaggggaagacaaaggcggaacggagggggggatctcgctaggcaaaggtaggcagactagtttttgggttatatgggcacgccccttatggccgggacgtaagcaagagccagctttagaggggatgacacctgtcaaggagaccgcgcacgcgttcccttccgggcaggaggacccggctaatgggctggcctggcggtggctgtctaggcggaggttaaggggaggttgagagggcgcccagggagcttgggggaaga

SEQ ID NO: 8867 - DNA, 364 bp, Zea mays
  Clone ID: MRT4577_108083C.1
aaaccaacaacccagtttatttgatgacttggaagaacatgaacattgaaagggtgaaaggggggagaaaaagaagtgctgagacgagggggggttttaacaacgatgggtgatgatgcggggatgattggtgggggggggggctcaattaccaatttccataatggggttacaatgggggtgcaagggccgggggcttttaggggggtgggcatgggacatgggacaccaataaaggtggggtttattcccggcttgggcatgggacccaccgaccgggacctatggctccgcatttcttttttttttctgggagggggtggggaaaaaagggggccgaaaatgaatttttgggggggggggg

SEQ ID NO: 8868 - DNA, 385 bp, Zea mays
  Clone ID: MRT4577_108084C.1
gccggccgggctgcgattccatgtgcaggcatggtagggggtgatagcatgcgtctaccaaagctagtcgagggcgccctgggcgaagtgatccaccgaaggaacggaaatctctcggtggagatgcgctgcgccgtaggtctgcttcctccatggtcggacttcaccgccatcatcatgccctcggtggtcagctgatggcgttcgccagtgtgtgtggatgctccccatggctttcatgattgcctcgttctgtacttcgtatagcaccgatcgatggggagtttaggctatccgcaaccgtacccctaaattttccccctatattacttttcctctctattttttcccctatttttaaaaaaaaaaaaaaaaaaggtcccta

SEQ ID NO: 8869 - DNA, 367 bp, Zea mays
  unsure (1)..(367): unsure at all n locations
  Clone ID: MRT4577_108085C.1
aaataaaaatttntatattaaaaaaaaaaaaaaaaaaaaaaaaaaaaaaaaaaaaaaaaaaggaggttgaaaaaaaaaaaaggggggataaaaaaaaaaaataaaaaaattataaaaggccgccctttttaaaaaatccaaatttacttccccttccttccaaattaatattttttttatagtcccacttaaattaaattcattggccgtcttttaaaaacgtctgaactgaaaaaaccctggctttcccaaattaaatccctttcaacaaaatccccttttccccagttggcttaataacaaaaaggccccaaccaatcgcccttccaaacatttgcccaacttaattggcaaatggaacccccct

SEQ ID NO: 8870 - DNA, 368 bp, Zea mays
  Clone ID: MRT4577_108086C.1
agaaaaaaaaacaaaagaacttgtctgttcgttccaattcctaaccaaactttacattagtcccacaggtgcatgtttcctaccactgatgcggttaaaaattctcctcacgcatcagccgccaaattgacttaaaaacagctcatgcgatcatgcccctaacttaccatctacttttggaatactatcttatgtgggtagacccacataacacacccacaaaccggtgtgtttccttcataaaaatagacacaggttatactacctgctccatcatgatgttgccagcactatccttcaaaggggccatgttgttagaagacttccgagagtgctcttgctagtacatgctaaggcccaccttgtgc

SEQ ID NO: 8871 - DNA, 1032 bp, Zea mays
  Clone ID: MRT4577_108087C.1
cctcgaggcggcgggaggagagtgaaccgacctttctcccctcccccgcgttccacttcgcggagatctagcccttgggtttcgccagcggcgaggcctaagtcatcggcggcgagccaaactccactagcggaggaagaggggggaagctgagacgaggaggcagctatggggcagcagtcgctgatctatgcgttcgtggcacgtgacacggtcgttctggcctcatgaagctccccgcaagcaacaacaagttcacctacaactgcgacggccacaccttcaactacctcgtggaagacggattcacatactgtgttgttgctgttgaatcaatggggcaacaaattcccattgctttcatggatagggttaaggaggatttcacaaaaaggtatggtggcgagaaagctgctactgctgcggctaacagcctcaaccgagagttcagattaaaacttaaagaacacatgcagtattgtgtggatcaccctgaagaggttagcaagccggccggggtgaaggcacaggtttctgaagtcaagggtgttatgatggaaaacattgaaaaggtccttgatcgtggagagaagatcgagctgcttgttgacaagactgagaatctgcgctcacaggcacaagatttcagacagcaaggaacaaatgtgaggagaaagatgtggttgcagaacatgaaaatcaagctcatcgtcctgggaataatcatcgcacttattctgatcattatcctctctgtctgccatggtttcaaatgccattaagcacagccagaacactggtacattcaactgcgccctattatactgctgcttggaggcacaacaaaaaaaagtactatttttctgttcttttgctagtgtgctcttggccgggtcattgtgcacaggtgttttacattgtcctagtaattgatacatgttggatggtgaatagattagttgtcagccatccaattggtacacgctatgtatgtatagcctggatatgagtaaatttactgaatttctccgg

SEQ ID NO: 8872 - DNA, 1651 bp, Zea mays
  Clone ID: MRT4577_108088C.1
cccactcgtgcgcttacacagactgtgagtacatcacggagatcgcggttgcctgttgcaaggcatgatcataatcatgacatcatattgagatgcatcaaataaaatctaggatatgcgtctggcaaaccagttgcagcatgtatcatttacaaatgtcttttgcactggcgtgcttttgaatcagagcgaactgctatttttgatcacgtgattgaggccataaatgatgtcctaaaggggaacgaagctgatggtagattaccttattggttgtccaatacctctgcattgctatgccttctccaaagaaatctgcggtcaaatggattattcactaccccgtctcgtcgttctggtggagctctagggaagatagcacaaacattgaggtctccttcaaagtttataggccgcagtgatactctaccacatgttgatgcacggtatccagccatactattcaaacagcagcttactgcatgtgtcgaaaagatatttgggcagctcagagataatctaaaaaaggaaatatcacctcttcttaatgtttgcattcaggctccaaagtcaacacgtgggcaatctggaaaagcatccaagtcatctggagttggtgcccacccagcatcgaactccaactgggacaatatcgtcaatttccttgacttacttatggatacattgcgcgaaaattatgtgccatccttctttatacgtaaacttatcacacaattattctccttcatcaatatacagttgtttaacagtcttcttctccgacgtgaatgttgtacattctccaatggggaatacgtgaaagctgggctatcgttgttggagaaatggattactgatgtcacagatgagtttgcgggtacatcttggcacgagctcaattatatcagacaagctgttggatttttggttatacaccaaaaaagaaaaaagacgcttgaggagatcaagcaagatctttgcccgtccttgagtgttcgccaaatctatagaatatgctcgatgtattgggatgacaaatacggtacccaaggcatttcaaccgaggtggttgctgcaatgcgggagatggtcaacaaagatacccagaatcttgtgtcaaattccttcttgttggatgatgacttaagtataccattctctaccgaggatctatcaatggcaatcccgtcaatagattatgctgacgtcgatcttccagaatctcttcagcactatacatcagtacagtttctactaaggcagcaggatccacagcctgcccaatagaatgaatgtggtcagcctgccctgaagatctgtctgtcccctggttgtttctaccaaggcagcaggatccacagcctgcggcctgcccaatagaatggatgtggtcagcctgccctgaagatctgtctgtcccctggttttattggggtaacatccatctgcgatgttgtattgatgtttagagagtacctagtttggtggagtggacacaatttaaaagcaaccattgttgctagatgccaattcattggtgttcactccccaagtatttttcattgtacaggaaatgttgtaagtctgttgactagcgcaaaattagttatatcagtggtaaattaggaaaaaaaaaaaaaaaaaagcggcc

SEQ ID NO: 8873 - DNA, 1007 bp, Zea mays
  Clone ID: MRT4577_108089C.1
cccgggccctcccccgcgttccacttcgcttagatctagcccttgggattcgccagcggcgaggcctaagtcatcggcggcgagccaaactccacgagcggaggaagaggaggggaagctgagacgaggaggcagctatggggcagcagtcgctgatctatgcgttcgtggcccgtggcacggtcgtactggccgagtacacggagttcaccggcacaagcaacaacaagttcacctacaactgcgacggccacaccttcaactacctcgtggaagacggattcacatactgtgttgttgctgttgaatcagtggggcaacaaattcccattgctttcatggataggggatttcacaaattcccgaaaaggtatggtggcgggaaagctgctactgctgcgggtaacagcctcaaccgagagttcagattaaaaattaaagagcacatgcagcattgtgtggatcaccctgaagaggttagcaagctggccaaagtggaggcacaggtttctgaagtcaagggtgttatgatggaaaacattgaaaaggtcctagatcgtggagagaagattgagctgcttgttgacaagactgagaatctgtgctcacaggcacaagatttcagacagcaaggaacaaatgtgaggagaaagatgtggttgcagaacatgaaaatcaagctcatcgtcctgggaataatcatcgcacttattctgatcattatcctctctgtctgccacggtttcaaatgccattaagcacagaccagaacactggtacattcaactgcgccctattatactgctgcttggaggcacaacaaaaaaagtagtatttttctgttcttttgctagcgtgctcttggtcgggccattgtgcacatgtgttttacattgtcctagtatctgatacatgttggatggttaatagagtagtttcagccatcctaattggtacacgctatgtatgtatagcctggatatgagtaaatttactgatttctccag

SEQ ID NO: 8874 - DNA, 160 bp, Zea mays
  Clone ID: MRT4577_10808C.1
agggggaaaagcagagccaggccgcgccagatggagaggcagcggcaaagcagcagagagtagggctctcactttcaactacggacacacgaagggctggaactcccccgggccgaccaggaagaaaaaactgtacggctaaggacaggcgccacacggt

SEQ ID NO: 8875 - DNA, 1338 bp, Zea mays
  Clone ID: MRT4577_108090C.1
gtacccggcgcgcccccagtcccaaaaaactgtccctttccctttacaaaatttgattttcctttcctttccttttccgcccccgactattacccctcctcccactccacggagaagcgaaaccgacctttccccctcccccgcattccacctcgcggagatccagtccagccctagggtttcgccagcggcgagccaaactccacgagcgggggaagaggggaaagcagggacgacgagggggcagccatggggcagcagtcgctgatctacgcgttcgtggcccgtggcacggtcatactggccgagtacacggagttcaccggcaacttcaccaccatcgcctcccagtgcctcatgaagctccccgcaagcaacaacaagttcacctacaactgcgacggtcacactttcaattacctcgtggaagacggattcacatactgtgttgttgctgttgaatcggtggggcaacaaattcctattgctttcatggatagggttaaggaggatttcacaaaaaggtatggtggtgggaaagctgctactgctgcagctaacagcctcaatcgagagtttggatcaaaacttaaagaacacatgcagtattgtgtggatcaccctgaagaggttagcaagctggccaaagtgaaggcgcaggtttcagaagtcaagggtgttatgatggaaaacattgaaaaggttctggatcgtggagagaagattgagctgcttgtcgacaagaccgagaatcttcgctcacaggcacaagatttcagacagcagggaacaaatgtcaggagaaagatgtggttacagaacatgaaaatcaagctcatcgtcctgggaataatcatcgcactcattctgatcattatcctctctgtctgtcatggtttcaaatgccattaagcacagaccagaatactgatacattcaactgcacctattatactgctgcttggagcaaaaaaaagtatgatcttttgttgtttcgctagtgtgctgtggcccggtcattatgcataggtgttttacattgtcgtagtgtttgataaatgatggatggtgactgggtttgttgtgtcaactgtcataactattgtgcatttttggacgctatatgtgtagccttgatatgaatagatttactgtacttataagggctggtgtgactcagccgtttgctcctttgggcaatgtgcgcatttgggagcatcttgcatttctcgttttctagctcttatttcggactgctgcagctgtcagctgtaatccacatagatacaaaacattatagaaacagtaaaagctaataaagctaaaaaaaaaaaaaaa

SEQ ID NO: 8876 - DNA, 1265 bp, Zea mays
  Clone ID: MRT4577_108091C.1
cattgggtacctcgaggccggccggggaggacctttatgcaaaaccccaagcttttccccttctgcactccacggagcagtgaaaccgacctttctcccctcccccgcgttccacttcgcggagatctagcccttgggtttcgccagcggcgaggcctaagtcatcggcggcgagccaaactccacgagcggaggaagaggaggggaagctgagacgaggaggcagctatggggcagcagtcgctgatctatgcgttcgtggcccgtggcacggtcgtactggccgagtacacggagttcaccggcaacttcacaaccatcgcctcccagtgcctcatgaagctccccgcaagcaacaacaagttcacctacaactgcgacggccacaccttcaactacctcgtggaagacggattcacatactgtgttgttgctgttgaatcagtggggcaacaaattcccattgctttcatggatagggttaaggaggatttcacaaaaaggtatggtggcgggaaagctgctaccgctgcggctaacagcctcaaccgagagttcagattaaaacttaaagagcacatgcagtattgtgtggatcaccctgaagaggttagcaagctggccaaagtgaaggcacaggtttctgaagtcaagggtgttatgatggaaaacattgaaaaggtccttgatcgtggagagaagatcgagctgcttgttgacaagactgagaatctgcgctcacaggcacaagatttcagacagcaaggaacaaatgtgaggagaaagatgtggttgcagaacatgaaaatcaagctcatcgtcctgggaataatcatcgcacttattctgatcattatcctctctgtctgccatggtttcaaatgccattaagcacagccagaacactgggtcttgctatttggctttaaaaaaaaatcggtgcaccgccgcggcagcagtcaggtacgagaatgcgccagaagtggtaaatggtctctcgtcaggtgccgggcatcgaagaatcacgtagagggtgtttggttttactgaactcgtatcaaatatttggatatcaattacgcctattatatatatgtttaattagatttaataaactcgaatcgtcttttagtgtttgtaattagttttataattaaactacttaatgttcataattactatttaaacatttgatgtaaattgaacttagttgtgtggaaccaaacacactctaaagttagctcctctggaccgtcaaatgccct

SEQ ID NO: 8877 - DNA, 454 bp, Zea mays
  Clone ID: MRT4577_108092C.1
gggtaccatcgagccggccgggccgggaatgaatagggagccggtcagccgagaggaggtgcggtggcggcattacgaccctgcgcgccatcccctgaatcttctcgcggacccagaccagataccacctcgccgagtgggtgcgaggaccggccgcattacagctagccatcgaagatgacgttcggaacttccaggccctcactcagatgtacaacgagtggccattcttcagggttctactgcaactgcagcacatgcttttcgttatgggagaacctggcattgccggattgaaggatcatctggttgtgccggaagaactcaaggcctgtgccgagccagctcttagcagctatatggtcagagggagtggctttctctccagatcgatgggcaccatgatattcatgagagcgatccagtcatgaaacaggacttggtgtatgatgac

SEQ ID NO: 8878 - DNA, 247 bp, Zea mays
  Clone ID: MRT4577_108093C.1
gaacaagtgatgaaagttctggacccaaagctctcgaccgttccgctgcacgaggtgacgcacgtgttatacgtctcgttgctttgcacagaggagcaaatcgtacaacgcccgacaatgatggaagtggtgcatatcctaagcaagcttacaaaaacgtcatctaccaagcatggagaggagaactctaccaagcaaggaaaggaggtttcaaattacagcgacagatctgataccagccctatac

SEQ ID NO: 8879 - DNA, 183 bp, Zea mays
  Clone ID: MRT4577_108094C.1
gtacgtaagctcggatcctgtatattcgacgcacgcgtcagaccgatcctccccctacacgtgcacaaaccgcatccgaatcgaccaccagccaagcctggccgatcccctacatccgctcgccctagatatcaagagcgcagaggttgtgagaagaccctcaccggaccgactgtgagcctg

SEQ ID NO: 8880 - DNA, 378 bp, Zea mays
  Clone ID: MRT4577_108095C.1
ggtaggacgtacaagccgtgtatgattcatgatagcaagccttcacaaaaaaaggaaacccccaatgtcaaaaggcattgcagaattacagcagtacacaaggctgcctgtgatggcactcttacagttaggctacatgtttctagcgtagcattttgttcagaagctgtacttaatagtaaaactagcaatcaagacgggaaaaaactgctgggaaaattcgttgtgcaatcaagcttcctgtgcaattaaactaccaaaagtcatgaaaaatctaaaaaaaccatagatatagatattttattatctgctctaccaatatatcaaaatttaaattctaacttatcctcgtcaagggaaataaaaaagagaaaaatt

SEQ ID NO: 8881 - DNA, 585 bp, Zea mays
  Clone ID: MRT4577_108096C.1
ccggccgggataccgaagccgccggcgaggttctagggccagcttcctttgcccgtgtatataggtggacaccagtacccctccccatccatcctgtccatcccctccttccaccttgacccatatcgtgcctcggcaccaagtgcggtgagatgcagtgttgacgatgccgccatgggcgtgtcatgcctacgcactccgccattgggcttcgggtgggcgaaggcactcgcgcccatagaactcttaccctgtgtcatcatcttggttccccgagtaggatcccctccagtcgtgtagtggattgaccgttgaagcaaggaactcgcccccaaccgtcctcaccatgggccgagctcttccactcaccgaccgccgaattggtaggccaagagtatcgtttaagcccctgctatgttttacgtgggttgttgatgagtttggttatcggaaagtagcatgactgtgggattctgggcacagtgccgccattgggccgctgatcgcgtgggcagggcactctggcgtcctgattctcgttgtggtggccctagttgtgttaaaaaaaaaaaaaaaaaagcggcc

SEQ ID NO: 8882 - DNA, 451 bp, Zea mays
  Clone ID: MRT4577_108097C.1
gtccgggagagtctccctccttaccgtgcgaggacaagtgcgtcacgacctcgcctagcgctcgtagtctctccttagctgtctctcagaaacgctgtcgggtgagcgtgaccgctaatggcaactgcagcccgtgctgctcgcgccatgcgatctatcaagcctagctgtgctcctacagggcggttgcgcctgtgactaacagcgagcaagaagatagtttatagcatatgacgtacagctaagctgagcggggtagcgccatgtatagctaggtcgtgcacgcgcaggtgcgtgatagctagctagatggatagctgtgctctagctgtgtactagcatcagaagtgaatgatgatacgctggagattaaaggaaatgctgtggggacatgtcgatggatatagccccggagctgatgaggacagtagcggtggtattgaggtttttg

SEQ ID NO: 8883 - DNA, 420 bp, Zea mays
  Clone ID: MRT4577_108098C.1
gtcccaaagtgagctaaactcttttattgaatacatacccggatttaccagaacagtatgtgatcacaaatcaccactatagccacaagataaattacaagtgcaaagcatttaaagcttactaagactcattttttttaggggggtgtaaggcattcctttcacccatatagcattacctaaccaattcatatgttgaaactcactatagtttttctagctctgctcactcaccctagaagactgtcctaccacacgatccatctgagaaaaccatttcccaatccgggtgtgctctagcatatctctacctgacttgagatggcggatgggtctaagaacaccaaacacagcaaggatctggtaaagtaggatccaacccaccaagaaattttcgggccttcaaagcatccacccatt

SEQ ID NO: 8884 - DNA, 819 bp, Zea mays
  Clone ID: MRT4577_108099C.1
gattcaatgctatgcgggcggagagtgctggcttgtgctcttcactcgaagagcttgagcatgagatcaagaggttgaatcaccgcataagtcatgagagcatatctttagatgaggagaagcggctgatcaaagaaattaagacccttgaaaaaaccagaccgaaggtcagttccaatgctgctaaacgagctaaaatgcaagatacagtggttgaaggagacgccatacaggatcaggtgaaaatcatcggggatggtatagatggagtaaagaaggagcgacaagcagtcaggtctaagattaaggtcctggacgatgagatgagggttgttgatggcgagattgctttgcttcaagaagatttaaatgcagctaccgccagaaaggataaagcgtacgagtcattgaccgaattgagaaaagcgcgtgatcttgccaatgcatccttccatcaaaaccgcatagttctgaacagagccagggattattcttctaggaatgaggtggaagaattgcaagagctccacaagactgaggttgagaagttcatgacacaatggtgcagcagcaagacctttagagaggactatgagaagaggatcctcacttccctcaatggacggcagctgacccgagatggccggatgaggaatcctgatgagaagcccatatttattgaaacacagcagccagcagcacctgtgcaacaggagcctatcccatcaaagcgcccttgaaacaagcaaaggaagctgctgctcctcaagtcgtcgctccccaagaagagccccttgcaaaagcatctgcccagtcagc

SEQ ID NO: 8885 - DNA, 171 bp, Zea mays
  Clone ID: MRT4577_10809C.1
ggttcgccttctggtaaggacccggcagcttgaaaacagttctggtcagcaggagttgcattaaaacaggggctcgccttcacaccttgactgcaggggttttgggccaaaccacaaatgatagtttcttctttttttttcgggtttttggggttggttgggggggggggg

SEQ ID NO: 8886 - DNA, 378 bp, Zea mays
  Clone ID: MRT4577_1080C.1
gcaaatacagcaaccgaatgagctagaggaaaataagcttggtggggtcaaaaccagaaaagcggatgaggagtgtttggagcaagaaaagtcccgtcagtctcctattcagagctttgcacttaggcttcttgagtataacattaatgcatctgaatttctgccattagccgaagcaccatcaactcctgacaggctaaatgattttggcattttgaaagtacctgatcaactttcagaagcaaatctcttttatggcgtagcacccggtgcaatgcaggcatacagggagtctatggagcgtctccttatttataataacaagaaagttggtgacactgtgctcaaggatgattatgagccatcaacatatgcatt

SEQ ID NO: 8887 - DNA, 622 bp, Zea mays
  Clone ID: MRT4577_108100C.1
cactcggcggcctgtccgacctgtcgtgctaccatctactcccctaacgcagcatatgtgttctcacatgacagcgttgttcgagctcgactggcctcctctcatcgcaccccactacagcaagcaatgcgcctcctcacaatatgcctcacgaaattattccgtgagccacgaaaaagagcaggcgccctccctgagagctcgaggggtagcattatataaaccagggtggacctcgcggatcaagaacctgtactctggcaacgatgtgcgctcatctccggaatcacagatgagctgaccgaggaggtgccctggcgagcctacgtcccgcctgatggctgcttggcaggccctctaggggagtcttctggagacgaatgaaacacttacttagctgaacgagcatgcacgacgacatccttgtcatgaaattctgcgctgagagtcatccctcctccgcctcctaatcttgatagctttactgaattcgcgcactcaatccattgatcttactatatcgtactggtagcgtctcgtgtctagcttggtccagcggacattgttgtaagctctgataataatatttggatactactaatgccaggcagattgcaggctc

SEQ ID NO: 8888 - DNA, 332 bp, Zea mays
  Clone ID: MRT4577_108101C.1
ggttgattatgtaagtgtgttgtttgagaaagtcgatgccctgcttaagtaatggttatattatagttttagactggttaaatataatggagggtggagatttgcttatgatttgttcgtcattcatctttatgattggatcatgacatgttgattaaatgttcatagctgttctaagaagtcgaaagcaagtgtgatcattaggtttgttttagatgaattttgataaaatgcatagtgggtgttgcaccttagtgttttatctttttaggattcaaattatgatctatgaaaactctatgtggtctgataatgttttttttcgttggtta

SEQ ID NO: 8889 - DNA, 120 bp, Zea mays
  Clone ID: MRT4577_108102C.1
ttttcttcttaaccccgtttcttcgtgcgcaccgcttcttcaacagggggccccaaaaccctccttaaattttcccttaattcccccaataaaacttgccggccggcaatcttcaaggga

SEQ ID NO: 8890 - DNA, 429 bp, Zea mays
  unsure (1)..(429): unsure at all n locations
  Clone ID: MRT4577_108103C.1
cttggccgaccccaactaaaaaaaaaaaatgggtttggccgaaacaaagccaaaataacagcaaaggggaaaaaacaaaaaggggagcgggccgattccccatgggggggaccaacttacccgaattttaacagcaaagagactaattaacaaacaaaaaaaaagaaaaccctccccccacaaaggaagcaggtttttgggagggccaaaaaaaagctcaaacgagcaaaccaccctccgaaaccaaactgggagggaggagtcccaaaacgggcccccaaaaaaaagcaacccagaactggaagcccttgagggggaggcccccggggggggggggagcatccccctggggggggccggggggncccccngagggggccttgccccggggggggggggcngnccgacccttccccggggcccccccct

SEQ ID NO: 8891 - DNA, 179 bp, Zea mays
  Clone ID: MRT4577_108104C.1
aggtgctgtatggcttttctgccggtgctcctgcagcctcgacatgccgtagacgtctgctgatcccatgtccatgactgcgtttatgaccatgccgtggcagttgatgctgattgggctggcaatggctgagctcaaggcgcccccgatctcgttctccctgaaaaggacgtcttcct

SEQ ID NO: 8892 - DNA, 250 bp, Zea mays
  Clone ID: MRT4577_108105C.1
gtttgttttatgttttttcttatttttttacttttagtgttgcatctgaggaaggcaaaaggttttttcttatttttttacaacaagggttgcaacggaaagaggcctgggcttcatgccttcggagcaggaactaagttattttgggtcctgtatgacaacattctgcactttaaagagcgaccagcatattttccctcatgggactaagcgttatgtacaccaaaaaaatgtgttcctaattaaccct

SEQ ID NO: 8893 - DNA, 264 bp, Zea mays
  Clone ID: MRT4577_108106C.1
gcggggagggcatgggctcgaagagagcggcctgagtgaggtgccctgcaggccgggactcatgcatgagaagcactatggggtggagagcgcctaccatgatacaggtgatgcagaagccttgcactgagatgcaggggactggagagagcataattgtgatggaccgatgcccacggtgcaagggtgagaaggtcattgaagagaaggaggatcttgaggttcatgtcgagaaggagacgtacaactaccagaacactggct

SEQ ID NO: 8894 - DNA, 309 bp, Zea mays
  Clone ID: MRT4577_108107C.1
tctttgatctcctgctaccgcgcactgtcccaggagccgtagctgtctcctgacccgaccaccggcgcccccgaccccggcggcgccgtcccactccccccaaaccccagcacggggagccccttatacaggcagaactggcgcaaccccgtcgtagtcaacccgccctcttcgcttctgcccaacgtctgcgacggcagctccttgggaacgcaataccgcatggccgccttctacgataagcccgacgccggggggctcaaggaaacccttggcaaatatatggcggatcaacggcgggaagacatg

SEQ ID NO: 8895 - DNA, 186 bp, Zea mays
  unsure (1)..(186): unsure at all n locations
  Clone ID: MRT4577_108108C.1
nacgtcctttttttttttttttgtattaagttaatgggtatttatttcctgtttaccaaagggaagcctaaagctatatataaagctaatttaaaacttcactaaataaacaggggggcctactgtttacatgaccatttccatgctctggtaagagcagcctacccatagcccggttacactcag

SEQ ID NO: 8896 - DNA, 310 bp, Zea mays
  Clone ID: MRT4577_108109C.1
caatgtaaaagcacagcggattaacattctacatcatatactctcttctaagtgcttggaaacaacatcagtattcattttataattcttgagttatagaaatcgccgctcaattaagagggatccgcaataagttaagtgagttatgcaatgagctcaattcaaattccttcaaattctctaacaccccgtttggatcatttgaattgaattacattctaataatagttatttaggcatatatcgattaagataattcgattttatataaacatatattgtatactatcattagcaagatatcggagat

SEQ ID NO: 8897 - DNA, 254 bp, Zea mays
  Clone ID: MRT4577_10810C.1
atattgccagacaaaccaatttaggcatttatggaaatggaggaatatatttttctaccgacccacagtaaatgttcatacaaaccaaaaattaaaacacaagtcgatgaaatgctaagcgcagcatattacagttttgacctaggccttgatagcatacttaactaatggggaagtacttctaacgctctttttccctatcggacttcaaagagagacggtgctctttctgaagaccaagccctacgcgtagg

SEQ ID NO: 8898 - DNA, 285 bp, Zea mays
  Clone ID: MRT4577_108110C.1
accctcagctgctcccaccaccccccgcctcgatctccggccacgaccctccgccacttgggctgccgtgcgcactggacgaggtggcccgggggcccgggggccaggaggccgcgcccgggccccggggccggccgagaagccgagaccccaactccctgcccctctgctcccgggagcccggaaggtgggcttcgaggcttccctgatgtcccgtcggagcgtcggccccagggccccccgggcccccaggccctccctctctgtcgcttgaaggaaagaaga

SEQ ID NO: 8899 - DNA, 385 bp, Zea mays
  Clone ID: MRT4577_108111C.1
catggttggttactgcccagctatctatctataaatataatgcctaaaaagttacagcacctgtatgctctaggcccaagagatcaacgggcgctaaataatctcagccgcacgggtggggggctagaatgatttaattggcgaccctcttggggagcagcctggcgcgaagctccgccgagtacaccttctgggcgccacccggcgggcgggagtagccggtaaccgggtccggtaccaacggggacttttcccgggaggcagccgcggagttaacctactggcccatgatgcgctgggccaccttagccacggccttccgcccacatcccttaaccaacaccgcggccacggagtagcacctcctttgcgctaggaggctagc

SEQ ID NO: 8900 - DNA, 288 bp, Zea mays
  Clone ID: MRT4577_108112C.1
attttctctgtacttttaaatttcgaaaatacaaagaatgtttgtgaaccttcagggataacatatgccatgttgttgaaactcctgctgaggtatctagcaaaataaagaagttagctactatcgttcatggtctggttcttgtttcactattgttgcttgtgttgatggtcatgacggacatgctaatttatttacaatttacacatgtcgctatgtaactattcacgcttttgacctgatttcacatctttatttgaagcagcactttatttttcatttcagctg

SEQ ID NO: 8901 - DNA, 255 bp, Zea mays
  Clone ID: MRT4577_108113C.1
ccaccagaagcaggcaagaaagccaaggagcagaccgacgcacgagcaccccaagaacagcagcaaccagaaacacacacaaaacccgaaaaggcagccgccccacccgacggaacaaaacgaggcacaaagacggcacggacggccacgccaaccacacaaaggaggctccacaagcacgccacacaaagacccacaccagcaaccccggagaaccccaccaagaacgacgccccagaccaaaccagccccagg

SEQ ID NO: 8902 - DNA, 251 bp, Zea mays
  Clone ID: MRT4577_108114C.1
gaagtattttctgaacctgcaacatttcaatctgggcttctagcatctgctcccgttgctcgagctgttcaacgagcagttgagcctccaataggtccgtctttctttggtccatgtcatcaagcaagcttcaaggttggaagaaacagtcccagtttgttcacttgactcggtaattccaagtataagcaaaatgatcagatggacaagtcagggttagaagtttcacctgtccctttccagaataagat

SEQ ID NO: 8903 - DNA, 416 bp, Zea mays
  Clone ID: MRT4577_108115C.1
tcgagccggccgggccgggatctggcattcgatcgatcttgctgctgctgctgctgtcgtcgctggttggccaggagcacaccagcttcttgctgtgtcgccgtcatagaagtagccgcgcgctgtcgtcgtcgtctcgtccgcgacgcgaccactccggcggctgctgctgcctctcatgctggccacgccaccgacgcttttgtgataccatacgaagcgccgcggcgggcacgttggagatgtcgtcgctgggtgggcaacagcagcacgggcgcggcgacgaggccagggcgcggctcaggtggacgcgccagctgcacggccgcttcgtgctcgccgtggcccagctcggcggcgcggacaaggcgacgcccaagtccgcgatgaggtcgatggccgcgtcggggctcacg

SEQ ID NO: 8904 - DNA, 299 bp, Zea mays
  Clone ID: MRT4577_108116C.1
gaagaaaagtagaggcctgatctagttcggttttgattggaagagaaatttaatttgattgaatgtggacaactggaaatcaaattcgaagacgtgttacatctttttcctgaagagaaatataatttgatcgaagttgtggatgatatcttgtaatatttctactattttgtaatacatttagattatttgccatgtgcgagcttataacagtttggaaattgataatgtgcaatgtacatgttctgcatatttgttttggtccaaataaaaaaattataaatatttgtttatggtgc

SEQ ID NO: 8905 - DNA, 661 bp, Zea mays
  Clone ID: MRT4577_108117C.1
ccggccgggccgggagctttaggtactagctcgatcggccgccggccggccggtcgacgtcggcgcgcacactgtcgtccatctccataaatcctcctgcacgtacggcgctacggccggccatgagacgacctcacgccgccgccgctaccgctctcgctgccctcctcctcctcctgtgcctcgccgtgctcacagccgcgttgatccacgggaacggcggcggcctggcggggacgaggccggcgaggtggcccgccgccgtcccgaggaagatgctgctcgccatgacaagcttcgacgctgcctcgtcctcgtcagctgctggtcacaaccaccgctatcttcttcaccaccaccaccaccatcttcatcatcaacaccaccaccaccaccaccaccacgcggaccggcgatggaaccggcacgggactcttccaccgtcagcagctggcggcgagggtgacgaggcgatgatcgatccgcggtacggcgtgcagaagaggctggtgccttcgggccccaaccccttgcatcactgagagtacgtgagagagatcgaggccccgttgccaccgcatgcgcacgcgcgcgcgacgcgagcagcacacctgcatgcttgcatccagcatcttcaattctcatgggcggccgctatgca

SEQ ID NO: 8906 - DNA, 576 bp, Zea mays
  Clone ID: MRT4577_108118C.1
aattcggcacgaggcacagccgactgccgccgccatggaggacgttctgacaccgccgccgcagccggaactcgccggagagaagcgtaagagggaggagagttcgctggatgcgtccatcgaagacgctccatccgcccccgcctccacctgcagcgctgaggatgcggccggcagcgacgtcgcccggcacccgatgtggaagacgagcctgtgctccttcttccgccgccgcggcgccggcgccgaagggtgcagtcacggggactcctgccgctacgcgcacaccgaggaggagctccgcccacggcccgacggcacctgggaccccacctccgaccgcgccaaggagctgcgcaaggtcgccgcggaggcccaggaggaggccgaggaggaggtcacggtggatgagcagtcactcgacaagtgcctcgtcgggctccccaggggctggacggctgataggctcaagtccttgctccaggatcagggaatctcgtatgcaacagcgtgggataagaagggaatgacagttgggttttgggacttttgagagtgggtgacaactaacaaatg

SEQ ID NO: 8907 - DNA, 1551 bp, Zea mays
  Clone ID: MRT4577_108119C.1
ggggaaaccaactagtccccaaagtcaataaagcggctacacgtttcgtccaagttcggccgggaaatcccatccagagattatcgaagcaacgagcgccgctccccttcacccctccgcctccctccaaaactcaaattgacctagcgagaagcagaagaggcgaagagtgataacgaacctctcccacatcgatttccccaaatcgcctggcgcgatgaccacggcaggagaggtggattcggcagcaggaggtgaggacctggagccgctcttcgactacaagcgagtgcagcccaggatgacgttctgctttgacgacagcgacttggaggtggccgacatcttcaaatactgcaacaagcgcccaaaggtccacacctccacggaggaggggtaagcctgacgaggaggtcgccgctgccaaggtggtggtcctcgatgaggaggattggttgcagccaccgccacccaaggccgcattcagggcaacggcagaggaagatagtgcgtttcgggaactgaggttgaagaaacaagagtgggcaaaattcgctgaatcagctgaggatatattgcaaaagctggatgaaatcacgaacaaagaagttggtcccaaggaaccacctgaacagataattctagatgaggagtctgaacctcaagtcgagaaagccagggaaaagatagtcatatcaatccaggacaaggatgggcagcaacagatgcgtgtatacaaggacgaaaagttcgacaagcttctcaaggtgtacgccaagaaggcaaagctcaacccatctgatctgtcttttgtgtttgatggtgagaagattaatccatcatctacacctcaggaccttgatctggaggacgaagacatgattgaggtgcgtcgtaagcagagttgaggtcatcctcgatatatgctggtttagacaaactcagccttttcgctgtcttcttttgcttccaacaaaggcttatttgtctatatatcatataacaaagacgttgaggccatccttgatatatgcgtgaaaccctcgagatatattgcagctgtaccgtgtacgtgggggtttggttggcaaaagccatctgcagaaatgccagagcagcctctgttattggatgtcagtatacaagacgccagtcagctagcaatgccaacagaagtgactaaggaaggcgccaactgtagctaataatcttcttagttttggttactttctaaaaataacatattgattttcaaagttacgtgctggtttctaggcctcaagtcgtctcgcaagacatagtttgtattaaaattattaaagcatgtccaatagttcctcaaaaaactctttaaatagggtgttagtaatcaaaaccattctataacagttctttaaatgaggtttctaaataaactaaattcttaaatatccctatttagttctcaaactttaggagttgttttgcactttcaataacttgttttgcttatcaatcataccataaaatcacttgtctgctattgagtttgcacatgtgtacagtgatgta

SEQ ID NO: 8908 - DNA, 354 bp, Zea mays
  unsure (1)..(354): unsure at all n locations
  Clone ID: MRT4577_10811C.1
ccctcacaaccagcccggggggggccttgtttttttaaacaaaatccccctgatcccaaccccttgcccaaatataaaaaaccggaccgggggttacctaaggccctttttcttttttttgggggggggggggggnggggnnnnnnnnnnncccaccccatccagggaccgaatccggcagggggcttttccaatcaggggggggaccaaatccaaacggtccttttcaggaaaaacagggggccccacccctttaaccccaaacccctttgagcgggcccaaaaccttcctggcgaccgaaattactttttatccggggtccaggccaaaaaaccgttcccccccccccccca

SEQ ID NO: 8909 - DNA, 340 bp, Zea mays
  unsure (1)..(340): unsure at all n locations
  Clone ID: MRT4577_108120C.1
ccccttttaactaatcccccttnnnnntttttttttcttggggggtttaatcgggccaaagcgggtgttttatagcagaagcctttggaccaacacacagggcggccataaaaaaaaacacagggcaagaaaaatgcccggcgttagaaaaaaaaagcgggagaaaatacgggattgcttattacacattcacacattggatggggggaaccgggataaatatgtatgaagctgcatgctgaaaacggacatgaggcattaggggatatataaagaatcaggaggggcggctaatggcccaagggaggaacccccctgacaccaaattggagggggcccc

SEQ ID NO: 8910 - DNA, 321 bp, Zea mays
  Clone ID: MRT4577_108121C.1
gcgttcacgacctgctaccacttttttttcaacctgggcatgttcatggcggacatggtgaactacggcaccaactccatcccgaggtggggctggcgcctctcgctcggcgtcggcctcgtcccggccgccgtcgtcattgccggcgctgcggtcatccccgacacgcccagcagcctggtgctgcgtgggaggctcgacgaggcccgcgcttcgctgcggcgcatgcgcggggctggggcggcgtcggccgataccgatgcggagtcaaggacatcgtcgcgcagtgagcaagacccagaacacaagtccggcgcgttt

SEQ ID NO: 8911 - DNA, 139 bp, Zea mays
  unsure (1)..(139): unsure at all n locations
  Clone ID: MRT4577_108122C.1
ngtcgttcaaccacaccaccccacaacaggggggcacactttacactaccggggggggacacaacaaaatctcgaaactcaacttcaaccacgggacattgaccggaaatgcgccaattccccatccgctagcctccga

SEQ ID NO: 8912 - DNA, 448 bp, Zea mays
  Clone ID: MRT4577_108123C.1
gtaaggacgttgtacaacattcatttcatgtgaactgctcatgggagctctgtatgatttctatgtacaaaattcctccacactcacttggtacagacgatggagtgccaacatgcatgcccacactagctagccacacccacacggtatcacaaaacctaaaaccagacagcagttccatgttctgcaacctctctacgtacgtacgtggtcacatatcacggcggcaacacagggtttcttacttgctaaccacaaattatattaattgctagaactcctctaacccccggtgcagtcccgacctcgcgctcgttgtacgtctttcttccagaagaactcgtccgtcaccggcgccggtacgttttaccgtttcaatggtcgacgacgacaacgacgcatggctgccgagaggctgaagcgactgacgcacgcatgacgatcgatg

SEQ ID NO: 8913 - DNA, 448 bp, Zea mays
  Clone ID: MRT4577_108124C.1
ggccattttcaaaaacgcgaggttcgcctgatcttactcccgagggtgcacgactgcggctctgggtctgcataccggcgaggcctgctgcgcgcggaacatgctgcggtatgtcccaggctacagacaagacctagcagaccgggatcggcgccgccatcgagtacctcgtgcgcgcggtctacgtgaaggtcctcgagttccataggccacagatgttgtacggggatctcggggctcctctccctcgaggatgaggcatctgttaacttccgcttcgaagagaactggagtatgataggattatctgacatgagtgacgatgatagagaccacgcattgatgccgatctatgatcatgtgctcaattgctagaggaaggagagccgcgtacctgcccctggagaacctcaagaactgagcccttcggccaggaagggctggacaa

SEQ ID NO: 8914 - DNA, 285 bp, Zea mays
  Clone ID: MRT4577_108125C.1
ttgtggcaaccaaaaccagccgacgaccgttcgtacaacccaagaaggggcgcaatgccggcgcggcgggggcggcccaggaagggcgaccgccggatcgacgcggccatcgaccacttcaccgtcatgggctacgcggcgcgcgacgttaaggccgtcgtcactgatctcctcaaggtgtacgggggccctgatgcgtggcccttactggaggaaggtggctcctaccagttgtgcagagagctcttcgagatcgagagaagagaagagaagaagaccagcagc

SEQ ID NO: 8915 - DNA, 1392 bp, Zea mays
  Clone ID: MRT4577_108126C.1
tttttgggtctgcgggagtgtattctgtcgcggctggtgctggacttggcaataagataatcagccagggcagggatgggacttgtaaatgttgggtgattgaagaagctgggctttcaaggaagccactacttacaatcaaaacaagtacataccatttctgcaagatgtcactggtgaagtcttcttttacacatgccactgaatctggctctagcagctcaactagtgacgtggcaccacaaatagtgccaactgaaaatgcagaatgccatggtgtaaaccctacaataggcccccaagaacatgatcaatgcactacctctaatgggcataatatgctggcaattgctggtcaagaatcctctcaggttgagctttgggacattacaagtactagaaagatcgtaaccttgccccaaacatgtagtgccaatgcgacagatcatcctactaagaaaaagggactatgcatggctgtgcaagctttcatcccccatgaatccgcaggctacgtaaatattttgtcaagttatgaagatggaagcactctttggtgggatgtacgaaagcctggattacctttatcttcagtgaagtatcattcagaatcagctttatccattgctattgatggattttgcaatggtggaatctcaggaggtgctgatgataaagtagtcatgttcacgctcgaccatccaaagggcacatttattcttaggaaagaaatagaactcgagcgaccgggtattgctggcacagcaattcgtccagacaacaagatcgctgcaaccgctggctgggatcacaggattcgagtgtacaactacaacaaaggaaatgctctagccgtgttgaagtatcacagtgcttcgtgcaatgcagtgaccttctcatctgactgcaagctcatggcttcctgctcggcggataccacggttgcgctgtgggacctctatcccccaaaaccccaaagcaaagcggacatcacagaaacagacgaggcctcctgctagctcactccctgtagtttgggctttcctgataccttctggcagaattttggagcttccgtgcaatgaaaatctgaacttgtcgcaacagtgcaagcgatttattctttttcgtcaaagaaaagagtaagatatgatgtgccttccacagagaagcgcaaacgtatgcatgtaactgttgttaggaacggttctcttgatttctttatttttcattgaaattctactcggtttcatggaacagttgtagtgtctcaagagcatgaaattgatttaaaggcaaggcagttgaagaactgactctttgaatactcagatgattgatttgaacaaatttatgcaaataaccagtacactgtaaaaaaaaaaccacacc

SEQ ID NO: 8916 - DNA, 816 bp, Zea mays
  unsure (1)..(816): unsure at all n locations
  Clone ID: MRT4577_108127C.1
gcttcgccttcctcagcgcgtcctcgtccggcttcctccgctcgatgcagcagcagcgactgcaggcggcgctcgacagaaaacaacacggctgcgaccggatctcaccggaaaagttgaggagtggagggtcttagctgccggagttgggtaatacctccccatatcccctatttgtaggtccgccgctgctccaacctccaggtccaggcaccaggtcgctcctcccttctcttcccgtcgggttcttgtccatcgtagatagcctctccttcgccgaggtcaccagttcctcctcgtgtccttctcgctagtcgctacagtcctcctactctgcttggctcgagtggaatggggatccatcctgacctgagtggtttcttctttgcttggtagtcgcgcatatttggtagccgcgtccgcgtgacgtcgtcggtgcttgggtccattcagacattgttcttatttgatcagtacccctatttagcgcctgcaagatcgagatcgatcttacttgactccataagatgtattggnggatttggagtgccttgtactccaacttaagactgggagtggagcccgcataccccaagcccgcccttccaccgaactgaactagacatcctcaagcgtcatcaattctaatggatgatgcagcagaaaatattcttgcatcacttggccgtgtgcatctcgttgatctaatggcctctgagggccttccttctgacagctatnnagatgtgtngtgtcgactctgatgcagtcactcgctcaatattcggcagccatcattcagctgtcaccagctga

SEQ ID NO: 8917 - DNA, 459 bp, Zea mays
  unsure (1)..(459): unsure at all n locations
  Clone ID: MRT4577_108128C.1
acatcaaaaactagcaaataaaatataggtccagcaagtagcaagcaactatatatatccatcaaatacatgataaactgaatagctgataaatatggcatattgccctaccctaagcccataaggcctattcaatatctaagttcatctcatattctcatttatgccacattgccaccaatatcacttgcagttgcagcagcttcagcatctgtagggcttggccataatcatcctcaacatgcagatcatcaggagcaacaaagtcaatttcagcttcttcctcttctcctaatccttgttcttgttctaaatcgcggctggggatgttgaagcagcaactacaacactactttgacgagtgtagctcccactcatcctaggaaaaatgcgacgctgtagtgattgttgttgcaccaatggctttatcaacatggaaccaganaagatcaagatcta

SEQ ID NO: 8918 - DNA, 316 bp, Zea mays
  Clone ID: MRT4577_108129C.1
gtgcggcgctcaaggcggccgggtccggagaggtactcacatcaacttgctatcgtgtgctttctctcatcatgtcttgatgagtatggcctaccataatgatgagcagactgtgatggaccagatctcctataagttcaagatgaggaacacctcttctactcttgagtcgatccacgagaacaagaaccttccgttttctgcgtctgcgaccgaggccatggaagccacgactaccatatcttcggccgcgagagcaccgtctgctctgtccatcgaggatctgcgaccacctcgatcttgagcgatggaccaa

SEQ ID NO: 8919 - DNA, 179 bp, Zea mays
  Clone ID: MRT4577_10812C.1
ttgtcaaggctaatttcctctcaacctatatcgattgcaacgctgaccagcttacccagactgatattactagtcatcacacaacgaagaactttgggaataaacattaacatgctctacgcacaaagctctaagcttgtactgcaaacactccctcagctatcaacacaatacatgct

SEQ ID NO: 8920 - DNA, 883 bp, Zea mays
  unsure (1)..(883): unsure at all n locations
  Clone ID: MRT4577_108130C.1
cacttcccatggaaagaactgtctgtattgatgtatatatctcactggagatcggggccatcgacatgtattcgagaatggagctgcgcgccattcgattctgtaattccgnnnnnnnnnnnnnnnnnnnnnnnnnacaagttgtcatgctctatgacctgcgccgccttccactcctcgccggggttgacgacaacgggcaccaacatggacgccatccccgtgcacagaaagtagtccttgccgaacttggcgtacatgcctcccgggctgcagaggtacatgtcctcgaaccccatcctcaccagcctgaacccgagcccgctatactgatcgatnnnnnnnaacttggacggcgcggtgctgtagacgcgcttcttcctctcctccnncggcgcggcggaaatttgaaagccgcgtgcttaatgcctagtaggctactacagatagaaggccaaagtgaaattggtaatgagatagcatttacatgcccttttgaataaccagattagttggctgcagcaatggtgaaacaaccttcagcatctgcatcctcatttgactgatctctgctcatggnnnnnnccgagccacaccctcctagccctactctgcctggtgaagctgatctctgcctcgaattgaagatgattnnnnnnnnnnnnnnnnnnnnnnnnnnnnnnnnnnnnnnnnnnnnnnnnnnnnncttgattgacagtattggttcctggattcggattttgctgnnnnnnnnnnnnnnnnnnnnnnnnnncctaggtatattgatggcatagtnnnnnnnnnnnnnnnnnnnnnatgccacattaatctgtagatgcaatgttctgttgtcgtnnnnnnnnnnnnnnnnnnnnntcgtgcc

SEQ ID NO: 8921 - DNA, 464 bp, Zea mays
  Clone ID: MRT4577_108131C.1
aaggaaatcaccatgtatttcttgtacacaattttgagtattacatgcaagcactaaatacaaccatagcatcacaaaatagaaaggagagcaaagattcttccctaacatcaccatagaacaatacacatatgcacaacaacggatctgaccaacataccacaacgcatcagttaaagacccacaaagaattattgtgacgagagtatctatcaatctattcatcatatcaattagccggacaagcgaatcatttaaccactttctaaatccgactcgaaatcgtgagatcgatgacgatgtctggttcaagcaattcatcaaacacaagaagaagttgtgttgggatttgcttctccacacaacaatgggattcctttgctccaatctcgcacacatatacacatatattacaacactctttcttatacgcacaacatggtcaacagcaggggacaggagct

SEQ ID NO: 8922 - DNA, 522 bp, Zea mays
  Clone ID: MRT4577_108132C.1
atgtcgaggacgcggcctttaaagcggaacgaccgggcaggtacaagctttttttttttttttttttttttttttgaaaaaaaaaaaaaaaaaaaaaataagttttttctttcccgggtggtcgttttaaagggttatttccggggatttccatcacattggggggggttcgagcatccttttggggggcccaattggccctataggggaggtaccattacaatgcattggccggggtttaacaacttcctgagtggaaaaaaccttgggttaacctaactaaaaagatttgaagcagatgcctttttggcaaagtggggggttcccaaagagggccgcacctaacgatttttccaataggttcacagcccgattggcaaatggaaaacccctgttgcggcctttttaaatcaaagggtgaaggggttacgagaagggggtccgttatattggccagcttcctattgcccgttcattaggtttttttcccttcttttttggccgcggtcggcggttttcccc

SEQ ID NO: 8923 - DNA, 176 bp, Zea mays
  Clone ID: MRT4577_108133C.1
ccccaccccagaaggaaaaaagacgcttcattttttggaacccaaataaaggggtttttacagaataggaccaagagatgcccggggccttaacaaaacccagggccagaggggagggggcacaacccaaaaagctaaaacgggggccttgaaacaggggactgattatttccaac

SEQ ID NO: 8924 - DNA, 337 bp, Zea mays
  Clone ID: MRT4577_108134C.1
cctctactgaaaacttgttttactcaccatcccacactccaagcctcaaaacgctcaagcgagatgctgctcctagacctctggattaaacatgcctctcacacatactccattaaaaaaattgattccactagctgatctaatacctgaacaactgcctactagaccattaactttgcacttataccgaatatctttcattttcacttatgattaacaaccaaaagttcttcctgcctctgcatataaatatccacccactctcaaaaaaatacttaatccaccatcttgtgctacccataccatgctatcaatctttaaatcctgttcaattact

SEQ ID NO: 8925 - DNA, 225 bp, Zea mays
  Clone ID: MRT4577_108135C.1
cccaaaagaaaaaaaaactgggaaaaaaaaaacgtcacagcttattgttgttttttatagacaggcccatacacagaagggtttggcccaaaggccacaatgacacatttttttttggtacattacggttccccagaagggaagaggttaccccagaaggttccgtttttttaattgccccccggccattagctttaggttaaggtccacgccccgcccaacccc

SEQ ID NO: 8926 - DNA, 786 bp, Zea mays
  Clone ID: MRT4577_108136C.1
cattggccgggaagccttcggccgggatcgtcaccctccttccttccccagcctctcatcctatgcaagaacccataatccagacccacgaactcgcagcagccattagcgtgcgctagccggccgcagccatggccgcccccgcaacgacctctctactgagcaccctgctgaatctgccgctcgccccgttgtcggggaagagctcgccgccgtccgtggtgcatgtggcgcggcgggggccgatggtggtggtggccgccaaggggtacaatgtgcagatcctggtggacgagaacgagggggaggagtccatcttccggcggttccggcgggaggtgatgcgggccggcgtgctgcaggagatcaagcgccgtcggaggtatgagagcaagacggacgagaagaagcgcaaggcgcgcgaggccgggcgccgcaaccgccgcaggcgtatgatggatgagccgaggttcccagaagaagacgccgacgctaccgcaaaggctcgggacgaggacgatgacaactgggagatcgatggcatcctgtgaaagagaagcaacggagtccatgatttcacaacgtccagacacacagaccccgacagctaatctgagttctttttggcccccggtgagacgcaaaccgtatgagttttggccgtgcccatttccgctttgaatggttacagttgcgatgtacaactaattaaatgttagcaaatgcagcatcccccatgcatgcatccctttcaaaaaaaaaaaaaaaaaaaaaagcggcccggcc

SEQ ID NO: 8927 - DNA, 331 bp, Zea mays
  Clone ID: MRT4577_108137C.1
cactccctcctccgtcgctatggcgcgcatgaagatccgggagtacgactccaatcgccgtgctatggagcacctcaagcgcctcgccagcatcgacctcaccatcctctccgcccagatcacccaatcaacggacttcccgaacctggtaaccaaccaccattgctttcaaccattaacctagtggtgaaacccgatatgctgttctggaagcctgcgaagagcagcctttttggctttcaacttgatattaattcaatccaaggatttttcaaggaaccgctttgggtttaagttgagattggttgcttcaaagctccaatcacgacct

SEQ ID NO: 8928 - DNA, 125 bp, Zea mays
  Clone ID: MRT4577_108138C.1
ctacacgaatgatgatgagttcctcggttgtggaaccctcctgataatctgatctcatggatgtcattcaggttgaagtgcagataagtgtgttattagcttgcttgtagaaaccttatgcgagt

SEQ ID NO: 8929 - DNA, 341 bp, Zea mays
  Clone ID: MRT4577_108139C.1
ccggccggagaataaataaaaaaccgagccagggaacccttcgggtcttcacgcggctatatattatgccgaagcctctcaccctcgcgaggcccgacatcgcgcaaacgcctgaaagataggactggacgggatgaacaaaccatgccgccgagaatgccggacgggatgacctcctaacaatgaagggggctcaacctcttcgacggaacacactgtcggaccataaacggctccgttcggacaaagcctgggagggcggccagggtaagaatgaaaagaggttggggaagaataccgtggacgcctagctgatctacctcttccaggttctgtatgag

SEQ ID NO: 8930 - DNA, 1278 bp, Zea mays
  Clone ID: MRT4577_10813C.1
atgaggctttcacaaaatacacttaatacgaagcaacccgctaaggtttctaaagacgatggtggaggcccactaggtgagcccattaacaacttccttggacaggcacttgttgagttctttggcacattgtcaagagagtgggctttggaatgcatgaaagaccttctactggttaatctgaggggaaatcttcagattgttgtgcaggccacgaaagaatactctgagcagctaggggttgatgcttgcatcaaattatttgagcaattcaaatcttatgaggacctttactttttcttgggatcttatctgagctccagcgaggacccagatatccatttcaagtacatagaagcagcagcaaggactggacaaatcaaagaagttgaacgtgtaaccagagagtcaaacttctatgatgctgagaagataatgaactttttgatggaagcaaaactacctaatgcccgtccactgattaatgtttgtgatcgctttggttttgtgccagatctcactcactatctgtacacaaacaacatgcttcgatatatcgaaggctatgttcagaaggaaccgcctatgtttgctcactcaattcttggagcacttgtgagtgaaggtagccaagatgtgcatgtccataatgctcttagtaaaatcatcattgacaacaacaacaatcctgagcatttccttactaccaacccattttacgactctcgtgttgtgggtaaatattgtgaaaagcgggatcctacacttgctgttgttgcttacagacgtgggcagtgtgacgatgaacttattaacgtcactaacaagaattcgttattcaagctgcaagctaggtatgtggttgagagaatggatggtgatctatgggataaagttcttcagcccgagaatgaatatagaaggcaactcattgaccaagtggtttcgactgcattacctgagagcaagagccccgagcaagtgtctgctgctgttaaggctttcatgactgctgacctgccacatgaactgattgagcttcttgaaaagattattcttcagaattctgctttcagtggaaatttcaatctgcagaacctgctcatcttgactgccaaagcccagttacgtgaaggtctggtcagtgaagcaattgagtccttcattcgtgtagatgatgctgcacacttccttgatgttatccgtgcagccgaggaagctaatgtgtacaatgatttagtgaagtacctagatcaactcacttgttatgattgttga

SEQ ID NO: 8931 - DNA, 390 bp, Zea mays
  Clone ID: MRT4577_108140C.1
cccacgcgtccgggcaattcatcaggatcagatgactggattgaacctgctgcctatgttcttaactcaactgctcttctgtcaagggaacataggaatgttgtggatgctttccgtctgttgcaaaaggatcccaccgttcaggtttaaacagaacttattccttttatgtattttcagttttcacctaaacactagatcctaaacagttggtcacttattgcgtagccttttattcgggttaaacagctgttaaacaggcaaaatgactggttaaatggacacaaccagtcaccatgtagtgattaaacaagctaaactgctgttcaggcgaccagaggtattttgcaacacttaaataatggatagtgccctatcatatttttatct

SEQ ID NO: 8932 - DNA, 446 bp, Zea mays
  unsure (1)..(446): unsure at all n locations
  Clone ID: MRT4577_108141C.1
tggagaaccgccatgggatttcaccggcgactgaaccccggccggctccctcgcccctggcaccgttcaacgccgtcagcctcccccctttctctggaacgtgggcccacgcccacggcgtccgccgtgccgtcccccgctcctcgtgggccgtctgggcccaattggccgcggccgcgcgctcccgaccaggccgaaatcccccccccccggcccggttaacctggaattccttttcttttttccttttcccattttcacatatataattatatgttgatattttatgcaccaaaaatagtttaaataaattatagggcacaaaaataataaggtataataattggcacaccccagtaagtcaccatgattgatgtattgttcttatttgtgcttgttagcggaagagggatcagatcctncggaatttgtagctccgggacaag

SEQ ID NO: 8933 - DNA, 443 bp, Zea mays
  unsure (1)..(443): unsure at all n locations
  Clone ID: MRT4577_108142C.1
cgaacaaggcggcggctcgtggctcacgcttctgtctcgtggcgcgccgtcnaacctggtgcgtcgggcgtcctgccccacgtgtgacagacctggcgccacctcggcggctttcctcgcgggccttcctaaactcggcttcgtcgtggctcatgccgcccccancttgggcctggatnnggagcgctacggactccccgccggcgccgccctgctaccgccagggaagtancctcgcgtacctcagtggaccctcctcgnccgtcgccatcatcatctcttctaagtcgggtaaagctgtaagcaggattggacatcctgatttatttatttatttatttatttattatatatatgcccttcgtagctggccatttccttcgcccagcatgtacataacaggagtaacgtgactggattctcctcttcctctctcatggcta

SEQ ID NO: 8934 - DNA, 296 bp, Zea mays
  Clone ID: MRT4577_108143C.1
cagcttatctgtgactgcagttgtgtgagacgcgaactaatatactactgctgctaatcagctttccttcctcccggccaatgggaccaccagagcgctagagaacctgattagtttagctgggatggaggaggttgtaccttccttgacgttggtggaggaggcatggctggcgcacaggcaacagtggcggggaaggaatgattcggaggtccaccaatggcggaggcacaaggcatcacatgctcacaggctcccctggcaaaggcaccgccggcaccgagcccacaccaccg

SEQ ID NO: 8935 - DNA, 368 bp, Zea mays
  Clone ID: MRT4577_108144C.1
ctcccaccccctccctcagccatggcgggtgccgccgccactgcccactgctcactcagccgtccgcccagccctactcttgcacgcacctcatcttctccatcccctccccatcttcctctagcgccagccaccagggaggttcgagctcgccccctccgcgccctccctgctcgctgccctccagctcgccagtcgtgctcagctctgctccatcttcctacgccgcccaagtccagtcaggaacttccttgtgtcaatctgccactacccattgctaccagtgctgtttttattaccatgctggtcactgcttccatgtcttcacaggccttcttaagctcgtcgagttctgatctgagcatgcc

SEQ ID NO: 8936 - DNA, 327 bp, Zea mays
  Clone ID: MRT4577_108145C.1
cggctcaacccgtccgaacaagcgggtgttattatatctgcttagcgtaaccgactagggggggacaatagcagatacgcatccggtgagcgtacatacgaagtctatgaccaacctactctacgatcgaaaggcgaacggtacggaaagtatgcagaaatagctctgccgacacggagaatgtgtggactgaacgaaacgtactgctattcttaggtcataggctttggcccagggtccgacacgcatagtagtgggcgccctcaactatcgaagtgtagagacctgagcacgccaggaacatgattctgaaacagggtcaaacat

SEQ ID NO: 8937 - DNA, 225 bp, Zea mays
  Clone ID: MRT4577_108146C.1
cgccacgccttcggccaatcgttcggccacgcgttccgaaagaatgcattctttgcccggtttctgaataccctttgtactcaaccctcataactcttcatgggggaactcttgtcccctattaacttaatgaaaaaaccgggtgggggttggagaactctgatcttaaaaagcaactggaaaatgctcggtcaaaaagcattgatggtaaggccctggtgggta

SEQ ID NO: 8938 - DNA, 323 bp, Zea mays
  Clone ID: MRT4577_108147C.1
ttttgttgtttgacaaaagagggactgcatttgcgatacatttgaagaaatcattcgagatacaaacaatggatcgaatgatgacagattaacatttttatataaactgttgttcaagaattaggaactaatgagtatggacaaggggggaagactatggagacatgcattgaacacaatacaagactactagggacctgacggcttataaacatccatacgatcgtgtcaaatacgaatcacgtggacggcatgacagctgttgccgttaaactgacgtctaactgctcatattcacctgagtacctgctcaacaatataca

SEQ ID NO: 8939 - DNA, 522 bp, Zea mays
  Clone ID: MRT4577_108148C.1
gcacacaatgccaacctgtacacatatatttgattactattcctacacatttttgcaatcagtcattacacatgatcattcacgagttcatgcaatctgcagttccacatgatcattgacgagttacgacgacacactactgcttgataacccatggccgaatagtgctattttgcccttgggacatccactatttctgcagatgcagcatgatacgggttgagtttccagctgctgagcttcttttcaacctgctgcacagcgtgaacaaccacctataaatccatttcaagcatcaaccatgggatttcacctgagctcctaccacgcgctgagcctcgactcggactgcgcctgcgtatacgcctcgcggcccaaatacccatctaggtcccctaaggctgatcccgttaccagctcctcccgcttcttctaactctgcagtctcctggggataatcttatccgccaaaaacacgttacagggccgctgccacccggcggctaatacgccgtggtcctt

SEQ ID NO: 8940 - DNA, 633 bp, Zea mays
  unsure (1)..(633): unsure at all n locations
  Clone ID: MRT4577_108149C.1
tcgagcggccgcccgggcaggtcagaaataagaaatacatttctaaaaaaaaaaaaaaaaaaaaaaaaaaaaaaaaaaaaaaaaaaaaaaaaaaaaaaaaaaaaaaaaaaaaaaaaaaaaaaaaaaaaaaaaaaaaaaaaaaaaaaaaaaaaaaaaaaaaaaaaaaaaaaaaaaaaagaaaaaaaaaaaaaaaattttttttcttgggcccaaacccccttaggggaaatttttgaaaatttcaaaaaaattgggggccttttaaattttttttaaaggggccaaattcccctttttggaagtgttttaaaaataaatgggccgttttttaaaaacttttggtttgaaaaaaccttgggtttcccaaattaaatcgctttaaaaaaattcccttttttccagttgggttattaaaaaaaaagccccccccaaatcccttttcaaaaattttccccccttttaattgaaattgcaccccccttttttggctcatttaagcccgggggttttgtttgttcccccaatttggaccttttatttttgaaagggcctttaaccccccgtttttngttttttttccttttttttttttcaaatttttggggtgttttccccttcaaatttttaaaaagg

SEQ ID NO: 8941 - DNA, 796 bp, Zea mays
  Clone ID: MRT4577_10814C.1
ttttttttttttttttttttttttttttttttttttttttttttttttttttttttttttttttttttttttttttttttttttttgtatctgatctttctccttgctaagttatactagtgaacattagctgtataaaccttgttcggtgtaactctagtgacaactacgggaaaaagagagagattgataaggggccgacgacattttacacggtaggctgtactatgccactgcaataatcctcatttctatgaggcgcccaaaaaaactctgcacaaagctcaactggtcagctccttttgctaactctatgatcagttgtatccgtaagacctacacgtaagttctcaccggatcccagctctaagaggtggaaattcgtcctcgtctcccactttgcaaagtcctggtggtctgttttcagttgcggcggccctggacctctgtaacacaaatggagaggcatctgtaaacaccttacttgtagcttctgtgttagtagttccatttgacttcaatgaggataaaggcagtgcaaaaggtcccaaagatccaaactctatagtctccagtggtcgatcatttgcagcagggaagtatgattgatgagcactagatgatggggacctctcttggctattgatgtcatgacaagaaagcaataactctggcaagattggccttacgggacttccgttgtcagcggatttatttgaattagccgcctccttttctaaaccatttggagtgctgctgcgtggctgcgtggcctgcacctctacgaaagataggt

SEQ ID NO: 8942 - DNA, 2347 bp, Zea mays
  Clone ID: MRT4577_108150C.1
cctcgaggcaaaactccaaaacaaacaaactcacgcccatcagcggtcagcccatgtcctccgaggacctcttcgacggcctgcctccgcccgccgccgccaccgccccggccggaggcggagctggcgcggcctccctcttgcagcccccgccgccaccacctcctccttctctggcgcaagcaacggcacccaagcccgcgctgaagagctcactcaagcggagcaagccctccccctcctcagacgctactccctcttccactcctgcccccgcggctgccgcgcccgaatcccatgttcctgagaaacgtcttcggttcagaacaaccgttgatgcttcagaaacacaagtgattgaggctatgcagaagatagcttcacacatagggaacgcttcaaaattcagcaaggcatcaaaactagctttgcaactcatcgaggctggaagcgtcaagcctggaacaatcggtcatttctttgctatactagaagctgcgatgtcttcaccgggagtgtgcaacgagccttctgtacgagcagactaccacaaattgttcgatgctgctcagggtgtaacagagttactcaaccaagagcagaaaaatcgattcaacatatgggtgctgcatgcagtggtggctaacgatcttttcactgatgacagctttgtgttctcaaaggctgtaggaaagatcaaagatgccatctcagccctgccagtggcaacggtggatgacgacaacgacgaagctgcggcccttgctgctgcgagcaaaactgatgtggcgacggacaacgaagcaggtcatggcgtcccagccgcagcttctgactctgtggtggatgatggcgcgcatgccgtggccttggagccggaagaagaatcctccgaccctttcggtttagatggtcttcttgagcacaggcctaagaagacgtctgggagagctcgagagaaggcagtcgcggctctgaacagaaagacggtcgaggaggaagcaaagagggttctcaagtcgcagcgggaggcccttctgaaatgcctggaaatagccgctcggcgctacagaatcccgtggacacagaccgccattgacattttggcgaagcaggcgtacgacgacgcggcccggttcacacggcggcagcgggacgcgatcgctaagctgtggaactcgatcaaggagcagcagatccggcggaagcaaggcaagtcggtgagcgggaagctggacgtgaacgccttcgagtacctccaggagaagtactcccgcgagaagatgagcatccggcacagcgtgggcggcggcggcgatcgtcgcgcgacgcagtggctgggctaggccgtgcgtgtgtgtgatggtttgtgcctttggcttcatcagcgacacggcgtgggagttgtttgtgcttggtttttcgtagaggagaggagagagttgacatgatcttccccgtagcatgtgatgggtggctcttggtgtaacgttacgtactagctgcactgaactcgttgcatgtctttttcagtactggaactggaagcagcagctgaaactgctgacaacgacatggcagtgcagcacagtgcggctgttgggcgcaaaatgctttgtctatgccggcagcacatactactagagtagcagcagtctatcaccaccctttgtttgactgagttgttcacttaagattaaaactaactgtttagactactgtagctctaatttatagaaacaaaacctgtttggttcagcttttttctaacctagatccggcggaagcaaggcaagtcggtgagcgggaagctggacgtgaacgccttcgagtacctccaggagaagtactcccgcgagaagatgagcatccggcacagcgtgggcggcggcggcgatcgtcgcgcgacgcagtggctgggctaggccgtgcgtgtgtgtgatggtttgtgcctttggcttcatcagcgacacggcgtgggagttgtttgtgcttggtttttcgtagaggagaggagagagttgacatgatcttccccgtagcatgtgatgggtggctcttggtgtaacgttacgtactagctgcactgaactcgttgcatgtctttatcagtgctggaactggaagcagcagctgaaactgctgacaacgacatggcagtgcagcacagtgcggctgttgggggcaaaatgctttgtttatgccggcacccggcagcacatactactagagtagcagcagtctatcaccacccttatttgtttgtgctggattggtgggtcggaacgatttcgacctggattgcttctctaatttatataacctcttgattaggttggaacaaaaa

SEQ ID NO: 8943 - DNA, 1583 bp, Zea mays
  Clone ID: MRT4577_108151C.1
gcggccaagtcggcacaaaacggaaatagctcgcggtcgcggtttcttgcgccactccggctcagccgccgcccgccacccgccacagccgccgcagacgagatgggcatcaagggtttgacgaaactgctggcggacaatgcgcccaaggcgatgaaggagcagaagttcgagagctacttcggccgcaaaatcgccgtcgacgccagcatgagcatataccagttcctgattgtagttggaaggacaggcatggaaactctcacaaatgaagctggtgaagtcactagtcatttgcaaggaatgttcaaccggacaataagattactggaagcgggaatcaagccagtttatgtttttgatggcaagcctcctgatatgaagaaacaagagcttgctaaaagatactcaaaaagagatgatgcaaccaaagatctgactgaggcagtagaggtaggagataaagatgcgattgaaaaattgagcaagaggactgtaaaggtcacaaggcaacacaacgaagattgtaaacgactattaagacttatgggggttcctgttgtagaggcaccttctgaagcagaagcagaatgtgcagccctttgcataaacgataaggtgttcgctgttgcttcagaagatatggactcccttacttttggggctccacggttccttcgtcatttaatggatccaagttccaagaaaatacctgtgatggaatttgatgttgccaaggttttggaggagcttgaactcaccatggaccagttcattgatttgtgcatcctgtgtggatgtgactattgtgatagcatcaaaggtatcggggggcaaacagctctgaaacttattcgtcaacatgggtccatagaaagcatcttggagaatcttaataaagacagatatcaaattcctgaggactggccttaccaagaagctcgacgcttgttcaaggagcctaatgtcacattggatattcctgagctaaaatggactgcacctgatgaggagggtctcataagtttcctggtaaaagataatggtttcaatgaagatcgggtgacaaaggccatagagaagatcaaatctgccaagaataaatcgtcgcaaggaagactcgagtcctttttcaagccaactgccaccacatcagcaccgctaaaacggaaggagacttcggataaaacaagcaaggcagctgcgaacaagaaaacaaaggctggtggaaagaagaaataatcttggatgcttgatgtacaactacgactacgaaagcagcggtggcgtgatcacttcgcctagattatttaactccctgttttaactcagagctttggtaaaagtttgcccatgtttcaagctggggtaagttagttgtgtttgaagagattggtgtaccaagtaacaaaacttatcgctgttttttacttcttgtcctttgaagtatgtatgccagtcctcgtccttttaagtatctgtgttgcaacaaaaatttaaggccttgttttgatgcataggctcactttaagatttagtttaaatttcacaccaagctacttcaacacgcatggattacgaag

SEQ ID NO: 8944 - DNA, 771 bp, Zea mays
  Clone ID: MRT4577_108152C.1
atggcttgttacctagaggtcgttgatctaggtgtttggagagtcactcatgacgggatgaaaccacctaaaaatcctgagaagctcaccacgaataatgagcttgttagatacatgtattctcgtttaaatctaatcatcaatgagctcaattatattggaattaaaaagctaggtgatgcggacattatgggtcaagaggagcaaacttcttcaatgccatatgcttttgcatgtgatgaaaagaaagacaagaagaaggctgccactccaagctcctcaagtgaagaagaggaagaaaaagaacgtgatgatgatgatcaaccctcaacatcatccttgaaggacaaagaaacaatccaatgcgtcgggaaggtcgaggatcttctccttaacattaacaggaaaaagcaaaaaagatatgatgcttcgtatgcgaggagaagggccacttcaagaacaactgtccaaatatggtcgaacccacaaagaggaggagcaaaggggtacccagattatcaccctaaaacgtgcttaacactcaaggacgtcatcagggcacattccctgaggatgaaaggatcgggctccgcctcgcccgaggtccccctaaggggtcttccaaaaaactccgcctcgctcgagcccaatctcggagagggtgtgagctcaggaggatctttgcctcactcgaggccttctcactcaagggcagccatgttcacctcacccgagcccgtctcgggcgataaggacaagacctgcgaatag

SEQ ID NO: 8945 - DNA, 405 bp, Zea mays
  Clone ID: MRT4577_108153C.1
attggaaaaaccatgggacatttttttttttcccccgggggtttcaactagaccagcctacaaaaaaggttccctcccctgatatccaaggggccttacaaaagaactgacaaattttgggggccggggaaaactttttttttccaaagcttttaactccaacaaagggccccccctttttagttttgaccaattcccaaaaaacattaatttttgctggggaaggaaatccccttttttcataatttaacaagctaatgttttacctactggaaacccctggttgggaatccagtttttgaaaaaaccgggccccaaaataaaaaaaaccaagggttaacaggggtttgcatactggacctttgttttaccaaaaaacccgtttttgaaaaaaccaagggtttt

SEQ ID NO: 8946 - DNA, 545 bp, Zea mays
  Clone ID: MRT4577_108154C.1
gggggggtttttttttttttttttttttttttttttttttttttttttttttttttttttttttttttttttttttttttttttttttttttttttttttttttttcggagttcgccgcccgggtgctcctagcggccccctggggggggggggggggcgtttttatttggggagaatttatgtcgtgaaattataaaggaaaaaaattttttgcgctaaaaaatgaaaaaacaaaaaaaaaaaaaaaaaaaaaaaaggaaaaaaagggaggggaaaaaagggaggagaaaaaaaaaaaaaaaaaacggacaaagcgcggggaaaggaaaggggaaaataaggggaaaagggggttaaggcattgaccaaagagagggggaaaaggggagggagggggaccggcgggcccggtgagagctggagcacgggggccccgcaaaaaggacccaccagccgaaaatcctctttgacggggggagacgaagggatccaacggggggggcccccggggtgggggccccccaggaaggagatttacggggga

SEQ ID NO: 8947 - DNA, 309 bp, Zea mays
  Clone ID: MRT4577_108155C.1
agaacgaggcacaagcttttttttttttttttttttttttttttatttactgaaccaacacactgtgttgtgaccgttgatattttatggtacctacccacacatgatattgggggaagctttactgcatatatccatatatataaatgagagagagggcagggggacaacacccattattatgtagttgaatgaccgggggtatggcaggggaatcccccaaggggtggttttggggcgttggcactaatggtaccgggaggaggcatagtatgagagctaatgatgagcatactaaggacatagggg

SEQ ID NO: 8948 - DNA, 436 bp, Zea mays
  unsure (1)..(436): unsure at all n locations
  Clone ID: MRT4577_108156C.1
cggacgcgtgggcggacgcgtgggctcgatctgacccctccctccaaatcctgtttgagtccctctccaaatcatgctagccgaaacgcccctcctcaaatctgagcatcaaatcgactcctcatcttcctgaaaccatccactcctccctaaatcctctcagatcaaatgccccttctcaaatatggagggctggaggacgagtgaatcgaaagaagaggccgagggggtgattgggatttttcttcttattttgccaaatacaaatcagctacttgctaaacgatatttgctctggataatctaaagtaacgacgagcaaatataagatcggtggatctcagaaaaaggaaataattgatgagaaggatcttccacaacaaacanaaaatcaaaagggtccaatctcaagggaaatgtanaaaacgatgaatga

SEQ ID NO: 8949 - DNA, 357 bp, Zea mays
  Clone ID: MRT4577_108157C.1
actctagaagagctatgacgtcgcatgcacgcgtacgtaagctcggaattcggctcgagctactgggagctgctggccaccaccaaggccagcaagcagggggcggcgcaggccgtggcgggcgacgtgctggagcgctgctgcctggagatggaggaggcgctcaactcggtgtatcgacagagccgcgtggcggacggatccatcgggccgctggagatccgggtggtccggtcgggcacgttcgaggagctcatggactacgccattttccgcggcgcgttcatcaaccagtacaaggtgccccgctgcgtctactttccgcccatcgtggagctgctcgactcccgcgtcgtg

SEQ ID NO: 8950 - DNA, 480 bp, Zea mays
  Clone ID: MRT4577_108158C.1
gcttggattctttaaaacgggcggccctttttgtttttttttttgtgcttaaattactttggttgattagaccaccattccaaatttccgacctttcttttttaaaggccaggccacattaccttggggcttacttaggcaccattatttcattacctaaaaagcccaggagggccaaaccccaaaccctgtttttcaaggcctagaacccctttcgcttgtaatggccaggcccccagcctggcatgcttggcaggtccaccggacccttattaagtggtgaaacttccagttacaagcttccaacccagaccaggattttaacaacagggttgggttacctggtttcttgaacaaccgaaaccctgggaacaaccttggcttccgatatttaaccatcctacttaatttaggaatttatgaacctaaacacgaacccgttggcaccctcctgaaaaaaccaaacgtccttgcccaaaa

SEQ ID NO: 8951 - DNA, 878 bp, Zea mays
  Clone ID: MRT4577_108159C.1
ctcgatctgacccctccctccaaatcctgtttgactccctctccaaatcatgctagccgaaacgcccctcctcaaatctgagcatcaaatcgactcctcatcttcctgaaaccatccactcctccctaaatcctctcagatcaaatgccccttctcaaatatggagggctggaggacgagtgaatcgaaagaagaggccgagggggtgattgggatttttcttcttattttgccaaatacaaatcagctacttgctaaacgatatttgctctggttgttgcagttctattgctgcttcatgttttttctcaagcatttctccatacttctctctttttctacttgcgacatgaatatagtttcctcttttttctgtaatactatctattgcaggataatctaaagtaacgacgagcaaatataagatcggtggatctcagaaaaaggaaataattgatgagaaggatcttccacaacaaacaaaaaatcaaaagggtccaatctcaagggaaatgtaaaaaacgatgaatgatataaaccaagaagacaaaaagtagtagactttagaaaagccttttgaccagtatgatatttttataatttctgtttcgtagaacacaaataaagctacatcttttgatgtatataagcatgtagcgtggcgacgactcctccatcgctagaagggcactcctatgtggctaggtctaatgttcatctttttttctacaacgaactatcttaaccagttgcgcgacggcgtggcaacgccgcgcgtcgttttctagtataaatactgaatgtcacaccatctctagctgccttatactgtatacaattcaacgtacaatactgaaaattcaaatcagttcaatatt
